United States Patent Application Publication US 2007/0016974 A1 - sequence listing, part 2

SEQ ID NO: 5924 - DNA, 556 bp, Oryza sativa
  Clone ID: uC-osflcyp155e08b1
cagattcagtggtggaaaatggagacgcagaaagcgaaaacgataaaaaccctaaactggaacttgatgttctcaataggagctccaatggggacatgaatcacgaagaagagaaaggcgaaaccaaggttgagcaggaggaagtgaaaaccgagtgcaccacacaggagagcaacaaaatcatcgagaagcagccacatccagacagaaaacaagaaaccgtatcctccaaagatgaactggagcccaaggaggataccaacactgagcatccaaatgggacagtatcagaagataccagcaaagtggcaatgtccccgacaaaaccacagcagcaacagaaaaagaacaagcctcttctgaagaagtttgggagcttactgaaaaagaaaaacagcaagtaggtgaacgacacatgtactactattgctattctgatttgtttttttttgtttgacaaggtagtgtggttttctacgagtttactgtcaatggctgtacttgttctggtgattgcagtagtttgggggtgtctcatttttttttataatttgga

SEQ ID NO: 5925 - DNA, 543 bp, Oryza sativa
  Clone ID: uC-osflcyp155e10b1
gcattagcttgctgggttttccgccacgttgcaagcaatcatttctttcgttgagaacagtggtgaccatatcaaatttgtaagggctgccaaacatcagatagttttccttgtcaagggtccaatatacttagtttgtataagttgcactgaagagtcatatgaaggattgaggggacaactagagctcatgtatggtcagatgctgctgattttgaccaagtctgtcaacagatgctttgagaagaaccctaaatttgatatggcaccattgctaggtggcacagatgcagttttcctatcacttatacatgcattcagctggaatcctgctacatttcttcatgcgtacacatgccttcccctcgcccaatccacaaggcaggcggctagtgcagttttacaagacattgctgattcaggagttttgtttgcactgttgatgtgtgagcacaaggttattagtctagtgggagcacaaaaggcaactttgcatcctgatgatatttttctactttcaaatttcatattgtcctctgaatc

SEQ ID NO: 5926 - DNA, 539 bp, Oryza sativa
  Clone ID: uC-osflcyp155e12b1
gtttttgcgagaagtccggctcgggcggcggcggcggcggggcggtgaagacaccgtgcgacttccttaagcccatcagggggcgccccgtcgtcgtcaagctcaacttcggcgtcaactaccgtggcctttcggcttgtcttgacggttacatgaacattgcaatggagcaaacggaagaatatgtcaatggtcagctgaagaacaagtacggagacgctgtcatacgaggaaacaatgttttatacatcagcacatcaaagcgtaccctcactgatggcgcatgagagggtgagacagcatgcagctcaatgcctgccactatcgcacctttgatgtcctgtgcgatcaatgtctaaagaaatactgccttacaatctcgtagttgctacatggaaagagatgttttctggaatggaggattatcaccagatatttgtaccccaaaaaaaacttatgttcgaatctagtagattctacagattgtggtctgctgcactcttgatgcatgtggtgattattggaccgccagggatatg

SEQ ID NO: 5927 - DNA, 536 bp, Oryza sativa
  Clone ID: uC-osflcyp155f01b1
ggagtttctgcagaatagagcacaggtatgcaaagatggaatccaagagtgccgctatttgaaatccaagatttcagaccagaagggtgttcctcttgattcaacaactttgatcactgccagtgacagacaggaaggacttgctttgataactgaaaagatgcatgcactggagatgattaaaaagaaggtggagagagcaaggagttctcttgaatctttttgcaacactaaaggtgatattagctgcgatgattttatcaaggcagctgaacagcaattggagatgaggaatcaatgtcggatcatcaaccagcaagcacggctatggaagttgaatgaccttgctaaaagggagaataagcgtgatattgttctgaactattgcagtttgttgctccaaaggatcgtgttaaacattagtgatatgtctggcatatttgtgagtaattcattgaatggaaccaaaataggccaggcattttcaaatttgaatgcatctgtggcattcaatttgtattcaaagctgagggaac

SEQ ID NO: 5928 - DNA, 474 bp, Oryza sativa
  Clone ID: uC-osflcyp155f04b1
ggccgttctttttcttttttttttttttgaggaacagagcatcggtacgtagtatattcgcgatggacaaatcgatatatatatatataggatagagccgcaggaggcatatttagattgagaagaaagaatcattagttgacggagaccttgccgaccatcccagctccggcgtgcggttcgcagtagaagccgtatgtgccggggacggtgagcgtgacggagaaggtctcgccgggggcgtcgaggtactcctcctgcgatatcttggacacgtcgacgccgatcggaaccgtgtcctcgtcgaacaccacgttgtgagggaagccggcgatgttcttgaacgtgatggtctcgccggacttgacggtgaagacgatcgggtcgaacaccagcacgccgacattggcgccgagaagcacctcctgcgccatggcgccgcccgcgagcatggcgctggcggtcacggccact

SEQ ID NO: 5929 - DNA, 508 bp, Oryza sativa
  Clone ID: uC-osflcyp155f05b1
gccggttcgcgcagctcggcatcgccttctccatcatcggcgagatcatcaccggcaagggcgccctcgcgcagctcaacatcgagaccggcgtccccatcaacgagatcgagccgctcgtcctcttcaacgtcgtcttcttcttcatcgccgccatcaaccccggcaccggcaagttcgtcagcgacgacgacgaagagtagaattacgaggatcgatcgatctaccgaggtttcgccgccattgttgtgcttgcgcatcattgagactttctttcaagtgtatatgtactgtgtacgtgtaggtgtaaagacgtaccttgcttaattagttgtgaattaatgcccatggagaaaattaacgtgagatttagctacttgctgcggtaaatctaattggagatgcctctccaattagtcttaaccagagacatccaattagtcttaaccagagacacccatactttaggagttttggctgctattaatccattgagcatctatgcttg

SEQ ID NO: 5930 - DNA, 509 bp, Oryza sativa
  unsure (1)..(509): unsure at all n locations
  Clone ID: uC-osflcyp155f09b1
ttatatgtttccctacaatacaatggagcctgtcaatgatttccaggaaggcatttcaacagagcatgcctttgaggcagagcctgtgccatcattgtcggaaacaataacgccacgatcaatggtggtgagcttcatccttagtgtaactctcagcatcgtcgccatgaaggtcaccttgagctctggcttcattccngcgttcagcatcccagccggcctcctcggtttttgtgtatcccgtgcgtagatccgcattcttgactacttcgcagtggcacaactaccattcacacgccaagagaacaccatcatccagacctgtgtcggcgcatgcacctcgatcacattcaccggtggctttgggacatatattcttgcaatgggaaagaaagcagctgcaggggatgtcaatgcccaaaataacgttgaggagccaagctttgccaggatgatcaccttnctcttccttattaagcttgctggcatgttcatcatcatgcccttca

SEQ ID NO: 5931 - DNA, 556 bp, Oryza sativa
  Clone ID: uC-osflcyp155f10b1
gtttataaatagcatctttagaaaggcggatttctaattcaatgtcaaatagtcgaggcatgcatgataatttagaactctcactgccttacattgaaatacctgagcaactcaatgagaaagcgtttcaacttgaggcaagtgagtgccaagagtttctgttgtcagaaagaaccacatttcagcacaacacaggcattgtccaagaaacaggatctcaagctcacaaaggaaagccattgcccagtgatgtatctgatgaatttctgaaaaaggcgtcacaggcagagattgatgaactgaagcagagggtatctgaactcactgaagccaaatctcaactagattcttgtaaccataagcttctagaggaaagtacatatgccaagggcctcgcctcagtgaccagtgttgagctgaaggcactatcagtaaaagtcaccaaactgatgaagcagaacgagaggcttagcagcgagttggcatcaggaagaaaccaaagaagaagaagccatggtcccaggggagctaggagggaaagccacacgaaacgata

SEQ ID NO: 5932 - DNA, 547 bp, Oryza sativa
  Clone ID: uC-osflcyp155f11b1
gtcttatttacatgcaatgttcaatcaatctccacctggaatgatgaaagttagccaaagcatattgtggtgtgctcctctagacatcatatatattggttgccctggtgcaaatttcctttttggccaagcacaagatgagatgactagagttgaagcttgcatcaatggtgataaaatttgagattggtaacttgctgaccagaaattccgtggagcctaagatgaattgctgccatactttcttcttgtctttataattaatctatacatacaagcatgtttgatttatgaggcatgggggatcaaatgtgcactacgcattttttattgagatcatgcttgctgctgctccaaatgactgcagctcagttctagctcatgctcttggaactttcttgttcctgatgagggctaagtgatcttctagccacttgaattggtttttattctgaagttatctgaaggcattcacccttctgactcagagcgggttggcttgatacgacgatgaggctggactgcttgatattctcctgaacttcca

SEQ ID NO: 5933 - DNA, 543 bp, Oryza sativa
  Clone ID: uC-osflcyp155f12b1
gcaccaaccccgtctccttcctccattcctccgccggtagaaccttctagaagctctcctcctcctcccatggcggcgacgatcgtgtccgtcaaggcgcgccagatcttcgacagcaggggcaaccccaccgtcgaggtcgatgtgtgctgctcagatggaacctttgcaagggctgcagttcccagtggtgcatcaactggtgtctatgaagctctcgaattgagggacggtggatctgattacttgggaaagggtgtctccaaggctgtcgacaatgtgaactcggttattgccccagctctgattggcaaggaccctacgtcacaggctgagcttgataacttcatggttcagcagcttgatggaaccaaaaatgagtgggggtggtgcaagcagaagcttggtgctaatgcaatcctggctgtgtcactggccatttgcaaagctggagctatcatcaagaagattcctctgtaccagcacattgccaaccttgctggaaacaagcaactggttttgcctgtacctgcattcaacgtc

SEQ ID NO: 5934 - DNA, 502 bp, Oryza sativa
  Clone ID: uC-osflcyp155g01b1
cggctatgggcaagatcgcggcgctcaagaaggtgcggggcgacatcctggagcccgagagcgtccgcttcatggcccgcgagatcctcatcctccgccgtcttcaccacccctaacgtcgtaaagctcgagggcctcgtcacctcccgcatgtcctgcagcctctacctcgtcttcgagtacatggagcacgacctcgccggcctcgccgccagccccgacatcagcttcaccgagccacaggttaagtgctacatgcaccagctgctgtccgggctggagcattgccacaacaatggagtgctgcaccgcgacatcaaggggtcgaacctgctgttggataacaatggcatgctgaagatcgcatatttcggcctggcgtcgttgttcgatcccaacaagaatcagccgatgacgagcagggtggtgacgctgtggtaccgcccaccggagttgcttttgggctccacggattatggggtgggcgttgacctgtggagcg

SEQ ID NO: 5935 - DNA, 571 bp, Oryza sativa
  Clone ID: uC-osflcyp155g02b1
ggagttttcgagtcccttccaagatggtgcagcaagccagacaccatctgttgaaagtgccgatgtggatgcatctgcagctactgcagggagacaggtagctactccaccaaggcctgctcaagctaaagtggtggaggagagagcagtttctactttgcccaaaccaagcactgaagtacgtagaccaggaggaaggagaccacttgttcgaccttcacttgaacgagttgaagaaccccaagctgatattgatacaacagtagttgaaggttccacagagaaaggcggcttgttgatggagcgtgaaactcctggtggtgtatctgcgttacagccatcaagtcgtaaacgtctaattccatcaccacaaacgagagatgatgcttcacaaggagagacaacggatgccaatccaccactgaagaaacccaaagaaggatctttacaatgtactagtgagctaaaaactgaacagtcacctcatgaagatgtcatggcacctgttcctgtgctaccatctacagagttagatgagcaacagcctggagaagagatggacaccgatcag

SEQ ID NO: 5936 - DNA, 439 bp, Oryza sativa
  Clone ID: uC-osflcyp155g04b1
catgttttttcctcgcgccgccgccgccgccatgccgtcgcacaagacgttccagatcaagaagaagctggcgaagaagatgcgccagaaccgccccatcccgtactggatccgcatgcgcaccgacaacaccatcaggtacaacgcgaagcgcaggcactggcgccgcaccaagctcgggttctgagcttggggaggagaggaggacgaggcgccggacgccgctgccctgggaagaagaagaagaaggagaagctagggcttatgggttgcgtcgtgttcgtttcgaggttttgcctgtcctgaagagactatcagtagctgtgtgtatcttggagcatcataattttgctgattaaagaaccactttcttatcctgcctaaagttgtctgaattttatctcagctgcagtggattgatcagttgaactcccttgtt

SEQ ID NO: 5937 - DNA, 535 bp, Oryza sativa
  unsure (1)..(535): unsure at all n locations
  Clone ID: uC-osflcyp155g05b1
ccattttccctagagaaaccccaactgagagagagatggcgccgccgccgccgccgccgcccaccgtcttctcccgcctccgccgcctcttctccaccgccgccgacaccgccaccgccccgaccccggaatccgacctctactccctccgcaccctctccaaggacccctccgtcgcgctcgccttcttccgccgctcccaggccggcggccacccgctgggatccgccgcctacaacctcatgctccgcaccctcgcctcccaccccacctccgcgcactcccacttctggcccttcctccgcgacatgaacgacgccggccactccatcgaccagggcacctacctcgccgccctcgcctccttcaagaaggccagcctcaccgccgactacgcctacctcaccgnccactacgccaaggcccaggaggacgccaagggtgggacccccacctccgccgccgacgacgccgtccgtgccctcgaggatggctcggattcggatgctagcgcggagctcgacgagaagctgga

SEQ ID NO: 5938 - DNA, 391 bp, Oryza sativa
  Clone ID: uC-osflcyp155g06b1
ggcttcttctccccctcccggttcggttcggctcggttggggtccggttcgatttcggttttgccttcggttcgagggttggtgggaaagcatggcggcgccggatgctgagtaccgctgcttctgcgactgcctagcctgggccaccgacgaccgctccctcgaagccgccttgtccacctactgcgagagcctcgagtccaagatcatcaacgatcggtagacagtgaggtcgcgcgtgttcggatatcggacgatctcgagcagagcaggtcatgcacgacgccattgaggtgatgaacggcgaggagcttgacggccgaaacatcaccgtcaaacgggcccagtcgcgccgctccggaagctgaggctgcggtggctactgccagcg

SEQ ID NO: 5939 - DNA, 462 bp, Oryza sativa
  Clone ID: uC-osflcyp155g07b1
cttgtttttagtgggttgagatggcggcgccggatgtggagtaccgctgcttcgtcggcggcctcgcctgggccaccgacgaccgctccctcgaggccgccttctccacctacggcgagatcctcgactccaagatcatcaacgacagggagacggggaggtcacgtgggtttggcttcgtcaccttctcctccgagcagtcgatgcgcgacgccatcgagggcatgaacggcaaggagctcgacggccgcaacatcaccgtcaatgaggcccagtcccgccgctccggcggcggaggcgggggctacggcggcggcggtggcggctacagcggcggtcgtggaggcggcggctacagaagaagtggcggcggcggctacaggcgccgtgagggcggctacggtggcggcggcggctacagcggcggccgtggcggcggcggcggcggctaccgtggcagcc

SEQ ID NO: 5940 - DNA, 554 bp, Oryza sativa
  Clone ID: uC-osflcyp155g11b1
aggaaccttcggaaggtaactaattccatggctgaagcatcaaagatatctagctccagggcagatgcctcaaaggtatctagctccatggctgatgcctcaaaggtgtctagctccacggctgatgcctcaaaggtatctgattccgtggctcaaatcccacctagtctcgtgaatgggatctctgatcatcaagacaaccaatgtgaggaagcacaacagaatgcatgcgtgtcatttcctcctgaaactcaggagttgcacagtggcattctgttggaggacaattcacatatgaatctgttggaacctgatttaatatctaacccggaaactcctttcacttcgattttaacctgggaaaaatttaatgattctactgctgatgctcaagaagttgaagttctgccactgcagaacattgataatgaagataatttcccagaaaatggtgtcttaggaaagaaagagaagccaaggtccaaggaagaacctctgtctaatggaaaccttaaaactagcaagaggaggtcttcgttctccaccaaatcaga

SEQ ID NO: 5941 - DNA, 550 bp, Oryza sativa
  Clone ID: uC-osflcyp155g12b1
cttctcattcccaactcatcgatccatcagtagctagctagctagctagctgcattgtccggcgagagagatagctgctgcagggggcggccatggggaggggcaagatcgagatcaagcggatcgagaacgcgaccaacaggcaggtgacctactcgaagcgccgcacggggatcatgaagaaggccagggagctcaccgtgctctgcgacgcccaggtcgccatcatcatgttctcctccaccggcaagtaccacgagttctgcagcccttccaccgacatcaaggggatctttgaccgctaccagcaagccatcggcaccagcctttggatcgagcagtatgagaatatgcagcgcacgctgagccatctcaaggacatcaaccgcaacctgcgcaccgagatcaggcaaaggatgggagaagatctggacgggctggagttcgacgagctgcgcggtcttgagcaaaatgtcgatgccgccctcaggaggttcgccacaggaagtatcatgtgatcagcacacagactgaaacctacaagaaaaag

SEQ ID NO: 5942 - DNA, 504 bp, Oryza sativa
  Clone ID: uC-osflcyp155h04b1
gaagtccttgacgatccagccatcaggtggaaaggagggggctgtgggcctctccacgaccaagaccaacaagcagaatgccccagctaagctctaccacaagtctgggatgcgcaaggagttccgcaagatggctaaggctgccaagaaccaggttagtgacaactactacaggccagatctgaccaagccggctcttgcaaggcttagctcagtgcacccgagcctccaggttgccaagtctggtgtgaagaagaagaacaggcagccagccaagctgcaaatcgcttgaagctgcgcgtttgtgccatggcacctcttgatgctcatgtttccagctacctgtgagttctaaaagggtccagacttgaaatgagggatctctgttagaattggatcaaccttgtcacaaatctgccgtgtagttagtattctagacagtttatttgctcggggcccttacaaactgttggctttgcacttattatagtagctaatggcatc

SEQ ID NO: 5943 - DNA, 559 bp, Oryza sativa
  Clone ID: uC-osflcyp155h05b1
gccttgtcgccgatccgatccgcctccgcctccgcctcgcggcccggcctgcctgcctcgccgccggtggtcccgatccgaggttgctcttgctgggcatcaaacatgggtctggtgaaggatggcgccgccgatttggaggaggggaccctggagatcggcatggagtacaggactgtttctggtgtggcaggacctctggttatcttggataaagtaaagggcccaaagtaccaggaaattgtaaacatccgattgggagatggcaccactcgccgtggccaagttctggaagttgacggtgaaaaggctgttgtgcaggtctttgaaggcacttcaggaatagacaacaaatataccactgtgcagttcacaggagaggtcctgaaaactcctgtctcacttgatatgcttgggcgcatttttaatggatctggaaaacccattgataatggcccacctattttgccagaggcctacttggatatctctggaagctcaattaatcccagtgaaagaacctatccagaagagatgatccaaacagggatatcaacca

SEQ ID NO: 5944 - DNA, 436 bp, Oryza sativa
  Clone ID: uC-osflcyp155h06b1
ccatcgaggggctattttaagggccctgtggaatcacataaacgaaaaaaaacgaagaaagaaaaaaaacacatgattctcttaagagattaagtgcaaaacagagaattacaaaacacaaaaaaaacacacacgaataaccgtttgattgaactgcatgaaaacgcaagaatcgcataaaagagatagactcaaaaaagaaaattttcaagaggttaaagctcttataaattttctccaaaacctttataagattgtctatttcataggaatcctaaacgattgaagaggattcaatcctttggtataaagacttccataggaaatatttctgtgcagattgaaatcccacaaaatatttttttccaacaaatcggggcctttattaagctatgaattgctagatatggtaaaaactaagaactgggttcaaacg

SEQ ID NO: 5945 - DNA, 414 bp, Oryza sativa
  Clone ID: uC-osflcyp155h07b1
cttatgctcacaggtcagtcctaccacgtccaacaggagaagtgatagagggagaagacgacactggaagaggaggagctgactagccgccatggcaggcgtctccttgctgccgggacatgctcctgcttggggcgtaggcggtggcgagcgcctacattgatgaagcgtccgctgctgggcgggcactcgcacatggcgcccgcttcatgagcaagcatggccgggtgacatacgagacgctgacggagccggagccgaagccaacgccagcgcctcatccttaacccacgcctaatcctgagcctacgccagagccgtagccaaacccagcacctgagcctgcgtctaagccgtaaccaaagccagaaccaagacctgagcctaaggctgaacctaaaccatacccagagc

SEQ ID NO: 5946 - DNA, 522 bp, Oryza sativa
  Clone ID: uC-osflcyp155h08b1
ggttttcaagaaccaggcagctgtgaacccagagaggaccatcttcgatgtcaaacgtctcattggaagaaagtttgaagacaaggaagttcagagggacatgaaacttggccccttcccgaattgtgaacaaggacggtaagccctacattcaggtcaagatcaaggatggagagaacaaggtcttcagccctgaggaggtcagtgctatgatccttggaaagatgaaggagactgctgaggcataccttggcaagaagatcaacgatgctgtcgtgactgttcctgcgtacttcaatgacgcgcagaggcaggcaaccaaggatgccggtgtcattgctggcctgaatgttgctaggatcatcaatgagccaactgctgctgctattgcgtacggtttggacaagaagggtggtgagaagaacatccttgtctttgaccttggtggtgggacattcgatgtcagtatctcgaccattgacaacggtgttgttgaggtgttggcccccatggtgacactca

SEQ ID NO: 5947 - DNA, 573 bp, Oryza sativa
  Clone ID: uC-osflcyp155h09b1
cgtttaacgaaaggaagcgggcggccggcgctcggcggcgctcggcaggcatggcgatcggatgggatgggatcggatcggcgcagggccaaggcccgagggtcgcatcctgcgactcctgtgagttcgtgggctatgctcgctcgctcttctccttaggataccagcttatattggcaaaccatgctcagtagcctgccagtttctgacagaaatactgaccaagaagccaaatcacatccttcatgcaaacaaagccagcagttttcgcatgaatttctttcaccttgcgcttgtgctactgccgctgagcttcatctgtcctcccatcggttcatgcattgagcaggagaggctaaccctcctccggttcctcgcggagctgtcaccgccacatgataatggcctcgctgcgtcatggaggaataggaccgactgctgtacctgggaagggatcatctgtgatgtggatggtgcagtaaccgagatcttgctggcctcaagaggcccttgagggcgcatctcgtcatccctgagcgagctctgggaccttgccactgaaacttgtccccc

SEQ ID NO: 5948 - DNA, 518 bp, Oryza sativa
  Clone ID: uC-osflcyp155h12b1
gtgtagtttattgatcacattaattatgctgccacgggtgctttttgagatcatactttgattgttggcgatgacctcatccagccagatgtgatactggggtgaaagaaaaatgaggcccctgtattatttcagggaattggacatgcggataatccatctaacagcttggtcctgaaaggctcatccgcctgtgcgttagcatacttagcaaacccaaagtctaagttggcttcccctccatgtgttacagggagggctatatcactggtttctgttatgcaggcaagaaacaatgctcgggcctcgatatccggatcactcgatctgtgtagcaacaggctcctaaaatctgatgttcagaatgccggtagcaacataaggcatgagaaagctggaaaagaacaatttgtgacagaaacaagccaacgtgtcttccatgagaggggccatctagaggcagtgaatgtcaaacataaccaggttggggagacaaatgagcctggtatgtaccgcat

SEQ ID NO: 5949 - DNA, 488 bp, Oryza sativa
  Clone ID: uC-osflcyp156a01b1
aattttatcactcggattatgtggagaaatattcttggccaaggtttgtatcagctcctggtgctggctactctaatggttattggaaagaaactccttagtattgaagggcctcaatctgataaaaccatcaatactctcatattcaactctttcgccttttgccaggttttcaatgaaataaatcgtagggagatggaaaagatcaatgtcctccaaggtatcttcagaaactggatctttgttggtatattgacagctactgtcatattccaagtgatcatagtagaatttcttggcacttttgcaaacactgtaccattgagcggggagctgtggctgctcagcgtcgtcattggctcaattagcatgatcatctctgctatcctcaagtgcattccagttgaatttaataagacagatactaaaccccatgggtatgagttgattcctgaaggcccagagattctatagcagcttcacgggag

SEQ ID NO: 5950 - DNA, 515 bp, Oryza sativa
  Clone ID: uC-osflcyp156a02b1
aaaatggtagcatgtcaaggacaccacaaccattggggaggggaaaatgttctctcctggtgacctgagggctacatttgataatcctgaatatgacaagctcatcaactactatgtcaaggagaagtacacattgcgttacactggaggaatggttcctgatgtcaaccagatcatagttaaggagaagggcatcttcaccaacgtgacgtctccgacagccaaggccaagctgaggctcctgttcgaggtggcgccgttgggtttcttgatagagaaagccggcgggtacagcagcgacggcaaacagtcggtgctggacaaggtgatcaacaacctcgacgagcggactcaagtggcctacggttccaagaacgagatcatccggttcgaggagactctctacggctcatcgaggctcaccgccggcgccaccgtgggcgccgccgcctaatcttttgctgcaacgcgagcccagtgtctctgcaggcctcaaaaacgctgaaactgcagtc

SEQ ID NO: 5951 - DNA, 393 bp, Oryza sativa
  Clone ID: uC-osflcyp156a04b1
gcatctgttatggtgtccgacgccagcaagaacaaggcgggggataataaggccgccgcgggtgacaacaagggtgacaaggacaaggccggcattactttctccgagcgcacctgcaccgacgtgctaacctcccataccctctgccgcgacatccacatcgagtgcctgtgcctcacattccacgggatgacctgcttcttgacaccgacctggagctcaactaccgcaggcgatatggtttgcttggcttaaacagctgcggaaagtgctgattgctcaaagctataggatgccgggggcttcctatccttgcacacatggacatctatcatctgacccatgagatcgaggcttccgtcatgtttgagctactagctgtcatcagctgtg

SEQ ID NO: 5952 - DNA, 337 bp, Oryza sativa
  Clone ID: uC-osflcyp156a05b1
acccgaccgttttttttgtcagctctcacagctcactgcatgggtggctctttacaccatgggggggtgctccccagtgatggcccgcacggcgccatggatctccttcgtgcttttccgagaagcgcggatcaccatacccaagaccggcgaaaaccctaccccagggtgacctatcaaaagcctgccaccttactttctatcgatggctacaaccgctggaatgacacacattgtgcgtgagggctaccatacctggctacaagctccacaagaacgaaaggtacaccgctgggatcatcaatcgacaccgatacgtttgtcattaaccgactcg

SEQ ID NO: 5953 - DNA, 465 bp, Oryza sativa
  Clone ID: uC-osflcyp156a07b1
ggtcttcaggaggtcatcacctcgtgtgacaaagggggacgttcaaaaggctgctgggggtctgaaggggtctgaccaccggcgtgctaccaatgttagcgctagactgctctcacaggagaagaagctcaaccttccagaccttactacaaccacaattggttcattcccacagactgtggagctcaggagagtccgccgtgagtacaaggcacaaaagatctctgaggaggagtacatcagtgccatcaaggcggaaatcagcaaggttgttaagatccaggaagagcttgacatcgatgtccttgttcacggcgagcctgagagaaacgatatggctgagtacttccgtgagcagcttactggttctgcatccactgccaacggatgggtgcaatcttatggatcacggtgtgtcaagccaccaattatctatggtgatgtgagccgccccaaccccatgac

SEQ ID NO: 5954 - DNA, 514 bp, Oryza sativa
  Clone ID: uC-osflcyp156a08b1
cgcgtgagcaccgacgacccaacaacacaagacggggggagcgacgagacgacctggggccaaagcgaaaaaagttgctgcatccttagcgcgcaagcgaaagcgagagggagctcgcgcgcgcgcgagggatcgatggatcgaccccaggtagttaccgagaactatgccaatcctgtgacgtgcctctttcatgtgctcttcaaggctggggcgctggtgttctacatcttgttttcgctcttcgtgaagagcttcgtcatcatattcgtcatcaccgtgttcctggcggcgctcgacttctgggtggtgaagaatgtgagtggcaggatattggtcgggatgcggtggtggaatgagatcgacgacgagggcaacagcgtgtggaagtttgagtgcctcgatggggaggctcttgctcggatgaacaaaaaggactcgtggctgttctggtggactctttacttgactgctgctgcatggatcattcttgggatattttcacttatcagac

SEQ ID NO: 5955 - DNA, 492 bp, Oryza sativa
  Clone ID: uC-osflcyp156a11b1
ttcatctcgcgccgccgccgccgtcgccgtcactgtggtcaggtaaggaggaggaagatgtcgcacaggaagttcgagcacccgaggcatggatccctcggcttcctcccgaggaagcgctcctcccgccaccgcggcaaggtgaagtccttccccaaggatgacgtatcaaagccctgccaccttacttccttcgttggctacaaggctggaatgacacacattgtgcgtgaggtcgagaagcctggctccaagctccacaagaaggaaacctgcgaggctgttaccatcatcgagacccctccgcttgtcattgttggactcgtggcctatgtcaagacacctcgtggacttcgctctctcaactctgtctgggcccagcaccttagcgaggaggtgcggagaaggttctacaagaactggtgcaaaagcaagaagaaggctttcactaagtatgccctttaagatgacagtgatgctggcaagaaagaa

SEQ ID NO: 5956 - DNA, 539 bp, Oryza sativa
  Clone ID: uC-osflcyp156b02b1
cacgacagctattgatgtgtggtctgctggctgtgtggttgctgaactacttctagggcagcctgtttttcctggtgacagtggcgtcgaccaacttgttgaaattatcaaggtactgggtactccaacaagggaagaaatcaaacatatgaatccgaactacactgagtttaagttcccccaaatcaaagctcacccatggcacaagatctttcataaaagaatgccatctgaagctgtagatcttgtgtctcggcttctgcagtactcaccacacctccggtgcagtgcattggaggtgttaattcatccattcttcgatgaactacgagatccaaatgctcgcttaccaaatggccgtactcttcccccactattcaatttcaagcctcgtgagctgaaaggagcatcaatggaatttcttgtgaagttggttccacagcatgctaagaagcaatgtgccttcttaggattatgagcagacagttcatacactaatcgggtattacgttggtctacttggttccgtagaacagcat

SEQ ID NO: 5957 - DNA, 539 bp, Oryza sativa
  Clone ID: uC-osflcyp156b03b1
cgcctcctgcgccgccatccccgagcaccaccaaccggggcccctgagcgagcggagcggagaacgcgaggcgaggcgaagcaaacatggcggcggctgcggtgtacggcgccggcggcgcgatgaagggcgggaagctcggcatggaggaggcgcgggagctgcagctcaaccgcatccgcatcaccctctcctccaagaacgtcaagaacctcgagaaggtttgcgctgatctggtgaagggcgccaaggacaagcagctgcgcgtcaagggccccgtcaggatccccaccaaggtgctccacatcaccacccgcaagtcgccgtgcggtgaaggaacaaacacatgggatcgtttcgagttccgcatccacaagcgggtgatcgatctcatcagctccccagatgttgtgaagcagatcacctccatcaccatcgagcctggtgtcgaggtcgaggcgacgatcgctgatgtgtaatgctgccaaactagcactaccttagacctacctgtcttgtttctctgctgcttagaatct

SEQ ID NO: 5958 - DNA, 468 bp, Oryza sativa
  Clone ID: uC-osflcyp156b07b1
gttcgcgcggtgcgtagcgatggcccggccacgcgtcctcctcctacctctcctcgcggtcgccgcggcggtgctctcgtcgccgctcggccgcgcgctcgccaagacggccaagaagagcaacgacatcgtcaatggcccactgctcacctccaagatcaacgccaagcgcacgctgatcgtcggccccgaggacgagttcaagaccgtgcagtccgccatcgacgccgtgcccgtcggcaacaccgagtgggtcatcgtccacctccgctccggcatctacagggagaaagttatgatcccggaaaccaagccgttcatctacgtgaggggcaacggcaagggccggacctcaatcaaccacgagtccgattactcccacaacgccgagtttgccgtcttcaccgtgcacgcggacaacgtcatcgtcttcggcctcagcatcaggaacagcgcgcgcgccgggct

SEQ ID NO: 5959 - DNA, 461 bp, Oryza sativa
  unsure (1)..(461): unsure at all n locations
  Clone ID: uC-osflcyp156b08b1
gtgcttggagggaacccaacttccatttctgggcagaaaccgttttgggctgtgtgaaaaattagtttgttctgtactccaatgcaagttgagtgcaggtagagaatgttgcctgacctgatgcatcagctcaatgccattacgctaacagttcatcgctcaatgttctcagtgtgagctatgtacaatatccagttccttttcttttggggtggttcaaatgtcgacgtgatggtcatttttcttttgacatataatcctgtagaagctagtgtgatcaggcagggcaagggcacttgtctgcacgacattcagagtgctgatgatgcttaagccaatttttgctagcttctcttggatgctgtatgttgctggttttgttagtttggtgaccttgacttgtaagatcaatgcaacaaaaccatgtgttgatacataaatangatcccattttgacttcg

SEQ ID NO: 5960 - DNA, 440 bp, Oryza sativa
  Clone ID: uC-osflcyp156b10b1
atcgtggcctccgacgcctccctcccacacgctgccgtgtggccgtacgtgcagccggctgcaccaccagctagcggcggcgggcgccggccggcggcgaggggatggcgtgcgaccagcaggcggagctccggcgggtgttcgagctgttcgaccgtgacggcgacggccggatcacccgggaggagctgacggagtcgctcgagaggctcgggatgcccgtgcacagggaggagctcgccgccaccatcgcccgcatcgacgccaacggcgacgggtgcgtcgacatggatgagttcacccagctgtacgagaccgtcatgcgcgtcgacggcggcggcggcggcgcctgcgacgtggatgaggcgagcatgctcgaggcgttcgacgtgatggggcggaacggcgacgggttcatcaccgtggactagctgggcgcc

SEQ ID NO: 5961 - DNA, 455 bp, Oryza sativa
  Clone ID: uC-osflcyp156b11b1
gtactcctcgtgatggacacccgcctccccctcctgctgctcctcgccggcgtcgtcgccgccgcggcgccactgctcgccaccgcccagctctccgccgacttctactcctccacctgccccaacgtcgagaaggtcgtctccaccgtcatcgagcgcaagttcaaggaggaccctaccacctccgccctcctcctccgcctcctcttccacgactgcttcgccaatggatggcgacgcgtcgatcttgatcgacccgctgtcgaaccagagcgcggagaaaggaggcggggccgaacatctcggtgaagggctacgacatcatcgacgagatcaagacggagctggagaaggagtgcccgcaggtggtgtcgtgcgcggacatcgtggcgctcagcacgcgcgacagcgtgcgcctcgcctggggccccactacgacgtgcccaccggccgcc

SEQ ID NO: 5962 - DNA, 512 bp, Oryza sativa
  unsure (1)..(512): unsure at all n locations
  Clone ID: uC-osflcyp156b12b1
ctctcctctcctcctccccttccaccccacgcgcccggcacccacccacgcgccgcgccctaaccctaaccctaaccctactcctctcgctcgccatgtccgagcccgcgtcgcccccaccggccatgcccgaggacgccgcgccgccgcagccgcagccggagccggcggttccagcgggggaggaggccgccccgtctctggagaggaaggaggagttgctgccggtggaggagaagatctcggaattagatgaatcacagtcacagcttatggggagacttcggggactcaaggaggatttgctgaattggaggagcagtttagatacacaagtgacaaaatacaaaagcgaactctctgatatcaaaactgcgctgaatagcgaaattgaacagctgagatcagattttcaagaattgaggaccacccttaagaagcagcaggangatgtatcacatagtttgaagaatttggggctacaagatgctactgacaatgatgggaacaaa

SEQ ID NO: 5963 - DNA, 490 bp, Oryza sativa
  Clone ID: uC-osflcyp156c01b1
gcgatgaggaaaattcaacccaatccaatgaattatcagagttggaagaagatggtgatgaggaagaatctgctaacgataatgaactaatagacgccaatgtgaatactgtgaaagaaatgtgcgtggatgttaaacataaacataaaaccaaggtcaagaaactttgcaaaacaattcttcgtcaggccccagcacaatctatgaaattgaaggaacttaaggtagctgttgaagcacattcagagtctatgttctccaacttctcttgtaggcgtgaagctctattgttcttaaagaggaagctccaaggaagcagaaaattcaatattgatggcaaacgggttcagcttgtatcgtaaattacgaagccgttgccgttcgggtgtgacatgaagccattgtggtcatattaggctattcgtgcttctgatgagtgtacgaaagtacggagcacagtatgctctgcggtatagatgtaagaagaata

SEQ ID NO: 5964 - DNA, 469 bp, Oryza sativa
  Clone ID: uC-osflcyp156c02b1
ctcttttgtaaacttgccctctgtggtgacctcgttactgccagcaccttctgaaggctcgaatttatacccaaatgcatcaagagcagccgccatgctatctgcgggatcacgatctttacatgaactggcagtcaaggatgtggcaacctatatgggtagatcggacaggtcgctatttggaacgcatttgatttgtgctgggcaaggatatcaggaggcaggtcctcagcttgaggatgctggttgctcgcgagaagcgtgaactgcggctgcaaggactgtacatgggtctgagtatgctgggatcctacagaggcggcgagatgatattcttcggagcgtacatatcaggggtagagctctagtactatatgtagctgcttgagcactacctgaggctatagaaacgcttcgcactaccagcgaccagacatgtgaagcgctgttgttgctagcgtgccatgag

SEQ ID NO: 5965 - DNA, 537 bp, Oryza sativa
  Clone ID: uC-osflcyp156c03b1
ggaatgttagaggatggtaccatatttgtcacaagaggtcatgatggtgacgagccattcgagtttaagactgatgaagaccaagtggttgaagggcttgacaaagcagtacttagcatgaagaaaggagaagttgcattggtgactattccaccagagtatgcgtttggatctgatgaaacaagacaagatttgtctgttgtccctcctaattcaactgtttattatgaggtggagcttgtgtccttcgataaggagaaagaatcatgggacatgaaggagaatactgagaagattgaagcggctgcaaagaagaaagatgaagggaatgcttggtttaagatggaaaagtatgccagggcttctaagagatatggaaaggctttaaacttcatccagtatgacagctccttcagtgaagaagagaagcagctgtccaaaccactctaggtgagttgcaagctcaacaatgctgcatgtaagctgaagcttaaagactacatggaagcaaaggaactgtgtactgaggtcctggag

SEQ ID NO: 5966 - DNA, 507 bp, Oryza sativa
  Clone ID: uC-osflcyp156c04b1
atcgccatctctctcagctctcacagctcactgcatgaatggccgcggccaccatggcgctctcctccccggtgatggcccgcgcggcgccgtcgacctcctccgcgctcttcggcgaggcgcggatcaccatgcgcaagaccgccgcgaagcccaagccggcggcgtcgtcggggagcccgtggtacggcgccgaccgcgtcctctacctcggcccgctctccggcgagccgccgagctacctcaccggcgagttcccgggcgactacgggtgggacaccgcggggctctccgccgacccggagacgttcgccaagaaccgggagctggaggtgatccactcccggtgggcgatgctgggcgcgctcggctgcgtcttcccggagctcctcgcccggaacggcgtcaagttcggcgaggccgtgtggctcaaggcgggctcgcagatctttagcgagggcgggctcgactacctcggcacccgagcctgatccacgcgcagagcat

SEQ ID NO: 5967 - DNA, 374 bp, Oryza sativa
  Clone ID: uC-osflcyp156c05b1
cctccttctccttctactagtaaagggaggagcaggtacacgggggttgagatctgaggagggaggagaggaggttcgtgatgatggacagccaggcgctgcatgacccccgcgccgagccccatggagctgagcctgccgccgccggagctcctcccgccgtggttcccggcagggagttcacccgcacctgcatgggcctcgtcgacgtcctcgtcggcggatatgtgctgctccagctcctaccctcctccctcgactacctcgacatcatccccgccaagactattccatttgtatggactgtcttcacagctggctacatcgaacaagttcttccaggggctatccgccgttcccttggtcttctttct

SEQ ID NO: 5968 - DNA, 507 bp, Oryza sativa
  Clone ID: uC-osflcyp156c06b1
gagttattatgaatccccttaaagcccttcatccgtttagtgcttctagttagccatggagtgctcaatctccactgagcatttcttggctatcttttagaactgtgattgcatccactgtgcttattagcttggcaagatagttttgcgattccacaagcaaccacatcctgaggcttcaaagtttgtacaatacagatgtactactaggaggatatcttttgcgatgaatattgcaacttatttgatgtactattaggaggatatcttctgcgatgaatattgcaacttatttgatcaagaaacctacttcaccaaccgggagctggaggcagtccagctcccggtgggcgatgctgcgcgcgctcagctgcgtcttcccggagcttcttgcccggaacggcgtcaagttctgcgaggccgtgtggactatggcggcctcgcagatcttcaacgagggcgggctcgactaccttggtaacccgagcctgatccacgcgcagagca

SEQ ID NO: 5969 - DNA, 476 bp, Oryza sativa
  Clone ID: uC-osflcyp156c07b1
gttggataattcctggcagaagtacacattaacctactttgttttggtcaggagtgagtacttatctagggattcaaggaagccttcagatgggaagaaccaacttcttgactgctgtgatgattcagaattagatttggatgtgctgtatgctgatttggatagtcaaagaactggagcttaagttgcagaaacctgttgtcaagactcaatcaaaaggtgactcatgtgccagtggatcaaatgattgcttctttcctggccttcacgacgacctggctcaggactgccttgcttgggcgagcagatcagactacccatcgctatcttgtttgaataagaagatcaatttgttaatcaacagcgggtctctgtgcagactgagaagaaaatatggcattgttgaacactgggtgtatctagcgcgtagcttgactgcctgagaagcatttgatccttcagcatgcgatggatga

SEQ ID NO: 5970 - DNA, 499 bp, Oryza sativa
  Clone ID: uC-osflcyp156c08b1
atgcttaaatgcactgtctgcgctgaagcaatgcaagtgggatgctgagatttctaccagggcatcatccctttaccatttgattgacttgcatggtaaaacagtgacctccattgtgaacaaagctgagcctctagaagctcacctgacccttacaccagtaaaaaaggatgaacctcccattgaggaaaagaacattaactcatcagatggtggtgcattggaaaaaaaggatgcttcaagatcacacaggaaaaatggttttgcaagaccactcttgaaatgtgcagaagatgttatactaaatggtgatgtcgcaagtacttctgggaaagccattgcaagtttacaggtggaagcttctgatttggcaaacttcctcaccatggaccgaaatgggggttacagaggttctcaaactctcctaagatctgtactgtcagagaagcaggagctatgcttctctggtgtctcattgctctggcagaagctcattgca

SEQ ID NO: 5971 - DNA, 510 bp, Oryza sativa
  Clone ID: uC-osflcyp156c10b1
aaacagcaaaaaaaatcaaacaaaaagaaaaaatattccccatctgtgaaattcgcaaaaccctagcgcggcggcgatgtcgaacacgagggtgttcttcgacatgaccgtcggcggagctccggcggggcggatcgtgatggagctgtacgcgaaggacgtgccgcggacggcggagaacttccgcgcgctctgcaccggcgagaagggcgtgggcaagagcggcaagccgctgcactacaaggggagcaccttccaccgcgtgatcccggagttcatgtgccagggcggcgacttcacccgcggcaacggcacgggaggggtagtcgatctacggcgagaagttcgccgacgaggtgttcaagttcaagcacgacagccccggcatcctgtccatggcgaacgccgggcccaacactaacgggtcccagttcttcatctgcaccgtgccctgcagctggctggacgggaagcacgtcgtgttcggtcgcgtcgtcgagggcatggacg

SEQ ID NO: 5972 - DNA, 505 bp, Oryza sativa
  Clone ID: uC-osflcyp156c11b1
gccatctctctcagctctcacagctcactgcatcaatggccgcggccaccatggcgctctcctccccggtgatggcccgcgcggcgccgtcgacctcctccgcgctcttcggcgaggcgcggatcaccatgcgcaagaccgccgcgaagcccaagccggcggcgtcgtcggggagcccgtggtacggcgccgaccgcgtcctctacctcggcccgctctccggcgagccgccgagctacctcaccggcgagttcccgggcgactacgggtgggacaccgcggggctctccgccgacccggagacgttcgccaagaaccgggagctggagggtgatccactcccggtgggcgatgctgggcgcgctcggctgcgtcttcccggagctcctcgcccggaacggcgtcaagttcggcgaggccgtgtggttcaaggcgggctcgcagatcttcagcgagggcgggctcgactacctcggcaacccgagcctgatccacgcgcagagca

SEQ ID NO: 5973 - DNA, 519 bp, Oryza sativa
  Clone ID: uC-osflcyp156c12b1
gcgatctgaagtgaaacagcaaaaaaaatcaaacaaaaagaaaaaatattccccatctgtgaaattcgcaaaaccctagcgcggcggcgatgtcgaacacgagggtgttcttcgacatgaccgtcggcggagctccggcggggcggatcgtgatggagctgtacgcgaaggacgtgccgcggacggcggagaacttccgcgcgctctgcaccggcgagaagggcgtgggcaagagcggcaagccgctgcactacaaggggagcaccttccaccgcgtgatcccggagttcatgtgccagggcggcgacttcacccgcggcaacggcacgggaggggagtcgatctacggcgagaagttcgccgacgaggtgttcaagttcaagcacgacagccccggcatcctgtccatggcgaacgccgggcccaacactaacgggtcccagttcttcatctgcaccgtgccctgcagctggctggacgggaagcacgtcgtgttcggccgcgtcgtcgagggcatgg

SEQ ID NO: 5974 - DNA, 522 bp, Oryza sativa
  Clone ID: uC-osflcyp156d01b1
gctttaggtattcctgaaggtctcatccctgtgcaacttctgtgggtcaatcttgttacagatggtcctcctgcaacggctttggggttcaacccacctgataaagatatcatgaagaaacctccacgaaggagtgatgactcgttgatcactccatggatcctattccgttatatggtcattgggatgtacgttgggattgccacagtgggagtgtttatcatttggtacacacatggctctttcctgggaattgacctggctggtgatggtcactctcttgtctcgtactcccagctctcaaactggggccagtgctcctcatgggagggtttcaaggtgtcaccattcacagcaggtgcccgtacattcaacttcgatgtgaacccatgtgattacttccagggcggcaaaattaaagcgacaaccctctccctgtctgtcttggtggccattgagatgttcaactcgctgaatgcgctgtcggaggatggtagccttctgagcatgcctccgtgggtt

SEQ ID NO: 5975 - DNA, 478 bp, Oryza sativa
  Clone ID: uC-osflcyp156d02b1
gatggcgccgtcgcagccgaagtccgggctcttcgtgggcatcaacaagggccacgtcgtcaccaagcgcgagctgccgcctcgcccgtccgaccgcaaggggaaatccaccaagagggtgacctttgtcaggaacttgatcagggaggttgctggatttgctccctatgagaagcgtatcactgagcttctcaaagttggcaaggacaagcgtgcactgaaggtggcaaagagaaagcttggcacccacaagagggccaagaagaagagagaggagatggctggtgtcctcaggaagatgaggtctggtggcggtcacgctcacaccgagaagaagaaatagagtatctccaagttcatgaagtccatggcaatattgtcttgttgagtttactcttgtagaaccctactactagaattgcactctattatccagctaaacatcatggtgttagttctgtgttaaaaacctcctgtc

SEQ ID NO: 5976 - DNA, 519 bp, Oryza sativa
  Clone ID: uC-osflcyp156d03b1
atccttttgctcatgataatattgaaaaagtggtaccttgggaagactcactgggatccatcagtgatggagcatctaacatttgcattgtcactttgtggtcagacatctgttcttgccaagcatcttgaagaggttttacctggaatataccctcgaactggaagatggtatagtctagctctttgcaattatgcagcttcacataatgaagctgcattaaatttgttaaggaagttgttgaataagaacgagagtcctggtgacataatggccctcctgttagctgctaagttatgcagctcagattattctcttgcttctgaaggagtagagtatgcaagaagagctgttacaaatgttgattcatcagatggtcatttaaagagcgctgcgctccacttcttggggagttgcctggctaagaagtctagaatcgctacatctgatcaccaaagatctctcttgcagactgagtctttgaagtcacttagtgaagcgatttctcttgatcgtcac

SEQ ID NO: 5977 - DNA, 503 bp, Oryza sativa
  Clone ID: uC-osflcyp156d04b1
tgggggtgccgcggtgttattggggggaccgacgcgtccggcgtatatgtgtagccaacacagggggttaacatcagagggggattgattaagaggaggggggggcatgtagcacaagagcggtaactgcgactgtgctgacaagagccagtgcgtgaagaaaggtaccagctatggcgtcgtcatatttgaagccgagaagagccacttcgaggaggccgctgccggctaggagaacggcggctgcaagtgcggcaccagctgttcctgcaccgactgtaagtgcggtaagtgaagttacgaagcaaccgaacactctccgccggtgaggtacctaccttaattagtccacaataaaaaccacctatatgagtgtggtttgtgtgtgtgctgattattgctgaataaaacccgtgtgttatcgattaattaagcagttggtggcttcgaagactatgcgtgtatcaacgtatgaatttgtgtgatgtgatgtacccgtgcta

SEQ ID NO: 5978 - DNA, 393 bp, Oryza sativa
  Clone ID: uC-osflcyp156d06b1
gaatgtgttcctgcttatgctccttggaggagcagagcggggagtccccatttctaatggcctacagtacgcaagagctctgagagaaagaggcggcgagatcaggatcatgatgttcccagaccacatacatgaaatcaacataccacaatcggattttgagagcttcctcaacattggtgtctggttcaagaagcatcttagcatatcagcatcagatgcatctgcatgaagtcaacttgaagaaggggaggaagaaattacgtggtttaatctagtccaacaggtagatgccattgtaagccttgttcatggagctcgtccgtagacgagtgctccaaaatattagagacttccctattgaaaaaagtaaatggagactttaattggttt

SEQ ID NO: 5979 - DNA, 431 bp, Oryza sativa
  Clone ID: uC-osflcyp156d08b1
ctccccctcccggttcggttcggttcggttcgggtgcggttcgatttcggtttttccttcggttcgggggttggtgggaaagcatggcggcgccggatgttgagtaccgctgcttcgtcggcggcctcgcctgggccaccgacgaccgctccctcgaagccgccttctccacctacggcgagatcctcgagtccaagatcatcaacgatcgggagacggggaggtcgcgcgggttcgggttcgtgacgttctcgagcgagcaggccatgcgcgacgccatcgaggggatgaacggcaaggagctcgacggccgcaacatcaccgtcaacgaggcccagtcgcgccgctccggaggcggaggcggcggtggctacggccagcgccgagaaggcggctacagcggtggcggcggctactgtggcggacgtggt

SEQ ID NO: 5980 - DNA, 480 bp, Oryza sativa
  Clone ID: uC-osflcyp156d09b1
gctgttgttcccgatcaagaacctccaggacttgaccggcgaggtgccggagagctacaggaacctggtgcagagcgaccggccggccacgtcggtgtcggagctcccctacgtcttcgtcgacctcgaccatggctgcacctaccacgacaagctcttctactgcgacgacgaacgccatttcctccaccgggcgccatggctgctgatgaggaccgacggctacttcccgacggcgctgatcctcaacccggcgtaccaagacgagctcgaccggctgttccctcggaaagactcggtgttctacctgttggcgcactatcttctccatccgacgaacaaggtttggggattgatcacgaggttctacgactgctacctgagggattcggacgaacggctcggcattcaggtcagggtgttcgacggggacaccccgttcatgcacatcttggatcagatcaccgttgcacgttacag

SEQ ID NO: 5981 - DNA, 534 bp, Oryza sativa
  Clone ID: uC-osflcyp156d11b1
ccactaagtactactgcacggtcatcgatgcccctggtcaccgtgacttcatcaagaacatgatcacgggtacctcccaggctgactgtgccgtgctcatcattgactccaccactggtggttttgaggctggtatctccaaggatggccagacccgtgagcacgctcttcttgctttcactcttggtgtgaagcagatgatctgctgctgcaacaagatggatgccaccactcccaagtactccaaggcccgttacgatgaaatcgtgaaggaagtctcatcctacctgaagaaggtcggctacaaccctgacaagattcccttcgttcccatctctgggtttgagggtgacaacatgattgagaggtccaccaaccttgactggtacaagggccccaccttgcttgaggctcttgaccagatcaacgagcccaagaggccatcagacaagcccctgcgtcttccccttcaggacgtgtacaagatcggtggtattggcaccgtgcctgtgggtcgtgctgagactggagtct

SEQ ID NO: 5982 - DNA, 433 bp, Oryza sativa
  Clone ID: uC-osflcyp156e01b1
cggaggagacggttggctgcccttctgcatataccgcgatggtttcaatcctgaaatatatccagctctatggtctgactactacaacaagaacagaagggaaccagagaatactcagctcgctccatgggttgccaaatatttttccaagtactactgaccccctacaccgatccaagtcccttgggttcgcgacagattggatagagttgagccgctcaggacagtgtcaaagcagctgctgcattttcctggaagaaaaggagattgacgttttacctgtacatgtcttttgccttcttttcttgtttccactcttactatatgacttttgggcagggcaactaagctcgccctcctgtgatgtatgttggaaaaataatgtgtaaagattctttaaagcccttgctgcaaagataggtgacatgctgga

SEQ ID NO: 5983 - DNA, 494 bp, Oryza sativa
  Clone ID: uC-osflcyp156e03b1
gcgcgggcttcgacgacgacgacggccatgccgcgcgccgcgaggtctcctcctcgctgaaagagctcacggtcagggtggaagggaaaggtgggagctgcagcggcagcgctggcacggatcagatgccgaacacgccgcgctcgaagcactccgccaccgagcagcgcaggcgcagcaaaatcaacgacagatttcaacttcttagagacttattgcctcataatgatcaaaagagagacaaagcatcatttctcttagaggttattgaatacatacggtttttacaagagaaagtacaaaagtatgaggtttcatacccggagtggaaccaagaaaatgcaaaggttgtgccatggacaaacatctatttccgttcttcctggaaaaatgcgcagaacaaaggccaagttcctgcagatcattcacctgacccttcagaacttctgaaaaatgggtccccctatatgttcccttttacagggaactctgat

SEQ ID NO: 5984 - DNA, 433 bp, Oryza sativa
  Clone ID: uC-osflcyp156e05b1
ctcatatgcaattggacttgccccaagagcaggggaaaagtccaagaacaggaactagaatggttattgcccacagttgaaagcaaaacggagatattaattaactgcagggcagttcctcaaaaccataatttaatagttttacaggatcaccatatgatctgtattacatggtttgctattctgcaagtaaaaaaaaaaactcttttaagactctgttatgttaggtttgcaacatctcctagagatgtacgctctattcggttgcacgtgtctttgtatgtgtagtatttccatccatgtaaatggttggtatgcagtgcgctaccgctattattgagcactcctacctatcctgcaagtgttgtcctgaaacgtatgttcccgtcacgtaagtgtttaaatgtttttaagaggttcctgaagatgtatt

SEQ ID NO: 5985 - DNA, 326 bp, Oryza sativa
  Clone ID: uC-osflcyp156e06b1
gcaggtttttggttcacgtggaggaggaagcggtcgcggaggttcaggcggtggaggaagcggcggcggcggacgaggaggaagcggcggccgcggcggaggaggaagatgcccgatcgacacgctgaagctgggggtgtgcgcgaacgtgctgaatgggctgataaacgtgcagctggggacgccgccgcggcagccgtgttgcagcctcatccagggcctcgtcgaccttgagggcgccgtgtgcctgtgcaccgacctacgcgccaacatccttggcatcaacctcaacctacccatcaacctcagccttctcgacaactact

SEQ ID NO: 5986 - DNA, 379 bp, Oryza sativa
  Clone ID: uC-osflcyp156e07b1
tcaatggcaagtaatgcaacaaggaatactgatcctgaccaacagggtgttcgattcagttccatggaccagcctccatgttttgcaagacctggtcaatcgttccctgcttttcctccactctttggggttcagtcttccagcttgtatttacctgatgacattgaagctaaaatcggtaaccagttcgaatcaaatccttccccgaataatcctacaatggattgggaccctcaggcaatgctgagcaacttatccttccttgagcagaagatcaagcaggtaaaagacatcgtgcagtctatgagtaatcgtgagagccaagctgctggtggttccagcgaggcacaagcaaagcagcagcttgtcactgctgatc

SEQ ID NO: 5987 - DNA, 432 bp, Oryza sativa
  Clone ID: uC-osflcyp156e08b1
atcaatttccttcctcccgatcgagcaagggggcgaaaggacgagctacggaccgagccatggaggaattcaaggctcgctccttcgtcgccttgtctccctcgggtgaaatttcatgaatataggaaaatagattataccatcagtttttgcacacgcggatgaaatttgactaggagaggcaccatggagaaagtcgaggtcgatgggaacttcattggtacgggtaattggaagctgcatggagcactatgtaagcaacttcacaaagtagttcttgaagtattggatgttattcctgtccttgaagctacaaggcctggaaacagctctggacttcttgcattgagttccttgcgcatagctgttgagaaggccaagaatctacttcagtattgctcagagtgcagcaagctatacttgggctttaca

SEQ ID NO: 5988 - DNA, 528 bp, Oryza sativa
  Clone ID: uC-osflcyp156e10b1
aaagatgcaacaactgcagaagtagagggtgttctaacacaaagcggaacttctcccgattacaaggttggcaacagaataacagacatcagccaaaaaatggttgaagaactaaaggagtctgtgaatgaagagcaggctgagaaaaaggaggcagccgaggagaagccagatgaaccagatgagatcgtactgaaagtcgacatgcactgcgaaggatgtgcaaagaaggtcgagaaatccctattgagatttgaaggagtcgaaaacgtcaaggctgacagtcgatcgaagacggttgtggtgaaaagcagggccgcagatccctcaaaggtctgcgagagggttcagaggaagacaaagagaagagttgagctgattttccctcttcctccacctccagaagaggagaagaaagaggaagctacagcaccacctccagaagaaaagaaagaggagccaccgaagacaataactgtcatcttgaaggtccagatgcactgcgacgcttgtgcgcagattctgcaa

SEQ ID NO: 5989 - DNA, 526 bp, Oryza sativa
  unsure (1)..(526): unsure at all n locations
  Clone ID: uC-osflcyp156e11b1
ctgtggctcgaagcgtatttctcttctgcgccttcgcttttgcctaagcacgatgtctgctacaatggacatcgacggcgccgccgccagcgccgccgcgggcggtgggagacattcggagaaggagctcttcagcgcggcggagtccggggacgccgcggccttctcctccctctcccccgccgacctcgccgccgcgctcgccctccgcgatgaggacggccggtccctcctccacgtcgccgccgcctccggccacgcccaggtggtgagagtgcttgccgcgatgggcggcgacgcggcggccagcgttgtgaacgggaaggacgaggaggggtgggcgccgatccacacggcggcgagcagcggaaaagctgagatcatctccatcctgctcgatcaaggtgctaatgttgatttgacaaccgatgctggcccgactgctcttcattatgctgccagtaaaggacggcttaatatagcagaaacactaatagcgcacagtgcacatgtcaacangaaagat

SEQ ID NO: 5990 - DNA, 505 bp, Oryza sativa
  Clone ID: uC-osflcyp156e12b1
agaatgcataagcaacacaagggattaactcatcactcacttagctaattaaatcttcgaccatgtcggacaagtgcggcaactgcgactgtgctgacaagagccagtgcgtgaagaaaggtaccagctatggcgtcgtcatagttgaagccgagaagagccacttcgaggaggtcgccgccggcgaggagaacggcggctgcaagtgcggcaccagctgctcctgcaccgactgcaagtgcggcaagtgaagtcacgaagcaaccgaacactcgccgccggcgagtcacctaccttaattagtccacaataaaaaccacccatatgagtgtggtttgtgtgtgtgctgattattgctgaattaaacccgtgtgttatcgattaattaagcagctggtcgcttcggcgactatgcgtgtatcaacgtatgaatttgtgtgatgtgatgtacccgtgctattctcagtgaaattaatcaatcgtgtattcgtgtggtttgcctagt

SEQ ID NO: 5991 - DNA, 541 bp, Oryza sativa
  Clone ID: uC-osflcyp156f01b1
gttcattatcaaatgctactcagttttggtgcaataatgatcatcagctttcttcaatagttcaggtagaaaataaaataagtatcatattcattagtttgaatactttaaatgaaaagaagtcgcattcattaggccatgtatatcttgctgtcatattgaaaatcctttaattgaacaatgcttgtatcagcaatttatcttcgtaaggttggtgctgagtacatatcaggcttttactagacccaagcaggatttcttgctggaattgttagtatgttttatttcatgatattgtttccagttcctgtgtaaaattatttatgaaaatagtttttcttttggtccatttgtgttttcttattgccctttgtgtatagatttgtcaagcttgcattatgagaagaaatggtgcagcatacagagatccatgtaccactatttattgtgatcgcagcatctggatatattaaagatctgtccacattacaacagtacacgtttacatcaatttcggatgctggtagcaacatgagctgta

SEQ ID NO: 5992 - DNA, 367 bp, Oryza sativa
  Clone ID: uC-osflcyp156f02b1
aggttatttcctgtttcttgctcctcccctgtgttcccggcggcggcgatggggtgcgcggcgtccaagggcgcggcggtggcgtctccggcgtacgaggcgaccacgacgtcgtcgtcgtcggcgtcggcggcgtacagcgtgttgaggagcgcgtcgacgggcgcggcggcggcggaggtggcgtcgatttggagccggccggtgcggttcgacgcgtacgaggatgatggcgacgggaagaagaaggcggcggcgcgtgggggtggtgagtgttcgtccgtcgttgtcgttggcggtggcgtgcggctcgggaacatccacaggtacgtcgaggcggagcaggtcgccgtcgggtggccgtcgt

SEQ ID NO: 5993 - DNA, 362 bp, Oryza sativa
  Clone ID: uC-osflcyp156f04b1
gccattgttagccatggcgccactccccgccgccgtcggggggccggccttcctgtacctgtgccctaccggcaaactgcccggcggcaaacccaggctgaaaccctactgtgccgcctccaccatgtccttgagggcgtcgtcaccctcgctcgccgagcagctggagcccctgtcccgcaggctcctgcacgggaagcccacgcgcacccagcacgcgccggagccaacctgggtgaacccgtccaagcacacgcgcacggtcacggtgctccgctggcaccgcagacgatgaatgcctcccacgcctgctgggtccctctggaggcgttcaacgcgctcgacatgaagctcacggacga

SEQ ID NO: 5994 - DNA, 507 bp, Oryza sativa
  Clone ID: uC-osflcyp156f06b1
aaaaaaatatctcccctcgaagcgaagcgtcgaatcggcttctcaagatgcagatctttgtgaagaccctcaccggcaagaccatcaccctcgaggttgagtcctcggacaccattgacaatgtcaaggccaagatccaggacaaggagggcatccccccggaccagcagcgtctcatctttgctggcaagcagcttgaggatggccgcaccctggccgactacaacatccagaaggagtccaccctccaccttgtgctcaggctcaggggaggcatgcagatcttcgtcaagaccttgactggcaagaccatcacccttgaggtcgagtcgtctgacaccattgacaatgtcaaggccaagatccaggacaaggagggcatccccccggaccagcagcgtctcatcttcgctggcaagcagcttgaggatggccgtaccctggccgactacaacatccagaaggagtctaccctgcaccttgtgctcaggctcacgggaggcatgc

SEQ ID NO: 5995 - DNA, 300 bp, Oryza sativa
  Clone ID: uC-osflcyp156f07b1
ctactcagtacttggtgcaatacggagcatcacctttctttcaatggggcaggtagccctcatgaaccaggacatggtcctcacggagagctcatcctaccttaaggactcagtcctggacggccgcatcccgttcaacaaggcgtacggaatgacggcgttggagaaccacggtacgaacgcccgctttacccgcggcttcaacgagggccagaataaccactccgctaacaccaacaaggagttgctggacctctacaccggatgcgacaccgcctgcaccggcgtccaggtcggggg

SEQ ID NO: 5996 - DNA, 495 bp, Oryza sativa
  Clone ID: uC-osflcyp156f08b1
ttaatggaaaaaaaaacaaaacacaccaagccaaataaaagcgacaatgggatcgctcaccaccaacatcgtcctcgccgtcgccgtggtggcagcgctggtcggcggcgggtcgtgcggcccgcccaaggtgccacccggcccgaacatcacgaccaactacaacgccccgtggctccccgccagggccacctggtacggccagccctacggctccggctccaccgacaatggtggcgcgtgcgggatcaagaacgtcaacctgcctccctacaacggcatgatctcctgcggcaacgtcccaatcttcaaggacggcaggggatgcggctcatgctacgaggtgaagtgtgagcagccggcggcgtgctcgaagcagccggtgacggtgttcatcacggacatgaactacgagcccatctcggcgtaccacttcgacttctccggcaaggcgttcggcgccatggcttgcccgggcaggagaccgagctccgc

SEQ ID NO: 5997 - DNA, 477 bp, Oryza sativa
  Clone ID: uC-osflcyp156f09b1
cgaagaactcaccctgcacagaagagtttcctgtgactccaaacaatccatatggcaaaacaaagcttgttgttgaagatatttgccgtgatatctaccgtacagatcctgaatggaagattattctacttaggtacttcaatccagttggggctcatcctagcggataccttggggaagatccatgtggcattcccaacaatcttatgccttatgttcagcaagttgctgttggcaggaggccagctctgacaatactaggaaatgattatgcaaccagagatggtaccggggtccgagattacatccatgtggttgaccttgctgatggacatattgcggcattgcagaaactctttgagagctccagcatagggtgtgaagcatacaaccttggaactggtaaaggtacctctgtgctggagatagtcaaggcatttgagacggcttctgggaagaaaattcctttgattattg

SEQ ID NO: 5998 - DNA, 508 bp, Oryza sativa
  Clone ID: uC-osflcyp156f11b1
ctgatgatgataatgtgtacagtacagaactaagggaactcctaagcaggtttttttatttctttcatgaagaaagtctctgcaacatatttctttagttctcagcgtaaatactgaattagtgttcattctgcagaaggagtgtttctaatcttcttcatagtgcttttcgtgaaaatttggaccgacttatccggtcatatgttgaaaggcaaggtcgtgctcctctctcttgggatttggaaggagcacctcctgcgcctgactcacccgagcaaagccaggagcagcatagagatgaagaggaacaggagcttcatgataatgttgttaggcctcccttagtgattccacctccgcctatacctcctcgccagccactttggcattcggagttgcatcgtaataactggatcagacaaaacatacatcgctctgatattgaatgggaggctattaatgacttacgggctgatatggctaggcttcagcagggcatgagtcatat

SEQ ID NO: 5999 - DNA, 499 bp, Oryza sativa
  Clone ID: uC-osflcyp156g03b1
gctcttgtttggcttcctccgtctcactcctactcctgggctgcccccattcttctctggatatttttctttttcatcttctttgagttggagggcttgattttaggggggactgctcgatcggcagggttaattccgatctctatatccttcccggacagagccgggatcaggtaccgattctgccactcacatccgagttcttcttcgttttgatctgtttcttttttactcgtatgtgcacccaaaagatagaagatttactaccctaggaagaactgtggtttagtgagcagttaattaggaatctaatccttggtcatgatgtagaacacggttacacgggtgtgctctgctactctgtagtagcagttctttcttagacttattaaaaggttcagtggcatgggttcgtcagcaacctttctttagagggttattaaacatgtattttgcttgtccttgggcatatgatttgaggacttttgtgatttctatc

SEQ ID NO: 6000 - DNA, 495 bp, Oryza sativa
  Clone ID: uC-osflcyp156g04b1
cgaattgggaagggtttgctcgatccctttgttctttccttctctttcccctgactcctcccctccccgtactccaaatcatccgctccgccatggctcccgcctgggtcttgctcgatcgcttcgtcgacatgttccccctcgacggcgacgaagagagcgaagacagcgggggagaagaatccataccagctggcatgtggtccgtgaagcccaacccacaagttgccgatccccctggtatatcttccttccccctgctgatctctcggaaggcgatgaaccaagagcgccacgccatggtcgtgtgcgctagcaagaaccgcgtcgtcttcctcaccggcgagtactacccaatcaactacaggcctggttgctacctgatctacgacgccatccacgactctctcactgccgtgcctgacgtgccgggacctgacagcctccttgccatcggcagcggaacatctgtcatttcctttggcggctcgggca

SEQ ID NO: 6001 - DNA, 525 bp, Oryza sativa
  Clone ID: uC-osflcyp156g06b1
ctcatttctatcacctcctcctcctcctcctcttcctgcgggcgcgcgagatccagggagagggagagggagagatcatggcggggacggtgacggtgccgtcggcgtcggtgccgtcgacgccgctgctcaaggacgagctggacatcgtgatcccgacgatccgcaacctggacttcctggagatgtggcggcccttcttccagccctaccacctcatcatcgtgcaggacggcgacccgaccaagaccatccgcgtccccgagggcttcgactacgagctctacaaccgcaacgacatcaaccggatcctcggccccaaggcctcctgcatctccttcaaggactccgcatgccgctgcttcggctacatggtctccaagaagaagtacgtcttcaccatcgacgacgactgcttcgttgccaaggacccatctggcaaggacatcaatgctcttgagcagcacatcaagaacctcctcagcccgtccaccccgttcttcttaacaccttgtatgatcccta

SEQ ID NO: 6002 - DNA, 141 bp, Oryza sativa
  unsure (1)..(141): unsure at all n locations
  Clone ID: uC-osflcyp156g08b1
gtggtgtgctaattcatccttcactccattaatttgttataaatatatatccttgtactagtgtaaatgtaataaagatcttaagttatgggtggatcatcatatactccccccgtcccnnnnnnnnnnnnntnnnannaa

SEQ ID NO: 6003 - DNA, 532 bp, Oryza sativa
  Clone ID: uC-osflcyp156g09b1
gttctctggcagtgagactacttcagtttggttagaggtttctgaagttaaaggagatgatgtggtttgtgtgataaaaaattcggctactctggctggttcactgttcaccctgcattgttctcagattcatatcgacttacctacactgtctgatgaggacaaggaggttatcagaagatggggagctccaaacaagattgacttcctctctctgtcttatacaagacacgcggaagatgtgcgacaggcacgtgagttcctctcaaagttaggcgaccttagccaaactcagatttttgccaaaattgagaatgttgagggtttgaatcattttgatgaaatcctgcaagaggcggatggtatcattctgtcaagaggaaaccttggaattgatcttccacctgaaaaggtgtttctgcttcaaaagtctgctctgcacaagtgcaacatggctggaaagcctgctgttgttactcgtgttgtggacagtatgactgacaacctcaggcctactcgtgcggaggctact

SEQ ID NO: 6004 - DNA, 484 bp, Oryza sativa
  unsure (1)..(484): unsure at all n locations
  Clone ID: uC-osflcyp156g10b1
ggagagaaccccaccttggcaaaaagaaaagaaaaataatatcatcgcactttttgctgcccttttcatcccctcggatattcacgaagcaaatctctctgcaattcttttctttttttttttttgatcttgcggatcttctccattgaggaaaggcgagagctttgggatcgattccgggccatggcgaaggaggtggatccgtgcgaccacggcgaggtcgtcgacgccgggtgcgtccgcgccgtgctggccgagctcgtcctcaccttcgtcttcgtcttcaccggcgtcgccgccaccatggccgcaggggtgccggaggtggcgggggcggcgatgccgatggcggcgctggcgggggtggcgatcgcgacggcgctggcggcggaggtgctggtgaccgcggggttccacgtgtccggcgggcaccttaacccggcggtgaccgtggcgctgctgcgcggnggcacatcacggcgtc

SEQ ID NO: 6005 - DNA, 509 bp, Oryza sativa
  Clone ID: uC-osflcyp156g12b1
cccggaggaatccgccgccgccgccgccgccatgtcgctgatcgccggggaggacttccagcacatcctgcgtctgctgaacaccaacgtcgatgggaagcagaagatcatgttcgcgctcacctccatcaagggtgtcggccgcaggttctccaacatcgcctgcaagaaggccgacatcgacatgaacaagagggccggtgagcttacgccggaggagctggagcggctgatgaccgtggtggcgaacccgcggcagttcaaggtgcccgactggttcctcaacaggaagaaggactacaaggacgggaggttctcccaggttgtctccaacgcgctcgacatgaagctcagggatgatcttgagaggctcaagaagatcaggaaccaccgtggtctgaggcactactggggcctccgggtgcgtgggcagcacaccaagacaaccggaaggaggggtaagactgtcggtgtgtccaagaagcgataagcctaagaaccacccgaga

SEQ ID NO: 6006 - DNA, 266 bp, Oryza sativa
  Clone ID: uC-osflcyp156h03b1
ttcgtgaatggggtggaaagactcccatggatcggagacaatgggctcaagatgctactgatctctttgaaccattccaaaactatgatgaagctggcaatccgcggagaattcaatgcctgaaacatgatggtgttgcaaatatgttgatggaatctgaagtgaatccctttgatgggcaagaggctaagccgtacaaaaatgatccggacatcctggccatgacagacttgattgcagcatatcagatgaatgacatcatggaa

SEQ ID NO: 6007 - DNA, 431 bp, Oryza sativa
  Clone ID: uC-osflcyp156h04b1
cccagtgtttgctgttagcatgcaccaagaccttactgggggtcatcgttgccaaggcgagggcaagctgctccactggcttgcaagactatgcgtgtgcttgatctgctaggggcgtcagcaccatcataccctgtgtaactaccacaggcatcatcttcccttactccaatgctacatattatgaggttatttttacctggaactatttttatacaaggttcaagccaggggctatgcactctgtctgtgataaggtctgcacaaatgcacgctctacatacagaggtgctgggatatatggtctggtctctgtcatcagctgcagatataggtttgtgttttgaaatacctcgactgattgctgagcacgacaccctaatgtagcagactcttacacaggaggaggtgttatgtgaactctacatgac

SEQ ID NO: 6008 - DNA, 456 bp, Oryza sativa
  Clone ID: uC-osflcyp156h05b1
ctgagtttgaccccatctgtgccctccaggcccttatggggggtctccaggtcctcacctcggaggatgtcgtctcggaggctgacatctttgtgaccaccactggcaacaaggacatcataatggttgaccacatgaggaagatgaagaacaatgccatcgtttgcaacattggtcactttgacaatgagattgacatgctcggccttgagacctaccctggtgtcaagcgcataaccatcaagcctgagaccgaccgctgggtcttccctgagaccaacactggcatcattgtgcttgctgagggtcgcctcatgaaccttgggtgcgctactggccaccccagttatgacatgtgctgctcattcactaaccaggtcattgctcagcttgagctgtggaaggagaagagcacatgcaagtacgagaagaaggtgtacgttcttcccaagcacc

SEQ ID NO: 6009 - DNA, 521 bp, Oryza sativa
  Clone ID: uC-osflcyp156h06b1
ccaatttctacctcccaccccccgccgccgacgagccacagacgaagatggcggaggtgaacccgaaggcgtacccgctcgccgactcgcagctggcgcaggcgatccaggagctcgtcagccaggccgccaactacaagcagctcaagaagggcgccaacgaagcgacgaagacgctcaacagagggatcgcggagttcgtggtgatggcggccgacgccgagcccctcgagatccttctccaccttcccctcctcgccgaggacaagaatgtgccatacgtctttgtcccatcaaagcaagctctcggccgtgcatgtggggtgacgaggcccgtgatcgcctgctcggtgaccagcaatgaggccagcaacttgagagatccaatcaataacctcaaggtcgctattgagaagctcctgatctgatcagtgatctgatgaggtgaagttcaaccatggcgttttcggcgtgaagggcctcacatggagccggaggcctggactggtgatggtgtctct

SEQ ID NO: 6010 - DNA, 502 bp, Oryza sativa
  Clone ID: uC-osflcyp156h08b1
atcatatagaaaggcacacaacttttggaagtctatggtattgagatccaaatgtacactgaaacaaagaacaacaaaaaattgaaggaactatatacaaaagctctttccatcaaatcagcgatacctcatccaagaatcatgggtataattcgtgaatgtggtggaaagatgcacatggctgagaggcaatgggcagatgctgcaactgatttctttgaagcattcaaaaactatgatgaagctggcaatccgcggagaattcaatgcctgaaatatcttgttcttgcaaatatgttgatggaatctgaagtgaatccctttgatgggcaagaggctaagccgtacaaaaatgatcctgagatcctcgccatgacaaacttgattgcagcatatcagaagaatgacatcatggaatttgaaaagattctaaagagcaacagaagaaacaatatggacgatcctttcattcgtaattatattgaggacctattgaagaaca

SEQ ID NO: 6011 - DNA, 461 bp, Oryza sativa
  Clone ID: uC-osflcyp156h09b1
tgcattttgtgttgggaggattctgaggatcggattgaccttgttgccctttcagcaaaagaaccaattcttttctatgacgaggttatcctgtatgaagatgagttagccgataatggcatttcattcctcactgtgcgagtgagggtgatgccaactggttggttcctgctcttgcgtttttggcttagggttgatggtgtacttatgagattgagggatacccgggtgtattgctcttttggtagtgacgaagcaaaacccattgtactgcgtgaatgctgctggagggaagcaacatttgctagtctgtctgcgaagggatacccttccgactctgcagcatatggagacccgaatcttattggttataagcttccaagtgtgatgcagaagatccaaaagctgaaattacccaattaacctgacaacccatctcgtgtacatcagcgttttttttt

SEQ ID NO: 6012 - DNA, 527 bp, Oryza sativa
  Clone ID: uC-osflcyp156h10b1
gttctttttgctgctgctgcttcttgttcctactgccgtgaaccatggccgctgagactgttgtcctcaaggtcggtatgtcatgccaaggttgtgctggagccgtaaggagagttctcacaaaaatggaaggcgtggagacctttgacatagacatggagcagcagaaggtgacggtgaagggcaatgtcaagccagaagacgttttccagacggtctcaaagacagggaagaagacctccttctgggaggctgcagaagccgcttcggattctgcagctgcagctgctcctgctcctgctccggcaacagcagaagctgaagctgaagctgaagctgctccacccaccaccaccgcggcagaagcacctgccatcgctgctgctgctgctcctcctgctcctgctgctccagaagcagctccggccaaggctgatgcttgatgatcacacataatgcttgcattgacatctggaaattgaactccaagcgattgatttactctctttgcatttagcctctagtaa

SEQ ID NO: 6013 - DNA, 80 bp, Oryza sativa
  Clone ID: uC-osflcyp156h12b1
cgggggccgccgcgccggaactgccgggacgaaccacgccgccgtatgttatcgcccaccccgacccttctactaagggg

SEQ ID NO: 6014 - DNA, 553 bp, Oryza sativa
  Clone ID: uC-osflcyp157a02b1
cccaacctgacccactccaaccccccctgcgccattgccggccacactcctcttcctcctccatcgccaagaaccaccacgagcaatggcgtcgctgtccatggccacaacgctgccgtcgctggccggcgccgcaccggcggcgaggaagaggagcggcgtgacgtacgtggaggggatgaacgcgtacagtgggctcaaggcgctcaacaaggtgaccctgctcggcgtgcgcaagaccgtcgactactcgatcgccaaggcggaggccaagctgagccccgccggcgggaagagccgcggcggcacgttcgggcgcagagcaacgcccccggtgagatattcaggaacgccgtcatcatgaacggactcgcgctcgtcggcgtcggcgtcggcttcttgctgctccgggtggaggcggtcgccgaggagccggagtagtggaccccgatcgagccatagcaggcagggtccagccagccatggctggttggccccgataagccgtgatatataactgtgatgtatgtttcgattaaaaattgctttcgtt

SEQ ID NO: 6015 - DNA, 504 bp, Oryza sativa
  Clone ID: uC-osflcyp157a04b1
gctggatcacgtgccttgcatggtgatgttgctcaagctcagcgtgaagttattcttgctgggttcaggagtggcaagtttttagttttggttgctacaaacgtggctgcacgagggctggacattaatgatgtgcagcttatcattcagtgtgaacctccacgtgatgttgaagcctacatacaccggtcaggtcggactgggagagcaggcaatactggtgttgctgtcatgctttttgaacccagatataagttcaatgtgaacagaatagaaagggagtctggggtcaaatttgaacatatctctgcaccacagccaactgatgtggcacaatctgctggtactgaagcagcagaagccatttccagtgtttcagacagtgtcattcctgtttttcgggagcaagctgagcaactattgaactcttctcggatgtctgcagttgatctactagccaaagcacttgcgaaggcagttggctacacggacataaagagagat

SEQ ID NO: 6016 - DNA, 449 bp, Oryza sativa
  Clone ID: uC-osflcyp157a05b1
ctttttaatctcgcgaggctctcgtcgtcgaatcgaattctctcgcgtcctaaagatgcagatcttagtgaagacattgaccggcaagactatcaccctccaggggcagtcctatgacaccatcgataatgtcaagggtaagatccaagataaggagggcatccccccggaccagcagcgtgtcatcttcgctggcaagcagctggaggatggcaggacccttgctgactacaacatccagaaggaggcgacccttcaccttgtcctccgcctccgtggtggcatgcagatctttgtcaagactctgaccggcaagactatcacccttgaggtggagtcttctgacaccatcgacaacgtaaaggccaagatccaggacaaagagggcatccccccagaccagcagcgtcttatcttcgtcggcaagcagctggaggatggcaggaccc

SEQ ID NO: 6017 - DNA, 426 bp, Oryza sativa
  Clone ID: uC-osflcyp157a07b1
ttaagctgaaattgcttcctttcttgaaattatgaaaactttttcagcccatcgcttgcttattgtggttgacaactttgaagacaaatctcctcattatcaaaagttaattaaggatctctctcaaaagttttacacgtgttggatgagtaaagaaggcagtgtcacaattgtggagtatgactctcctaacactgaagagaaagagaccaaaagattggtggttatgtttggtgggacaatggcactggatgaatatatccaccaaaaaaatctctgtacagttgttttggtgaagacatctgagattaagctgctaagagatgctggaatcgaagaaataagtgctaagacacttctgagttttcgcaacatcaaagcaaaaccagttgtgccaaagaaacctcgggaggatgaggatctaga

SEQ ID NO: 6018 - DNA, 548 bp, Oryza sativa
  unsure (1)..(548): unsure at all n locations
  Clone ID: uC-osflcyp157a08b1
atttccatcagaagctagtgatgcagattcagtttctgaattttcatcagaatttgaaatatttgcggtgatcatgcatagtggtaagctagaagctggccattatgtgacatatctcaggttaaacaatcactggtacaaatgtgatgatgcctgggtaaccagagttgaagagcatactgtcagaacctctcaggcatacatgctcttctatgtgcagaagacactttactacaaagcttgtgaaagagcaactgctgtctgatttggaacaaatatggctgatattattctgatcagccacaaaatatagtcatcagagagcgcaccatgtaattccatccagagaaaaagtgcctgtcatttggacagccacgaagtcggatgagattcaatttttttgcatgcaataacctttggattcggttgaccgagggtttttggcaattttctcaatagccaccacccaaaggaagaaggtcaattttatttgctcaatttatcttattacctganttatgtgatcaattaagctggaagcattacac

SEQ ID NO: 6019 - DNA, 430 bp, Oryza sativa
  Clone ID: uC-osflcyp157a10b1
ttcgcacccatctagaaacgcgtccacgcagatcggagagaccgaggctgcttcttcctcttcttcttcttcccccagccgcgtcgtcgagaaggttctagagggttcgagagagggtgggagggaccgcgaaagcgacggacgatggcgctgcagtggatgatcctggcgtgcgtggtggcggcggaggcggcggtggccgtgatgctcacgctcccggcgccccgcgccgtgcggaagcagatcgtcgggctcacctcgatgctcctccagccattcgccgggatactccccttcgcggccttccagctcctcgatatctactggaagaacgagcacaggttgatgtgcacctccgagatttgcaccgctgacgagcgtatccgctttgagaaatccatcttcaaggcccagaggaatgtcattcttt

SEQ ID NO: 6020 - DNA, 586 bp, Oryza sativa
  Clone ID: uC-osflcyp157b01b1
cttttcgaattctgctggtctccattgcggctactgttcttggggttgccctctctctctccttcctttggttttgggcggttttcttttgctgaaaaaaactagttcttgattggttcttgtcatctttgggaggacattgctctgggtgtgtgtcaagattgtgctgggagcataaagctgggatctttggccagattgtagagggcttctggttcttgtcactgggggtgctttagagcatttcttggtgtccattactgttctgggtcatagagtttccaatctttggcaattactcggaggaattcttgagctgtgtgctactgtttcctttccctgataaatcaaccaagggaagggaaggctgcatattttccctttcttgatcttgatccttgcaataattttgatcatcttgaagaaaagaagtgtaaagtgtttggctgtgaaatggctgatgtgaagcctgaggacatggtccatcatccacccatggaccagctccagggatttgagtactgcatagactccaatccatccttggggtgaagcaattgctattggctttcagcattacattctt

SEQ ID NO: 6021 - DNA, 518 bp, Oryza sativa
  Clone ID: uC-osflcyp157b02b1
catttatcatactttctgcgggatttgaagagtgcatttcctaaaactttcaagctgtggtatgattcaatcggaggagacgcaatcggtcttacatgggagaactcaaagaagcgtggcagagacgaggccgatgaaaccatgctggatccagcttctatcctaaaggaggttggaaatgttggcaaaggtttggtaaggggcgtgtatctcctcaaagcaccaaagcttcagtaaactattgaaaactcgctgaaagttgtgtggaagagagaggcttgtgctgtttgtgcaattaacacaacttctaaccgatattcttacactggcaagagcaagacggtggtttccatggcactgattggacatggtaagggatcaacatctggcaatgtactgattagaagtaagcaaggaatgttgtgtttagactcaagttgattagggtataaaagtttgtatccaaatcttgattctgaggtacagaaaagtatagcaatgtattttgatccttcctt

SEQ ID NO: 6022 - DNA, 298 bp, Oryza sativa
  Clone ID: uC-osflcyp157b03b1
gatgtatattatcttcgtcctccagcagaaggagcattccaagttcaagagaaagggagatgaccttttctacgagcacaccctgaacttaactgaggccctttgtggcttccagctcgttctcactcacttggacaacaggcagttgcttatcaagtccaagcccggtgaagttgtcaagcctgattcattcaaggctggtaacgtcgagggcatgctcatgtaccagcggccattcatgaaggggaagttctacaattcacttttccgtggaattccccgactttttgaaccctga

SEQ ID NO: 6023 - DNA, 392 bp, Oryza sativa
  Clone ID: uC-osflcyp157b04b1
cgggttttgcggcccgcccaaggtgccacccggaccgaacatcacgaccaactacaacgccccgtggctccccgccagggccacctggtacggccagccctacggctccggctccaccgacaatggtggcgcgtgcgggatcaagaacgtcaacctgcctccctacaacggcatgatctcctgcggcaacgtcccaatcttcaaggacggcaggggatgcggctcatgctacgaggtgaagtgtgagcagtcggaggcgtgcttgaaggagccggtgacggtgttcatcacggacatgaactacgagcccatctcggcgtaccacttcgacttctccggcaaggcgttcggcgccatggcttgcccggggaaggagaccgagcttcgcaagg

SEQ ID NO: 6024 - DNA, 343 bp, Oryza sativa
  Clone ID: uC-osflcyp157b06b1
ctttatatttatactgctcgcaaattgaggatctcatgtttgagctgtctatgtggcgatgcaatgatgagcttcgggcacgagcagatgagctgcatctctcctcaaagaaagatgcaaagcactatatagaattctggaagaaggttccgcccagtgagccataccgagttgttctaggtgatgtgagagacaagctgtacaacacacgtgaacgagcacgccagttattatccagcggatattctgacattcctgaagaaaccactctcaccagtgttgaacagttcttagagcctctggagctatgttacaggtcactctgcgattgcggtgaccgtgt

SEQ ID NO: 6025 - DNA, 409 bp, Oryza sativa
  Clone ID: uC-osflcyp157b07b1
tttatatcctctccttcctcttcctctgctcactcagctctcccccgcgcgcgccaccgtcgtcgccatgtcgggcaacatcgccttcggccgcttcgatgactccttcagcgcggcctccctcaaggcctacgtcgccgagttcatctccaccctcgtcttcgtcttcgccggcgtcggctccgccatcgcctacaccaagttgaccggcggcgcgccgcttgacccggccgggctggtcgccgtggcggtgtgccacgggttcgggctgtacgtggcggtggtcatcggcgccaacatctccggcggccacgttaacccggcctgtaccttcggcctcgccctcgggggccagatcaccatcctcaccggcgtcttctactggatcgcccagctcctcggcgccatc

SEQ ID NO: 6026 - DNA, 570 bp, Oryza sativa
  Clone ID: uC-osflcyp157b08b1
gttttctattaggtaaatgaagatcttttttttttccatctatgtacagttcccttctttgtcttccatgcgaggagcattaccgcatacgggtagtacttcaatgctgccgcgtgctccattcacaggatttgttaattctgatctgataactccacaaattctgccaccaatgacgacgaacaaccgtaatttttttttactttgtttcgccatcttctgaattcaatttaactccatcgtgatttccctctaaaccttattatatcatgtcatgctacaataactattttgcagatcagttcatagtccaacaacatgatgttaaggttacacatcagatgcagaatgccagtttccccatcaaccaaagtcatttgccccaagttggtggaaacccctttttttaacacttttctgatgcctcctgtgtttagctgcgtattttaagcaatcttatgtcaagtgtaagtgttatggaaatagtaaacaatggaagagtgaagcatattgccctgcatttcttataccgaaatggcaagaaatagccaatcgagttcttgtgtgaca

SEQ ID NO: 6027 - DNA, 507 bp, Oryza sativa
  Clone ID: uC-osflcyp157b10b1
tgttgaactgcaatcttgatgttcacaaacagccagagaaggacagttagatcacttgagcgtgatgttggatgcagatttgacttcataagtcctccagcaattgaggatgtgctggagtcctctgctgaacatgtcatagctactttaagaggtgtgcacacggagtcgattcagtacttcattccagcagctgaaagactgcaagaagaattaggacctaatgctcttgcttctgcattggcacatctgagtggattttctcagccaccctcttcacgttctcttatctcatgagcagggatgggtgactttgcaactaactagagatccaggatatggaagggggttcttttctcctagatctgttactggctttctgtctgatggttcttcagctgctgctgatgaagttggcaaaatttccttacagcagatgagaaaggtcaaggtgcagtttttgatttacctgaggagatttgcgggggatttgtttagtatggaact

SEQ ID NO: 6028 - DNA, 392 bp, Oryza sativa
  Clone ID: uC-osflcyp157b11b1
tttatactgaacccaacccaacaaaccaccaccacgctgaccgccctcaccggcgagccagcgagcgacggaaggaggccgcatgcttccacaactacaacctcctcctcctcctcctcccgtctccaatgccctccgcctccactagatggccgccctcttcctcctcctcctcctccacgtatcagacgccgccatcaacccgggcgacctgtccgtgctccacgacctgcgccgctcgctgaccaacgccgacgccgtcctcggctggggcgaccccaacgccgccgacccgtgcgccgcatggccgcacatattctgcgaccgcgccggccgggtcaacaacatcgaccttaagaacgccggcctcgtcgggacgctccccttcacct

SEQ ID NO: 6029 - DNA, 482 bp, Oryza sativa
  Clone ID: uC-osflcyp157c01b1
cttctatacactcccactccagcggcagctgagcagagagctccaccgccgccggccaccatgagttctcaccaccgctacgcccacctcctcgacgaccccttcttccccttaccaccggcggcctcctcctcctgccccttcctctccccacccgccgcttgctccacctgcccattcttcgccctcgactcccccttcgctgctgaccctttccatctccaccccttcctccccacgccgcccactagctccctcctcgaccccttcctcctgcacaccctcaccgaccgcgtttcccaactcgagctcgccctcgacggccgcgccccacactccaggcccaccagcaggaagtgcacctatgtcaccgagtccaccggctcgaaggtcaagtggaccaccgaggacatgcctcgcgccggcgagagggtgctcaagtgggaggctgagctcgactccccctacgacgatggattcga

SEQ ID NO: 6030 - DNA, 529 bp, Oryza sativa
  Clone ID: uC-osflcyp157c03b1
gacatttttagtgttcaatgaaaacaaagtgccaaatttgcaatcgcaccttgagaatatcgttggcgagaattatttcctgaatcagtcagctaaagaggcatacagatcctacatcttggcatacgactcacactccatgaaagacatttttgatgttcataatctcaatctgaaggtacactgcttattgaatttctttctgaaggatttttggttcccctgtgcatgaccaattgttacccattatatgctttgttgtattggacattcaattcacaacaaatgctcttcattttggcatgttccaaatcttttaagtgtcaagtggagtgtctgttgttttttcttcaattttagtagtatttagctctcttgagagaaaatggtatgtgctaggtaagtgatgataatttatcatctttaacttttatataaagtatgtgctaggtaagtgaaggtaatttatcatctttaacttttatataaactaactgaattcttttgcactttttactgagctagatta

SEQ ID NO: 6031 - DNA, 459 bp, Oryza sativa
  unsure (1)..(459): unsure at all n locations
  Clone ID: uC-osflcyp157c04b1
actgtttgacatgcaaaggttcaggggtggtagatggcatgaaatatgtaaatgtgaccattccagcaggtgctgtgcagctaaccttaaattatggttgatagccagctcctttccatgaaacggctacaattgtcaaaatgatttacattttttctattccacttaaaaaaacttcaaataaatttcacaaaaccccaggtttgcgggtatgcataacacgacttttaccagtcattgtagctatattacagacacatgtcaggctaacacatgccaaaacctagctctattactgcgccttatccacatatattgcacatgcattctcgtgaaaaatgtaaaatctaagttagcttgcatatatattgctccatctctttgccgtgacaggttcattcaaggaacatctggcatctggggctgctatgtgncattctagnttctagtttttctttt

SEQ ID NO: 6032 - DNA, 518 bp, Oryza sativa
  Clone ID: uC-osflcyp157c05b1
accagtttacagctaagagcaagtatttggtggaactggaatgcagatgcaatcaaatgaatctctctgttaaaagggcaatggaagaaactgacttgctgcacaaaagttacaatgaagaaatgcgaaatatgcaatctgctgctcgtgaacattcacagaaaatatttgaagagactgatcagctgaggaaacagttggatgataaagagaatgccatcgagaggagatccaagcaactaagcaagtttgttgctcaaactgacatagaaagaagaaaattggagagtgagatgaaaaagaactctgagcaaaacgactccatccacatggctagaatcgagcaacagaagtctgataaaaatgtgctaaagcttgttgagaaacacacgaaagagaaggagattgctctgaacaaaatcctgcagttagaaaagcaattggatgaaaagcaaaagctggaactggaaatacaacaacttagaggaagactgctggtggtccaacacatggaggga

SEQ ID NO: 6033 - DNA, 365 bp, Oryza sativa
  unsure (1)..(365): unsure at all n locations
  Clone ID: uC-osflcyp157c06b1
aatgtttagttattacactttgttgaatgctttgattgaggatggacgagtggaggaagcagaagagctgtatggaaaaatattctcacgatatttggaggctttgcctcatacctttttcatgagaatgatatctttatattacagactagaatcatatcagaagaggtttgaggtaggaatccaaatatattatactttcgttctaatgaacacccttcttatgttaattctggaccatggtttcccttgcatggaggaacagaactgaacttgtgaaaattttctgctaacagcctaacacataagtattgttaagatagtaagttgtaattcntgttaaaattttttttttgttttctact

SEQ ID NO: 6034 - DNA, 540 bp, Oryza sativa
  unsure (1)..(540): unsure at all n locations
  Clone ID: uC-osflcyp157c07b1
ttcctctcgccttctcccgtcttctccttcgagttagctacctccttattcaaccatgggtaaggagaagacgcacatcaacatcgtggtcattggccacgtcgactccggcaagtcgaccaccacgggccatctgatttacaagcttggaggtatcgacaagcgtgtgatcgagaggttcgagaaggaagccgctgagatgaacaagaggtccttcaagtacgcgtgggtgctcgacaagctcaaggccgagcgtgagagaggtatcaccatcgatattgccctgtggaagttcgagaccaccaagtactactgcactgtcatcgatgcccctggtcaccgtgacttcatcaagaacatgatcacgggtacctcccaggctgactgtgccgtgctcatcattgactccaccactggtggttttgaggctggtatctncaaggatggccagacccgtgagcacgctcttcttgctttcactcttggagtgaagcagatgatctgctgctgcaacaagatggatgccaccactcccaagta

SEQ ID NO: 6035 - DNA, 449 bp, Oryza sativa
  Clone ID: uC-osflcyp157c08b1
cgtatgggagtgcctcccggttcaggcccagctcctgctgctgctaatgtaaaccgaggaacagcccctcctaggcctactggggtttcattttccccacttcttaatgtgcaccatgaagacgatgagccagaagacgagttctctgttctttcccgcaggtctgcaagggatggcacagcagcacagggcaatctaccttctgctccaaaaagtgaaaggccttacccaagcccacttcttcctccgccaccatcatcaaagaggccagttttcacggaggcaagcagtgttgactatcttagtggcgactcctacaagacagaaaaagtatcagatgactttattaatccaactgccccagccaatatacctgcgccgtctcattcaaaaacagaaacgaatccgccgccaagttatgatagccggtcagaaagtgtgtctgatga

SEQ ID NO: 6036 - DNA, 495 bp, Oryza sativa
  Clone ID: uC-osflcyp157c09b1
tttacgcgtggggcgccgcgccgcgccaggctccgcaccctcgccttcttcctcctcctcgacgtcgccgtcttcgccctcatcggcgtcaccaccctctacctcgtccccaagccccaccaggtcaagttcctcggcagcgtctgcctcgccttctccatggccgtcttcgtcgcccctctctccatcatcttcaaggtgatcaagaccaagagcgtcgagttcatgccgatcgggctctccgtctgcctcacgctcagcgccgtcgcgtggttctgctacggcctcttcaccaaggacccctacgtcatgtacccgaacgtgggcggcttcttcttcagctgcgtgcagatggggctctacttctggtaccggaagccgaggaacacggccgtgctgccgacgacgtccgactccatgttcccgatctccgccgccgtcgcggccacgcagagggtgatcgagctacccgccggcacgcacgcctttaccatc

SEQ ID NO: 6037 - DNA, 419 bp, Oryza sativa
  Clone ID: uC-osflcyp157c11b1
aattaatggtgctggtatcaactctagttttgctgttcaccaggatgttgatggaagggcaactgatgttgctctaggatggtcagttgcgctgggatctcccttcacatttgctactaccttagaacaggagtacaagagcgatatctttggggagcgaggcattcttcttggagctgttcatggcatcgtggaggctctgtttaggagatacacagagcaaggaatggatgaagaaatggcatacaaaaacaccgtagagggcatcactggaattatctcgaaaactatctcaaagaagggaatgcttgaagtgtacaactccttgacagaggaggggaagaaggaattcaacaaggcctacagtgcatcattctatccttgcatggacatactctatgagtgctacgaagatgttg

SEQ ID NO: 6038 - DNA, 484 bp, Oryza sativa
  unsure (1)..(484): unsure at all n locations
  Clone ID: uC-osflcyp157c12b1
gttatatcaagagccttgttagcaccaaggctagcaatggtgggaatctgatggcaggtgggcgcattgggttcggcgagcactctgacccgcagatccttagcttgctccgagcaaacgatgtggaagggctacaggtgtttgtgccggaccacgagggcaaggagatgtgggttcaggtgccatcggacccatcggccattttcgtcaatgttggtgatgtcctccaggctctgacaaatgggaggctgataagtatccggcacagggtaattgcaaccgcctgcaggccaaggctgtccacaatatacttcgcatcaccacccctgcatgcacgaatctcggcactcccagagacaatcacagccagcagcccacgccgataccgatcattcacctgggctgagtacaagacgacaatgtactcactccgnctgagccacagccgnctagaactcttcaaaattgacgatgatgacagcga

SEQ ID NO: 6039 - DNA, 500 bp, Oryza sativa
  Clone ID: uC-osflcyp157d01b1
ccaagtagacttgttacgcctgttggtgttcgagtggtaggagcccttgggcttttccaggttcagatcgacgcctccttcctctggacattgttgctagttggtgatggctgagcaggctaatcaaccgactgtccttcagaagttcggtggccagttccaccttggctccagcttttctgaaggtgtacgggctcgcaacatctgcccatctgtctcatcctatgacaggcgctttaccacaaggagctacatgacccagggccttgtcaatggtggcatcaacgtcccaatgatgtcgtcctctccaatttttgctaatgctccagctgagaaaggtggcaaaaacttcatgattgatttcctcatgggtggagtgtcagccgcagtttcaaagactgctgctgctccgattgagcgtgtgaagctgcttatccagaaccaggatgaaatgatcaaggctggtaggctctcagagccatacaagggtattggggact

SEQ ID NO: 6040 - DNA, 518 bp, Oryza sativa
  Clone ID: uC-osflcyp157d02b1
cgatgagccggtagctacagagaacagtgacgctgctcctgctgaggcatctgtagatgctgtgaacggcaagattcctcctaccaagttgattccccaacatcctctggaaggtgttacattgacagaaagaactgtacgtattactgggaataagaagcagatagaagcggcaaaagatattattaagcaagctatgagtcaggttttggtagaagcaaatggtgtaacacggacattggttttgaataggccaaagcagttgaatgccctctcctctgcaatgataacgtgttttttgaggtgcttcactgcttatgaggaagatgatggagttaaactattgattgtgaagggaaaaggaagagcattttgtgcaggtggagatgttgctgcagttgtccggtctataaataatgatagctggaaatatggtgctcattttttccgaaatgaatttctgttaaactatatcattgcaacatatagcaaacctcaggtttcgcttctaactggaa

SEQ ID NO: 6041 - DNA, 533 bp, Oryza sativa
  Clone ID: uC-osflcyp157d04b1
gaccatgaagacatagatcgtgctattgcattatctttatcagaagaagatcagcggaaggggaaggctgttgatgaggtagatattgatcatcgtttacatgaagatgaacaacttgcacgggctctacaagagagtctgaatgatgaacctcctcgtcagaatgttccagtaaaagatgttcactcggagagtactccagcaactttcatgcccccatatatattcccttcaactggattaagggtttgtgctggatgtaaaactccaatcggtcaaggacggtttcttagttgcatggattctgtttggcacccccagtgcttcaggtgttttgcttgtgataggccaatatcagaatatgagtttgcagttcatgaaggtaacccataccatcgatcctgctataaggagcttttccatccaaaatgtgatgtctgcaagaactttattccaacaaacaaagatggccacattgaatatcgggcccatcctttctggatgcagaagtattgtcctgccccatgaactga

SEQ ID NO: 6042 - DNA, 484 bp, Oryza sativa
  Clone ID: uC-osflcyp157d05b1
aaggtatccaaacctctgaggactacaggttctacgctatttcagcggagtacccagaattcagcaacaaggataaaaccctggtgctgcagttctctgtaaagcatgagcaaaagcttgactgtggtggtggatatgtcaagttgcttggtggtgatgttgaccagaagaaatttggtggggacacaccgtacagcattatgtttggaccagacatctgtgggtacagcaccaagaaggtccatactatctttactaagaatgacaagaaccatttgatcaagaaggatgtcccctgcgagactgatcagctgtcccatgtgtacactttgatcatccatcctgatgctacatacaccatacttattgacaatgttgagaagcaatctggcagcatctacgagcactgggatattctgcctgcgaagcaaatcaaggacccagaagctaagaagccagaggactgtgatgacaaggagtacat

SEQ ID NO: 6043 - DNA, 221 bp, Oryza sativa
  Clone ID: uC-osflcyp157d06b1
atattaatccaaaaagagcagggtagacagtgagtgttcttgtatgttacttagacgcagttgcgatcactcttaggaaccttctgtgctagttttagttacaatacttgacaacacctccaggctaccacattctgagcaggattactcatggaggattttatttcatgaaactattacggctcctctttatcaagtttgaccaggaactattaactgtt

SEQ ID NO: 6044 - DNA, 425 bp, Oryza sativa
  Clone ID: uC-osflcyp157d07b1
gtcatcatcatgttctcctccaccggcaagtaccacgagttctgcagcccttccaccgacatcaaggggatctttgaccgctaccagcaagccatcggcaccagcctttggatcgagcagtatgagaatatgcagcgcacgctgagccatctcaaggacatcaaccgcaacctgcgcaccgagatcaggcaaaggatgggagaagatctggacgggctggagttcgacgagctgcgcggtcttgagcaaaatgtcgatgccgccctcaaggaggttcgccacaggaagtatcatgtgatcagcacacagactgaaacctacaagaaaaaggtgaagcactcctacgaggcgtacaagactctgcagcaggagctggggttgcgcgaggagccggcgtggttcgtggacaacaccggcggagggtg

SEQ ID NO: 6045 - DNA, 520 bp, Oryza sativa
  unsure (1)..(520): unsure at all n locations
  Clone ID: uC-osflcyp157d09b1
gtttcgtttccccagagaaaccctaatcctccccgtcctctctcctctcgcatcgaagccgccacggcggcgatgacgcctcccttccgcccgtcgccctccgccggctccatccctcgtggctgcggcggcgaccggtgcgcatccggccgcgacgcctggcccctccaccacgtccgccacgacggcgtcttctgccgcctctgctcctcctgtgtcctgctctatcaccccgccgccttctgctccgcctgcctcctcctcttccctcccgcctccgcctccgcctccgcctccgccgccaccgccgtccaggagccccgcctcgatcccatcctctccccgccgggacctaccgccgcttgctccagctgcggcctcttcgtcgcgcaccactcctgtgtcccagactctgcctccttcgtctgcccctcgtgcgccgncgccgccgagggcaagcccttctcctacacgccccggggggggcggccggcgcgcgctggacgagcgcgccccgcga

SEQ ID NO: 6046 - DNA, 551 bp, Oryza sativa
  unsure (1)..(551): unsure at all n locations
  Clone ID: uC-osflcyp157d10b1
agtcaatcaggtggaacgacgctcctcctgcaggattcaaccaaagcaacccacaagaaaagacacttaaagacattcttgaccttaatcctcataaacataaggaagcacgcttcatagtaaatgtggttgttaaaagaatatgcaacgaaaactcctagtggtacaattcatgtcacctatgctacaaaacctcaaaaccatatggctcagcctacaagtgcaccagttgttcctatataggaataccagatcaaagatgcaacatttattctttttggaaaaactgcgcaacgcatcatacgaaggccagtggaatctctgatcgaagaaaatccaccggacagtgaattcattccaagggaaatcttagcacttgttgacaatggttttctatggaatgtcagcttcacaaaggatattaacagaagcgaagaaactctccaggttaatagtgttatatcctctggtccagcanatcaaccaccgctgcttatgtcgccagtactttacagccagcatcagcaatggtatcggcaagctcaagcagt

SEQ ID NO: 6047 - DNA, 458 bp, Oryza sativa
  Clone ID: uC-osflcyp157d12b1
ttttatattccgccaccgagccttacatcgcagcccataaccttctcctttcacatgccgctgctgtcaggacatatcgtgacaagtaccaggctattcagaaggggaagattggcatccttctcgattttgtatggtatgagccactcaccgacaaagaagaggatcacgcagctgcacatagagccagggagtttacccttggctggtacctgcacccgattacatatggtcattacccagaaactatgcagaatgctgttaaggaaaggctgcccaatttcacacgtgagcagtctgagatgataaaaggatcagcggattatattgcgatcaaccattacacaacttattatgtcagtcaccacgttaacaagacattcatcagctatcttaatgattgggatgtgaaaatttcatatgagcgtaacggtgtgccaattgggaaacaggcgtac

SEQ ID NO: 6048 - DNA, 497 bp, Oryza sativa
  Clone ID: uC-osflcyp157e01b1
ccccccctgaccgcccgcctactgctcgtccacccacccggttctttcttaagccccgcggattcggcaccacgggagggtaggaggtctcggatgataggaccgccattctgcagacgaatacgcattcctttcttctatattttgcttctagtcagagcgcaaacttttacggcacatacagacatattctatagtcgatggcaacatatcgagagcgcataacagattggagattttagagaaacaccttaaggcaactggtggaaaagtgatgacctcgtataccaccagaacctaatggatatcttcatattggacatgccaaggctatgtttattgattttggactggcgaaagagagaaatggtcattgttaccttagggttgatgacacacatccagaagcctcaaagaaagagtgtattgatcacattttggaaaatttcactggatgggatgggagccctactaaagttcctatacaagtgattatt

SEQ ID NO: 6049 - DNA, 184 bp, Oryza sativa
  Clone ID: uC-osflcyp157e02b1
cttaataggaatttgagcagaaaattgttccagtggcatcacagtaccctggaattcagaaggttactaaggttagaggggcgcgtatgggtaaaaaggttgttgagattgaaggggctgatgatgtgcgctttagccccagtggaactgatagtggtcgaagtgattgtgatggtgatggtga

SEQ ID NO: 6050 - DNA, 409 bp, Oryza sativa
  Clone ID: uC-osflcyp157e04b1
ccagtttaagaagctcatctcctcctcctctcgcatggcagccatggccaccaccgcgtccagcctcctcaagacctccttcgctggcgcgcgcctccccgccgccgtccgcaaccccaccgactccgtcgcgctgagcaccggcggcgccatctgcaactccatctcgacggcgtcggccactaccccctacgacctcaacgccatcaggttcagccccatcaaggagtccatcgtgtcccgcgagatgacccggcggtacatgaccgacatgatcacctacgccgacaccgacgtcgtcgtcgtcggcgccggctccgcggggctctcctgcgcgtacgagctctccaaggacccctccgtcagcgtcgccgtcatcgagcagtcggtgtcccccggcggcggcgcg

SEQ ID NO: 6051 - DNA, 480 bp, Oryza sativa
  Clone ID: uC-osflcyp157e05b1
cagtttgctagctaactaactacgtggctatggcccccaccgtgatggcctcctcggccacctccgtggctccattccaagggctcaagtccaccgccggcctccccgtcagccgccgctccaccaactcgggcttcggcaacgtcagcaatggcggaaggatcaagtgcatgcaggtgtggccaattgagggcatcaagaagttcgagaccctatcgtacctgccaccactcaccgtggaggatcttttgaagcagatcgagtacctgcttcgatccaagtgggtgccttgtctcgagttcagcaaggttgggttcgtctaccgtgagaaccacaggtctcccggatactacgatggcaggtattggaccatgtggaagctgcccatgttcggctgcaccgatgccacccaggtgctcaaggagctcgaggaggccaagaaggcctaccccgatgcctttgtccgtatcatcggcttcg

SEQ ID NO: 6052 - DNA, 486 bp, Oryza sativa
  Clone ID: uC-osflcyp157e07b1
tgttccacgaagcagctggaccctgcgcttgatgctctccgatggatcactgatttcctcgtcaatgcgcatccatctgacaatgtgttctacattcaggttggtgatcctgatctagatcacaactgctgggaaaggccggagactatgtctgagaaaagaccactcacacagattaacacaaagtctcctggatcagatgttgctgctgaggcagcagcagctatggcatcagcatcaattgttttcaaatccagagacactacatattctgattcacttcttcaacatgctcagaagttgtttacttttgctgatacttataaaggcctcgccagtgacacctatccaaagctccaaaactactataattctactggttatcaagacgaactcctgtgggcagcgagttggctctatcatgctacaggagaccaaacatacctcagttatgtgactgtagagaatggaaaagcttttgctgat

SEQ ID NO: 6053 - DNA, 531 bp, Oryza sativa
  Clone ID: uC-osflcyp157e10b1
tttttcccacgccgtctcgccgcaatcgctcgctcggtcgcctcctcttccgccgcgagacacgaagagcagcagctcacaggtaggcctgcgcgtcggcggccatgggagacagccagtactccttctccctcaccaccttcagcccgtcggggaagctggtgcagatcgagcacgcgctcaccgcggtcggatccggccagacgtccctcgggatcaaagctgctaatggtgtagttatcgccactgagaagaaattgccttctattttagtcgatgaaacatctgtgcaaaagattcagtcattgactccgaacattggagttgtctacagtgggatgggtcccgatttccgtgttcttgtgagaaaaagtcggaaacaagcacagcagtattatcggttgtacaaggaaactatccctgttactcagcttgtccgagaaactgctgctgttatgcacggagtcacacagtctggtggggtaagaccatttggagtatcattattgattgccggtacgatgacaatgg

SEQ ID NO: 6054 - DNA, 564 bp, Oryza sativa
  Clone ID: uC-osflcyp157e12b1
gtatgtgtcagcttattagctgcttcaataatccaaagtttttgtagcatgaatccaaagtgcttgtgattggtttcttttaatcctgggagagattaacgcatggtttgctactttgcaaaaggttcctttctagatacagaatttctcgaacagttcctcatcacctgacatctatttgtgtttttttttaaagccctcgtatttgaactgtagcttagtcttgttgagctaaagatgagaacattttttttaaaaaaaagaacaattttgacacaaactagggagttctttttcttgatatggacttacaaaagttcatgacaattttttatatatgtcatgtgcatggtgtgtatagtgatatgcatttatgtctctttttgcatagtacagtacttgcataatttcagtttgaaaaaaagtatagcaacattaaacacaacaataatttacaaaaaggaaaaatgtaaacacgatatatagttgtgtatagctcctacttttctacaaagagcacaatcttgtcaagatattatgatacaacatttggtataaaaggat

SEQ ID NO: 6055 - DNA, 493 bp, Oryza sativa
  Clone ID: uC-osflcyp157f02b1
ctctttttcgcctcctccacacacgagcgcgtcccccgacgccgcgccgagatctagggttgggcgcgcgcgacgccccccccccgcggtgaggaggatgagcagcccccatggcggcctcgacgaccagatcgagcgcctcatgcagagcaagcccctccccgagcccgaggtcagagcactttgcgagaaggcaaaagagatattgatggaggagagcaacgttcaacctgtaaagagtcctgttacaatatgtggtgatattcatgggcagtttcatgaccttgcagaactggtccgaatcggtggaaagtgcccagatacaaactacttgtttatgggagattacgtggatcgtggttattattctgttgaaactgtcacgcttttggtggctttaaaggttcgttatccctaagcgattactattcttagaggaaaccacgaaagtcgacagatcactcaagtttatggattctatgaccagtgctta

SEQ ID NO: 6056 - DNA, 183 bp, Oryza sativa
  Clone ID: uC-osflcyp157f04b1
catctttgtctcgcctccaccggccgtgatctcgccgccggcgccgtcccgccgcccctgaggcctactagtagcgacctacaagtaccttgttttgtaccatcctaggagcgaatcctccccctgcggcagcggtagcagatcgcgatggccgcctcggcgccttctccggccgagccgccg

SEQ ID NO: 6057 - DNA, 492 bp, Oryza sativa
  unsure (1)..(492): unsure at all n locations
  Clone ID: uC-osflcyp157f05b1
cttctttaagattccacggatattttctctccccctgctcccgtcgccatcgcaaaggagaaaaaaaaaagaggaggaaggaaggaaggatgagcgccacggcggtgtcgtcgctgaacccggacgcgccgctcttcatcccggcggcgttccggcaggtggaggacttctcgccgcagtggtgggacctcgtcaagaccaccgcctggttccgcgaccactggttccacgagcaccagcagctcgacgagatggccgactccctcgccctccacgacgccgtcgccgacgacgacgaccttgccggcctcctccccgacgacgccttcgacgacgacgacgacgacgacctcttctttcgaccagacccataacctncttgtcgatcccccgcaagccgccgccgctctcaagactgatgcggtgctcaaggcgctgagccttgtgtctcccaagggcggcgaccccccgcgggggctccgggagaagccc

SEQ ID NO: 6058 - DNA, 343 bp, Oryza sativa
  Clone ID: uC-osflcyp157f06b1
attgtttagcgtcgcctctcctcctcctccctaaccgctacgcttccagaaccttctcgaagctcccgctccccccccctttcgctccaatggcgaaggaaccgatgcgcgtgctcgacaccggcgccgcaggacaaattggatatgctcttgtccccatgattgctaggggtgtgatgttgggtgctgaccagcctgctattctacacatgcttgacattccaccagctactgaatctcttaatggccttaagatggagctggttgatgctgcatttccctttttgaagggaattgtccgcacacctgatgttgtggaggcctgcactggggtgaatgctgc

SEQ ID NO: 6059 - DNA, 65 bp, Oryza sativa
  Clone ID: uC-osflcyp157f07b1
tctgctgcggcgggcggcgcaaatgggtggcgacggagctgataggtggcaggcggcggttggag

SEQ ID NO: 6060 - DNA, 453 bp, Oryza sativa
  Clone ID: uC-osflcyp157f09b1
gttataaggaaaaagcagcaaaagttgaggagaaaaaagctgcagtagtcactgctgcaccgccatctgaggaggaattgaatccatactctatatttcctcagccagaggaaaattttaaggttcatacagaaatattctatagtgatgggaacatatggagagcgcataacagtaaggagattttagagaaacaccttaaggcaactggtggaaaagtgatgacccgtttcccaccagaacctaatggatatcttcatattggtcatgccaaggctatgtttattgattttggactggcgaaagagagaaatggtcattgttaccttaggtttgatgacacaaatccagaagccgaaaagaaagagtatattgatcacattcaggaaatcgtacactggatgggatgggagccctacaaagttacatatacaagtgattatttccaggctt

SEQ ID NO: 6061 - DNA, 486 bp, Oryza sativa
  Clone ID: uC-osflcyp157f10b1
cgtacgcgtgggaaaaatcgcctcagattttctggttcgaaatcctctaccccctcccatggcgtccctcttcagggctcgccgccggcgatcgccggaggacgacggcgagggggaggacggatccgcgtccgggcgggtcacccgccgccgcctgtcgccggaggagggcgcgctgtcgctggccgaggcgtcggcgtcggtggccgcggcgggggcgggggcggagagtagccccgggtggctctccagcatcgtgtccggagcgaggagggtgatctcctcggtgttgttctcctctcccgaggaggccgcctcaggggaggaggaggaggacgatcacgaggaagatgaaacagaagacaatcttggagcaatcagttcatacaatgagtcaaagtttgccattgaggcataggttatgacacgagacattctcaacggctgaatgtgataaaatggtaacgtttatacagccctgagttt

SEQ ID NO: 6062 - DNA, 436 bp, Oryza sativa
  Clone ID: uC-osflcyp157f11b1
ttttatcgagagagtgtctcaagtgatgagccttctgataattcgaaaaggagaaaacttcattcatgtaaaagcagcatgtccccctcacccccaaaatctaggaacaggtaactatatgtttacagcatatttataatgtagattaatgctgttaaaaatgtgcgaattagcagttagcttcaacatgtttgtagatggtattgttttatggctggcatcattagttaatcctaaaagttgtttttatgtttggcatcaataatgtggctgacatacttactctgttctggttatctggaagccacaaattgcttagcatttgatgttttttaaatcatgaatacggctagtcatgccatggtttttctatgatttccatcctttctccccatgcgaggataagagatttttgtttttgtgtgtgtgttggggt

SEQ ID NO: 6063 - DNA, 464 bp, Oryza sativa
  Clone ID: uC-osflcyp157f12b1
attgtccctccggccaatttcccggccggccggaacggcggaacctcgtccatgatcacttgaaacacctcccttgctcttcatggccatggagacgacgagccaagattcgcaggtgatcatgggccggtacaagctcggccggctcctcggccgtggcacgttcgccaaggtctacaaggcctataagttggccaccggcgaggccgtcgccatcaaggtgttcgacaaggaggcggtgcagcggtccggcacggtggagcaggtgaagcgcgaggtggacgtcatgcggcgtgtgcaccaccgccacgtcatccgcctccacgaggtgatggctacgcggtccaggatctacttcgtcatggagtacgcgagcggcggcgagctctttacccgcctcttccggagcccgcggttccccgagcccgtcgcgcgccgttactttcagcagctgaacaccgccg

SEQ ID NO: 6064 - DNA, 322 bp, Oryza sativa
  Clone ID: uC-osflcyp157g03b1
cgggccgggactgaatggctggaccgacgcacgcgcgcgcttgtaccatgcggacgactgcgacggccgagcggcggcgtcgagaacacccggcgcttgatataggtgcaagaggcctacgagacgctcttcgaccccaggcgacgggccatctaccaacgcgccctcgcgcgcggcgtttgacggcttgacttctactacttccggcgcgtggtcctctactactaccaggatcaggaagacaagtctggctggcggagaacttgcggagaccaaatggaggagttgaagaagaggagcatgcctaacgatttagaggaga

SEQ ID NO: 6065 - DNA, 411 bp, Oryza sativa
  Clone ID: uC-osflcyp157g05b1
atctgttgctccattggtggtgttggtgcatcttgagctgggattctggggagaggttgagtgaatctttgggcctccatggggacggcggcggtggcggcggcggagaggccgaagcagcggcggagcagccacctgtggaagaaggcgctgctccacttctccctctgcttcgtcatgggcttcttcaccggcttcgcgccctcgtcgtcgtcgtcgtggcgggccgggagcggtggcggtggcggtgtccagccgcgccaccagctcgcggcgtcccacgtcgcggtgaaccagcaggtgagcctggtgccggatgcggcggcggcggaggcggccggggtcgggaacggcgcggtggtggacgtgggcgacgaccaggggggcgagggggccaggcggatgctgata

SEQ ID NO: 6066 - DNA, 521 bp, Oryza sativa
  unsure (1)..(521): unsure at all n locations
  Clone ID: uC-osflcyp157g06b1
gattgaacaagggccgccaagttgcagttagctagctgttgcgctcgctttcccccaaacgtgacccggccgggagggagaagtcgccatgaagcagcctcccgctgctgctttctctctctcgcctcgttaaaatctctcttccaccccgaaccccatccagttcagttccctctcgatcgcttcccgtgctctcgctctctcgcttgctagatcagagattcccctctgcggcggttgtgaggtttccgcttcggctcgctagctagctctgctgtttctgtgagagccgggagcaccaaccgcgcgtggggtgggtgcccggaggtttgatgcgcgtggccgccggtttctccccgtcgtttgatgggcaacgcatgcggcggttcccttagatccaagtacctgagcttcaagcagaccgcgtcgcagcgccacgacaccgacgacaacaacaacgccgncgtggtcgactcgccgagaagccctcccgcctccagcagccgccagacggacgacca

SEQ ID NO: 6067 - DNA, 578 bp, Oryza sativa
  unsure (1)..(578): unsure at all n locations
  Clone ID: uC-osflcyp157g10b1
tgttcctgataccgttacgggagacattgtattcgtcctccagcagaaggaccactccaagttcaaaaggaagggcgatgatctcttttatgagcacaccttatctctgactgaagcactttgtggtttccaatttgtcctgacacatctggacaacagacagctgctcattaagtcaaaccccggtgaagttgttaagcctgaccaattcaaggcaataaacgatgagggaatgccaatgtaccagaggcctttcatgaaggggaagctctacattcatttcacggtggagttccctgattccctggcgcctgaacaatgcaaggctctcgaggctgtgcttccaccgaagcctgcatcccagctgacagaaatggagatagatgaatgcgaggagaccacgatgcacgatgtcaacaacattgaggaagagatgcgcaggaaagcccaagctgctcaggaggcgtatgatgaggacgatgagatgcctggaggtgcccagagagttcagtgcgcgcaacagtaagcagagtatgtcatctaggaaactcgtcattggttcacanatcaacgtcgtc

SEQ ID NO: 6068 - DNA, 480 bp, Oryza sativa
  unsure (1)..(480): unsure at all n locations
  Clone ID: uC-osflcyp157h01b1
cttaccacgtaccaacaatggccaccatggctccaaggctgctcatcgtcgtcgtctccgtcctcttcaccgccggcataatcgcctccgccgccgccgcgcgcgacctcaccgccgacccggccggccaggccccgccggcctacgacttcggcatcccggcaggcttcttcgtccccggcaccaacaacccgtacaacggcgatcctgcagcgtgggcagctgggtacggcagcgccgccgccggcgacgtcggcgggttcgggaatggtggggcggaggcgccgtcgatggtttgctccgacaaggggccatgcaacggcaagaagctgacctgcccgaagaagtgcttcgtctncttcagccgctccggcaatggctacgccgnctgcggtggcggcggcggctgctccttcgactgctcgaccaagtgcgaagctacctgctgatcattntactacttcatttcctcacccatcg

SEQ ID NO: 6069 - DNA, 454 bp, Oryza sativa
  Clone ID: uC-osflcyp157h03b1
atatattttagggaagtaagagatctgaacaactggtggagcaagaaaagagtgatgttataagtccagtcgatgccatccgtcctgctgatgttgaggagctccgtgagcaggataacgagtcaaagcctgccccagagggggagaattcaaaacccgacaggcaagtctccccagacaagctcttaagagcagccctccttaggagtcgttatgctgatgtgattgttaaggcacaggggattctcagccagggtggagacaaacaggaggagctggaaaagcttcagaaggaagagaaagcaaggctgttggctgaaggaaatgcagctatggaagctcgaagagctgaagctgaagctgaagccaagcgtaaacgggaccttgagagggagaaagctcgccaggccctgcatgagattgagagaactggtggaatcaatgacaaccttca

SEQ ID NO: 6070 - DNA, 426 bp, Oryza sativa
  unsure (1)..(426): unsure at all n locations
  Clone ID: uC-osflcyp157h05b1
gcttgttcttggattttggaaagaacaggtggtttgttattcagatttttaggttagaaaaaatccacaaaaaaaaagatattcgatggcagctgctatagaaggaaatctgatgcgggcgctgggagaggctccgtcgccgcagatgcagaagatcgcgccgccgccgtttcatcccggcttgccgccggcgccggcgaacttctcctcggccggagtccacgggttccactacatgggcccggcccagctcagcccggcccagatccagcgcgtccaggcccaactccacatgcagcggcaggcccagtcggggctcggcccgcgggcccagcccatgaagcccgcttcggcggctgctccggnggcggcggccgcgcgggcgcagaagctgtaccgcggcgtgcggcagcggcactggggcaa

SEQ ID NO: 6071 - DNA, 260 bp, Oryza sativa
  Clone ID: uC-osflcyp157h06b1
ggatactctagcaaatcggaccgaacccgtggctggggacctatatctccaggttcgagacgacgcacacaacgacggagattccgtggaacacgatccaagcagacatggggaacccgcgctgagaaagagggccgccccggggagccagaacatcgctgcaaggcctgtccaccgccacctgggaggcgccgacgccaatttgtgttgtgcagaaggcggacctggctagctatgaggatcatgaagcactgagagga

SEQ ID NO: 6072 - DNA, 424 bp, Oryza sativa
  Clone ID: uC-osflcyp157h07b1
attctctcatctctgtcattctgcagctagctgaaaaaatcttcagagaatcatcagttcatcacaaaagactatcaagcgaggcaagtacgtgacggtgactgtgatgagcggcggcggcggcggcgggagggggatgacgagggggctggacctgaagctgaacctgtcgctgccggcggtggcgcgcgcggtgtcgccggcggcggacgacgagtcgtcgccgagctcgtgcctgtcgtcggagagcgagctgcggcagcagcacggcggcggcggcgggcagctgcagtggtcggacagcccggaggcgacgtcgatggtgctcgccgcgtgcccgcgctgcttcctctacgtcatgctcgccgaggccgacccgcgctgccccaagtgccggagccccgtcatcctcgacttcctccac

SEQ ID NO: 6073 - DNA, 218 bp, Oryza sativa
  Clone ID: uC-osflcyp157h09b1
ttttttcttgatggagaactaggacgatgcttgcaccttacatggagaacactgagaatttcacaagtggcctccaaatggcgcatgatggataagtcgtagtcgtctcttatgaggaatccatacaaccaagattttgggttcagaactaaatattatgattttgttagtactcagagctgatgttggaaacaagtggtgtcgggtttcttttgaag

SEQ ID NO: 6074 - DNA, 494 bp, Oryza sativa
  unsure (1)..(494): unsure at all n locations
  Clone ID: uC-osflcyp157h11b1
tgtatgtcgcgatctccggagagaggagagaaaaattcggaacggcccccccgacacacgcgaaaccgccgcaccccgcgcgagtcaatcctccgtgtggccgagtcctcttccacccctcccctcgcgttaacaccaccgcgcgcacgcgctgctcctgctccccccacaacgcgacgcgcctaagcaaacctcatcttcttcttcttcctcgcttccttcctccacctccacgcggcgaatccaccaggtgtgccatgggtggctcgttctccaccagccggcgccgccgcgacgagtactacgcggtccggccctcgtcgccgccgcaccactactacacctacccaccgccccctcctccgacgncgtaccaccaccaccacccgtcgtcaccgcctatcccgtcgcaccaccaccaccagcacccttaccggtcttcgccgtcgtcgcaccacgccacctcgtcctccttgtactactaccacccaccc

SEQ ID NO: 6075 - DNA, 513 bp, Oryza sativa
  unsure (1)..(513): unsure at all n locations
  Clone ID: uC-osflcyp157h12b1
ttttgacctgcggcggcgacgcctacgaccgtcgagctctggtacccatggaccgccgacgcttccattggaagggcatgagccatcagtgctaagctccaatgctgattacgaagaatcccatgcttgggatgaccgccacagcggctgcgaaggagccacttcccgagcagtcgtgccatgatcgataagagtgatcgatggatgcgagcgtatggtgtccattgtgcagtcgtgcaggctttccctataaattaattgacaggaggaagaaatcacaggtggtttaccaatttcaatgacattttatagttcatcaaagaattgaacttctatatggtagccgggcaaatagcagggatgtttctttctctacacctgtatcttggctgatcatttagtttctttctatatatatatgctggtaaatgctctatgaagcataatagttcttatggcttctggattacacttagctgattntatcttgcaaaattcaacactttttttttt

SEQ ID NO: 6076 - DNA, 389 bp, Oryza sativa
  Clone ID: uC-osflcyp158a01b1
gccaaatggaaggtgtgtcaaatgaggcatcctcccttgctggtcactggggtctcgggaaactaattgccttctacgatgacaatcatatatcaattgatggtagcacaggcattgctttcactgaagatgcacttgcccgatatgaggcactaggttggcatactatctgggtgaaaaatggtaacacagggtatgatgacatccgtgctgcaattaaggaagcaaaggcagtcaaagacaagccaactgttatcaaggtgactactactattgggtatggatccccaaacaaagcaaacacttatagtgttcatggtagcgctctaggtaccaaagaagtagaggcaaccaaaaacaatctttcttggcatcatgaacctttccat

SEQ ID NO: 6077 - DNA, 399 bp, Oryza sativa
  unsure (1)..(399): unsure at all n locations
  Clone ID: uC-osflcyp158a02b1
gcggagtcagctgcttgatggacgacgaggccacgctcgtcggcggcaagaaccacaggcacgccacccaggacctgtacgactgcatcgccggcggcaacttccccgagtggaagctgctcgtccaggcgatcgacccggaggaggaggagaggatcgacttagacccgctggatgacaccaagacatggacggaggacgaggtgccgatccggcccgaggggcgcctcgttctgagccgcagcgtatacaacttcttcaacgagaacgagcagctggcgttcgggccggggctggcggtgccggggatctactactccgacgacacgatgctgcagtgcanggggttcgcgtacgccgacacgcagtgctacaggctggggccaaactacctgatgc

SEQ ID NO: 6078 - DNA, 293 bp, Oryza sativa
  Clone ID: uC-osflcyp158a03b1
cgtgtgaggtcacgtgggtttggcttcgtcaccttctcctccgagcagtcgatgcgcgacgccatcgagggcatgaacggcaaggagctcgacggccgcaacatcaccgtcaatgaggcccagtcccgccgctccggcggcggaggcgggggctacggcggcggcggtggcggctacggcggcggtcgtggaggcggcggctacggaggaggtggcggcggctgctacgggcgccgtgagggcggctacagtggcggcggcggctacggcggcggccgtggcggcggcagcgg

SEQ ID NO: 6079 - DNA, 379 bp, Oryza sativa
  unsure (1)..(379): unsure at all n locations
  Clone ID: uC-osflcyp158a04b1
ggctaatttaattagcaccagaaatatggcttcttccaagatgacgctgatccccgtcctcctcctcctcgccgcggcctcgccggcggcgctgggcgccttcgacgtgaaccagatgctcgccgacaagtcccagtacgggtcgttcctgaagttgctgacgcagacgaaggtcgcggaggagacgaaccggctcaagtcggcgtcgctgctggtcctccaagacaaggccatgaagccgatcacgtcgctccccgccgacaagcagcggatggccatggccaaccacgtcctcctcaagtacttcgaccccatccagctgggcgagatgaaggaccgcaccgncatgctccccacgctgctgtccaacaccgacaag

SEQ ID NO: 6080 - DNA, 319 bp, Oryza sativa
  unsure (1)..(319): unsure at all n locations
  Clone ID: uC-osflcyp158a05b1
ggggttcatcaaggagagcccttttggatttaatcaaaaaaattttttctcttcatctgtccctgtaaactctctttgggatttagtagctaattgaattagtaggtgggaagggggggttgggattagntngggctctgtccctcgttggctgtggcgagcggatcatgcttatatttggcttttgcggctgcatgtgactcggcatgccaccaagaaatgcaaaggccccggtcgatgtggccaaaagagtggctacaagaagagagtaagagagcagtttaactttacgcccatcagtgtgagggagacatgaatg

SEQ ID NO: 6081 - DNA, 284 bp, Oryza sativa
  Clone ID: uC-osflcyp158a06b1
gctctctctctgatctcgtcgttctcgatggactggaaacccgaacacgttacagctacaggtggcggcggcgtcgccgcgctcccgtgacaacaacaacaacgacggcggcagggcggtccacgccgacccgaggggcgtgaccccggtgaagaagcacgagctcttcttgcgccgctacgacgagtgggtgaattaccacttccagacctaccaagggttgcatgcaattggagcaagagtcgagctagacgttctcaaggacctgattatcaatggcggac

SEQ ID NO: 6082 - DNA, 392 bp, Oryza sativa
  Clone ID: uC-osflcyp158a07b1
gcatgtacgccgtgggaaaggtgcggatgtgcgcgtcggagttccatctcggcgaccagaacgtgaccgccgcgcagggccgagccgaggtcggagggttcgtgctctggcagaagtgccccgaggtctggtacttcgagctcatcatggccggccacaagatgagcgccggcagcgacggcaaggtcgcctggcgccagtccgccgccgagaactcccacgcctcccgcggacctccccgccccctccgccgctccctccaggggctggacccgaggtcgatcgcgaacctgttctccgacgcggtgtgcatcggcgagaagatcataccgggagggagtgcttcatcctgaagctggaggcgagcgcggcgaagctgcgcgcccggagcg

SEQ ID NO: 6083 - DNA, 460 bp, Oryza sativa
  Clone ID: uC-osflcyp158a08b1
gcaatgacttgcgcgatggcgcccgagtgccctcgatcgagtcgctcaaggctatgaatcccaccgagtcatccgtggaggtggtcctcatagatagggtggtcgactatgatctgaggcaactgataagcaccgcgattgacgtttctcggagccgcgctgactcaagggaaatcaccactcgccttgctggcattgtgtcctcaaagatggggggttccgtagcgtctaccgaagaacatgaactgtgtccccggtggagagactctgccgggttcctgaagattagttcaggttctgttgtgcttccaattgggaagttatcaatcggtctttgccggcaccgatcgttgctgtttaagaccttaacagacactatcagtctcccatgtcgagttgtgaggggatgcaagtactgcaaatctgctggtgctgcttcatgccttgtgcactttggtaa

SEQ ID NO: 6084 - DNA, 302 bp, Oryza sativa
  Clone ID: uC-osflcyp158a09b1
ttgatcctatggtgctctgtactattgaggagtctggtgagcatatcattgctggtgctggagagcttcaccttgaaatttgcttgaaggatctgcaggaagatttcatgggtggtgctgaaatcattgtttccccacctgttgtttctttccgtgagactgtccttgagaagtcgtgccgtactgttatgagcaagtccccgaacaagcacaaccggctctacatggaagctcgccccttggaggagggattggctgaggccattgatgacggtcgtattggcccacgtgatgatcccaag

SEQ ID NO: 6085 - DNA, 307 bp, Oryza sativa
  Clone ID: uC-osflcyp158a11b1
cacgccatgtcgccgaggtgctcgacgaattgccccaacggcggggaaggcgcgcgcggcggtggcggtggccgctcctcggtgttccggctggagatgatgagcagggcggtccacgccgccgcgaggggcggcagcgtggagatgctgagggagctcatcgagcgccgctccgacgtgtcggagtatctcgacttccgtggatccaccgtgctgcatgctgctgcagggagagggcagctagaggttgtcaagtaccttatggccactttcgacattgtcgattcgactgataatcaagggaaca

SEQ ID NO: 6086 - DNA, 392 bp, Oryza sativa
  Clone ID: uC-osflcyp158b03b1
ctcccagctcgtgctcccctcgccgccgccgccgccgccgcctcgcctcctcggagatcttcgctgcccttccgccaacatggggaagacacgtggtatgggagctgggcgcaagctcaagacccaccgcaggaaccagagatgggcagacaaggcctacaagaagagccacttgggtaatgagtggaagaaaccctttgctgggtcatctcatgccaagggcatcgttctggagaagattggtattgaggccaagcagcccaactctgccatccgtaagtgtgctcgtgtgcagcttgtgaagaatgggaagaagattgctgcctttgtgcccaatgacggttgcctgaacttcattgaggaaaatgatgaggtgttgattgctggatttg

SEQ ID NO: 6087 - DNA, 402 bp, Oryza sativa
  Clone ID: uC-osflcyp158b07b1
attttggacgagagggctctgtttctggaagaagatatgatgtgggagctcatcgggatgcaacacctggaacgaatggtgataaatccgccaatcctgaagcagatcaaagtggtagtaccagcacgatttctcaatttcctcaacatggtcctaaaggtgatagatcctcaagaggaagaggtagaccaaatagcagggattctcaaagagttggaggcacattaccaattatgccccctccttttggtcctcttggtctgccaccaggaccaatgcaacatattgggccaaatattccccactctccaggccctcttctacctggtgtttttgtgccgccattccctgggcctcttgtgtggcctggggcacgaggtgttgatgtgaatatgctttctg

SEQ ID NO: 6088 - DNA, 450 bp, Oryza sativa
  Clone ID: uC-osflcyp158b08b1
cttggtgctcatatcttctatgcaacaaaaaattgttctaaactctatgtaattgtagatgtgatatataatcattttcatgtatttttttaaaattacgtagtttcttaatttatcaaatgatagggctccacgaagcacaaaaaaggtaaatactgaaagataagttctgtgcactttgagttttattttctttcttggaactcaggacttctgatgatgatagattgatagctctattttattcattcatgcatatttgcttcatattgttcttgattcagtagctaggctggttgagagggataattgataaattgtatttcctatcttctgagatttcttctaaccgtgcatgtcagctaaaactatggcataaaatccatattgcaagtatggagctggtgaggtgcttgactgatggggagacattgtgaggtgctcggcgct

SEQ ID NO: 6089 - DNA, 407 bp, Oryza sativa
  unsure (1)..(407): unsure at all n locations
  Clone ID: uC-osflcyp158b09b1
tcgatgacgcgacggcgaaatgcggtgtattctctggctcaccaccgtcctttacggacaacataccgctatgatgcggtcgacctgggtgtggaaagtggtggtcgcacangctttgctatcttgatggaatacgtgaccgatgtccgtcgatttgaggagagagaggcggcaacagcaataaagaggggagaggcctgccggcggctgtatggtggagaagcgccgacgtagcccgcatacccttctattgccccttcctctaccacccgggcgattcgcaagccgccgatgccaccgctctcgaccggcattgctgccgtctcatgggctccaggaaccggcggcgggggcgatcttgacctcgaccttagccttggctgctttaatgtggggataagaggaga

SEQ ID NO: 6090 - DNA, 283 bp, Oryza sativa
  unsure (1)..(283): unsure at all n locations
  Clone ID: uC-osflcyp158b10b1
gcgcgtaggagaagctatcccacagatattaaatgtgaagcatgcagagattgccacaacttttggaatttttatgatctaaaattatccaagaatgatataacatttttggttcagttatagttgtccatgtactgttttccatcgttccatgcatctacagtatgtatgacttgcaaacttatttttgcggcttgctacatatggtggcattccctgtcactgaagcaattgtttaataaagcanaaaagaaaataaaaaaataataaataccaaaatttg

SEQ ID NO: 6091 - DNA, 451 bp, Oryza sativa
  Clone ID: uC-osflcyp158b12b1
tcgcttagccactgcatatcttccagcttttgtcatagccttttttgtttcttctcttttggtacaaattcagggtctggaatacttgaatcagtgagaagaaaaaacaagatgtataaccctccaagtgcccaggcgatgacatacagagatcatgttcagaggcgccatgaggaaaaaggctgcacatatgcatgcctgtttacactgtgctgctgctactgctgctacgagacctgcgagtgctgcctccagacactcagctgctgctgctgacgtcgtcatgacgaagtgatatgcgcactgagacgtccactgggacactcatcgatgtccatctgctttgtctgaataaaaaatgtatctatgtacttaattaattatttgagtgctgaaaatccgcaaggcgtgtgttgatgtgtttaattaccttttcttttctctgcaatgg

SEQ ID NO: 6092 - DNA, 478 bp, Oryza sativa
  Clone ID: uC-osflcyp158c02b1
gtgaaacagcaaaaaaaatcaaacaaaaagaaaaaatattccccatctgtgaaattcgcaaaaccctagcgcggcggcgatgtcgaacacgagggtgttcttcgacatgaccgtcggcggagctccggcggggcggatcgtgatggagctgtacgcgaaggacgtgccgcggacggcggagaacttccgcgcgctctgcaccggcgagaagggcgtgggcaagagcggcaagccgctgcactacaaggggagcaccttccaccgcgtgatcccggagttcatgtgccagggcggcgacttcacccgcggcaacggcacgggaggggagtcgatctacggcgagaagttcgccgacgaggtgttcaagttcaagcacgacagccccggcatcctgtccatggcgaacgccgggcccaacactaacgggtcccagttcttcatctgcaccgtgccctgcagctggctggacgggaagcac

SEQ ID NO: 6093 - DNA, 314 bp, Oryza sativa
  Clone ID: uC-osflcyp158c03b1
caaggagtaccgtggcaagattgaagctgagctgagcaagatttgcgatggtatcctgaagttgcttgactcacaccttgtgccctcatctactgctgcagaatctaaggtgttttacctcaagatgaagggtgattaccacaggtaccttgcggaatttaagactggtgccgagagaaaggaagctgctgagagcacaatggtggcttacaaggctgctcaggatattgctctggcggatcttgctcccacccatcccataaggcttggactggcacttaacttctctgtgttctactacgagattctaaact

SEQ ID NO: 6094 - DNA, 407 bp, Oryza sativa
  Clone ID: uC-osflcyp158c06b1
acggcggcacggtcaccaccgcaccagtgccaccacccacggcgagccttcgccgcgagctcgccctctctccaaacctccccgcgcgcggaggcgtcgccggacagcccaacgctgccacccgcgaggcccccgccgccgccgtctcctccgcccggcgagtcgtcgtcgtctctccctccctcgcgggatacctagatgagcaattttgtcaggtggaagatttgcaggatgaagctagtcctaattttgtggaagaagttgttactttgttttttaaggactcgggcaggctaatgtcaaacattgagcaagctctggagaagtacccaagagatttcaacaggtgggatacatatatgcagcaactaaaaggcagctgttccagcatcggcgcttctaggatg

SEQ ID NO: 6095 - DNA, 410 bp, Oryza sativa
  Clone ID: uC-osflcyp158c07b1
tcgtgtagattagatttagattagtcctatgtgtctcttgccgggttcttcttctcgggactcatgctcgcattgcacctctttgctccagcgaaaatgtgagattgaccagagatctgccatcgcaaggttcagtttcagcaagagctaaactcgatcggattcagaccgcgaagctaagctttgcgaacggatgatgaagccggcgacgtcggagtccgacatgacgagcctcgcgacgtcgtcgccggcacggtcgcaccaaggcggccgcggcggcgatctacgtgcagatcagcccgtcgcgcgactcccacacgacgacggcgacaagtacgccgacgacgcacgccacgccggtgtacaacaacaggccgctcgactcgccgttgcaccacttctcctacttc

SEQ ID NO: 6096 - DNA, 471 bp, Oryza sativa
  Clone ID: uC-osflcyp158c09b1
ctccactgcgctatagatagctacgtgctgcattcgcgcgcgtgtgcatgcatggcagcaattggtaacatgaatttgttcgacttgttcttcgtcttgcagcttctcctgtcaggagtatgcgtgctcgtcatctgctaccgatatcagcggcttaaatccatgaaaaaatgtagcctaggggttgtccagtggccgatcgtcggcgtgctcccggccatcgtcgccaacatgcaccgcctcctcgacggcgtgaccttcctgctggccacgtcgcagctcaacttccagtgccgcttctggctcgccggcttccggttcttcgtcacctgcgacccggacaacgtgcgccacatcttcacgtccaacttcgacaactaccccaagggcgacgtgttcgccgacatgttcgacgtcctcggcggcggcatcttcaacaccgacggcgagcggtggcggcggcagcggaac

SEQ ID NO: 6097 - DNA, 413 bp, Oryza sativa
  Clone ID: uC-osflcyp158c10b1
tcgcataccccgaaatctcgaggagcttgtcttttttcggtagcaatggcgttggagcagaccttcatcatgatcaagcccgacggcgtccagaggggcctcattggcgaggtcatcggccgcttcgagaagaagggattctacctcaaagccatgaagctcatcaacgtggagaagtcgttcgccgagaagcactacgccgatctgtcctccaagcccttcttcggagggctcgtggagtacatcgtctccggccccgtcgtcgccatggtctgggagggcaagcaggtcgtctccaccggccgcaagctcgtcggggccaccaaccccctggccgctgagccgggcaccatccgtggcgacttcgctgacgacattggcgggatgtcatccacggaagcgactcggtcgag

SEQ ID NO: 6098 - DNA, 347 bp, Oryza sativa
  Clone ID: uC-osflcyp158c12b1
ctcttcccaacactagtaggataaagccacagagagagcagtagtagtagcgagctcgccggagaacggacgatcaccggagaagggggagagagatgagcggcggtcaggacctgcagctgccgccggggttccggttccacccgacggacgaggagctggtgatgcactacctctgccgccgctgcgccggcctccccatcgccgtccccatcatcgccgagatcgacctctacaagttcgatccatggcagcttccccggatggcgctgtacggagagaaggagtgggtacttcttctccccgcgaggaccgcaagtacccgaacgggtcgcgggcgaaccgcg

SEQ ID NO: 6099 - DNA, 438 bp, Oryza sativa
  unsure (1)..(438): unsure at all n locations
  Clone ID: uC-osflcyp158d01b1
gccgccgccgcagcctcctctcggctgctcccatcctctccttcgagttagcttcctccttattcaaccatgggtaaggagaagacgcacatcaacattgtggtcattggccacgtcgactccggcaagtcgaccaccacgggccatctgatctacaagcttggaggtatcgacaagcgtgtgattgagaggttcgagaaggaagccgctgagatgaacaagaggtccttcaagtacgcgtgggtgcttgataagctcaaggccgagcgtgagagaggtatcaccatcgatatcgccctgtggaagttcgagaccaccaagtactactgcacggtcattgatgcccctggtcaccgtgacttcatcaagaacatgatcacgggtacctnccaggctgactgtgccgtgctcatcattgactccaccactggtgggttt

SEQ ID NO: 6100 - DNA, 351 bp, Oryza sativa
  Clone ID: uC-osflcyp158d02b1
atgtccgtctatgaacatctgggtagggttccctggatcaaggcggcgaaggcggctagggtttctaggcgggccacatggcctctccggcgacggcggtggactcccttagcgcgtggctcgctgagctggatcggcagcagcagctgctggtgagctgcacgaggctgatcaagcaggtggaggagcacttcgcgtcggtggagccctggctggctgagaggtcatgactcgctaacaacaagggcacctcggatgatgcacgggccttggccgtcatggactcgctccgtcgtcgggaggcctacattgatggcttctgtttccgcgcgcttgaccaccttgacgacc

SEQ ID NO: 6101 - DNA, 411 bp, Oryza sativa
  Clone ID: uC-osflcyp158d03b1
atgaagaagcgaaagacgctgaagctgacaaggaggcccctagcgaagatgctccaaaggagactgatgtagagacaaagcctgctgaagaggcgaaggaggcccctagcgaagatgctccaaaagacaccgatgtggagatgaaaactgctgaagatgccagcaagaccgcagacgccgacactcctgctccagcaccagccggaaccgagaaggaagatgcaaaaccggctgaatctgaggctgctcctccagcaccatcggaaggaggagagaagaaagaggatgcaaagccagctgaacctgaagcagcagctgctccaccaagcaacccaactgagccttccgcacccaaagctgctgctgctgctccagtagagaactccgcggacaaagggccttaccaggaca

SEQ ID NO: 6102 - DNA, 459 bp, Oryza sativa
  Clone ID: uC-osflcyp158d05b1
ccctaattcccttcctccgttcctcagccactggcgctggcggcgactggcaagaggagttgccggccgccgcatccatcccctccccagcgccagaccgccagcggcaggccggcagcgccgttcgaacttcgaagccccctctatgccgccgccgccggcccgccacctcccttcctgccgcctcgctccttgcgccgcctacctcccctactgtgggtctgtggctgcgtcggctccgtcctccctccccggcgacgccccctgtgccgtcggcccgccgcggcgccgcctcccttccctagttccctgcaccacctccggcctccgtccaccgtccccagtgccgctcgagccgagctcgacgccccctgcgtcgccggcgtccctgactcgacgccgtccatcatgacctcgccgagacgccatgtcgacaaccgatcgacgacaattcatgca

SEQ ID NO: 6103 - DNA, 413 bp, Oryza sativa
  Clone ID: uC-osflcyp158d06b1
cggttggattctacttcccctaccggttcggttcggttcggttcgggtccggttcgatttcggtttttccttcggttcgggggttggagggaaagcatggcggcgccggatgttgagtaccgctgcttcgacggcggcctcgcctgggccaccgacgaccgttccctcgaagccgccttctccacctacggcgagatcctcgagtccaagatcatcaacgatcgggagacggggaggtcgcgcgggttcgggttcgtgacgttctcgagcgagcaggccatgcgcgacgccatcgaggggatgaacggcaaggagctcgacggccgcaacatcaccgtcaacgaggcccagtcgcgccgctccggaagaggaggcggcggtggctaccgacagcgcggaggaggcggaggcta

SEQ ID NO: 6104 - DNA, 470 bp, Oryza sativa
  unsure (1)..(470): unsure at all n locations
  Clone ID: uC-osflcyp158d07b1
tcggtcggatctaattaatttacctcctccacctcctcctcctccccccgatcggatcggcccggctcctcctcctccgacgacgccaccgacgccgcagataggagaagatggccgcacttgataccttcctctttacctcggagtctgtgaacgagggtcaccctgacaagctctgcgaccaagtctcagatgctgtgcttgatgcctgcctcgccgaggaccctgacagcaaggtcgcttgtgagacctgcaccaagacaaacatggtcatggtctttggtgagatcaccaccaaggctaacgttgactatgagaagattgtcagggagacatgccgtaacatcggttatgtgtcagctgatgtcggtctcgatgctgaccactgcaaggtgcttgtgaacatcgagcaacagtcccctgacattgcacagtgtgtgcacggncacttcaccaagcgccctgaggag

SEQ ID NO: 6105 - DNA, 399 bp, Oryza sativa
  Clone ID: uC-osflcyp158d08b1
tcggtccgtggaccatggccgccgcttcccctccgcaacggcgcagaatcgtttctgcagctgctggagctccgcgaggcgatctcgggagagatcgctcccgtgccctcggcactccgccactcccgtctcctcgcgatttcgcccgcccgctgcccgcgccaatctccatcccgcgagcagctgcggcggcggcggcggcggcgacctgtctgccttacgccgcatcctcgccgaacaacacggtgaactagtaatctagcatcacccatgcccttaagcagcaatatttctactcagaaaacccactatgaagttctttctgtgaatgaaggtgctacatatgatgaggtccgagctggatacagggctgctatcctaaacgcgcattctgacaag

SEQ ID NO: 6106 - DNA, 266 bp, Oryza sativa
  Clone ID: uC-osflcyp158d09b1
atcgccgccgccgtctcctcgtgtaaccctagcttagtggattagtttaagtgtttgccggagattatggggtcggtggcggcggaggaggtggtggtgttccggtcgaagctgccggacatcgcgatcgacaacagcatgacgctgtatgagtactgcttcgcgaggatggcggacgtctgtgcgcggccgtgcctgatcgacgggcagaccggggagtcgtacacttacgcggaggtggagtccgcgtcgcggtgcgccggggc

SEQ ID NO: 6107 - DNA, 380 bp, Oryza sativa
  Clone ID: uC-osflcyp158d12b1
gctgtttcagagatgaaggcagctgtgaggagcaagaagagcaagggctctttctgccaccctcctctgctcctgctcatcgtggcaatccagttcttggtgatttactcaccaacccttgatcagtacatggtgatgctaaccacaggcaagcctggtttcccatcaatgttgattgatggtaggaggagcttcaaacaagtagatgagttcatcccggagcctcacctgcgatgcgacttcagagacaatagattccacctgtgcgagatggagggcgccatccgcattctcggcgcacgtcggaagtgttcctgggggcgccgagccttgcctccatcttcggcggaggcggcgggagtgaacgccatgggcgtgga

SEQ ID NO: 6108 - DNA, 338 bp, Oryza sativa
  Clone ID: uC-osflcyp158e01b1
cacaaatccgccgtcgccgacgttgagagagaagggacagagagcgagtgcttcgccgtccccgccgccgcgatgagggccaagtggaagaagaagagaatgaggaggctcaagaggaagcgccgaaagatgaggcagagatccaagtagtcgatatcagtagtgtggatgtcttcttacatcatgttgaccggtgcatttggattgatggtgccttcggattcttgatgttccagttattggtgtaggaatgtgaaaccttttctggttttggttaattctagctggtgaaatgtctctggttatgttcctagactggagtattatgtaatgtgatg

SEQ ID NO: 6109 - DNA, 233 bp, Oryza sativa
  Clone ID: uC-osflcyp158e02b1
ctcatcgtcattgtcatccaaagcaaagaagagagccaccctgcagacacagtacgcacacgcagagagagagagagagagagagcaagggatgaggcttctcggagctcatcgtgctgctctgctggtgctcgcgtgcgtcgtcgtcgtcgtcatccatggcctaggagaggcggaggccttgggaggagggggcggattcgtgagggcgcaggggacacggatcgtgctcg

SEQ ID NO: 6110 - DNA, 452 bp, Oryza sativa
  Clone ID: uC-osflcyp158e03b1
ctgaatgttgtactggattggtctttatttaaacttaatccaataataaccagtttttgtacaagctggtattattttcattgggttgctaggttccctatggaattgatatgttgagcagattcgtgttcatgtatataataagtttctaaagaaaacaaagtgtttcgaagggaaaaagctgtgtatgatgaaaaaattatatcaggattgcaatcagctatatgctgatcttcactacagtgcattaacatgctaatagggtgtttttggaaatgccttccaacatgctataggccagggtgggagacctattgataatttttacacttacaagcttgtttgctttctcttcttttcctgttttatcaacagttttaatctggccaaacaacaatggaaatgcatgctaacgggatgaattactatcaatgattagggaaatcatgcac

SEQ ID NO: 6111 - DNA, 390 bp, Oryza sativa
  Clone ID: uC-osflcyp158e04b1
gccgagctgacgatgtcggaccaccggccggtggtggcgacgtacgcggcggaggtggaggtgttcagcagcaggaagctgcagagggcgctgacgctcacggacgccgaggtggaggccggcaccgtcagactacgtgccggaccaccttgccggtattgagggccagagaggatcggttactgcaaggataaacttgacactgtagcgctctcatgtgtaaacactgtaatcgtgtaatcgcccatggccgagacggattctcttctttctcaagctcacaatccactggtgcatttgccattttgcttcatactgagtgaacccggagaaactttcgtgttataccactcgaactaattttttggtaccagtattgttttcaatcct

SEQ ID NO: 6112 - DNA, 473 bp, Oryza sativa
  unsure (1)..(473): unsure at all n locations
  Clone ID: uC-osflcyp158e05b1
cagacctgcagaggcaatccatccatggcatctatcgttcctgtactcctgcgcctgctgctcctgctgctcccgcttcccctgatccgagaccacctctggccgagccaccgccggccaacgccgcaggacgatgcgggtgagctccacccgatcttcctggtgcccggggcgagctgcagcgacctggaggcgcggctcaccgaggcgtaccggccgtcgacggcgcactgcggcgcgatgaaggggaagggatgttttgggctgtggngagaacaacacggagctgctggtccacgactacgcggactgctcactggagcagatgaccctggtctacgaccccgccgccaacgagtaccggaacctgcccggcgtcgagacccgggtgcccaacttcggctccgatgggtcgatcggctacaagacccctgttaaccgtctacagagagcacaatgccttggaaagctca

SEQ ID NO: 6113 - DNA, 268 bp, Oryza sativa
  Clone ID: uC-osflcyp158e08b1
tgcttcttcctacttcgtcttcttgctggtgtgttcgaggaggaggcggaggaggagaagctagcggctgaggctgaaatggctacgagcgggcttaggagctgcagatcggggggcgatccgagcctgctggcgccgtcggcgaacaggaacccactgcctgtctgagcctacgccaccacctgctggcgcgtcaccatggaaagggaccccgtgaagaataagtaccccttcggtaccttggatccccttgctttttccaaggacc

SEQ ID NO: 6114 - DNA, 313 bp, Oryza sativa
  Clone ID: uC-osflcyp158e11b1
tcggtggtggcgtgcgggcgggcgggcgccgctcgcgtgcccgtgacgctgcttcccagcgccgctgcctccgccttccacgccgcgtgggcgcgaaggcggggcttgggagttggaggaggaaggatagggggcacggcacgggtggcagtagtgcaaggcaagcaggtccccgtgtataattcgggcggcggcggcggaggattggatcggggaatcggcgacgcgggccagaggaggaggaggatgggggcaagcatgcgggctgaggcgcagacgctactgctgcagggggaccagggtggacgccgag

SEQ ID NO: 6115 - DNA, 177 bp, Oryza sativa
  Clone ID: uC-osflcyp158e12b1
ggcttcgttagatccaacgatcggaaatgattttgtaccgcgaggtaccgatacctcgagatactttttgttggaccgaagaaaaactcatataggagatgggtgctcttgttcgtagtttgtttgattctgttatttttttctcttgtagatataaaagagattgggatttgtttc

SEQ ID NO: 6116 - DNA, 297 bp, Oryza sativa
  Clone ID: uC-osflcyp158f01b1
gtcgtcttcggctcgctttctccaccgtctccggcgacgagcggaagcaaccttctccggcgagcggaggcaaccctggggggctaggcgagcagcaggatgcaggtgaagcagaaggtgtacgagctctacaaggggacggtggagcgggtcacggggccgcgcaccgtgtcggcgttcctcgagaagggcgtcctctccgtccccgagttcatcctcgccggcgacaacctcgtctccaagtgccccacctggtcctgggaggcgggcgatccgagcaagaggaagccgtatctc

SEQ ID NO: 6117 - DNA, 459 bp, Oryza sativa
  Clone ID: uC-osflcyp158f04b1
tgatatattagctttagccgctgattaggttaggtctctgcttctctcatccatccatccatccatccatccatcccctgctgtgcaccgtgactccaccaccaccatcaacaagatgaaaaacaaactcttcttccttttcttgccttgccttgcttgctttgcagtaatcaggggaactgctctctcgtgcgtgtgatttctagtcagtcagtgtggacatctctaaattcatttgtgatttccttcctcatttcgttgcatcggtgtgctatgctgctccaagaaacaagacaaagaaaagaaggcgtgcttgcttgcttgcttgtctgctgcacgagtcatagttggcgtcaatcacatgtacagctgcaaatgctgtgccaagaaatgaacaaaagaaatttacctgacccaaaagaaggccatgtaagtcgtctcacttgatcctctgattct

SEQ ID NO: 6118 - DNA, 449 bp, Oryza sativa
  Clone ID: uC-osflcyp158f05b1
gcctcccatcaacttcttgcacacaccctccctttggctttcatctgcatctattcagttgcagattgagagccaaagacattatcttgattctatcaggagggttgtgctagcgaattcttgttagcaacaaattgacatattgctcggcacatccccaccgagaataccaagatgacgttctctggtacacaggacaagtgcaatgcttgtgacaagaccgtgcatttcattgatctccttaccgcggacagtattccctaccacaagtcttgcttcagatgcagccactgcaaaggcacactttcgatgtgcagctattcgtccatggatggggttctttactgcaagacccattttgagcagctattcaaggaaacaggcaccttcaagaagaacttcccctcaggtacaaaggcaaacagtgaacaggctaagattcccagcaa

SEQ ID NO: 6119 - DNA, 397 bp, Oryza sativa
  Clone ID: uC-osflcyp158f07b1
catgaaccttgtgaagaagcgcgtggagctgttctgtgagatcgctcagaacaaggaagactacaacaagttctacgaggtcttctccaagaatcttaagcttggcatccatgaggactccaccaacaggaccaagattgctgagctcctgaggtatcactccaccaagagtggtgatgagatgaccagcctcaaggactacgtgacccggatgaaggagggccagagtgagatctattacatcactggcgagagcaagaaggctgatgagaactcccccttccttgagatgctgaagaagaagggatatgaggtcctgtacatggttgatgccattgatgagtacgctgttggccagcttaaggagtttgagggcaagaagctcgtttctgccacc

SEQ ID NO: 6120 - DNA, 485 bp, Oryza sativa
  Clone ID: uC-osflcyp158f09b1
catgaaatccaaggacagagaagaaatcgcagagattgagaagatgcatgaacttattaagacctataacttgtttgggcagttccgttggatctcggctcagacgaacagggctcgcaatggtgagctctatcgctacatagctgatactcatggtgccttcgtgcagccagctttctacgaagcattcggtctcactgttgtggaggccatgacatgtggactccctacttttgcaacagtccatggtggacctgccgagattatagagcacgggatctcagggttccacatagatccttatcatccggatcaagctgcaaatctgatagctgacttcttcgaacaatgtaaacaagaccccaaccattgggttgaagtttctaatagaggcctacaacgtatatatgagaaatatacatggaagatctactctgagaggttgatgacattggctggggtttatggcttctggaagtatgtct

SEQ ID NO: 6121 - DNA, 336 bp, Oryza sativa
  Clone ID: uC-osflcyp158f10b1
ccgggccgacccacccgtctggcttgatgcaagagactgacttatctctatgaacggcttctgacaaggatagcttgcttgagggtaactaaccactgttgacagattctaacaatagcttgattgtagaaactggaccttcattgacacattaccatgaggatagcatggttgaagaaaccaatctatggtgcttgacaacttctcacaagggcaacttgaaacaggagacgggcttatctcagacaatatcttctcatgagaataacttgaaattgcaatacaaggaaagttgaggcattgatatgttgacacaagatgtagacttgattgaat

SEQ ID NO: 6122 - DNA, 384 bp, Oryza sativa
  Clone ID: uC-osflcyp158f11b1
gggaaaagaaaaaaaaaagagataaaaaaaaatctcctcctcctcctcctcgccgccgccgccatggacgcctccgccggaggcggggggaactcgctgccgacggtgggggccgacggggccaagcggcgggtgtgctacttctacgacgcggaggtggggaactactactacgggcaggggcacccgatgaagccccaccgcatccggatgacccacgcgctgctcgcccactacggcctcctcgaccagatgcaggtgctcaagccccacccggcgcgcgaccgcgacctctgccgatttcacgccgacgactacgtcgccttcctccgctccgtcacgccggagacccagcaggaccagatccgggcgctcaagcgcttt

SEQ ID NO: 6123 - DNA, 410 bp, Oryza sativa
  Clone ID: uC-osflcyp158f12b1
aattgtttgcaaattgtactagcatagctaaagcctgaaagactaaatgctcatatgcaattttgtggaattaatgtaaaggaacactactgttttaggacacccttctcacttatgttttgttcagactagtttggtcttggtctggttaatactgagaatacataaatgtatttttacatgttaatctaatcaacacgaagcacccttttttcgtctaacttttggctagtaaatctagggctgtcaactgcatacttgattagttctgttcatgatttttgtagtctgtacgattggggcaccatgtcgtgtgcctaggttctggttgtagattattcccctacgatctcattcttggctccagctctgtcttccatccttatctcttggtcccaatctcccgtgac

SEQ ID NO: 6124 - DNA, 496 bp, Oryza sativa
  Clone ID: uC-osflcyp158g01b1
ctttcagattcaattccaggggatgttaaggacgagatttcacaggcaaagaagcagttggacaaaaaggatgttgactatgaggcatcactggcctcaaaactctcgatagcaagaaaaatattcaaattagagaaagacaaagtactaaattccagttcgttcaagcagtttttatctgaaaacgaggagtggttgaaaccatatgctgcattgtgttttctgcgggacttctttgagacatcagatcacagccaatggggccgtttttctcagttttccaaggagaagctagataagcttgtttctgaaggtaccttgcaccatgacgttatatgtttccattactacatccagtaccatctatatatgcaattatcagaggcagctgcctatgcaaggaagaaaaaggttattctgaaaggagatttacctattggtgttgataggaatagtgtggatacttgggtataccccactttatttcgcatgaata

SEQ ID NO: 6125 - DNA, 360 bp, Oryza sativa
  Clone ID: uC-osflcyp158g02b1
gggaagtcttgagttggaagcgatcgatggcggctactacgacgggacgagttgttgcactcggcgcggcggccgtggtggtggcgctgacattcctcgccggcggcgcggacgccgactgctacgacttctgcttcaaggactgcatggccagggagaacaacatggtcgactactgcagctacgcctgcgacaagacgtgccagccggacaagcccacgctgtactcgtcgtcgacgacgtcccgactcgccggcgacatggagagccaactctactgcgccttgggctcctgacaccgactccttccggacggcaagggcgccgaggaggcctgcttcgggcagtgctactacggct

SEQ ID NO: 6126 - DNA, 392 bp, Oryza sativa
  Clone ID: uC-osflcyp158g03b1
ggctacattatcgacgacgacgacgaggtttgttcagcttgccgcgtgcgcggcggcgtcgctgctcgccgtggcggcgagtggcgcggtggcgcatggcgtctggtcggtcatcacgcaggcggagctcaacagcatgctgcccaaccgcgacaactcgcagtgccccgcgaggggcttctacacgtacgacgccttcatcgccgccgtcagacttcttcccggcgttcggcacctccggcggcagcgccgagctcatccggcgggagctcgccgccttcttcggccagacctcccacgagaccaccggtggaacgaggggtagttctgaccagttccagtggggatactgctttaaagaggagataaaccaggcgactattccaccctac

SEQ ID NO: 6127 - DNA, 213 bp, Oryza sativa
  Clone ID: uC-osflcyp158g04b1
accgcatgagcaatggtgctatcatcggcgcttccaccgtgctggtggtggagggggaggaagccgtgagcgtggagtctatcaagaacagtggcggtggaaaggaggatgtccagttgtgcacgtcggagaatacgcttaaggacatctgtcagacaacctactaccattgaagcggctatgacgaggcatggaaacgaaccctaaattgca

SEQ ID NO: 6128 - DNA, 352 bp, Oryza sativa
  Clone ID: uC-osflcyp158g05b1
gtgttagcgagaatcggcggcggcggcggcgagagcggagagagacaggagggggcggcggcggcggcgggggggcgcggagatgacggggaaggcgaagccgaagaagcacacggcgaaggagatcgcggcgaagatcgacgcggcgacgacgaacaggggcggcggtaaggccgggcagaaggaccggctggggcaggacaagggcggccacgccaagctcgagtgccccctctgcaagaccaccgcccccgacatcaagtccatgcagatccaccacgaggcgcgccaccccaagctccccttcgagcccgacaagctcaacaacctccacgcgggtggagccggcgcc

SEQ ID NO: 6129 - DNA, 373 bp, Oryza sativa
  Clone ID: uC-osflcyp158g06b1
gcgttggatctctccggctaccggtgacgtccaatcacccaagaagaggttggtagagagtggggagaaggagaagctgatggagctcctccgggagcggctcgtcgagtgcggctggagggacgagatgaaagctctctgcaggttcggttccttgtcccaccaaattcttgtatcgtttgtgatgagtatctgcttggtgatcctgaattccggcaacgattccgtgcctaagcctatgtgaacaatgatctctgtcttctgtctcctagcgcgtatagctaccagtttgcttaatgtacaaagcacaagcgtttgtacggctttaacatgaatgaatgaatgaacgaataattagcttcaacatattggt

SEQ ID NO: 6130 - DNA, 343 bp, Oryza sativa
  Clone ID: uC-osflcyp158g07b1
tcgcttttaaatggagatgatggcattgctcatgtgaagagacatcttgttgaaaatgcatcacagaacattgtgactctggagctgaaattatcacgaggatggggaggagaaaatgcttatcatgttggtggatatcgctacttacttgttgatccagatagaaaagtatcaagagcctccccacctgggaaagtcaccaccctctcaaaggattctctactttccttgaatagactaagagaagaaatagatttggagaagtcaagggccaagaggtctgactcttgtcatgacaaggattttgaagtatgcatcagagccaaaaataatgcatgggtca

SEQ ID NO: 6131 - DNA, 323 bp, Oryza sativa
  Clone ID: uC-osflcyp158g08b1
ccgtcatgacattatccactacaatctgaagtcaagcaacattctgcttgatggatcaggcgatgccaaggtgggggactatggattggcaaagcttctgccgatgttggatcggtatgttctaagcagtaaggtccagagtgcacttggttacatggcaccagagtttgcgtgcaggactgtgaagatcactgaaaagtgtgacgtgtatggatttggagctcttgcccttgagatattgacagggaggacgccggtgcagtacatggaagatgatgttattgtgctttgcgatgtggtaagggctgctttggatgaaagga

SEQ ID NO: 6132 - DNA, 429 bp, Oryza sativa
  Clone ID: uC-osflcyp158g09b1
attattttggtgattggaaaatactggatgatgtagcgttttgttggattttctgacaaccatatatgcaaatccttatcttttcatgttattgaactttatccttatcttttcatattgaactttactggaactccagcatggaggaaatcgatctagcgtacagggaagctgcaaatggtgtctcatccacaagacctgttatagaaatgacgattccttctgtgttggataagaccatctccccacctggtatgccaatttcttgttcccagcattgcagttgcataccacgtgtggcgtctgatttgtataaactataattgcgccctacaggtcatatattcaagattaattttccccaccccccaaaaaatccaagtttaaatttggatatgtggctgggaaacctcaccttcttcgtatgct

SEQ ID NO: 6133 - DNA, 351 bp, Oryza sativa
  Clone ID: uC-osflcyp158g10b1
ctttctttgacaaaaccgtgcgggtttgggatgctgacaatacaagttattcactccgtactttcacgggtcattcagcatctgttatgtcacttgacttccatccgaacaaagaagatatgatttgctcctgtgatggtgatggtgaagtccgcagctggagcataaataatggtagctgcctgacctttgttaaggtctttaagggaggtgctactcagatgcgatttcaacctcaaaagggaaaatatcttgcagctgcctcagagaaggccatctacatacttgatggagagacacaacttgcttgtagaaaccctatgcaggggcacacaaagaatattcactcac

SEQ ID NO: 6134 - DNA, 287 bp, Oryza sativa
  Clone ID: uC-osflcyp158g11b1
ggggtcagcgctccccaaggcagtggaaagacaactcttgttttcgcacttgattatctttttcgggttgctggtaggaatgccgctacattatctatcgatgacttctacttgacggcagcagaacagggtaaattgagggaaagaaatcctggaaatgctcttttggagcttcgtggaaatgctggaagccatgatctcccgttctcagttgaaacacttgaatcgctgcttaaactaactaaagaaggtttgaagatgaagcttccacggtatgacaagtctgc

SEQ ID NO: 6135 - DNA, 255 bp, Oryza sativa
  Clone ID: uC-osflcyp158h01b1
gccttcgccactgccacgaacagttcgctcaccgcctcaccggatcgccgccgccgaccaacgcgcagcgcgggcgccgcgtccccgaacaatggcgctcatagcgccgagcccccgggtgctgcgcgcgcgcgaggcgcccgccgcaggcgccctgcagccacccgcggctgcatgctcgaccgtcgctggcggtggcggggcggcggggaggccgctcgggatgtggagcggtggcgggggcgggggcggggg

SEQ ID NO: 6136 - DNA, 392 bp, Oryza sativa
  Clone ID: uC-osflcyp158h02b1
tcgggagattttggtcttagcaagattatcaaagcccagcatgccaatgatgtgtacaagatgactggggagactggaagctaccggtacatggctcctgaagtattcaaacaccggaaatatgacaagaaagttgatgtcttctcgtttgctatgatactttacgagatgcttgaaggggatccacctttctctaactatgaaccttatgaagccgcaaagtatgtgggagaagggcatcgcccaccctttcgttcgaagggatttactaacgagttaaaggagttaattgagctatgctggtccggggatatccatctgaggccatcttttctagagatcctcaagaggctcgagaagatcaaggagtacttagctgcgcacgatcacca

SEQ ID NO: 6137 - DNA, 426 bp, Oryza sativa
  Clone ID: uC-osflcyp158h04b1
ccggaccggaacggccgggccgagcccagagcgaccggtcgtgcgtatacgcgggcttgctgtatatgggagcgtggtgagcatatcatcgctgttgccatgaagcttccgcgggctagcccttctgttgatcttcttgctgattctatcgctacagattgcgaaaagagatggattgctgtagataggatacgcatactggggctcttgccccctagcttctttcatatgctcgagcgcgttcagattgacaatggtttttacttggcactgtgtgggtgggaggatggattggcataggccatagatggcggacgtattggcccacgtgatgatccaaatgtgcgctccaagatcctgtctgaggagtacggctgggacaaggatcttgcaaagaagatttggtgttttggacctgagacaact

SEQ ID NO: 6138 - DNA, 377 bp, Oryza sativa
  Clone ID: uC-osflcyp158h05b1
ccatggtacaaaagataatctacatgtgcaatattagtcgtaatcaaatttccatatcattcagcgtttcataattatcactgccttaaaatatccctagtcacataatattcctggatttactttaaattgcttgaattacttaattattattatcattgccaattaatatccctgataaacagcagtattatcatccctagaagtgcatctcacatattgactcaagttgattaaagttacgcttggtaattggtttaagagcagctggaatactacgcaattgttctaacgatatctagtacttgctttgtatactaaatatatccataagtcggtgtagtgggaatatttgcttcccggaatatgtgctcagc

SEQ ID NO: 6139 - DNA, 159 bp, Oryza sativa
  unsure (1)..(159): unsure at all n locations
  Clone ID: uC-osflcyp158h07b1
gctttcggttttttctggacctagcacgattactgactgaccggatcgccgacgacgaccaacgcgcactgcgggcaccgngtgctcgaacaatggcgctcatagcgccgagcccccgggtgctgcgcgcgcgcgaggcgaccgcctcaggcgcgctgt

SEQ ID NO: 6140 - DNA, 272 bp, Oryza sativa
  Clone ID: uC-osflcyp158h08b1
acgcagctgctcatgatgcacggcgggacaagctgagcggagatggctgacaacggctgccacttcctgctctccgtgtaccggccagtgtactgcatacgccgacacggcggcgaccaccgaccgggcaaagcgcgagcccatatcagacgatggtcgaggcacgacgactcagaggcatgttcaacaagcaggcccttgaccaatggcaaggaagaagaaaaaaccactccttgcagacgaaaatgccttgcttgcctatgcgatgtgac

SEQ ID NO: 6141 - DNA, 295 bp, Oryza sativa
  Clone ID: uC-osflcyp158h09b1
ttcgtttactcggaagccaccaaaccctagccgggagccctgaccttgcgaggaaggggaagaggagagatcgacatcggggagactcatccatggcgcttcgagccctgaacagagagatccagggtatgaaggcgcgagaggtgccggagtaccttgagccgtttctgacttgtgggaacgtggagaagagcacagaccattgctacctccgatacatcgacaaggtcatggtgaccagcttgcccgagccgatattacacgtcatgtacggactcatggtacttttactacc

SEQ ID NO: 6142 - DNA, 408 bp, Oryza sativa
  Clone ID: uC-osflcyp158h11b1
tcgcggtcgcgtgggctaccttctcctccggctcttcttcagtatcgaatcctctcttctcctcgtgcccaccaccaccaccgtagcaatggcgggcaacgggccgatcaacaaggaggacccgctcaactggggcgcggcggcggccgagatggccggcagccacctcgacgaggtgaagcgcatggtggcgcagttccgcgagccgctggacaagatccagggcgccaccctccgcgtcggccaggtggccgccgtcgcccaggccaaggacgccgccggcggcgccgacgagctcgacgaggaggcccgcccccgcgtcaaggccagcagagagtggatcctcaactgcatcggccaccgcggctacatctacagcgttaccaccggctttggggggaccttcca

SEQ ID NO: 6143 - DNA, 343 bp, Oryza sativa
  Clone ID: uC-osflcyp158h12b1
tcgcgcttccattgcaaccccaccccgccgcacgccgccgcatcgatcggaaccaaaccctaaccctaaaccctagcccccccacctcgccttccaccccccacgctcccatggcggggcgcggaggctacgcgtagccacatcgatcgaacaccctgtatggattgaggtgggtttcccgaggcatgggtacaaaccctagcctgcacgagctggcggcgggggcggcgccgcggggacgcgtggtgcgtatcctcgtgcgcgacgccgacgccaccgactcgtcctccagcgaggacgaggcggatgcggtggcgcaacctcggccgcggcggaagggtaa

SEQ ID NO: 6144 - DNA, 429 bp, Oryza sativa
  Clone ID: uC-osflcyp159a02b1
gattgtcaggagttaaagcaactagctggtgaagttggatcggagatatctttcataatgtcgaggaaatgccaaccatgtaacactggacattctgttgtggagctcgctattgctatacattatgtcttcaatgccccaatggataagatattatgggatgctggtcagcatacatatgcacacaagattctcacaggaaggcgctcactctttcatactattaagcaaagaaaggggctttcaggtttcacatcccgtttcgagagcgaatatgatccctttggtgcaggacatggatgcaatagtctctccgcaggccttgggatggcagtcgcaagggatctaggtgggaggaaaaaccgaatagtaacagttataagtaactggacaactatggctggtcaggtgtatgaggcaatgggtcat

SEQ ID NO: 6145 - DNA, 292 bp, Oryza sativa
  Clone ID: uC-osflcyp159a05b1
ggcattggctccgatggccacacgctgacgtcggagagggtgcggtcggccatgctcgtgcgcatcaacacccttctgcagggctactccggcatccggttcgagatcctcgaggccatcaccaagctgctcaacaccggcgttacgccgtgcctgccgctccgtggcaccatcaccgcgttcggggacctggttcccctgtcctacattgccggcctgattaccaggacgcccaactcgcaggccatcttgcccgacggcaggaaggtggacagccgccaggcgtttaagc

SEQ ID NO: 6146 - DNA, 482 bp, Oryza sativa
  unsure (1)..(482): unsure at all n locations
  Clone ID: uC-osflcyp159a07b1
tttgttttaacattgaaaatcatttcatgtgcaataaactacagtgacggtatgttgaaggaagagggtttgcgtgatgcccagaaaaagtatcgtttggctaaacttccttctttgatcgaatattttggttactgcctctgctgtggcagccattttgctgggccagtatatgagatgaaagattatcttgaatatactgaacggaaaggattatgggccagcccaactccttcaccactattgcctactttgcgtgctctagttcaagctggcgcatgtatggggttatatttgtatctatcacctcaatttccactttcacggtttagcgagcccttatattatgagtgnggttttctggcaccggctcttctatcagtacatgtcaggctttactgctcgttggaaatactactttatatggtcactttcagaagctgcaatcattatatctggtctgggttttagcggctggtctg

SEQ ID NO: 6147 - DNA, 392 bp, Oryza sativa
  unsure (1)..(392): unsure at all n locations
  Clone ID: uC-osflcyp159a08b1
gctgttgtgctaccctccaaagctggaggcctagctaggcagacggcagcaagcctgtcccgcgcgccctcgagctgtgatcctcacgcaacacgcgcacggcgtaggtagcgcggctagccctgcacgcgtgggcatggacgtggaggcgaccaaggacgtggtccacgagcaggcggcggcgccggggcgcggcagggcggcgcgatggctcctcgtggcgctcaactgcgggatgctggtggtgggcaccacgggcgggccgatccttagccggctctacttcagcaagggcggccacaggaagtggctctcggcgtggctcgagaccgccgggtggccgctgctgctggtgcccgtgtcggcgtnctaccacagccgccgtgcgcgcg

SEQ ID NO: 6148 - DNA, 493 bp, Oryza sativa
  Clone ID: uC-osflcyp159a10b1
cttgtgctgctgctgaggaggtgaaggaggagagcgggagatctctcaggagcgaggcattgacattccgctatggaggctccttcgtcgtccccgtcatcgccaagtctgaaagatcatctctcttcgccaactggccctttgcatctcaaagtatgggaggtcatatgcattgtcttgggggctttcatggtggtcatcttctttgtaaccgtgtggctcacgatccggagtcggaagagggttagacgggcttcggcaaatatcccaatcacccaaatccctgccatttccaaggaaatcaaggaagtgagggtggagcaagtcccaacaagcgattttgcagcacaagatggagtcctgatgacaatccaagacaagtctagtgagaaggagtcagacaaggtcatggtccatttggggtgaagcaaatcgaagcgtggcgatgagagccactcaagatcattcccgtacatggacaaggattttagat

SEQ ID NO: 6149 - DNA, 491 bp, Oryza sativa
  Clone ID: uC-osflcyp159a11b1
tgtttatcttatcgccatgaatcacactgatttcatgatcaccagtacattccaagaaattgctggaagcaaggacactgtggggcagtatgaatcacacattgcattcacccttcctgggctttaccgagttgtgcatggcatagatgtttttgatcccaagttcaacattgtctctcctggagctgacatgagtgtctacttcccgtacaccgaggctgacaagaggctcactgccttccaccctgaaattgaggagcttctctacagtgaagtcgagaacgatgaacacaagtttgtattgaaggacaagaacaagccaatcatcttctccatggctcgtcttgaccgagtgaagaacatgacaggtctggttgagatgtatggtaagaatgcacatctcagggatttggcaaaccttgtgattgtttgtggtgaccacggcaatcagtccaaggacagggaggagcaagctgagttcaagaagatgt

SEQ ID NO: 6150 - DNA, 245 bp, Oryza sativa
  Clone ID: uC-osflcyp159a12b1
ggtttggttgctgggcggtgaacgcacagtcaactgtgagactcatcagaagacgaccgtggtgagagaagatcgaaacacacagtctattctcacgatgattgccatgatacacacgacactgctagcagagtcggaatgcacaactcttattcaaaggacggcatgcacagcgtagacactataaatggcgtatgcgactgcatagggtcctaagaagtatctggctgaaatcgatgatgatt

SEQ ID NO: 6151 - DNA, 438 bp, Oryza sativa
  Clone ID: uC-osflcyp159b01b1
gccttttcaagatgcagatctttgtgaagaccctcgccggcaagaccatcaccctcgaggttgagtcctcggacaccattgacaatgtcaaggccaagatccaggacaaggagggcatccccccggaccagcagcgtctcatctttgctggcaagcagcttgaggatggccgcaccctggccgactacaacatccagaaggagtccaccctccaccttgtgctcaggctcaggggaggcatgcagatcttcgtcaagaccttgactggcaagaccatcacccttgaggtcgagtcgtctgacaccattgacaatgtcaaggccaagatccaggacaaggagggcatccccccggaccagcagcgtcttatcttcgctggcaagcagcttgaggatggccgcaccctggccgactacaacatccagaaggagtctaccc

SEQ ID NO: 6152 - DNA, 482 bp, Oryza sativa
  unsure (1)..(482): unsure at all n locations
  Clone ID: uC-osflcyp159b02b1
gctctatgaaagcctgaagagaactgcagagacattcctattcagacctgatgctcaaggcccttccaaatttacccccctccatatagcagctgccacagatgatgcagaggatgtattggatgcacttactaatgatcctggactggttgggatcaacacgtggagaaacgcgcgagacggcgcaggcttcaccccagaagactacgctcgccagaggggcaacgatgcttacctgaatatggtcgagaagaagatcaataagcatcttggcaaaggccatgttgtcctcggcgtccctagcagcatacaccctgtaataaccgatggtgtgaagcctggtgaagtcagcctggagatcggcatgaccgtgccgncgccagcaccgagctgcaacgcctgcagccgtcaggccctgatgtaccccaactcgacggcgaggacctttctgtacaggccagcgatgctgaccgtgatgggca

SEQ ID NO: 6153 - DNA, 303 bp, Oryza sativa
  Clone ID: uC-osflcyp159b06b1
ctctcctcaccaccatcacctcctcctcctcctcctgttcctccgcgcgcgcgagatccagggagagggagagggagagatcatggcggggacggtgacggtgccgtcggcgtcggtgccgtcgacgccgctgctcaaggacgagctggacatcgtgatcccgacgatccgtaacctggacttcctggagatgtggcggcccttcttccagccctaccacctcatcatcgtgcaggacggcgacccgaccaagaccatccgcgtccccgagggctttgactacgagctttatcaccgcaacga

SEQ ID NO: 6154 - DNA, 453 bp, Oryza sativa
  Clone ID: uC-osflcyp159b08b1
gtgtgagctccttgggactttcgccaacacggtgcatctcagcgggaagctgtggctgacgagcttgctgatcgggtcggtcggcttggtcatcggcgccatcttgaagtgcatcccggtcgaatccggcagcgacgcttctgatcgtcacgacggataccggccgatccccaccggcccgagtgcggtttgatttttgcaggcattttgatcatcgttttcttcataaagaaggagatgagtttgcatgcaaacttcgtagtttaactcagttttttttttcctcccgaacggaagacattcagtttttcacacaaacatcgtagttttaactcctccaaagagtaggttttgtcattgcgtcttcttttttcccctcagatttggtagtgataataagttgtcattgttttgatccaagggatagaattcagttagacaaaattgaactta

SEQ ID NO: 6155 - DNA, 330 bp, Oryza sativa
  Clone ID: uC-osflcyp159b11b1
tttctccttcaagaaacaagaaagacaacaccaacagactagctagctcaccaatggcctcgttgtcctccttccggctcgccgtggcagtggcggcattgttggtcgtcggctcatgcgccactgaggtcaccttcaaggtcggtgagggctctagcggaaaaagtctagagctcgtcaccaacgtcgccatctctgaggtggagatcaaggagaagggcggcaaggactgggtggcgctcaaggagtcgtcgactaacacctggtcgctcaagagtgaggcggccgctcaagggccccttttccgtccgcttccttgtcaagaacggc

SEQ ID NO: 6156 - DNA, 363 bp, Oryza sativa
  Clone ID: uC-osflcyp159c01b1
ctctttgaaaagaatttcaaagcttagccgaagatgccaatggagaggtcggtgtcgtgcgccgagaggccaccggcggcgttcggcggcggcgcagccgcggacctgcggtgctacagcgcgtcgtacgccacgtcgtacaagccgggcgctggcgcggcggcggcggcgggggcggggacgaacacgacgacgaaggtgatgaagcgcgccacgagcgccaacgcgtggtcgcggccgggcggcggcggcggcgtgcagcggagcgggagcaccaagacggtggtgtcctccgccgccgggtggagcccgggcggcgggccgacgcccgggttcaacctgcggagctacagcgcgtcgtac

SEQ ID NO: 6157 - DNA, 425 bp, Oryza sativa
  Clone ID: uC-osflcyp159c03b1
cgtctttgaacctaccgtcttgtgtgttgttgtttggatcggttcgtcgtgtatatatgggtgtgtcacggccatgaacggctgagatcgcacacacatagagacagacaatgtactctcagaaacgcacccattacacgatgaaaaccaatcaaacacgaaaaaaaaaagcacaaaagaccgacaaacaacgcctgcgacgacggaggcatgtgggggccagagaggggcaccgcgtcactgacgctgggccccaccgccctcgatgacaaactcttttatttagccccacgtcacgcgtacccacacacacctacggagtcgagtactaccacttcagctcactcaactcatcactcgctacacgcacacgtacgtacaactccggcgagtccccggcggcggcggctcgcgcgggccatgca

SEQ ID NO: 6158 - DNA, 422 bp, Oryza sativa
  Clone ID: uC-osflcyp159c04b1
tgatttattatttttagctatgcaaattgctcgtcatcttcagctgcaagaccctatttttctcttagataacagtgagatagtgaatgctgtgcagaacgaggactacatacaaaaccccggacattggtctctgagaccaattctttccagaattaaaaattttctgcaggatcaacaagttcgaatcatttggatctctagagagctcaacaaagttgcagatggccttgcaaagtcagcaagacaagctcagactaacagctgcttagcttttgattgctctaatatttctcacatttcttccagagatgtttgtcctactaaaagagctctttccttcactcctaatggagcagttaatgtaactcatgctttgtgtttctaaaacgctttcttttataaagtgcatgagttctcat

SEQ ID NO: 6159 - DNA, 494 bp, Oryza sativa
  Clone ID: uC-osflcyp159c05b1
ctctcctctcctctcctctcctctcccggtggcggcgcggccaactccagccatgtcggactccaaggccgcggcggcggtcaccctccgcacccgcaagttcatgaccaaccgcctcctctcccgcaagcaattcgtgctcgaggtgatctaccccggccggcccaacgtctccaaggctgagctgaaggagaagctggccaagctgtacgaggtgaaggacgcgaactgcatcttcgtgttcaagttccgcacccacttcggtggaggcaagtccaccggattcggcctcatctacgataacctcgacgccgcgaagaagtacgagcccaagtaccgcctcatcaggaatggtcttgctaccaaggttgagaaatctcgcaagcaaatgaaagaacgcaagaacagagctaagaagatccgtggtgtcaagaagaccaaagctggtgatgccgggaaaaagaagtgaaaactcatttacatttgtactactg

SEQ ID NO: 6160 - DNA, 377 bp, Oryza sativa
  Clone ID: uC-osflcyp159c06b1
cttttactgaatctaaagagtattactcaactttacaacgattatgctgttccatttaatctttgggaggtttgcctggaaatgctcaactttgcaaattattctggagatgctgacagtaaaattgttcgagaaatttgggccaggcttcttgaccaggcacttacaagaggtggtgttgcagaagcatgttctgtggtgagaagagtaggttcaaaacttgatcctgcagatggcgcttgtttaccattggatataatatgccttcatctcgagaaggctgcattggatagattaagctcaggagaagaattagttggtgacgaggatgttgcaagagcccttctccgagcctgtaaggtctacctgaacctgtg

SEQ ID NO: 6161 - DNA, 175 bp, Oryza sativa
  Clone ID: uC-osflcyp159c07b1
tggtaaatcaacagtaaattaagcatcaacgggagcggccgtattaatcttatggcgactgataccaacccaccacccaaacactccaacccatatatcacatattcaatagaaccaccatttcaagactccactacagcaagagctaacaaccaccagatcaagaccatgaacg

SEQ ID NO: 6162 - DNA, 484 bp, Oryza sativa
  Clone ID: uC-osflcyp159c09b1
tgttttatgcagaatttgtcccagtcatgaggcaggcaatgggattttgcaacaactgtttgaggatggcaatcatgattgagaagaacgtcgatgttgactctgatggggagagggttgatttcagtgacagggagacatatgaatttttgttcaaggattactgggacataattagagaaaaagaagggttgacattggataatatgcgagaagcctatactcttctcagaagtggcttaaactgtaatgaactatcagatatggagaaacttccaaatagtgagcagagttcagatgatgatttcttgggcaatagtgatgacgacgatgagccagtttatccatctggttcaaatggaacatcaaataaagtgaaaaccatactgaaggaaggaaaaacaaagaaacaggtttatgtgggatggggtttaatagaacttattggattcatgtcatcaatagggaaagatacattaaaacc

SEQ ID NO: 6163 - DNA, 340 bp, Oryza sativa
  Clone ID: uC-osflcyp159c12b1
ttttatgagtgcagaggagagacaaaaggttacgccacgcactgtcatgatagggggaaaagcattcgcgacttacaccaatgccaaaagaatagtaaaattggtaaatgatgttggtgctgtggtgaacaatgatcctgatgttaataaatacctaaaggtggtgttcattcccaactacaatgtatctgtggccgaggtgctcattgctgggagtgaactgtcacagcacattagtaccgcaggcatggtagcaagtgcaacgagtaatatgaaattctctatgaatggatgtgttatcattggtactatcgatggagctaatgctgagattagatag

SEQ ID NO: 6164 - DNA, 248 bp, Oryza sativa
  Clone ID: uC-osflcyp159d01b1
cgtcgtggaagaacccaagaacgaagaagaagaagaggaagaagacgcgaagctcggggcgcggccattctccgatcccgagctcgccttccaagccgccgcattcccccgccgttgatgcgggtggaggccgggggcctcccggagcttgggtcgggggcgagggaccccgccggcgcgcggcggcagcggcggcggcgtcagcagcggacgccggcgatgccgttgcggggggccaactaacagct

SEQ ID NO: 6165 - DNA, 301 bp, Oryza sativa
  unsure (1)..(301): unsure at all n locations
  Clone ID: uC-osflcyp159d02b1
gcttgttaactaagcttaccacactcacatactcctatatattttggcacgcattgattacctgctagctccttgagcaatatcaatatggctcagccgacttggtcagcaaggcgcgtcactgccgccctggtcgtgatggtggtggtggtggtggnnttcctcgaacccggctggtcgcggacgcagatgtcgccgagctcaagatcatcatcgagcccgggagtgttaaactccgcgaattcgggtacgcgaccttctatagccagcaggccatgcgcgacgccatccatgggatgaa

SEQ ID NO: 6166 - DNA, 422 bp, Oryza sativa
  unsure (1)..(422): unsure at all n locations
  Clone ID: uC-osflcyp159d03b1
gtcatcaggttattcctaccgagctcgagaggcgcaacaaaagccatctgtgctttttcgccgccgtcgccgacggctctctccgtctgaaaacacccaaaaacccaaccaaaccctagatccgccgnctccccgctcctccgtctccgactccggcgacgctcgcgcggccacgatgccgaacctcgagtgccggatgtacgagccgcggttcccggaggtggacgcggcggtgatgatccaggtgaagcacatcgccgacatgggcgcctacgtntccctcctcgagtacaacaacatcgagggcatgatccctttctgtgagctctcccgccgccgcatccgctccatgttcttcctcatcaaggtcggccgccaggagcccgccatcgtgctccgcgtcgaccgcgacaagggctaca

SEQ ID NO: 6167 - DNA, 470 bp, Oryza sativa
  Clone ID: uC-osflcyp159d04b1
cccttctccgtccgccgcgcgcacgccgccgccgccatggggaggagacctgcaaggtgctatcgccagatcaagaacaagccgtaccccaagtcaaggtactgccgtggtgtccctgaccccaagatcaggatctacgatgtcgggatgaagaagaagggtgtggatgagttctcccactgtgtgcatctcgtctcttgggagaaggagaatgtcaccagtgaggctcttgaggctgcgcgtatcgcgtgcaacaagtacatgaccaagtctgcaggaaaggatgccttccacctcagggttcgggttcacccgttccatgtgctccgtatcaacaagatgcttttgtgtgccggggcagataggctccagactggaatgaggggtgcttttgggaagccacagggaacctgtgctagggtggatatttgccaggtccttctttttgtgccgtgcaagcccaacaatgc

SEQ ID NO: 6168 - DNA, 328 bp, Oryza sativa
  Clone ID: uC-osflcyp159d05b1
tcggtctactcgttttctacagagaaagggagggatcaggggaaggggggcgccggccccgcaccccgagctgtctccgacggtccactcctccgagcctgccaaagctaccaacgctaactcagcaagatgggtgcctgcggcaggatgacggagaaggagcgggaggagcagcagaagctgctcggccgcgccggcattggcgcggccgagcagcggccgacgacggacaagccggcgttcacgctggcgcacagcaagaaggtcatccccgctcagtgcttccagcgctcgatgatcaaggacttctcctacgtggaccatgacc

SEQ ID NO: 6169 - DNA, 441 bp, Oryza sativa
  unsure (1)..(441): unsure at all n locations
  Clone ID: uC-osflcyp159d06b1
cgttcatcttcctagcaattaagatcatggtgcagcgcacttcatccgattcggcggcgtcggctgaggccatggtcatggacctgagtcccaagcgtcccgccaagtcctacggcggcgaaggcggctcgtactttgattggtccccctccgagctgcccatgctccgcgccgcctccattggcgccgccaaactctcgcttgccgccggaggcctcgccctccccttctactccgattcggctaaggtggcctacgtcctccagggcaagggcacctgcgccgttctcctccccgagaccccctccgagaagatcctacccatcaaagagggcgacgcgctcgcccttccattccgcgttgtcacctggtggcacaacctgcacgccgncaccaccgaactcgtcgtcctcttcctcggngacacatccaagggccaca

SEQ ID NO: 6170 - DNA, 354 bp, Oryza sativa
  Clone ID: uC-osflcyp159d08b1
ttttctcctccccctcccggttcggttcggttcggttcgggtccggttcgatttcggtttttccttcggttcgggggttggtgggaaagcatggcggcgccggatgttgagtaccgctgcttcgtcggcggcctcgcctgggccaccgacgaccgctccctcgaagccgccttctccacctacggcgagatcctcgagtccaagatcatcaacgatcgggagacggggaggtcgcgcgggttcgggttcgtgacgttctcgagcgagcaggccatgcgcgacgccatcgaggggatgaacggcaaggagctcgacggccgcaacatcaccgtcaacgaggcccagtcgcgccgc

SEQ ID NO: 6171 - DNA, 422 bp, Oryza sativa
  unsure (1)..(422): unsure at all n locations
  Clone ID: uC-osflcyp159d09b1
tttttctcgccgctccatctccaagcccgaatccgcaaaaccctagcccaccccctgccgccatggccgcctcccccaccggctcctcctcctcggcccccgccgccgcggcggcggcggcgatggcggcggcggtggcggccgaggccaccgacgggccgaccctcagcgtcgtctcgaagcggctccgcgcgctgcggaagaagcacaaccggatcctccagatggaggagtcgctcgccggcgggaggaagctcaacaaggagcaggaggaggtgctccgatccaagcccgccgtcgtcgcgctcatcgacgagctcgagcggatgcgcgcccctattgccgacgtcctcgccgaggagctctcctnccgcccggcccccttcttcttcgccgtgccggcgacccccgcattcttcttc

SEQ ID NO: 6172 - DNA, 218 bp, Oryza sativa
  Clone ID: uC-osflcyp159d11b1
ggtgagaaacatctagagtgaataagaaagatggggttcgtccgtgccctgttcctgctggcgatggtgtgcgtggcggcgcacgcgaaggactaccccaaggaggagggcgcgaaggcggaggggccggcccgcgtctttgagggcggcggccgttgcagtacccacgacgtggtgaagctgggcggcaagggcgacggcaagacggacagcaccaa

SEQ ID NO: 6173 - DNA, 393 bp, Oryza sativa
  Clone ID: uC-osflcyp159d12b1
gttttggagacaaggaggaaacagaacaatcaactgtcagagtcatcagaagatgagcgtgatggtagaagaacgaaacacacggttgattctcctgatgattcccaacagaaacagcacactcctagtagagttggaatgcacaactcttattcaaaggatggcatgaacagtgaggatgcaataaagggtttacgtgacggtatggcttctaagaagtatcctgctaaaatcgatgatgattctgagtcagaagatggaagtccttttcgaaaagataagagaaaagcacacggtaataacaacattgattctggcagttcacgttcagaagaatcaggggaacatagattccattttgagaaagcgaaagcataaaaagagcccgtagca

SEQ ID NO: 6174 - DNA, 306 bp, Oryza sativa
  Clone ID: uC-osflcyp159e01b1
ataacgccgtatactggggacgagccaggaacccgaattgggagtttttcccgaagaactgataatacggattttctcgcaaaattattcccagccgcaccctctaggccgatggccgaggcggtcgcaagcggcgcagcggggagatggacccttcgcggcaagacggtcctcgataccggcgggacccgcggcatcgggcatgcggtggtggacgagctggcggcgctgggggcggacgtgcacacctgcttcaggaaggaggccgagctgggcgagcgcctcagggagtgggagggcaagggc

SEQ ID NO: 6175 - DNA, 474 bp, Oryza sativa
  Clone ID: uC-osflcyp159e02b1
ctttcttgctttgctcctggatatatagctagctgctttctttcttcctctctccctgtgcggcacgcgcctccaatcgatctcttcggtgagtagacgcatcgagatcggggggaaatgtcggtccagtttacatcggagcatgtttgctatgtcaactgcaactattgcaacactatccttgtggtgaatgtgccaaacaattgttcctacaacattgtgactgttagatgtgggcattgcacaatggtgctctccatggatcttgctccttttcaccaagcacgcactgttcaagatcaccagaacagaggatttcaaggtaataactttggaagctatgacatagctttcagaaatcagaggacatcgacagccatgtacccaatgccaaccagtcagcagcaagtgtcacctatacgtccccctgagaaaagacagcgtgtcccatctgcatacaacagattcatcaag

SEQ ID NO: 6176 - DNA, 425 bp, Oryza sativa
  Clone ID: uC-osflcyp159e03b1
ccctgtgcaagaagctcatctcctcctcctctcgcgtggcagccatggccaccaccgcgtccagcctcctcaagacctccttcgctggcgcgcgcctccccgccgccgcccgcaaccccaccgtctccgtcgcgccgcgcaccggcggcgccatctgcaactccatctcgtcgtcgtcgtccactcccccctacgacctcaacgccatcaggttcagccccatcaaggagtccatcgtgtcccgcgagatgacccggcggtacatgaccgacatgatcacctacgccgacaccgacgtcgtcgtcgtcggcgccggctccgcggggctctcctgcgcgtacgagctctccaaggacccctccgtcagcgtcgccgtcatcgagcagtcggtgtcccccggcggcggcgcgtggctcggcgggcag

SEQ ID NO: 6177 - DNA, 494 bp, Oryza sativa
  unsure (1)..(494): unsure at all n locations
  Clone ID: uC-osflcyp159e04b1
cttacaatgcaactctctctgtccatcagttggtggagaatgctgatgagtgcatggttcttgacaatgaggcactttatgacatctgcttccgcaccctcaagctgaccactcctagctttggcgacctgaaccacttgatcagtgctacaatgagtggagttacttgctgccttcgcttccctggtcaattgaactctgacctccgcaagctggccgtgaacttgatccctttccctcgcctgcacttcttcatggtgggctttgcgccactcacctcgcgtggctcgcagcagtatcgcgccctcactgtccctgagctcacccagcaaatgtgggacgccaagaacatgatgtgtgccgctgacccgcgccatggccgntacctcacggnctncgncatgttccgtggcaagatgagcaccaaggaggtggacgagcagatgatcaacgttcagaacaagaactcgtnctacttcgtcgagtggatcccc

SEQ ID NO: 6178 - DNA, 361 bp, Oryza sativa
  Clone ID: uC-osflcyp159e05b1
gctttatctagcgattgatcgatcgatcggttgatgatgcagtagctgctactgttcttctgttcgatccataaaccactatctttttttttgtgttcttggaatcaagaattcaagatcaatggtggtcgatggcggcgccgccgtggcgtctcggccgagcacgtcgcgccgccgcgccgccgtcacggcgaagcccagggcagtcgtcgcctcgcgctacctcctcccgtcctccaggcccgcttcgccggcggcggcgacacggccggctgccacgaggcggccggcgacgatggcggctgacgccgtggcgagagccgggtcggtcgtgtttcaggacgcgagctactgcttggat

SEQ ID NO: 6179 - DNA, 372 bp, Oryza sativa
  Clone ID: uC-osflcyp159e06b1
aatgttcgtcccttccaaacctaactgaggaagagaggaagaagaatcttcattttgttgttattggtggtggcccaacaggtgtagaatttgctgcagagcttcatgactttgtcaatgaggacttggcaaagttgtatcctgatgtgaagaagtatgcgaatatttcagtaattgaagctggagatcatatccttacaatgtttgacaagagaattacccaatttgctgaagataaattcaagaggacaggcatagatttgaagacgaattttaaggttgtgaaggtgtctgataaggctatcactatgactaattctgcaactggagagattgctgtgccttatggcatggctgtttggtccactggta

SEQ ID NO: 6180 - DNA, 465 bp, Oryza sativa
  unsure (1)..(465): unsure at all n locations
  Clone ID: uC-osflcyp159e07b1
tgctacccacacatctccattgcgccaaggaagaagaaaccctccccctccctctccccaatccaatccaatccaatccggcgagtcgcgtgagtttccgctcccctcttccgtcgattcggcatcgggttcgccgatcaggggggcttccttgtccgatttggtggttgattcgtgtttttgctcgtgttctccaggaccagctcagtctctcgaaggagcgccatggccaagagctcgttcaagctggaccacacgctcgagaggaggcaggctgaggctaaccgtatcagagaaaagtacagtgacagatttnctgtgattgttgagaaagctgaaagaagtgatattcctgacatcgacaagaaaaagtacctggtccctgctgatcttaccgttgggcagtttgtctatgttgttcggaagcggatcaagctcagtcctgagaaagcaatctttatcttt

SEQ ID NO: 6181 - DNA, 475 bp, Oryza sativa
  Clone ID: uC-osflcyp159f02b1
ctctttgtccgatggcctgttgctggcataataatggagctatatggatcttttgttctcttcagtggttatggacctcctatccaggccttcctataccagattccagtcattggatggattctgcaatacccattccagctgtttggtcagttcaggcgtaaacgtgcatgacaactcacggcagaaattacccttcgtacgggagcatattttgtgatgttaatacggaaacctgctgtgtaccatctgccacgatgcagtttaattcttgtgtgcatattcatactttcgcctttctaatctggagtttatctggcttttgctcattttgctaactggcagtagtttagtgttcatatatagacgatgtagaggctttaaatgattgttgctagaaatttgggatctgggttaaacatgtggatcttttagcctatttctaacaaattgtgagccccgtaacttttgcttg

SEQ ID NO: 6182 - DNA, 245 bp, Oryza sativa
  Clone ID: uC-osflcyp159f03b1
ttttttgcagcaaaattttggagctttcatcagggggaagtcaagaacgcacctcagactgtccttgccatgtggtgcccatatatagttgggataatttttcgctagtttttccgcaaattcgggaaatttcaaaaaaaatgtgcaaccactacgcaagggcggttggttcgggtattgactccctttaaatgttcgcctctcggatgctgctactttatgaattaagggttcttttggagtac

SEQ ID NO: 6183 - DNA, 391 bp, Oryza sativa
  Clone ID: uC-osflcyp159f04b1
gattttacaagttaaggctagaaaaagtaaaagcagggagaaaaggaaatctcaatgttgctactgagatactgcaggttgcaccctctcttcatatggttgaagtacgaaaagcaaaaggcgacaccctcgaatttcacaagttctacaagaacctctccagaaccttaaaggatgttgtttggaaatcagatgatcttcaaaatcaactttcctagagtaacttgggagaggaggaatgggtgaactattttagcatcccattcttttgaatcagcattcccatttctagaggctggaaaagcagaaagcatgtttattgcatctgtaattagatgtgagtggccctgtaaactatgtttggtcttcactagtgtttgaaatgctgctc

SEQ ID NO: 6184 - DNA, 322 bp, Oryza sativa
  Clone ID: uC-osflcyp159f06b1
aagtaagaagagacgagacgagggagagaaggagaggagggggccggacgcgggcgtcgtcttgttcctccccccctgtctctcctctcctctcctctggagctgcatgcttgcttgcatccattcctccccgcacccttcgcattgctctcgacgtctcgattcggtcgaggatctccaggaaaagaggaggaagcgatatgggttgcttttcatgctgcggagcggatgatggcgggcggaagaagaagcgcgacgatccttacgtccacgatccttgatccaggtggtaactatggaccgtgcaaagcccgggccccca

SEQ ID NO: 6185 - DNA, 420 bp, Oryza sativa
  Clone ID: uC-osflcyp159f08b1
ttggcccaccccgtctttttgcacaaaattttggaggtttcaataaggggagaggaagaacgcaccttagactgtccttgccatgtggtgcccatatataggttggattatttttcgcttggttttccgcaaattcgggaaatttcaaaaaaaatgtgtcaccactacgcaagggcgggtggttcgggtattgacttcctcttcatgttcgcctctcggatgctgctactttatgaatttagggttcttctggagtacaaaaaaaaccccttaatttgatctgtaatttctgttgtttagactttccagtacctagctagctagtaggagttgcagaatagagatctgtgtccctgtcttatacttttaggtctcttcagggtttgatcagcgctgtttcaatccaaaattgtgtgtgct

SEQ ID NO: 6186 - DNA, 490 bp, Oryza sativa
  Clone ID: uC-osflcyp159f11b1
tgctcatcccaacagatgctgatcctatggatactgatgttgcaactgagaaggcggttcttaatgatttgggtgacactacttcagtgtatgatgaagagcgcaaagattctgagctcacgaatgaggacgagaagcccatcgcaccaaaaccaaatgatcaggtacctgaggttagcccagatttagggtctccaattaagtgtgagtcaatttctagcgatgatatatcaactaacaaaaagaataatataaaggataatttgaatgctaataattttgatttagaactagaggctaagccagagatggtaaaaccattttctggcattacttccataggtggagatttgcagccattggatgatgacaaagatctgggtaaaaaccagtcatctttggaatacatagattccacagctaatgtggatgaaggcggctctccagagaaactaaatttagacaggagttcaggtgatgagtcaatgga

SEQ ID NO: 6187 - DNA, 342 bp, Oryza sativa
  Clone ID: uC-osflcyp159g01b1
ctgttttatgctagagtagtacttgattgtgcgactgctgatcctgatggcgcggatgagagctcttctcattggagggggtatagctaacttcaccgacgtccgggccacatttagcggcatcattcgggccttacgagagaaggaatccaagttgaaggctgcaaggatgcacatctatgtccgacgtggtggtccaaattaccaaactgggctggctaaaatgcgcaagcttggcgcacaactcggcgtcccgaatgaggtgtatgggccaaaagcgacgatgattggaatctgcaagcaagcaattgaatgcgttatggccgcagcataaatgaagat

SEQ ID NO: 6188 - DNA, 344 bp, Oryza sativa
  Clone ID: uC-osflcyp159g03b1
gcatcatttacaaacgcccacatcacacgcagaaatgcgcatcaacagccagccatggcgtccacgctgaccaacgtcggcctgtctaccccggcggcggcggcgtcgtccctcgttaggccggtcaccggagctggacgcgtggtgtttccccgtgttggccgcggcgggttcgcggcggtgagggcgagcgggccggcgacgccgccggacatctcggacaagatgtcggagagcatcgacaaggcgaaagaggcgtgcgcggaggacacggcgagcggcgagtgcgcggcggcgtgggacgaggtggaggagctgagcgcggcggcgagccacgcgcgcga

SEQ ID NO: 6189 - DNA, 275 bp, Oryza sativa
  Clone ID: uC-osflcyp159g04b1
ctttttccccctttcgccttccccctctttcctgattccccacctcctccctcgccgccgccgccgccgctgactcccaccgtgaccgcctcccccgccggcgcggtttcggaggaggcccggcgcctgcaggaggaggagggagggagggaaggaggtcctggcccgtcttcgtcgtcgttgactcgtgcgggtcccgacgccggccgtgctgcgcagtgctcgaccacgccgagcgcgccgtgggggggcatggcggtgaggtgggagggaag

SEQ ID NO: 6190 - DNA, 434 bp, Oryza sativa
  Clone ID: uC-osflcyp159g07b1
tttgtcttctcctccccctctttaccttttcctgctcggttcggttccgtggttcgtctagggtttagtgggttgagatggcggcgccggatgtcgagtaccgctgcttcgtcggcggcctcgcctgggccaccgacgaccgctccctcgaggccgccttctccacctacggcgagatcctcgactccaagatcatcaacgacagggagacggggaggtcacgtgggtttggcttcgtcaccttctcctccgagcagtcgatgcgcgacgccatcgagggcatgaacggcaaggagctcgacggccgcaacatcaccgtcaatgaggcccagtcccgccgctccggcggcggaggcgggggctacggcggcggcggtggcggctacggcggcggtcgtggaggcggcggctaccgaggaagtggccgcggcggc

SEQ ID NO: 6191 - DNA, 391 bp, Oryza sativa
  Clone ID: uC-osflcyp159g08b1
tgctttctattcctactccgctgcctccctctgctctcctctcctctccgccgctgccgctgctgctgcgtgctcctctcatccccgtctcttccccctccgcgcgccgaccactcgctgggaggaggaggaagaggagaccttccccggaattcgtgctcgccggatcgggctcgccgcaatccatgtcggaggaagcaggtcgtcccttgcccaaggttggcgaatgggatgtcaacgacccagcgtccgctgatggattcacagtgatattcaacaaagccagagatgagaaaaagggtgggaatgggcaagatactgattcaccctgcaaagaaactaggactgagagggtggaatcatatgcccccaagacaaactcgaagaaatg

SEQ ID NO: 6192 - DNA, 481 bp, Oryza sativa
  Clone ID: uC-osflcyp159g10b1
ggttcattcattgatttgatttttgcacggcatttgaggaagaatgtgcccgctgagggtgatcctcatcttcctctccgctactatcgccggattcttcctcatccggggcctcaacgccgatcccgacctcctccacgacgatgccgatgccgacgcctccgaatcccccagggaaagggcccccgtgcccctccattccaaggttgggtcggctttgaaaacaggattctggacgatggtggacatggcaagtgggaaatacctttggcgcactcttgtttcaccaccgacaaaatgcgaatctgagaaggcccagtgatggagttctgatatttatatcatacttagttgatttgggaacacagatgtaacccctattgtggttagattctgttggtgaagtgtagtacgatggcaactgtaacatgaggattacatctttgaagaaatgtacaaaatagttcacgtttgagccttt

SEQ ID NO: 6193 - DNA, 493 bp, Oryza sativa
  Clone ID: uC-osflcyp159g11b1
ttctagttggtgatggatctggctgggtgttcatatcaaaccaacagaaggaaattattaatgctatggataaatgggctccacaagctgaacacaggatctgtgctaggcacatatatgctaacttgaagagacacttctatgacaatgaacaccagaagttttggaagtgtgccaaggctccgtgcataacgttgttcgacttggcaatggcagagctggtacaacttacaactcctgcagtacaaaccatcttgaataaccatccgcagcattggagccgagcgtggttcaggtcaggctctaactgtgacttagttgacaacagtatgtgtgagtccttcaataaatggattctagaggctaggttctttccaataataacaatgcttgaaacaattagaaggaaagtaatggttaggatccatgatcagagaactatatcaggtagatggaccacatcaatttgtccaaacattctgaaaaaaatgaa

SEQ ID NO: 6194 - DNA, 377 bp, Oryza sativa
  unsure (1)..(377): unsure at all n locations
  Clone ID: uC-osflcyp159g12b1
ggctggggccaaactacctgatgctgccggtgaacgcgcccaagtgcgcccaccacaacaaccactacgacggcgccatgaacttcatgcaccgggacgaggaggtggactactacccgtcgcgccacgcgccgctccgccacgcgccgccgacgcccatcacgccgcgccccgtggtggggaggaggcagaaggcgacgatacacaagcagaacgacttcaagcagcccggggagaggtacaggtcgtgggcgccggatagacaggagaggttcatccgccgnttcgccggcgagctcgcgcaccccaaggtctcccctgagctccgcgccatctgggtcaactacctctcccagtgtgatgagtcgtgggggtga

SEQ ID NO: 6195 - DNA, 242 bp, Oryza sativa
  unsure (1)..(242): unsure at all n locations
  Clone ID: uC-osflcyp159h01b1
cctttgtttgcgacgctggcgaaggccggcggtcgggaggcggcggctgaagaggaggtcgtgttgtggacggaggacccgaggaggttcgagacgcccgacggcgaggcctacctacagtaccgtcttctcgccgncgcccagccgggcttctacttcttcagaaacggaaagcgcggcgagcgtgcgaccacgccggcagacgggatggagatggctcacacgtacatgccggggagcaa

SEQ ID NO: 6196 - DNA, 379 bp, Oryza sativa
  Clone ID: uC-osflcyp159h02b1
atgtttctatttatggtcactaacatctcattctcctaatggtcatcactagctaatagctagcttaattacatcaatacgccatggcggccgagaagcaccaccaccacctgttacaccacaagaaggacgtcgtgccggccacctgtgtcgactccgaccgcgagggcgtatacacgtcggagacggtgaccaccgaggtggtcgccagccgacagcactagtgcgaaaggtacaagaaggaggagaaggcagcacaagcacaagcagcaccatcgctaggcctgtgccctcggcgcagcgccttcggccttgttgagaagcactaagcgaaaaacgacccggagaacgcgcacaggcacaagatcaccgaggagat

SEQ ID NO: 6197 - DNA, 424 bp, Oryza sativa
  Clone ID: uC-osflcyp159h03b1
gttttgtttactatgagtactttgactgaagagggtgtgatggctgtgaaaaatgctgcatgtgagaggcttcttgatcaaagggtggagatcaagatgaaatcaaagaagatcaatgactgcctaaataggtttcatgttgctatgccaaagcctcgtgataacaaggagaggcctgcttgcatccctcaggctgttctggatgctcgagcaagtgctgctgctgcaaaggaaaagaagaagctggaaaggaaactggagaaggacctcgagaatgagaatggaggtgctggggtctattctgctagtctcaagaagcattacttattggctgatgatgaatggaaggaagatattctgcctgagatattggatgggcataatgttgcccgttttctggatccagatatactgcaaaggtgtg

SEQ ID NO: 6198 - DNA, 388 bp, Oryza sativa
  unsure (1)..(388): unsure at all n locations
  Clone ID: uC-osflcyp159h04b1
ggacgttctcgagacgtccaccccgccggggcccggcgtgaagcacgtactcaaggccagcctcgacgacgacagaaacgactactacgccatcggcacctacgacggcgagaccgatacctggacgccggacaacgccgacatcgacgtcgggatcgggctccggtacgactacggcaagttctacgcgtccaagacgttctacgaccccgtcgggcggcgtcgcgtgctatgggggtggatcggcgagaccgacagcgagcgggctgacatactcaagggctgggcctcccttcagtcaattccgaggacagttatgctggacacgaagactggcagcaacctgctccagtggccgggtgtggaggtggagaacctncgtatgcgc

SEQ ID NO: 6199 - DNA, 432 bp, Oryza sativa
  Clone ID: uC-osflcyp159h05b1
gatttctctctcgctgcagatccaaaccaacctcaccgtcgacgaggaagaaggcggcggcggcggcggaggcgaaggcggcgaagatgcagtacaagaacctggggaggtcggggctgcgggtgagccagctgtcgtacggggcgtgggtgacgttcggcaaccagctggacgtgaaggaggcgaaggcgctgctccaggcgtgccgcgacgccggcgtgaacttcttcgacaacgccgaggtgtacgcgaacgggcgcgccgaggagatcatggggcaggcgatgcgggacctccggtggcgccgctccgacgtcgtcgtctccaccaagctcttctggggagggcagggccccaacgacaagggcctcttcccgaagcacatcgtcgagggccttcgcggctcgctcaagcgcctcgacatggactacg

SEQ ID NO: 6200 - DNA, 416 bp, Oryza sativa
  unsure (1)..(416): unsure at all n locations
  Clone ID: uC-osflcyp159h06b1
gctttatcggcgtcgccatggtgtttctcatcgtgtcggcttcctccttcctcatccgtctcccacttgtcgctcgagctcgcctcccaaaccctacctcctcctcatatacctctaggtctaggtctagggccctcctcctcctccccgcctactcccctcttcgcgccttctgccccgcctcccgccgcccctcgcccgccacctgctccgccgcctacgcctnctnctccatggccaccgacgacaacccgctcctcgccgacttcgacttcccgcccttcgaccgcgtcgagcccatccacgtccgccccgccgtccgcacgctcctcgcccgcctcgagggcgagctcaccgacctcgagaagggcgtgcagcccacctgggggaagctggtccagccgctcgagcggatc

SEQ ID NO: 6201 - DNA, 333 bp, Oryza sativa
  Clone ID: uC-osflcyp159h07b1
gctttcgactactctcggagaaggaaagagcgaagaatggccgcctcatcgtctctcagactaatcctcggctcctcgtcggcgtcgcgccgccagattctcgccgagatgggatacagcttcacgcttcttagtgcggatattgacgaaaaggagatcagaaaggagaagccggaggagcttgtggtcgcgctggctcatgcaaaagcagatgctataatggagaagctgagggataatgggatgatgaaggaaattcttgattctcaagagactacactgttgataactgcagaccaggttgtggttcatgatggagtgattagagaaaaa

SEQ ID NO: 6202 - DNA, 496 bp, Oryza sativa
  unsure (1)..(496): unsure at all n locations
  Clone ID: uC-osflcyp159h09b1
tgtttacttggtggacaaggcaaaggatcagtttgaaaatcttttgctgtcatcagcatgtgaaactcttatggagattggtaacttaggaaacttgtacattgatgagcaagcaccatggtcttgtttcaagcaagggggtgagagtgctgaaaaggcagcgaaggatcttgttattattttggagactatgagaataattgcaattgcactatcaccgatcaccccaagcctttctttgaggatttatacacagcttggtttcacagaagaccaatttagaacattgagatgggaggataccaaatggggaggtctaaaggcaggtcaggtaatgatggagccaaagccagtttttgcaaggatagaaacagagacggacgagaaagatcaatcaagttcgaaggcaacaaaaggcgggaagaagaaggcangaagtcaaggacttgtggagcatgagtcaagtttgtgatggtgtacatagcataaactacct

SEQ ID NO: 6203 - DNA, 449 bp, Oryza sativa
  Clone ID: uC-osflcyp159h10b1
tttttcctcctctcctccttcctgcgtcgcctccctgatcagccgcagctcgttgccggccgttgttgcgcggccatggaggcgagcgccgggctggtggccgggtcgcacaaccggaacgagctggtgctgatccgggggcacgaggagcccaagccgctgcgggcgctgagcgggcaggtgtgcgagatatgcggcgacgaggtcggccgcaccgtcgacggcgacctcttcgtcgcctgcaacgagtgcggcttcccggtgtgccgcccctgctacgagtacgagcgccgcgagggcacccagaactgcccccagtgcaagacccgctacaagcgcctcaaggggagcccgagggtgcccggggacgaggacgaggaggacattgacgacctggagcacgagttcaacatcgacgacgagaagcagaagcagctgcagcaggatca

SEQ ID NO: 6204 - DNA, 468 bp, Oryza sativa
  Clone ID: uC-osflcyp159h11b1
ttttcttctcctctcttcgtctctctctctctggcggcgcgttggatttgacgagctcgtcaccaccggctgcggcggcgaggcaggcatccgcactcctcggcgtcgggccgtcgtcgttgtccgctacctggaaaagatggctggtggctttagggtattgcatcttgtcaggccttttctggctttcctgcctgaagtacagagtgctgataggaaaataccatttagagaaaaagtgatctacactgttatttccctattcattatcctggtatgcagccagctaccactgtatggcatccattcaactactggagctgatcctttctactggatgcgtgttatccttgcatcaaaccgagggactgttatggagctgggtatcactccaattgtgacatctggcatggtaatgcaacttctagggggatcaaagatcattgtagttgacaacagtgtgagaga

SEQ ID NO: 6205 - DNA, 326 bp, Oryza sativa
  Clone ID: uC-osflcyp161a05b1
gcatattcaacaaaccagttatcttcacaagatcccaacaggagctcggtgagaggcaattttcctgagccccttctgttaggttcttctctgtttccttctgactcggcagaattgctatctattgccgggaggcagaaagcaaccaacaaaattccagctccacaattcgaactgcttgaaatataggagctcaacagattgctgggttaaatgcatcccagcctacttcaagctcaaggggttctggttgatattgttaggagatccttgcaggctgctagcgttcctaagtccagaggttcaagcattacatcacagcagca

SEQ ID NO: 6206 - DNA, 139 bp, Oryza sativa
  Clone ID: uC-osflcyp161a06b1
ccttgatttaatcaaggtttgagtctatgtcccagatcattgtgtcaaagatagatgaaaggggaaccaagatcgatgagctggagcagagcgtcaacgaccttgaatgctggatggggactgatgtgcctaccaagaa

SEQ ID NO: 6207 - DNA, 259 bp, Oryza sativa
  Clone ID: uC-osflcyp161a07b1
gatcgacgaagatgctcttgtcagagcccttgactctggcaaagttgctcaggcagcccttgatgtcttcactgaggagcccccagccaaggacagcaagctagtccttcatgagaatgttactgttacaccccatcttggagcaagtacagtggaggcccaggagggcgttgctatcgagatagcccaagctgtcgtcggtgcactgagaggtgagctcgcagcatcagccgtgaatgctcccatggtcccagctgag

SEQ ID NO: 6208 - DNA, 277 bp, Oryza sativa
  Clone ID: uC-osflcyp161a08b1
ttctgggacaacctggggttcgggctgacgccgaccgactacatgtacgtcatgcggtgctcgctggaggacggcgtcttctcccgcggcgagctcagccgctactgcaacatcgagctcagccccttctccggcgtcatcaactacggccaggggctcttcgagggtctgaaggcgtacagggcggtgaaccaacaggggtcgtacatgctgttccggccggaggagaacgcgcggcggatgcagcacggcgcccagcgcatgtgcatgccgtccg

SEQ ID NO: 6209 - DNA, 463 bp, Oryza sativa
  Clone ID: uC-osflcyp161b02b1
gtttgaattctactgatgttactaaattctaattcttgcagacgtcagcagctgcagtgtgcacccttgcaggaggcacaactcgatggcaagaaactagaaaaggacgacaagagaagattatgccagtggtggtggcgccactggaatgccatcctggtcgtcattctcgacatgggcatcgtcaaagctcgtcgccggtggccaacctttaccccttgccagaattggataaacaatgatgggaataggagtgctggaccatgagctggtggattgattttcttgtggttgataactgagtctggagccggccatatccatcaattgtggggttgttgtaattttttttattttgtatttcgtccattctaccaaaggtttgtaattgcgtatggggatcagaatagttggttttattataaaatttttggcccaaaaattttcccggatgtttaaataa

SEQ ID NO: 6210 - DNA, 74 bp, Oryza sativa
  Clone ID: uC-osflcyp161b03b1
gtaatatggtgagagcgagaagagaaataaagtgtgggaggggaaagcgagcgaacagggcaacaacggggcaa

SEQ ID NO: 6211 - DNA, 381 bp, Oryza sativa
  Clone ID: uC-osflcyp161b06b1
gttttcgccgcctcctcctcctctcgccttctcccgtcttctccttcgagttagctaccttcttattcaaccatgggtaaggagaagacgcacatcaacatcgtggtcattggccacgtcgacttcggcagtcgaccaccacgggccatctgatttacaagcttggaggaatcgacaagcgtgtgatcgagaggttcgagaaggaagccgctgagatgaacaagaggtccttcaagtacgcgtgggtgcttgacaagctcaaggccgagcgtgagagaggtattaccatctatattgccctgtggaagttcgagaccaccaagtactactgtattgttatcgatgtccctggtcacccgtgactttattaagaacatgatc

SEQ ID NO: 6212 - DNA, 304 bp, Oryza sativa
  Clone ID: uC-osflcyp161b07b1
ttttctctactactactagccagcaagctagctaactaactacgtggctatggcccccaccgtgatggtctactcggtcaccttcgtggctccatttcaagggctcaagtccaccgtccgcctccctcgaagccgacgtttcaccaacttgggctttggcaatcgtcagcaatggcggaaggatcatgtgcatgcaagcgtggccaattgagggcatcaagaagtttgagaccctatcgtacctgccaccactcaccgtggaggaccttttgaagcaaaccgagtacctggtttgatccaagtg

SEQ ID NO: 6213 - DNA, 215 bp, Oryza sativa
  Clone ID: uC-osflcyp161b10b1
tctattcaaccgttgacgccgctcccctcatccttcgtcgagcccccaccacgccttcaccgaccgccactcctgctcgcccgaattgacgccgccgtcgtcgtgggttgacatctgcgatcctcctatcgaacttctacccgacggcactgtctccatccattcctcctctggcgcctgctctcccggaccctaccgtccttatcgccccaaca

SEQ ID NO: 6214 - DNA, 391 bp, Oryza sativa
  Clone ID: uC-osflcyp161c01b1
catttatatgggctttgaagaagaatggctttggaaatctcccagtcattgttggggagattggatggccaactgacggggacatgaatgcaaatattcagatggcgcagcactttaaccaaggctttctaacacatattgccacagggcgaggaacgcccatgaggcctggaccagttgatgctttacttgtcagtctaatcgatgaggatgagaagagcatacagccaggtaattttgagcgtcactgggggatattcacctatgatggcttgccaaaatatcaaactgattttgggcaatcacatggcctttttaaagcgaaaaacgtgaagtaccttgaaggaaatagctgcttctttaaccttctattggccttactgatccaagg

SEQ ID NO: 6215 - DNA, 314 bp, Oryza sativa
  Clone ID: uC-osflcyp161c02b1
ctctgtcctaagaaaaccaccaaggggaagaagcctggcaagggcgggaataggttctggaagaacattggccttgggttcaagacacccagggaagccatcgaaggaacctacattgacaagaaatgcccattcactggtactgtatcaattaggggtcgtatcatagctggaacatgtcatagtgctaagatgaacaggaccattattgttcggaggaattatctgcactttgttaagaagtaccagaggtacgagaagaggcacttcaatattttctgcttacattttaccgtgcttccgtgttaaggaag

SEQ ID NO: 6216 - DNA, 265 bp, Oryza sativa
  Clone ID: uC-osflcyp161c03b1
gaaaaatgaagaacgcagatactttggtaacaagcaagaaattggtacagaaatggctctgaggctgtgggctagctcagctgccaatgccctcaagatctcatgcagtggagccaccagggctgcacctgcctactcaatctccagatacttctccactgttcttgatgggttgaagtacagctactctcatgagtgggtcaagaatgatggctctgtggccacaattggaattacagaccatgcttagggccatttgggagag

SEQ ID NO: 6217 - DNA, 273 bp, Oryza sativa
  Clone ID: uC-osflcyp161c04b1
ccgaatgccacccacactctcgtgctcctcttcctcatggcgatctcgaaggcttggatctcgctgctgctcgcgctcgccgtcgtgctgtcggcgccggcggcgagggcggaggaggcgccggccgcggaggaggaggcgcctgtggctgaggccgtgctgacgcttgacgcggacggcttcgatgaggcggtctccaagcacctgttcatggtcgctgagttctaccccccgtggtgtggacacttgcagaagctcgctccagagtatgag

SEQ ID NO: 6218 - DNA, 75 bp, Oryza sativa
  Clone ID: uC-osflcyp161c05b1
actagttttagatattgagcggccgtcctagtttgagtgagagagcattagaaggcagtatatcatgaaacccat

SEQ ID NO: 6219 - DNA, 369 bp, Oryza sativa
  Clone ID: uC-osflcyp161c07b1
ttttaccactgctagcttgggaagaggaggaggagcttgagcttggagagagacaacaatggcggctcaggctcttctctctgggaggcagctgctggggaggccattgcaatcttcagtctccaggctttttttctccaggaaggcacccttcatggtcagggcagaggccactccccctgccaagcaaggtgctgacaggcagctgtggtttgcatccaagcagtccctgagctacctggatggcacgcttccgggagacttcgggttcgacccgctggggctattggacccggaggggaccggtgggttcatcgagccccggtggctggcctacgcgaggtgttcaacggtcggactgttattatg

SEQ ID NO: 6220 - DNA, 248 bp, Oryza sativa
  Clone ID: uC-osflcyp161c08b1
tgttttcggactccccgctggctccccagtggtaccggctcgagaacaagcgtggcgagaagacccgtggcgagatcatgctctccgtgtggctggggacccaggccgaccaggtctatcccgacgtctggcatttcgacgcccatgcggtggtcggtccgggggccgtcgtctccacgcgcgccatggtttacttttcccccaagctcggttacctccgccgttgccgccatcggagcgcatgacct

SEQ ID NO: 6221 - DNA, 415 bp, Oryza sativa
  Clone ID: uC-osflcyp161c09b1
gttttattcaatattttatcaggggaggttgcactccatcaaagtgttctaaagcgcctatcagaggaagctggaaaaaatgcaatgaatgaacagattgagatggaaatgaaggtggccaatgatgaggttaagcctaataagcagaaaatagcatctctagaaaggcggatttctaattcaatgtcaaatagtcgaggcatgcatgataatttagaactctcactgccttacattgaaatacctgagcaactcaatgagaaagctgtttaacttgaggcaagtgagtgccaagagtttttgttgttagaaagaaccacattttaacaccaacacaggcattgttcagaaacaggaactcaagcttacaaaggaaagcccttgcccagtgatgaatctgatgaatttctgaaaa

SEQ ID NO: 6222 - DNA, 305 bp, Oryza sativa
  Clone ID: uC-osflcyp161d01b1
gttttatcggcggaggagatggtgacgctgtcgggggcgcactctatcggcacgtctcactgctcatcgttcacaaaccggctgtacaagtactacggcacgtacggtactggacccgtagatgccggctgtgtacgccgtggacatgaagagtaagtgcccgtcggagacggcggtgcatcatgacgcgacgatggtgcagcttgacgacgtgacgccgttcaagatggacaaccagtactacaggaacgtgcttgccgggaacgttacgttcgcctccgacgaggcccttctcgacacgccgg

SEQ ID NO: 6223 - DNA, 305 bp, Oryza sativa
  Clone ID: uC-osflcyp161d02b1
gaagatgacccaagaaacccagctgtcattgcagataatgttggtgacaatgttggagatattgctggaatggggtcagatctctttggttcctattctgagtcatctttgtgctgcttttgtcgttgcttcaatttcttcttttggaattaaccatgaattcactcctatgctgtacccgctcctgattagctcagttggtatcattgcttgtctgattaccacacttttcgccactgatttttttgagatcaaggctgttgatgaaattgagcctgccctcaagagcaccttataatttccac

SEQ ID NO: 6224 - DNA, 93 bp, Oryza sativa
  Clone ID: uC-osflcyp161d04b1
gcccctgtaatttacaataaatatgattcattttatctgtacatagcaaattaatttataaaaagggtaaaaaaaaggaaatatttttttctt

SEQ ID NO: 6225 - DNA, 313 bp, Oryza sativa
  Clone ID: uC-osflcyp161d05b1
gttcttatttaaggttgcgtctatgcagaaggggtgaaccatctggtgattacttccgctcatttttgacagaggacaaggcacctggtggcctttcctatgtggagttccttgtgcatgtgcacaggcaaatccagagcatgatgacgtgacatgccatatgcttgtcgcactgtttttggttagtggatggattacaaacctagaagagatcagtttcggcacatggatactgtgaagaagcattgggcaactccagaacactggttgagttggggttagacattaatttcctggagaatagatttgcagg

SEQ ID NO: 6226 - DNA, 460 bp, Oryza sativa
  Clone ID: uC-osflcyp161d08b1
gatttcgtcaagagcatgcctgtggagccacacccaggcttatggggtgcacttgctggcgcctgcaagatccatggcgaggtggagctcggtgaggaggttgccaagaagctcattgagttggagcctcagcatggcagccggtacatcctcctgtcaaacatatatgccacctcgaacagatgggacgacatggctaatgtgcgcaggatcctgaaggatcgcaaggtccccaagggtacaggcaatgccatagttggaaatgattctcagtctttaggatatgaaatcgatttgcgattagtgcttctttggactgagaaagtgcattcagtgtgacttttcacaagcttcgttgtggtagggaggggattgaaccacccaaccttggagacaccattggtactggaaacaagcctcccataaagatatttactttcatgggggcatttgggaaagt

SEQ ID NO: 6227 - DNA, 439 bp, Oryza sativa
  Clone ID: uC-osflcyp161d11b1
gtttaaaagaaggggagaaaataaaaagctcaccggcggcttctctcctctcgccgggcgaccgcccgatgctgcgcggattacctcaggcccggaggctcctcaggaggatggggttggagaacgaagacccctacttatggaagcagatgggcaagggcatgctctgaacctacgcgctcttcggtgccgcctggctgtggaacgagacctcttccctcggctggtggacgctcaagccgcgccccaaggaagaaagagaaatggcccacctttacgagcgcaggatgtttccatacccaggggaatgaagaggcaagtgaggagctcataaaaagtggaggggctctaggcaccacaattggacccaaggttctgctgatccaaatggactctgaaaacatgcagaacaattgcagtcaaaaaagtttgaccaata

SEQ ID NO: 6228 - DNA, 397 bp, Oryza sativa
  Clone ID: uC-osflcyp161e01b1
cggtgtttaaggcgctgagcctggtgtctcccaagggcggcgacgcgccgcgggggctccgggagaagccccggcactccgagaagcccaccaagtacgccggtagcccgaggagcggcggcgctccccgcgtcatccaccagccttgctaggctgcgatggctaggatggcaaaaactaaaggatgtagcaaaagcattgcgtctttgcgccgcggtgtattgctatgctttcttcctcccggctgctgctgctggtggggtctactcaaaggttgggtttggccctagagcttatctaggaatttagttgggtccttttgtatagtattaaaccaaaatgaccctaaaaaaaggatgaacaaaatggcaccttttgtcagtgttgccttgtaagt

SEQ ID NO: 6229 - DNA, 87 bp, Oryza sativa
  Clone ID: uC-osflcyp161e02b1
gtttccttggcgatgcaggccgactttgccgccttgatgtttccgcagctggcgcagcggaggggaagcgatcgcgcggtggtggtg

SEQ ID NO: 6230 - DNA, 193 bp, Oryza sativa
  Clone ID: uC-osflcyp161e07b1
gttttccgctcccattccctgcggattctatctctctcttctccaattcgcgcgggctcgggcgccgcattggcgcgatctccggattgtgagggggtttgttgtcgaaatgttgggggaattgtgggtgctggttgggccgatcttgtcgttggagctggaggggtttcaggatcggtgcggttcttgtgtg

SEQ ID NO: 6231 - DNA, 436 bp, Oryza sativa
  Clone ID: uC-osflcyp161e08b1
tgtttacggtcttgccgttcacgtgctctttatgaagggctgaaggttgctgctacaccagatttaatgctgggttatttagatttctttcttggtggggatgaaaaaaggccttgacctcccccctcgtcttcatcaaaggctgccaatgtcattaatctttggaggcgatggaagttacatggctccattttcacttcacagtgacagtgtggtcacaagtcttattagtcagggtgtaccttcatcaatatggcaccgccttgatgctggattgaacgcccagttgcgtttggctcgtcgtggaaatctaaaagccacattttttcctgtactcaaatggcttgaaacttaagcaaattcctgtttgaacacataccgcgtgcgggttgaccctgcatggtttcaagctaccagacttggtttctatcaattt

SEQ ID NO: 6232 - DNA, 423 bp, Oryza sativa
  Clone ID: uC-osflcyp161e09b1
atttgctccttttgtatgcatctgatgtggaatcacacaatagtggagttctctttcagtttattaatcatggtggtaaaccatatatagttttcaccagtgtacaatatagtgtgcaattcatcagtccaattgtatggccagtagctcatgtgtagctttaggggcaaatagtaaagtcagaatatataactagacatgcatgcagtgttgctccagtatatttcagagcttatatgtactgaacttttgtgcaatttagttatgatgatctgatctttttgtatattaccagctgcaatttttcgatatgagctttgtataatcttatgcacatattgctcagattatctttttgcacatatttgctttggatattcttttggatatgccagctgcttagttttatttggttagcagccc

SEQ ID NO: 6233 - DNA, 285 bp, Oryza sativa
  Clone ID: uC-osflcyp161e10b1
cttgctctcgatctcctacagaagctacaatagccagcaaatcaatcgatcgatcgatacgtgcaatggcggccatgaaggtgaacaagattgccgtggcggcgctgttcctcgtcgccgtggtggtggcgggcggcgccggcgctagcgcccacgttggggttggggctggggccggggccgacgccggcgttggtgccgccgtaggggccggcgctgacgtcgttcttggggttggcgccaacttcttcggtgtctgtggtgctggagttggggctggaattg

SEQ ID NO: 6234 - DNA, 285 bp, Oryza sativa
  Clone ID: uC-osflcyp161f02b1
gtgttttatacgatcacgcgtacaggtgccacttccacgccgcaatcctgcgttccggcgacgaggcgtggatgctcatggataggcatctcattgtcaactttccccaccttttgagggatgactgccgtgtccctatatacccacgactgctaagatgctactgcacaatggtaaggattattggtgcgacgtgacgaccggagcagtcaccaccgtctgctaaggcaagtggaagttgcggtggccagatgagccaggtcaggagatccaatccagccacct

SEQ ID NO: 6235 - DNA, 252 bp, Oryza sativa
  Clone ID: uC-osflcyp161f03b1
gggttagtatgcattgggaaatatcgcgtataatcaggtattccgagcagattctctactctatttactagtgtatgcacagcgtcctctttttacaacaaatactattgagttagttggaaaatgattaagccttgggctggacagaatgcgactgttgctgtcatgagttatagtggttacgatattgaagatgcaattgtgatgaacaaattatcccttgaccgatggtttggacggtgcattgcaatg

SEQ ID NO: 6236 - DNA, 337 bp, Oryza sativa
  Clone ID: uC-osflcyp161f04b1
agatagtataagcaacacaagggattaactcatcactcacttagctaattaaatcttcgaccatgtcggacaagtgcggcaactgcgactgtgctgacaagagccagtgcgtgaagaaaggtaccagctatggcgtcgtcatagttgaagccgagaagagccacttcgaggaggtcgccgccggcgaggagaacggcggctgcaagtgcggcaccagctgttcctgtaccgactgcaagtgcggcaagtgaagtcacgaagtaaccgaacacttgccgtcggcgagtcacctaccttaattagtccacaataaaaaccacccatatgagtgtggttt

SEQ ID NO: 6237 - DNA, 145 bp, Oryza sativa
  Clone ID: uC-osflcyp161f05b1
tttttttgttccaaatgaacctacctgttttttgtttatccatttgggtggacaaccgctccagttgtatctaataagaggcgtttgaatctttggaccaaaaaatttgagcttctggtataaacctgtaatactcttcaagtgc

SEQ ID NO: 6238 - DNA, 427 bp, Oryza sativa
  Clone ID: uC-osflcyp161f09b1
tgtggagcttgattcgttaatgaagattgtgacagttaaaagagatgatattgctgatacacctactgttgcaacaccattccgagaacctcgttattcgttgggtggtgaaactccaatgtatcccattttgaacaccgtttcatccttaccagacaccaatgcgggaccctggagcaaccccaatacacgatggcatgcggactcctatgcgttgtggctgggctcctatgagtcctccgagggataactgggaagaaggaaatcctgctacttggggaagcagtccagcttaccagccaggaactccactcagttggccatatgaagcacccacacctggatcagggtgggcaaatacgccaggagtttagtataatgacgctttcactcccagggagagcaactactgaaatgcttcaagccc

SEQ ID NO: 6239 - DNA, 393 bp, Oryza sativa
  Clone ID: uC-osflcyp161f10b1
ctcacagctcactgcatcaatggccgcggccaccatggcgctctcctccccggtgatggcccgcgcggcgccgtcgacctcctccgcgctcttcggcgaggcgcggatcaccatgcgcaagaccgccgcgaagcccaagccggcggcgtcgtcggggagcccgtggtacggcgccgaccgcgtcctctacctcggcccgctctccggcgagccgccgagctacctcaccggcgagttcccgggcgactacgggtgggacaccgcggggctctccgccgacccggagacgttcgccaagaaccgggagctggaggtgatccactcccggtgggcgatgctgggcgcgctcggatgcgtcttcccggagctctttgcccggaacggtgtaaagtt

SEQ ID NO: 6240 - DNA, 451 bp, Oryza sativa
  Clone ID: uC-osflcyp161f11b1
tgtataccaagtggtggttgtagcatatcattgacttgtgatcaatgccctggcacaagtgcgacagattctactggagcaacctgtgtgcagcaggcataaaaggtgtctactgacagtgatcaagttgctaaggctgcaatgatgactgttgaaggtgccatgaatttcatgagaagcacgatatctggagacttgggctcctttccatgaacagacgctgcatctggaaaggagagcatgcctatgggcatgaatccaaattttgacaccatgggagcagatagtgatcttgctgttgacttaaatgtatggtactcagcggggttttacactggttggttccttatgcaccagtccattgaaaaatactagacaaggctgtcttctattaaaagccatttggagtttctccaaaaatgttctttccattccacaaaaataagaaatc

SEQ ID NO: 6241 - DNA, 184 bp, Oryza sativa
  Clone ID: uC-osflcyp161g01b1
aattaatttgttgggtctgatggcttgtctatgggtgtatctactctgattagctccggtttttgtgtatgccaatataattattccgtaagtacgtggggagtcaagaacattatgtgtgtagtttgatttcataaattgatttgagattctggtaagaaactagtttaatatttacaagatt

SEQ ID NO: 6242 - DNA, 283 bp, Oryza sativa
  Clone ID: uC-osflcyp161g02b1
gattggtccccccgccgccgccgtcgtcgttccagctatagctttccccgccggcggtggcgatcgatcgatcctctcctcgtcggttgattagggtcaagaattcttccctctcccagcttggttgaatttcttggtttgatcaaggggaggaattaattgagaggtgaattagttcgccggagtttggatctctctctctctcctcttctctgagctgagagggggaggagagaatcaagtgacgagttatagtatggcgaggagcggcggcggcaatggt

SEQ ID NO: 6243 - DNA, 422 bp, Oryza sativa
  Clone ID: uC-osflcyp161g09b1
tgttacaccgatagctagctaactaatcttccccttcgtctccggcattattccacttggacgaacactagctcaccggccggccatggcgtcttcttccgttctgatcaagctgctcgtcgtcgtcggctgcgccgccgcggcctccgcggcgacgctcaccgtgggtggtagctccgggtggacgcttggccagaactacgatacttgggcaagtggccaaaccttcgcggttggagacaagctcgtgttcagcttcgttggggcgcacacggtgacggaggtgaacaagaacgaatacgacaactgcgccgtcgcaagcaactcgatcagcttgaccagcaccagcccagccacccttgactttgtcgcccgcgggatgcactactacatttgcaccatcagcgggcactgggcccgcg

SEQ ID NO: 6244 - DNA, 370 bp, Oryza sativa
  Clone ID: uC-osflcyp161g11b1
ttttcgccccccatttcgaagcccaccgaattccattcctcgcgattcctctcccctcgcctcctcgtcctccccctcccaggggatcgccggagaggaatcgcgcggaggaaaaaaaaagaaaagggcttccccgtcgtctaagttaaaaggaagccatggagcacaaggagactggatgccagcagccagaaggcccgatcctttgcatcaataactgcggcttctttggcagtgcggctaccatgaacatgtgctcaaagtgccacatggagatgataatgaagcaggagcaggccaagctggcagcctcctctatcgacagcattgtcaatggtgggtgattcccgggaaggaaccaattattgct

SEQ ID NO: 6245 - DNA, 266 bp, Oryza sativa
  Clone ID: uC-osflcyp161h03b1
acttttgtctgttccagccacacgagcctagttcaggtagatacaatggcgtccaccgcctttttcatgctcgccgacttgctggcggtggccgtcgcggcggcgccagcgagggcggtgcgatgcccgccgagcgacaagcaggcgctgatgagagtgaagcagtcgctgggaaacccggcgacgctgtctacgtggtccctggcgtcggcggactgctgcgagtgggaccacgtccggtgccacgaggccgggcgcgtgaacaa

SEQ ID NO: 6246 - DNA, 538 bp, Oryza sativa
  unsure (1)..(538): unsure at all n locations
  Clone ID: uC-osflcyp161h09b1
tgtttattgcttcgcatattccctcgtgagcttctccatcgtatccctgcgaagacattggatcagtactacagcagagatgctacccactgatctatgttcagaaaaatcaaatgttttctctcaagtgcagcttgaataaattgaaatgtttgaacttgtggcctttttgctgtagttatatatagtccggtcctattctttctgtcgggtgagcataattcggtcgtagatcactttgtcacgggaacttctgtaatattgtgccatgtatctttaaactttcacacttgagctctttttggttttcatttgccagaattgttagcaagagcattcgtgggccaagatggttggacctccaacttttcaaggaactggctggatctacttttgtgaattgaataagatggaacaantaactgcgatgaaatttccatgttggacaatgggggtttttgaaaaataatatatgcaaattgggccgctttaaaatcaagtacaatatgatctattgcaattcgtcttatctattcct

SEQ ID NO: 6247 - DNA, 281 bp, Oryza sativa
  unsure (1)..(281): unsure at all n locations
  Clone ID: uC-osflcyp162a01b1
gtggcgcgagaccggaataggaggtttcaatggaggtggtgggcggcgtgtcgtcgctgagcgcgtcttcgccggcgccggcgcgggcgcggctgcggcagctgtcgcccggcgaggcgagcggcggggggagcttcctgctgatgaggacggcgccgaggagcaggctgcaggcggcggcgaggccggcgaggcgggcggcgctggtggtggaggcgaggggaggggggtggntttaccatttcttctcttccctccctcttctctatctatcttttatt

SEQ ID NO: 6248 - DNA, 477 bp, Oryza sativa
  Clone ID: uC-osflcyp162a02b1
gatgttttcatgatattgatcccggtattcctacaacgccagggcctcagagtgcaacagagcttgatccgaagatcccacaaactccacgtccaaaccttaaggaggccggtgaaaaacggacatcgataaagatagtagtcgatgaagatgcgaaaccgacaaggagtgcgggagatgcagagaacttgacagaagatgtagccaaggtgatggagaaaaacgcaggtgagccaggtagatcactgacaagcatactgagtagaaagatttccaggaagaaaccagaggacaagctgtctgatatcccagagcagactgaagctcaagcatctgagttggtgaaagaagggcctgttccagttgagggtaaacctattgatggtcatccgacaactgaaaatggccatggagatggtgcttcaggagacgcagctgaaacgcaaactagtgctcagactttacaatgattacaag

SEQ ID NO: 6249 - DNA, 519 bp, Oryza sativa
  Clone ID: uC-osflcyp162a07b1
ttggtttgtccgtaaaactattgcttgcaaaaggagcttatgttgacccaatgtctacttttgggacaccacttcatcttgctgctaaagaagggcaggatggcaccatgaagatattgttggacaacaatgcagattgcaacaagatggtaaacggtataacacctctcctccttgctatgaaagctgcatcagcaaaatgtatggagctgctggttgaggctggagctgatgctacttactctgatgtcatctggaattatatgtcaactacttttatggatgatgaagatagtggttcatctgtgttctcggattctgaaccagaagagattgatgccaatcaccatattcccgtcaatgacaaacctgtgaatcgaaggaaaattgcagagtttaagttcgtagggcttgaggcagttgagaagaaggattatttttctgcactaggattttacagtgaggccatggaccttgaccctgatgatgcaaccctgctgttcaataggagcctttgct

SEQ ID NO: 6250 - DNA, 432 bp, Oryza sativa
  Clone ID: uC-osflcyp162a08b1
tcgatttagccaagatacaggagcgatcggctccgcggcgttcatcgccgaaactccactgttcatcttcaacctccagccattcttgtgtgtgagagaaagagagctctgttcttgtgttcctaggctgattccaacaaaacacacagccgaaacaatcaaacttaacgcggcacaatgtctagcatcaattcgtttccgcctcaagaacggtgtgaatactcattgtcaacttcgcttgatggcttctggcttctcccgttctccggctctccactctactctgcctcccggctacataccttgcacgattggtgtgtgcagcgactgcgagtccgcaactccgcctctctttctctatctccggcctcaggtgctcagcaccggaacaacaccggcggtccacggtcggcgtggggcatgcagcgacca

SEQ ID NO: 6251 - DNA, 583 bp, Oryza sativa
  Clone ID: uC-osflcyp162a09b1
tcgcattttttttacctgacatatttcatacttgttgactgataggcctggttagcctgtgatttacctgaattagtctgcatgtaagtacactgcaccagccagattgggctaccagctcactaattttagcacatgtcttgatacgaaacagtgaaccatggaatgctctttggcagcttgtaactctgaatatgtagctacatacatgaacataattcagagatacagttgtacaaagatttcacctgaattttttcagagccatctatgttcttgtagttttcacctgaattctgatacctttagaaatttggagatttcatattcactccctgaatatgtgcatcatggcagcaatgactcctgaagcgttagggctaaatacttgtgttagccaatattacacacatgaggaaccctctgtcttgtatgtctacatataagtataaagcaccttatatgcaagctacaaatctgtttgttatatctatgccctgcatataacatgttggtaatttggttgtcttcatcgatcaattttcatttgttataagctatgctcaatgatgaatataagttt

SEQ ID NO: 6252 - DNA, 483 bp, Oryza sativa
  Clone ID: uC-osflcyp162a10b1
gttacgacatcttcatgcgctcctggaccggcacaatcattggaccactcaactctgtgcacgaggggcgcatctaccagctgaagctcttctgcgacaaggactaccccgacaagccgcccaccgtgcgcttccactccaggatcaacatgccctgcgtcaaccctgacaccggactggtcgaaagcaagaagttccatatgctggcaaactggcagagggagtacaccatggagaatatcctgacgcagctgaagaaggagatggccgcgccgcacagccgcaagctggttcagcctccagaagggaccttcttctagtcataccgtgagatgttcgagggcatgttcctgttgctgctgctgctgctatatactcatataggattggattgctatctctgtccatggcacgcaccgttccgaactatcacctgcccccaaatctgtcacctgaaaggtagtagtactagatgtgtatgta

SEQ ID NO: 6253 - DNA, 402 bp, Oryza sativa
  Clone ID: uC-osflcyp162a11b1
agttgcggcggcggcggcggcggagcccaacctggtggtgtcgttcggggagatgctgatcgacttcgtccccgacgtcgccggcgtctcgctggccgagtccggcggcttcgtcaaggctcccggcggcgcccccgccaacgtcgcctgcgccatctccaagctcggtggctcctccgccttcgtcggcaagtttggtgatgatgagttcgggcacatgctggtggacatcctgaagaagaacggggtgaacgcggaggggtgcctgttcgacgagcacgcgcgcacggcgctggcgttcgtgaccttgaaaagcaacggcgagcgcgagttcatgttctaccggaacccgagcgccgacatgctcctgacggaggcggagctcaacctggacctgatccg

SEQ ID NO: 6254 - DNA, 386 bp, Oryza sativa
  Clone ID: uC-osflcyp162a12b1
gttttactgaccagagaagctcacatggatccgtacactagcagggctccggcgagtggtggtgtcgccgccggcgacgacgacgaggaggcggcgtgcctgcaggcgtttgagctaatgtgcatcttcaccgtccccatgacactgaaggcggcgatcgagctcggcctcctcgacgcactaaccgccgccggcgacggccgcgcactgaccgcggaccagctggccgccgcgcggctcccggacgcggcgccggacaaggccgaggcggcgtactcggtggaccggatgctgcggctcctcgcgtcgttcgacgtcgtcaagtgctcgacggaagccgggcccggcggcgaaccttcccggagacgatactcgccggcgcccgt

SEQ ID NO: 6255 - DNA, 307 bp, Oryza sativa
  Clone ID: uC-osflcyp162b01b1
tttgctttgaccccctgggtctcggatcggacccggagagtttgcggtggaacgtgcaggcggagctggtgcactgccggtgggcgatgctgggcgcggcgggcatattcatcccggagtttctgaccaagatcggcatgctcaacacgccgtcgtggtacaccgccggcgagcagcaatacttcaccgacaccaccaccctcttcatcatcgagctcattctcatcgggtgggccgagggccgtcggtgggctgacatcataaagcccggctgcgtaaacaccgaccccattttccccaacaacaa

SEQ ID NO: 6256 - DNA, 414 bp, Oryza sativa
  Clone ID: uC-osflcyp162b03b1
aattaactcaaaactggtaaaaaaatgtatccatgatgccattatctccaaaaaaagagagaaaaaaaagaaaaaagaaaaaaaaaaaaaaaaaaaaaaaaaaaagggtagtatggggcggtggttgtgggggcggccggtttgggggagccgggatgccgggcgggggcggggaaatggggagatctaaaggggggggacggggggaagtttgacgggggggggatggggggggcgggggggggaaaaccgggggggtcttgcagtgaatgggggtggggaaagttggggttagggcggtgggggttggagcgggggggcctgccaccgagggggtgtagcaagaggggccacagggggatggggggagggggcccattagggcggggaggatttggggggtgggcgggggtg

SEQ ID NO: 6257 - DNA, 352 bp, Oryza sativa
  Clone ID: uC-osflcyp162b04b1
gcgaacatttttatgtactaacacagtttgcttgagtgggctgacgctatttcgaatgatgttcagtgttcttacagatttcattgctgtttacattttgtatttttcttctatcaaaccagatcaagctgtagaagaaacaaagtaacacagatttttttttcagcaacctacaatgtcgatacaaagttgtctttgcagaaactttttttgttctcgttggtaatgtactccgtatgaacaaaatataaagaatggacatagttgtttttgttaaaaaaaaaaaaaaaaaaaaaaaaaaaaaaaaaaaaaaaaaaaaaaaggggaggaagtatagggggtcctagtttac

SEQ ID NO: 6258 - DNA, 115 bp, Oryza sativa
  Clone ID: uC-osflcyp162b06b1
ttagtttttagcgagacacattttgtttcgcgtgccggatccaaaccaatcttccctccggctactagaacagaataggacaatgggggcttgctgggcgatgaggaactttgcc

SEQ ID NO: 6259 - DNA, 496 bp, Oryza sativa
  Clone ID: uC-osflcyp162b07b1
tcggttgactgtaggatggccacgctctcttcctgcagccgcctgagcaccggcggcggcgccgtccagcgccgtccccggcggccggcaagcgctgcgaccatcacctgccaccggagctcctcctcctcctcgtcggccagggtagtccgcacaggcgccgccgcggcgcctgccgcggccacggcgcccgccgtgccgcagaccaacgagtgctcgcttccgacatgggcggagttcgagctgggcaaggcgccggtctactggaagaccatgaacggtcttcctccatcggctggtgagggcctgatccttttctacaacccggcagcgaccaagatgacccccaacgctcagtttggcatcgcgtttaatggtggttttaaccagccgatcatgtgcggtggtgagcccgggcagatgacgctgcaagagaggggatcagctgatccttcatatacaccatcaggatacgtgtgcccagcatgccatgacc

SEQ ID NO: 6260 - DNA, 499 bp, Oryza sativa
  Clone ID: uC-osflcyp162b08b1
tcgctcctctcccacgcctcgccgccgcccgagcagccgtcggtaaagccgggcggctgcaaagacggcggcggcggggctcccctttctcctcactcctggtcaagtggttggggcgccgatgagaccggagcacgaggggcgcagctcggcgaggactgccagatccggcgccgttgaattcggatccggccctcccttggccggatctgggctggacgcgcaagtcggcggcgaaggcggcagccgcggcggcgaccgcggcgcgagggccgcgcggaggaggcgacggtggcggcgaccgcagcgcgaggggcgcacggaggaggaggcggtggcggacgtggctcgaggaccgcgcggcggcgactgcggcgcgaggacctcgcggcaacggtggctgcggttcgcggacgtgcgtcaactgctgcttctctggcttgtgtgcaccaggaagcggttggcggtggcgacgtctcttttcccaggcggcttaaaa

SEQ ID NO: 6261 - DNA, 465 bp, Oryza sativa
  unsure (1)..(465): unsure at all n locations
  Clone ID: uC-osflcyp162b11b1
ctctctctcgctcaccgcctccttctcctcgcgatctatccaaacaaggggctcgctaagatcggcatgtcggactctgaggagcaccatttcgagtcgaaggccgacgctggggcgtccaagacctatccccagcaggccggaaccatccgcaagaatgggtatattgttatcaagaaccgcccctgcaaggtggtggaggtttctacctcgaagactggtaagcacggtcatgccaagtgtcactttgttgccatagatatattcaatggtaaaaagcttgaggatattgttccttcgtcccacaactgtgatgttccacatgtgaaccgcacagagtaccagctgattgacatatcagaggatggattcgtgagccttcttactgagagtggtaacactaaagatgatcttagactcccaactgatgacagtctnctgggtcagatcaagactggatttggt

SEQ ID NO: 6262 - DNA, 417 bp, Oryza sativa
  Clone ID: uC-osflcyp162b12b1
gtttagatgaaagcgagacacattttgttcgtcttttggatcatcaaacttttgagttcctgtcaatttatcagcttgatcaatatgagcatggctgctccatcattagctgctcattctcagatgataataatgtttattattgtgtgggaacagcatatgttttaccagaggaaaatgaaccatcaaagggccggatccttgtatttgcagttgaagatggcagactgcaattaattgtagagaaagaaactaaaggagctgtctattcgctgaatgcattcaacggaaaattgttggcagctatcaaccagaagattcaactatataagtggatgctacgggaggacggttcacatgagctgcagtctgagtgtgggcatcatgggcacatattggctttgtacactcagactc

SEQ ID NO: 6263 - DNA, 462 bp, Oryza sativa
  Clone ID: uC-osflcyp162c01b1
ctttttgtttaaacttaattgagaagacattatgacaattttcaagttaaagcactaggggcttcccatttggaggtgtgagttcccttcacctctgtttctacttgacgcgatctacacctttctttttttggcttccaaatcttctatggtctttgctctccatcctgatttgttgtatgcttcttctgtgcaatgaagctaacaaaaagtccaaagcagagctttgcttcagagattctaaattcagttattttagctattgtaacatgtaatagtcattgcttattgtgttcttggctcaacgtgcagctctccaattatgttccctttttcgttacaacaattcagtttgaatgtggacccaggttctagaatgttttatgtataatgtttttagttgaataaatatccataatccatatatgactatgcataatttccagtgaagaaagtactatt

SEQ ID NO: 6264 - DNA, 503 bp, Oryza sativa
  Clone ID: uC-osflcyp162c02b1
atttatcgtttcccctgaaatcacgctgccgatagcttcctcttccccttgatatcgctctccacaaaatcgattagcctacacacgatttcaccatccacaaaatcgctcagcctcctcctccgcttgatcttgctggccatctccttcaccaccgctgtacgcagtctcgccggagatccgcctgacgacggagtttgaggtggcgcgacggagatccaccaggagcgaaaaccagtctctgctcccgcggagcacggcctcgacgacgcttcctccttcccacctcaccccaactctctcagattggcgccgctgccagccactcactcgccatcggcaagatcagtcgcaccgccgacccctcgctctaccttgccaagaacagtgccgctgcacctcaatccagccatctccatgactaagcaaggaaacctttcctattttttgccaagaatttcatttttcttacactgaatcccttgtgagtattttattattaa

SEQ ID NO: 6265 - DNA, 522 bp, Oryza sativa
  Clone ID: uC-osflcyp162c03b1
gttttcgtcgcggagcttggaggtttgggtgagatcggagcagcgaagcggaggcagccgcagccatggcgttggccgctcgcctcgtctcccgctcccggcagctatactctgctcaagctgccttggcaaatggaggtgccactcaagtccgcttgtatgccaaggaggcagatcgtactcccgtcaatggtgatgacctattgaagggcatattttttgaggtaaagaagaaatttgagactgcccttggtgtacttaagaaggaaaagatcactattgatccagatgatcctgcagcagtttctcgttatgcccaagtcatgaagactgtaagacaaaaggcagatcttctatccgactctgagaggattaaatataccatcgacacctttacaaagggcatccctgatgcacggacttacttgaatactcttcaggagatcaggataaagagtggccttatagatgatatgggtgctgaggctatgatgatggaagcccttgagaaagttgggaagg

SEQ ID NO: 6266 - DNA, 340 bp, Oryza sativa
  Clone ID: uC-osflcyp162c04b1
tcggtttatttgcaagtgttacggcttcgttggccctaccagtcagtgacccagttcaatctccggcgatgggggccggaatgagcagcggccggcggccgagcttttactgtggaggcggtggcggcggtgtcggtcggccgagagggatgctgaccctgctggcgctgcaggtgctgctcgagtacggacgcgcgggcgccagccggccccccgtgacggcggcgttgctcgccgccaacgcgctgctgtaccttccgccaggcttccttgacgcgcttcttcctttggttaaccgggttggctttaacccttaccttattatttacttctgggacct

SEQ ID NO: 6267 - DNA, 512 bp, Oryza sativa
  Clone ID: uC-osflcyp162c05b1
gccgcttggtgatggctcgagctctgctcctgctcatcctagcagcgctagcttcggcctcgtcaatggctgccaagaagcaggggcgacagcctcgcggctgcggcggccacacctcgacgtcgccgacgccggagctggagctgccgccgtgctccggccaccgcggtcaagccccagcgccagtgttggggcttcttggccggaggggatcacctggagctccgcctccgccgcggtcacacccgccggtatcatacgtacgcccacagccgcgcccgtggccaccgtcaccgccgcatccgcagcctccattcccgatcagcccggttgcgccgtcgtcgtcaccaccgacgtcaccaccgtcgtcaccgtgcttgtagtcgccgtcgttgcaggatcagtcggattcaggattttcagtcaggaaggaagctcaaatgatttgctaaatctggttcgggcacttcggaactattgtaaattctttgccttttgcgggttcaagattt

SEQ ID NO: 6268 - DNA, 307 bp, Oryza sativa
  Clone ID: uC-osflcyp162c08b1
tcggttagaagcctcttttggatctatccattcgggtcaccgtggcagttcggtaattttggcggagaggaggaggaggacgacgacgacgacgacgtgatgggtctcctcgacaagctgtgggacgacaccgtcgcggggccccgccccgacaccggcctcggccgtcttcgcaagcacgccgtcgcccgtcccgtcgtcgtcaagatcaacgacccgacaggggacgcggcgatggtggccgttccgccgacgacgccggtcggggcggaagaagcgcccgtgaaggtgacgcgcagcatcatga

SEQ ID NO: 6269 - DNA, 368 bp, Oryza sativa
  unsure (1)..(368): unsure at all n locations
  Clone ID: uC-osflcyp162c10b1
atcggtctctccggcctcgccaccgacgcgcagacgctgtaccagcgcctggtgttcaggcacaagctgtatcaactgcgggaggagagggacatgaagccccagaccttcgccagcctcgtctccgctctcctctacgagaagagatttggaccatacttctgccagcctgttatcgctggacttggagaggacaatgagccatttatttgtaccatggactgcattggtgcaaaggaactagctaaggatttcgttgtatcggggacagcatcggagtctctatatggtgcttgtgagtccatgtacaaaccaaacatggaacctgaagaactctttgagactatctcacangctctgcagtcatc

SEQ ID NO: 6270 - DNA, 473 bp, Oryza sativa
  Clone ID: uC-osflcyp162d03b1
catgacgttatctggctgaaggaatttcagaaatttgatgacaagtctagcgccattaatgttgatactggtgttaacaaacagcttactgagatgatcatgaagtggcgtcgccctaggcagaaattggttgttggaaagccggagtataaatcaatcattgaaaataccttaggaataccctgcctgtgtgatgaagttgtgatggacgtaatgtgggccatgaagcgtctcattcgctattttgtgcccactgaaacacccgagctggctgaagaggacagcctcactatgagtcaaggactacggatgtttttaagtcgttatggctttgaaatcaaaccagagatggtctacaacgatattgttcgtgctgcatccatcgtgtttaggtgtgatgctgttgagaaggacctttacgagcacttgcaacatcttggtcgccaccttaagaatgtgtctggcattgacta

SEQ ID NO: 6271 - DNA, 276 bp, Oryza sativa
  Clone ID: uC-osflcyp162d05b1
ctcgagctcatccatggccatcgcgacgacgaccttaccactcgcgccactcgccctcgcgccgccatcctccccgatctcccagtgctcgctcctcctgctgcgcccccgcgccccggccgccctctcgctccgcccctccgcgcgcctcctcgtcgccgtcgcggccagggagcccgagctcggcggatcgggaggcggaggcgcaggcgacggctctgggagcggcggcggcggggacagcgagaagccgcggggtggtgggggcgacgagga

SEQ ID NO: 6272 - DNA, 253 bp, Oryza sativa
  Clone ID: uC-osflcyp162d06b1
gcccaggcccgggcgcctccttgctccggctgctaccgaacccgcgggtctcccccttccgcaacgaggaggtcgccatcgtccgctgctccggcggcgcccgctacgtcatcgcctgcctcatgccaaccatcaggcgccccatggagttcaaggttatgcgcttcgactccgacgtcggccgctggaaatccacagctgtgttcatcagtgagccggtcgagagggacagggtgcttcccaatcctgacac

SEQ ID NO: 6273 - DNA, 484 bp, Oryza sativa
  Clone ID: uC-osflcyp162d07b1
tcgccgtctacaagttcggctacggcctcagctactcgaagtactctcaccacttcgtcgcaaacggcacgaagctgccgtctttgagcagcatcgatggcctgaaggcgatggcgacagcagctgcaggcacggtgagctatgacgtcgaagagattggccccgagacgtgtgacaagctcaagttcccggcgctcgtcagggtgcagaaccatggccccatggacggcaggcaccccgtgctgctcttcctgcgctggccgaacggcgcggcggacggcggcaggccggcgagccagctgatcggcttccagagcctgcacctcaagtcgatgcagactgtccatgtggagttcgaggtgagcccatgcaagcactttagcagagcgacggaggacggcaagaaggtgattgatcatgggtcgcatttcatgatggttggcgatgatgagttcgagatgagcttcacgccttgatcgagctg

SEQ ID NO: 6274 - DNA, 509 bp, Oryza sativa
  Clone ID: uC-osflcyp162d08b1
tcgccttgacgccaagggtgactatgatggtgccctggagcaccttgtgcttgcctccatgaccatggtcgccaatggacgtgacattgaggtcgcgacgatcgatgtcgcgataggcaacacctaccttgccctcgcccgcttcgacgaggctgtcttctcctaccagaaggcgttgacagtactcaagtctgcccgtggtgatgaccacccttcggttgcatctgtctttgtccgcctcgcagacctttaccaccgaacagggaggctccgcgagtccaaatcctactgtgagaatgcactccgtgtctatgcaaagcccgcgcctggcgctgcccctgatgaggttgctggaggcctaatggagattgctgccatctatgaggcgcttggagaccttgatgaggcactgaagcttttgcaaagggcactaaagttgcttgaggactcaccaggacagtgtagcactgttgctggcatcgaggcacaaatgggtgtgttgtactaca

SEQ ID NO: 6275 - DNA, 391 bp, Oryza sativa
  Clone ID: uC-osflcyp162d09b1
tttgagatgaggcttcttggtagtaggtggattggaatatcgaaatgatatgattgtgatccgcaactacaacgaccgccactacggagagctcatgctatttgtttgtttgattttgtactagtgctcaaatatatactccagctcatgtccatgtgtatgttttgctgctattatttttttctcctgaaaataaaatatataacaacgcgcattggcatgaaaaaaaaaaataaaaaacagataataaaaaaaaaaaaaaaataaaagaaaataaaaaataaatatttaagatagaattatataatttgttatattaaaataaaaggggggggccgttttagaggtacaaaatatatcgtccggttgtatgggaagaataatttttttt

SEQ ID NO: 6276 - DNA, 321 bp, Oryza sativa
  Clone ID: uC-osflcyp162d10b1
cattcaacaactcaggttcctgattttttgaatgctaaaattaacgggagaccagtgaaagaagtcattaaagacacaaagtggttagaagatgaattcaccaaaacagttcaaaagcgtggaggagtactcatacaaaaatggggcagatcttcagctgcatcaaccgccgtttccatcgtggatgctattaggttccttgtaaatcctaccccagaaggcgattggttctttactggggtttatacgactggaaatccttatggcatagcagaggacattgtggttagtatgccatgcaagtcaaagggtgatggtgac

SEQ ID NO: 6277 - DNA, 368 bp, Oryza sativa
  Clone ID: uC-osflcyp162d11b1
tttcttcctcccgcagctcacctcaactccggaagcgagagctcactccccccatccccatggcttccaccgctctctcctccgccttctccctcctctccctcccctcctcctcctcccccgccgccgccgccccaaggtccttcgccgtccccagccgcgcccgcccacgccgcgccgtcgccgtggtggcgtccaccgccaccgagtcccccaaggtcctggagctcggggacgccatcgcggggctcaccctcgaggaggcgcggggcctcgtggaccacctccaggagcgcctcggcgtctccgccgccgacttcgcgcccgacgccgtcgttgtcgcgcccggcgcgggcggcgcgggcgcc

SEQ ID NO: 6278 - DNA, 502 bp, Oryza sativa
  Clone ID: uC-osflcyp162e01b1
ataagttgggcgcctgccgtgccggaccggaatggccgggccggcccagcccacgcgttcggttacttccatctgattctcctaattgtcatcactagcttctagctagcttaattaattaattagccatggcggaggagaagcaccaccaccacctgttccaccacaagaaggacgacgagccggccaccggagtagactcctacggcgagggcgtctacacgtcggagacggtgaccaccgaggtggtcgccggcggccaggacgagtacgagaggtacaagaaggaggagaagcagcacaagcacaagcagcacctcggcgaggccggcgccctcgccgccggcgccttcgacctgtatgagaagcacgaggcgaagaaggacccggagaacgcgcacaggcacaagatcacggaggagatcgcggtcacggcggtggtcggggccggcggctacgcctttcacgagcaccacgagacgaagaaggaccacacgagcgc

SEQ ID NO: 6279 - DNA, 372 bp, Oryza sativa
  Clone ID: uC-osflcyp162e02b1
atgcggtttgcgacccctgaacgacgcccactactcttccacgcctcggcgtctcgtgagcacacagcgggaaagtcgggtgggtgtaaagaccgccagtaggcggagctcaccatgtgtcctcactcccaggtcaagtggatgtagtgccgatgagaccggagcacaaggggcgcacctcggggaggactgacagatccggcgccgttgaattcggatccggccctcccttggccggatctgggctggacgcgcaagtcggcggcgaaagcggcagccgcggcggcgaccgcggcgcgagggcctcgcggaggaggcgacggcggtggcgaccgcaacgcgaggggcgcacggaggacgaagcggtggctg

SEQ ID NO: 6280 - DNA, 470 bp, Oryza sativa
  Clone ID: uC-osflcyp162e03b1
agataagctaactttggaaggtgagtcataccacaagagctgcttcaagtgctctcatggaggctgcatcctgaccacctcctcctacgcggcgctcaacggggtgttgtactgcaagatacacttcgggcagctgttcatggagaaagggagctacaatcacatgaagaagaagagcgagtcccaggaggtgttgccggaagtggtgcccgaagagcaaccggcgccgccgtcgccagacgaaaatagagaggacaactaggactacgaaacgagccaaacacatacggtgatacacggatctctggagtttctgtttactaattttgcaacggttgtttattccctcctctttttttgctcgtgatcctccctgtgtgcgagtagtctgtcaagctgtaagtgtacgccttcgtttcataggaggctcatgaaaatggcaggttgacaacaatggcatgcgactgact

SEQ ID NO: 6281 - DNA, 442 bp, Oryza sativa
  Clone ID: uC-osflcyp162e04b1
gtcgcctctcctcctcctccctaacccctacgcttccagaaccttctcgaagctcccgctcccccccccttccgctccaatggcgaaggaaccgatgcgcgtgctcgtcaccggcgccgcaggacaaattggatatgctcttgtccccatgattgctaggggtgtgatgttgggtgctgaccagcctgttattctacacatgcttgacattccaccagctactgaatctcttaatggccttaagatggagctggttgatgctgcatttcctcttttgaagggaattgtcgcaacaactgatgttgtggaggcctgcactggtgtgaatgttgcggttatggttggtgggttccccaggaaggagggaatggaaaggaaggatgttatgtcaaaaaatgtgttcatctacaaatcccaagcttttgctcttgaggcttatgca

SEQ ID NO: 6282 - DNA, 421 bp, Oryza sativa
  Clone ID: uC-osflcyp162e05b1
cgttcttttaaagatggtgctctgggtcttcggctatggctccctgatctggaaccccggattcgacttcgatgagaagatcctgggcttcgtcaagggctacaaacgcaccttcaatcttgcttgcattgaccatcggggcacgccggagcatcctgcgaggacctgcacacttgagtccgacgaggaagccatatgctgggggattgcatactgtgtcaaaggggggcttaaaaaggagcaagaagcaatgaagtacttggaaagaagagagtgtgagtatgaccagaagatctctgtggatttctacaaggaaggagattctttgaagccagctgtgacaggtgtactagtctttgtatccactcctgatccagtaggcaacaaatactatcttgggcctgctcctttggaggacatg

SEQ ID NO: 6283 - DNA, 396 bp, Oryza sativa
  Clone ID: uC-osflcyp162e06b1
ggtttattgaacggtggaacgcgtacttacccacaagttaggtgcatgccatggcaccattcatggcgtgcgcctcgccaccggtactcacgctggccctgctcgcgtcgtgcggtgcccttctcgccacctccatgctcccggcgcgtgcgacggcgggcagctgcttggacgtcggcgacatggtgatgatggacaggttccgcgcttggcagggagctcacaaccgatcgtacccgagcgcagaagaggcgctgcagcggttcgatgtgtaccgccgcaacgcggagttcatcgacgccgtcaacctgcgcggcgaccttacttaccagctcgccgagaacgagtttcgagaccttaccgaggagggagttctggccacgtacaccgggtact

SEQ ID NO: 6284 - DNA, 245 bp, Oryza sativa
  Clone ID: uC-osflcyp162e07b1
aagccgggcggatgcaaagacggcggaggcgggggttcccatttctcctcactcctggtcaagtggatggggcgccgatgagaccggagcacgaggggcgcagcttggagaggactgccagatccggcgccggtgaattcggatccggccctcccttggacggatctgggctggacgcgcaaaggaggcggcgaaagcgggagagcgcggtgggaccgaggcgcgagggctcgtcggaagaggcg

SEQ ID NO: 6285 - DNA, 466 bp, Oryza sativa
  Clone ID: uC-osflcyp162e08b1
gaaggtgagttaaaccacgagagctgctataagggctctcatggaaggctgcattctgaccacctccccaacacggagctcaacggagcgagggactgcaagacacactttccgacctgatcccgccgccgaggaggctacaacgacagcgacctctggctggagaagaccaagaagcagcagcagcagaagaagaagaacaagggcgcgaggaggctgccactgcgccaagaggaggaggatgatttcgaggccgacttcgaggagtaagaggtggattccggcgagtgggaggtggagtccgacgcctacgaggccaagccgctcgccgcgccccggagcggctacgctaaaggtggattgaaaaacactactgttgctggtgctgatgggcctgcagcaaggtctgctaaaaggaagagaaagaaccaaatcaggggtatccgccagcggccatggggcaaaa

SEQ ID NO: 6286 - DNA, 489 bp, Oryza sativa
  Clone ID: uC-osflcyp162e09b1
tttctttctcctcccatcaccgaggagagagagagagagagagagtagtgagagaggaagacgagagagccgtctccgcggccattgccgccgccgcagcagcggggccactaccccgactgccccctaccctcctcccatggccgagatgccaggtgggcccgaccttgccggggccggtggcgccgtcgccgtcgccgtcgacgcgatgcaggtcgacgacccgccgcgtgcgtccgccgaggagaagcatggtcccactataatgggaggaaatgatccagtcacaggtcatataattccaactactattggagggaagaacgatgagcccaaaaggactattagctatatggctgaacgagttgttggaactggatcctttggtggtgtattccaggcaaaatgccttgagactggggaaaccggtggcattaagaaggtcttacaggacaaacgataccagaacagagaggtacagataatgcg

SEQ ID NO: 6287 - DNA, 359 bp, Oryza sativa
  Clone ID: uC-osflcyp162e10b1
gttgctgcttgttccccggggaggtttatcggatcttgatggagacccatatcggatccgtggacggggcggcggcggccgcggacaacggcgcggtggggtgcccggcgttagcggtggtgtgcccgatgacctcggcgcgccccgcgcccgtgtcggacggtgaggcgttgatgggacggcacctgcctaggcggctggtgcaggtggtcgtcagagacgtgttctccgtgcccggggacttcaacctcacgctgctcgaccacctgatcgccgagcccgggctgcgccttgttggatgctgtaacgagctgaacgtcgggtacgcggccgacggctacgcccgtgcgcgcggtgtc

SEQ ID NO: 6288 - DNA, 480 bp, Oryza sativa
  Clone ID: uC-osflcyp162e11b1
ctggacctctcaataagcatggagaaccaggaaagaagtcatctggtccccagtcaggcggagtgaccccaatggcacgtcagaattctggtccttttacctcctgttcttcctacaactgggctgatcacatcagggcctatctcctctggacctctgaattcatctggtgctccacgaaaagtatcaggccctcttgatcctagtgtatcaatgaagatgcgtgcaacttcttttgctcacaacccagctgttacaaacctgaatgccgatgatggttactctattaagggcagcattcctaagacaatactctggatggttattctgctctttttgatggggttcatagcaggtggtttcattcttggagctgttcataaccctattctgctggtagttgtggtggtcatattttgctttgttgctgctctagtgatttggaacatttgctggggaacgagaggtgtgactgggttc

SEQ ID NO: 6289 - DNA, 377 bp, Oryza sativa
  Clone ID: uC-osflcyp162f04b1
tgttctcttctccaaccaccctgctctctcctctcccccttcacagttcacacctgcgaccacgaggcggtggcggaggagacgaggcgcgccggggagatccgaggcactcggtgaccctgcgctccggcggccgattcgctgccggggacgccgtcttctccgtcaactccggcgaacggctgccgcgcttcgatctgcacgtcgccgacgtcgctgagcttttgatctcgccttctcgagacacatctgatatcgctgttctttttatgagttcacaagacactcaacatgaagtttttagaatacacccccttcgacagtataaatctgttccttgataatcttgaccttggtgattgtacgataagaggaaa

SEQ ID NO: 6290 - DNA, 569 bp, Oryza sativa
  Clone ID: uC-osflcyp162f05b1
catcggtcacattatcctcgctgactccgccgcgcgccgcgtgctcgccttcctccccctcgcgccaccaccgccgccgccgagtcctcgtcaccggagagcgagggggtctccgccgtggtcgcctgcgcgctacgcggcgacgctgccggcttccttccgccggagtcaaccttgggggtaaggattgctgcaaacaactccagtttctgaataaagacagtgccgatattaatggataagaaacagacctcgttaggcactcctgtctacaggacaaatcccttcgattctgactctgattctgaagtgccctcaagaccgtcaagggcacaatctgtcccagtgcgacgcacagatcaatctatacaagagctggaggactatgctgttgataaagtagaagaaacatcacgcaaagtaaatgattgtgtcagagccgctgaagcaatcagagaagatgtacaaaaacactgggtactttgcatcgtcaggtgaacagatcacccgaactcaatcagtagccgcggatattgaacacgatcttagtatgagtgagaagcttttgg

SEQ ID NO: 6291 - DNA, 563 bp, Oryza sativa
  Clone ID: uC-osflcyp162f07b1
gggctgctggcgtgccggaccggaccggccgggccggcccacgcgacccgtgcctttaagcatagcgttcgagcacttctgcctccacgccggtggccggccacagagcgaccagttggagaagaaccttcagctgcagccggtccacgtcgaggcctgtcgcatgacgctccaccggttcggcaacacgtcgagcagctccatatggtacgagctcgtctacatggaggccaagggccgggtccgccgaggccaccgcatctggcagatcgcgttcggcagcgggttcaagtgcaacagcgccgtctggcacgctctccgcaacgtcaagccgtcgccggagagcccctgggaggattgcattgaccgctacccggtggagctcgtcgacggctttgccacccacaacaacacgcagcaataacaccatccatccatccatccatccttcttctccattggtgcaacaaacacaaacgtttatcatcatggatcaaaccaaaaatcctcaaaagattggttagtgagaatgacataatggcacttgcttttataggacatga

SEQ ID NO: 6292 - DNA, 333 bp, Oryza sativa
  Clone ID: uC-osflcyp162f08b1
gttcgtgtggtggtaggagagggaatccatccatggtgatggacgcacttagagcggcggctatgccgtcgctgtcgccggccaccgtcgtggtgaggccgagcagccgccgccttcacaaggtcgccgccatggccacccagaagcccacctccggcacaagaagggggacgacggtgtacttcccggtgggggagccggggccgaggcagacgacgagcgggaaggcggcggcgcccccggtgaagctgctgacgaacgtggagaagctgcggctgctgacgaaagcggagaaggcggggctcctgtcggcggcggagcgcgccgggctgt

SEQ ID NO: 6293 - DNA, 432 bp, Oryza sativa
  Clone ID: uC-osflcyp162f11b1
gtaataaagcttcaacatggataaaacattatcaggataaaccgatcaagtcacacgaattttttcggagtacgaactgataacacaggcattgcatgaagtagctagagagacatgaaattgaaacgagttctttcaggtaaaactagtagcaagatctactgctgcttgacctcagccttcctcttctgccacagcctatccagagcactgtcagcatctccctgagcacggatgaacccagagagagcaaaggtggtgaagcggccatcgtacagcccattctcatccacatgcccaatgttgatctggaccgaggcgtggtccttggcggtgatgatcctgttcgtggacgagcacttcctggggacgtagaggtccaccatctgaccctccttgttctgcatggtggcggtggatagatcgcgagcg

SEQ ID NO: 6294 - DNA, 354 bp, Oryza sativa
  Clone ID: uC-osflcyp162g01b1
acgggttttcagccccactcacgccgagccgacaacaagcgacgatgggatcgctcaccaccaacatagtgctcgacgtcgacgtgggggcagtgctggacggcggaggatcgtgcggaccgtccaaggtgccacccggcccgaacattacgaccaactacaacgccccgtggctccccgccagggccaccatgtacggccagttctacggcttcggctccaccgacaatggtggcgcgtgcgggatcaagaacgttaacctgcctccctacaacggcatgatctcctgcgggaacgtcccaatcttcaaggacggcaggggatgcggatcatgctacgaggtgaagtgtgagc

SEQ ID NO: 6295 - DNA, 354 bp, Oryza sativa
  Clone ID: uC-osflcyp162g02b1
gccatatttctcagctctcacaggtcactgcatcaatggccgcggccaccatggcgctctcctccccggtgatggcccgcgcggcgccgtcgacctcctccgcgctcttcggcgaggcgcggatcaccatgcgcaagaccgtcgcgaagcccaagccggcggcgtcgtcggggagcccgtggtacggcgccgaccgcgttctctacctcgggccgctctccggggaggcgccgagctacctcaccggcgagtttccgggcgactacgggtgggacaccggggggcttttcgtcgacccggagacgtttcgcaagaacccggagctggaggtgatcccactccggtgggcgatgc

SEQ ID NO: 6296 - DNA, 449 bp, Oryza sativa
  Clone ID: uC-osflcyp162g03b1
ctaaagaatttaatgctgattttcggagggaatcaactggaagatggacgtacattagctgattacaacattcagaaagagttaactttccatttggttctgaggctcaggggtggaaccatgatcaaggtgaagacactcactggtaaggaaatcgagatcgacattgagcccactgataccattgatagaatcaaggagcgtgttgaggagaaagagggtattccacctgttcagcagaggctcatttatgctgggaagcaacttgctgatgataaaactgccaaggattacaacattgaaggtggctcagtgctccatctcgtgcttgctctgaggggtggtcagtagatgtagtttccatgcccgcattatctctaaagggagaagcataattgctattctagttctatctgtagatgctgcaaacttatagctatatttggtag

SEQ ID NO: 6297 - DNA, 477 bp, Oryza sativa
  Clone ID: uC-osflcyp162g04b1
gttctggtcgatcccctccgtcgtcgtcgcgtgaactcctcgccgatcccctccgtcgtcgtcgcgtgaactcctcgccgatcccccgcctccgtcgcgccgtcacgccgccgattcccccctcctcgtctggcgcgccgcggggttcagtcggcgccgatccccatcccccaggtggccgtcgccgatcctgcatctcctctgtcccgtcctcgccgatcccccgcctccgtcgcgccgtcacgccgccgattctcgcctctccaagaccgctttcatttttgcatcttccccagatcactgctggtcaacaggtcaacaaaagaggtagtggaggctgaggaggtcgccatccacaaccgacaacgacaacgcgacgcccgtgtcgccttaagagccaccgctgcctatccgtactcacgccaccgtttcttctgtgccgaaaggtacaggacaccctttggcacccctacccca

SEQ ID NO: 6298 - DNA, 484 bp, Oryza sativa
  Clone ID: uC-osflcyp162g05b1
gttgttgtgagaattcttaattcatgagttgtagggagggacgtatgtcaccacaaacagaaactaaagcaagtgttggatttaaagctggtgttaaggattataaattgacttactacaccccggagtacgaaaccaaggacactgatatcttggcagcattccgagtaactcctcagccgggggttccgcccgaagaagcaggggctgcagtagctgccgaatcttctactggtacatggacaactgtttggactgatggacttaccagtcttgatcgttacaaaggccgatgctatcacatcgagcccgttgttggggaggataatcaatatatcgcttatgtagcttatccattagacctatttgaagagggttctgttactaacatgtttacttccattgtgggtaacgtattttgttttcaaagccctacgcgctctacgtctggaggatctgcgaattccccctacttattcaaaaa

SEQ ID NO: 6299 - DNA, 542 bp, Oryza sativa
  unsure (1)..(542): unsure at all n locations
  Clone ID: uC-osflcyp162g06b1
tttctgtctactgggtgggccaatggcatataggaggattaggacgagaagaagctgtcctctctgttgcctctcctgtacagcccaacatactactatcatattgtctgtagctagcacatgcagaagatagactggcaggatgaggtggtggtggttcttccccagacccgtcactgctctggttgcatttattaccttttgggttgttgtcctatgaattgagcctaattagttgatattcaacagctggaggttatatttcctttttacattgcatcttcttggttgttcaacagcagtgatagcatttgttcccttagtgaaacagctatcttgttgtagcagtgatagcttttgttcccttagtgaaatagcttttggcaaattgtactatcttgttgtattggctagatgagtgtcctagatgtttaatatggcccgaggaggttgctaagatgtgtgacagaattcaaaaatatatttcaatagaaatttngttgttacctctaaataaaagaataatgttctaaatgataact

SEQ ID NO: 6300 - DNA, 357 bp, Oryza sativa
  Clone ID: uC-osflcyp162g08b1
gccatctttctcagctctcacagctcactgcatcaatggccgcggccaccatggcgctctcctccccggtgatggcccgcgcggcgccgtcgacctcctccgcgctcttcggcgaggcgcggatcaccatgcgcaagaccgtcgcgaagcccaagccggcggcgtggtcggggagcccgtggtacggcgccgaccgcgtgctctacctcggaccgctctccggggagccgccgagctacctaaccggcgagtctccggtcgactacaggttggacagacgggggctttccttcacccacagatacgggagcaggaacccagcgaagttgacaacaacgagcacaagtttatgctgaa

SEQ ID NO: 6301 - DNA, 528 bp, Oryza sativa
  Clone ID: uC-osflcyp162g09b1
acccgtttgtttccctgaggcgattggggctgattactcagaggcacagtaactggatatacggccgatcagaccctggtgacgacgctcataaagtgtgaacttgctaccaagctcggcggttgacttagcggaggcctatgatcgaatggggaccacgactcatgtggtgaaggccatgacgaggaacgaccacatgagactagctgagtccatgcaatagagagcaagggaccagggttcagtgagacaggtccacaccgcacctgtttctacccagcatgatgaggcagtcaccaacgatgagattgctgctgacctgaaggagcatgtcatcaagcctgtcattcccgagcagtaccttgatgagaagacaatcttccatcttaacccatctggtcgcttcgtcattggcggacctcatggtgatgctggtctcactggccggaagatcatcattgacacttatggtggctggggagctcacggtggtggtgccttctctggcaaggacccaaccaaggttga

SEQ ID NO: 6302 - DNA, 73 bp, Oryza sativa
  Clone ID: uC-osflcyp162g10b1
ggcttctcctccccctctttaccttgtccggctcggttcggttccggggttcgtttaagggttaagggggttg

SEQ ID NO: 6303 - DNA, 351 bp, Oryza sativa
  Clone ID: uC-osflcyp162g11b1
gtttagtttacataaagattgagaacttggtaggtagggtgatctagacattaaggttcggagctggttgttgcggtaatgggatgcaccaacaggctggacgccacgagagtcgagttgacaggtggtcgatccgagcttgtgactcgacggagttatggactgggacactcttgccccaaagaacgactatcacaaccgtgccagggcacaccccgttcaccgggaccgaagcgactgctgtgttaggcagaagaacgtcgccttatgacatgtcattcaggcgaatgaaggggaggctgaagatcatggacaggaactggtgccagtgcaagtcgactctgatggagg

SEQ ID NO: 6304 - DNA, 474 bp, Oryza sativa
  unsure (1)..(474): unsure at all n locations
  Clone ID: uC-osflcyp162h02b1
gtgcggctgggggcgaacaggtactcggagaggcagccgatagggacggcggcgcagggcgccggggacgacaaggactacaaggagccgccgccggcgccgctgttcgagccaggggagctcaagtcgtggtctttctaccgggccgggatcgccgagttcgtctccaccttcctcttgctctacatcaccatactcaccgtcatgggggtctacaagtcctcctccaagtgcgccaccgtcggcatccagggcatcgcctggtccttcggaggcatgatcttagcgctcgtctactgcaccgtcggcatctncggaggacacatcaacccagcagttacttttgggctgttcttggccaggaagctgttcctgacccgggccatcttctacatagtgatgcaatgcctaggggccatctgcggagctggagttgtgaagggctttcagcagggtctgtacatgggcaaaggc

SEQ ID NO: 6305 - DNA, 382 bp, Oryza sativa
  Clone ID: uC-osflcyp162h03b1
gagttcccggccacgcgctcacgcgttgcggttgcggcagctgagcgagtgagcgccgaggctccccggccatgtccaagcccgatcgccgctccggcgccgacacgtccccgtcgctccgcttcctcggccttctcaagcagcccgacgacggcagcggcgaccacgagctggagctcgacgagcgcgacgtcgtctggtcgtcgtcgtcgtcgacgaacacctcgccctgctcgtgggcctcctcaaccaattcctcgccgtacctcaccccgtccgtgtccgagggcgtgggcgttcgccggccgatgccgtcgtcccacgcctttcccgccgccggcagggttggcctgttccgcctccttcgcgacgatcacgcccc

SEQ ID NO: 6306 - DNA, 543 bp, Oryza sativa
  Clone ID: uC-osflcyp162h04b1
cttgcgattcctctcccctcgcctcctcgtcctccccctcccaggggatcgccggagaggaattgcgcggaggaaaaaaaaagaaaagggcttccccgtcgtctaagttaaaaggaagccatggagcacaaggagactggatgccagcagccagaaggcccgatcctttgcatcaataactgcggcttctttggcagtgcggctaccatgaacatgtgctcaaagtgccacaaggagatgataatgaagcaggagcaggccaagctggcagcctcctctatcgacagcattgtcaatggtggtgattccgggaaggaaccaattattgctggtcacgctgaagtagctgttgctcaagtcgaggtgaagacgcttgttgcgcagcctgctgagattgctggtcctagtgagggggtcacggtgaacccctaggtgagggaaggaccaaatcggtgctccacttgtcggatgagggttggtcttaccggattcactgccgatgtgcaacttgactgcgcacgcaccgctttccgatagctgact

SEQ ID NO: 6307 - DNA, 376 bp, Oryza sativa
  Clone ID: uC-osflcyp162h06b1
cgttgactccgctgatgctcccgcacaaggccagcacgaacgttaagatcggcgggtacaacatccccaagggcgccaacgtgatggtggacgtgtgggcgatcgactacgacccaaaggtgtggagcaacccgttggagtacaggccggagcggttcatcgaggagaacatcgacatcaagggcagcgacttcagggtgctccccttcggcgccggccgccgcgtgtgccccggcgcccagctcggcatcaacctcgtcgcctccatgatcgggcacctccttcaccagttcgagtggtctcttcccgagggcaccaggccggaggacgtcaacatgatggagtccaacggcgttgtcacgttcatgagcacgtt

SEQ ID NO: 6308 - DNA, 477 bp, Oryza sativa
  Clone ID: uC-osflcyp162h07b1
tcgtgtcgatgaagatgacgacgatgatgaagatgaggatgacgagggtgatgatgaagacgacgaggatgaaaagaagggcggacgagttcctgcaggggaagggcagcagggagagctacctgcagaatgcaagcaacagtaagatgcttcctacctgagcgtttccaaagtccggtcctggagtgaagaagaatgtttggttcggcttgatgcaatgtctcgtccatttggtttggagagccagttggggaagtgttgggattgagttggtttagtggaactggcgggggatattattttcgggacatggtattatatgtttggcagctttttccattgttgtattgcgacgacatatcttgtgcgaagcttatggatgaatgatgaatatcgccggtttggtattaatcatattggcaaaaccactgggaataggctgagaaaatttgatctatgagagggcatgtttttgtg

SEQ ID NO: 6309 - DNA, 475 bp, Oryza sativa
  Clone ID: uC-osflcyp162h08b1
tcgggtcaagcacgaggaagtagcatttattgaagagattgccaggacagcgccaatcaagtacttacaccggtatttagtgctcaagggagtcgcgtctcaagactatgaggacttcaagagaatgctgacatcgctatggttcgatttgtatggaagaggtggcagttctagcagctcttctgcatttgagcatgtgttcgttggtgagatcaagggacgacgaggacagggagagaatgaggtctcaggattccataattggattcagttttacctggaagaagccaatgggaatgtggattaccaaggttacatattcccaaggaggcgtggggaatcgcctgattcagagacacagctattgactattcagtttgagtggcacggtgttctgaaattggtatccagcactctgattgctgtcagccctgagtttgaggttgcactctacacgctttgcttctttatggga

SEQ ID NO: 6310 - DNA, 369 bp, Oryza sativa
  Clone ID: uC-osflcyp162h10b1
ctttggcagcgtgaggcgagatgggtggcgcgcggtggccgacgggagaggagcggcgtagcggccggcggaggccgcgtccccgtggccccctccgccgctccccccgttgtcctcgcttcttccccccgggccgacgccgctgccgccctcaccaccgtcgcgtccgccatcgccgattccttccgtgacctgttcctcctgtcccgccactgggcatggcggagcgggacgtgttcgcgtacacggccatgatctcggggctgtcggaccacagccgatgcgtgaaggccatcgaactgttcgagcggatgcaggaggaacggggagggcagggctcatcggtcaggcaagggaagatctttcgga

SEQ ID NO: 6311 - DNA, 545 bp, Oryza sativa
  Clone ID: uC-osflcyp162h11b1
cggtgccagacaaaggagagaagcgcgaaggcggcggcggcggcggcgcatggcgaagatgtcggagaagaagcgcggcgccggcacccgcaaggacgaggtggtgacccgcgagtacaccatcaacctccacaagcgtctccacggatgcaccttcaagaagaaggcgccgaatgccatcaaggagatcaggaagtttgcacagaaggccatgggcacaacggatatacgcatcgacgtgaagcttaacaaggccatctggaccaatggtatccggagtgtcccaaggcgagtccgtgttagaatctctcgcaagagaaacgatgaggaggacgccaaggaggagctctactctctggtcacagttgctgagatccctgcagagggtctcaagggtttgggaaccaaggttgttgaggatgaggagtaaacttttcattgttatctgtcagttagcgcttagtgcatatttccatgattccagtcactatgctgagagcaaatttggaagtctgctttaagcgttttgtatctactgttgatga

SEQ ID NO: 6312 - DNA, 403 bp, Oryza sativa
  Clone ID: uC-osflcyp168a02b1
ttaatatcgccttctctccgaccgctcgccggcgacggcgcccgcgtcgactagacggagctgagcccggcagggtcacacgccgagccgacaggatgtggaacgtatgcatgttctaccacaggctcctagactaccggagggccgaggtgcaagccctcgccgagctcttcggcgggcctggcgccggggacgccgtcacgaggcgcatgccggagaaccaccacgttgactactatttacagctcggacgcctaccgggcgacgagcgcctcgccgcgcagatcgccaaccgcagtaaaagcgcctcgcctgatcgattgattcaccaccattcgctggctaagcttcttcttgcgggttaatcttgggggggcgccgtgacgccatgtgtgggttttgt

SEQ ID NO: 6313 - DNA, 205 bp, Oryza sativa
  Clone ID: uC-osflcyp168a04b1
acccggtcagtgctgcagacaagccaccccgtgggtcgcgtagactgctccccccacaaacaaaagcaatcctaatctcggattcgaggcgaacgagcggcggcgagggagggggactagcggcgatcgcgattggagtcgggtggacaccgatcgcggcggcgctctgggggatcggggtgtggaatcgagggggagggaggag

SEQ ID NO: 6314 - DNA, 230 bp, Oryza sativa
  Clone ID: uC-osflcyp168a06b1
ctcggccaaatccaaagcacagccgccattacggctccttttacattccactggggacgtacgagctctgcgcatcccttccattccattactgaccttggctgcgctgcagagggggtttggtggtgcggttgatttccggctataaaagctctagggggaggtatcggtcatggctgctgcttctgtacggaggggcttaaccgatgctctatcccttcctggtggcc

SEQ ID NO: 6315 - DNA, 425 bp, Oryza sativa
  Clone ID: uC-osflcyp168a07b1
tttaaaaagtcctgcagagcctaatccagtggcttcaaaaggtttcaccttcagtgaggtaaattgttggcgaacaaacaatagcaaagtagtttgctgccatttttcatcagatggcaagatactggctagtgctggacatgaaaagaaggctgtactttggaacatggagactttccagacacagtatactgctgaagagcatgctgtcattatcactgatgtccgtttcagacctaactctaatcagctggcaacatcatctttcgatagaactattaaactgtggaatgctgcagatcctggcttctccctgcatacatttgctggtcattgctctggaatcacatcactagattttcatccaaagaagacggaccttttgtgctcttgtgatagcaaatggtgaaatccggtactggaat

SEQ ID NO: 6316 - DNA, 392 bp, Oryza sativa
  Clone ID: uC-osflcyp168a09b1
ttaaatagccctactttaccgtaatggctatagctggtttactggttggtggtactaattgatatggtttgctggttggtggtactaattgacttattttgcccccttgcattagttttaatatggatcagatttccaaatagattggcatcttttgatacagaaattggataacctgccgatgaagtggtggaaggccgtggatgaacaattccactttgctgctaaaaatggacaggtctatgttgaaggatctgacagtatgtgttgctagatatcatacattgacttagagaagcatgatggctggatttaatatctgaagcagtcgttgtgaaattactttgtctatgctttaaccaagagcgcttaaacactatcttttaatttat

SEQ ID NO: 6317 - DNA, 385 bp, Oryza sativa
  Clone ID: uC-osflcyp168a10b1
tccccctcgacacgccgtcgccgccgaggggagagagagagaggccgccggccgccgctaccactgacccccccccctcgccggagcgccccgtcgccgggtttgatcgatggcgtccaagaggatcctgaaggagttgaaggacctgcagaaggaccctcccacctcatgcagcgcaggtcctgtgggtgaggacatgttccattggcaagctactattatgggaccctcagacagcccatttgctggtggggtattcttggtgaacattcatttcccaccggattatccttttaaaccaccgaaggtctctttccgcaccaaggttttccacccgaacattaatagcaatggcagcatttgcctcgacatcctcaggaacagt

SEQ ID NO: 6318 - DNA, 236 bp, Oryza sativa
  Clone ID: uC-osflcyp168a11b1
ataagacgccgcccaactcgcgaaggcggagggggaaattaagagagaaaaagagaaggaagaaaaaaaaaataaaactcgcgcacagcaaccgaatcatctggctcctcctcaagtagtctagacctcctctcttctccggagtctgcgtgcgaacgaagcagaggagcttcgtggccggccgggccgccatggagagccgcaaggaggaggagccccattggggaggaggggcc

SEQ ID NO: 6319 - DNA, 477 bp, Oryza sativa
  Clone ID: uC-osflcyp168b02b1
ttcgccgccgtcaccttctccccgcacactctgtcggctcccggatccacaccggcccccgccgtcgtccaaaatgaagttcatttctgcctatctccttgccactcttgctggtaaccctaacccatctgcggaggatcttacaactattctggagtcagttggagctgaagttgaccatggcaagatggagttactcttgtctcaactggctggtaaggatatcactgagattattgcttccggtcgggagaagtttgcttctgttccatgtggcggaggtggcgtagctgttgcagcagctgctccggctgctggtggtggagctgctcctcaatctgaggctaagaaagaagagaaggtggaggagaaagaagaatctgatgatgacatgggcttcaggtttgtttgactaggaccattccttggattatacccattttgggtaacttgggaaacgggaacctaaacacgctt

SEQ ID NO: 6320 - DNA, 377 bp, Oryza sativa
  Clone ID: uC-osflcyp168b03b1
atcgcatccgcctccaaaccctagacgcgggggccatggcgcggcgatccgcccctctcctccggcgcctcctctcccccactccctccccctccccctacccgtcccattctctcgccgccgccgccgactcccgccgcaccgtcacctacatgccgcggccgggggacggcgccccgcgcgccgtcacgctcatcccgggcgacggcatcgggcccctcgtcaccggcgccgtgcggcaggtgatggaggccatgcacgcgccggactacttcgagacctacgaggaccgcggagacatgccgacggatccccccgaggtcaacgactccatccggcggaacaaggactgactcaagggcggactccccacccca

SEQ ID NO: 6321 - DNA, 514 bp, Oryza sativa
  Clone ID: uC-osflcyp168b05b1
ttggcatcatatcataatggatccttcagcagcgcctatattcaccgatatggcggctgctggtcacatggagagaaatgataatgatcccattaggccacaacggcttagtgtttctgcaggaaggacatcaacagatagatcaccaaagcatatagagctagtatcaaatgggcatagtagtggtcaaaatgatcaaattcgtcccctactgagcctgttggagaaagaaccaccctctcggcatgtatctggacaacttgattatgttcgccacttatctggtctagaaaggcatgaaagtattttgccattactgcatgcttcaacagagaggaaaactaacggcgaacttgacttgttaatggcagaatttgctgaggtctctagacagggaaaagaaaatggtaaccttgattccaacataaaaacttcaaatagggttccaagcatgaaatatgcaccatcatcaggttcaaacaacttttaatgagggagcattaacatctggagc

SEQ ID NO: 6322 - DNA, 398 bp, Oryza sativa
  Clone ID: uC-osflcyp168b06b1
tttcaatgcactcgctgggggggaacagacgggggctgaggagcaaaggtcggagctgggacgcggcggcgaggaagaacgccggcgccggcgccgacgggctggccagcctgaacatcagccagtgcacggcgctgacgccgccggcggtccaggcggtgtgcgactccttcccggcgctccacacgtgcccggagcggcactccctcatcatcagcggatgcctcagccttacctccgtccactgcgcctgcgctcaccacccgcaccggcatgggagggccattcttttcaaccatgcctactagcaagctccctcttggagaaactaggacagcttggatttgaggaagatgtaaattaaaacccccggaatggttaccaaggactggggaaaa

SEQ ID NO: 6323 - DNA, 405 bp, Oryza sativa
  Clone ID: uC-osflcyp168b07b1
ttgaagcccacgtggacgaacaccctcctccgcccgacgaccgccggccgccgccgttatcatgccccccggcggcgggggcgccgtcttcctcggagtcgacgtcggcaccggcagcgctcgcgcaggtctctttgatgagaagggtaagctgctggggtcggcgagcagtcctatacagatatggaaggagaaggactgcatcgagcaatcatcaacagacatatggcatgccgtgtgtgctgcggtaaaacacgcatgctctctggcaaatgttgcgcctgagaatgttgtcggacttggcttcgccgctacttgttctcttgttgctgatgatgctgatggttcccctgtttctgtttcttggactggtgatgcgagggaggacatcatcgtgtggatgga

SEQ ID NO: 6324 - DNA, 290 bp, Oryza sativa
  Clone ID: uC-osflcyp168b08b1
tttgactcgtgggctcttgcgccggcggcgacgtcgaccgcctggagcaatggaaggcatagccagcggtaagaacaagcgcatctacaaggcgaggatgggaaccaagaagacgaccgaaaaggcatatgctaagaaggactggtattatctcaaggtcccataagagttcaatgggcgtaacatccgcaagacccttgaagccataacacatgggacagagaatgattgtgagggcctaaagcatactgcgtcagcggtcatactagcttgtctgcataccgactatg

SEQ ID NO: 6325 - DNA, 397 bp, Oryza sativa
  Clone ID: uC-osflcyp168b09b1
ttcgccttggcacaagtaacagcagaagcaggccattctccgtacagtatgattaatcaatcagatttctcactcccgttctcgtcgacaacgacttcagtgttggcatcacaacatgtcaactcttctgccaatgtgtcatcaccacgagaaataccaactctgccatcccacacagataatagcaacattgaatcaactgaggtttcacatggattccaaactactgccctcactgaggataaacctgctgatgatggctacaactggcggaagtatggccagaaggcagttaagggtggggagtatccaaggagctattataaatgtacccatttaagctgtccagttaagaagaaagtggagcgctcatctgacggacagattactcaaatac

SEQ ID NO: 6326 - DNA, 407 bp, Oryza sativa
  Clone ID: uC-osflcyp168b10b1
ttcccactcatctcacttcactctctttctggtgtcttcacttcaccaccgccacctctctcatcggatccctgcagaggaggagagggcagtggcggcgaaaggcgacatgggctcgctgtcctctctcgccgccgcggcggtgtttctctccctcctcgccgtcggccactgcgccgccgccgacttcaacgccaccgacgccgacgccgacttcgccggcaacggcgtggacttcaactccagcgacgccgccgtctactggggcccctggaccaaggccagggccacctggtacggccagcccaacggcgccggccccgacgacaacgggggcgcgtgcgggttcaagcacaccaaccagtacccgttcatgtcgatgaccttctgcggcaaccaagccattg

SEQ ID NO: 6327 - DNA, 303 bp, Oryza sativa
  Clone ID: uC-osflcyp168c06b1
ttttcggcctccctcctctcctcgtccctcctgcccgccgccgccgcagcagatttaatcctcaatggcggccttcaacaagctcggtagcttcctcaggcacagtggcttgacaagcagtgcctcggccggctcttcccctgccatgttcaatgctgctcgtttgatgtccaccaagcttttcgtggggggtctttcttggaatactaatgccgattcgttgaaggaggcattaaccagcttcggggatgtgactgaagctcgggtgaccaatgacagagaatctggaaggccaagagggtt

SEQ ID NO: 6328 - DNA, 461 bp, Oryza sativa
  Clone ID: uC-osflcyp168c07b1
ttgacttaaaaatactaatgagttacatgcaaattttctttttagcttaaaaaggatattgagctaatgatagtgatgaccaggtgggtagtaacttattgtcttgtcgggaagatttgaaaatattattatgctatatatgttgtatattatcggagccaaccatttacttataagtgattatggctggctgcagtgttccttttgaacatttatgtgaattttgaagcctggatacattatgaaatccgaatatctccttttcttttcattggaaaaaaaatttgtatgcaactttttttctgagcaattacttcctgttgtagaggctgcagagtttgaacttgttgagcccatctaaatactctaaaggagatgctgaaagaggaggtggatgagagcactaaaagaaagtttgatagttgggggtgtcttttggttactatggttaaaaaacaaac

SEQ ID NO: 6329 - DNA, 75 bp, Oryza sativa
  Clone ID: uC-osflcyp168c08b1
gtatgaaaaagagggagacagttgaacacacggggcgattgaaaaagcgtgaccgaccgagaggtgacggaagaa

SEQ ID NO: 6330 - DNA, 283 bp, Oryza sativa
  Clone ID: uC-osflcyp168c10b1
cacatgtagaaacaaagaggggagctgatggaaacgaggctggtgggctaaagaacaaaagaaaatttgctaaggcaacagggaattcttcaaaagcttcttcagttgctggatcaaaaaagcgcagaaaagctatgtttgaatctagtgaatctagcgcttcagacaccagcactgatagcgaagaagagattattgaagatggtcctgctgcaagtaatgtagggccagatcaacatccccgcagatcaagcaggcagaagcaagaagttaagtataatga

SEQ ID NO: 6331 - DNA, 216 bp, Oryza sativa
  Clone ID: uC-osflcyp168c11b1
tctcctcatcccagagcaagaagctcatctgctccttctctcgcatggcagccatggccaccaccgcgtccagcctcctcaagacctccttcgctggcgcgcgcctccccgccgccgtccgcaaccccaccgtctccgtcgcgccgcgcaccggcggcgccatctgcaactccatctcgtcgtcgtcgtccactcccccctacgaccttaacgcca

SEQ ID NO: 6332 - DNA, 185 bp, Oryza sativa
  unsure (1)..(185): unsure at all n locations
  Clone ID: uC-osflcyp168c12b1
ttcgtgccccccgggcgactcgagagacgacgcggccgtcggccccttcctcttcaacgcctactccctgacctcgccgacgtctgagcgggcgctggcaaagccgtgcgctcgaaaggacggtggcggcggggccttgtctcacctnccctttgcgcccaacggctggggacgccgcttagagt

SEQ ID NO: 6333 - DNA, 395 bp, Oryza sativa
  Clone ID: uC-osflcyp168d02b1
tttgcactaatgaggagattgtccaatttgcttgcacctgctcaaaggaccagcatccaatttatgataaggttgatgttaatggtgacaacactgcacccatctacaagttcctgaagtccagcaaaggtggtcttttctgcgacaatatcaaatggaacttctccaagttcttggtcgacaaagaggggcgtgttgtggagcgctatgcgccaactacttctgcactcagcatggagaaggacatcaagaagctgcttggaagttcttaaaaccttaccgccggcgccaccagatgcactgctgcgttgcattgagcacttggaacttacaataatgttgctataaaactgagcttggaattgctgggttttcatttgcgtagccctgctgtg

SEQ ID NO: 6334 - DNA, 457 bp, Oryza sativa
  Clone ID: uC-osflcyp168d03b1
tttgagctcagccaggaccagctctatcatggatgcagcgagtgaagattgccttgagtgctgcaaaggggcttgagttcctgcacgagaaggcggagcctcgtgtcgtccaccgtgacatcaaatccagcaacattatgctctttgacaacgatgttgcgaaagtaggagacttcgatgtatccaatcagtccccggacatggcggctcgcctccactccactcgtgttcttggcaccttcggttatcatgctcctgagtacgcgatgacagggcagcttagcacgaagagcgatgtctatagctttcgagtcgtgttgctggagcttttaactggtcgcaaaccggtcgatcatacgcttgccccgggccagcagagtcttgtgacatgggctactccaaggctaagtgaagacaaggtgaagcaatgcgtggatccaaggcttgaaggggatta

SEQ ID NO: 6335 - DNA, 299 bp, Oryza sativa
  Clone ID: uC-osflcyp168d05b1
tttaaacctctccctgtccccactctcgcgcctcctcccatggcttccttcccgaccaccgccgccgccgccgccgcgcaggcattcgccttcgccctcgcgccgaagccatcctcctccgccgccgcaccatccgcgctcttcccccgcaccgccgcggcggcggcgttcccgacgctggctgtgcgaggaagcgggaaggcgaggcagccggtggtggccgcggcggcgggggcggggacggggagcgagcagagggagacgatactgctccacgggtgcgactacaaccactggct

SEQ ID NO: 6336 - DNA, 393 bp, Oryza sativa
  Clone ID: uC-osflcyp168d07b1
ttcgtaggaagagtctctaataacacttttgagcctaatgggcaggctccaatttcgagcaccaataagtcactaaaacctgcagtaagagccaacggcatagatgtggctactttctcaactcctaggcgattagagactgatgagatcccttttgtcgtgaatgattacagggttgctgctagaaatgcaattgaagcaggatttgatggtgttgaaatccatggagctcatggttatttgatcgatcagtttctaaaagaccaagtcaatgatcgttctgacaaatatggtgggagcttagagaatcgctgccggtttgcgctagaagtggtccaagccgtaactgatgaaaatggagctgacaaggttgggataaggctgtcacccttt

SEQ ID NO: 6337 - DNA, 411 bp, Oryza sativa
  Clone ID: uC-osflcyp168d08b1
tttattttgaacttgaagcaaaaggtttctgatctccgtggacaactcaacaacaatgtccagatgagctccacctcattatgtgactcttgcaacaaacgactcctaagtacagacaagcttttcgaagatgaacagaatacttcaccatcaaatgttgggcccaattctatgtctgacatggcatcggctacagacatggcagatattgagcaatcaaggaagcaaaccacacaacattcatcttcttccatagacaagccaactctccacaagcatcaaaagagtattgcatccaatgaacaatcaagtaccatcagccaaagggctcaaaggatcttatcttctaagggtgggattatgaaaggatggccaagatggatcattttacatcaaagtggaaccttgcac

SEQ ID NO: 6338 - DNA, 400 bp, Oryza sativa
  Clone ID: uC-osflcyp168d10b1
tgtgaagaagaagagagaggatcccaaccccaccacctctcctcctcctcctctctctctctccgatctgcctcgccgccgccgcggctgctcttctcctctcgcctcgcctcgtgcgcgcggcgagttcgacctcctcctcctcctctccgagcccccgcctcccctggctgcgggcggggggtttcgagggggtggacgcggcctccgtgtcggcttcggctcggatcgaattcaaagaagaggttggaaaccttggtggtgtagttagtgccaccgcccctgtctggagtggcatgtagttttcgcaaggctttgtttatgattttgtcgatggcgaggagatgaaggcatcgcaagtgtggcaacggggcagcaaggacatgacagccatgccccc

SEQ ID NO: 6339 - DNA, 158 bp, Oryza sativa
  Clone ID: uC-osflcyp168d11b1
ttccactgaaccgccgacaccacccgccgacacccccttgcattgtgtagcggcggcgcctccgacatctatactgcgccgacatcccccatcctcgagctggacacggtggcacgccttcacctttcttgggtagcgttttctcctcatacttcccc

SEQ ID NO: 6340 - DNA, 484 bp, Oryza sativa
  unsure (1)..(484): unsure at all n locations
  Clone ID: uC-osflcyp168e01b1
ttaacgacaacgaggcgctgacagtggggcccagggggccgatcctcctcgaggactaccacctgatcgagaaggtggcgcacttcgcccgggagcgcatcccggagcgcgtggtccacgcccgcggcgcctccgccaagggcttcttcgagtgcacccacgacgtcaccgacatcacctgcgccgacttcctccggtccccgggcgcccagacccccgtcatcgtccgcttctccaccgtcatccacgagcgcggcagcccggagacgatccgcgacccgcgcgggttcgccgtcaagttctacacccgcgagggcaactgggacctcctcggcaacaacttccccgtcttcttcatccgcgacggcatcaagttctccgacgtcatccacgccttcaagcccaacccgcgctcccatgttcaggagtactggagggtcttcgacttcttggcccaccaccccgagagcctncacaccttttt

SEQ ID NO: 6341 - DNA, 494 bp, Oryza sativa
  Clone ID: uC-osflcyp168e03b1
ttctgcttcaaggctggtgaggatgccgactcacttggccttactggacatgagcggtacaccatcgacctcccgaccaacgtcagcgagatccgtcctgggcaggacattaccgtcacaaccgacaacgggaaatccttcacttgtactcttcgctttgacacagaggtggaactggcatacttcaaccatggaggcatcctcccatacgtcatccgcaacctggcgcagaactaggagaaaatgcacaccatttcaagttttcaaccatgacaacaacattacaggctcctctccttcccctcccctctgttgtgatcagcctgcaccgacatcgagagttctcctgggacaatcagcctcctttgttcaccatataaataaaaaaaaaccgaaaataaaagccgcaggagacaaggagccacacctggagatcttggtgtgaggaacaaacaattttgcctgctgcggttagttgtgatgttgaaccctac

SEQ ID NO: 6342 - DNA, 426 bp, Oryza sativa
  Clone ID: uC-osflcyp168e07b1
tcagagaaaggcgtcttcgtactcgcctctctccgcgccctcctccgccgccgctcgccgccgttcgtctccgccgccaccgccgccgccatgagggagtgcatctcgatccacatcgggcaggccggtatccaggtcgggaacgcgtgctgggagctctattgcctcgagcatggcatccagcctgatggacagatgcccggtgacaagaccgttgggggaggtgatgatgcttttaacaccttcttcagtgagactggtgctgggaagcatgtcccccgtgctgtcttcgtcgatcttgagcctaccgtgattgatgaggtgaggactggtgactaccgtcagctttttcaccctgagcagcttatcaagggaaggaggatgcaaccaacaacttttgcccgtggtcactacaccattggcaag

SEQ ID NO: 6343 - DNA, 372 bp, Oryza sativa
  Clone ID: uC-osflcyp168e08b1
ttcacgcgtccgcttctctcctcctctaatcgcaagtctctgtctcgtcgtcctcgcatctccactcgccatgggcaagattaagatcggaatcaacggtttcggaaggatcgggaggctcgtggccagggtggccctccagagcgaggatgtcgagctcgtcgccgtcaacgaccccttcatcaccaccgactacatgacctacatgttcaagtacgataccgtgcacggccaatggaagcacagcgacatcaagatcaaggactccaagactctgctcttgggcgagaagccggtcaccgttttcggcatcaggaaccctgacgagattccgtgggctgaggctggtgctgagtatgtcgtggagtccac

SEQ ID NO: 6344 - DNA, 107 bp, Oryza sativa
  Clone ID: uC-osflcyp168e10b1
ttgtacctcctctagacctctgctacttatagctttgtacgcgccactcactctccgagcttgacggcggaggcaacggcggaggtcgtcgattggaggtcggggag

SEQ ID NO: 6345 - DNA, 446 bp, Oryza sativa
  Clone ID: uC-osflcyp168e11b1
ttccaccccccaccggccggccccgtctcgccgtcgccgccgtcgtctccgccacccaaaaccctagccctgcagcctcccctccgcagctcgccccctctcctcgccatggccaccaacggcagctccccgagggcgagggagactgagagcagcctggagaaggtgaagcggcagctctcgtcggggtccgggcggtacctgctgcaggggccactgctgaagcgatctgagacgttgaggaaatggaatgagagatgggtaattttagaccctacttcaggaaagatggaatacaaaattcggagaaatgaaactgccattaaaggaaccattatatttgatgcttcaagcactattacctttgcccctgtaaatttccaagggatgccaaagtatgatggctggctgttctacattggaacttctcaaaaaaggattacttt

SEQ ID NO: 6346 - DNA, 445 bp, Oryza sativa
  Clone ID: uC-osflcyp168f03b1
ttcatcttcaaggacggcaagggctgcggctgatgcttctagatcaagtgctccaagccggaggcctgctccgacaagcccgcccttatccacgtcaccgacatgaacgacgagcccatcgctgcctaccactttgacctctccggccttgccttcggcgccatggctaaggatggcaaggacgaagagctccgtaaggccggcatcatcgacacgcagttccgccgcgtcaagtgcaagtatcctgccgacaccaagatcaccttccacatcgagaaggcctccaaccccaactaccttgcgctgctagtcaagtacgtcgctggtgatggtgacgttcgggaggtggaaatcaaggagaagggctccgaggagtggaaggcgctcaaggagtcatggggtgcccatttggaggatagacacccccaagccgctaagggcccct

SEQ ID NO: 6347 - DNA, 134 bp, Oryza sativa
  Clone ID: uC-osflcyp168f04b1
tgcaaacccatcgtatcaaccaccaaatcgaaggcacgttggtgagcaccaacagcttcattgggcatggcttgggggctcgtttttggcgggaaccttcttgccggttattgaagggcaccgttcggggaagc

SEQ ID NO: 6348 - DNA, 170 bp, Oryza sativa
  Clone ID: uC-osflcyp168f05b1
tgcacgcccaagctcagaacaaccaatattgaggtgcttatggcggcgacgccggaggacttcgcggccagcaagcgggccatggactacgtgctgggcaagcacgtgaacctcgagccgaatacaatatgcacatcatggaaggaagagagggagactgcccccctgga

SEQ ID NO: 6349 - DNA, 260 bp, Oryza sativa
  Clone ID: uC-osflcyp168f09b1
tgcaccaccacaaccacctacgactggccggaatattatcagaagccgtcgccgacgacgccatggacttcgtagaggcgtggggtctgaccccgctcgccgaggaagacctagtcgatcactacctactactgcgacagatgcggccttagcttagcagccacgagtaaagatggcagggacgaagagcttcgtaaggccggaatcaatcataacgcatttatgctgagttataagaaatgtaaactgccagcactaaa

SEQ ID NO: 6350 - DNA, 512 bp, Oryza sativa
  Clone ID: uC-osflcyp168g01b1
ttcatttcctcctccccctcctccgccgccggcgcctcctcctccctgcttgtgctcgccttgctgccgccccccgccgcggcgaccgagcacgcgcacgagcaggagccatggatgaggagtacgacgtgatcgtgctcgggacgggcctcaaggagtgcatcctcagcggcctcctctccgtcgacggcctcaaggtgttgcacatggatagaaatgactactatggaggggattccacctcgctcaaccttaaccagctgtggaagaggtttagaggggaagacaaacccccagctcatctgggtgcaagcagagattacaatgtagatatggtcccaaagtttatgatggcaaatggcacattggtaaggaccctgattcacactgatgtgacaaagtatttgtcattcaaagcctgtgatgggagctacgtcttcagcaaagggaagattcacaaggtacctgctaccgacatggagggtctgaagtcccctttggaggggcccttt

SEQ ID NO: 6351 - DNA, 326 bp, Oryza sativa
  Clone ID: uC-osflcyp168g02b1
tgcgtcgtcctccccgggcgactcgagagacgacgctgccgccgcccccttcctcttcaacgcctcctccctcacctcgccgccgcctgagcgggcgctggcaaagccgtgcgctcgcaaggacggtggcggcggggccttgtctcacctcccctttgcgcccaacggctggggacgccgcttagagtggtggtggcggtgcccagatccgcgccgtggccggccggatctgggggagcgatagccggtggcagggaatgaaggtggcggcggtggttgacaccgcggcgtggggagttggcggctggggacaccgctcggagcga

SEQ ID NO: 6352 - DNA, 390 bp, Oryza sativa
  Clone ID: uC-osflcyp168g03b1
ttaatgctcgccaccacacccacccacccacgaatggcgtactcccgcctcctcctcctcgccgcgctgctcgccacggcggcggtgctggcggcgtcgcagaagccgaaggccgccacgccgacgaaggccacgccggcgtcgcccggccccgcggcggcggcggccgacggccccgcgccgacgaacgtgacggcagtgctggagaagtccggcaagtacaccaccttcctccggctcctacacgagagccgggtggacacccagatcaacagccagctgatggacagctacaacgggctgaccatgttcgcgcccacggacgccgcgttcgcggagctcaagccgggcacgctcaactcgctgccggcgcaggaccagatccagctg

SEQ ID NO: 6353 - DNA, 493 bp, Oryza sativa
  Clone ID: uC-osflcyp168g07b1
tcctccccttccgtctctccgcgctccagctgcacgccaattaaaccctactcctcttgcgttgcgttatctgcggttccgtctcccactactcgcgcacacgtagaaacggaaggagaaacaaacaaaaggcgccgagtaacgcagatagagagttgtttccgcaccgagcgcgtccgcggcagtgtgtgtgtgtagcggtagcgcacgcgcggctcgcgggcgcgccggttgcaccagctgtgcgttgcggcgacgatggaggtgacggccgagttcggcggcgcctactacggcggcgcggcgggccgcgagaagaaggcgctgcagcaggggtgcggggaccacttcgccgtggacgaccttctcgtgttgccctacggcgaggaggatgaaacaacaagggaagggtgaggccaccggccgtaaggaggaagctgccggctttgggaacgcgttggcggactcgtcgaccataacgggcctggatagc

SEQ ID NO: 6354 - DNA, 524 bp, Oryza sativa
  Clone ID: uC-osflcyp168g09b1
tgaaaaactagtaaacaacgcacacgaaaagagaatcaattcaatggcttctcgatggatccgtcctgaggtgtacccgctgttcgcgaccaccggcgtggccgtggggatctgcgcgatgcagctggtgcgaaacatcaccaccaacccggaagtgagggtgacgaaggagaacagggcggctggcgtgctggagaacttcgacgaggggaagaggtactcccagcatggcgtgaggaggttctggctctccaagcgccgcgactacatgcaggccctggacaaccccaccaacccctcaaccaaaaaatagacgcaaaagtcatacttattcgatgggtacatatatatatatatatcgatttgattctcggcttcaaaatgcctatatataaatgaatgaatcgacaataagtttttaacatggggaatattcatgttaggacttgctactttacatatttggccatatatctggctggttctctaggaatgaacatttccactggattccttttattttc

SEQ ID NO: 6355 - DNA, 75 bp, Oryza sativa
  Clone ID: uC-osflcyp168g11b1
ttctagaccagggaggaatcaaggcccgagggagacttttgaggccgaaggtggaggtcaagcggcggagaagag

SEQ ID NO: 6356 - DNA, 496 bp, Oryza sativa
  Clone ID: uC-osflcyp168h02b1
ttctcgcaggagctccaggagaagaagctcatgcacaatctccgcaactacaccgtccccctccagcgctacatcgccatgatggacctccaggagaggaatgagaggctgttctacaagctcctgatcgacaacgtggaggagctgctgccggtggtgtacacgccgacggtcggggaggcctgccagaagtacggcagcatctacaggcggccacagggcctgtacatcagcctcaaggacaaggggaagatccttgaggtgctcaagaactggccggagaggagcatccaggtgatcgtcgtcaccgacggcgagcgcattcttggccttggagatcttggttgtcagggaatgggtattcctgtcggcaaactgtctctgtacactgcccttggaggagttcgcccatcagcttgcctttcaatcacattgatgttgggaccaacaatgagtcactgctcaacgacgaattctacaatggactcaagcaacg

SEQ ID NO: 6357 - DNA, 325 bp, Oryza sativa
  Clone ID: uC-osflcyp168h03b1
ttgacgcgtggggaaagtagagagatggaggggaaggaggaggatgtccggctgggagccaacaagttctcggagaggcagccgatcggcacggcggcgcagggctccgacgacaaggactacaaggagccgccgccggcgccgctgttcgagccaggggagctcaagtcgtggtccttctaccgcgcagggatcgccgagttcatggccaccttcctcttcctttacatcaccgtcctcaccgtcatgggggtcaacaactccacctccaagtgcgccaccgtcggcatccagggcatcgcctggtccttcggcggcatgatct

SEQ ID NO: 6358 - DNA, 391 bp, Oryza sativa
  Clone ID: uC-osflcyp168h04b1
ttaaatacttcagtcgattaacaaaaggcctacaagagaaccagagttttcagctggaggaatggaggaaagattggattgcctactcgaatgaatggcagtccgggaaggagctctatgctgtgaaggctacgggtgatgctttggcaatttccagctcactattcaaaaagtacttcagttagctgcaattgtccacttcgaattattagatgattgaaaatatcacatttccagcccctgcactaggtgcacacgccctaactgttggaataaagccaactgtctactttgttgatgtggtaaataattcatacatcagaaacacactgtttagaagcttgagaatcgtgcaaatgaaggtcgaaaatataaaatgagtaaaaaataa

SEQ ID NO: 6359 - DNA, 378 bp, Oryza sativa
  Clone ID: uC-osflcyp168h07b1
ctcaacatcaccgtcaatgaggcccagtcccgccgctccggcggcggaggcgggggctacggcggcggcggtggcggctacggcggcggtcgtggaggcggcggctacggaggaggtggcggcggcggctacgggcgccgtgagggcggctacggtggcggcggcggctacggcggcggccgtggcggcagcggcggcggctaccgtggcagccgtggcggcggctacggcggcgactccggcgggaactggaggaactgattggtggggcccatcgtggccagatatccttagctatccgtgtcagaatcatcttatcatcgagccgagtctgtatcgtgtccagtggcttcttccagtcgagaagcccctctattc

SEQ ID NO: 6360 - DNA, 411 bp, Oryza sativa
  Clone ID: uC-osflcyp168h09b1
ctgtgagcaacctgctcgccgccggctactggatgtactcgagctcggtcatcttcgtgctcaccatcgggacaggggtgtacgtgttcacgctggacccgatgtacggcgagttcgtgctgacgcaggagaaggtgcagatccccaaggcaggcaagatctatgccttcaacgagggcaactacgcgctctgggacgacaagctcaagagctacatggacagcctcaaggagcccgggccgtccgggaagccatactccgcgcgctacatcggcagcctcgtcggcgacttccaccgtacgctgctctacggcggcatctacggctaccccagggaccagaagagcaagaacggcaagctgcggctgctgtacgagtgcgcgccgatgagcttcatcgtcgagcaggccc

SEQ ID NO: 6361 - DNA, 483 bp, Oryza sativa
  Clone ID: uC-osflcyp169a01b1
cttttccacacgaagagatagagtgaaataccaagagagaaaaaaaagagagaataatttcccccttttctctcttccgtgccggagaatcgatggagattagggcgccgccgacgagcctgaggctcgcgccgccgccgccggcctccgccagcttccgccggaccgcgctcaggacctccttcctcaacggcagcgtttcacttagacttattcaagtgcgccaatcaaatgtcaacaggtttaagtgcaatggcataagaagtaacctccttgatagattttctagggttgtaaagtcctatgcaaatgcagtcttaagttcatttgaagaccctgaaaagatcctagaccaggctgttttggaaatgaatgatgatttgacaaagatgcggctagccactgcacaggtcttggcttctcaaaagcggcttgagaacaaatacaaatccgctgaacaagcttctgatgattggtatcgga

SEQ ID NO: 6362 - DNA, 537 bp, Oryza sativa
  Clone ID: uC-osflcyp169a02b1
gccataatctctgccgcgctcctcctcctctcctctcctctcctctcctctcccggcggcggcgcgggcaactccagtcatgtgggactacaaggccgtggcagcggttacccttcgcacccggaagatgacgatcacccgtgtaacataccgcaagcaattcgtgctcgaggtgatccaccccggccggcccaacgtctccaaggctgagctgaaggagaagctggccaagctgtacgaggtgaaggacgcgaactgcatattagtggtcaagctccgtactcacttcggtggaggcaagtacaccgcattccgactcatctacgataacctggacgccgagaagaactgcgagcccaagtaccgtctcatcacgaatggacttgctaccaagggtgagaaatgtagcacgcaaatgaaagaacgcaggaacagagcgtagacgatccgtggtgtcaagaagaccaacgctggtgatgcccggaaaaagaagtgaaaactcatttacatttgtactactggctctgggaacactgt

SEQ ID NO: 6363 - DNA, 487 bp, Oryza sativa
  unsure (1)..(487): unsure at all n locations
  Clone ID: uC-osflcyp169a04b1
gttcaccgccggcatgcccgtcgcccgccgctccggcaactccagcttcggcaacgtcagcaatggcggcaggatcaggtgcatgcaggtgtggccgattgagggcatcaagaagttcgagaccctctcctacctgccaccgctcaccgtggaggacctcctgaagcagatcgagtacctgctccgttccaagtgggtgccctgcctcgagttcagcaaggtcggattcgtctaccgtgagaaccacagatcccccggatactacgatggcaggtactggaccatgtggaagctgcccatgttcgggtgcactgacgccacccaagtgctcaaggagctcgaggaggccaagaaggcgtaccctgatgcattcgtccgtatcatcggcttcgacaacgtcaggcaggtgcagctcatcagcttcatcgtctacaagccctncggctgcgaggagtctggtggcaactaagccgtcatcgtcatatat

SEQ ID NO: 6364 - DNA, 256 bp, Oryza sativa
  unsure (1)..(256): unsure at all n locations
  Clone ID: uC-osflcyp169a05b1
gagctcacaagcccaagtcgcgtcgcaccgaagcagagtagagaaggagaggagcggagcgccatcagccgtccgatcgagtgatccgatggctctcgctctctccacctctgctgctgctgccgctgccgccgcggcgcgggcgctcgcggcgagggtgacgacgacgaggggttacgccgcgtcggcggcgtcgtcggcgatgaggcgggcggcggtggcggtggaggggaaggggcgctgcgggngatgacgc

SEQ ID NO: 6365 - DNA, 467 bp, Oryza sativa
  Clone ID: uC-osflcyp169a08b1
gtttgggaatgcatgtgattgcacacgatccgtatgcttctgctgatcgtgcccatgcaattggagttgagctagtgagcatggaagacgctttgacaactgctgactttatctcgttgcatatgcctcttacccctgcaacaaacaagatgctcaatgatgaaactttcgctaagatgaagaagggtgttagaattataaatgttgcgcgtggtggtgtaattgatgaagatgctctagtcagggctcttgattcaggaatagttgcacaggctgctcttgatgtgttcactaaagagccaccggcaccagacagcaaattagtgctgcatgagaatgttactgtaacaccacaccttggtgccagcacagttgaagcacaggaaggagtggctattgaaatagctgaagctgttattggagctcttgaaggggaacttgcagcttcagcagtcaacgcaccaatg

SEQ ID NO: 6366 - DNA, 373 bp, Oryza sativa
  Clone ID: uC-osflcyp169a09b1
ctgagtctttcatctggaacattgatggggaatcattatcaatggatgaacgagatttccaaaagaagatggacttggcaagggaacgcatgttgggattatcagctagctcagagaatcaggacaaccaaaacaatcttgatgtacgggagcaaaaatcacaaacactgaaagctagcagggattctgatgtcaatctctctttgaaagataatttccaaggtcctggactggaaatgagaagggacagtgatgcaagtagtaacccagttgaagcgtgtgcaatcgatttctgatttggagaagaaaggagcagccgagcttctagggaatgatgacttgaacaaaaaaattcaagagtacccattctttt

SEQ ID NO: 6367 - DNA, 349 bp, Oryza sativa
  Clone ID: uC-osflcyp169a10b1
tccaccgccatgcggtgttcacaagcccaagtcgcgtcgcaccgaagcagagtttacaaggagaggagcggagcgccatcagccggccgaacgagtgagccgatggctctcgctctgtgcatctatgatgttgatgccgttgcctacgtggcacgggtgctcgcggaggggctgacgacgccgagggagtacctcttgtggtccgagtggcggcgattaggaggatagtggcggcggaggaaggtacgggcgcttccacgatgacgcacgcgactacggtggtccgtctactttatcgacaggattgttaatgggggtgattccggtaaggacccccatgttgttaagg

SEQ ID NO: 6368 - DNA, 232 bp, Oryza sativa
  Clone ID: uC-osflcyp169a11b1
cgtacgcccataaccctagccgccgtcgccggcgtactcgagagaaacatcagcatccatggcgggcaagggcgagggtccggccatcggcatcgaccttggcacgacctactcgtgcgtgggcgtttggcagcacgaccgcgtggagatcatcgccaacgaccagggcaaccgcaccaccccctcctacgtggggtttaccgactccgagagggtcattatgagatgctgt

SEQ ID NO: 6369 - DNA, 264 bp, Oryza sativa
  Clone ID: uC-osflcyp169a12b1
gcttgggcgccggctttttcagaggctgttttgttcaactacctttggaccgaccttggcaccggggtggactacccctgcaagttcatagccaagcggaagctcatcaccaaggaggacctcgaggaccttcgccgcgagagccagatcatgcaccaccttgcgggccaccggtacgttgttgtcatcaagggcgcctaccaggacccgttactacctcacaatgtgatggagctttgcgccgcggccagcttattctacctg

SEQ ID NO: 6370 - DNA, 504 bp, Oryza sativa
  Clone ID: uC-osflcyp169b02b1
agcaaacgctcctcatacgacagagagagcgtgacagcgcgagggggttcggaggcgggagcgggcgacggcggcggcggcgggcgccagcgagcggcgaagggcgcgctggagatgaaggagaaggggtcgagggcggcggtggacgagcgctacgcgcagtggaagtcgctcatcccggtgctctacgactggttcgccaaccacaacctcgtctggccgtccctctcctgccggtggggaccccagtttgagaaggctacctacaagaatcgtcagcgtctttacctttcagagcagacggatgggactgtccctaatactctggttattgcaaatggtgaagttgtcaaacaagggttgcagctgctgaacatatttctcagttcaatgaggaagcacgatcaccttttgtaaagaagtacaagactataattcatccaggcgaggtgaacaggattagggagctttcgcagaacagtaagatcattgccactcataccg

SEQ ID NO: 6371 - DNA, 527 bp, Oryza sativa
  unsure (1)..(527): unsure at all n locations
  Clone ID: uC-osflcyp169b03b1
gcggcggtggcggcggaggcgaaggcggcgaagatgcagtacaagaacctggggaggtcggggctgcgggtgagccagctgtcgtacggggcgtgggtgacgttcggcaaccagctggacgtgaaggaggcgaaggcgctgctccaggcgtgccgcgacgccggcgtgaacttcttcgacaacgccgaggtgtacgcgaacgggcgcgccgaggagatcatggggcaggcgatgcgggaccttgggtggcgccgctccgacgtcgtcgtctccaccaagctcttctggggagnggcagggccccaacgacaagggcctcttccggaagcacatcgtcgagggccttcgcggctcgctcaagcgcctcgacatggactacgttcgacgtcgtctactgccaccgtcccgacgccaccacctccgtcgaggagaccgtgcgcgccatgaactgngtcatcgaccacggcatggccttctactggggcaccttcgagtggtacgcccagcagatcaccgaggcgtggagc

SEQ ID NO: 6372 - DNA, 486 bp, Oryza sativa
  unsure (1)..(486): unsure at all n locations
  Clone ID: uC-osflcyp169b04b1
aatgaatgatggcgtcaagacacaattagggcttactcgttttaaaggattttttcactcataggattaggaaaaatgaaggaatagggatagctgtggagtccaatcctatgggaagctaaacgtcaggaatttaaaaaaagtgtgcattcggatataccgcaggagaagtgtaggaaatctgccgtttgaaatatatttttttaagtttgcatcaactgacatcggccctcaactagccgttagctttgaagtgcataaatagccctcgttagccttgtgcaccattttcccctgttctttttatttgctcatcaactgtggaagaagcttgctgatcctttgctcttctcttcactatctgcataatttttccagaagctgtactcattgtctagccaccatactgggacgttactggttcgtgtaacaacangcatcagtttggtaacatctgcacaccatgaatccaagctaccgacgtat

SEQ ID NO: 6373 - DNA, 456 bp, Oryza sativa
  Clone ID: uC-osflcyp169b05b1
aaataaacaaaacacaccaagccaaataaaagcgacaatgggatcgctcaccaccaacatcgtcctcgccgtcgccgtggtggcagcgctggtcggcggcgggtcgtgcggcccgcccaaggtgccacccggcccgaacatcacgaccaactacaacgccccgtggctccccgccagggccacctggtacggccagccctacggctccggctccaccgacaatggtgacgcgtgcgggatcaagaacgtcaacctgcctccctacaacggcatgatctcctgcggcaacgtcccaatcttcaaggacggcaggggatgcggctcatgctacgaggtgaagtgtgagcagccggcggcgtgctcgagcagccgggaacggtgttcatcacggacatgaactacgagcccatttcggcgtaccacttcgacttctccggcaaggcgttcggcgccatg

SEQ ID NO: 6374 - DNA, 432 bp, Oryza sativa
  unsure (1)..(432): unsure at all n locations
  Clone ID: uC-osflcyp169b06b1
ggtgcggtgcggagcagaggaggacgaagcagcaggcggcggcggcagagcacggcgacctagcccgacctcgcaaccatggcaaggggtttgaagaagcatctgaagaggctcaatgcgcccaagcattggatgctcgacaagcttggtggagcttttgcccccaagccatcttctggtcctcacaagtccagggagtgcctgcctctgatcctcattatcaggaacaggctcaagtatgctctgacataccgngaggttatttctatcctcatgcagcgccatgtcttggttgatggcaaggtcaggactgacaagacctacccagctggtttatgggatgtcatttccatcccaagactggtgagaactacaggcttctgtacgacaccaggggacgttttccgcttcagtctgtcaaggatgaggatg

SEQ ID NO: 6375 - DNA, 395 bp, Oryza sativa
  unsure (1)..(395): unsure at all n locations
  Clone ID: uC-osflcyp169b07b1
gttgttaggcacaattggtactctagtttcagatgctatgtaccattctgattttagaactttgatcaattacctaaagtaagaatgtcaataaggaatgcaatcttgtatctgtggtattgtatagtactatgattgtattgccggtgcttaaggacaatcattgattattatcagcactattatgttacagttctgaaaaaaaaaaaaaaaaaaaaaaaaaaaaaaaaaaaaaaaaaaaaaaaaaaaaaaaaaaaaaaaaaaaaaaaaaaaaaaaaaaaaaaaaaaaaaaaaaaaaaaaaaaaaaaaaaaaaaaaaaaaaaaaaaaaaangggggggggcgttttaaaggaccaaaattttttacccccttcggtgtcacaaaaaattttttt

SEQ ID NO: 6376 - DNA, 447 bp, Oryza sativa
  unsure (1)..(447): unsure at all n locations
  Clone ID: uC-osflcyp169b09b1
ccatgtcggacaagtgcggcaactgcgactgtgctgacaagagccagtgcgtgaagaaaggtaccagctatggcgtcgtcatagttgaagccgagaagagccacttcgaggaggtcgccgccggcgaggagaacggcggctgcaagtgcggcaccagctgctcctgcaccgactgcaagtgcggcaagtgaagtcacgaagcaaccgaacactcgccgccggcgagtcacctaccttaattagtccacaataaaaaccacccatatgagtgtggtttgtggtgtgtgctgattattgctgaattaacccgtgtgttatcgattaattaagcagctggtcgcttcggcgactatgcgtgtatcaacgtatgaatntgtgtgatgtgatgtacccgtgctattctcagtgaaattaatcaatcgtgtattcgtgtgggtttgcctaagt

SEQ ID NO: 6377 - DNA, 383 bp, Oryza sativa
  Clone ID: uC-osflcyp169b10b1
gatggagaagaaggagaggagcagccatggcgtcgtcggtggcagcggcggcgagcacgttcctggggacgaggctggcggacccggcgccgcagagcgggaggatcgtggcgaggttcgggttcggcggcgggaagaaggcggcggtgaataaggcggcgaggccgtcggcgccgacgacggacaggccgatgtggttccccggcgcggtggcgccggactacctggacaggtcgctcgtcggcgactacggcttcgacccgttcggtctcgggaagccggcggagtacctgcagttcgagctggactcgctggaccagaacctggccaagaacaacgccggtgagatcatcggcacccggttcgagaccggcgaggtgaag

SEQ ID NO: 6378 - DNA, 282 bp, Oryza sativa
  Clone ID: uC-osflcyp169b12b1
ccctacgcgttcggccacatcttattgtcacttccatctcattctcctaattgtcatcactagcttctagctagcttaattaattaattagccatggcggaggagaagcaccaccaccacctgttccaccacaagaaggacgacgagccggccaccggagtagactcctacggagagggcgtctacacgtcggagaccgtgaccaccgaggtggtcgccggcggccaggacgagtactagaggtacaagaaggaggagaagcagcacaagcacaagcagcac

SEQ ID NO: 6379 - DNA, 544 bp, Oryza sativa
  unsure (1)..(544): unsure at all n locations
  Clone ID: uC-osflcyp169c01b1
ctgttttccaaagatcagaagctggttcggatgatgaggatgattatccaatggatggtattgatacctctatgaaatccgttggaattagttacccatatgtcagaaggcgtaagaagctgccagatccagtcgagaaagagaagggtgtaagcttgtggtcaatgatcaaggacaatataggaaaggatctaaccaaagtttgtctgcctgtttatttcaatgaaccactctcatctttacagaaatgctttgaagatcttgagtattcctaccttattgatcgcgcttatgaatgggggaaaaggggcaatagtctgatgaggatccttagtgtagcagcatttgctgtttctggctatgcatctacggatggaagaagctgtaagcccttcaatccacttcttggggagacctatgaagcagattatccagacaaaggcctccgttttttctcagaaaaggttagtcaccatcctatggtggttgcatgccattgtgagggaaccgngtggcgtttttgggcagatagcaacctaaaaag

SEQ ID NO: 6380 - DNA, 519 bp, Oryza sativa
  unsure (1)..(519): unsure at all n locations
  Clone ID: uC-osflcyp169c03b1
ccggcggtggcgagctcgtgatctcaaccaccaggaggaacccggcgctcgcctcgatctccgccgcctcgtcccaccatgtcgaagaggaagaccagggagcctaaggaggagaatgtcactcttggacccactgtccgtgaaggagagtatgtgttcggagttgcccacatcttcgcatccttcaatgacactttcattcatgtcactgacttgtctggaagggaaactcttgttcgcattactggtggcatgaaggtcaaagctgaccgtgatgagtcatcaccatatgcagctatgcttgcttctcaaggatgttngcacagcgttgcaaggagcttggtattactgctctgcacatcaagcttcgtgccactggaggcaacaagacaaagacacccggtcctggtgctcaatctgctcttagggctcttgctcgctctggcatgaagattggtcgcattgaggatgtgaccccggttcccacggacagcacccgcagaaagggaggtaggagag

SEQ ID NO: 6381 - DNA, 369 bp, Oryza sativa
  Clone ID: uC-osflcyp169c04b1
cgtgcttgttcgacacgaagacgacgacgacgaacgcgggagctccggtgtggaacgacaacgaggcgctgacagtggggcccagggggccgatcctcctcgaggactaccacctgatcgagaaggtggcgcacttcgcccgggagcgcatcccggagcgcgtggtctcacgcccgcggcgccttcgccaagggcttcttcgagtgcacccacgacgtcaccgacatcacctgcgccgactttctccggtccccgggcgcccagacccccgtcatcgtccgcttctccaccgtcatacacgagcgcggcagcccggagacgatccgcgacccgcgcgggttcgccgtcaagttctacacccgcgagggc

SEQ ID NO: 6382 - DNA, 331 bp, Oryza sativa
  Clone ID: uC-osflcyp169c05b1
tcataatccgcgacgacgaaaaccctagccgtcgccggaatgtttaaggccgaggccgccgtcgccggcgacgccgccaagcccgacccggagatgggagtcgcgggggagaaggaggtggttgtggagaaggtgccggcgaggaggaaggtagtggcggaggaggaggacccgcggctgtggtgggcgttcgtgcggaaggtgtactgtattctggcgctgcagttcgccgtcacggtggagatcgacgttgtgtcgtgggccgtccgccccatcccgcgcttgttcgcggcgggctccctcgcttcgtggctcgtatacctcgccatgc

SEQ ID NO: 6383 - DNA, 472 bp, Oryza sativa
  Clone ID: uC-osflcyp169c07b1
cagaacccctgctgggcatcctcctctttcaaaacatcctttgctctccaaccacttcatcttgatgttcttaatctcctatagtctttccctgtgcgaattttttctttgagaaccaaagtttcttagggaaattctgttgaatttttcctttgagaaccaaggtttctcggggagactctgccaaaatttttatcaactagcaagttgaaaatacatcattgtacatatattttgtctgcacatttatatacagtagcaaaacctgtttgtagaggaaattattatagtgtttctgctggttgatccatgatagattaaacaggagggggtgtgactggtaggatgtcaccaatcctctcccgggtcatcctctccggatttatgatcagctcgacgctccggcgaggctctcatcttgtcctctctttctccgtcgtcttcctttactggttctatgtcttctcagtaa

SEQ ID NO: 6384 - DNA, 491 bp, Oryza sativa
  unsure (1)..(491): unsure at all n locations
  Clone ID: uC-osflcyp169c08b1
ctcgtctcgtctcttctctctccatttttctcgaagcgagagtgcgttgcgttgcgagcgggaagcgaaaactcgaaaccatggccacggccggcgacgagcagcagcagcaggcggcggcggcgcagacggcggaggtgacggaggcggcggcgaaggaggtggtgtccgtggagatgccggcgccggaggggtggacgaagaagtttactccccagagaggggggagatttgagattgtntttttgtttcaccaactggagaagagattaagaacaagagacagctgagccagtatctgaaggcacaccctggaggccctgcatcctcagagtttgattggggaactggtgatactccaaggcgctctgctcgcattagcagaaagttaaggctttcgatagcccagagggaggaagatccgaaacgttttggaactcatctggcagaagggcaagcaggagaaaaaggaggccaccgaaaatgaagaa

SEQ ID NO: 6385 - DNA, 502 bp, Oryza sativa
  unsure (1)..(502): unsure at all n locations
  Clone ID: uC-osflcyp169c09b1
gagtgcacctttgggatcatgcaccaatggaggcggtggcgcgatgcgtgtgagccgtcggatcgagaacggacggttcggatcggaccgtggagatattgttattatatatagtttctttttttttcaaatgcagctttttctttgttgttttttttatggacggtgggtgagatggatatgcaggcgaattataattcttggctatttttcatagatatncgttgtgtttctttttaattcataattgagatatcatcttcagtgggtgactgatgagtggtgccatttgagattcctatctactgaagcaataatgctaagatagaaacttacataatttgttgagaaatgcagttgatttttagatgattaacaattaatgtggcacacccagtactggtgcttaattttgcttttaggggcttttgcttgctctggcatgaagattggtcgcattgaggatgtgacctccggtcccacggacagcacccgcagaaag

SEQ ID NO: 6386 - DNA, 466 bp, Oryza sativa
  unsure (1)..(466): unsure at all n locations
  Clone ID: uC-osflcyp169c10b1
tgttattccaatctcacttggtcgtttagtttttgaggctattccccgcctgccaatcacacatggcatcaagtgcaatgatttattctctttcagcattggatgttatattatctggagtgcagcagctggaaccagatatgcaattgattacattcgatcacgacgactggccttcctagtgcaacaaatctgcaagtggtgctctattgttgtgaagagttctgctctcctgtcaatatggatctttgttattcctgtgttgattggactcctgtttgagttactggtcattgtacccatgagggtgcctattgacgagagtccggttttcctgttgtatcaggattgggctcttggattaatattcttaaaaatatggactaggctgngttatgttggatcaaatggcacctttggttgatgaaagctggaggacggacgtttgagagggttagagaggatg

SEQ ID NO: 6387 - DNA, 440 bp, Oryza sativa
  unsure (1)..(440): unsure at all n locations
  Clone ID: uC-osflcyp169c11b1
tgcgtgaggcgaaaccaccacacctcaccgtcgaatcgaatccaaggcggcggcggcggcggcggcggcgatggggatccacgagcacgtcgaggggatcaaggcgcactgggcgaagaacttctccttcctcgactacttcaagaaggtctacggccgggacaagcccctccccaagtggaccgatgccgacgtcgacgagttcatcgcctccgatcccgtctacggcccgcagctcaaggcgatgagggaatccaggaagttcgcgctcggcggggctctcgtcggcggcgcgcacctcggcggcatcgccctcaagtactccaaggccccgcaccggtgtcgtcctggccaccggcttcggggcgatctgcggcgccgtcgtcggatcggaggtggcggagcactggtaccagctctacaagacggacangcagggg

SEQ ID NO: 6388 - DNA, 558 bp, Oryza sativa
  unsure (1)..(558): unsure at all n locations
  Clone ID: uC-osflcyp169d01b1
gacaggaccttcgaggtggcgcagaaggtgtgggcggagaccttcttctacatggccgagaacaatgtgatgttcgagggcatcctcctcaagccaagcatggtgacacccggtgccgagtgcaaggacagggccacccctgagcaagtatctgactacaccctcaagctcctccacagaaggatcccccctgccgtccccggcatcatgttcttgtcgggtgggcagtcggaggtggaggcgacgcagaacctgaacgcgatgaaccaggggcccaacccgtggcacgtgtcgttctcgtacgcgagggcgctgcagaacacgtgcctcaagacgtggggcgggcagccggagaacgtgaaggcggcgcaagacgcgctgctcctncgcgccaaggccaactcgctggcgcagctcggcaagtacaaccagcgacgcgaggccgtcgaggccaaggagggcatgttcgtcaagactacgtctactaatccgatccaatccaatcaagacagtgaacctgctgctgctggctgtacgtactacagctactggtatact

SEQ ID NO: 6389 - DNA, 398 bp, Oryza sativa
  Clone ID: uC-osflcyp169d03b1
atttgtttgtagaggtgatcggaggcaagcgcaccggggcacaccggctgcgactgcaccggtaaacggcagcatgagtcgatacactgaagtgaagtggactcagaggatagatacggtatacatatctggacaattagatgatgctaaggatgctaagggcaatctggaaccagaaggtgtattctatttctatgatacagctggaactgatgggaacttatacgaatcaaagctagagtggaacgacaaaggaaatgttggggagagcaaaataagtgtaggtggaaggtacatattatgtattgtaaaataagctgaggacacatggtcgaagaagctggttttggaagagcaaaaggcaccacactttgtgaaagttgactgggacaaatggg

SEQ ID NO: 6390 - DNA, 297 bp, Oryza sativa
  Clone ID: uC-osflcyp169d04b1
cgtttatagaaccttatcgaagctgccgatctcatcactttcttatctaatggcgaaggaacccatgcgcgtgctgggcaccggctccgaatgacatatcgggtatgctcttgtgcccatggttgctaggtgtgtgatgttggttgctgaccaccctgttattctacacatgctggacattccaccagatactgaatctgttaagggccttaagatggagctggttgaggctcgatgtactcttttgaagggaattgacgaagcaactgatgactcggaggcctgcactgacgtgaa

SEQ ID NO: 6391 - DNA, 443 bp, Oryza sativa
  Clone ID: uC-osflcyp169d05b1
gttaggtacgtggtgagcggcgacgggaaggggaagttcaggaccatcaccgaggccattaaggccgtgccggagtacaacaagaagagggtcatcctcgacatcaggcccggcacctacaagtaattaactaaatccttttcgatcaaattatcccatccgtcctaaaatatataacggtagtagctttttacataaagtttttgaccattcattttaatatagcttattttattctggcttgttttatcatcaaaatagctataatcttaacatgtacttttatatattcataataattattttaataagacgaatgaacaaatgttatatgaaaaagcaacggcgtcatacattttaagatgaaagcaatataatctgagcatgaaatcatggcggattatatatatatatatatatatatatatatatatatatatata

SEQ ID NO: 6392 - DNA, 504 bp, Oryza sativa
  Clone ID: uC-osflcyp169d07b1
gcacgccctcgccgccatgtcgtccgccaccgccgccgccaccgccaccatcgccgccgccgccgcgaagctcgccgccacccccgcccccgccccctcccggcgccgcctcacgctccgcgggaaccccaccgcgcgccgctgcgtcgccgcgatggccgtgtccacccccaggtcggccgccgccgccgcgttcctcgagcgccgcgagtcggagcgcgccctccacttcgtcaagtaccagggccttgggaacgacttcatcatggtggacaatagggattcggccgtgccgaaggtgacgccggaggaggcggcgaagctgtgcgacaggaacttcggcgtcggcgccgacggtgtgatcttcgtcatgccgggggtcaatggcgcggactacaccatgaggatcttcaactcggacggcagtgagccggagatgtgtggcaatggagtcccgtgctttgccccggttatagctgagcttgaaacctacagggaacacat

SEQ ID NO: 6393 - DNA, 421 bp, Oryza sativa
  Clone ID: uC-osflcyp169d08b1
agttgattcccgcatcagacaaaggtaggttctttgcctttggtcgtgtcttctctgggagggttgcaactggcatgaaggtgcgtatcatgggtcccaactatgtccctggccagaagaaggatctgtatgtgaagagtgtccagcgtactgtcatctggatgggaaagaaacaagagtctgttgaggatgttccctgtggtaacactgttgctatggttggtttggatcagttcatcaccaagaatgccaccctgactaatgagaaggagtcagatgcctgcccaatcagagcaatgaagttctcagtgtcccctgttgtgcgtgttgctgttcagtgcaaggttgactctgatctgcccaagccttgtgagggtttgaagcgtctgacgaagtctgatcctatggggcttttgtacta

SEQ ID NO: 6394 - DNA, 507 bp, Oryza sativa
  unsure (1)..(507): unsure at all n locations
  Clone ID: uC-osflcyp169d09b1
cttttccccgttcccacttcgccggagcaccaccgcggccacggcgcgcgacgcgagcacccgccccgccgccgccggcggctgaccaacttcctgctcgccgcctcccaatcatctcgagattttaactgaactcctctcttgaacttcacgagtttttgttcaacaaagaacaatggaaggccagtcccagttgaatccagatgccagtcctttcataccttcctcactaagtcttttcacatacaatgattctaagagacaagcagagtcatcctcgatgaacgatccttctgctagagcttgccgtccttccatgtgcgaggaaaatgatatggatccacttgctttgacaaatctgtccttttaatgttcccgaatatctctgaggaattcattgatgagttactccaggcaaatgaatttgacatatgtctcacggtngatatgctttatgagctgaattcacanaatatgcttcatggtgatgccataatgggctttcca

SEQ ID NO: 6395 - DNA, 513 bp, Oryza sativa
  Clone ID: uC-osflcyp169d11b1
tctgatttatgccaatgggaatgtaatatcagcacagactttcaccttccgagaacttgcgaccgccaccaggaatttcaggccagagtgcttcctgggcgaaggaggctttgggcgcgtttataagggccgcctcgagagcactggccaggttgtggctataaagcagcttaatagagatgggcttcaaggaaacagagaatttctagtggaagttctaatgctcagtttgttacatcatcaaaatcttgttaatctgattggctattgtgctgacggagatcaacgtcttcttgtttatgaatacatgcactttggatcattggaagatcatttgcatgatctacctcctgataaggaagcattggattggaacacaaggatgaaaattgcggctggtgctgctaagggactagagtaccttcatgacaaagcaaatccaccagttatttatagagacttcaagtcatcaaacattctcttagatgagagttttcatccaagctgtctgac

SEQ ID NO: 6396 - DNA, 440 bp, Oryza sativa
  Clone ID: uC-osflcyp169e01b1
gagaaaggcgtcttcgtactcgcctctctccgcgccctcctccgccgccgctcgccgccgttcgtctccgccgccaccgtcgccgtcatgagggagtgcatctcgatccacatcgggcaggccggtatccaggtcgggaacgcgtgctgggagctctattgcctcgagcatggcatccagcctgatggacagatgcccggtgacaagaccgttgggggaggtgaaatgatgcttttaacaccttcttcagtgagactggtgctgggaagcatgtcccccgtgctgtcttcgtcgatcttgagcctaccgtgattgatgaggtgagggactggtgactaccgacagctcttccaccctgagcagctcatcagtggcaaggaggatgcagccaacaactttgcccgtggacactacaccattggcagggagattgttgatct

SEQ ID NO: 6397 - DNA, 450 bp, Oryza sativa
  unsure (1)..(450): unsure at all n locations
  Clone ID: uC-osflcyp169e02b1
ggcggggtttgaacgtgttcaacatgtcccgggaagaggaggaagcgaagaaattgagtcacagtgagctaagactacggccgctggacttcgtgcactccttcttcacggcgatggtgttcctcaccgttgcgttcagtgatgtcgggctgcagaactgcttcttcgggcagaatcctggcggcaacaccaaggagctcctcaagaacctgcctcttggcatggcgttcttgtcgagcttcgtcttcttgatcttcccgaccaagaggaagggcatcggatacaacgacaatacacccaaccgcaaggccgaggatgtaactaaaaattaaattaaagctcttatatacgtagctaggtcacacgtacatgtctctcaaaaatttcttgttagaatatatatataatgtaattaacaagtatttgattggagatcagttaattanaatt

SEQ ID NO: 6398 - DNA, 554 bp, Oryza sativa
  unsure (1)..(554): unsure at all n locations
  Clone ID: uC-osflcyp169e04b1
gttttgttggcccccattcctcccccaccccggtgtcctcccctccgccgctcgcgtcgccgcctttttcccctatggcgctgccgaatcaggggaccgtggattaccccagcttcaagctggtcatcgtcggcgatggcgggactggtaaaactacatttgtgaagaggcatctcactggagagtttgaaaagaaatatgagccaaccattggtgtcgaagttcaccctctagattttaccaccaactgtggtaagatccgcttctactgctgggacactgctggacaagagaagtttggtggacttagggatggatactatatccatggtcaatgtgcgataattatgtttgatgtcacttcaaggctgacttacagaatgttccaacatggcatagggacttgtgcagggtgtgtgaaaacatccncattgtcctgtgtggtaacaaggttgatgtgaagaacaggcaggttaaagccaagcaggtcacattccacaggaagaagaatctgcagtactatgaaatttctgccagagcaactacaactttga

SEQ ID NO: 6399 - DNA, 403 bp, Oryza sativa
  Clone ID: uC-osflcyp169e06b1
gtttgtggggaacaagttccggatgtcgctgggtctgactgtggcggagacggggaactgcgccgacaacaccggcgccaagaacctatacatcatgtgcgtgaagggcatcaaggggaggctcaaccggatgacgatggcctgcgtcggcgacatggtcatggacaccgtcaagaaggggaagcccgacctccggcagaaggtcatgcccgccgtcatacgacgtcagcgcaagccgtggcgctgtaaggacggtgtatacatgggcttagaagacaatgctggggtgattgtgaatcccaagggtgagatgaaaggttactgtatcactggacccattggttaggagtgcgccgacctttggccaaggattgctagcgcagcaaatgccattgtctagagc

SEQ ID NO: 6400 - DNA, 374 bp, Oryza sativa
  Clone ID: uC-osflcyp169e07b1
gcttgcagcagcaagaagcggcgccgcctcctgacataccacgcccgccggcggcgaggaagacgaggcggaagcggaggtccacgagcgactgcccggtgccttcttcttcttcttcggcgagacccagctgcgattccaccatggcgcctgcttccgacgccaatgcgtcgcaagatcaaaactgcaactctgcaacgtgaagtgcagcactgatcgaatttccgggtgtgctactgctacttgcgcagagagtgctgtacatcgttgtctgttcagtgctctctgctttgcgccaactgtacatgtaaatgggtttggagtttggagtgcagattaatcggcgatcgtaccgagaaattgaatggtgatcg

SEQ ID NO: 6401 - DNA, 413 bp, Oryza sativa
  Clone ID: uC-osflcyp169e10b1
tgcttgaccccgccatgcgccccgcggtcgccgccgccctcctcctcgtcgccgccgccgtcgcggcctcgccggtttccgccctctactccgccggctctcccgtgctccagttcaaccccaacaacttcaaatccaaggtgctgaactcgaatggggtggtgctggtggagttcttcgcgccgtggtgcgggcactgtcagcagctgacgccgatttgggagaaggccgcgggcgtcctcaagggcgtcgccacggtcgccgcgctcgacgccgacgcgcacaaggagctcgcgcaggaatatggaataagaggatttccaactattaaggtgtttgtgcctggaaagccttcagtagattatcaaggagcaagagatgtgaagccaattgttgaatttgctctttcacag

SEQ ID NO: 6402 - DNA, 395 bp, Oryza sativa
  Clone ID: uC-osflcyp169e11b1
ttcatgagtgtgtgcagcaagtatggagtttctgggtacccaacaattcaatggttccccaaaggatccctggagcccaaaaagtatgaaggacaacgcagtgcagaggcccttgctgaatttgttaacactgaaggaggcactaatgtaaagctggcaaccattccttcaagtgttgtagtgcttggcccagacaactttgactcaattgttcttgatgaaaacaaagacattcttgtggagttctatgcgccatggtgtggccactgcaagcatcttgctccgatatatgagaagctggcttctgtttataagttggacgatggagttgtaattgctaaccttgatgctgacaaacacaaagacttggccgaaaaatatggagtttctggcta

SEQ ID NO: 6403 - DNA, 352 bp, Oryza sativa
  Clone ID: uC-osflcyp169f01b1
ggtgggttggcttctcctccccctcccggttcggttcggttcggttcgggtccggttcgatttcggtttttccttcggttcgggggttggtgggaaagcatggcggcgccggatgttgagtaccgctgcttcgtcggcggactcgcctgggccaccgacgaccgctccctcgaagccgccttctccacctacggcgagatcctcgagtccaagatcatcaacgatcgggagacggggaggtcgcgcgggttcgggttcgtgacgttctcgagcgagcaggccatgcgcgacgccatctatgggatgaacggcaaggagctcgacggccgtaacatcaccgacaacgaggccc

SEQ ID NO: 6404 - DNA, 523 bp, Oryza sativa
  unsure (1)..(523): unsure at all n locations
  Clone ID: uC-osflcyp169f03b1
attgaaatgcgaaatgtgtgaacaagacatttttggtacttcctccgtccccctaatataagagattttggcatttgcttgcactgtttgactattcgtcttattaaaaaatttagaattattatttattttatttgtgacttactttattatccaaagtactttaagcacaactttttgttttttatatttacacaaattttttgaataagacgagtggtcaaacagtgcaagcaaaatgtcaaaatccgttatatttggggacggagggagaangtatggtggcagcgtgacttaaactgggattgctgtgtcatgctagatatctcaggagacggtattgttttggtcagagttaggggaaaagacaaatttcttgatgtactgatggttccttttgcaggatttgcccgatgaggttggaagcgttaatgtcttttcttggataagctgtctggatctttcgactcttgctgtgctgacaaattccaccatatccagctcaagtgatccccataacata

SEQ ID NO: 6405 - DNA, 508 bp, Oryza sativa
  unsure (1)..(508): unsure at all n locations
  Clone ID: uC-osflcyp169f06b1
ctgcttttagctaacttcgcaagcacaacacttgggcgactctggaatgattttcagcagcaacatgcctgcaatgttcttactctggctggtgccatggctattgtaccccctcttgaaaatatatcactgaagacgctcgcagagtcaatggcactgggaaatatcaaggactatgtcagcagacctatggataagccttatctggaggacaaatgcataaaaagtagatctgttgcagtgccaagcacaatatttcagggagatgcaattgaaccaaaaactggaatcaagtttcctgcatttctcgaagatgactccagtccatctacaacggtccttgtgggaatgggtttaaaggtgtgaaagtaatgagggtcaaaaatttggatctgtacgcttttggtttatatctgcaaccgaatactatttctgagaagctgggacctaagtatgcttctgttccaaccatcaactntgaggacaacccagatttctatgatgatct

SEQ ID NO: 6406 - DNA, 434 bp, Oryza sativa
  Clone ID: uC-osflcyp169f08b1
aatcagcagccgcagaataacaattccaccaagcattcatatggctcgacaagcaggacttctagcattccggggacagggcatgggggttaccagcaagatggtacttatgattcctacaacaaccaaagcttccaatggaatcagtactccaagacaacacctgcagctggtacaaatgcatacggtacccaggccttggagaaaccgaaaaggaaacatgaagagagctacagttacaactattctgctactggcaattcatatggccatgagagaactaattcaaggcgtggccggttttcaaagaggagaaggcatagtaatgatggttacactactatggattttggtggagataacagagaaactgtagctgccagcacagaaacaactgctttcactgacgtggcagtggcacaagtcaatggcac

SEQ ID NO: 6407 - DNA, 439 bp, Oryza sativa
  unsure (1)..(439): unsure at all n locations
  Clone ID: uC-osflcyp169f09b1
agtttgaaccaactactcaaactgttgatttaattagttcaatagccagaagcacagatgacaaacaagtagttagaatcaataatgctcctgattgctcctccaaggttccagatggaaatgataaaaatcgtgattctctcattgatatgacatctgaagagttgggtttgaagagattgaaaacaactggatctgcaactgaaatccatgatgaacgaaatattctgaaaagatcagatctctcagctttcaccaggtaccatacaactgtggcttctaatcaaggtggagctggatttggngggaaggctgttcacctcaagataacagtttcagaggctctgaaaacagactccaactgcaaggntgaagtcaaattcagatgctgctgaaataaagcaaggcttcatggtagtagcaacaacatgacatgggc

SEQ ID NO: 6408 - DNA, 461 bp, Oryza sativa
  Clone ID: uC-osflcyp169f10b1
gttataatatggatgcaaaggaggctttaaatggagggagactaagaagccaaatcctaatatccttattggagcactggttgctggccctgataggcatgatggcttcaaagatgtccgtacaaactacaattacacggagcctactcttgcagcaaatgctggcctggtggcagccttgatttccctaactaacattcacgtcaaaagtggaatcgataagaacaccatcttctctgcagttcctccgatgtttccaactcccccacctccaccgtcagcttggaaaccatgaagagtcagatcgctgaatatttcttgagcatcaaacggagggaacgacagatgtttgtttggtacagcaaaggacacatacagaaagcagacaacataagcttacagagcctctattttctgtatcagtatgacagatcggtatatattcatctgtcgacaataga

SEQ ID NO: 6409 - DNA, 390 bp, Oryza sativa
  unsure (1)..(390): unsure at all n locations
  Clone ID: uC-osflcyp169f11b1
ggtatttgtagtgttcggcttgttcggcgcaagcctggccttcctctttcggttcctattttctggtttctgtactatttgagtgagtgctcctcttccggttcactgcttgtcgcggaattgtgttattatcttcttattattgttgtactattgaccattttcttttctaatttggtcgaagtagttctcgccttaacagagtaacagatgtatttgatggaatgtgaatttgcgattgatcaatgtaactctcctgatgcccatctgagtattgattattcaccttgggcaaagagggctagtctaaaaaaaaaaaaacaaaaacaaacanaacaanananaaaagggaanaaaaaaaanaaaaaaaaaaaaaaaaaaaaggggcgg

SEQ ID NO: 6410 - DNA, 496 bp, Oryza sativa
  Clone ID: uC-osflcyp169f12b1
aattattatcaaaaaaaagatagataagagagaggggttatttggcggttttgggggttttaagggcggtcgtttttgggggtcccggcttccgtgccctttgcttggcgcctcttggcttttttttggggtccccgggggggggtcccttgggggggccctttttttcccgcccggcggggggggcccctggggttttttttggggggccccttgctgcctttcccgggccgggtgtttcccccggtggcgggggggcccccgggggtgcccctttttttcggtggggcggccctctttccctttttgcccgggggcttgtttggggggggggccccccgttgggcgtttttctccgggtgggcggtttgggggggtttgggggccccccctttttgggcttttttgggggggggggggggggggttcccccctgttggctcccctttttttgggggtctttggggcgcccctcttgggcttcttctcttttttt

SEQ ID NO: 6411 - DNA, 400 bp, Oryza sativa
  Clone ID: uC-osflcyp169g02b1
ctgttcagcccggagagacgatctcgttcgatcgatcgatggagtgcctgcttggcttgctcaaggtgcgcgtcatgcggggcctcaacctggccatctgcgacccgctcacccacagcagcgacccctacgtcgtcctccgccacggctcccagaaagtcaagtcaagtataagatatcattccatcaacccagaatggaacgaggaactcacgttatcaatcacaaacatgatgctgcctgttaaaattgaagtgtttgacaaggacaccttcaccaaggacgacagcatgggcgacgcggagttcggcatcctggacttcgtcgagatcgccaagcaggaccacagccatctcggcgacggcgcggtgatgaagaccatccacccggacatggagaa

SEQ ID NO: 6412 - DNA, 558 bp, Oryza sativa
  unsure (1)..(558): unsure at all n locations
  Clone ID: uC-osflcyp169g06b1
aatggcgtcctccaccaagatccccttcctcctcctcgccgtcctcctcctcctttccgtcgccttcccagcggaggtgatggcaggagggcacgggcgcggcggaagcagcggcggcggcggaggggtggccggcggcgggaacctgaggccgtgggagtgctcgcccaagtgcgcgggccggtgctccaacacgcagtacaagaaggcgtgcctgacgttctgcaacaagtgctgcgccaagtgcctgtgcgtgccgcccggcacctacggcaacaagggcgcctgcccctgctacaacaactggaagaccaaggaaggcggccccaagtgcccctaagatgcatgctttgtttcttttcttctttttttttaccctatgattaatacctcctcctactagttctacattggtgtcactgcctcactgacactggtttagctcatggatccggttgattagttaaatggtgggggggttatngcttagatctggggctataagtattagtttattctgttctagtagggggtgtgttgggggaatgtgtgtgagaa

SEQ ID NO: 6413 - DNA, 428 bp, Oryza sativa
  Clone ID: uC-osflcyp169g07b1
gactagcatccgaaatgtcatggacatgaatgctaatattggtggatttgctgtggcactaagcaatgatcctgtctggattatgaatgtagtaccccatacaatgagcaacacattgcctgttatctatgatcgtgggttaatcggttcttaccatgactggtgcgagccattctcaacatatcctaggacatatgatttgctgcatgctttccacatcttttctcattaccaaagtcggaaggaagactgttcattggaagatatcatgctagaaatggaccgtatcattcgccccgagggttttatcattattagagatgagaatgccatcttgtcaggaatcaatgatcttgcaccaaagttcctttgggatgtcaccacacatatgttggaaaatgaggaaagcaagccggagaaagtcttgg

SEQ ID NO: 6414 - DNA, 435 bp, Oryza sativa
  unsure (1)..(435): unsure at all n locations
  Clone ID: uC-osflcyp169g08b1
tggagcccaacaataataatccccccttttcatcgcggcgacgatacccgccattttcatctcattctcaccaccaaaagcgaccacgcagcgaccggccaccgatcgagatggagcagcatgaggaggcagcggagaggaagccttcgccgccggtgatattccggctgttcggcgtcgaggttcgcggcggcggcggcggagttgatcaggaggagtacgaggaggaggaggctgactggtaaaattgaantgtttgacagggacacctttaccaaggacgacagcatgggcgacgcggagttcggcatcctggacttcgtcgagatcgccaagcaggaccacagtcatctcggcgacggcgcggtgatgaagacgatccacccggacatggagaactgcttcgcggtggatagccacattacatggaaggac

SEQ ID NO: 6415 - DNA, 452 bp, Oryza sativa
  Clone ID: uC-osflcyp169g10b1
ttcctctcttcttcctccctttctcctcctcgccacctaacgtcgtcgacgctcgccggcggcgaggtgtgatatctgtgcggtgatcatcgatggggcctcagcaagaccggtcggcggccaagccgtacgcgaacggcagcacggcggcggcggcggcggcggggaggaaggagaacaacaaggtggtgcggtacagggagtgccagcgcaaccacgccgccagcatcggcggccacgccgtcgacggctgccgcagttcatggtggttctggcgccgagggcaccgacgccgcgctcctctgcgccgcctgcggctgcaccggagctttcaagggagagtgggaaggccgtcgccgccgaatgcgactgctcctccgacacctacttcggcaccggccgtcggtgatcgccgtggatatgattcggcttcgtcggcgagtggatcagca

SEQ ID NO: 6416 - DNA, 450 bp, Oryza sativa
  unsure (1)..(450): unsure at all n locations
  Clone ID: uC-osflcyp169g11b1
cctccgcctccaccaccacccgccgctcgccgctcgcccaccatggccatggcgacggcgctccgcaagctctcctccgacgccctccgccgccagccgctctcccgcatcaccccgctctactacatggcgtccctgccggcgacggaggagagatccggagtcacctggccgaagcagctgaacgcgccgctggaggaggtggatcccgagatcgccgacatcatcgagcacgagaaggcccgccaatggaagggtctggagctcatcccgtcggagaacttcactcggtgtcagtgatcaggcggtgggatccgtcatgaccaacaagtcagcgaggggtaccccggcgcgagatactacngtggaaacgaatacattgatatggtcgagtcattgtgccagaaacgtgctttggaggccttccgcttggacccagcgaaatgggga

SEQ ID NO: 6417 - DNA, 404 bp, Oryza sativa
  Clone ID: uC-osflcyp169g12b1
caggcacaccttgcttccgtgggtatggcaggcgtgatggtgagcgcaggaggaagtctgtccgtggttgcatcgtcagccaggacctatctgttattaacttggtgattgtcaagaagggtgagaatgacctgcctggccttactgacactgagaagcccaggatgaggggacccaagagggcctccaagatcaggaagctcttcaacctttccaaggatgatgatgtccgcaaatatgtcaacacctaccgcaggacattcactaccaagaatggcaagaaggtgagcaaggctcctaagatccagcgtcttgtgactcccctcaccctccagaggaagcgtgccagaatcgctgacaagaagaagagggatcgcagaagaagtcggaggctgctgagtacc

SEQ ID NO: 6418 - DNA, 390 bp, Oryza sativa
  Clone ID: uC-osflcyp169h01b1
gggtgagatgatggaggctggtttggagcctgataacacgacctacacaatggtgattgatgctttctgtaggaaaggggacgtgaagacaggccttagactcctgaaggaaatgcagaataagggtagaaaaccaggagttgtgacatataatgttattatgaatggtttctgcaagctggggcagatgaagaatgcagacatgcttcttaatgcaatgattaatataggtgtatctccagatgatatcacatacaacattctcttggatgggcattgcaagcatggaaaagttacagatattgaagaactgaagagtgcaaaaggaacagtgccagatttgggtgtctatacttctatagtcggtgaaattgtcaagaagaaaacaac

SEQ ID NO: 6419 - DNA, 407 bp, Oryza sativa
  Clone ID: uC-osflcyp169h03b1
gaatgaatgatgtcgtgctgcggaggaaactgcggctgcggatccggctgccagtgcggcagcggctgcggaggatgcaagatgtacccggagatggctgaggaggtgaccactacccagactgtcatcatgggtgttgcaccttccaagggtcatgccgaggggttggaggccggcgccgccgccggagcaggagcagagaacgggtgcaagtgcggcgacaactgcacctgcaacccctgcaactgcggcaagtgaagcaagcaacctcctgacgaaaccaaggagatggaagggcctagtactgctaagctagtagtttgatccagttacaagtgatgagttattggcactgaactttgtgtttctctgagtttgtgatctaagacctgagactgaagaatgca

SEQ ID NO: 6420 - DNA, 500 bp, Oryza sativa
  Clone ID: uC-osflcyp169h04b1
gttgtatggatgcatacccaacttgcacaaaatcaaactcaggatctcgtattgcagtacattgatcagctatgtgaccgtcttcctagtcctatgggagaatcatctgttgactgcagcagccttgcatccatgcctgacattgccttcacaatcggtggcaacaagtttgttctcaaaccagaacaatacatcctgaaggttggtgagggaactgctacccagtgcatcagtggattcacagctatggacattcctcctctcgtggtcctctctggatcttgggagatgtctttatgggagcctaccataccgtgtttgactatggcaacctgaaggttggtttcgcagaggcggcataatgcccccatggtgatcggacgagtcggagagcccttagcttttcagtcgggtttatctcccgcagcgtgtaggtatatattttagtgcatgctcaataaatatggctactgtgatctaaaacctgtctgttttatttg

SEQ ID NO: 6421 - DNA, 448 bp, Oryza sativa
  unsure (1)..(448): unsure at all n locations
  Clone ID: uC-osflcyp169h05b1
tcttgatcgcgaccttttttttttttttttttttcataatcattttgcttcttaatctgtgggattaatcttgtacatttcttttctgcgagacacaaatgcgcaaaccaaaagaaagaagaacccaaaaaaaaaaaatctgatggattttacaatggcgctacgccgatcttggccaaaccgaatcacccgatcgcccccacacaccgagctcgctggccccacaccgtgcacgacaccggcaaacacaccactcgagcgcacggctcccgcttgctcgccggcgccgcggcggcagcagcagaagcgaccgaagcgcacaccgnttcggcgttcgcgcgctcttggtggaatgatggtatggtgactgggtngtggcccgtgcaatcggccgacgttccccggatcccatgcccttttgacccaaaaatttcgatggttttgcgtc

SEQ ID NO: 6422 - DNA, 305 bp, Oryza sativa
  unsure (1)..(305): unsure at all n locations
  Clone ID: uC-osflcyp169h06b1
ccctgactttgtgaaatctgcagttgtgccactgacatgtgggccccactttttcgcgatggctcacatgtcagttccacaactgtaaaatgcaaaccgcacaaagtcaggggagtctctcgttcgcgtgcgggatggggtngttggtctcttaagagttgagaatgagatggtgtagtgttgatttcatgcggctgcgttgatgattcgtgttaaggcggatggaaggactattggaatcatgccagggtacatacacaagccacgctcgtgttgggatagtatctcgctctggtaccttgaca

SEQ ID NO: 6423 - DNA, 356 bp, Oryza sativa
  Clone ID: uC-osflcyp169h08b1
tcgggtttgctctgctgcgagggtgggtgttgcttgtaccgggcggggatggaggcggcgacgatggcgtggacggcggcgggggtggggatggcgctggtgtactggttcgtgtgggtgatgggagcggcggaggtgaaggggaagcgggcggtggatctcaagatgggatccatcacgaacgacaaggtgaaggacaagtacacgcagtactggtcgttcttccgccgtcccaaggagagcggcgaccaccgaggcctccgcgagaaggtgccggccttcgtcgacaccttctacaacctcgtcaccgacatctacgagtggggtttgggggtcaggacgtttcactttctccc

SEQ ID NO: 6424 - DNA, 370 bp, Oryza sativa
  unsure (1)..(370): unsure at all n locations
  Clone ID: uC-osflcyp169h09b1
catggtgcagcttcattaggaagctaaaacaggcattggctgtttatcaatctacaaagctgtgcactgaattggtgcacaaatatttttaagaatttcagggtagaacacagtcaatgcaaaccttccttgaattaactgaatagtttaattgtccaagcatctttctcctactggggctcaagatgtgttccaggatattgcaccctcatggttgnagtagttttttggtatttctgattcaaaagcaccgtttgtggggttgacatacattttgtgtgccatgcttctccagagattctgatttttggttgtggtagacacatccaaccaatcagtcctgagctccgcaaattcattcggtcaactg

SEQ ID NO: 6425 - DNA, 287 bp, Oryza sativa
  Clone ID: uC-osflcyp169h10b1
gttagcctacctactctcaaccattaaggcagaagaaaactacgccttaggaacgttgcggcagacaagaactggagccggtgcatttgtgaagttgtagcttctgccaagtttaatttacctcaggcgtagtgctagctggcaaacggaacatgtccatgctgcaggaaccatgttattagctacgatgtttagacggatgaactcttgtatcgtatctacctaattagttgcccaactatcttagcagcaacgtgaattgaacttctattatagttcccaacctt

SEQ ID NO: 6426 - DNA, 441 bp, Oryza sativa
  Clone ID: uC-osflcyp170a01b1
ctttcacggtcaagtgcaaatagtatgtcagatttccaagagattgaagaggaagaaataaataaaggcgatcagcatccagtcctgtcagaaatctttgattcacattttgttagtttcctcagtaagcttgagactgatattagggacaatataatggatatatttagtcgaacaaagaccgcaactgcaattatacctgctgagttggagcagaagatggggggaagttgatggagaatacatcaagcggctaaagtcatttgtagagaaacaatgcaatgaaatgcaggacttgctaggtcggaatgcaatgctggcagaagagttagtgaacttgggtggtggcaactccgctgattccttacagaaccatagcagtggccgagtaagggttcatatcgaatccctcaaacaagaactcgaaggagcaacccgacg

SEQ ID NO: 6427 - DNA, 511 bp, Oryza sativa
  unsure (1)..(511): unsure at all n locations
  Clone ID: uC-osflcyp170a02b1
aagataacgaggaggcggtcaaagcatatggaatccaccttggtactgaaatgtgcaagaaaattttagctactggaatcaagaccttgcacctttacacgctaacatggagaagtctgctctaggaatattgatgaaccttggattaattgaggagtccaagatctcaaggtcattgccttggaggcccccaacaaatgttttccgtgtcaaggaggatgtccgccctatattctgggctaacagaccaaagagctatatttcaaggacccttggtctgggatcaatacccacatgcgggtgggggtgattcccggaacccatcgtatggagcacttactgactaccagttcactcgccacgggaggnngtacaggaagctcaagagatntgggcggctccgtgaaatctgttgaagacattaacgagcgattatgaacttctgtaaggaaaacttacatgcagccatggtctgagcttgatggccttaacctgagacaaagaattagac

SEQ ID NO: 6428 - DNA, 437 bp, Oryza sativa
  Clone ID: uC-osflcyp170a04b1
ctcaactactactcctgttcttgctactgcctagctcagctactctgcttgcccccaacctatccaacctactaacattgtagtacactacacacaagcctagcttagcttaggttgcagctgtgtgaggtggggatccagatcagctttgctgttgaagagatccatccatccatatagctagctgtaactacatacagttgttcattcagattcaggcattcagccactgcctgatttaggtgagggaagaagaagaaggttcaagcaactgcacaccagatggtccatctcttgccatgcacccatgctcacttgcccctgcctctcttcttctccatcctcctcctcatcttctcatgggaggtggcacattcagatcaagggaggttgccactgaagctctagaagttggcaacataaagaggagcctgatg

SEQ ID NO: 6429 - DNA, 233 bp, Oryza sativa
  Clone ID: uC-osflcyp170a06b1
cgtttcatttttgatgatgagcctaaggcagaccggacggtgtgagctcaaaatcggcattgcgtcgagcgactcttcagcccagagtgtgaaccacagaatatttgcgcttatgacaaacttggacacaagactggattgtattatagaaatattaggtcttgatcatcatctaaagaattagagctaggtagcaaacctctgtatcgtttgctgtttcaatctaggagata

SEQ ID NO: 6430 - DNA, 487 bp, Oryza sativa
  unsure (1)..(487): unsure at all n locations
  Clone ID: uC-osflcyp170a07b1
gcttgaaatccctcctaactgtgatagatatacctagctaggctgatctccatcatctgatcaaagaggggcggtgtagaaagggagggagaagatgttccgcactggagccaagaacatgagcagcgatctcccggttgaaggtgtggtgagggtgaggaaggtngcnagaagatccaggcttacaacctcgtcaccaagccatcatcgaccacatgcaggatatcgccgataacaggtcaggccgaaagcttggcccgcaccgttgttcgggttggagctgtggctggtaaaccagacgacatcgtcccagtggctagaatgaacaactaagttatgatcggagaaatagacggcgtacgtcatcgtctagtggctatacataacaactaattagcacgcatggttcactagggaaaatggtgagttctacttgggataactggggatgatggttataggctctgtcatatgtcatgtgtactgg

SEQ ID NO: 6431 - DNA, 186 bp, Oryza sativa
  Clone ID: uC-osflcyp170a09b1
tctccctctgccgccgccgccgcatccacgctcagcagccatggcggtggtcgagcagccgcagcagcaggtggcgaagctcttcaactgctggtccttcgaagacgtttaggttgaacgacatttttcctcgcctactacctctcgtttctctttctgttcctttctacttaccttttctttact

SEQ ID NO: 6432 - DNA, 428 bp, Oryza sativa
  unsure (1)..(428): unsure at all n locations
  Clone ID: uC-osflcyp170a10b1
ggaaaaagcctcgggttccttttactaaaaagtttccaggtgtggatcctatggctctccatttgcttgaacgccttcttgcttttgatcccaaagatcgtccaagtgcagaagaggccctgacagacccctactttaatgggctagcaaactctgaacgcgaaccaatagcacagcctatctcaaagcttgagtttgagttcgagaagaggaaattggccaaagatgatgtccgggaattaatttaccgagagattttagagtatcatccccatatgctgcaagaatatttacgcgggggagaccagatgagtttcatgtatccaggcnggtgggatcgcttcaagcgtcaattcgctcatttggaggaagggagtttcaaagggtgaataattccagtccacagcttcggcagaatggcttcctta

SEQ ID NO: 6433 - DNA, 80 bp, Oryza sativa
  Clone ID: uC-osflcyp170a11b1
tcggcggtggagaggaggtggcccccgcctacggcaagtgtacattaacatgcatggcggtcccgtgcaaggacccggcc

SEQ ID NO: 6434 - DNA, 297 bp, Oryza sativa
  Clone ID: uC-osflcyp170a12b1
tcgggagtctcaggtgggcatcatgcggagcaatctctgtgagctcagcatcggcattgctcgtgcgactcttcagcccagagtgtgaaccacagaatatagcagcttatgacaaacttggacacaagactggatagtattatagaaatattaggtcttgatcatcatctaaagaattagagctaggtagcaaacctctgtatcgtttgctgattcagtctaggagatatattgcatgtctttctctggaagaaagtcatgcatgagggaacttggccttaagaccttgcctccctc

SEQ ID NO: 6435 - DNA, 320 bp, Oryza sativa
  unsure (1)..(320): unsure at all n locations
  Clone ID: uC-osflcyp170b01b1
ctactggacatactctactactactagccagtaagctagctaactaactacgtggctatggcccccaccgtgatggcctcctcggccacctccgtggctccattccaagggctcaagtccaccgccggcctccccgtcagccgccgctccaccaactcgggcttcggcaacgtcagcaatggcggaaggatcaagtgcatgcaggtgtggccaattgagggcatcaagatgttcgagaccctatcgtacctgccaccactacgtnggagggatcttttggaagcagaatcgagtaccggntttcgatcaaagtgggtgcc

SEQ ID NO: 6436 - DNA, 213 bp, Oryza sativa
  Clone ID: uC-osflcyp170b03b1
gcccatcatcatcacgcagaaatccgcatcaacagccagccatggcgtccacgctgaccaacgtcggcctgtctaccccggcggcggcggcgtcgtccctcgttaggccggtcaccggagctggacgcgtggtgtttccccgtgttggccgcggcgggttcgcggcggtgagggcgagcgggccggcgactcctcctgacatcttggacaaga

SEQ ID NO: 6437 - DNA, 257 bp, Oryza sativa
  Clone ID: uC-osflcyp170b04b1
caactatgtcgatctccttcgctttaaattttgtggtagatttttgtctccttcgctctccacgctaccgcctcgccgtgccggagcccgggcgttccccgccgtcgagaaccttcgtctccgcctccatctcctccgccgccgccgcagatggatcgggaagaagtgacggagttcctcggccaggtgcccctcctgcagtgccttcccagttcctccatccgaaggatcgccgacgcctccctggtgaagcgcta

SEQ ID NO: 6438 - DNA, 251 bp, Oryza sativa
  Clone ID: uC-osflcyp170b05b1
aaatcacactcctcctcatcagatccacacccatcctccccaccccccaagcggcggcgagaccaaatcccccacttctctctcaatctctctctctgctagggtttatccctccgcgccgccgcccccggaagacgagagagcgccatggccggcggtcccgggcggtgtcgttcctgaccaacatcgccaaggcggcggcggggctcggcgccgcggcctccctcctgtcggcgtcgctctacaccgtc

SEQ ID NO: 6439 - DNA, 281 bp, Oryza sativa
  Clone ID: uC-osflcyp170b07b1
cgatctcggacctaaatgcgccggcgacggtcgagccattgttgccagaggggaacctcccgtttgatcctgccaccagtttcgctccgccatacaacaccgtgtctgcttttaccaatgccaagaacattgtgctgtgtgagggcaacttgtaccagatctggaggaatgcaagctgcactgtgactttgcagctgcccggaggcggtcaccgtcgtgtatcggagaatgaaatcttggttctaaggtactacccccgtcgccagccgagctgggatgct

SEQ ID NO: 6440 - DNA, 353 bp, Oryza sativa
  unsure (1)..(353): unsure at all n locations
  Clone ID: uC-osflcyp170b08b1
gtgacagacgacacatagaaggttttcatggagaaagtactggtgctctccttgatatgtatttcactctgccaaggatgggtggtgcaatctttagaatatgatcatacagcaagtattgagtgccttcgcgatccgatgaagccgctgtacaacggcggcatcatccagaacggcgagttcaacagcggcctcatgggctggtccacgcaccgcgacatcaaggccggcctgagcagctcgccgtccggcaacaagttcgccgtggtgcagcgcgccgactccctctccgcgcncgcgttgccgtcgcgcagtcgtctaccagtaagatccagctgcagggcgacacccac

SEQ ID NO: 6441 - DNA, 451 bp, Oryza sativa
  Clone ID: uC-osflcyp170b12b1
ttttcctctcgaccggccacatcttactgcgggtttggtttcattttgataacagtcaacactagctactagctagattaattaattaattaggcatggcggatgataagcaccaagaccacctgctccaccacaagaaggaccactagccggccaccggagtagactcctacggagagggcgtatacacgtgggagaccgtgaccaccgaggtggccgccggcggccaggacaagtacgagaggtacaagaaggaggagaagcagcacaagcacacagcaggacctcggcgaggccgacgccctcgccgacggcgcctccgcccatgatgagaagcacgaggcgaacaaggacccggtgaaggcgcacaggcacatgatcacggaggatatcgcggccacgggggcggccggcgccgggggctacaccttggacgagcaccacgagaaga

SEQ ID NO: 6442 - DNA, 361 bp, Oryza sativa
  unsure (1)..(361): unsure at all n locations
  Clone ID: uC-osflcyp170c02b1
cttttgttgttctgggctaacaatcctattaaggactcttgcttctacttcacacagttgatctggtactttgcactccatgtgtattcctgcgctgtgttctacgaatacattggtgtaaagcatcccgcacgctacctggaagcaatgttttatacaatactaacaaccaacggtggcctgatgaaagtacttaagttcatgtttttgggacaagaatgagaaacattttccttgtctggtgatatagaatagggggatattataagtcccgatgtataaatcaaattcaccatgnnggattgcagatgtgatctacttaatgaaatnggggatttataacgttacatgttccttcaat

SEQ ID NO: 6443 - DNA, 428 bp, Oryza sativa
  Clone ID: uC-osflcyp170c03b1
cactgccgctccctctccctccccctccccctcccccgacctctactcctcgacctacccacctccaatggggtgtcctccgccgccgccgccgccgccaccacttcctccggtgcgtcgccgcctccgctgccaccctgcagaaggaactcacggtgccgcgcaccccaacagccgcgcagagccccggtccagtgaacccgcctacgctgttcgacagaatgcccgagaggagcgtcgcgacggtttccgctgcggataacctgctcgacgaaatgtctcggacgtgcgtcgcgggccgccgtggtcggcctctggaggcgcctcctcgggacggcggcgggaagagcgcgagcgccgcgatcgtggcgctggcgcatgccggccggcacgcggaggtcgtcgagctctttgccgctgcggagggg

SEQ ID NO: 6444 - DNA, 550 bp, Oryza sativa
  Clone ID: uC-osflcyp170c04b1
ctgttcttgagccagtgcttcttccgatcggagcctggagccatgcaagcacgcggcgttgcacgatcagcgctgcacccaagcagcacaggcgacgccgagctctcatcaccaaccggacgcgacgacgaggaaatcccacgccgccgccgccgccgccgccgagggctcctccatccaccatgtactgacgagagatcgcagcagggcgagcgcgtcgccgaaccatcgcgtctcgctggagaatgatatcaggcagctgcagcttaacctgcatcaggagaggtcgactccggatcatgcttgaccgggcgattggccgcgcatccagcactctgtctcctggccacatgcatttcccagctcagacaaggaactgattgcagagattgaattgcttgaagaggaaatcgcaaaccgtgagcgcatgttcttaccctctacagagcatctttcgatcatctgcgttggagcatcctagggcagagttctggtctttctttccagcgcatccagagtatcagctctagacaagacgcatcgagcatat

SEQ ID NO: 6445 - DNA, 275 bp, Oryza sativa
  Clone ID: uC-osflcyp170c05b1
atctacccctctcgccgccgccgccgccgccaccaccgcgagacgcgagaggagagtgaaagaaagattcagcgagagagagagagtaagcatgatgtccttcagccagcccgacgccttctcgccgtcgcagttcacctcctcccagaatgccgccgccgactctaccaccccttccaagagccgtggcgcatcgagcaccatgccgctcaccgtgaagcagatctctgaagcgcagcaatctggcatcaccgggaagaagggcgctcccttct

SEQ ID NO: 6446 - DNA, 473 bp, Oryza sativa
  Clone ID: uC-osflcyp170c07b1
ggatgttttgcagcatcccttctttcagccatgcttttacatccccccttcacttcgattcagatcaacaaacggatatgcagcaacaccaccatcagttggggctaaaggagctgtggatcagaagaatgctaggagatattccgtggggcccttatctaatgggagaccagccgttaattactcatacttgagcgctaacaccccggcaagagcagctggtgtgcaaaggaagctggagttggatcaccaggtgaatatgaattcttgtcaggctccagagggtaaccataaactgacaaaggcagaggcaatgaatcagccttggttcagaccaccaccagcagtagctggagttaggagcattggaaattacttcactaaagaccagggcccttttgctccttgacttttgtggagaagctgttttagtgccattggtcttcactgggtccaagctgtttagtccattt

SEQ ID NO: 6447 - DNA, 188 bp, Oryza sativa
  Clone ID: uC-osflcyp170c08b1
aatctacacaccatcacgagaacctcctcgtggcggcgagctctcgcgactcgactctcgcgtcgcgcgcgcgcacggcgccatcaatcgattctcacatccatccatctgcctatctatctctcgcaattctggcggcgcgctgcgcgcatagggggggatcgaatttgatctagtggtgatggccg

SEQ ID NO: 6448 - DNA, 290 bp, Oryza sativa
  Clone ID: uC-osflcyp170c11b1
cttctctttctttcatcagctatcacaattcacaagtgtagactgtaggatggccacgctctcttcctgcagccgcctgagcaccggcggcggcgccgtccagcgccgtccccggcggccggcaagcgctgcgaccatcacctgccaccggagctcctcctcctcctcgtcggccagggtagtccgcacaggcgccgccgcggcgcctgccgcggccacggcgcccgccgtgccgcagaccaacgagtgctcgcttccgacatggcggagttcgagctgggcaaggcgcc

SEQ ID NO: 6449 - DNA, 284 bp, Oryza sativa
  Clone ID: uC-osflcyp170d01b1
gaaaaataattacctccaaaaaaaagaaaaaaaagggagaaaaaacgccgcgggttggattaaagagccgccgccgccgtcgccgccgaagtccgcaggtgcgaggacgccgacgagtctccagagagcagggtaagacaagatgaacaggaagccaggagactgggactgcagggcgtgccagcacctcaacttcagccgccgggacctatgccagcgctgcggcgagccgcgtggcgccgctgatcgcggcagcggtggtggccggtgactacgccaacttc

SEQ ID NO: 6450 - DNA, 100 bp, Oryza sativa
  Clone ID: uC-osflcyp170d02b1
tgcctctcgccttcgcgcgaccgcgccgcctgctgcgccgccggccggagcggctccgggaggcaggactccaccgcgcggaggaggtctgagcgcacct

SEQ ID NO: 6451 - DNA, 409 bp, Oryza sativa
  unsure (1)..(409): unsure at all n locations
  Clone ID: uC-osflcyp170d04b1
gcagtaacatcggctgctgtgatatactgcttacggtgcttggtcgatgttgatatacctctaaatcaaggctgcctagcccctgtgaagatcctaattcctaaaggctctttcctttctccaagtgacaaagctgcagtggttggtggtaatgtattgacctctcagagagtgacggacgtagtcctaatggctttccaagcatgcgcctgctcccagggttgcatgaacaatttgacatttggagacgacaccttcggttactatgagaccattggaggcggttcaggagctgggncgagttgggcatggacaaggtggtgttcagtgtcacatgacaaacacaaggatgactgaccaagagatctttgagcagcgataccccgttcttttacatagatntagcatc

SEQ ID NO: 6452 - DNA, 411 bp, Oryza sativa
  Clone ID: uC-osflcyp170d06b1
tgacatatgtgctttagccgctgattaggttaggtctctgcttctctcatccatccatccatccatccatccatcccctgctgtgcaccgtgactccaccaccaccatcaacaagatgaaaaacaaactcttcttccttttcttgccttgccttgcttgctttgcagtaatcaggggaactgctctctcgtgcgtgtgatttctagtcagtcagtgtggacatctctaaattcatttgtgatttccttcctcatttcgttgcatcggtgtgctatgctgctccaagaaacaagacaaagaaaagaaggcgtgcttgcttgcttgcttgtctgctgcaccgagtcatagttggcgtcaatcacatgtacagctgcaaatgctgtgccatgaaatgaacaaaagaaatttacc

SEQ ID NO: 6453 - DNA, 300 bp, Oryza sativa
  Clone ID: uC-osflcyp170d07b1
gtgtgggggcgaggcggccggggatggataagctggtgcagttcggagaggaaggcgtggctcgtggtacggctgctgcccggtacgaggagaggaggtatgcgtgctcacaggctgcagatgcagcagcggatcgcgagggcccaagctaagaaggaagagcttcagaagcagccagaacaaattattctatcagaagttcgtcaaatggttcagcagatgcaagccctcaatcagcatcttgaagaagcttgataccgtcatagatgaatattttaaaccaattcttaagaatgctaa

SEQ ID NO: 6454 - DNA, 96 bp, Oryza sativa
  Clone ID: uC-osflcyp170d09b1
tcgctcatatgaaatctgatggctctcttgaggaaagtgttgaaactcgtctccttaggaaatcactagaggaaatggctgatgtacgaagctagg

SEQ ID NO: 6455 - DNA, 262 bp, Oryza sativa
  Clone ID: uC-osflcyp170d10b1
ccttcgtgtcacagagtacaagcaatagttgctgatacttgcacaaattgttgccttactggtaattcatgtgctcgtaaacaagcacatgtgagttcacatcatcactacaggcaagagcatgatcggagcagtgcttgcggtactgtaggtaatatctacctgacagatgcccatggtgaaggaaacgctgcaagcgtgcccgtgctcccaaatgtgagaggacaatttgacatgacggagtcgacacctttcgtggact

SEQ ID NO: 6456 - DNA, 72 bp, Oryza sativa
  Clone ID: uC-osflcyp170e02b1
cttcgtcttcctctcgccgctgattcgattcgatcctatccgatccaaggggtggggtagcaatggcgacta

SEQ ID NO: 6457 - DNA, 699 bp, Oryza sativa
  Clone ID: uC-osflcyp170e03b1
gtgatccactctcaggtgggcgatgctcggcgcgctgggctgcgtgttcccggagctcctcgcccgcaacggcgtcaagttcggcgaggcggtgtggttcaaggcggtgtcgcagatcttcagcgagggcgggctcgactacctcgtcaacccgagcctgatccacgcgcagagcatcctcgccatctgggcggtccaggtggtgctcatgggcgccgcctaggtgttccgaattttcgtctttcctttctgtttaggttatcttttctattttttctcttttgttgtttatttttttttttacttttttacattctttttttattttttttatttcttatttttataagttttgtattttttttattatttatttttttttttttattttttttaatctcttttattttttttctttttttttttatatatttttttttttctttctttagattttacttttatatttatttttttttttttttattactttcatttttctattttttttcttatattttattttttttttcttttaaattttttttcttcttcttttcttacttatataatcttttattttttttttttcttttatcttttattacttcttttctttattcttatttttatctttttctctatattttattctttcaatttatcatttttttttactttctttttttctattttttc

SEQ ID NO: 6458 - DNA, 228 bp, Oryza sativa
  unsure (1)..(228): unsure at all n locations
  Clone ID: uC-osflcyp170e04b1
catttccgttacctttccaccaaatccccaatctttttttttcttcttcttttcttgcaattgatgcgcttcgccatcgggatttgaggggaggaagaagaagggccctncnnncctactccccctttgtctcgctcttcacgctcattacaatttttataatctctttcttcttcaccggtgtccggcgcatccaggccggctgtgcaggcgctgcagactcccgag

SEQ ID NO: 6459 - DNA, 568 bp, Oryza sativa
  unsure (1)..(568): unsure at all n locations
  Clone ID: uC-osflcyp170e06b1
atgtagaagtgaaagacgctgaagctgacaaggaggcccctagcgaagatgctccaaaggagactgatgtagagacaaagcctgctgaagaggcgaaggaggcccctagcgaagatgctccaaaagacaccgatgtggagatgaaaactgctgaagatgccagcaagaccgcagacgccgacactcctgctccagcaccagccggaaccgagaaggaagatgcaaaaccggctgaatctgaggctgctcctccagcaccatcggaaggaggagagaagaaagaggatgcaaagccagctgaacctgaagcagcagctgctccaccaagcaacccaactgagccttccgcaccaaagctgctgctgctgttccagtagagaactccgcggacataggccctcaccaggacagccagccgtcttcgtcgtcgtcccgcaaggagtcatcnctgtcaacaacggcagtgcggctggtgctctccgtggagtgacctgagatgaagatgaaccccaacgatcatattctctcccttgtcgtgatgtacgcctttagaatattcgattgcatg

SEQ ID NO: 6460 - DNA, 81 bp, Oryza sativa
  Clone ID: uC-osflcyp170e09b1
tcggtttctccactactagcccacagctcccaagaatctctgccatttcttgagctggtcgatccatcggggagggagaga

SEQ ID NO: 6461 - DNA, 206 bp, Oryza sativa
  Clone ID: uC-osflcyp170f04b1
caaataaggtattaaaaaaaaatagaatgaaccctactatgtaattatagaaaatgaactaataaccaacctattgcttcgtattgtcgagatcctaactaagataacagtcactatatgaataaatacatctatcataaatgagtaaatctatcatatacgtgtagcaactgcaatttcttctttaaaaaaaaataggattctaa

SEQ ID NO: 6462 - DNA, 454 bp, Oryza sativa
  unsure (1)..(454): unsure at all n locations
  Clone ID: uC-osflcyp170f06b1
catggagtaccgtggcaagattgaagctgagctgagcaagatttgcgatggtatcctgaagttgcttgactcacaccttgtgccctcatctactgctgcagaatctaaggtgttttacctcaagatgaagggtgattaccacaggtaccttgcggaatttaagactggtgccgagagaaaggaagctgctgagagcacaatggtggcttacaaggctgctcaggatattgctctggcggatcttgctcccacccatcccataaggcttggactggcacttaacttctctgtgttctactacgagattctaaactctccagacaaggcttgcaaccttgctaagcaggcgtttgacgaagccattnncgagttggataccctcgggagggagtcttacaggacagacttttgatcatgcagctctggggacaacttgacccttggacctctgacc

SEQ ID NO: 6463 - DNA, 83 bp, Oryza sativa
  Clone ID: uC-osflcyp170f09b1
acaaaaacatttctctcgcgagtcgcgagttgcaccgatcgaattaagggtcgcagatgtttgcgtccgggccccaccacacc

SEQ ID NO: 6464 - DNA, 495 bp, Oryza sativa
  unsure (1)..(495): unsure at all n locations
  Clone ID: uC-osflcyp170f12b1
gtagaaaccggcgagccatcacgatgagaattcagttcgggcaaagctagaactcgcgaagaatgcgaagcttgaactcacgaatagtgcaaagctagaggtgacaaagagaaaacttcaggaaggctaccaagaatttgataacgcaaagaagcagagaactattcaaatggtggatccacaaaatttgccgaaacaagcgaaccggaattggcagcctaatggcaggccgaggaataacagcaacttcaacaacaaccggaattggtcaagatgaggcaccaattccatcatccagcacaaagggatcatagactccctcctcccaattccatccaaatttttcctctttttccggctaaagttagtccagccaagtacataaacagcaataagggctttccttcaaaacttgttttcagtgccacacacacaccacatacacttattggagnctgtgtngctggtttgcactctcttttaacttttgatcat

SEQ ID NO: 6465 - DNA, 184 bp, Oryza sativa
  Clone ID: uC-osflcyp170g01b1
aatgtctggttctgtaaatcaacagaagctggaaaagaaatttggccaatcttctgtttttgtcgcatccacacttcttgagaatggtggaaccttgaaaagtgcgagtccagcatctcttctaaaggaagcaattcatgtcataagctgtgggtacgaagataagacagactgggggaatgag

SEQ ID NO: 6466 - DNA, 72 bp, Oryza sativa
  Clone ID: uC-osflcyp170g02b1
cgaataagaaaagaaaggctttcgtctcggtgggcaaaagggcgaggtcaaagcgccggttctgcatccaac

SEQ ID NO: 6467 - DNA, 173 bp, Oryza sativa
  Clone ID: uC-osflcyp170g03b1
agattgcatttgcaacacaagggattaactcatcactcacttagctaattaaatcttcgaccatgtcggacaagtgcggcaactgcgactgtgctgacaagagccagtgcgtgaagaaaggtaccagctatggcgtcgtcatagttgaagccgagaagagccacttcgaggag

SEQ ID NO: 6468 - DNA, 68 bp, Oryza sativa
  Clone ID: uC-osflcyp170g04b1
tctctctctctcccgaaccttctcgccatggccgaccacgctgcggcggaggcggctccgcagcgttc

SEQ ID NO: 6469 - DNA, 376 bp, Oryza sativa
  Clone ID: uC-osflcyp170g07b1
gaatctctccataggtgctggatttttcaaacggccccacagaggttgacgctgatgatggaagctcatcggtaacgaattgacaaccgacacctattagggggcgggaaattttttaaaaaagtcggctcaatgagtcggctaatgctgattgctcccaatcctattgcccccaattcacaaaatacatgaatcaccaaatcatccaaatgcaatcacaaatcgaaatcaagaatccccacaaaatcaacatcccaaatcaaaccattgcttgggggtggttactaaatcaacatcccaaattacaaaaattcccacaaaatattcacaaatcaaaccaccgccatgccggagagaactgtcattggttccatgt

SEQ ID NO: 6470 - DNA, 81 bp, Oryza sativa
  Clone ID: uC-osflcyp170g08b1
tcgatcttctcacaaagctaattctggcttctcttatgactatcagttggttgatgttcctgattaccgtggcagaggaga

SEQ ID NO: 6471 - DNA, 150 bp, Oryza sativa
  Clone ID: uC-osflcyp170g11b1
tgctgtcgccgccgtcgtgccgccgccggtcgtccacgcgcacccagatcccagccggcaggctgacgctgaatatccccgcagctaaccctgcttggtgaactcggcgagcaaccagagatcgtgtaagcgcggaggatcgggatggag

SEQ ID NO: 6472 - DNA, 89 bp, Oryza sativa
  Clone ID: uC-osflcyp170g12b1
tcggctgcgccaccgccctcaacggatcattcttccgggaccgcggtgaggagccgacatggacacctcactccctcgatgagcagatg

SEQ ID NO: 6473 - DNA, 154 bp, Oryza sativa
  Clone ID: uC-osflcyp170h01b1
gacattttgcattatataatattggaaggtaaagatataattatttatccctcatttcttctgctatggcgatacatgctccatgtagattatcattcctctaatccctttactagtctgcccgatcagcactgaacactaaatccaatatgtt

SEQ ID NO: 6474 - DNA, 303 bp, Oryza sativa
  Clone ID: uC-osflcyp170h03b1
gagctttccatagtaaagtatgagcctctatgggtcaaaggaggaaaccactgtaatttggaactgtacccagagtacattaagcatctaaagaagtttgttgggggccattgaaaaatcgccacccctatatgatgaatctccagagagctcaggtccatcagataatactcaaacaaaccctgaaggcacagaggaatctaggaaaagcacagactgcagggagaaaacaaggccaagcatagatcacagacaatgcacagatcgccgggtcatatcaaggggcagcacagataggaggga

SEQ ID NO: 6475 - DNA, 315 bp, Oryza sativa
  Clone ID: uC-osflcyp170h04b1
acccctcagctgccgccgccgcagcctcctctcggctgctcccatcctctccttcgagttagcttcctccttattcaaccatgggtaaggagaagacgcacatcaacattgtggtcattggccacgtcgactccggcaagtcgaccaccacgggccatctgatctacaagcttggaggtatcgacaagcgtgtgattgagaggctcgagaaggaagccgctgagatgaacaagaggtccttcaagtacgcgtgggtgcttgataagctcaaggccgagcgtgagagaggtatcacctttgatatcgccctgtggg

SEQ ID NO: 6476 - DNA, 300 bp, Oryza sativa
  Clone ID: uC-osflcyp170h08b1
cccattcgtccgcaaagcaaaccttccccctcctcctcctccggccaccgcggcgagaggccccgatggcgccaacggtggagatcagccacctctccttcacctacccgggcatcgacggccgcccgccgcccggcgcgccgccgctcatcgtggacgtctgcttctccctcgacgccggccaccgctgcctcctcctcggctccaacggcgccggcaagacgacgatactgaagatactgggcgggaagcacatggttggatccgagcatgttgcgggtcctgggcaggtcggtcttt

SEQ ID NO: 6477 - DNA, 404 bp, Oryza sativa
  Clone ID: uC-osflcyp170h11b1
cgaacccccaaccctccagaaccttccgcctcccgccggcgccggcgccgccgactcggccgcggaaaccctagcgtgcgctcgcgcccgcccttgctcgccggccacctccggactccgcctcctccgcctgctcctcgtctccggcccctccgccgccgtcgaccggtcagatctcgacgccgtcaagccgcgatggaggactgggattctgaagactttcagcccgcagtgcctagtgcaaaagctgagccgcttaaaagtaagtgggcagatgaagatgtggaagaagatgatgtaaaagaatatgggaagaagagaaggagggagaaacctaaaccaccacctgtagtaaagactgcaccaaatcctaggggaaagggtgctggcgagaaaggaaaaca

SEQ ID NO: 6478 - DNA, 177 bp, Oryza sativa
  Clone ID: uC-osflcyp170h12b1
tgttgcgctactctactgtggtttcctcagagacggtcgcttgagcgccaaacctagctgcgatggatccattacggctgctagcgttcccctgggatggtgagcacgcgagcgctcgacctgctggggggttgtaggatcagggtggcggcggcgcaggtcgggccagaggagagg

SEQ ID NO: 6479 - DNA, 432 bp, Oryza sativa
  Clone ID: uC-osflcyp171a02b1
catggatcatacgacgaccatggcgcctctccctctggggaccacgacgaaactgctgcggggggttcttcctcgcgtcgtcgttcgccgccgacgtagtcgtcgcgggcggcggcggcggcggcggcggctacgacggcggcggcgacggcgaaggcgggggcggcagcgacggcgaatgctgaagcagcggtggaggagccaagatgccacacgtgaaccacggcaggtacaagtgcggaccgtgggtggacgggcacgcgacgttctacggcgggcgcgacgcgacaggcacgactgagggcggagcgtgcggacacaaggacacccactggtacagtgcgatgactgctgcggggagccccggcctggactacaacagctccgaatgcggagcgtgctaccagcccaaggaggatgccaggaagaccg

SEQ ID NO: 6480 - DNA, 529 bp, Oryza sativa
  Clone ID: uC-osflcyp171a03b1
tctgtattataacttaatgtcaatcagactggcttctatagagtgagctatgatgaggaacttgcatctcgacttagatatgcaattgaagccaacaaactgagtgcagcagacagatatggtgtacttgatgacacatatgccctctgtatggctggcaaacagaagctagtctccttattgcatttgattgctgcgtacaaggatgaaaccgagtatactgtgctcgcccgtgtcatagatgtatagatctttctacccgacaaatgtttttgttagattgattctgttctaagcatttcaattcttggcttgatagacaagtctgagcattgtcgagatggtggctgttgctgctcctgaggggttgggcaagctgaaaaagttcctgattgactttcttgagccatttgcacagagaattggttgggatgctaaaagcggtgagggtcacttggatgcattattgagaggtacacttttaactgctctggcagaacttggccatgaagctacaataaatgaagct

SEQ ID NO: 6481 - DNA, 514 bp, Oryza sativa
  Clone ID: uC-osflcyp171a04b1
gtggttctcagaaggccttggaagtcttggatgaactttggttggaaggatgtcaaccagatgtcgtcacctataatgctctcatcagtgcatcatgcaaggctggcaggctgaatgatgcaaagttcatcttaactcgtctagctgctgaagggcttgaaccaaatggtacaacctactgcatcttactccatgccctctgcaacatgagaaggtgggatgaagtatgcgatttgcttgaagacatgaaccaggtgaatcgtgatcctgatgttacaacctacaatatttttatcaattacttttgtaagtatgggcatctggatcaggcaattgatgtgttggagaggatggttatcaacaattgttctcctgatattgtgacctgcaacacactcctgaatgccatctccaaaaagggtatggttgaggaagctcttgggattgctcgctgcatcagagaaaacggatacaagttggttctcatcacatacaataccctcatagatgcttt

SEQ ID NO: 6482 - DNA, 243 bp, Oryza sativa
  Clone ID: uC-osflcyp171a05b1
tctctcctacttcgtcttcccccaattcaagaagcggaagagagagcgcggcggcggtggagagaaggttctagatcgctctggaggcggcgtgatctgggggcggccgctctgtggctactgcaccgagggatcccggcgcctgcagcggcttcgcaacctcccccggcgtggatgtcgccaacgtctcattctttcaatcttcttcacctcgcacccgggtggtcacctcgggcgcttcgt

SEQ ID NO: 6483 - DNA, 325 bp, Oryza sativa
  Clone ID: uC-osflcyp171a06b1
atcataattgaggagatgttctgttaattgttgcttgcatgttcttctatcggttgcgtggtgacagatatgcgtgaattgaaaatctaatttaaccacaggccgagggagatttcccttatattctggtgatccgtgctactactactcctacttctgctcctacggtgtcgcctcctccccttcgatggacaccgtgagcgagagctgcatcagtagctggagccgtggggagatcacgctggccatcggctgtggccgctcgtcggcggcggcgtggactcggctggtcagctccggcgtggaggacgtgctggtggtgggg

SEQ ID NO: 6484 - DNA, 528 bp, Oryza sativa
  Clone ID: uC-osflcyp171a07b1
ccaatgtctagcttcactcacttcatctcgcttccggtgggtatccacccacaacttggtgataagctgaatgaattcaagaggtcaatcctgacttctaatgaatataaagctgcaggtttccgcatcgacgagtcaatatttgctattcccgaatcacttcacctaacggttcttatgttggagctaaagggtgagaacattgctaaggcttccagtgtgctccagtcagtatcggacaaactaatggaagccttgaaaaacagacctatctccatacagcttagaggtctggcatgcatgaaaggctcaccagataaggcctgggtagtatatgctcctgtgctggaagttggtgaacagggacgcctacaacaagtttgcgacattataattgatgcctttaccagctcaaacctagcacctacaagtgatgagaagcgagaactgaagttgcacgctaccgtgatgaatgcaaggttcaggaagggctactgtccggatgcttcatttgatgctcgcaagata

SEQ ID NO: 6485 - DNA, 485 bp, Oryza sativa
  Clone ID: uC-osflcyp171a08b1
atggttcttgagtcgcaccactctacaccggctagctggcgctgcctcagaggcggatgaaggctgccttacactttcggcgcctgctcgcggacggacgggcagcacatagccatagatggctgcgagcaatgcgcagataccgtcatcaaggacgacaggcccaccaaaggtacgaggctacggacactgtggctgaacgtgcctatgccgttgctcccgctcgacggccagccgatggcgcacaacccagtatgccgctgtggacgaattcctaagctggctcagatatacctggtcgggccactacgaggagcggtagtaccagctacacgtgtcctggatctctcaacgaggtcaagttgcttgtcagggaccagaaggaggataaggaccatggatcagatggagggctttacaacttacaggagtacatactggatgacagtgcacaccacactgtcctgctgtactgtgatgcatgc

SEQ ID NO: 6486 - DNA, 507 bp, Oryza sativa
  Clone ID: uC-osflcyp171a10b1
gtatctgatccgggcgcagggtgcgagtgcgtgagggggaatccccaaatcccccccggggctcgccgccgtcgtcgcccgtctgcacgcaggcctcctcgtcgcttcacttcatcaacaatcaagatgagtcgtggtgggagtgccggtggtggccaaagttctctgggttacctttttggaggcaatgaggcccctaagccagctgctaaaccagcacctgcagctgcacctgcaccagcgccagcaccagcaccagctgcggctgtggctgctcctgctgagaaaccatcacctgcaaaggctgatgccaccaagcagattccagctgggattcagggcagccggagcaataacaactaccatagagctgatggccagaacactggaaactttcttacggatcgcccttcgaccaaggtccatgctgccctggtgtgggatcttccctgggctacctctttggtggaaactgaaggagtgatccctgtgcactggagcaccgga

SEQ ID NO: 6487 - DNA, 389 bp, Oryza sativa
  unsure (1)..(389): unsure at all n locations
  Clone ID: uC-osflcyp171a12b1
ctatcacttccccgtgcccgcgcctcgcgacgggcccaaatccaacacgacgacgaggaggaggagatcgagtgcgccaccgaatcgaataaccacaagccgcggaagatttcccctccccccggtggatccctcctcctcctcctcctnctnctcctcctccggggtcgcctcctcccctccgatggagtccgggagcgagagcggcagcgggagcgggagccgaggggagatcacgctggccatcggcggtggcggcgcgtcggcggcggcgtggactcggctggtcagctccggcgtggaggacgtgctggtggtggggggcgcgggtggctgtcgtggaggaggaggaggagatggagccggntggggctgctgccgtacgggca

SEQ ID NO: 6488 - DNA, 507 bp, Oryza sativa
  Clone ID: uC-osflcyp171b01b1
ggactgctgtgtgtacaggcgatagccagccatttactagagttgagaagaattgcaactcagagataattttcccccctgatttcacaccttctggtcatgagctcttctcatgtagtgctacagaccttcatggtgcttcttgttagagcagcattgaagaggtctagaaatcgatgtcggtgaaagatcatctgaaatgaggaaaaggagcatgcactgacaaaaaaaacttccattccttgtactaatcttcaagttttcattgaccaggctggccccctgttgctgtaattctgtcactgcttcagtaaattactgaaacagacaaaggcatctcctctatatcgatgtgattgctgttaggagcaagtttgtaactgtagatgtaactgatgcttgcggttcttgcaaaagaggagtttaactagtagaatatatacagtgttcatatcaaattaatcaatgtctccttgcttcagaaatgcaaggttttctgcctcatcc

SEQ ID NO: 6489 - DNA, 528 bp, Oryza sativa
  Clone ID: uC-osflcyp171b03b1
cacatcatttgatccatcaattcctaaacctgtattccaaacttctagcaagaccaaaacttttgacaagggcattgcaaagcctaagttctcagctggaaagggtagggaaacaactgaaacagaaatgaagaagggtgattggctttgcccaaattgcaacttcttaaattttgctcgaaatcggcactgccttgaatgcaaagcagatggaccaaagaagatagaaacagctaccactgaaatgaaaacgggagactggatctgtccacagtgccacttcatgaactttgcacggaataagatgtgttttaaatgtgaagaatctcgaccaaagaggcagctcatccctggagaatgggagtgcccctcatgcagctttgtgaactttcgacgcaacaaggtctgcttgaagtgcaagcatgaaggccccgaaaatgatacccatgacagccagcacggacacaataggtggaggaacacgagaggggctgacagaagtagaagttttgatgactctttcgatcg

SEQ ID NO: 6490 - DNA, 520 bp, Oryza sativa
  Clone ID: uC-osflcyp171b04b1
cgcctctgtcgccatggtggcgatccatggacacctccacttacgtgaggccatgccagacccgttcggcgtcgacgagggcttcccgctccccgtgaagctccgcggggtgcaggtcaacgaggaggccctcgttcacctccccctcttccgcgccgccgaggccgagagcttcgccgtcgtcttcaacagcttcgcggcgctcgaggccgacttcgccgagtactaccgtagcctggacgggtctcccaagaaggtgttcctcgtcggcccagcgcgcgccgccgtctccaaactcagcaaaggcatcgctgccgacggcgtcgaccgggaccctatcctgcaatggctcgatggccaaccggcagtgccgttgttgtacgcgtgcttcgggagcacatgctggatgggcgcgagccagctcacggaactcgctgctggcctgcgcgcgtcgggccggccattcctctgggtcatcccgacgaccgcggcggaggtaacagaacaggaggagcgcgcg

SEQ ID NO: 6491 - DNA, 160 bp, Oryza sativa
  Clone ID: uC-osflcyp171b07b1
tttgttcttcactgattcattaggcatcttgtcattgcccttcgtttgtacagatctggttatgttgtgctttgcatttactttcatggatagtatggactatgggggtttcactcgatacagaaacatctatatattctggcagtacaacattaccaga

SEQ ID NO: 6492 - DNA, 492 bp, Oryza sativa
  Clone ID: uC-osflcyp171b08b1
ccctctcgtccgctctgggcaacggtcaccgagggtcttcaccgaagcaacaacatccaccatgacctggatacccagtgccctactgcgaagactggcctctttggaggagccgctttcctggcccttgatgctgctctcttctggcttgtttgccagatgctagctctcaatgcaaggtctgactatctggatgaggatgacaagggcgattatggccaggtttttgcttctgatgttgatggcacaaaggtctgaggctttgactgggcagggtttcatatttagtgtcacttagctatattatcttatcgacaaagctggttcgattagctctctaaaatctgtagatatgtgctatgccagttgcaaagtcgtatatataagggtatttgctcattgcacgtttaagcttacgttgtgaaacaataacagtattctcagtatggtccgtctgttagtaatctccgtggagctaagtgtcctactatt

SEQ ID NO: 6493 - DNA, 525 bp, Oryza sativa
  unsure (1)..(525): unsure at all n locations
  Clone ID: uC-osflcyp171b09b1
gtctcctcgcaaatacgacgcgttcccaaatcccccaatccgatctgcctttcctcttcctcctcgtcaaaccctagccaaatccacgatcggggctagctcgtcggcggcggcgatggggaacccggagaagctgatgacccagatcttcgacctcaagttcacctccaagtcgctgcagcggcaggcgcgcaagtgcgagaaggaggagaaggagcagaagctcaaggtgaagaaggcgatcgagaaggggaacatggacggcgcgcggatctacgccgagaacgccatccgcaagcgcaccgagcacatgaactacctccgcctcgcctcccgcctcgacgccgtcgtcgcgcgcctcgacacccaggcgaagatgcaggtcatcggcaagtccatggccaacatcgtcaagtcgctcgactccgcgctcgccacggggaacctgcagaagatgtccgagaccatggacaacttcgagcgccagttcgtcaacatgaggtncaggccgagttcatgggggcg

SEQ ID NO: 6494 - DNA, 505 bp, Oryza sativa
  Clone ID: uC-osflcyp171b10b1
ccggtcatgtcgctctcgtcggcgcgtcagcgtcgggccacggccgcgtcgccgccgaccgacgacggctactccaaggaagccaaggacaggaggcggcgccccagcggcgaggaggaggaggagggcatccggtggttcctcccgttcctcgccctcggcctcctccgccacatgagcgcgtcctccaacctgatccacgactgcgacgaggtgttcaactactgggagcccctccacttcctcctctaccgctccggcttccagacctgggagtacagttccaactttgctcttagatcatatctgtaccttttcattcacgctcttgtagctgggcctgcttcaatgatttttggggagcataaggttcgagtgttctactctgtgagaatctttcttggccttatatcaactataacagaaactgttctggttgttgctctttcaagaaaatatggaaaaagacttgcttgttatggccttgcaatgctgtgcttaacca

SEQ ID NO: 6495 - DNA, 523 bp, Oryza sativa
  unsure (1)..(523): unsure at all n locations
  Clone ID: uC-osflcyp171b12b1
gtatctgcctgcattgctctgtccaaaaatgattcctatgtgatgtctgcatccggtggcaaagtctcattgttcaacatgatgacattcaaggtcatgactactttcatggcacctccacctgctgcaactttccttgcattccaccctcaagacaataatatcattgctattggaatggaggactctaccattcaaatttataatgtccgtgttgacgaggttaaaagcaagcttaagggacattcaaaaaagatcactgggctggcattttcgcagtcaatgaatatgcttgtatcttcaggtgctgatgctcagctatgtgcttggagcattgatggttgggaaaagaagaaatcaagatatatccaatctccagcaaatcgttctggtgctttagttggtgatacaagggtgcagtttcacaatgaccaaacacatattttggtggttcatgagagccagttggcgatctatgatgcanagctagagtgcttgcgctcgtggtccccaagagaagcac

SEQ ID NO: 6496 - DNA, 531 bp, Oryza sativa
  Clone ID: uC-osflcyp171c01b1
atcatttcacaaacatactgtacgtattgctgcatttactatatctgactttgaaaatgttcaagtggcatttggttctgtgatcaatgtactttgtcctcaatgaattttcctttgtcatgagcacctgacttgtctttctgttgaataccggcacagcgcgtattgacaattcaccgattcaggctgtgttatgaagacggagcaccggattatacaagtagtcaggcactgttattctgtgaagctgactttcactgatccatccaccgacgcatcatcagaattgataaggaggagcatctgttctgttctgtagtttaacaggcccacccagatctgattcatttgattacctttcgttttcagatgaaaccatctggcacctgcgatccaaagaggccttgaaagctggtccatgtttatcttcagaaaccagaataacaagtccatggcttattgacatatcaatcgtttggtcagttagaagttattattgaaaaaagagaggaaaagttagtagttcatcat

SEQ ID NO: 6497 - DNA, 532 bp, Oryza sativa
  Clone ID: uC-osflcyp171c02b1
gtcatctctacgcatgatgcgcgctgaggcttttgtgaaccttggtgaaccaaatatcccagttgcatgatatgagatgatatggatatgacctagagatatctatgcatgtattctcatcatgagcgacgccgaggaatttctagatcacatgatacctgatgctgagattcgcatgcatgagagacacttacaccacctcatgtcctgcacggtgaaatagtggaaatctgcttgaggataaacagctttggttttatcgtcaccttggaattttgatatagcatcaaagcaaccttgacactagagcatgattacagagtatgggccatcgatctaacttcttcttgaagctgcaccacttcttgcaaacgtttatgcttcagaactaggacccatggtcccattatgctttttagattagatcttcatcctaagtttcgacaactcatagctgtagtttttgtctttcttttggcacagaattctgtcattgttaagcctagctttgttccctctattatgtaacctg

SEQ ID NO: 6498 - DNA, 528 bp, Oryza sativa
  Clone ID: uC-osflcyp171c03b1
ctttatgaacaacaaattgagcagctcgggaacttccagttgagaattcatgatcagatgatcatgttagaagctgcaaaagctacgacagaaaccgttgatgctttgaggactggagctgcagctatgaaagcaatgcaaaaggcgacaaatattgatgatgttgataagactatggatgaaattaatgaacaaactgaaaacatgaaacaaatacaagatgctttgtcagcccctcttggagcatctgctgattttgacgaggacgaactagaggcagaacttgaagaactggagggagcagaattggaatctcaacttctcgagcctgttgcagctccacctgtgcatccagtgcaggtcccaggcaccaggataccaactcgccctgctccacagaaagcatcagctgaggaggatgagcttgcagccttgcaagctgaaatggcattgtgatcaggttcacaatgaagaggtgaaatgtacaaatgattggctgtactctacggaatttcaacgagtctagct

SEQ ID NO: 6499 - DNA, 451 bp, Oryza sativa
  Clone ID: uC-osflcyp171c04b1
cctttcttttctctcccctctcctccaaggtcatggcaaaggagaaataacagctagcgggcttggggaagggaaaacagcaagtgggagatcggcagcgagaggtgaattactacttgagtagaagtggtacaagaagagtcgtcgtctacctgtgagcgaattatttcgaggttgtgcgttgcgatgatgggaggtggtctggtgatggaccagggcatgatgttccccggcgtgcacaacttcgtggatctcctgcagcagaacggcggcgacaagaacctcggcttcggcgcgctcgtgccgcagacgtcgtcgggggagcagtgcgtgatgggggagggcgacctcgtggacccgccgacggagagctttccggacgccggtgaggacgacagcgacgactacgtggaggacatcgaggagctggagcgccgtatgtggtgcgacc

SEQ ID NO: 6500 - DNA, 208 bp, Oryza sativa
  Clone ID: uC-osflcyp171c05b1
aacctacttaggcactgacgggactggggaaagtctagagcggcgtgggagacaaggccgacatcgacctcgccgtgaaggccgccagggaggccttcgaccatggcccctggccaagaatgttcggctttgcgaggggaaggatcctgcacaagttcgcggacctggtggagcagcacgtggaggagctggcggagctggacacggt

SEQ ID NO: 6501 - DNA, 465 bp, Oryza sativa
  Clone ID: uC-osflcyp171c06b1
ggaaatctctggtgctatggagaagggctatctccagatgagtgacctcgttcagaacttggttgatcaaaatgagaatggtaccattgccttgccagtttctgacaattcaaacaacagcaaccattctgaagacgtggatggaaattcaggggacattttaagtgaccaaaaccttgggtctaactttctttaccatgttgagcctgtggagcaaaatggcctagtgcttaatgaaaatatgttctctagtgccaatgctggagacctttttaatatatctagccccaatgatggattcctagaactgaaggattttgcagatattgcagatttggagaatcctttagccaatgaatccaccatctggccttctgatggttggccctggaaaccaactgattccatggaggctgtgaatggggctagcaatgtatttttttccttagctggtgaacagatatt

SEQ ID NO: 6502 - DNA, 521 bp, Oryza sativa
  Clone ID: uC-osflcyp171c07b1
gtattttgcaaaccataatgcatttgaactccttgcaaaatatggaacaactcaccttgtattcaatgatgatattcagggaacagcttccgtggtcctttctgggcttgttgcagcactaaaattagttggtggttcattgtcggagcacagttacctgttcctgggagctggagaggctgggacaggcattgcagaacttatagctctcgagatatcaagacagaccaaagcaccaattgaggagtgccgcaagaaaatatggcttgttgattcaaagggcttgattgtcagttcacgaaaggagacccttcaacacttcaagaaaccatgggcccatgagcatgaacctgttggaaatctcttagatgcagtcaaaactatcaaaccaacagtattgattggcacatctggaaaggggcaaactttcactcaggaggttgttgaagccatttcctcatttaatgagaggcctgtcatttttgccttgtccaacccaacatctcaatctgagtgcaccg

SEQ ID NO: 6503 - DNA, 516 bp, Oryza sativa
  Clone ID: uC-osflcyp171c08b1
atgatcattgcaagaactgcaaattcttgttgaacggaagaggttccttgaatccacttatggcatgaatcagctagaagtcacggacttgcgtttccgtggcactcctatcgaagatttgtgtttagattttactcttccaggttatcctgattatattcttaaagaaggcgaggaaaacacaattgtaaatatttacaacttggaagagtatgttactttggtagtggatgctacagttaaatcagggataatgaggcaagtcgaagcatttagatcaggatttaaccaggtctttgacatctcatccctgaaaatattttcacctgaagagcttgactatctaatatgtggtcgccgagaaatttgggagcctgattcattggtggataatataaaatttgatcatgggtatactgctaaaagtcctgcaattgtaaatctactcgagatcatggctgaattcaccccagagcaacaacatgcattctgccagtttgtaactggtgctcctcg

SEQ ID NO: 6504 - DNA, 501 bp, Oryza sativa
  Clone ID: uC-osflcyp171c10b1
ctctgtctagctattagctaagctgctctgctccaccactcgtcttccgcgcgcagcaactgttcgcggaaatgccgagcctggcgctgctcagggcggtcgccatggcgctgctgctgctgctcgcccgctcgatggagggggtggatggggcgacctgcccggcgtggatgtcgccaacgtcgagcgcctcaacctgctcgacctcgcacccggtggtcacctcgggcgcttcgtgatctggaccgagagcgccttcaagaagcttgaggaggtgtatggcaccttcgaggcgccgtcgctgaagaagaaggggttcatcctgccgaggcccaagatggccaatgctgatcttggcaggatcatcaactctgatgaggtgcagtctgtggtgaagccgctcaacaaggaggtcaagcgcagggagaagaggaagaacccgctcaagaatgtcgccgctgtgctcaagctcaacccctacttcggcactgcacgcaagat

SEQ ID NO: 6505 - DNA, 349 bp, Oryza sativa
  unsure (1)..(349): unsure at all n locations
  Clone ID: uC-osflcyp171c11b1
tctttctccatggtagtctagcgagggtgctctctctctctccaaaattccaaggcgctgcagcagcagacagcaggtttgagagagagagaagaaaaaaaaaaacggacaccgaaacggtccgagacgcgacaccaaccggcttttctctctccccttccaccgccaccgccaaccccttctagaatcttctggaatccagtcggtggcggagggcggaggcttctggaaggcagcgcggggatctcggcggcgccggaggcgtccatggcgaggccgtgaagccctcgctcgcccggaggccacgcgacgcgcgggttaggaggaggaggcagggatccgntgggtg

SEQ ID NO: 6506 - DNA, 472 bp, Oryza sativa
  Clone ID: uC-osflcyp171c12b1
accatctctccgtcattccgcctcccgttgaccggggctcctccacatctcctctccatggtcgcgtggatccgccgtcggcggcgacggcaggggtggatccaccgagctccatcatttgtccgcccccgctcgcgccgatccaccgcctctcgcgtcggcagcgacgggaggggtggatccggcgacctccgtcgtctctccgcccccgctgacgccgatccaccgcctctcccgtggatccgccgtcgacggcgacgggaggggtttgatccggcgacctccgtcgtctctccacccccgctcgcgccgatccgctcgggctcgtcgtcgcgtcgtttgtgggctgcttcttcacgtccgtcgcctcgctcatcatctccaagctgcatccgccgtcggcagcgacgtgatgggcggatccagctcatcccttcagtcccaactctgtctgggtgttcaggaagagacc

SEQ ID NO: 6507 - DNA, 524 bp, Oryza sativa
  Clone ID: uC-osflcyp171d02b1
gttgttcttccgtttagcatctaggctctagcaaacctgtaaagatggaatcctacacaactggagccaagtttgattgtttgttgtttgacatggatgatactctgtacccactgagcttaggaatcaacttagcttgccgcaagaacatacaagactatatgctgaacaagcttcagattgaagagagccttgttcccaagatgtgtcttgatctgtacagggaatatggaactacaatggctggactgaaggtcttgggttatgatttcgactatgacgatttccacgcttgtgttcatggcacattgccatacgagaagctgaagcctgaccctgtcttgaggcacctactgctttcactgccacaaaggaagattatattcacaaactctgacaaggcgcacgccgcgacggttctgaagaagctcgggctggaggattgcttcgaagggatcatctgcttcgagactctgaacccatcgactgaacctgaagaagacgactatgacagtaccgatgga

SEQ ID NO: 6508 - DNA, 239 bp, Oryza sativa
  Clone ID: uC-osflcyp171d03b1
caccttctcgctggaacgggcgcgcgacttcttgccagagccctgacaccatggctggggatcttgatgatgctgatggtagataggagagctcttctgtttttgattcgctttttttctccttcttcttcttgtggtgagattcatttctttcattgttttttgataaaaaggaggagacgagtaagatcgtgtcatagacaagtgtccaaaggttaatttacacttgcacactttgt

SEQ ID NO: 6509 - DNA, 528 bp, Oryza sativa
  Clone ID: uC-osflcyp171d04b1
ccacctccgagcaagcaaacaccaaaggcaggcagggcaagaggcgaccgaatccgaaggagccaatggcgaaatccctactggcggcgtccgcgctgctgctggcgctgctcctggcggtggccgggggagcggcggcggcgggggaggtgccgctcgcctgggagctcggggtcggcggcggcggcggcggcggcgaggaggacagcttcgggttctcctccgaggatgcggcggccgacggcgccgcggtggtgaggcgggtgctgcaggggcaggggtacatcagctacggcgcgctgcggcgcgacaccacgccgtgctccgtccgcggtgcctcctactacaactgccgccctggcggccaggccaacccctactcccgcggctgttccgccatcacccgctgtcgcggataacccaccttcgtcaccacacgtttgtttgcttaaaccgggattattaaaagttcgtttgccttgtcttttactttttttttttttttttgtcccccccttttttttgttt

SEQ ID NO: 6510 - DNA, 520 bp, Oryza sativa
  Clone ID: uC-osflcyp171d05b1
cgaattctgctgcattaccgcccatatggccggatcctgcgacacccgccggaccacaacgctgccatctccctcgccgatctcctccgtgtcgacgttgaggactgcctaagccagtgacgcccacctcgccgatctcccccagggccgttgccgaccggcatcgcaggggagaggaggggcgccgtcgtcctgctgcatccctgtataatctctcggcaggctatgcatctgtctatttggacatcctctttctcatggtgacctgcacggtgggtactatagcaagacatgttggaggttaaggaggagatgagcagctaatgaagaaaatgagtcaccttccaccttctacgaggatgtccgaacatggctgctcagggatggaggtgatggtctgcatctgcttctttcctacctataccgcaggctctggctggtacaaatgcaatcattcaccagttcttatgtcatggaaaacgtctgagttttctttaattactcacctccatctaatcgt

SEQ ID NO: 6511 - DNA, 532 bp, Oryza sativa
  Clone ID: uC-osflcyp171d06b1
ctcctcttcttgcaggcgccacgccgcctttccatcccgggcgccactgcaccgccgtctgcacatccctggagccccgccaccgtatcctctccaaccccatcccctcatcctcctgcacccctgccacagcctcctcctccccatccccactgtcgtttcctcgccatccccatcgatgtcttctcttccccatcttcagtggcactaccatgacctcctcctatccatctccgacagaagctgcagatctggtgtccttccatcttctttgctccctattcctcgcaatggggaaggtcaacacctctgcctcctttcgtgctggtgactccaatgcttctacctgtctccatccctaattcgccactaggaggcacggtgaagcaaagacaaaagggagacgccgaggggaatatggcggcagattgggaggggagaaggtcatatggagatggaggcggcaagggcctcttcgtcacgtatagcaacttgtgccttcacttcggtttcacttacggtcttcgcctga

SEQ ID NO: 6512 - DNA, 317 bp, Oryza sativa
  Clone ID: uC-osflcyp171d07b1
ggtaggagggggactgactccgccgccgtcgctggtggcaatgctgctgcataatgggagctgattaccaaagaagcatactgagactgaggtggtaaatggtggataatttgctgtcgattatgatggaaatgcctattaaatgtttaaaattcctcttatttaattgatggttgctgctgtttaaatgctgtaaattgaagtgtttatatgctgtaaattgaagcgtttaaatgttgtaaattgaagtatttaaatgttgtaaattgaagcgtttaaatgttctttgtttagcattttaaggaacttaaagctca

SEQ ID NO: 6513 - DNA, 322 bp, Oryza sativa
  Clone ID: uC-osflcyp171d08b1
cgtcgacctcgtcgagcacttcgtgcggaggtggcgggtggcggagctcgcggcggggctcttccacaagggccgacgcaacgcatgagtacctgtgcagatagtgaccaaagaagcataggaagaagaagcatttacaacgatatattataaagactcttttacccttaagcttcataattgaaaagagccctcgttcccaaggatgtgtttgatctgtacagggaatatggaactacaatgagctggactgaaggtcttgggatatgatttcgaactaatgacgatttccacgcttgtgttcatggcacattgccatacg

SEQ ID NO: 6514 - DNA, 480 bp, Oryza sativa
  Clone ID: uC-osflcyp171d10b1
tttttggtggcgccggagccagagcggcaatgtttccggcgtcggcgtaggcccagatggttgtgctaagggagctggcggcggtgggtcgtcttcctcgttgccggtcaacaccctcacccttcctggagctcctccccttctctgtggggagtttctaagctggattgaggtggcagctcgtcagcgggggaagctcaggctgctgaagcaatgccatccaatcccggattctccttcggccagatctggcgaggaggccggtgggtggtggaacggagaggtcctgggccagctctcagggatggtggttcgatgaagccggccgacggaggggcgtcggtcgggtgtggcggaagccatgtgccgccgatgttcagatggtggattcggattgggtgatgtaccacggtggcagggggttccgagcgaaagcttagcccaattctttgggccaacagtgactttcgcttcggacgt

SEQ ID NO: 6515 - DNA, 527 bp, Oryza sativa
  Clone ID: uC-osflcyp171d11b1
ttctatcgatggttcacgtcagcttctaccgcaactatggtaagacattcaagaagccacgtcgcccttacgagaaggagcgtcttgatgcagagctgaagctagtgggtgagtatggactgaggtgcaagcgtgagctgtggcgtgttcagtatgctttgagccgtatccgtaacaatgcaaggcatctgctcacacttgatgagaagaatccacgccgcatctttgagggtgaggcactgcttcgccgcatgaaccgttatgggctccttgctgatgggcagaacaagcttgattatgtccttgccctcactgttgagaacttcctcgcaaggcgtcttcagactcttgtcttcaaggctggcatggccaagtccatccaccatgctcgtgtcctgatcaggcaacgccacatcagggtcggcaggcaaattgtcaacatcccgtcgttcatggtgagggttgagtctgagaagcacattgacttctcactgacaagcccattcggtggagggcccccctggtag

SEQ ID NO: 6516 - DNA, 485 bp, Oryza sativa
  unsure (1)..(485): unsure at all n locations
  Clone ID: uC-osflcyp171d12b1
cccgatcaccgagcccctcctcctcgacctcgccgcagatcctccgccgctcctccgccgctagggcataaccgcccgcctctcgccggcatccgcatctcccggggaagggaagggaagggaagggaaggaaggaaggtgagggcggatatgtcggcggcgccgataccccgcgagtgggtggggctgcagcagtttccggcggctacccagaccaagctgcacgagctcctcggcaagctcaaggaggagaatgtgagcacattgacaattctggtgatggggaagggcggggtggtngaagtcatccaccgtcaactccatcgttggcgagagggtcgctactgtcagcgccttacagtccgagggtctcaggccgatgatgtgttctcgcaccagggcaggcttcaccttgaacaataatgacactcctgggctcattgaaggtggatacatcaatgagcaggctgttgagatcataaaaa

SEQ ID NO: 6517 - DNA, 445 bp, Oryza sativa
  Clone ID: uC-osflcyp171e01b1
aacgttttggtttagtgttggtcatccgtttaattatcctccaactcactttggacaaatcggattgcattagttgcaattggttcttcttcagagaggctaattagtgtgacaaatcgatcccgattgctggtacacgagctgccatggaaggctgtatgccgagcgatgcaaactacgcgccgctcaccccggtgagcttcttggagcgcgccgccgtcgtgtacggtgaccgcacggccgtcgtctctggcggcagggagtactcgtggcgcgagacgcgggaacggtgcctcgctggggcgtccgcgctcgcgcgcctcggcgtcggccgccgggacgtggtcgccgtcatcgcagcgaacattccggcgatgtacgagctgcacttcagcgtgccgatggccggcggcgtgctctgcacgctgaacacccggcacgacgc

SEQ ID NO: 6518 - DNA, 528 bp, Oryza sativa
  Clone ID: uC-osflcyp171e03b1
cccatatccgccgcgatggccgccgccgccctcctccgccgctcgccggcggcgcgcgccctcctctccccggcgctctcctcccgcctcgtcgcctccaagccccactcgtcgtcccccgcgccgccgccgccgccgtcgaaggcgggggcgaacaccaagacgttctcgatctacaggtgggatcccgactcgccgtcgacgaagccccacctcaaggactacaaggtggacctctccgactgcgggccgatggtgctcgacgtgctgctcaagatcaagaacgagcaggacccgtcgctcaccttccgccgcagctgccgcgaggggatctgcgggagctgcgcgatgaacatcgacggcgacaatggcctcgcctgcctcaccaagatctcgtcggcgtcctcggcctccacgatctcgccgctcccccacatgttcgtcatcaaggacctcgtcgtcgacatgaccaacttctacaaccagtacatgagcgtggagccgtggctcaagcgcaaggacgcgccg

SEQ ID NO: 6519 - DNA, 533 bp, Oryza sativa
  Clone ID: uC-osflcyp171e05b1
cgacttttccgcccaaggcgtccaagaaggacgccgcccccgccgagcgccccatcctcggccgcttctcctcccacctcaagatcgggatcgttgggttaccaaatgttggcaaatccactttctttaacatagtaacaaagctgtctatcccagctgagaacttccctttctgtaccatcgacccaaatgaggcacgggtatatgttccagatgagagatttgattggctttgtcaactttacaagccaaagagtgaggtgtctgcatatctagaaatcaatgacatagccgggcttgttagaggagcccatgctggggagggtttgggcaatgccttcctatcccatatacgcgctgttgatggaatttttcatgtattgagagcatttgaagacaaagaagttactcatattgatgattcagtggatcctgttagagatttggaaactattggtgaagagctgagactcatggacattgagtttgtgcagaacataattgatgaccttgagaaatcaatgagagaagca

SEQ ID NO: 6520 - DNA, 172 bp, Oryza sativa
  Clone ID: uC-osflcyp171e06b1
ctcctcctcaaccatggcgtccagtcgtccacaccccccgccatccccaccttaaagaccggaggaacggcaactccccaaccctcttgtttcttcgagagcgaggtgaagatttgtttcttggtttgtgttcttggagtggaggaggaggaggagttggatatggggcgcg

SEQ ID NO: 6521 - DNA, 508 bp, Oryza sativa
  Clone ID: uC-osflcyp171e07b1
tttttccagacctgagcctgagcctaaaccggagccaaagccagaaccaaaacctgagcctaagcctgaacctaaaccatacccagagccaaaaccggagccgaagccagagccaaaacctgagccggagcctaaacctgagcctaagccagaaccaaaaccagaaccaaagccgtacccagagccgaagccagagccaaaaccggaaccgaagccggaaccaaaaccggagcccaaaccaaagccagagcccaaaccacacccagaaccaaagcctgatccgaaacctgagcctaagccacacccagagcctgagcctaagcctgaacctaagcctgagcccaagccacaccctgagcctgaaccaaagcctgagcctaagcctgagccaaagccagaaccaaagccggagccaaaacctgaaccaaaaccaaagccaaagccagagccaaagccaaagcctgagcccaagccataccctgagcctaagcctaagcctgaaccaaag

SEQ ID NO: 6522 - DNA, 455 bp, Oryza sativa
  Clone ID: uC-osflcyp171e08b1
ttctcacggacacggccacaccacccaccaactgagagctgagcaggcgagcgagcggacatggcagcatcgctccaagccgcggccaccctgatgcagccggccaagctcggcggccgggcctcctccgccgcgctgccatcgcgcccgtcttcgcacgtcgccagggcgttcggcgtcgacaccggtgccgccggcaggatcacgtgctccctgcagtccgacatccgggaggtcgccaacaagtgcgccgatgccgccaagctcgccggcttcgccctcgccacctcagctctgctcgtctcgggcgccagcgcggagggcgtgccgaggaggcttaccttcgacgagattcagagtaagacgtacatggaggtgaagggaaccggcacggcgaaccagtgcccgacggtggagggcggcgttttctccttcgccttcaaggccggcaagta

SEQ ID NO: 6523 - DNA, 514 bp, Oryza sativa
  Clone ID: uC-osflcyp171e09b1
gtccaccgccggcgcctcggccgccgcgtccgccgccgcgtcggggctccccagccacatgttcgaggccggcgcctactccttgggctcccgcgtcgcgacgctgctatccaagggcgccacgttcgccgccgtggggttcgccgcggggctcgccggcaccgcgatctccaacggcctcatctcgctgcggaaacgcatggacccggcgttcgagaccccgaacaaggcgccgcccacgctgctcaacgccgctacctgggcgatccacatgggggtcagcagcaacctgcggtaccagacgctgaacggcgtcgagtacctgctcgccaacgccgcgccgccgtcggtgttcaaggtgtccgtcgttgctctccggtgcataaacaacgtgctgggtggcatgtccttcgtgctactcgcgaggttaaccgggtcgcagaagtctgatgcgccggccgcctcggcgactgcggaggaggagaagggaggttgatagccgtgggcaatgaca

SEQ ID NO: 6524 - DNA, 442 bp, Oryza sativa
  Clone ID: uC-osflcyp171e10b1
ttataataaaagagaaaaagaaaagaaaaaaaagaagaagaagagagaactcgaactctcgcctaccatttcgcccccctccgcaagcaatccaccactgcatcggcggcgagggctcaccggcggcgagccatgtgcggcggcgccatcatccaccacctgaaggggcacccggaggggtcgcgccgggcgacggaggggctcctgtggcccgagaagaagaagcccaggtggggcggcggcgggaggcgccacttcggggggttcggggaggaggacgacgaggacttcgaggccgacttcgaggagttcgaggtggactccggggactcggatttggagctcgggaggaggacgactatgacttcgtctagatcatgccggtcgccttcaagagggccctttccagagatatacttgagcaccattaccactgccggat

SEQ ID NO: 6525 - DNA, 510 bp, Oryza sativa
  unsure (1)..(510): unsure at all n locations
  Clone ID: uC-osflcyp171e12b1
gtactggacggaggtgatcgacatcgccaagcaaggggatggatcgatcttggtgaagacgtcgagcggggaggagttccacggcgccaagtgcatcatcacagtgggcgcgtgggcgagcaagcttgtcaagtcggtcgccggcgtcgacctgccagtgcagccgctgcacacgctcatctgctactggaaggcccgccccggccgcgagcatgagctcacgccggagtccggcttcccgacattcgccagctacggtgacacctgcatctactccacgccgtccatggagttcccaggcctgatcaaggtgtgcgcgcacggcggtgcgccgtgcgacccggataggcgggactggtgcgctggcggcgacgccctggcggacccggtggcgtcgtggatcgacgagctcatgcccggccacgtcgacaccgtcggtgggccggtcatccggcagtcgtgcatgtactccatgaccnctgatgaggatttcatcatcgacttcgttgg

SEQ ID NO: 6526 - DNA, 449 bp, Oryza sativa
  Clone ID: uC-osflcyp171f01b1
aaaatattaaaaaaaaatctgctcttaacaactccctataaagctaccactacgcccccctaccgcggagaagcaaccaatccaattccgaacaagcaaggcaccaaatccccccaccatggatcaccgcctcctcctcctcggcctcctcctcctctccccggcggtggccgccgcctcagtccccggcgaggaggagccgctgatccggcaggtggtcggcggcggcgacgacaacgagctggagctgaacgcggagcgccacttcgccagcttcgtccagaggttcgggaagtcctaccgtgacgccgacgagcacgcgtaccggctctccgtgttcaaggccaacctccgccgcgcgcgccgtcaccagctgctcgacccctccgcggagcacggcgtcaccaagttctccgacctcaccccggccgagttccgccgggcctacc

SEQ ID NO: 6527 - DNA, 377 bp, Oryza sativa
  Clone ID: uC-osflcyp171f03b1
ctactattgcagcgactacatacccatccaccactacaatgactgcagcaactactggccattacgattattatgatgttttcactgcaaatgcatggggctcagggatgcaaatgatgcagcagcccatagatcagtttctgtaccagtgctagctagcttctagccaggaagtcgatagagatagtggaccaaattaagaaacagggcattgagatattgggcgtggtgaatgttgtagctaggtccatattaattatattgtgtcaccagtggttgtttatcttttgctttgatttgtgatcggttgtgggggcaggaaaaaaatggtgttgtacctttctgctgttggtggtaagaggccaaatggctattgg

SEQ ID NO: 6528 - DNA, 514 bp, Oryza sativa
  Clone ID: uC-osflcyp171f05b1
cacatcttctttgcagaggagaggcgacaatggaggggaaggaggaggacgtgcggctgggggcgaacaggtactcggagaggcagccgatagggacggcggcgcagggcgccggggacgacaaggactacaaggagccgccgccggcgccgctgttcgagccaggggagctcaagtcgtggtctttctaccgggccgggatcgccgagttcgtcgccaccttcctcttcctgtacatcaccatcctcaccgtcatgggggtctccaagtcctcctccaagtgcgccaccgtcggcatccagggcatcgcctggtccttcggaggcatgatcttcgcgctcgtctactgcaccgccggcatctccggaggacacatcaacccagcagttacttttgggctgttcttgggcaggaagctgttcctgacccgggccattttctacatagtgatgcaatgcctaggggccatctgcggagctggagttgtgaaggggctccagcagggcctgtacat

SEQ ID NO: 6529 - DNA, 533 bp, Oryza sativa
  Clone ID: uC-osflcyp171f06b1
gttgttctttcaaagaagaaagtaaagaaaactaatgttggagttgctgagttggtttatggtgccttggggactacagagttgcagaaggctgtggaaaaagagtatgaaatggctcttcaggacagggtgatggaagagacaaaagataagaagaatgccgtggagtcttatgtttatgacatgcgaaacaagctgtatgacaagtacaatgattttgtgactgctgaagacaaggaagcattcattgctaagcttcaagaggttgaggattggttgtacgaagatggtgaggatgagaccaaaggagtgtatgttgctaagcttgaagaacttaaaaaggtggggggtcccattgaggcaaggtacaaggaatggatggacagaggcccttccatcgaccaacttgcttactgtatcaacagtttcagagatgctgccttgtccaaagatccgaagtttgatcacattgagatggaggagaaacagaaggtgattaaccagtgttccgaagcagaagtctggctgagaga

SEQ ID NO: 6530 - DNA, 435 bp, Oryza sativa
  Clone ID: uC-osflcyp171f08b1
gttctagatcgcgagcggcccctttttttttttttttttttttttttttaggggatgataaatagacttcataatcgcaaacagaaacaatatgtaggataagataccatgctccattacatcctaaataacccaccattacaaaattcagtctctcagaaaattgcaactcagaggatgatcagacacgggagacaagaaacagcacttcatgatactaggtgaagataggagtttacgcatcctctgtgatggtacccttgtcgctcacgtagataccatccaagaacttcctgatatccttgttcttcacgtggcatttctggttgatgagggctgctgagcgagagacgagctcgatgtcgttgccgtcgaggacgagctcgtccttcaccttcttcgaccgcaagatggtcacccccttgagcatggtaa

SEQ ID NO: 6531 - DNA, 446 bp, Oryza sativa
  Clone ID: uC-osflcyp171f09b1
tttatatacgctacttatacgtcagagatagcttgactgttctaggggtcttgcaggcgggagcgggccaccgccgttgcggtggacgccatcgagcgtggaatggcgcgctggcgataatggagatggggtcctgggcatgagcggtctagcgctcctcgcaatgctggtctctcatacagaagctataggactggctcggcaaccacagcctgttaatgaccgatgcatctactgctcgtggttgaccccctctgagatggctagctacatgaattgcaggtggatttaccttttaacgcagacttggagctctgacacatattactgtagtgattgcgtgttgtgaagtggctacaccaatggccagccgtgtgtggcatatgtaatggatcatggtggtggcgacgtcaccttttgtgaggaagtacaagagtttatttcat

SEQ ID NO: 6532 - DNA, 528 bp, Oryza sativa
  Clone ID: uC-osflcyp171f10b1
ttgatcatgcagaagctgaatgagatttatcgatataaaacagaagaatattcctatgatgctgtgaacaagttcaacatatatcctgatcaggtttctccgtggcttgttgagtggatacctcctaaaggaggttacttcattgggaacctgcagccagctcacatggacttccggttcttttctctggggaatttatggtccatagtaagcagcttggcaacaactcatcaatcccatgccattttggatctgattgaatccaaatggtctgatttagtggcagagatgccattgaagatatgctatcctgctctagagaaccaggaatggaagatcattactggaagtgacccaaagaatacgccttggtcatatcataatggaggatcctggccaacattgttatggcagctcacagtagcatctatcaagatgaacagaccagagattgctgcaaaagctgtagaggtagctgagaggcgaattgctatcgacaaatggcctgaatactatgacaccaaacga

SEQ ID NO: 6533 - DNA, 430 bp, Oryza sativa
  Clone ID: uC-osflcyp171f11b1
aaatcgcaattccccaatccatattcccttcccttcctttcctcctcctccatctccaccctcccgccgccgccgccgccgccgtcgccgcggcacactccccgggaccagcagaggccgccgccaacgccgcgggggcaggtaaaaaggcgcgcgagacgcccgcctctgcccgctgacctagatcggtagggtttactcgggcgcccgggtcgttcgtgtatgggggcgtgggcggtgggggattaggctttcggggtcggggggtcgggaaggtgtctgatcggatgatgggtggctctgttctccttctggggtgcggggttagagctagggctgtcgcggcgattttattttattttattttagttgaatttgaccggaatttccacgatttggatgggtttgtattggttggattgtggtagag

SEQ ID NO: 6534 - DNA, 500 bp, Oryza sativa
  Clone ID: uC-osflcyp171f12b1
gatatgctgtattatgttgatctcattgatttgttcagtgaggttgagtttaagactgcttcaggtcaattgttggatcttattactactcatgagggagaaaaggatctcacaaagtacaacttgacagttcaccgccgcattgttcagtacaagacagcttactactcattctatcttccggttgcatgtgctttgctgctatctggtgagaatttggataacttcggtgatgttaagaacattcttgtggaaatggggacatacttccaagttcaggatgattatctagattgttactggtgatcctgagtttattggcaagattggaacggacattgaagactacaagtgctcatggttagttgtgcaagctctcgagcgtgctgacgagaaccaaaagcacattctatttgaaaattatgggaagccagatcctgaatgtgttgcaaaagtgaaggatctgtataaagaacttaatctggaggccgtatttcatg

SEQ ID NO: 6535 - DNA, 492 bp, Oryza sativa
  Clone ID: uC-osflcyp171g02b1
gccgtgagtgtgcagttcaaggaaatgggcggaagtagcatttcgagaagtagagcaattgctgatgctgccaaacctcctgaacaacaaaatgataggaggaaaaatttccttgattggaggaacttaatgaagcccatgaacgaggagaaagaccactgggtcccagatgaagccgtcactaaatgcacagcatgtacagcagatttcagtgctttcaatcgcaggcatcactgtcgaaattgtggtgatattttctgcgacaagtgcacccagggaagaactcctttaactactgatgctgatgctcaaccagtgcgagtttgtgacagatgcatggctgaagtttctcaaagactgaacaatgcaagggaagcggcaaatcggcctattgttcacagccatgaggatcttgccaaaaaacttaaggatgcaatggatataaataagaagtcatcttcagcctcgtcaaggtctacggatggttctagc

SEQ ID NO: 6536 - DNA, 482 bp, Oryza sativa
  Clone ID: uC-osflcyp171g03b1
cgcttcgttcatcagcttgaccgcctcacctcaccaccccaagctagacgacctcgtcttcctcctccacctcctcgcgacctcgcattgttagatcagcctcgattcatctccaatctttcggcgccgctcccggagagagggacagcggcgcaggcggtgagcacgaggaggagcagagctaatcaaaagccctctcgccgctcgagctctcgtgcaccgtgccgccgccgccgacgccgacgctgacgccgacggcttaattcagtcttgtcggctacatctcttggcgtgctgaaattggtgggagcacgagagcggcgccaatggggacgaggccgtgcgccggcgtggcgtcggcggtggcggcggcggtggccgttctgctgctcgccgtgtcttgcttcgccgcggcggcgacgacgacgcaaaagcatggcagtatgtcagggaagggcggcgacgtgctggaggacgacccg

SEQ ID NO: 6537 - DNA, 369 bp, Oryza sativa
  Clone ID: uC-osflcyp171g04b1
cgcgtcgctcaacacgaactcccgaaggcgaggcggctttggacgcacgcacgcacgcacgcgcgcgcggcctacctcctcggcgcgagttgctcagtcgcagggggggaggtgggagcggggcggggcgggcgtcccggtcggggattgctggttcgatccccccgcgcgtgtgggggtgtgggtgcgtgggatcgatctctccctctcgctcgctcgctcgctcgccctagcacctggcggtcggggcgtcgcatgcggcggcgcggcgaggcgaggcaaacgcgggtggattcgtcactggcggtggaggagaggcgagggggcggcggctgtgatggcgattcagacgatgcattcggagcagca

SEQ ID NO: 6538 - DNA, 533 bp, Oryza sativa
  Clone ID: uC-osflcyp171g06b1
gcgcgcggttgccacccgccgccgccggccacctctacgggtccgccggcgccgccaacatggggctcagcctctcccaggtcggctcccacctcgcctccaccctccaggaccacggccaccaccaccaccatcacggcgcctccccggacctcctccgcttcggcggcagcggcggtggcgccatggctgcacgcctcgagcacctcctgtcgtcgtccagcgcctccgcgttccggcccctgccgccgccgcagcagcagcctccggcgccgttcctcctcggcgcggcgccgcaggggttcggcgacggcggcgacggcagtggtccgcacggattcttgcagggtaagccgttccatggcctcatgcagctccctgacctccaagggaatggcaccggcgggccgtcgccgtcgggtccgggtctctacaacctcggttacatcgccaacagcgcgaacagctcgggtacttccagccatggcccaccgagccagggacagatgactaacaccgaccagttcagcgaa

SEQ ID NO: 6539 - DNA, 410 bp, Oryza sativa
  Clone ID: uC-osflcyp171g07b1
gtgttgtggtcggacgagacctgctgccctcgcgtcggtaccgtcacctcctacggcgggcggcactacttaggggacgagcccttgctatagcggccaccaggtgcgaagcctgcagtgccggccatacaagtatatgcgcaccccatgcacgatgcagtcagaatgcagccggactacgccttctccggctaccgtccccagcacgagcagcagcaggctacggatcctctggctacggagctaagcgccagcccgactgtggcgaccgtccccaggccgagagaggagaacacacactgctccggctatggatctggatacggtggtggacgacggaagcaacaggaagaggatgagctacaggtgcagctacggtcgcatgccgcaggtcgaggagagctatggat

SEQ ID NO: 6540 - DNA, 365 bp, Oryza sativa
  Clone ID: uC-osflcyp171g08b1
tctttttcttcttctccatgccgatcgcctccaagctcgtctacttccagcgccgccgcccatcgccggcgccgccggagccggagccggagcctcccgaccctcgccgcaggccctgccgagccggagccggagcctccgccgcacgccgccgcaagccgggtcaggaacatgttccaggaagcaaaagagatacctcaaagggtgtcgcatctgctggaaacataacaggacaagcaggcagcacgggctccagctcaaggctaaaccgcagcgtatcagatcatggccggcttcctgattcccgtcagcaggctagggaacggctacttcagaggcttaacagcgtggacttatcaggaaga

SEQ ID NO: 6541 - DNA, 507 bp, Oryza sativa
  Clone ID: uC-osflcyp171g10b1
ctgtcagtggccgctcctcttcgccatcatctccgaggggttcggcctcaagtactactccaggctctacaacttcggctccgtggcgagccccgtcggcgcctacgtcctcaacgtccgcgtcgccggctacctctacgacgtcgaggcggccaggcagcacggcggctcgctcgccggcggcgacaagacctgcctcggcgtgcagtgcttcaggaaggccttcctcatcatcaccgccgccaccgtcgccggcgcgctcatctccctcgtgctcgtctggaggacaaggaacttctacaagggggacatctacgccaagttccgcgagaacaccgtcaccgacgaagctaccaccaacggtaactccgccgatacagcggcggaaaaaaggtcaaccttagtcaatgacgaggacagtaaaaaggggtagtaatgtagtttactgatataaagattactacaccaaaagacaagagcttgttacttcttattagcagaaaagtc

SEQ ID NO: 6542 - DNA, 509 bp, Oryza sativa
  Clone ID: uC-osflcyp171g11b1
ctcctaccacctccaaaaccagaccccgaaatctcgaggagcttgtcttttttcggtagcaatggcgttggagcagaccttcatcatgatcaagcccgacggcgtccagaggggcctcattggcgaggtcatcggccgcttcgagaagaagggattctacctcaaagccatgaagctcatcaacgtggagaagtcgttcgccgagaagcactacgccgatctgtcctccaagcccttcttcggagggctcgtggagtacatcgtctccggccccgtcgtcgccatggtctgggagggcaagcaggtcgtctccaccggccgcaagctcgtcggggccaccaaccccctggccgctgagccgggcaccatccgtggcgacttcgctgtcgacattggcaggaatgtcatccacggaagcgactcggtcgagaacgccaggaaggagattgctctgtggttccctgagggcatcgccgagtggaggagcaaccagcacccatggatctatg

SEQ ID NO: 6543 - DNA, 506 bp, Oryza sativa
  Clone ID: uC-osflcyp171g12b1
ggcttccagacgcttctctcctcctctaatctcaagtgtctgtctcgtcgtcctcgcatgtccactcgccatgggcaagattaagatcggaatcaacggtttcggaaggatcgggaggctcgtggccagggtggccctccagagcgaggatgtcgagctcgtcgccgtcaacgaccccttcatcaccaccgactacatgacctacatgttcaagtacgataccgtgcacggccaatggaagcacagcgacatcaagatcaaggactccaagactctgctcttgggcgagaagccggtcaccgttttcggcatcaggaaccctgacgagattccgtgggctgaggctggtgctgagtatgtcgtggagtccaccggtgtcttcactgacaaggagaaggctgctgctcacttgaagggtggtgccaagaaggttgtcatctctgccccgagcaaagatgcctcgatgtttgtctgcggtgtcaacgaggacaagtacacttcagata

SEQ ID NO: 6544 - DNA, 110 bp, Oryza sativa
  Clone ID: uC-osflcyp171h02b1
gaaacatctagagtggaataagaaagatggggttcgtccgtgccctgttcctgctggcgatggtgtgcgtggcggcgcacgcgaaggactaccccaaggaggagggcgcg

SEQ ID NO: 6545 - DNA, 336 bp, Oryza sativa
  Clone ID: uC-osflcyp171h03b1
tggttcttcaacaaatgcaagctgggaacagaatggtagtgctggaaatgattctgataagatggggaggttggaatgacgcaactgctggagctgacacgggagtcacacatccagcacaccaagggaatcactgttgggatttgcctgccacagcttaaaagagttcctactattggtgaggctgggtccctgcaaaggcagatgagtaggagaaaacatgtggagagcccgctcaacatgatgcttggtctgtccagggccctaacaggtcatcacatggaggatccagctggaacaagcagcctagcactcataatgatgacaactcctgga

SEQ ID NO: 6546 - DNA, 518 bp, Oryza sativa
  Clone ID: uC-osflcyp171h06b1
ctttttctcgatctctgcacggcgacgataagataagggagggcagtctagtcgccggggcggtcgtctctgcatgtgccgatggccgctgcggcactattagggatgctgatgatgatgtcgtcggcgccggagatgaaggtggaggcggccggcgggttgtccgtcgggttctacgccgaatcgtgccccaaggcggaggcgatcgtccgggacacggtgaccaaggcgttcgagaaggcgcccggcacgccggccgacctcatccgcctcttcttccacgactgcttcgtccgcggatgtgacgcatcggtgttgctggagtcgacaccagggaacaaggcggagagggacaacaaggcgaacaaccctagcttggatgggtttgacgtcgtcgatgatgccaaggacctcctcgagaaggagtgttcacacaccgtcttttgcgccgacatcctctttctcgtggctcgtgatagcgcctaccttgctggtgggctcgactcgagatcccaaca

SEQ ID NO: 6547 - DNA, 496 bp, Oryza sativa
  unsure (1)..(496): unsure at all n locations
  Clone ID: uC-osflcyp171h08b1
atattttcgcataatttatcgatgctttcgttaaatattgagtcccatcggtttgcctaataagctaaagcaaaagataaaattaaattttcgaacttaatttttgaagttgattttaagatattttgaacgtattttttttagcattggtttttaagtcgttacgaacaaatatataaaagttttacctataaaataatttttatttcctaatgagccgttttgacttattagaaaataagagcaactgatgaggctcattgacaaatcttatcgatacctttcagcgagtaataacaaatgtactggaagacgctggatacacangggattgcacgctttctttggaagattttaccaggattatagatcatcctggcctaaagatggaggtggaagtgcctattgactagtggcccgtgcatacctctggttttggttgctgaacataactgtgcctaatcaatgggacatgcaatgcaccagaagaacgggc

SEQ ID NO: 6548 - DNA, 103 bp, Oryza sativa
  Clone ID: uC-osflcyp171h09b1
aaaaaaaaaaaataaaagataaaaaaagggggagatttaaaaaaataatgggtgggaagctaaagcaaaagataaaattaaggtgggccggtctatctgttga

SEQ ID NO: 6549 - DNA, 137 bp, Oryza sativa
  Clone ID: uC-osflcyp171h11b1
gttgtaggagagaaacatctagagtgaataagaaaggtggggttcgtccgtgccctgggcctgctggcgatggtgtgcgtggcggcgcacgcgaaggactaccccaaggaggagggcgcgaaggcggaggggccggc

SEQ ID NO: 6550 - DNA, 506 bp, Oryza sativa
  Clone ID: uC-osflcyp171h12b1
caattcttgagctcaatcagcaacaacatctatctgggtcttgcttagttaagtccttggccctcccaagaagaagaagatgtcttgctgcggcggcaactgcggctgcggcagcggctgccagtgcggcggcggctgcggcggatgcaagatgttccctgatgtggaggccacagccaccaccaagaccttcgtcctcgctgctccatccaacaaggcgagctctggaggaatggagatggcggtggagagcggcgagaacggcggctgcggctgcaacacctgcaagtgtggcaccagctgcagcggctgctcctgctgctcctgcaactgaatctatcgtcgtcgtcgcccggctgcatgaggatttatcgtatggatgctgctactgtcgatcagagctttgatcgaggccttaatttgcttgcattagtacccagcttatatgtaggcaggccttgccttttgctctgacgcctaaataaaaccgtcgtcgtcgttgtcag

SEQ ID NO: 6551 - DNA, 439 bp, Oryza sativa
  Clone ID: uC-osflcyp172a02b1
gcaaaatcgagtctcctctcctccctccctccctcccttccctttgccatcaaacgcaagccgggagaagcaccactacctagatagaacaataaaaattgctgcatccgtcagagctggccactacaaaaaccagctgcatcacaggagagagcaggcagagaggcagctctccagctcgcgtttggggttgaccagttactccggcgaaccgacggcaagccggcgccggcggcgagggtcgtcgggagcggaagagagggagaaagaatggccaccaccgcctccgtccgacctcccctgctccgacaagcagcaggttcagaaaaagcctcactcctttgcaaaccaaagcagagagcttctgtcagaagaagaagcttcactgccagggccagctcgaatcctgtgagcatcccgaagcaatggtacaacctcg

SEQ ID NO: 6552 - DNA, 498 bp, Oryza sativa
  Clone ID: uC-osflcyp172a05b1
cttctgctgggacactgctggacaagagaagtttggtggacttagggatggatactatatccatggtcaatgtgcgataattatgtttgatgtcacttcaaggctgacttacaagaatgttccaacatggcatagggacttgtgcagggtgtgtgaaaacatccccattgtcctgtgtggtaacaaggttgatgtgaagaacaggcaggttaaagccaagcaggtcacattccacaggaagaagaatctgcagtactatgaaatttctgccaagagcaactacaactttgagaagcccttcctttatcttgcaaggaagcttgctggtgacccgaacctgcatttcgttgaagctgttgctcttaaacctccggaagttcccattgacctggcaatgcagcaacagcatgaggctgagcttgcggctgcagcagcacaacctctcccagatgacgatgacgatctgatcgagtagagaggatcatgagtctatcatgc

SEQ ID NO: 6553 - DNA, 278 bp, Oryza sativa
  Clone ID: uC-osflcyp172a07b1
gctgcgaatccagggccccgcgccgcgccgacgaccaccgccgatcgcgaccaggagggaggatgctgggcgccgcgaggaggcagctcggatccggccccatgctggggcaggtgctgcggaggctccggccggcgacggcggctgcagcggatgcggcgagggcgtactccgcggcggcgaaggagatgactgtccgtgaagcgctgaactctgcactcgatgaagaaatgtctgctgatccttctgtttttctgatgggtgaagaggtggtagag

SEQ ID NO: 6554 - DNA, 434 bp, Oryza sativa
  Clone ID: uC-osflcyp172a08b1
gttcttgcattgcctcccagtgatgactgcagtatccgggtgagctttgaatctctgtatgggatatggccatttctccccttgctacaccaccaagaagttgttcagaaatcattttaaatgaaatgaagatgtcttgtttcaaaagaaagagagagaaaaatgaacttgtagaatgatttgaaagacacagaagagaattctgtgaacctgagttggcgaatgacctttcctagagtaagcaggcttctgttaatatggctgccctcctttagcctcataccagccgatgccgtctgagatgcacgctcacttcctgctaaatcaacaaaattctgtccacaagaaactcagattctatggaaaaacatgtgcaaaataatacaaagcttacaagatgcaagtatttcatcaataccacacaagcaataaga

SEQ ID NO: 6555 - DNA, 361 bp, Oryza sativa
  Clone ID: uC-osflcyp172a10b1
ttgctgctccctcctccgagagtccgaggtcgatcgccgtcgtcgctcggtcgctcgctcgcctgcctgatccggatccggcaggccggactgcgtaggtgtgccgcggcgagacgtgcgcgcggcggcgccgatcgacgacccgatcgatggacttcacctcgtcctacttccacgccttcggcaaccccgacttcgccgcggtcttctccggcggcggcagcgcgcaggccatccggccgggcaccaccaccagcagcagcggcggcgcgaaggcggtgaacgttggcaggggcggcgcggcgaggcagggcgccccgtccgtgttctgcgtccaggacgcggaggtggaggaggcgca

SEQ ID NO: 6556 - DNA, 370 bp, Oryza sativa
  Clone ID: uC-osflcyp172a11b1
tgctttggtttagagactacagtagcagatagcttagtagatggttcagttagcaagatagttgcaaagaaaacatctgaaagcaaacttccagttattgcattgtcagaagttcccagcaaacaagcaagaaatgagcatgaagctgcagagaagcttaagtttgttatttgtccaaggcccaaggctttccaaaatggtgcaggtgatgccggtgccaagaacaatgcagcaagaactgttgaagagaggatagaggaatacaacaaagcacgagcacgcattttcaacggttccatttctgatattgaaggcacaagtgatttgtgagctttatctgttgcgagagatgaaccaattaatgttgagc

SEQ ID NO: 6557 - DNA, 115 bp, Oryza sativa
  Clone ID: uC-osflcyp172a12b1
agcctcttcatgcacgcagagactacagaagctcaaggggggggccaattcaaagctagcgggaggggcgcaaagactacagcggtacgcaaaggtgcagtcaacggattggcag

SEQ ID NO: 6558 - DNA, 435 bp, Oryza sativa
  Clone ID: uC-osflcyp172b01b1
atctgcattcgaaggcgaaggcgaaggattcgggctcagctcctccgcctccgccgatctctcgccggagatgtgtcagccctaggagaggagaagctttctttttttggaaaatcgagtcaacaaaaggtcttgccaattaacacagtgaaggataattctggcttgagtgtttgtaaatggagagaataagcaccaatcagctctacaattctggaattccggtgactgtgccatcgcctctgcctgctataccagctaccctggatgaaaacattcccaggattccagatgggcagaatgttccgcgggagagagaattgagaagcacacctatgccacctcatcagaatcagagtactgttgctcctttcatgggcattttcagtccagtaccgggtctgttgggcctttgcgttcgccccaggcgataag

SEQ ID NO: 6559 - DNA, 491 bp, Oryza sativa
  unsure (1)..(491): unsure at all n locations
  Clone ID: uC-osflcyp172b03b1
cctttattcatgcttcgattctccatgctttcctgtacgtgctcattggtaacattcggcggatttgacagatgggtatattggtcatcttggtggacctgcaatgctgccgctgcgatgccaagatcaggaaggtcctgggctgccttgaagaggagtactgcatcgagaaggtggagtacgacgtgaagaacaacagggtgatcgtgcgcgggaagttcgacccggagaagctgtgcaagaagatctggtgcaaggccggcaagatcatcaaggagatcctcatcgtcgacgtctggccgncgtcgccgccgccggcgtgcaagccgtcgccgtgcgagaagccttcggaggactgcaagcccaagccctgccattgctgcagctgcgagaagcccaagcccaagcccaagccctgccattgctgcagctgcgagaagcccaagcccaagcccaagccctgccactgcgagaagcccaagccctgtcac

SEQ ID NO: 6560 - DNA, 465 bp, Oryza sativa
  Clone ID: uC-osflcyp172b04b1
ctcatagtcaagttgggagaataactatgcttcttctccatgcagcaaggttggatgattcgttgatttcacagcttgtggaatatctagacagaggttctgagtgggcaactttttttctatcgttgaagaagtatcttgacaatggtgttagcagagacatcttactcttggacttcaaatttgctcttgattgcacttataaggcaaactggagggctgaacactacatatccccgatatgctatgtagatctcattgagtgccttggctttttggctacaacgcatcttgtactgaatgactatatgttttgcacaaaatctctgttggccaaaatgatgaagtgtcgcactaccaagggttactatgagacatgtatggctcctagcacagatatcgatctgggctatgcaggtcattcagcacggcgtttcatatacctgtcagttaaggatcttttgg

SEQ ID NO: 6561 - DNA, 546 bp, Oryza sativa
  unsure (1)..(546): unsure at all n locations
  Clone ID: uC-osflcyp172b05b1
gtgtcccctcgccgccgcagccagcgtcgagggctcggcgaccggaggaggagaggccggaacccgccgccgccgccgccgcctccgcctgtagcgagatcgctcgatccggttcgcctcccgcgcgccagtccgccagcccagttcgatccgttgagggggaggggacgctctagtgtggggattgggggaatcgatggcggcgccgccggcgagggctcgggccgactacgattacctcatcaagctgctcctcatcggcgacagcggtgttgggaaaagttgtctcctcctacggttctctgatggttccttcaccaccagttttattaccaccatcgggattgatttcaaaataagaacaatcgaactggatggtaaacggattaaacttcaaatctgggatacagcttggtcaagaacgtttncgaactattacaactgcctactacaggggagcaatggggtatttgcggtttatgatgtcaccgacgagtcatcatttaataatataagaaactggattaggacatagagcaacatgct

SEQ ID NO: 6562 - DNA, 555 bp, Oryza sativa
  Clone ID: uC-osflcyp172b06b1
gcattgtctgctgatgaggttgataagttcatatcagcacaattacctgatccttctgtcgatccaattggttttgatgctgtatctgcatttatgattcatggtccttgtggtgagggacatccatcatgtgcttgcatggttaacggcgaatgctctaagaactatccaaaagaatattgtgagaagacaacaatcttacaaaatggacatgttagatatgctcgaccaaagaatagaatatctaccaaaaagaatggtgttgctgttgataatgcatttgttctcctgcataatgtggatttatgtgtgaagtaccaagcacacataaatgtagagagagttagccgtgatgggatggaaaaatatttattcaagtattttaccaaaggttttgattgttcaaaggttggtctccaacgtaaaagagcatccggtgaatcatctacctgtaccaaaggtgttaatgagatccaagattacctagagtgcagatgtatagctcccaatgatgcagcttggcgcttgctccagtttgaaattcaccacactaac

SEQ ID NO: 6563 - DNA, 509 bp, Oryza sativa
  unsure (1)..(509): unsure at all n locations
  Clone ID: uC-osflcyp172b07b1
attaatttacctcctccacctcctcctcctccccccgatcggatcggcccggctcctcctcctccgccgccgccaccgccgccgcagataggagaagatggccgcacttgataccttcctctttacctcggagtctgtgaacgagggccaccctgacaagctctgcgaccaagtctcagatgctgtgcttgatgcctgcctcgccgaggaccctgacagcaaggtcgcttgtgagacctgcaccaagacaaacatggtcatggtctttggtgagatcaccaccaaggctaacgttgactatgagaagattgtcagggagacatgccgtaacatcggttttgtgtcagctgatgtcggtctcgatgctgaccactgcaaggtgcttgtgaacatcgagcagcagtcccctgacattgcacagggtgtgcacggccacttcaccaagcgccctgaggagattggggctggtgaccagngacacatgtttggatatgcaactgatgagaccc

SEQ ID NO: 6564 - DNA, 488 bp, Oryza sativa
  Clone ID: uC-osflcyp172b08b1
gttgtcatggaaagggatacgagatattgaattaagacggatacaatgagggaattccatggaaaatttaaatgaactttcaacataaaatgtgaactgtactttttattatggtgtttggtctggaacttgattttgggatttgggtttatttttgtattttgtaacttggattagagggaggtaatatttaaattaatttagaagggatttgaatatttgggtttttgaaacatggattggactcgagtttatggagtttgcttttttggagggatgaactgcataacatgagattatttgacacagcttatgagatgacagtggaaaagcaaaaaaaaagtaattaatcttttactaaacaagagttttaacgcctcgtaaaatcaggggcgttactagccagcaatatgtcatgacgtccattactccctaccaatatgatcaatatagtcgttcgactaaaattagagttagcacaattctag

SEQ ID NO: 6565 - DNA, 500 bp, Oryza sativa
  unsure (1)..(500): unsure at all n locations
  Clone ID: uC-osflcyp172b09b1
tcggatggaaatggaggattaccatgcaagactctcgatgtgggaaaatacccgggagaaacaaaggcgaaggcttcttgttcaagaagctgaggataaacagcgtgatggggtgtggatagatgagaaaagggggtttcttgacaagttagtgtcaaggaaaagaagaggaaatatagaacctggagttgggaaatgggtctcatatttgaaccgagaaaagaaactggataccttggttggccagaagcctgttgcacccattgctccgaaaggaatatatctttacggcaatgttggaagtggaaagacaatgctgatggacatgttctatggggccacagaaggtcttatcaagcacaggaggagattccactttcacgaggctatgcttgaaatacatgatcatatgcatgatgtatggaagagacgtgatgaggacaagtctattgagtcgagtgctttcagntggatatcaagcctccctttgatgggaaaat

SEQ ID NO: 6566 - DNA, 538 bp, Oryza sativa
  Clone ID: uC-osflcyp172b12b1
tcggttgtttgcgcgccctctccagggcccagattgagctctgttctggatcttgcacggtgcaccattgtgtccgagctgtccaacaaggactttgactcctatgtcctctctgagtccagcctgtttatctattctgataagattgtgattaagacctgtgggactacaaagctcctgctcacaattccaaggattcttgagcttgctgaagggctttctatgccacttgctgctgtgaagtactcccgcgggatgttcatcttccccagtgcacagcctgctccccacaggagcttctctgaggaagttgctgtcctcaaccgctactttggccatctgaaatctggtggtaatgcttatgtgattggagatccagccaagcctggccagaagtggcatatctactatgctactcagcacccggagcaacctatggttacccttgaaatgtgcatgaccggactggacaaggagaaagcttcagtctttttcaagacttctgctgatggtcacacatcatgtgctaaagaaatga

SEQ ID NO: 6567 - DNA, 537 bp, Oryza sativa
  unsure (1)..(537): unsure at all n locations
  Clone ID: uC-osflcyp172c02b1
gttacattcacaaacttgaccatgatgaccaatgcaatatcaagagccttgttagcaccaaggctagcaatggtgggaatctgatggcaggtgggcgcattgggttcggcgagcactctgacccgcagatccttagcttgctccgagcaaacgatgtggaagggctacaggtgtttgtgccggaccacgagggcaaggagatgtgggttcaggtgccatcggacccatcggccattttcgtcaatgttggtgatgtcctccaggctctgacaaatgggaggctgataagtatccggcacagggtaattgcaaccgcctgcaggccaaggctgtccacaatatacttcgcatcaccacccctgcatgcacgaatctcggcactcccagagacaatcacagccagcagcccacgccgataccgatcattcacctgggctgagtacaagacgacaatgtactcactccgnctgagccacagccgnctagaactcttcaaaattgacgatgatgacagcgacaatgccagtgagggaaaag

SEQ ID NO: 6568 - DNA, 432 bp, Oryza sativa
  Clone ID: uC-osflcyp172c03b1
ggcgagctctggaggaatggagatggcggtggagagcggcgagaacggcggctgcggctgcaacacctgcaagtgtggcaccagctgcagcggctgctcctgctgctcctgcaactgaatctatcgtcgtcgtcgcccggctgcatgaggatttatcgtatggatgctgctactgtcgatcagagctttgatcgaggccttaatttgcttgcattagtacccagcttatatgtaggcaggccttgccttttgctctgacgcctaaataaaaccgtcgtcgtcgttgtcagtgtgtgcgtgtgtcgatcaatgttggatggatccctagctagcttggatggatcatctatcatatggtgatctcatcatgtactcctgctccatctcctcatgcgtgccaggcttcttaatataatctacctctgctttcat

SEQ ID NO: 6569 - DNA, 463 bp, Oryza sativa
  Clone ID: uC-osflcyp172c05b1
tcgagctgagcacgtctagctagctatatctctcaacatcttccgagctactactagtagctagctagctagaggaagcagcagcaatggcgaaatcttgcaccttggtactactacttgtcgcactggtcgggctctcacttcttgtgagccccattgcttgctcccgcaagctcagcaagccgaaacccaagccgaagccgagcatgaagaagccggtggtccgggctcacaacaactacaccggtagcccgtcggtgacggtcaccaccggctgggccgccgccggcgccacgtactacggcgcccccaacggcgacggcagcgacggcggcgcttgcggctaccagaccgccgtcgggcagcggccgttctcgtcgatgatcgccgccgggagcccgtcgctgtacaagggaggcaaggggtgccgcgcgtgctatgaggttaaatgcacgaccaacgc

SEQ ID NO: 6570 - DNA, 361 bp, Oryza sativa
  Clone ID: uC-osflcyp172c06b1
gagccgtgtcactatcaaaaagagcaagaacattctggtcgtcatctctaaaccagatgtcttcaagagcccaaactcagacacctacgtcatcttcggtgaggcgaagatcgaggatctgagctcgcagctgcagactcaagctgcagagcagttcaaggcacctgacctgagtaacgtcatctcaaaggccgagccttctgcagcagctcaggatgacgaggaggtcgatgagtctggcgtcgagccgaaggacattgaactggtgatgacacaggccaccgggtcgagatcgagggcggtgaaggcgctgaaggctgctaacggtgacattgtcactgtcatcatggagctgacgaac

SEQ ID NO: 6571 - DNA, 521 bp, Oryza sativa
  Clone ID: uC-osflcyp172c08b1
tgttatcatagatgcatacgtagagcatggtcccaatgatcaggcttttattttagttgagaagatgaagagtaacggaatatctccaagtatagtaacctacaatttgcttataaaaggcctttgcaaccagtcgcagatatctgaagctgaggaaattattaacagcttaagtaatcacaggttgatacctgatgctgtcagctataatactttaatatcagcatgctgttacagaggcaatattgataaagccttggatcttcagcaaagaatgcataagtatggcatcaaatctacggtgagaacataccatcaacttattagcggataggtggtgcagggagattaaatgaaatggaatatctgtatcagaaaatgatgcaaaataatgttgtacccagtaatgcaatacataatatcatggttgaggcctactcaaaatatggaaatgaaataaggcagaagatctgaggaaggaaatgttacagaaaagggacaaccatgatgacacatgagaa

SEQ ID NO: 6572 - DNA, 540 bp, Oryza sativa
  Clone ID: uC-osflcyp172c11b1
ttgcttgttatgagttgcagcacggttgactggaatgctgaagacattagacaaatgctgaccaggttttactaactttttcttttcttcttttggacacattatttttaagaccgtgtcctttctactgtacctttaaagccaaaacaagcagagaacttgccatatgaaccaaacaagcttgtattgtattcaacattcaaaactgtccatgccttgaacttaacaacttcaatctgatagccgcactcttctgccatatctgttattgcatctaaatgaaacaagtctgatagtgttcatgattcttacatgaattgaatcttatgactcgacatgtattcttatggtaatttggtgctcaatgcagttttaaattttccacttccactgggtcaaaccattctccctactccggaatccatgctgctaaatttatctgcaaacttcatgcaaggctttgattttcatgcgggacacatgcctgttggacctggggcagtcacctatccccagaggcctggagcaactgtttgtgat

SEQ ID NO: 6573 - DNA, 411 bp, Oryza sativa
  Clone ID: uC-osflcyp172c12b1
ctcctcttcttcttcttctccatcttctcacccagcatagccaccttcttccttggtgcaactcggctttctggtccggaggcggctgctcccgctccttcgccggcagaggatggcggtgctcgcggcgccggtggtcgccgccgtgctgctgctcacctgggcggcgtacggcgaggcccaatacgtgctgtacaaggacgccaccaagccggtggaggcgcgcgtcaccgacctcctggcgcggatgacgctcgcggagaagatcggccagatgacgcagatcgagcggcaggtcgcgtcgccgcaggtcctcaaggactacttcatcgggagcttgcttagcggcggcgggagcgtgccgaggaagcaagccaccgccgcggagtgggtgagcatggtgagcgactt

SEQ ID NO: 6574 - DNA, 372 bp, Oryza sativa
  Clone ID: uC-osflcyp172d01b1
gttgtctagagccccggttgcccacccccgcggggacgatggcgggccaggagtcgctcaccctggcgggcgtcctgcgcggccacaacgacatggtgacggcgatcgcggcgccgattgacaactcgcccttcatcgtctcctcctcccgcgacaagtcgctgctggtgtgggacatcaccaacccgtccaccgccgtggccacggatcccgaggcggccccgccggagtacggcgtctcgtaccgccgcctcaccggccactcccacttcgtccaggacgtcgtcctcagctccgacggccagttcgcgctctcgggatcctgggacggcgagctccgcctctgggacctagccaccggccgcaccaccc

SEQ ID NO: 6575 - DNA, 317 bp, Oryza sativa
  Clone ID: uC-osflcyp172d03b1
gtctctctctactctctctcctgccgcctcgccaaaacggaaacgagagggctgagggctccatggagatcgcggtttcgatgtcggcgaggcgccgtgaactcgcagccggcggtggcaggccagccgttgggcgtgaaggaacagtagcgggctaatatccggccacaagacggcgaccgccgccgggggagtgccgcttggtggcggtgcgcgccacccgttcggcggaatgcccagcgggacttcgccacggacgggcggctcgccgaacgccgcttcagtcgatcgcgagcacgatccacacctcgaggatt

SEQ ID NO: 6576 - DNA, 524 bp, Oryza sativa
  unsure (1)..(524): unsure at all n locations
  Clone ID: uC-osflcyp172d05b1
accactcagtgttcaccattgctgaccctccctctccaatccaagctccaacaatggctaaaccatccttgctcctccttcttcctctgctcatcttctccatcggcgcggctctcgcccgcgccgatctcatgctggacaggttcgagcagtggatgatcaggcatggccgcgcctacaccgacgccggtgagaagcagaggaggttcgaggtgtacaggaggaacgtcgagctcgttgagacgttcaactccatgagcaatggctacaagctggctgacaacaagttcgccgacctgacgaacgaggagttcagagccaagatgctggggttcagacctcatgtcacgattcctcagatttcaaatacctgctccgctgacatagcaatgcctggagagagcagtgatgatattctgccgaagagcgtagattggaggaagaaaggngcagtggtggaagtgaagaaccaagagattgtggttcttgctgggcgttctccgcgtggcggcgatagaggggat

SEQ ID NO: 6577 - DNA, 429 bp, Oryza sativa
  Clone ID: uC-osflcyp172d06b1
agagcatgaagctcatctcctcctcctctcgcatggcggccatggccaccaccgcgtccagcctcctcaagacctccttcgctggcgcgcgcctccccgccgccgcccgcaaccccaccgtctccgtcgcgccgcgcaccggcggcgccatctgcaactccatctcgtcgtcgtcgtccactcccccctacgacctcaacgccatcaggttcagccccatcaaggagtccatcgtgtcccgcgagatgacccggcggtacatgaccgacatgatcacctacgccgacaccgacgtcgtcgtcgtcggcgccggctccgcggggctctcctgcgcgtacgagctctccaaggacccctccgtcagcgacgccgtaatcgagcagtctgtgttccccggcggcggcgcgtggctcggctgtcagctgttct

SEQ ID NO: 6578 - DNA, 532 bp, Oryza sativa
  Clone ID: uC-osflcyp172d07b1
tcggttccgaggaggagaggagcaataatccaattccaatccattcctccgcgacctcgtcgtccgatcatggccatggccgcctccaggttgctgtgggcttcccgcgccgcctcctacctcaagatctccactttccccagggccttctccaccgtgctgaaggatctgaagtatgctgacactcatgaatgggttaaggttgagggtgattcggcaaccgttggaattacagaccatgcccagcaccatttgggtgatgttgtgtatgtggagcttccagaagttggcagcagtgtatcccagggaaagaactttggtgctgttgaaagtgtgaaggcaaccagcgatatctactctccagtatctggagaggtggttgcagtgaacgatggactaggcgatgaacctggattggttaatacaagtccatacgagagtgggtggatcatcaaggtcaaggttagtgattcaggtgagctcaattcactgatggatgacgcgaaatactcgaaattctgcgaggaagaag

SEQ ID NO: 6579 - DNA, 529 bp, Oryza sativa
  Clone ID: uC-osflcyp172d08b1
attaagaaaaaaaaaactcgttttcttttcttctcttctcttctcttgttgcggcgaagggggagaggaaggtcgaggtcgacgagatgggcggcggcaatgggcagaagtcgaagatggcgagggagaggaacatggagaagaacaagggcgccaaggggagccagcttgaggccaacaagaaggccatgaacatccagtgcaagatatgcatgcagactttcatctgcaccacctctgagaccaagtgcaaagagcatgctgaggcgaagcatccgaagagcgacctcaccgcgtgcttccctcacctcaagaaataatggcggtggcatctctctgctcaatcagaagagaaaaagagaagctgccataatccactagtatcatcttgtatgcaatgactggttgccctatgtatgggtctaaactttggtcagctgctgctgcttctttgggtgtgtgcctcatctaaatatgtaatgctctatcaaccttttgtgccacgatataaatctgtgtggatttgctg

SEQ ID NO: 6580 - DNA, 455 bp, Oryza sativa
  Clone ID: uC-osflcyp172d09b1
tcgccgccctttttttttttttttcatacaacatatcacccagaagaaagtaagcctgcccgtcctgatcacctcactttatttgtgcattacattacattatccaacacacacacacacacataccccaatcttttatcatatcatttccatctttatttgtgcatgcacgtcacatgacattacttactttatttgtgcacgtactagtagtagctcgtgcatgaatccagtgaagtgatcagtgatcaaagtgaaaatggatcaaggtctggttaattaccagccgtccatcacagaacctgatccaggagaccaggctcattaccagccgtccatccggtcttcttgtcccagtacctgttccagaccatgatgcccccatagttgggcagcttgttgatgaactgcagcacgtcgtagtagagatccttgtgcgacacgtagccgtccct

SEQ ID NO: 6581 - DNA, 363 bp, Oryza sativa
  unsure (1)..(363): unsure at all n locations
  Clone ID: uC-osflcyp172d10b1
ctttacgcgtgggttgacatctttttgcctggcagccaaagaaagccgaggagaagccccaggcctagtgatccaggcatagatggaatagcttccagcatatcttgaggtgttcattttggctatgttgttcaggacacccttcctctttatttttgctgaacgcgcttcagtagatgttaaaaaaaaaccttcctggaatgggtgttccatagtcatatatcgctgtacgcttatagcccttctctcagtgcagtctgttgtgaacgaatttattcagaataagcaccctcactgttttgtagtggatttcaaaaaaaaaaaaataaaaaaaaaaaaaaaaaaaaaaaaannnnnnnaatt

SEQ ID NO: 6582 - DNA, 502 bp, Oryza sativa
  unsure (1)..(502): unsure at all n locations
  Clone ID: uC-osflcyp172d11b1
cttgcagttgagcgccccgattcctcccccttcgcctcgccaaaaaaaaacccagctcccccgatctccccaccaccaccacccagatctcgaaaccctcgccgtcgccgccctcctcctcctccaccgtcgcggcggccatggcgaaggagttccccgtgccgccggtggtcttcactccctccacccctacccaccgccgccatcctcccccagggaccggcccctccccgccgccggccttcgcgcctccccgcccctccacctcatccggcgcgaaccctctccccttcatgtccttcgacgtcggcaacgcggccacctcctcctcgccgccgctgttcgccgggccgatcggcgtcggcggctccggggcctccttcgaggacgagccgccgctcctcgaggagctcggcatcaacacgcgccagatctggcggaagacgctctncatnctncacccgctccgctccgncgatcccttccttcacgccgacgccga

SEQ ID NO: 6583 - DNA, 511 bp, Oryza sativa
  unsure (1)..(511): unsure at all n locations
  Clone ID: uC-osflcyp172d12b1
ttgtgttaacatgttggttatgccaaacaaggccaaggtgaaagtcattagtgtacactgtgatgaagatagagtgagaagtgctgcacctggtgagaatgtccgagtcaaactgtcaggaattgaagaggatgacatcactgctggttttgtgctatcaagcattaaaaatcctgttagtgctatatctgaatttcgtgctcaactacagatattggagttgcttgacaatgcaatttttactgctggttacaaggcagtgctgcatatccactctgtagttgaggaatgtgagattgttgaactcatagaagaaattgatttgaagaggaggaaagaaggtgacataaaaaaaaagaagtcaaagaggaaacctctttttgtgaagaatggagctgtcgtcgtttgccgtgttcaggtcaataatttgatttgtatcgagaacttctctgagtttcctcagcttgaaaatttacgctccggactgaangtagacagttgctgtaggaaa

SEQ ID NO: 6584 - DNA, 542 bp, Oryza sativa
  Clone ID: uC-osflcyp172e01b1
gttcattatctacgtccatgttatgacacagcaggagcagcagccatccattgagcgaggatcatcagatgctcagtgtggttcatccaatgtatttgatcctcccattgaaggtcatgcggcaaactatagtgtgaacgggagcttttcaggtggccataatggaaacaatgggcaaagaggacctagtactgctcccaatgttgggaggccaaacatggagactgttaatggtatcgtggatgaaaatggggctggaggtggcaatggaagtgggagcggtagtggtaatgacttgtatcagaatggggtctgttaccgagaagctgcattgaacaaattcagacagaaacggaaagtgaggaactttggaaaaaaggtgcgctatcagagcagaaagaggttggctgagcagcgccctcggatccgcgggcaattcgtgcgacaatcttgacaggaagatcaggcaggccaagacgaagacagataactaagaaccacctacatatcccacatggcatctgctttgacagctggagagc

SEQ ID NO: 6585 - DNA, 477 bp, Oryza sativa
  Clone ID: uC-osflcyp172e02b1
gctgagtttgagaggaaggttggaggcaaggaagagagacagaggagaaggaagagcaggaggggagggaaaaggaaaaccctttctctctctctctctcagcctctctctccctctctcttcttctccttccttgcaccaccgtcctactcaccgtcgcatcatccactgatccggccggcgatatcacctccatccatccatcacattacggtcggcgtcggcggcggcgacgacgaaggcgggtgagatctcaccggagaagtgcaggcgggcaggatgcaaggaggagggccactcagccccgacgagcaccgggccacctcgccgccggggataatgcaccaccagccggcgatgacgatcgtcgtcgccgtggaccctgaccggaacagccagctcgccgtgaagtgggtcgtcgaccaccttcttaccggcgccttccccattattctccttcccatcggcgtccacccc

SEQ ID NO: 6586 - DNA, 457 bp, Oryza sativa
  Clone ID: uC-osflcyp172e03b1
gttcggtcggagcacgcaaaaatctcgctcacctcgtgaagagctgagatcaaggggggagagatcggaggcggccgtagcgtggcggagatggatcctgctagcgtcagcgccagcgccagcggcgacccgatggcggagtgccctccggcggcggctgccgctgagggcagcgacgccatggactgcggcggcggcgggcggagcaacgcgagggtggccggagtgctccgcgggttcctcgccgtgcagcagcgccgcgccgaggcgtactccacgctccgaaaggggtttttctgaatacatggctaatggaggtgaattagcttttcaacaactatgcgcgagtgttaccgcggagttcaatgattgctcgaaacaagttctcgaaatggtagccctcctatcaacgccagaaatttgtcgtggcgatcttgcccacttacttgaggatgtg

SEQ ID NO: 6587 - DNA, 531 bp, Oryza sativa
  Clone ID: uC-osflcyp172e04b1
ctacgccttctcccgccccatccttgtcctcctcggcgagtccccggagatcgccagcgccgccgccgtcttcgtctacggcctcgtcccgcagatcttcgcctacgccgccaacttccccatccagaagttcatgcaggcgcagagcatcatggcacccagcgcctacatctccgccgccacgctcgccttccacctcgtcctcagctacctcgtcgtctaccagttcggtcttggccttcttggcgcctcgctaatgctcagcatcagctggtgggtcatcgtcgtcgcgcagttcatctacatcgtcaccagccgccggtgcaggctcacttggaccggcttctccatgctggccttctccggcttgcccgacttcttcaagctgtccctcgcctccgccgtcatgctctgcctcgagacctggtacttccagatcctcgtcctcatcgccggcctcctcaaggaccctgagatggcacttgcctcgctctctgtctgcatgacaatttcttggatggtgttcatgat

SEQ ID NO: 6588 - DNA, 495 bp, Oryza sativa
  unsure (1)..(495): unsure at all n locations
  Clone ID: uC-osflcyp172e05b1
gtgattgctcgctcgtttttccaagaaaccggccggactcgagcgctcgtcaagtccgtgttccagatcgagtttgtagagccatggcggcggcggcgcgcgcgatcatatgcgagatggcgccgcagaggggggcggcggcggcgccggcggcgccggcgcagcagaaggcgacgacgagacgggacggtgggaagatcatgctccagccacgcctctgcacgctccggtcgtacggcgccggcagcggcgtggtggcgcggaggcgggtggtggggagaggagagcggcngccgcggcgcggggtcctccccgttcttcgcgtcgctagccgactacatcgagagcacccgcaagagccaggacttcgagaccatcttcggccgcctcgcatggtggcgttcgcgaccgcggtggcgtggtagttgacgacggtgaactcgctgttcaagaagctggacatgcaggagatcgaggaggcgggccgggtgtgcc

SEQ ID NO: 6589 - DNA, 516 bp, Oryza sativa
  Clone ID: uC-osflcyp172e06b1
gtggattacacctacactaaaggcgaaaataagaagtgcccttctgttgctctgatgttccaaattggagagaaagcaacgtactataatatgggagggtgtaaagatatgcctggttcatgcacaagcaaaagttgcagaggtcaagaggttgacattatgcacttttctgttggaaatgctatccctggacgtctttatggtggaaatcacatagataatgcagacggaaatggcggtgatagattcggtcatcttgttgatttgtattcatggaatccgcattgccgataccttgatgggataggccctaaagagaataattcaaatgctcagaatgattggcatggggcatggtggcatagctctctgacctttcactcaggctttgtggatgatgacagtccttacggaaaacaagatgagaagggcacatattattttgagttttcaaggcccctaagaacaatggatcgattacagcaggatgcacagttcacgataggtgggcccaac

SEQ ID NO: 6590 - DNA, 478 bp, Oryza sativa
  unsure (1)..(478): unsure at all n locations
  Clone ID: uC-osflcyp172e07b1
ctgtgacgcgtgggaagaaaatccaccccaaaaaggaaaaccctaggctcgcaccgcgcgccgccatttctcccccttccaccgcgcaccgcctcctccgccaaatccaccgccgcggcgcgcggcctcctcctccgccgcggcgtgccgccacctcgctcctctctccccatccaccgcgctgccggagtcgacctcngcgcccgcccaggtggtggtgtgtgccgggtagaggagggaggaggaagcgagggcgtcggacttgtgcgtgcgcaggtccaggggcaggacgacattcgacgcggtcgccgacgagtttttccccttttgcctttgatttcttcggccctttcctttcaagttttgatacaaagaattcagaaactcatactatatgatgggtagtttcctctgttagtcctgtatcttggaacctatactttatgatcaaagaattcagaaagggatcatggaacta

SEQ ID NO: 6591 - DNA, 532 bp, Oryza sativa
  Clone ID: uC-osflcyp172e08b1
ttgtttgaacggcggggcggcgtgcgggaagcggtacgtggtgacgtgcacgggcgccaccaaccagggggtgccgcggccgtgcaccggccggagcgtcaccgtgaagatcgtcgaccactgcccctccggctgccagggcaccatcgacctctcccaggaggccttcgccatcatcgccaaccccgacgccggcaagatcaagatcgactaccgccaggtgtaaggtgaagacaatacatgcatatctacggagtatatagtcaataaagtgcagtgcttttccaaacgagacagggaagcgaacgtgtgtgttcagtgttccagctgattttcggttgttgccaataaaacaatttgtatgagagagcgaaaagaagaaacttattaatttggtttttttgaacgaatttgtactgtgggtttagcaaatattttcaatctttctttacgttttttctctctattttaatttgtttcgttctttatggtaatttttttttttttattttaataaggggggcctttttta

SEQ ID NO: 6592 - DNA, 453 bp, Oryza sativa
  unsure (1)..(453): unsure at all n locations
  Clone ID: uC-osflcyp172e09b1
tcgcttcttcttcagctgcctccttctccacagcccacaggcgggacggcggtgagctcggaaacggcgggcggacgtggggaggcggcggctggcgcaggcgggataggcggcccgcggctcctctcctcccctccccggcagggactccggcgcgcgggcgggcgacgacgggcgaggagccacggctcctcccctccctctcccctcccctcccctccccggcggcgacgggagcgcgcaggcggcggatccggcaggcgggcgggcaggcaacgatgggcggctcgcggccgtccccgcacggatccggcagcagcggccgtccccgcccggatccggcagcagcgtccctctcccacccttccccgctcgagggcgacgacgacgatgacgacnaggcgggagtgggcggtggcgaccacaacaacgacgacgagggggagggctttc

SEQ ID NO: 6593 - DNA, 431 bp, Oryza sativa
  Clone ID: uC-osflcyp172e10b1
ttgattctgaccaaatccaccctagctacaaattttcttggccgcgcgcggcaggcagatcgagcaggcgagcgaagatgtcgtggcagacgtacgtcgacgagcacctgatgtgcgagatcgagggccaccacctcacctccgccgccatcgtcggccacgacggcaccgtctgggcacagagcgccgccttccctcagttcaaaccggaggagatgaccaacatcatgaaggacttcgacgagccggggttcctcgccccgaccggactgtttcttggaccaaccaagtacatggtcatccaaggtgaacctggcgctgtcattcgtggcaagaagggatcaggaggcatcacagtgaagaagaccgggcaggcgctggtggtcggcatctacgacgagcccatgacctcgtggcagtgcaacatggtg

SEQ ID NO: 6594 - DNA, 476 bp, Oryza sativa
  Clone ID: uC-osflcyp172e11b1
ttctatggtttagagactacagtagcagatagcttagtagatggttcagttagcaagatagttgcaaagaaaacatctgaaagcaaacttccagttattgcattgtcagaagttcccagcaaacaagcaagaaatgagcatgaagctgcagagaagcttaagtttgttatttgtccaaggcccaaggctttccaaaatggtgcaggtgatgccggtgccaagaacaatgcagcaagaactgttgaagagaggatagaggaatacaacaaagcacgagcacgcattttcaacggttccatttctgatattgaaggcacaagtgatttgggagctttatctgttgcgagagatgaaccaattaatgttgagcctcctgttgatgagaataaggtgaacacaatgaacagccgttccagagttgctgtttttaaggacactgaaaaggatcgtagtgatcctgactatgatcgtaacta

SEQ ID NO: 6595 - DNA, 487 bp, Oryza sativa
  Clone ID: uC-osflcyp172f02b1
ttggtggggatgtagggaggttctctatgataagctgccacttcataaatcatatgaggaacgtcctatcctatccaaggctacaagtagagagataataaaagcagatgcatatgtcgcagcttgtgatgtcccggggatcaaaagacttttaccttctgaatggaggcaatgggatacatttgacaacatctacaagttagatggtgttcctgtagtcacagtacagcttcgttataatggatgggttacagaacttcaagatttggagaaatcaagacaactgaaaaaggcagttggcttggataatcttctctacactccagatgcagatttttcatgtttttcagaccttgcactttcatctcctgctgactactacattgaaggacaagggtcctttgatccaagctgtgctaacccctggcgatccttacatgccattgcccaatgaggagataattagcaaggttcaaaagcaggtctt

SEQ ID NO: 6596 - DNA, 505 bp, Oryza sativa
  unsure (1)..(505): unsure at all n locations
  Clone ID: uC-osflcyp172f03b1
gtctgttgaccatgtcattccttgttaccaagcagaatgcagagaatgcaagttttgcaagagtggaaagaccaacctctgtggcaaagttcgtgctgccacaggggtcggtgtcatgatgaatgatcgcaagagccgtttctcaataaatggaaaacccatttatcatttcatgggaacatctacattcagccagtatactgttgtgcacgatgtcagtgtcgcaaagataaacccacaggcacctctagacaaagtttgcctgcttggctgcggtgtttctactggcctcggagcagtatggaataccgcaaaggttgaagcaggttccatcgttgctatttttggacttggcacagttggacttgcagttgctgagggggcaaaatcagctggtgcttctcggattattggcatcgacattgatagcaaaaaagtntgatgtcgcaaaagactttgggngttacaganatttgtgaaccccaaaggaccatgacaaaccaat

SEQ ID NO: 6597 - DNA, 488 bp, Oryza sativa
  Clone ID: uC-osflcyp172f08b1
cttttatttacttttcttcctcagcaaaattacttccactacattgctcatcaaacttccatttcatttccaagttcccatctctcccatttcccaaaattactcccacttgatcacgcatgtcatatttgtttgtggctttctaacattgtcaagggatttccaagttcccatctctcccatttccctattatttacttttcttctttagcaaaattactcccacttgatcatgcatgtcatatttgtgtggctttctaacattgtcaagggaattaggatgatgtgacttgtttaattaccttgtcgaatttcgtcctattcagtattcacaatgattctcgctcactttctctgactttttagcatgctgacctgagtattgactactgtcgatcactgcatctcatgtggaaaaagaaaaaagtttatcttggtgcttgtaactcctctttttcttttaatgcatgaatctgggagcagctgca

SEQ ID NO: 6598 - DNA, 424 bp, Oryza sativa
  Clone ID: uC-osflcyp172f09b1
ttgcaaaggcagctcagctcaagtttagagtgagaggtgagagctcagcggcgcgccatggcggcatctcggcttgcgctcctcctcctcgtcctcgccgtcgccgcggcgcgccacgcgctcccggcggcggggagcgacgcgcacccggggtacgacggcgcggaggacacctgcggggtcccggcggcggcggcggcggcggcggggaggatgaggagtacggcgtcgggcggatcctggacatcacccacgcgtaccgggcggacctgccggcgttcgcgccgggggcggtgacggggccggtggtgcggctcagggactccatggcgaacgggacgctctacaacctgtcggagctaagatggagtgccacatgggcacccacgtcgacgcgccgggccacatgaaccagggccacttc

SEQ ID NO: 6599 - DNA, 527 bp, Oryza sativa
  Clone ID: uC-osflcyp172f11b1
tcgctcaacctctcccaaaattagccccgatccgatcgcttcctagccctgattcgaggtaaaaaaggggaggagaagatgagggagatcttgcacatccagggcgggcagtgcgggaaccagatcgggtccaagttctgggaggtggtgtgcgacgagcatggcatcgacccgacggggaggtacgccggcacgtcggacctgcagctggagcgcgtgaacgtctactacaacgaggcgtcgtgcggccggttcgtgccgcgcgccgtgctcatggacctggagccgggcaccatggactccgtccgcacggggccctacggccagatcttccgtcccgacaacttcgtcttcggccagtccggcgccggcaacaactgggccaagggccactacaccgagggcgccgagctcatcgactccgtcctcgacgtcgtccgcaaggaggccgagaattgcgactgccttcaaggtttccaggtgtgccactcggtgggcggcggcacgggctccggcatgggcaccct

SEQ ID NO: 6600 - DNA, 380 bp, Oryza sativa
  unsure (1)..(380): unsure at all n locations
  Clone ID: uC-osflcyp172f12b1
ggagcttgagcttggagagagacaacaatggcggctcaggctcttctctctgggaggcagctgctggggaggccattgcaatcttcagtctccaggtcttcttcctccaggaaggcacccttcatggtcagggcagaggccactccccctgccaagcaaggtgctgacaggcagctgtggttcgcatccaagcagtccctgagctacctggatggcacgcttccgggagacttcgggttcgacccgctggggctatcggacccggaggggaccggtgggttcatcgagccacggtggctggcctaccgcgaggtgttcaacggccggacggcgatgatgggcgtcgtcngcatggtcgccccggagctcctcggcaagct

SEQ ID NO: 6601 - DNA, 492 bp, Oryza sativa
  Clone ID: uC-osflcyp172g02b1
attaactatccgtcactgctgcgctccaaccaaaatgatgcacatttcagccctcccacaagagatcacggaggatgcgattcttaaccatgtttcagagcatggttctgttgtaaacacaaagctgtttgaggtgaacggcaagaggcaggcgctcatccagttcgagagcgaagaggaggcgaccgaagcccttgtatcaaaacatgccacctcgctggagggtaacacgatcaggatctcattctcccagatgcagagcatatagaaactcatcgtggggaaacttatccagctaatcggatgacgagtagcaagttttatttaggaaagcattgaactttagatgtgaatcctgttctgtcttctcctgtaggccgatgctttgtcttttgctgtaccatgctgtgagactgactgaacaagcttgacgttggggcctttagctgcaccaaatggttttaagctttttttctttccctggtggtttag

SEQ ID NO: 6602 - DNA, 446 bp, Oryza sativa
  Clone ID: uC-osflcyp172g04b1
ggtgactgtcctcttttctgactcaacgtacagcgatcttcaggtaaaagagacgaaccacaatactacagcaatggatgaaaacaatgagttccttcagctgattcttagtagcaatgatgaaggatacaatgctggaagtgaattccaagtttgggatgttctggacttctacttctcagaaagcttttcagctgtgcagtttgatagcttgatgggttttacaaatgatgttagttcttcccatcacgattgtatgaatcttgttgacatggtagagcggcctgttgcgctcctgtccctaaatgataccgaggagcaaaataactctactgatgagttccctgatgatacatcatcataccttcaaatgaaacccttagattccgaaactgaaagtaattatgcctctcgagatgttgcggtaactgaatatgttgatgaaa

SEQ ID NO: 6603 - DNA, 423 bp, Oryza sativa
  unsure (1)..(423): unsure at all n locations
  Clone ID: uC-osflcyp172g05b1
ctcccttcctccacttcacccatctctcccgacctccacctccatatctatccacttctcactctctcacactctcactagctaggagcactccactccaatttactactagtatctctctctctccaactaccgccattgccttcttggcaagctcggttttcttgcggagatgaaggggctcagtgggccgaagctgctggtggtccacccgtcgtcgaacaagccgctgggtggcgccgcgtcaccggcgatggcggtccttggctcccgccgccggatgtgggtggtgctgttcttggccgggttcgcctgcgtgtcgctcggcacgatgctgtgcgccgcgcgcgaccacccgccgccgcccgtcgccgngaggaggctggcggcggcggaggcgcaagcggcgacgctcgcagtgtc

SEQ ID NO: 6604 - DNA, 470 bp, Oryza sativa
  unsure (1)..(470): unsure at all n locations
  Clone ID: uC-osflcyp172g11b1
tttgtgtgtgccttgggatgaagctgctgaggaagcgcgacatcccggaggagaagtacaccaacgccttcctcggctatggcgcggaggacaaccacttcgtcgtcgagctcacctacaactatggcgtcgacaagtatgacatcggggcaggtttcggtcactttggcatcgccgtcgacgatgtggcgaagacggtggagctgataagggcgaaaggagggaaggtgaccagggagcccggccctgtcaagggcggcaagacggtgatcgccttcgtcgaggacccagatggctacaagtttgagatccttgagaggccagggactccagagcccctgtgccaggtgatgctncgtgtcggtgatcttgatcgggccataagcttctatgagaaggcctgtggcatggagctgctagggagagagataaccctgaatacaagtacacagtggcaatgatggggtatg

SEQ ID NO: 6605 - DNA, 422 bp, Oryza sativa
  Clone ID: uC-osflcyp172g12b1
tcgatcaattgagaaactggaaggagctatggaaggtggaagggaaatcagattttacaattcagaggttcatcgggctgcttttgttctgccaacatttgtaaggagagaactggaatcacacaatacttgtgctgaaaaggataaatcagaaaccaagccagtcgcgaaaccaaagaagatgaaaataatgccgaatagtgccattccgactgcttcctagattcgggcggccatatgcgacaaccatgttcgacgtccttagctacagtatatgccaactataagaggagaatgtcgctgtaactcttctgtcttaagtatggtatgttatgcctgactgaataaaagggaggaacaggtgagatgtgaaccaaaataatgttcttcctgaaccctgagccctgttgtagtgttgccct

SEQ ID NO: 6606 - DNA, 474 bp, Oryza sativa
  Clone ID: uC-osflcyp172h02b1
gtttcggtgaccggcacgcgtacgcggcgatgatgtacatggggacgccgagggactacgagttctacgtcgccgtgcgcgtcatgatgcgctccctcgccaggatcggcgccgacgccgaccgcgtcctcatcgcctccgccgacgtccccgccgactgggtccgcgcaatgagggaagaggatggcatgagagtggtgctggtggagaatatgaagaatccttatgagagcaaccttggagggatcaacaggaggtttaagctgacgctgaacaagctctatgcgtggaccctggttgactatgagcgcgtcgtcatgatcgactccgataacatcttccttcagaagaccgatgagctcttccagtgtggacagttctgtgccgttttcatcaacccttgctacttccacactggtcttttcgtgctccagccttcatggatgtcttcaaggcatgcttcatgacctagag

SEQ ID NO: 6607 - DNA, 394 bp, Oryza sativa
  Clone ID: uC-osflcyp172h04b1
cctatctccaaatcctcctcatctcctcttccagaacctttctttttcgatttcgtgttcgagttctttgtgattgcagcgatggcgtccgtggatctgaccccgaggcaggcgaggaaggcgtacggcggcgatggtgggacctactacgagtggagccccgcagacctgcccatgctggaactcgccaacatcggcggcgccaagctgtcgctcaacgccggtggcctcgccctgcccagcttttccgactccggaaaggttgcgtatgttcttcaaggcaagggcacttgtggcattgtcctgccggaggcgagcaaggagaaagtgatcgccgtgaaggagggagactccctggcactcccctttggcgtggtgacatggtggcataacc

SEQ ID NO: 6608 - DNA, 374 bp, Oryza sativa
  Clone ID: uC-osflcyp172h05b1
cttataagttaataactgggttgagattttatcgagttaagagtttcctttgtgttttggagtcttttcctcttctttacccttctcatggaggtgcaggagcatacgccgtgtgctgctactgcagacttgtccactgctatatggaaccactgctggagttgcagaacgttggtgccatgccatgcagggcatttgttagtgtattgctgtagactagatacattttcgatgtaggcggtaacatggcaaacagtattgtgctgctttcagtatatttcttttttttggccaaatttgtttatgcatgtaaaagcaattctctcaacattgtatttgaacagtttggtcgaattagccgatcattcttatgt

SEQ ID NO: 6609 - DNA, 480 bp, Oryza sativa
  unsure (1)..(480): unsure at all n locations
  Clone ID: uC-osflcyp172h06b1
ctcggataaaggccgctccccaccaccaccaaaccaggacaaatcctcctcctccccgtcctcggcggctgatccccacccgtctccctccaccagcgcgcgcgcaattcccccccccccccacccatcctgcgtgcgctccggcctcgaggagattcagagcctacgtaatcacttagaaatggatagagggcgaaatggaagagatgacttctttggtgggagggacccgtttgccggattcggtggctttggtcgccagaggagcttgatctctggtgtctttggaggcagggatcctttcgatgatccgttctttaatcagccatttggaagcgggatgcacggtcctagcctttttgggccaatgggaggaccatttggagacataaggaatgatggattccttgagcaagctcctnccaaaggtaatggcaggaagcttatattactgagcttgatgaggaggaaggagagaac

SEQ ID NO: 6610 - DNA, 477 bp, Oryza sativa
  Clone ID: uC-osflcyp172h08b1
tcggtttctcacgtctctcgctgccgccgccgccgccgccgccgccgcgagaagccgtaggaggaggagagagagggagggatggcggagaagaagcagcgccccggcggcgcgaggaaggacgaggtggtcacccgcgagtacaccatcaacctccacaagcgcctccacggatgcaccttcaagaagaaggctcctaatgccatcaaggagatcaggaagtttgcacagaaggccatgggcaccattgacgtcagggttgatgtgaagctcaacaagcacatctggagcagcggtatccggagcgttccaggcgtgtccgtgtcagaattgcccgcaggaggaacgacgaggaggatgcgaaggaggagctctactctctggtcactgttgctgaggttccccaagaggggttgaagggcctgggtaccaagcttgtcgaggacgatgagtaaatatgcctaggttttgatctta

SEQ ID NO: 6611 - DNA, 408 bp, Oryza sativa
  Clone ID: uC-osflcyp172h09b1
tcgctctcttctcattcaattccctgctcacctcgatcgagtagctgctgctgctgtgctagcttgctcgccggccggtgaggtcgacgatggagctgcacagatgctctctcctcgctctgctcctcgccgtgacatgctcggttgcagtggcgtatgatccgctggacccgaaggggaacatcacgataaagtgggacgtgatatcgtggacgcccgacgggtacgtggcgatggtgacgatgagcaactaccagatgtaccggcagatcctggcgcccgggtggacaggggggtgggtcgtgggccaagaagggaggtcatctggtccatcgtgggggcccaggccaccgagcagggcgactgctccaagttcaagggcggcatcccccacagctgcaagcgcac

SEQ ID NO: 6612 - DNA, 235 bp, Oryza sativa
  Clone ID: uC-osflcyp172h11b1
tggtgacgccgacgccgacgggaagcaaatcgatggacggcggcggcggcatgttgggcgccgtgttgtgcttgctgctggtcttcgccatcttccccctcctcctctggcgccggcgctccgatgccgaccaccgcctcccaccccagccgctccaggacgaacgtgtgctccgcggcggtccctctcccggttcggtggcgcgcctcatgctccggaggcctcttctcacttt

SEQ ID NO: 6613 - DNA, 514 bp, Oryza sativa
  Clone ID: uC-osflcyp172h12b1
ttgctttagctcaacaggtggctcagcgacgaggaggggccgcacctgaaggttgctgccattgttggacctgcagggattggtaagacggcacttgctacagagttgtaccgtgaccgtagatggcaattcgagtgccgagctttcgtccgggcgtcgcgaaagcctgacatgcagcggcttcttgggggtattctctctcaagttcagcgtcgccaacgatcgtctgatgcctacgctgacagcacggtgcagagcctcattgataatctccgggagcatctccaagataggaggtaccttattataattgatggtttgtgggagacggcagtatggaatattgctaacagtgcttttccagatgttaacagtttcagtagaatattaataactgcggatatcgaacaggtagctctggaatgctgcggttacaagtatgattatattatgaggatggaacctcttggcagccttgatttcaaaaagttttcttaataaagttttggctccg

SEQ ID NO: 6614 - DNA, 532 bp, Oryza sativa
  Clone ID: uC-osflcyp173a02b1
ctccgtctctctctcccctcttcctctcctccgcgcggcgaacgaagcgagcgagcggcggccatggagcggctgcagcggatcttcggggcgtcggggatggggcagccgccgacggactcgccgctgctcgactcctccgagcaggtctacatctgctccctcgccctcctcaagatgctcaagcacgggcgggccggcgtgccgatggaggtgatggggctgatgctcggggagttcgtcgacgactacaccgcaggggtggtcgacgtcttcgccatgccgcagagcgggacgggcgtcagcgtcgaggccgtcgaccacgtcttccagaccaacatgctcgacatgctcaagcagaccgggagaccagaaatggtggtgggctggtatcactcccattctggatttggatgttggctttcaggtggtgatatcaacactcagcagaggtttgaagctttaaatcccagggctgttgcagttgtgatagacccaatccagagtgtcaaggggaaggtggtcattgatg

SEQ ID NO: 6615 - DNA, 513 bp, Oryza sativa
  Clone ID: uC-osflcyp173a03b1
gggtgagccatgggcgacgacggtggtggtgatggcggcgcctcctccgcgggattctcctacttcgccgtcttccacaactaccccctcgtcgccgccttgctgggcttcgccgtcgcgcagtccatcaagttcttcgtcacccggtataaggagaacagatgggatcctaagcagcttatcggttctggtggcatgccatcgtcacattctgccacagttacagcactagctgtagcgattggcttccaagatggttttggctgtgccctatttgcgacagcagcaatattcgcaagtgtggttatgtacgatgcttctggtatcagattacatgctggaaagcaagcagcggtgttgaatcaaatagtctgcgaacttccttctgaacatcccttgtctgaaacaggaccattgcgtgaactcttaggccatactccaacccaggttgttgctggagctttgcttgggtctatgctagcaacagcagggcaaatggtccttgtagtatca

SEQ ID NO: 6616 - DNA, 426 bp, Oryza sativa
  Clone ID: uC-osflcyp173a06b1
ctttgttcctttcattttttctcctcttactctctctcttctcaaaaagtcacgagagatgccgagggcgaggcgtcgtcgccgtcgccggcagccacacggcgacatcggcggtggggcaaggtggtgcatgcataggtaggaggtgctgaacctcgccggcggccacaagatggcgatgaggcaaggcggcgcgagttagggaggaagcactggacctcgtcgatggggggcgtggtagggaggaggttatggacctcgtcggcgtccacgggacaggcaacgcaggattagggaggagtcgcggtggcttgcagccggtcgccggaattgctatactccggccgccgtcgtttctagcccgggatccgtgccggcctttctccgccgtctcgtcactcgtcttcgccaggcgtgctgtggcgc

SEQ ID NO: 6617 - DNA, 389 bp, Oryza sativa
  Clone ID: uC-osflcyp173a07b1
attggtggttgtggattactggtgcaataaaggcgacgaacttggtaatatagggcatatggactaacatgtacaaaagtactaaagggaggagggctagttaggagtgaagagactggaggaagacaagttctacttgaaggtgatggatgtatgacacgcaaagtacatgtgggaaacagcgaccgcaacaagagaactgtaacacaacctggactgtgactagatgctgctatggattaaatactgcatgttgatgacagataaagatattgaagctactggggagcagtatctttggttgcagatggcgcggcggagcaacgacgtgatcgaggaggcgcggagcaagctcctggagaagcggcagtgcagtagggtgaaggcgc

SEQ ID NO: 6618 - DNA, 420 bp, Oryza sativa
  Clone ID: uC-osflcyp173a08b1
atctcatctcatcatcagcaaccaattcgcaccgatcgatcgatcgatcgatccagcaactagatcaacagtactagctaggaagcatggcccgtgcacagttggtgttggtcgccctggtggcagctctgctcctcgccgccccgcacgccgtcgtggccatcacctgcggccaggtcaactccgccgtcgggccctgcctgacctacgcccgcggcggcgccgggccgtcggcggcctgctgcagcggcgtgaggagcctcaaggcggcagcaagcacgaccggagaccggtgcaccggctgcaactgccttaagaacgcggcccgcggcatcaaggggctcaacgccggcaacgccgtcagcattcccttcaagtgcggcgtcagcgtcccctacaccatcagcgctttcattgact

SEQ ID NO: 6619 - DNA, 255 bp, Oryza sativa
  Clone ID: uC-osflcyp173a11b1
tgcccccaccctatctacgctggcagaactgcttagctggccacgctggatagatggggattcgctgacgaagtggactactttatactatggcagaaaacatgaagttagttgcaggaaggcagtccgtagctaataagatcactggagagctgggggagtcccaacatgtggacgatgatctatgagagatgtctggcagcaagcctatggtgcacataacactatctgacactgggcgaaccgtttacacta

SEQ ID NO: 6620 - DNA, 250 bp, Oryza sativa
  Clone ID: uC-osflcyp173a12b1
ggaaacaaaaacatatgaaagtgcaagtgctctgtccttggccacatttgcctcccttctaatcgagtttgttgcccgactacagaatgttgttaatgcatttcaagagttgagtgataaggctaacttcaaagagcctgtgcaggagcctgttgcagttagtactagtgatggcggctttctccataaaatatgcaaattcgtcggaatcaagagttaacatcgcaaatgaccctactagtttcatctg

SEQ ID NO: 6621 - DNA, 521 bp, Oryza sativa
  Clone ID: uC-osflcyp173b02b1
ctcgactcgaactcctcctccgacaacgtaccaaggagcaaggacaaaatagcaacatctgaagataaggaagatctgaaaagctctacgagccagacttatcaaccaagccaattaggtgaatccaaagccaacatcgggatgatgagccttggtggggcaccagccggcttccacaacgaaggcaaccaggatgacagcttcatgaacctaatgctgaaggaccaaaggccgggcgaagccgaaggcagcctcctccatgatgccgtcgcccatcattccgatgagaacgctcggttcatggcttaccatttgtcggggctcggaagatacgggaacagcaatgtgtcattgacacttggcttacagcatcctgacaacaggctttcggtacagaacactcatcagccaggtttcgccggtgctggagaagaaatttacaactccaccgcttctctcggtgtcgctgcagcttcctcttcggactacgaatccacgaaccaaatagatcaaaggcaacg

SEQ ID NO: 6622 - DNA, 448 bp, Oryza sativa
  Clone ID: uC-osflcyp173b03b1
gaaaccaagagggggcgtcgccggagtcggagtcggagacgtcacggcgagctccgcggcggcgatggagagctccctgggcggctggccgtcctacaacccgcaaaacttcagccaggtcgtccccgccgacccctccgcgcagcccttggtcggtcagcccctctgtgactctgtcccccctcactcgcgatcgatctctgtgcttagctgtcgtgatctcatgcctccgaccgccaagtacaattcagaattaggttgattgtgttgatgatgccatgaattgtgtgcctgatccctcacgccggagctttacctctagtcagtcctattgtgtgtcagagcgtgtgtctgaaattccagtgcgcatgattaacaaaaggtggttagtactatttggttctaagtcccaatgccaaatagttggatcataatatctcatttggga

SEQ ID NO: 6623 - DNA, 529 bp, Oryza sativa
  unsure (1)..(529): unsure at all n locations
  Clone ID: uC-osflcyp173b04b1
tctcacttggatacagttttggagaagctgaagaacatattggagaatgcaggacagagcgctctccaaaggttcctatcacttttctcattgggagcaaaagttgaggatgttgatgacacatatgcagccctggcattgatgtatggatatgctgcaaaatatgctccatcaacagttattgaagccaggatcaatgcacttgtggggactaatatgcttggaagatttcttcatgttcaacatcctactgcaaagcaagctgtcattactgccattgaccttttaggccaagctgttattactgctgctgaaatggggatttcattcccactgaaacgaagagaccaattgctggagtatgtgctaacgctaatgggaagagatcaaaatgatgaccttgttgatttcagcactgagcttctgcacactcaaagtctagctttaagtgcctgtactactctggtttcgatagagccaagattacctatggaaacangaaaccgtgtgatgaaggcaacactaggat

SEQ ID NO: 6624 - DNA, 508 bp, Oryza sativa
  Clone ID: uC-osflcyp173b05b1
gggcgcgctcggctgcgtcttcccggagctcctcgcccgcaacggcgtgaagttcggcgaggccgtgtggttcaaggcggggtcccagatcttcagcgagggggggctcgactacctcggcaaccccagcctgatccacgcgcagagcatcctggcgatctggggttgccaggtcgtgctcatgggcgccgtcgaggggtaccgcgtcgccggcggcccgctcggcgaggtcgtcgacccgctctaccccggcggcagcttcgacccgctcggcctcgccgacgaccccgaggcgttcgccgagctcaaggtgaaggagatcaagaacggccgcctcgccatgttctccatgttcgggttcttcgtccaggccatcgtcaccggcaaggggccactggagaacctggccgaccacctcgccgaccccgtcaacaacaacgcatgggcctacgccaccaacttcgtccccggcaagtgagtgtggatcttcggcgagcaacggcggtga

SEQ ID NO: 6625 - DNA, 476 bp, Oryza sativa
  Clone ID: uC-osflcyp173b06b1
ccatctcctcctcgtcgtcgcggcgcgcgagctagggtttctcgactcgccctcgccgatccggtcagccatgtcgaagcaaggagggaaggccaagcccctcaaggcgcccaaggccgagaagaaggagtacgacgagagtgatctcgcgtatctgcagaagaagaaagatgaggaaaaggcactgaaggagcttaaggccaaggcaggacagaagggtgcactgggaggctctggtctgaagaagagcgggaagaaatgaggctgataccaatctgtaatgcctgaaaaatgataaaccagctacctgtctgtgttacttcactatgtgcggatgtaacaaaactacctttaagcatgttatgcattaagcaatgttgcagttggttgcttgatccgaagatgtttcgggctctcttctgctagctatgatacatctggtcccgtatgatgataatataacataactcatggtg

SEQ ID NO: 6626 - DNA, 533 bp, Oryza sativa
  Clone ID: uC-osflcyp173b07b1
gtcccagctgctcggctcctccctcgcctgcctcctcctcgccgccctcaccggcggcgaggaggccgtcccggtgcacgcgccggcgcccggcgtcggcgcggcgcgcgccgtggccatggaggccgtgctcaccttctccctcctcttcgccgtctacgccaccgtcgtcgaccggcgccgcgccgtcggcgcgctcggcccgctcctcgtcggcctcgtcgtcggcgccaacatcctcgccggcgggccctactccggcgcctccatgaacccggcccgctccttcggcccggccctcgccgccggcgaatgggccgaccactggatctattgggttgggcctcttataggtgggcctttggctgggctggtttatgagggcctcttcatgggcccgcccggccatgagccgcttcctaggaatgacggcgacttctaagttaattaggccttaataataactttgatctcgagctagtaaaaataatgaatgtatgagaagtgattggtttttaggtgcatgtaatttc

SEQ ID NO: 6627 - DNA, 534 bp, Oryza sativa
  Clone ID: uC-osflcyp173b08b1
atcaaggccgtcctcctcaacgaccaagaaaagtcggaggcgacgttgctcgagctgctccggcttctgcaacagctggagttcacggtggacaccttgacggttactgagattgggattcatgtagccgtaagaaactataaaaccagccatctccttgcttagcacaacatattgcttttctcctaagcataggtggcctaaagatgtagcttgccatccagatggttaattaatttttgctgtgtacagtgctgataacggcgactctcaagtttcagtgatgaatcgtagcatatcaggacaaaaggctagcatgattggtaggaaggaaagaaaaaagggagtgcaggctagaatgctagattattcagtactaatgtttaaacatcaccacccagtcttctctggggtgtacatgtggtcgtcagattgctcatcacattattatagttccatgatacatgccggttatctttgttgttatagtgagtgtaaaggtgtgcaaacgggaaatgagaagcgctgtcagca

SEQ ID NO: 6628 - DNA, 532 bp, Oryza sativa
  unsure (1)..(532): unsure at all n locations
  Clone ID: uC-osflcyp173b09b1
ctgagccgtagccagtgccaaaaccggaaccgaagccggaaccaaaaccggagcccaaaccaaagccagagcccaaaccacacccagaaccaaagcctgatccgaaacctgagcctaagccacacccagagcctgagcctaagcctgaacctaagcctgagcccaagccacaccctgagcctgaaccaaagcctgagcctaagcctgagccaaagccagaaccaaagccggagccaaaacctgaaccaaaaccaaagccaaagccagagccaaagccaaagcctgagcccaagccataccctgagcctaagcctaagcctgaaccaaagcctgagcctaagcctgagccaaagccagaaccaaagccggagccaaaacctgaaccaaaaccagagccaaagccagagccaaagccaaagcctgagcccaagccacaccctaagcctgagcctaagtctgagcccangccagaaccaaagccagagccaaaacctgaaccaaaaccagagccataaccagagcctgaaccgaa

SEQ ID NO: 6629 - DNA, 439 bp, Oryza sativa
  Clone ID: uC-osflcyp173b10b1
ttctgtgtaccagagtatgagcagacaggattaaggtctggcagtttttcccctggatctggtgcagaccaagtatcaagctcagaaagtccatcggaatctgaagaacaagaacatgtacaagaaccagttcaacttgttgttgaagatgactcattgcgtgctggacatgatgaggtagatgtggaagcaagatcttcacaactcaatctttccacattgacagccgagatatccttgccaccatctgaggatagcgtagaaatgaatggcgaagaggttgagaacgatgatggtcttgggttggttcagagtgatactccacttgcacctgttgatggccaaaatatgcagagtgcctcaaatctgactgcgttttcaacatatggtcatgaagaccctaatatgcatccaagtaatgaggcacagttatacagac

SEQ ID NO: 6630 - DNA, 365 bp, Oryza sativa
  Clone ID: uC-osflcyp173b11b1
ctccgtccagagcaagaagctcatctcctcctactttcgcatggcagccatggccaccaccgtgtccagcctcctcaagaccttcttcgctggcgcgcgcctccccgtcgccgcccgcaaccccaccgtgtccgtcgcgccgagcaccgtcggcgccatgtgcaactccatctcgtgggcgtcgtccactcccccctacgacctcaacgccatcaggttcagccccatcaaggagtccatcgtgtcccgcgagatgacccggcggtacatgaccgacatgatcacctacgccgacaccgacgtggtggtcgtcggcgccggtttcgcggggctcttctgcgcgtaccagctttccaaggacccct

SEQ ID NO: 6631 - DNA, 509 bp, Oryza sativa
  Clone ID: uC-osflcyp173c01b1
gcgccacacccctggaggaatgggaaggtagaatgaacgtggggatgtcaaattcagtgacgactgcgataagggacagcataagggagacggcaattgggaaaacatggaacacagagaaggctgatcgtgctacagtagaacaggctattgatccaagaacacgcatggttctgttcaagatgttaaaccggggggtttttaataccataaatgggtgcatttctacagggaaagaggcaaatgtctatcatgcatcaaaggctgatggccaggagttagcgatcaaagtctataaaacatctgtccttgtttttaaggatagagaccgatatgtccatggagattaccgctttagacatggttactgcaagcataatcctcggaaaatggtgaagacctgggctgaaaaggaaatgagatatcttttacgagttggagcagctggaatccgatgcccaaaaccattgctcctgaggcttcatgtactggtgatggaattataggaa

SEQ ID NO: 6632 - DNA, 514 bp, Oryza sativa
  Clone ID: uC-osflcyp173c02b1
gtggatgttctccgtgaccacagtgaggatgtacgcactgtgttccttctagcatcagtaaatctgatatttactggtggtaatgactctgtgatccgaatgtgggacttggaggaagggcttttgattgataagtcccgcccactttgttgcaccatccgggccattgcagctgacactaggcttttggtcactgcaggaaccaatgcctttattcattgttggagggctgttgaaggtaattcttaccctttccacatctctgggaatggcactgaccagagtcctgagtttcgcctttgggggcatgaaggacctgtgacttgtcttgccttggattcattgaggattttcagtggtagctgggatatgactgtccgtgtttgggacagatccgaaatgaaatgtgttcaaaagttcatgcatgcagattgggtttggagcgtggcacctcatggaaatactgctgccagtacaggctgtaaggatgcctatgtatgggatatcaagagtg

SEQ ID NO: 6633 - DNA, 522 bp, Oryza sativa
  Clone ID: uC-osflcyp173c03b1
ctcgactcaagtgaagagtccgccgcctttccctcctcgccgccgctcggatggggatggcccccgccggtcgcctcctcctcatctcctgcctcctctgtgtgcccaattcatttggatttgcatttgctgtggaggaggaggaggacggcagcgggctgatgccacagctctcacccaccggctctcccaaccccttggttcccttcctcgcgcccgcccctctggcgccattcttcaacaccacccctcctaacttgtcaggcaagtgctcattgaattttactgctgtcggtgacctcatcaccaccactgctgtcgactgctttgcgtccttcgccccgttcctcgccaatgtcatctgctgcccccagctccaggccatgctcaccatcctcattgggcagtccagcaagcagactggctcccttgctttggatcccaccgtcgctacctactgcctctccgatgttcagcagctattgttgagccagggcgctagtgatgagcttcacaacattt

SEQ ID NO: 6634 - DNA, 357 bp, Oryza sativa
  Clone ID: uC-osflcyp173c04b1
ggtgtttggcaacacaccaggtgttcagggattagtgattttgatgatgtccctgagaagttcatctgcaggaagtgtgctagtccacgcagaggaaagggtcgtggtggtggaggtggcaatggtggtagcagaatggatgtgagcgctgcagggaggtgcaaggatgagataggatcatctgttggcggtgcaggcaaatttgggcgcatggcaactgttggatgactgtacataatgtgtgaaatgtaaatactgaggggagagtggggagtagcacctgaggcctgtgtgaaccttcatggaatcttgtctttctgaccagtgatatgatgttaatctatcctccttggaagc

SEQ ID NO: 6635 - DNA, 489 bp, Oryza sativa
  Clone ID: uC-osflcyp173c05b1
ggcaggtggagaccgggaggcgcgacgggcccgtgtctctggcgtccaacaccggcgcgctgccgtcgccgttcgccgggttcagcacgctcctccagagcttcgccaaccgcgggctcaacctgaccgacctcgtcgcgctctccggcgcgcacaccatcggcaaggccagctgctccagcgtcacgccgcggctgtaccaggggaacaccacctccctcgacccgctgctcgactccgcctacgccaaggcgctcatgtcgtcgtgccccaacccgtcgccgtcgtcgtccaccatcgacctcgacgtcgccacgccgctcaagttcgacagcggttactacgccaacctgcagaagaagcagggcgcgctggcgtccgacgccgcgctcacccagaacgccgccgcggcgcagatggtggcagacctcaccaacccgatcaagttctacgccgcgttctccatgtccatgaagaagatgggacgca

SEQ ID NO: 6636 - DNA, 486 bp, Oryza sativa
  Clone ID: uC-osflcyp173c07b1
tggacgcgtgggaaaaacccctacattcctccctcttctttgccgcggcgccgacatcgatccatccctaacaaataacacgatgtcgcgcgccacggtcgccatcctcttctacatcctcacagccgccgccgccatcagcgcggcggcgcaggccccagcggagtcgccatcgaagagcacggcagctgccacccctgcaaaggcacccaccgtcgcatcggcaccgaggaaggccggaccagctgccgcgccgacgaccaccgtggctacctccgcgcctgctggtggcgacgaggtgtccatcccccctacgccgttcgccaccgtggtgtctcccgtcgccgatggacctgccgatgcggctgaccccgatttctcggtgccggtgctctcagaggtgcgctgccgttgccgtgtcgcggctgccattgccaccgtaccttctacttaagatgccgatgcagagatgtggagtgtcatggt

SEQ ID NO: 6637 - DNA, 440 bp, Oryza sativa
  Clone ID: uC-osflcyp173c08b1
tcgaattccattcctcgcgattcctctcccctcggctcctcgtgctccccctcccaggggatcgccggagaggaatcgcgcggaggaaaaaaatagaaaagggcttccccgtcgtctaagttaaaaggaagccatggagcacaaggagactggatgccagcagccagaaggcccgatcctttgcatcaataactgcggcttctttggcagtgcggctaccatgaacatgtgctcaaagtgccacatggagatgataatgcagcaggagctggccaagctggcagcctcctctatcgacagcattgtcaatggtggtgattccggcaaggaaccaactattgctggtcacgctgaagtagctgttgctcaagtcgaggtgatgacgcttgttgcgcaccctgctgagattgctggtcctagtgagggggtcacggcgaacc

SEQ ID NO: 6638 - DNA, 509 bp, Oryza sativa
  Clone ID: uC-osflcyp173c09b1
atggtaaaaacattaataagaggagattacatgggacaagagagagagagagagagtgagagagagagagatgggttcttgcgcttcggttcacaaggacctcgggttccccaagaagctgtttcttgcgtcgtcgcctaccaaggagaagaaggccgcgaacgggaagggtggcggtggcggtgtgtctgttgatctcaagcgaaaggagcagcagcaggcggcggcggcaggggttggcgtcaggagccccggttctggtagcaaggatgaaatgttctttgactcgcgggcatggttagattctgattgcgaggacgacttctacagtgtgaatggagattttactccgtctcgtggcagcactccaaactaccaacccagaacacaaacagttatgagcaatgtctttgtacctgataatgtacagaattccaaatcacctgaaccttctccaactggaaggagaaaactagccgagctcttgcaggaggcgatgcagaatggtt

SEQ ID NO: 6639 - DNA, 466 bp, Oryza sativa
  Clone ID: uC-osflcyp173c10b1
gggaaacccaagtttgagattgaggaggtggaaccttccaagaagcgggggtatttgacaaagaagcgattgaagcttcagaggaagagggaaaagaagaagaggaaagaggccaataaaaatgatccacggcgtatcagacccaagggaaagaagataaaacagaaatttcctacacctgaagctcgactcaaatacaagattgagaaggccaaattgaaagaagctatgttggttgagaagttaaagaagtatgagattgctaaagcacaaggccctatggctaaacaagatgatcttgatggcgaggaaagattttatttgaagaaggtttctcaaaaaaagtcaaattatgtccctgttggaaggagaggagtctttggtggtgttattctaaacatgcatttgcactggaagaaacatgagactgtaaaagtcatctgcaaaccctgcaagccagggcaaa

SEQ ID NO: 6640 - DNA, 427 bp, Oryza sativa
  Clone ID: uC-osflcyp173d01b1
cattgccggcctggatccggttaccgaggggcagctgccattaaccgctgggaacgttgagtctgctctagatcaagtgcgcccttacctgacggaagatggaggggatgttgcccttcatgaaattgccgggaatgtggggaggctgcagcttcaaggagcttgtggatcgtgcccaagctcgctgatcacgatcaagaggggcatcgagcgccgtttgatggagaaaataccaaatggtgctgctgttgaacctgttacaaataaggagactgggcttgagctgaatgaatagaaggctgacaaggttctcaacgaaatcaggccataccttgctggcacgggaggtggtgggctccactttctcatgatcaagggccccattgtgaaagttcggctcacaggccctgctgcagttgtgaggact

SEQ ID NO: 6641 - DNA, 503 bp, Oryza sativa
  Clone ID: uC-osflcyp173d02b1
atggtaatgcgtgaaatgttttggtactatcagtcaccgactcatggtgctctctaatttgacagcaaaatttgttgctgaacaggactacttaattgctatgatctaattcttactatttcgtatatgatctaattcttgatcatctggtgtggcactttattctaaatttttgaagcgcctatgtgttcactccctttattttgttgttttcaaaggtaaaactccatcatatttttctgattgttatgtcgttttcaattgttatgtttcaatgtgtagcttaaaggatataataaatactttggttgcagtagatagtttttactaattaatgttcatgcttgcaaagaaaaaaaatatgttcagttctgctaagcagaacaaagaggttgactctatatagaagaacatagaggaatgcatgtgtgttttcacagtgcatgagaaaatcagtgagaaagttcagccatcttccagtggtatcattgattgctctaatg

SEQ ID NO: 6642 - DNA, 464 bp, Oryza sativa
  Clone ID: uC-osflcyp173d04b1
gctgctcatcaccatcaccctcatgctgctctgcctgctggaggtgaagtggtccgggatcgggctggaggagtggtggcggaacgagcagttctgggtgatcggcggcacgtcggcgcacctggcggcggtgctgcagggcctgctcaaggtggtggccgggatcgagatctccttcacgctcacggccaaggcggtggcggaggacgacgacgaccccttcgccgagctctacctcatcaagtggacgtcgctcttcatcccgccgctcgccgtcatcgggatcaacatcatcgcgctcgtcgtcggcgtgtcgcggacggtgtacgcggagatcccgcagtacagcaagctgctcggcggcggcttcttcagcttctgggtgctcgcgcactactacccgttcgccaagggcctcatgggccgccgcggccggacgcccaccatcgtctacgtctgggccg

SEQ ID NO: 6643 - DNA, 411 bp, Oryza sativa
  Clone ID: uC-osflcyp173d05b1
gccgacctcgccgcctaccgcggcaggctctactacgagggcatgatgatgtcgcagccgccaccgtcttccacggcgtcggcgtcgtcggcatcctcctccggcgccggcgcttccgacttcaggagcttcccggcgctgcacgaggatctggtggacaacatgttcttcatctgacgacagcctttcgtcgcatggtccggtggtctctctctgttcttagtttacctcttactgcgtggagtctcaggtcatagactcattagtcacagactcacaggttgtctatcttttgacttttgttgaccgtgtcgtcggtcttggtagttggtagtcttatacatactgttgaggctgcattatggttgcacaagaaagtttaagagtactatactggtactctgtattttg

SEQ ID NO: 6644 - DNA, 487 bp, Oryza sativa
  Clone ID: uC-osflcyp173d06b1
ccgaccccaagcgcaacgcccgcgactcccacatcccggtgttggctcctctcccaattggattcgcggtgttcatggtccatctggccaccatccccatcaccggcaccggcattaacccggcgaggagcttgggagccgcggttatctacaacaaggacaaggcctgggatgaccaatggatcttctgggtgggccccctgatcggcgccgccatcgccgccgcctaccaccagtacgtgctgagggccagcgccgccaagctcgggtcctaccggagcaacgcctgagatcggcggcggcggcgcgcgcgaggtggcgctgaagtgtagatacgcgtacaagatggccgcctcggtccagcactagatcaacgaattcagccttcgcatcctgcatttcgcctcgtggatagattctactgcactattatgtactatgtatccatgcatatggtctccattcctttgaactatgtccgccatat

SEQ ID NO: 6645 - DNA, 536 bp, Oryza sativa
  Clone ID: uC-osflcyp173d07b1
gtcgtccgtagcgggagggagggagagagtacgtgcggtcgtccggtggtctcagcgcacgcccgcggccgggccgtcgcgccgatcgcgatggggtcgtggcggcgcatggcctacggcgccctcaaggactccaccaaggtcggcctcgccaaggtcaacagcgacttcaaggagttggatattgcaattgtgaaggccaccaaccatgtagaatgccctcccaaggacaggcacgttagaaaaatattcgtggcgacctccattaaccgccctcgagcggacgttcaatactgcatctatgccttgtcaaggagattgtccaagacaaagaattggacagttgcattgaagacattgatagtggtacataggctcttgagagaaggtgatcctacattcaaagaagagtttctggcctactcatacaagggaagcgttttgcagagagcaaacttcaaggacgattcatgccaattagcttgggattgctctgcgtgggttcgcgcctacgcgctcttcctagaagaacggtt

SEQ ID NO: 6646 - DNA, 439 bp, Oryza sativa
  Clone ID: uC-osflcyp173d08b1
ctcctctcctctcctctcctcagatcggatcgcgagagccccaatcccaccaccgatcgatccattcctgctgctcgcggccaccggagaaggagagagagagagagctcgacctcgtcggcgggtgaaggatcgcagcagcagcagcggcggtagagcaggaggagaggcgaagatgtcgtcggtgttcagcggcgatgagaccgcccccttcttcggcttcctcggcgccgcctccgccctcgtcttctcatgcatgggggcggcgtacgggacggcgaagagcggcgtcggggtggcgtcgatgggggtgatgcgcccggagctcgtgatgaagtccatcgtgcccgtggtcaatgctggtgtgctgggtatttacggcctcatcatcgcagtcattatcagcacggggatcaaccccaaaggccaagccctacta

SEQ ID NO: 6647 - DNA, 357 bp, Oryza sativa
  Clone ID: uC-osflcyp173d09b1
gtcctgctggatacaggtgtgcccaagatgggctccatcgcatcaacgaagcatggctggacgtctatcgtctcggataagtacaggtaccagagctgaggcaggtaccctctctgggtgcacaccagcgtgatgttttatgagcgcgatgagacggagaacaacactgtgtttggtgtggacctgtgcgcgcacgtgattatgattgactttatcgagcaggacgatcttaagaagacacaagctcatatggacccagctggttgatccctcattctcatgcctcatgatctggctattctcactgtccagttgatcatgatcgacacgaactgaggtgtgactgcctcacgttgg

SEQ ID NO: 6648 - DNA, 506 bp, Oryza sativa
  Clone ID: uC-osflcyp173d10b1
gttgcgtttaaatctgctgaagatgcttcccgagctcttgccgaaatgaacagcaagatggttggcagcaaaccgctctacgttgcgcttgcacagcgcatggaagacaggaaagcaaggctgcaggcacaattttcacaactgaggcctgtcccacttgctccttcagttggtcctcgcatgcccatgtttccacctggtgttcctggagttggacagcaactgttctatggtcagccccctccagcgtttatcaacacacagcctggtttcggcttccagcagcctcttatgcctgggatgaggccaggtgcaggtccaatgccgaactttatcatgcctatggttcagcaaggacaacagccgcagcgtccggctggtaggcgtgctggtgctggtggaatgcagcaacccatgccaatgggtcagcaacagatgatggctaggggcggccgtggctatcggtatcctacaggacgtggcatgcctgatcctgcaatgcatgg

SEQ ID NO: 6649 - DNA, 525 bp, Oryza sativa
  Clone ID: uC-osflcyp173d11b1
gagcagcactgggtcttacattccaatggagctcgcctgttgctttcattacatgcttcgtgactttatttgctttggtcattgctataaccaaagatctcccagatgttgaaggggatcggaagtatcaaatatcaactttggcgacaaagctcggtgtcagaaacattgcatttcttggctctggtttattgatagcaaattatgttgctgctattgctgtagcttttctcatgcctcaggctttcaggcgcactgtaatggtgcctgtgcatgctgcccttgccgttggtataattttccagacatgggttctggagcaagcaaaatatactaaggatgctatttcacagtactaccggttcatttggaatctcttctatgctgaatacatcttcttcccgttgatatagagaccaagcaatctgatatggtctgcatgttgagtgcggcaaaaactagaagcccatatgaacagtgggagtaggggaacgaacatgccatccatgggaggactctgataac

SEQ ID NO: 6650 - DNA, 426 bp, Oryza sativa
  Clone ID: uC-osflcyp173e01b1
cattgtcggcctggatccggttaccgcggtgcagctgccattaaccgctgggaacgtcgagtctgttctagatcaagtgcgcccttacctgacggcagatggaggggatgttgcccttcatgaaattgccgggaatgtggtgaggctgaagcttcaaggagcttgtggatcgtgcccaagctcgctgatcacgatcaagaggggcatcgagcgccgcttgatggagaaaataccagatgttgctgctgttgaacctgttacagataaggagactgggcttgagctgaatgaagagaatgttgagaaggttctcaatgaaatcaggccataccttgctggcagggaggtggtggccttcagtttctcatgaacaagggccccattgggaaaggtcggctcacaggccctgctgcagttgtgaggact

SEQ ID NO: 6651 - DNA, 507 bp, Oryza sativa
  Clone ID: uC-osflcyp173e02b1
atcgccatctctctcagctgtgacagctcactgcatcaatggccgcggccaccatggcgctctcctccccggtgatggcccgcgcggcgccgtcgacctcctccgcgctcttcggcgaggcgcggatcaccatgcgcaagaccgccgcgaagcccaagccggcggcgtcgtcggggagcccgtggtacggcgccgaccgcgtcctctacctcggcccgctctccggcgagccgccgagctacctcaccggcgagttcccgggcgactacgggtgggacaccgcggggctctccgccgacccggagacgttcgccaagaaccgggagctggaggtgatccactcccggtgggcgatgctgggcgcgctcggctgcgtcttcccggagctcctcgcccggaacggcgtcaagttcggcgaggccgtgtggttcaaggcgggctcgcagatcttcagcgagggcgggctcgactacctcggcaacccgagcctgatccacgcgcagagca

SEQ ID NO: 6652 - DNA, 484 bp, Oryza sativa
  Clone ID: uC-osflcyp173e03b1
cgaacgcgaagcgcggcggcgagaaatccggcgacgatgagccgcggcacgggcgccggctacgaccgccacatcaccatcttctccccggagggccgcctctaccaagtcgagtacgcgttcaaggcggtgaagtcggcgggggtgacgtcgatcggcgtccgcggcaaggactccgtctgcgtcgtcacacagaagaaagtgccggacaagttgctggaccatacgagcgtcacgcacttgttcccgatcaccaagtacatcggtctgctcgccactggcctcacagctgatgcaaggtccttagtctaccaagcaaggaatgaggcagctgaattccgtttcaaatggggctacgagatgcccgtagacgtattagcaaaatggatagcagacaaagcacaagtctacacgcagcatgcctacatgaggccccttggagtagttgctatggtcttgggctatgacgaagagaaaaacgctc

SEQ ID NO: 6653 - DNA, 492 bp, Oryza sativa
  Clone ID: uC-osflcyp173e05b1
caccttctcccttctcctcgctcttccccctccgccgccgccgcagcggagcagcaacagcaggcgagcgacatgggagggtttgtcaagacccagaagacccatgcctacttcaagcgtttccaagtcaagttcaagagacggaggcagggcaagactgactacagggccaggattaggctcaccaaccaagataagaacaagtacaacacaccgaagtaccgctttgttgtgagatttacaaacaaagatatcacagctcaaattgtctatgctaccattgcgggtgatatcgtgatggctgctgcctactcccatgagctgcctcgttatggtcttgaagttggtctcaccaactatgcggcagcttactgcactggcttgcttctggctcgccgtgtgctcacgctccgtggtttggaccaggagtacgagggcaatgttgaggccactggggaggactactatgttgaaccagctgatgaaggaggc

SEQ ID NO: 6654 - DNA, 504 bp, Oryza sativa
  unsure (1)..(504): unsure at all n locations
  Clone ID: uC-osflcyp173e06b1
ctcctctcgcgccgtttcgctccctgaccctccgccgccgccgccgccgatcatcatgagtaagttgcagagcgaggttctcaaggaagccatctcccaggttgttggggaatccaaggagaagggcaggaagttcaccgagaccgttgagcttcagattggtctcaagaactatgacccgcaaaaggacaagcgtttcagcggctccgtcaagctgccccatatcccccgccccaagatgaaggtctgcatgcttggtgatgcccagcatgtcgaggaggctgagaagattgggcttgactacatggatgttgaggctcttaagaaaatgaacaagaacaagaagctggttaagaagcttgccaagaagtaccatgctttcttagcatcagaggccatcatcaagcagattcctcgtctccttggtcctggtctcaacanggcaggcaagttccctacattggttactcaccaggagtctcttggatcccaggtcaacgagac

SEQ ID NO: 6655 - DNA, 512 bp, Oryza sativa
  unsure (1)..(512): unsure at all n locations
  Clone ID: uC-osflcyp173e07b1
gcagggcgtccggctcggtcggcctgtcttacggcgctcactccaacctctgcattaaccagctggtccggcatggcagccctgcccaaaagctcaagtacttaccaaagctaatcagtggggagcatgtgggggcattggcgatgagcgaacccaactctggttctgatgttgtcagtatgaagtgcaaagctgagaaagtagatggtggttatgtcattaacgggaataagatgtggtgcaccaacgggccatctgctcagacactggttgtgtatgcaaaaacagatatagctgctggatcaaaaggaataaccgcgttcataattgagaaggggatgcccgggttcagtactgcacagaagttggacaagcttggcatgagaggaagtgacacatgtgagcttgtgttcgagaattgttttgtgccccatgaaaacgttctcggngaagagggaaaggtgtttatgtcatgatgtcagggcttgatctagaagacttgtgttagctgc

SEQ ID NO: 6656 - DNA, 496 bp, Oryza sativa
  Clone ID: uC-osflcyp173e09b1
gggccaaatcctcaaaatgatggtgagggagttctacaaggtttaccaccatcgccaccaccattatatcctatccattccgaggatgaagctgaagaaacgccctcagctatggacatcagtgagccaagtcaggagcttgaagtagcaaggggaacccggatgtttcatattaatgacctaaatgttcccccaatttggattgaaactccagaagaagaggaggatccagaagaacgagtgtttgagatgcaagaacatatttctatgtatgctgatgatcaaggagatgatgaagatccttactcatgctctgcccctaatactgctgcatcaacttctacacctcatgctgaatttttacatttcgcacctacatcattattcactaaccccgctgaggtagtggtgagtaatttgatgattaggagttgtagatagagtgctaatagttagaggtcatataaataaataaacttgctagtatagtttagca

SEQ ID NO: 6657 - DNA, 529 bp, Oryza sativa
  Clone ID: uC-osflcyp173e11b1
gccgtctcgccgcaatcgctcgctcggtcgcctcctcttccgccgcgagacacgaagagcagcagctcacaggtaggcctgcgcgtcggcggccatgggagacagccagtactccttctccctcaccaccttcagcccgtcggggaagctggtgcagatcgagcacgcgctcaccgcggtcggatccggccagacgtccctcgggatcaaagctgctaatggtgtagttatcgccactgagaagaaattgccttctattttagtcgatgaaacatctgtgcaaaagattcagtcattgactccgaacattggagttgtctacagtgggatgggtcccgatttccgtgttcttgtgagaaaaagtcggaaacaagcacagcagtattatcggttgtacaaggaaactatccctgttactcagcttgtccgagaaactgctgctgttatgcaggagttcacacagtctggtggtgtcagaccatttggagtatcattattgattgccggtacgatgacaatggcccacagc

SEQ ID NO: 6658 - DNA, 483 bp, Oryza sativa
  Clone ID: uC-osflcyp173e12b1
cctcctcctgcttcccctccggcgacggcggcgcagatctccggttggaagttagggtgttcatcttgacacaaaatcatgccgaaatcaaactgtaccgaagcgaaaataagatatggattagctctccttccaattgatttatcgttctgtcaatattgatccgaatacgaaaattttaagtgctgttattttgaaggtttcggaaccggaattcggaattgcagtagcagtggatgcctttataaatcaagttcttgtccttggcttcaaatactcgatgtgtttcttggctaatcctaatccctagctgcttgtgtgttgcgtgtgcaatttctgacccttttgtggtggtgtatatcaacagagaaatctctagctttttcagcggcgaagcgaatccatggccgagcacctcgcttccatctttgggcacgagaaagaccgcgtgaactgccccttctacttcaagatcggcgcgtg

SEQ ID NO: 6659 - DNA, 517 bp, Oryza sativa
  Clone ID: uC-osflcyp173f02b1
cactattggtaaagatggtgctcctgctggtgctgccgctcaattattgccgcgtccaaccacgccgattgtacatgggatcaggctatgagggtcatcataaatgacaaaaggtatggtgccctcaaaactctcgacgagaggaagcatgcttttaatgagtatctaaaacacatgaaaaagcttgaagcagaagaaagacgtatcaaacagcggaaggcacgtgatgattttttagctatgctagaagaatctaaggagcttacttcatcaacaagatggagtaaagcaataactatgtttgaggatgatgaacggtttagtgctgttgagcgtccaagggagcgtgaagacttatttgagagctatcttatggaactacagaagaaggaaagagccagggctgctgaagagcacaaaaggcacatagcagaatatagagcttttcttgagtcatgtgaattcataaagacaagtacccagtggagaaaagtttaagaacgtcttgaggatgatg

SEQ ID NO: 6660 - DNA, 478 bp, Oryza sativa
  Clone ID: uC-osflcyp173f04b1
caatagtcgaggtagacccccgcctgcttcctcctcctcctcgcgcttcgatttggtttggtttgattcggtttgcgagatgaaggatggtggtggaggaggagggagggggcagcagcagcagtggccttgcgactactgcggggaggcggcggcggctctgcactgcatggcggacgccttggccttcaagaggaggtggcagaacaagatgaacgcagccggcacgccatgcgacaagcctaacattgtcaccggcgccaatgtccaagtctgctgggagaagttcgcgcgatacttctaggttgagctcaaggaagtgaagctgagtgacggctactacgtcatggacccagctaaggccgcggatatggtcgacgagaacaccatctgcgtcgcggcgaacctccggtcgacgctgaacggggagttcgaggacgtgaagctgctcaacgatctgctcaccaagaagagacgc

SEQ ID NO: 6661 - DNA, 523 bp, Oryza sativa
  Clone ID: uC-osflcyp173f06b1
ctcctccacctcctcctcctccccccgatcggatcggcccggctcctcctcctccgccgccgccaccgccgccgcagataggagaagatggccgcacttgataccttcctctttacctcggagtctgtgaacgagggccaccctgacaagctctgcgaccaagtctcagatgctgtgcttgatgcctgcctcgccgaggaccctgacagcaaggtcgcttgtgagacctgcaccaagacaaacatggtcatggtctttggtgagatcaccaccaaggctaacgttgactatgagaagattgtcagggagacatgccgtaacatcggttttgtgtcagctgatgtcggtctcgatgctgaccactgcaaggtgcttgtgaacatcgagcagcagtcccctgacattgcacagggtgtgcacggccacttcaccaagcgccctgaggagattggtgctggtgaccagggacacatgtttggatatgcaactgatgagacccctgagttgatgcccctcagccatg

SEQ ID NO: 6662 - DNA, 402 bp, Oryza sativa
  Clone ID: uC-osflcyp173f07b1
caaaaccaaccaggaaaagagcctgtggacagcttaaacaaagaatcaggattcatacggaatccacatggacattcttcaatgatgccacacagctcaggttctatccctgtccaaaactcattgccacctgctccgccatctgcatcacagttacaggttcatgcgccaccagttcaagggtcagtgccaccaaatccatccattatgcatacaccgaatgctcctatgccttctcacaacactttgcctttaccccctatgcattcttcgggaaatccagctcattctttcatgcctttgagatcgttcgtccctcctcttcctgaaggcccttcaccccttaagccgcacacatcaagggctttacaagcgcaacctgcactttcctctggaccacag

SEQ ID NO: 6663 - DNA, 485 bp, Oryza sativa
  Clone ID: uC-osflcyp173f08b1
atcttcgtcttcgccggccagggctccggcatggccttcagcaagctgaccggcggcggagcgacgacccccgccgggctgatcgcggcggcggtggcccacgccttcgccctgttcgtggcggtgtccgtcggcgccaacatctccggcggccacgtgaacccggccgtgaccttcggcgccttcgtcggcggcaacatcaccctgttccgcggcctcctctactggatcgcccagctcctgggctccaccgtggcgtgcttcctcctccgcttctccaccggcgggctcgccaccggcaccttcggcctgaccggcgtctccgtgtgggaggccctggtgctggagatcgtcatgaccttcggcctcgtctacaccgtgtacgccaccgccgttgaccccaagaagggcagcctcggcaccatcgcccccatcgccatcggcttcatcgtcggcgcgaacattctcgtcggcggcgcgttcga

SEQ ID NO: 6664 - DNA, 532 bp, Oryza sativa
  Clone ID: uC-osflcyp173f09b1
gttcatgttctggttattcccggaaatccaggtatcgttgcattctacaaggactttgttgaagagctctatgagaacctcggtgggcaagcatctattacagcgattgggcatatttcacatagcaaaaaggatgcagagtgtggacgattgttttcgttgcatgaacaaattgatcacaaggtcgatttcattgagcaagaatttcaacattcggaacaatcattagttctggttggtcattcaattggtgcctacatatgcctggaaatcttcaaaagacttcagaagaaggtgaaactttgtgtaggactctatccatttttaacactcaacaagaagtccatgaagcaatcagctattggatatattgcaaggtcatctctcctaagtaaaggggttagctcatttgtttcttttatcggatcactccaagcttcagtaactaggggcatcgtgagaaggttacttggaccttcatggtctgtaacggctgtcgaagctacatgcggtcatctcttatggtaccata

SEQ ID NO: 6665 - DNA, 509 bp, Oryza sativa
  Clone ID: uC-osflcyp173f10b1
ctcatccaggcctccgtcaacaagaactacgtcgacatggacgagtaccccgtcaccaccgaactccagaaccgatgtgtgaacatgattgcacacctcttcaatgctcctctaggggactctgaaacggccgtcggagtcggcactgtcggctcgtctgaggccatcatgctcgccggtttggccttcaagaggaggtggcagaacaagatgaaggcagccggcaagccatgcgacaagcctaacattgtcaccggcgccaatgtccaagtttgctgggagaagttcgcgcgatacttcgaggttgagctcaaggaagtgaagctgagtgacggctactacgtcatggacccagctaaggccgtggatatggtcgacgagaacaccatctgcgtcgcggcgatcctcgggtcgacgctgaacggggagttcgaggacgtgaagctgctcaacgatctgctcaccaagaagaacgctgaaacaggctgggacacgccgatccacgtgga

SEQ ID NO: 6666 - DNA, 526 bp, Oryza sativa
  Clone ID: uC-osflcyp173f11b1
gcctgcgccgcgatcccacccacccggacgaggaggaggaggattttttccccctctctccccttcgctttcctggagcttgaaggatagggatcgaggaggaagaagacgaatcaagaagcaagcaagtactgtgttgcagcaagaagaggatagcaatggcaaaagagaacttagagagagagagagacagagacagaggagatagtatgagcaaaagcagttctcaactctgaacattgatagcttcatcttcatagcttgatagaattatatccgagcttgcaggcatgtacaagaaccagcttcaggagcttgctcagaggagctgcttcaatctgccatcctatgcgtgcatccgcgagggtccagatcacgcgccacggtttaaggccacggttaatttcaatggagaaacgttcgaaagccccgccttctgttctactctgcggctggcaaaacaagcggcggcagaggttgcgctcaatgagctgtcgaaaagagggccatcatcgtcacttgctgc

SEQ ID NO: 6667 - DNA, 524 bp, Oryza sativa
  Clone ID: uC-osflcyp173f12b1
atttcataagattgcatacagctttactccatggtaattagctctaatatatatttttttcatgcatacagtttactgcatgagctctatttgtttttcagataatgagctctaatatatgctcctacaaaatgcttaccttttccctccatgttaagtagctgtaccggtgttggttcacagcactggagagaagggctgcattctcaacaacaatgttggaatcttggtcaattctgtatgacacatcaatgccttctagatgaaggtggtagaccacgctagtggacgggtcaacggattggcgatcctcatcgttgctgcaaccgttgtcaattttgctgccgccattatcagtgacatcttttatggtcacatcatggggacggatccgctgagacagcgacctgatgtcccaggagagcacttccttgacaagatcctgaaactcatctgctgaagcgtagagtgattgcttttttacatgcatccagcaatcagaaagtgaagaaatgaagtgctca

SEQ ID NO: 6668 - DNA, 529 bp, Oryza sativa
  Clone ID: uC-osflcyp173g02b1
cagaatgctaagctaaagtgctaaactaagcacgagaaaatctaatcaaccaagcttagattagatcattagctatatatagctaggcgatttaatcatccacgagctagcttattagctaagcagtagcagcagcagaagatcgaagatggtgaaggagttcgtgcaggacgaggagaagcagcggctgctgctggacgagcacaccgagaagcacttcaccgccggcgaggtggtccgcgacatcatcatcggcgtctccgacggcctcaccgtgccgttcgccctcgccgccggcctgtccggcgccaacgccccctgcgccctcgtcctcaccgccggcctcgccgaggtcgccgtcggcgccatctccatgggcctcggagggtatctggcggcgaagagcgacgccgaccactaccaccgtgagctgcatagggagcaggaggagatcgacaccgtgccggacacagaggccgcggagatcgcggacatactgtcgcagtatgggctgggcccagaggagtat

SEQ ID NO: 6669 - DNA, 460 bp, Oryza sativa
  Clone ID: uC-osflcyp173g03b1
agctttagcgttggcaaggagagagagagaagagagagagagagagagagagagagagtaattaaggctgggaggataggcagcagcagcagcgagagggaaacgagcgagcgagcttagctggtgcttgcctataggtagctaagcaaaatggggcagaggaggaggtcggggccgcggcgtcagagccagagcgtggtggtggtggtggtcgccgtgttgctggcgacggcgtcctgcgcggcggcgcagctgagccagagctactacgcgtcgacgtgccccaacgtggagacgctcgtccgcggcgccgtcacgcagaagctcaaggagaccttcaacgccgcgcctgggacgctccgcctcttcttccacgactgcttcgtcagggggtgcgacgcgtcggtgctgatcgcggggcccgacgacgagcacagcgcggtcgcggacacgacgctgt

SEQ ID NO: 6670 - DNA, 534 bp, Oryza sativa
  Clone ID: uC-osflcyp173g05b1
gcttagcagaaggaagcgccctgatcgtatgaatcatgtgtggagcgtggtcgaaccccttgtaaagtctgcttcgctgccagtagaaccagaatccattggacattgggtgaataagaaccgcacgccattctacttcatatgcccaatttctcaggaggtcatgagggatcctcacattgcagcagatgggttcagttacgaagaggaggccatcaaaggatggctcggcagcgggcacaacacctccccgatgacaaaatcaactctggaacatcttcagctgatcccgaatctcgctcttcgttctgccattgaggaatttatgcagcagaagcagcagcagattccatcatagtaattagttcagtgaacttgattattcttagcttcataagttgtaaagttgatagctcattctttgttcagaagtctgctcgtgtagtgtagctgttttgttttgtgagcagcaacttacaataaatcgtgcatgctcatatgagcaggtgatgatcagctagcatatgtttgatg

SEQ ID NO: 6671 - DNA, 512 bp, Oryza sativa
  Clone ID: uC-osflcyp173g06b1
catgggtgccaaggtcaggctggagtgcaagcactttggcaccgacaaggtcgagcgtgcgattgacggtgtgactgatgagaccgggacatacaagattgagctcaaggacagccatgaggaggacatctgcgaggttgtcctcgtccacagcccccttgcaaactgctctgaaatcgaggccgaaagggatcgtgcccgtgttttgctcaccaggaatgtcggcatctgtgacaacctgcgcttagccaacccactcggctacctcaaggacatcccactgcccatctgcggcgcgctgctcaagcagttcgacctggctgatgatgataacgagtaatgcgatgatcgtcatggaaccaccggagaggctgcattaattataaatcagttacatggcttgcaaaatagcatggatgtatccgtaaaaggcagaatctaagcatatctgtccaaaaacatgaaaaatgtacatcttcattcatctaatgttacttacaaccttgtgactt

SEQ ID NO: 6672 - DNA, 534 bp, Oryza sativa
  unsure (1)..(534): unsure at all n locations
  Clone ID: uC-osflcyp173g07b1
atcctgttggattggagtataattccactaaagttgcctatctatcgtgtgttcttgtgttcttgtgatttgtttccctttttcctgcttaaatcagtgttgaatcttgtaagatcctgtcagccggctgcatcaaccccccacatcccggcctcccactagaccaccaccctcatcccgcggcggcctccatcgtcgactccgcttcccccgtgcgcagcccacatccacgccgacagtccgtcgcctacgccacgtctcgcaactggatccgctcctctccgtcgatctccaccacggtccctttcgcgccgcaccggaagctgcccgccagtcctctgatcgtcgctggatgctgtcggcgggtgatgcagtactcacccgtctcccctccatcagccgcaccggaagctgcccgccagtccttcgatcgtcgctggatgctgtcggcgggtgatgcagtactcacccgtcttccctccatcactgagggacattcccatcaacaaaaggtacacttggcngcatcactaa

SEQ ID NO: 6673 - DNA, 489 bp, Oryza sativa
  Clone ID: uC-osflcyp173g08b1
gctgcggcgacgaagccgtccatagattcttcttcctccccgtcactcctcaccaacaaccatcccccaccctccaagatggacgccgccgtcgaccgcctcaaggatgggttcgccaagttcaagaccgagttctatgacaagaagccggagctcttcgagccgctcaaggccggccaggcacccaagtacatggtgttctcgtgcgccgactctcgcgtgtgcccgtcggtgaccatgggcctggagcccggcgaggccttcaccgtccgcaacatgggcaacatggtcccagcttactgcaagatcaggcacgctggcgtcgggtcggccatcgagtacgccgtctgcgccctcatggtcgaactcatcgtgggtgattggccacagccgctgcggtggaatcaaggccctcctttcactcaaggatggagcaccagacctctttcacttcgtgaagcactgggtcaggaccggtttcccggccag

SEQ ID NO: 6674 - DNA, 479 bp, Oryza sativa
  Clone ID: uC-osflcyp173g09b1
gctgaaagaggagagcttactgaacttgttcttatggtcatatggaatcgacttgatgttgctcgccgcgatgatgagagggatgccatcagaagccttgatctcttatacagaagggtagagacggaaattttaaggagtgaagcaactcctgctatgagattgctcaatgaccttctgaatcttcatgatggatctgatgatgacaagtggttaaagaaatgtaaaaaacatatgcttgaagtttttcccagagaagacccgttcaccatggtctttcctgctggtttcaacatggaggaacatcaaggacagatcaagctgccacctcaggatgatgatgttcttctaagagttgatttcatcaggaagttgatgagctcttgaaggaagttcaagctgcacatgaaaacaataaggtcccaactggtaatgaccccgaagctgttgcgaccaagttgaagtatcaagagaagctg

SEQ ID NO: 6675 - DNA, 507 bp, Oryza sativa
  Clone ID: uC-osflcyp173g11b1
tgtggaaggaataaacatgatgagcattaatgacaatgacgtcaataaccattgtggtgctccagaagatggccgcttgttggatatagctagcacagcactcatgagtgatttacctacaggagacaagttcaaacctttaataggttcttcttcaggagatgggatgaatcttctgccacttaattcagatcagccagctgagccagtttcaacgacgcctaaggcaccctgtgtcacagacaaagatatgttcaatgatgggagcgtatatggagacttctgtgtggatgatgctgacctaacatttgagaattatgaagaattattcggtacctctcacgttcaaacagaacaactctttgatgatgctggaattgacagttattttgaaatgaaggatgtgccagcagatgaatctaatgagcagcccaaacctgtgcagccagaatgtagcaatgtcgcaatctgtgattctgggatgtcaaacccagcttgcagggctga

SEQ ID NO: 6676 - DNA, 530 bp, Oryza sativa
  Clone ID: uC-osflcyp173g12b1
gtgtgagagaaggggggaagaatggcgtcgcgcctcctcgcccgatccaaagccctagcgctcgccctgtcccgcgccgacgcggcggcgccggggcccgccgccggagtgcagtggctccgcacgctgtcctccctcccccgcgatccggccgccgccgcctcccccgcccccgcgccgcgccaacccgccgtggggtcccctctcggcctctccaagattccaggatatgaacagacatctcgactcagtggtacacaagtattgcctcgttggttttctactggaacatcaaatggatcttctgctcagcaggagggagccaccagaaaggtaatggcattcagcccattagaagcaagcatcgccaaacccagaaaaggtccattgacatctgaaagctggaaagtgaagcagacagagctactaacacgatctacgtattacatgatcccaactctgtttcttgtgtcaaagaacagcatcagtacgtctcttctggtcgcatcagtatttcatcaagtctacat

SEQ ID NO: 6677 - DNA, 538 bp, Oryza sativa
  Clone ID: uC-osflcyp173h02b1
cacgtgtccaccagccagcgaaagaaagcttttctccgatgttgcacggcttggctttgcgtctgcccaagactcgcctcctctaagagttgaatctggggatttgactggcaaaagtgaaagcacgggggaacaagggccagccgcaacacccgcattatcctttgccagcatcatttcctccactagagcgtcagacaatagcctggacacgcacaaaccaaatgtagtcgggaagaaaggcaagaaacccaccaaagtgctcttgtccactggcggtggccgccgatactgaaggaagagtgacactggaatggaagcagttgccagttggctgtttcctataagcagtgtgtatagtgcataacctggacttcacatctgtaacactcccaagtcccaagtagcagctttttctcccatgtggtttgatctaaatcgcctgactgttttagaaagtttttactgtgtatctacatcctgacccatgctaagggagtaagggtgactgccctgtcgcataagagaagagctatgt

SEQ ID NO: 6678 - DNA, 479 bp, Oryza sativa
  Clone ID: uC-osflcyp173h05b1
ctcgtctgcgccgccacctcctccaccttctcttcccctcccaaccatgacggcggccgagatcgggaagcaggaggaggagctccgcgcccagatcgaggagcagaagctcaacgagggagatgagccagtcgttgttgaagatgacgatgacgatgaagatgatgacgacgaggatgacaaagatgacgatgatgcggagggaggtgatgcaagtggaagatctaagcagagtcgtagtgagaaaaaaagcaggaaggccatggtgaagcttggcatgaagtctatcactggtgtgagccgtgttactgtcaagaagagcaagaatatcctttttgtcatctccaaaccggatgtcttcaagagccctacatccgacacctatgtcatttttggcgaggccaagatcgaagacctgagctcgcaactgcagacccaggctgcagagcagttcaaggcgccggatctgagcagcatgc

SEQ ID NO: 6679 - DNA, 528 bp, Oryza sativa
  Clone ID: uC-osflcyp173h06b1
tgctttggcaggaaggcgagaggaggaatcggaggtagctggacggcggcgaggcgacgacgagccggggtggtgcagcaagaacggcgcggcgagcggcggggaggagagattggatcgacgccgggtagttaggaagggagcttggagagatggcggcttccgcgaggcccgtcggcgtcggcggggagagggcgacgagcttcgccatggcgtgcagcctgctcagccgctacgtccgccagaacggcgccgccgtcgccgagctcggcctcggcatcagaggtgagggtgaggctccgagggcggcgccggcgacgatgagcttgctgcccggggaggcggagaggaagaaggagaccatggagctctttccgcagagcgccggctttggccagcaggatgccatcaccgccgattctgctgctgatgctagggaacaagagcctgagaagcgtcagctgaccatcttctatggtgggaaggtgctcgtgttcaacgacttcccagccgacaggcaaagggctt

SEQ ID NO: 6680 - DNA, 489 bp, Oryza sativa
  Clone ID: uC-osflcyp173h07b1
ttcgccttgcgtcccgcggccaccatcaccaccaccaccaccacccacctcctctcctcccggatccgagatccgatccggcggcgatggcgtcgacggcggcgaggcggctacgggagctgcaggggcaggcggggaacaagacgtgcgtggactgcgcgcagcggaacccgcagtgggcgagcgtctcgtacggggtgttcatgtgcctcgagtgctcgggcaagcaccgggggctcggcgtgcacatcagcttcgtccgctccgtcaccatggactcgtggaccgaggcgcagctccgcaagatggaggccggcggcaacgaccgcctcaacgccttcctcgccgcgcggggcgtgcccaaggagaccccccacgttgccaagtacaacttcaacgccgccgccgcgtaccgtgaccgcattgtcgccgtcgccgagggccgcccgtggaccgacccgcccgtcgtgaaggagacctccggatctg

SEQ ID NO: 6681 - DNA, 319 bp, Oryza sativa
  Clone ID: uC-osflcyp173h08b1
tggacgcgtgggcgcgcatccaactccggcgagaggaggaggaggaagaagaagatgtcttgctgcggaggcgccgaggaggacagctacggcccgccggcgaaccaggccgctccgccgcccaacgtcaatgctcccgggaatagaggcgggccgagagggccgggggcggcgcggccgggcgggccgccgaagccggtgaacatcgacgtgccggcgataccgttcgaggagctgaagaagatcaccagcaacttcagcgaccgcgccctcatcggcgagggcttctacggccgggtttacacgggacgcttagcga

SEQ ID NO: 6682 - DNA, 526 bp, Oryza sativa
  Clone ID: uC-osflcyp173h11b1
ggcgtcttcgtactcgcctctctccgcgccctcctccgccgccgctcgccgccgttcgtctccgccgccaccgccgccgccatgagggagtgcatctcgatccacatcgggcaggccggtatccaggtcgggaacgcgtgctgggagctctattgcctcgagcatggcatccagcctgatggacagatgcccggtgacaagaccgttgggggaggtgatgatgcttttaacaccttcttcagtgagactggtgctgggaagcatgtcccccgtgctgtcttcgtcgatcttgagcctaccgtgattgatgaggtgaggactggtgactaccgccagctcttccaccctgagcagctcatcagtggcaaggaggatgcagccaacaactttgcccgtggtcactacaccattggcaaggagattgttgatctgtgccttgaccgcatcaggaagcttgccgacaactgcactggtctccagggctttcttgtgttcaacgctgttggaggaggaacgggctccggtc

SEQ ID NO: 6683 - DNA, 560 bp, Oryza sativa
  Clone ID: uC-osflcyp174a01b1
gctcgagtcaaccatcggcaaattcctgacgcagagcgggacgttcaaggacggcgatctgctcgtcaacaaggacggcctccgcatcgtctcgcagagcgaggaaggggaggcccctcctatagaacctttagatcataatcagttgagtctagatgatctagacgcaatcaaagttatcggtaaaggtagtagtggaatcgtgcagttggttcgccacaaatggactggccagttttttgctctgaaggtaatacaactcaatatccaggagaatatacgcagacagattgcgcaggaattgaaaatcagcttgtcaacacagtgccaatatgttgttgcatgctgtcagtgtttttacgttaatggtgtcatttcaattgctttggagtatatggacagtggctctctctcagatttcctgaagacagttaaaaccattccagagccctaccttgctgcaatctgtaagcaggtgctaaaaggactgatgtacttacatcatgagaagcacattatacaccgagatctgaagccgtcaaatatattaataaatcata

SEQ ID NO: 6684 - DNA, 445 bp, Oryza sativa
  Clone ID: uC-osflcyp174a03b1
cgatcaaggacccccaggcagcagcgaagcgactgacgaccgaagcgcttgcgaggaagagcaaggacgacatctcctgcatcgtcatccgattccgctgctgaacacccgcttcgcaacattgtctctgcgtttctcttcgttccgattgaatttgtgtggtggtgctgaaaaaagatggtttacctatagtatgtagctgttgtgaacagaccctagagatgagatatgttagcaaggacaaaactggagatgttcaaacttgtgggttcagtagcgagtagtgagtgtgtgcagggtggtggtgggcggtggtgattcgtctgtgcatacatacaccagcataaactgttttatcaatcgaacggggcgtgcaggttgttgccgttgtgtacatacattgttgcttggttttggctgtgagttgtgaaatggtagtagtccc

SEQ ID NO: 6685 - DNA, 418 bp, Oryza sativa
  Clone ID: uC-osflcyp174a04b1
gaaccttagccctcgaaggcctcgagccctcccctaccttgttctacctcctcccatggaggtagaacaagttctatctatcacctccaactccaaggtagacaatatcaccaatggcgacaatgtgatcatcatccctagtgtgagcacggaggagaaggagcacatcaatggagctgcagagacaaatcatgttgtgatgatcaccgctgcttccatggacagaaccgacggcgacgacaagacgacgatggaggaggagtcggacgtcggcatcgccatcgccaggagcgcctcctccaacggaagccggcagcaagacaagaagcggggcgcgttcggcctcttccgggcgatgttcatgtccttcatcggagcgccagcatcaagaagagggccgccgccaccatgggcaatc

SEQ ID NO: 6686 - DNA, 469 bp, Oryza sativa
  Clone ID: uC-osflcyp174a05b1
atctgcggcagcctcaacaccacggtcaccgaggagatgatgaacatcctcaagggcatcgagaaggcgtccgggtggtcgatgccgatggtccacatcgaggacgtgtgccgcgccgagatcttcgtcgccgaggaggagtcggcgtcggggaggtacatctgcggcagcctcaacaccacggtcaccgagatcgccggcttcctggctgccaagtacccccagtacaacgtcagatgcgattgcatcgaagagcatcaccccgagaagccgaccatctcgctctcgtcggcgaagctcatcggcgaagggttcgagttcaagtacaagaacctggacgagatgtacgacgacctcgtcgcgtacggcatggcacttgggttgatccccaactgacggtgatgatggacggcgtgattccactgatttggcgattacgaccaaacgtgtgcttgtttcaaaaacacta

SEQ ID NO: 6687 - DNA, 545 bp, Oryza sativa
  Clone ID: uC-osflcyp174a07b1
gtggctttagccagtcagacttatgacctggttgatgctcatatccaacagctagatcagtttatgagaaaacttgaagaacttcgacaagaaaaggaggcagctacaactgctgctgctgctgctgctgcggcggctgctagtgttgctacaggtacgcctgttgctgctactgtaacagctagcgctggtacttcaactgctgacaatactccaaaaggtggaaggtctagcgaaagaggccgagggggtcgaaagaagactgctaaggtgcccactgagcaaccagcaccagccatagatttagaactgcctgtggatcctaacgaaccaacatattgcctctgcaaccaagtcagctacggagagatggtcgcatgcgacaataatgattgcaagatcgaatggtatcactttgggtgcgtcggcgtgaaagagcatccgaaggggaagtggtattgcccaagttgcattggattccataagaagcgaaaaggaaagtgaaatgtgatcaacccttgataggaggtagctccttgatgata

SEQ ID NO: 6688 - DNA, 565 bp, Oryza sativa
  Clone ID: uC-osflcyp174a08b1
ttctacagcaggggcaaccccaccgtcgaggtcgatgtgtgctgctcagatggaacctttgcaagggctgcagttcccagtggtgcatcaactggtgtctatgaagctctcgaattgagggacggtggatctgattacttgggaaagggtgtttccaaggctgtcgacaatgtgaactcggttattgccccagctctgattggcaaggaccctacgtcacaggctgagcttgataacttcatggttcagcagcttgatggaaccaaaaatgagtgggggtggtgcaagcagaagcttggtgctaatgcaatcctggctgtgtcactggccatttgcaaagctggagctatcatcaagaagattcctctgtaccagcacattgccaaccttgctggaaacaagcaactggttttgcctgtacctgcattcaacgtcattaacggtggatcacatgctggaaacatgcttgccatgcaggcagtgatctgaactaaagatttctcattctatgtgttgctcataaagttatttaatgatgtgctctatattgcaggagttcatgatc

SEQ ID NO: 6689 - DNA, 520 bp, Oryza sativa
  Clone ID: uC-osflcyp174a10b1
caccattggtgttcttttaatcggtgagaaagcaagtgctccaagaattgcaaaggggagaggagagatgagagagtgaagaacaactacataactaaagcatctctctctctctcctctctctctctctagaacacaagaacaatttagcgattactagctagtgttcatcaaaactgaacttggacaagaaatttacctaaagttagtattccacgatgagctttcttgagcaggcaaccgagcggaaggcaccaccgccggcgaggctcggctccatcaccaagctgacggcggcatcgtcgtccttcgccaacctattctccaccttcctcgggccagtgagctcccccgagccgaggccgaggcgcagcttcgacggcggcgccaccggcgtcgggcttggcatcgtcgcggccatgagccacgcctgcctgacgaccgaggccgagccgatcgtccatcgcgcggcggctcggcgccgcacgagagaggaggccgagctctctgagagctacac

SEQ ID NO: 6690 - DNA, 462 bp, Oryza sativa
  Clone ID: uC-osflcyp174a11b1
ttcttgtatggctatgatcctgtactaactgaggctgatttggaacctaacattgttgttaagagctgctgtggtggcagaaagaaaaagagcaagagctacatggatagcaaaaaccgtatgatgaagagaacagagtcttcagctcctatctttaacatggaagatatagaagagggcattgaaggttatgaagatgaaaggtcagtgctgatgtcccagaagagattagagaaacgttttggtcaatcgccaatttttattgcgtccaccttcatgactcaaggaggcataccaccctcaacgaacccagcatctctactgaaggaagccatccatgttatcagttgtggatatgaggacaaaactgaatggggaaaagagattggctggatctatggttcagttactgaggatattctgactggatttaaaatgcacgcaagaggttggatatcaatc

SEQ ID NO: 6691 - DNA, 272 bp, Oryza sativa
  Clone ID: uC-osflcyp174a12b1
cttattttaatttataagtggatttgcggtttattttagcctacaagtggatttcacgccacttacactcgtaccataaaccaccgtaacatcttttcggttttcactgtgtgagctgctgcctcttgtggtagtatagtgttcactgttcagtgtccagagagtgataaaaaaataattaaataaagcctgaaatgtgctactatcaggcacactgtaatactgttactagcccgaactggtttgcatcaaaaatatttttaacggttttc

SEQ ID NO: 6692 - DNA, 558 bp, Oryza sativa
  Clone ID: uC-osflcyp174b01b1
aagaatcaagaaagacaacaccaacaaactagctagctcaccaatggcctcgttgtcctccttccggctcgccgtggcagtggcggcattgttggtcgtcggctcatgcgccactgaggtcaccttcaaggtcggtgagggctctagcggaaaaagtctagagctcgtcaccaacgtcgccatctctgaggtggagatcaaggagaagggcggcaaggactgggtggcgctcaaggagtcgtcgactaacacctggtcgctcaagagtgaggcggcgctcaagggccccttctccgtccgcttccttgtcaagaacggtggctaccgtgtcgtcgacgacgtcatccccgaaagctttacggccggctctgaatacaagagtggtatcaacgtctaattaatagacatgcgtactcttgcattgggttgcatgataattattaacctctaaaaaattttggcttgaaaaagatcacgctacgcgtgagcaaagcaacaattaatttctggtggttattttgtggcataagccagggtaaaataaggatacatgtgtcc

SEQ ID NO: 6693 - DNA, 530 bp, Oryza sativa
  Clone ID: uC-osflcyp174b02b1
caaataactaacacccatcagcaacaatggcatcctcttgtctccttctggcctgtgtcgtggcagcggccatggtgtctgcagtgtcatgtgggccgcccaaggtgccgcctggccccaacatcactgcggcctacggcaaacagtggctggaagctaggggtacctggtacggcaagccaaagggtgccggccccgacgacaacggcggcgcttgtgggtacaaggacattgacaaggctcccttcctcggcatgaactcatgtggcaatgaccctatcttcaaggatggcaagggctgcggctcctgctttgaggtcaagtgttccaagccagaggcctgctccgacaagcccgtcatcatccacatcaccgacatgaacactgagcctatcgccgcctaccacttcgacctctccggccatgcttttggtgccatggctaaggaaggcaaggatgaggaactccgcaaggcgggaattatcgatatgcagtttcgtcgcgtccgctgcaagtaccctggtgagact

SEQ ID NO: 6694 - DNA, 456 bp, Oryza sativa
  Clone ID: uC-osflcyp174b04b1
gcttcctttgcttgtcctccgtcgctggtgaagctgtcaccgaggagcatatgtccatggcttgcacgaaggtgtggagaagcacgatgtacacacccaggcggctgaagcgaacgacaccggcgtcaagagtatcaagcacggccatggcggcggcgaacggcgatgccagccatggcgccaacggcggcattcagattcagtccaaggagatgaagacggccatccacagcaacgatagccccaagaccctcctcaagagtgaatccctccacgagtacatgctgaacacgatggtgtacccgcgggagaacgagttcatgcgcgagctccgcctcatcaccagcgagcacacctatgggttcatgtcgtcgccgccggaggaagggcagctgctgtcgctgctgctgaacctgacaggcgccaagaacaccatcgaggtgggcgtgttcaccg

SEQ ID NO: 6695 - DNA, 488 bp, Oryza sativa
  Clone ID: uC-osflcyp174b05b1
cgctgccaagccagcttccgcccacgacgccgccgccgccgaccggtccggcgaatcccccgctctcccgactcgcgagggctctctctctctccggttcgtactccctccccacccctctcccgcttccctctcccacaacaccgctcgcgtcgagtgacatgctcaccgggtgttcggcgtaatgcctctcccagaccaagaagcagctgcaggcggggacggcggcgcgatggcgagcggcgacggcgcgaacggcggtggcggtggcgggcaggggaagctcccgcggaagcggttctaccgggcgcgcgcgcacagcaacccgctcagcgactcgcacttcccgatcccgatatcgcccgacgaggtagacctctcgcagcactacccgcggtacttcccctccggcgagggcgaggcccgccagggcgacgcggcggtgccacggatccgcttcgcggacgttgggtgtgggttcggcgggc

SEQ ID NO: 6696 - DNA, 528 bp, Oryza sativa
  unsure (1)..(528): unsure at all n locations
  Clone ID: uC-osflcyp174b06b1
ctcctgagtatgcacgtaccctcgtggccactccaaaaggggatgtttatagctttggagtcgtgttgcttgaacttgtcactggtgaagagcccacacaggtgaaaaatgccccagaaaacttcaaaggaagtttggtggattggataacatacctgtcaaacaattctatccttcaggatgcagttgataagtccttgattggaaaggatcatgatgctgagctgcttcaattcatgaaggttgcatgctcttgtgtgctttccgctccaaaggaaagaccgacaatgtttgaggtttaccagctaatgagagctattggagagaaataccattttagcgctgcagacgatgaattgacgatgcagccgcagaatgctgaagccgaaaagcttgatgagcttattgtagcaaactagatgagggtgatgaatggatgttgctcagatgcagtagctactgtgaagcttctagataatcanggtgatctgaacttgatggaatcctgctaagtgtttttttttcagc

SEQ ID NO: 6697 - DNA, 539 bp, Oryza sativa
  Clone ID: uC-osflcyp174b08b1
gtcgaggattccattcaagtttccgtggcacacagagtggactttctctgaatatcgatgtttcgacaactatgattgttaaacctggtcctgttatcgattttcttcttgccaaccagaaagttgatcaccctgacagaattgattggcaaaaggccaagcgtgctctcaagaacttgaggataagaaccacccctgtgaattcagaattcaagatcattggtttgagtgacagaaattgcaacgaacagatgttttcgttgaggcagaggaatgggaacaatggggatgttgatgaagttgaagttacagtctatgattactttgtgaaaaacaaaggcatagagctgcgctattctggcaatcttccttgcataaatgtggggaaaccaaagcgtccaacttattttccaatagagctatgctctcttattccactacaaagatacaccaaaagcttgtcaacactgcaaaggtccctccttgttgagacatccagacagaagccccaggaaagaatgtcagtccctaatgatgca

SEQ ID NO: 6698 - DNA, 477 bp, Oryza sativa
  Clone ID: uC-osflcyp174b09b1
cacttccacagcagtggactcagtgagcaacggaggaagcaacgatgcgctcccgatctctcctcctcgtcgccctcgccacccttcttctccacgcctccgcctccgcctccgacgacgacctcgactacctcatcgacaacgccgacgacatccccgccaacgaccccgacggctggctccaggagggctcccccgacgacgacgacgacgacgacctcttccaccatggccaggcccaggaccatcccatagatgagacccacgtcttcctcctctccgccgccaacttctccgacttcctcgcctcccaccgccatgtcatggtcgagttctacgccccctggtgcgcccattgccaggcgctcgccccagactacgccgccgccgccgccgacctctcccctcttgcccatcaagtcgccctcgccaaggtcgacgccaccgaggacactgatctcgcccagaagtacgacg

SEQ ID NO: 6699 - DNA, 485 bp, Oryza sativa
  Clone ID: uC-osflcyp174b11b1
ggctactgctcgtcggggtcggagggggaggacgaggacgaggggatggaggggtaccggaagggagggtaccacgccgtcaggcccggcgaccgcttcgccggcgggaggttcgtcgcgcagcggaagctcggctgggggaacttctccaccgtctggctcgcgtacgacaccctcctcaacagatttgtcgcgctcaagatccagaaaagcgcgagggattacgcacaggcggcactccacgagattgagttgctgtcggcgatagccaaaggtgacccgacaaattccaagaatgttgtgcaattgctggaccatttcaagcatgctggtccaaacggacatcacgtttgcctggtcaccgagttcctcggtgatagcttgctaaggttgatacggtacaaccggaataagggcattggtctgagcggagtcaaggaaatctgccgatcagtgttggtcggtcttgattacttgcacagaga

SEQ ID NO: 6700 - DNA, 570 bp, Oryza sativa
  Clone ID: uC-osflcyp174b12b1
tttaaccctagccgccgccgccgccgccgccgtcgtcgtcatggccacccaaacgggggcagtacaatgcgtatgtgatcacgtacaactacatggccaccgacaacagcagaagcctcgccctcgacgaggtgtcccagtgcgcggctccgccccgacgtggcccgcttcgggcacaggctggtctcatgatgcaggcgccagccctacgccgtgtaccgacaggccggacagcagacccaggcggagtcgtggggcacggggcgcgccgtgtcgtgtatcccccgcgtacccggcggcggaacgcaccgtgccgggcagggagccttcggcaacatgtgccgcggcgggcgcatgttcgcgccgaccaagacatggcgcaagtggcaccgccgtgtcaacgtccacctccgccgcgtcgccgtcaactccgtcctcgccgtcacctgcgtcccgttcctcgtgcctcgccgcggtcaccgcatcgagaccgttcccgagctccccctgttattttcgactccgccgagttcatcgagaagaccttccagccatcaagatcctgagcag

SEQ ID NO: 6701 - DNA, 485 bp, Oryza sativa
  Clone ID: uC-osflcyp174c02b1
cgacgacgtcggcatccccaccgattaccgccacatggacggcttcggcgtcaacacctacaccttcgtcacccgcgacgccaaggccaggtacgtcaagttccactggaagcccacctgcggcgtcagctgcttgatggacgacgaggccacgctcgtcggcggcaagaaccacagccacgccacccaggacctctacgactccatcgccgccggcaacttccccgagtggaagctgttcgtccaggtgatcgacccggaggaggaggagaggttcgacttcgacccgctggatgacaccaagacatggccggaggacgaggtgccgctccggcccgtggggcgcctcgttctcaaccgcaacgtcgacaacttcttcaacgagaacgagcagctggcgttcgggccggtgctggtggtgccggggatctactactccgacgacaagatgctgcagtgcagggtgttcgcgtacgccgacacgc

SEQ ID NO: 6702 - DNA, 486 bp, Oryza sativa
  Clone ID: uC-osflcyp174c04b1
ctcagcttaagcgagcgagcgagtgaacgagagagagagacagagatggcgagtgttgcctccttcccggtgatcaacatggagaacctggagaccgaggagaggggcgcagcaatggaggtcatccgcgacgcctgcgagaactggggcttcttcgagatgctgaaccatggcatcgcgcacgagctgatggacgaggtggagcgggtgagcaaggcgcactacgccaactgccgggaggagaagttcaaggagttcgcgcggcggatgctggaggccggcgagaagggcgccgacgtgaagggcatcgactgggagagcaccttcttcgtccgtcaccgtcccgtcttcaacctcgccgaccttcccgacgttgacgaccactacaggcaggtgatgaagcaatttgcgtcggagatcgagaagctctcggagagggtgctggacctgctgtgcgagaatctgggcctggagaagggttacctg

SEQ ID NO: 6703 - DNA, 471 bp, Oryza sativa
  Clone ID: uC-osflcyp174c05b1
acattctccaaggctatatttcttggcaatggcctggtcgcaattgtatccgggctatttgcaaacctgcttgccgacaacttgggctttggtcccgtggcaccatttgatgctgctgcatgcttcctggcaataggcatggctatcataatgtcttcatggagtgaaaactatggagacccatctgaaagcaaggatttgatgtcccagttcaaggttgcagccaaagcaattgcttcagatgaaaaaattgcattactgggagccatacagtcattgtttgagggctcaatgtatactttagctttgctctggactccggcgttgagcccaaatgaagaagatattcctcatggcttcatattggccacattcatgctgacatcaatgttgggtagctcaattgctgcacgcttgttagcccgaaagctgaaggtcgaaggttatatgcagatcgtgtttacaatatca

SEQ ID NO: 6704 - DNA, 427 bp, Oryza sativa
  unsure (1)..(427): unsure at all n locations
  Clone ID: uC-osflcyp174c06b1
atccaggggatatcaaaaggtattgtcctgaacctactccaccagattttcaaggaatgagagcgcttgttgttgacggaagatgtactcgtgctgaggttaccatgtaccatctgcggagacttggaatacaatgtgatcttgcagccacatctgaatcagcactttctgctctattggaatcctgcaattcaagtgtaaaaagcagtctaaatatggtgcttgttgacaaagaagcttggggcgaggactcaggcttggcatttttccggtgtcttatagatcttcggctgaagggcacactcaagtcttggcaaaccatgccaaagttctttcttttggcaggttcaataactcctgctgactctgattgtttgaggttggcggngtattctaatagcataagaaaaccccttcgtcttagtac

SEQ ID NO: 6705 - DNA, 522 bp, Oryza sativa
  Clone ID: uC-osflcyp174c07b1
cactaacaacgcaacccaaagattcccagtatcccaccaccgcattgtgcatttgtgaattgtgagtgtcgaatccaagagttggagttcgtgttcgatggggtcgcaggcgatagaggcgcacagggagggggcggtggtgtaccacggggcggcgctgtgcgcggagaaggcggtggagctcctcgcggagatccacatgccgctgggcctgctgccgctggcggagatggaggaggtcggctacaaccgcgccacggggttcgtgtggctgcgccagaagaaggccatcacccacaccttcaagcagatcagcaggcaggtctcgtacgccgccgaggtcaccgccttcgtcgaggaccgccggatgaagcgcgtcaccggtgccaagaccaaggagctcctcatctgggtctccctctccgacatgttcatcgacaaggacgacgcctccaagatcaccttcaagacccccaccgtcctcgggaggacctaccccgtcgacgccttcgccaaggagga

SEQ ID NO: 6706 - DNA, 561 bp, Oryza sativa
  Clone ID: uC-osflcyp174c08b1
caggaagagcttgacatcgatgtccttgttcacggcgagcctgagagaaacgatatggttgagtacttcggtgagcagctttctggttttgcattcactgccaacggatgggtgcaatcttatggatcacggtgtgtcaagccaccaattatctatggtgatgtgagccgccccaaccccatgactgtgttctggtccaagttggcgcagagcatgacctctcgccccatgaagggaatgttgactggtcccgtcacaatccttaactggtcttttgtcaggaatgaccagccgaggtttgagacatgctaccagattgctcttgccatcaagaaggaggtcgaggaccttgaggctggtggtattcaggtcatccaaatcgatgaggctgctttgagagaaggtctgccactccgcagggcggagcatgctttctacttggactgggctgttcactccttcagaatcaccaactgcggtgttcaggacaccacccagatccacacccacatgtgctactctaacttcaacgacatcatccactccatcatcaacatggac

SEQ ID NO: 6707 - DNA, 493 bp, Oryza sativa
  Clone ID: uC-osflcyp174c10b1
ctaacaccagctttcatcagtgtaacaaacatcagatttcatcagcttccacatgggcaactagtagacactagtcagttcataaacagcagcaatggcatccattcagaaacaacagcagcaaaaattcataggcagaaccgaaacaaccagattttcaatactgaagcatccatttaggattaaacagatgtagatggttcatccattaacttaactagataataccccgcgcgttgctgcggacataataaataactttcaacatgcaatatgtgcataacatttgagaagaaaaaagaaaaaaaaactacttattaccatataattgatggagtatatacagtggtaattataactaaatattacatgatggagtatctccccaggtagcagtggttggccaatgcaactaacagaattacaactcaaatatatggctgttgaccggatagagcaggtattaataaacaaaattgaaggccactaaaca

SEQ ID NO: 6708 - DNA, 541 bp, Oryza sativa
  Clone ID: uC-osflcyp174c12b1
tgacattccaccagctactgaatctcttaatggccttaagatggagctggttgatgctgcatttcctcttttgaagggaattgtcgcaacaactgatgttgtggaggcctgcactggtgtgaatgttgcggttatggttggtgggttccccaggaaggagggaatggaaaggaaggatgttatgtcaaaaaatgtctccatctacaaatcccaagcttctgctcttgaggctcatgcagcccctaactgcaaggttctggtagttgccaatccagcaaacaccaacgctctcatcttaaaagaattcgatccatccatccctgagaagaacattacttgcctcacccgtcttgaccacaacagggcacttggccagatctctgaaaaacttaatgtccaagttactgatgtgaagaatgcgatcatctggggcaaccactcatccacccagtaccctgatgttaaccacgccactgtgtagactcccagtggagagaagcctgtcagggaactcgttgctgatgatgagtggttaaatacg

SEQ ID NO: 6709 - DNA, 565 bp, Oryza sativa
  Clone ID: uC-osflcyp174d02b1
gtttttcttggccgaaccccccctcgacacgccgtcgccgccgaggggagagagagagaggccgccggccgccgctaccactgacccccccccctcgccggagcgccccgtcgccggtcgggtttgatcgatggcgtccaagaggatcctgaaggagttgaaggacctgcagaaggaccctcccacctcatgcagcgcaggtcctgtgggtgaggacatgttccattggcaagctactattatgggaccctcagacagcccatttgctggtggggtattcttggtgaacattcatttcccaccggattatccttttaaaccaccgaaggtctctttccgcaccaaggttttccacccgaacattaatagcaatggcagcatttgcctcgacatcctcaaggaacagtggagtcctgcacttaccatatcaaaggtcctcctgtcaatttgttcactgctgacggacccgaaccccgatgatccgttggtgccggagattgctcacatgtacaagactgatagggccaagtatgaatccaccgctcgctcctggacacagaagtac

SEQ ID NO: 6710 - DNA, 453 bp, Oryza sativa
  Clone ID: uC-osflcyp174d04b1
gctttataacaatgggttcccagcaactagcattcatggagacagaacacaacaggaaagagagtatgccctgagatccttcaagagtggagcaactcccatcctcgtggcaactgatgttgctgctcgtggactggatatacctcatgttgcccacgtcattaattttgacctcccaaatgatatagacgactatgtccatcggataggaaggacagggcgtgcagggaaatctggtctggcaactgcatttttcaacgagagcaacaccccactggcaaggccgctgagtgagctcatgcaggaggctaaccaggaggttcctcaatggcttgagaggtatgctgcccgttcatcgtttggaggcggcggcgggagaaaccgcaggtcaggtggtggtgctaggtttggtggccgggacttccgacgagacagaggcagtggtggtggagg

SEQ ID NO: 6711 - DNA, 518 bp, Oryza sativa
  Clone ID: uC-osflcyp174d05b1
cgcacttctcgcatcgcaaagctcggcagcaaaagcaaagcaaagccaagccaagcttgaagctccccgcactgagccaagaagcctccacctcaatccgaaagagatctcgtgcgcgcacggcgatgcggtgaatcgggcatggcgcctccacaggagcgggactacatcgggctgtcgccggcggcggcggcggcgctggcaacggagctgcgccttgggctgccggggactgcggaggaggctgagtcggagggcggcggaggaggagggacggatgcggctccgctgacgctcgagctgctgcccaagggcggggccaagcgcgggttcgcggacgccatcgttgggggtcccgccggccagcggcgggaggcggccgggggcaaggcggcggcagccgctgcggaggccgaggaggaggaggagaagaagaaggcgcatgcgccggcggcgacagcacaggtggtaggatggccaccaatccgcagctactggaagaacaccatggcgatgag

SEQ ID NO: 6712 - DNA, 544 bp, Oryza sativa
  unsure (1)..(544): unsure at all n locations
  Clone ID: uC-osflcyp174d06b1
gataacttggaaccatcttgattggcattattcagattcctattacattgttcggagccattctaatggataagagtggaagacgggttcttctaatggtctcggcatccggaacatttttgggctgctttctgacaggaatatccttctacctaaaggcacaagggctattctcagaatgggttcctgaattggctcttaccggtatactggtttatattggagcatactcgattggaatgggccctgtcccttgggttgtcatgtctgagatattctcgattgacatgaaagcaatcggtggaagcttggtgacactagttagttggttaggttccttcgcgatttcttactcgttcagcttcctcatggactggagttctgcagggaccttcttcatgttctccgcggcgagcttgatcaccatcctgttcgtggtgatggtcgtgcctgaaaccaaagggaggacgctcgaggagattcaggactcgctcatcgactncagatcaagattgagggatccatagaccatagagatatgatc

SEQ ID NO: 6713 - DNA, 473 bp, Oryza sativa
  Clone ID: uC-osflcyp174d07b1
gagcacaactatataacttaataagcacattacagcacacacatggccaaggcagttatttgaatcagtctccaacatacttcaaatcatagaccacaccatacagcaaacatagtataaacattgtcatagagagtacagctgatagcagcttgtaatattctagcattactttggtagcatccctctacaaaacatagcagacatcaccagctcttcatcttggccatacacattcaacatggtttgctagtgacagaccacactgaccagaacatttcgtctcctcagtaggcaccagctgccatgagcagctcatcaaggctccagatgccctcgttgcttgccccgtcttgtgtagcatcattttgcagaaggttgtccattgattcatctgagctgctctcaacataaggtaatggcaaatacttcatctcgggatcgaaggtggcatgtttgtgcgagataggcat

SEQ ID NO: 6714 - DNA, 489 bp, Oryza sativa
  Clone ID: uC-osflcyp174d08b1
gcaactatcattccagtactcctgcggctgctgctcctgctgctcccgcttcccctgatccgagaccacctctgggcgccgagccacctccggccaacgccgcaggacgatgcgggtgagctccacccgatcttcctggtgcccggggcgacctgcagcaacgtggaggcgcggctcaccgaggcgtaccggccgtcggcggcgcactgcggcgcgatgaaggggaagggatggttcgggctgtgggagaacaacacggagctgcaggcccacgactacgcggagtgcttccaggagcagatggccctggtctacgaccccgccgccaacgagtaccggaacctgcccggcgtcgacacccgggtgcccaacttcggctccgtacggtcgtttggcagcaaggacgtttttaacccagaatggtgccttgcgagtcttataggggcgctggaggagatgggataccgtgacggagacaacatgtacgga

SEQ ID NO: 6715 - DNA, 432 bp, Oryza sativa
  Clone ID: uC-osflcyp174d10b1
gctcctgcaagccctagccgccacatctcctgcgtcctaccaccgccgccgctgttcctgtctccgccggcgccgccgccgccgccggttcagccgtcgtcgtccttcgccaccccatccgctcgtctccttgcgtggcttgctgcttgacgctgctgcatcgatcagagacgagaaggctccagacagcacaggaagcagttgaacaggagtaacaagggaaggaaaaggtacctaatgacattgatcggcatggggcgggagtagcacccttggactacacattattattgcacactattggaatttagttttagattatgtttctgcttagcataagttttgcgtagaacttgtaacggtcatttaaagttccggtccttattttcacgtggaatttgaggagctaggatggtttggattgtgtggatt

SEQ ID NO: 6716 - DNA, 491 bp, Oryza sativa
  Clone ID: uC-osflcyp174d12b1
catgactcttgccgtgttgagactgcagaaacgagagctagctagccagaggctgcatgaagattctgcacccatagatcgtctaccatggccacaaacccaggactcttcacggagtggccatggaagaagcttggcagcttcaagtacgtgttgctggcgccgtgggtagcgcacgggtggtatgaggtggcgaccaaggggtggcgggaggtggatctcgggtacatcgccatcctcccgtcgttgctgctgcggatgctgcacaaccaagcctggatcaccatctcccgcctccaaaacgcccgtggccgtcgccagattgttcgccgcggcatcgagttcgaccaggttgaccgcgagaggaactgggacgaccagatcatcctgagcggtatcctactatacctcggcgcactgtacgtaccgggcgggcaacacttaccgctgtggaggacggatggcgcggtgctgatcgccttgctgcatgc

SEQ ID NO: 6717 - DNA, 485 bp, Oryza sativa
  Clone ID: uC-osflcyp174e01b1
agaggctttagaggagaataagatgtacagagctcaacagaagagtcccatgcctgatgggcagtgtgctgctgggaatggcaatgagagtagtaacgaaagggttttgcaactagaaggagagctaagagatatgaaggagcggttactcaacatgagcttgcagtatgcagaggtagaggctcagcgggaacgattagtgatggaactgaaagctaccaaaaaaggaggagggcggtggttctaggttgtcgtagaactattgcctgccataacagagactgacatcacagatggacatcatatgaaccagagccatgtctgcaccatgacagtatgttatcatgtgagagcaaaagccaagtgctgaagcagatgtgatgtgcaccagactatgctagttggtactggagcatgagctgcaaaagactgaaggtcttggtgatagggcgaactgtgagtctgtgacttctccctggagaaaa

SEQ ID NO: 6718 - DNA, 513 bp, Oryza sativa
  Clone ID: uC-osflcyp174e03b1
agctgaggagaaattgatccatgcccttctacaactccgtgataagaaacctttggatattcgtcttcgtggccgtaacctacctccaaacttgatgaaggaaatgttaaaaaagttcggggctgatctggaaggattgaagagagaggtgcctgcagtagagcttcgattaaatttacgacaacatacactttacgttcgaggcagtaaagaagacaagcaaagggtggaagaaatgatctctgagctggtaaattctacaaagtacaatggcctgcttcaacttccattagagaatgcatgccctatttgcctgtgtgaggtagaagatccctttaagcttgaatcttgtgggcatgtgttttgtctgacttgcttggtggatcagtgtgaatctgctttgaaatcacatgatggtttccctctgtgttgcctcaaaaatgggtgcaagaagcagctccttgttgttgatttgagatctctcctatcgagcgagatactggaagagctatt

SEQ ID NO: 6719 - DNA, 498 bp, Oryza sativa
  Clone ID: uC-osflcyp174e04b1
gagaaattcccacgcagcagcaagcaatccaatccgagagcgcgcgtttgcgattattcgctttcgattccgcgaggtttttggagagggaggagaaggaggaggagatgtcgaagggggaagggccggcgatcgggatcgacctggggacgacctactcgtgcgtgggcgtgtggcagcacgaccgcgtggagatcatcgccaacgaccaggggaaccggaccacgccgtcgtacgtcgccttcaccgacaccgagcggctcatcggcgacgccgccaagaaccaggtcgccatgaacccaaccaacaccgtcttcgatgcgaagcggttgattggtaggaggttctccgacccgtccgtgcagagtgacatgaagctatggccgttcaaggtggtgcctggccccggcgacaagccgatgatcgtcgtccagtacatgggcgaggagaagcagttcgccgcggaggagatctcgtccatggtgctgatcaagatga

SEQ ID NO: 6720 - DNA, 520 bp, Oryza sativa
  Clone ID: uC-osflcyp174e06b1
aattaaaggaaaaaaaaacaaaacacaccaagccaaataaaagcgacaatgggatcgctcaccaccaacatcgtcctcgccgtcgccgtggtggcagcgctggtcggcggcgggtcgtgcggcccgcccaaggtgccacccggcccgaacatcacgaccaactacaacgccccgtggctccccgccagggccacctggtacggccagccctacggctccggctccaccgacaatggtggcgcgtgcgggatcaagaacgtcaacctgcctccctacaacggcatgatctcctgcggcaacgtcccaatcttcaaggacggcaggggatgcggctcatgctacgaggtgaagtgtgagcagccggcggcgtgctcgaagcagccggtgacggtgttcatcacggacatgaactacgagcccatctcggcgtaccacttcgacttctccggcaaggcgttcggcgccatggcttgcccgtgaaggagaccgagctccgcagggccgcatcatcgacatgcag

SEQ ID NO: 6721 - DNA, 418 bp, Oryza sativa
  Clone ID: uC-osflcyp174e07b1
agcgcgagcagttcgaggagcgcgccgagaccatcctccacctcctcaagctccagttccccggcacccctcagtcccagctcgacatctccaagatccaatacaaccgggacgtggggtacgcgatactggagagctactcgagggtgctggagagcctggcgtacagcgtgatgtcgaggatagaggacgtgctgggggcggacgcggcggcgcagaacctgacggcgacggaggcggcgaggaggctgatggacggggacgcggcggcgaggaagctggacgccatggaggagctggagaagctcaacgaggcgccggcgtccatgacgctctacgacttcatggggtggcacttcgaccaggacgagctcatgaggaagaaggaggaaggcaccctcgacgaggcccgcgaggc

SEQ ID NO: 6722 - DNA, 491 bp, Oryza sativa
  Clone ID: uC-osflcyp174e08b1
ctggaagaccatgaacggtcttcctccatcggctggagagggcctgatccttttctacaacccggcagcgaccaagatgacccccaacgctcagtttggcatcgcgtttaatggtggttttaaccagccgatcatgtgcggtggtgagccgaggcagatgacgctgcaagagaggggatcagctgatcctcccatatacaccatcaggatacgtgtgccgcagcatgccatgaccctcgtcttctccttcacaaacggggtggattgggatggaccgtacaccctcaagttcagggtccccaagccatggctcaacaagcccttgagcttcttcaacgagggtctagcagacgaactgaacagagaaggggcatgcgacagagccatcttcccagacgaaaacgttgtcatcacaagctgcgagatgggcagctactacgaagaggggggagatcgctgcaagctggacattgtgtcagggtgcatggatc

SEQ ID NO: 6723 - DNA, 575 bp, Oryza sativa
  Clone ID: uC-osflcyp174e09b1
ctgatccaaagactggtcgcccgagtccctacatgcctccaccctctccctggatgactcagaggccgctgggcgttgatgtgaatgtcgcttatgtggagaaccgtgaggacccagataggaccggacagcctccgcaactaactaaggattttctaatgatgtcctctgggaaacgcaagagggatgaatatcctggtcagctcccttctggttcttttgtgccacaacaagatggaagtgcagatcagatagttgaatttgttgtctcaaaggacaacgcacaacaactttggagttccattgtgaacaagcaaggaacagcaacaaaagaatcttccacaaaggaaacaataattgctccaacgattcctcaacgggatgggatggatgactataatgatccattttacttgcaaggagttccaactgaggattacaatacccctggagaatcgtctgaataccgagctgccacaccggctgtcgaaacagcaaacccgagaaatgatgtaggcgatgatgatgagcctccgcttaatgaagatgacgatgatgatgatgagttagatgac

SEQ ID NO: 6724 - DNA, 456 bp, Oryza sativa
  unsure (1)..(456): unsure at all n locations
  Clone ID: uC-osflcyp174e10b1
atcgacattgacctgcttaaaggatcatgtggcaagtcacttgcacctttcccacaaggttgcttctattccaatgctcttggaggcttgaagtgctatgagaacccaaagaacaaggtgactgctgttcctgcaaatgaagaagagatctgtggtgcaaccttcaaggttgagagcgccactgcaatcctcacagctctgcactaggatgatgtttcggtgtccggtcgttgtacatggtggtggtgtaacatagttgcaactgatctgtatcatcttttcataaaagagaagtactgcctgcatggcaagtgcttcagtgttctgggtgtgtagtatgatctctgtacctttgttgttcaagcaggaatgaactccaggccggctgtgatcagttgaatgtagttctgttgcncancaaaaaaattctaaaatacaaataaaacaatcctaaac

SEQ ID NO: 6725 - DNA, 543 bp, Oryza sativa
  Clone ID: uC-osflcyp174e11b1
ctttcggatcccttcttctccgggcggcgatttctttcttcccatcggccttgttggtttgaaatacagagtccaggtgcgagccaagtcccctctcttcgcgactgattgcgtttccttaaatatgcaaggctggtagagggccgggtgagaaattttgagatttcgaccaacagagggcggaaaacccttggattttagattcactcaaggcttcgtcgcgtcatgggtattttcaagttgaatctgctcctaaagctgcagcggcagcggcagcgccgtcgtcgccaaatccaagcccgtaatggatcagttttgattcatccacgggataaaataaacgctccagcctgtcaaaataacacacactcttggagtggccaagcgaagtgttcagacccaacgcttccggaggacatctcgtgtcatatacattccctgatgtctatgcgggatgctgctcgtgttgcctgtgtgtctcgggcgtttgcacgttcctggagatgccttcccaacctcgacttcagtgaggaatcattagga

SEQ ID NO: 6726 - DNA, 571 bp, Oryza sativa
  unsure (1)..(571): unsure at all n locations
  Clone ID: uC-osflcyp174e12b1
gctgtgcaaaagtccaaaccacgcctcgtgatctcacaccaaatcttccacggcgatgcaagaggccgaggagcccagcaccaagcttccgtcccgctcccccctcgacgggcccgcccctcccccttaccaccatcaccactacggcactttcctcccgccgccgccgccgcagcagcagcagcagcagaagcccgacggagcagcctccaaccacccgttcccggccgggtacgcagctcagggcgttgttgccttcccgtgcactgtgcagcagctggtcctcgtggagggcgtgcccatcagggagcctccgcttccgttttgcggcatcggcctaggctggattttgttcttactggggtttttcttggctgcacttccctggtatgctggtgcttttattctattctttgttgctttggaccacagagagaagcctggattgattgcatgcactattgctggtatttttgtgctagttcctntcatcctcaatggcataagagtgcatcccttctggtgatactggatgtcatcaatccatatctggatgtacctattatttcag

SEQ ID NO: 6727 - DNA, 453 bp, Oryza sativa
  Clone ID: uC-osflcyp174f02b1
agatcagttagtttgttgagtggaagcagatcaggaagatgctggagaagctgtgggacgacgtggtggccggtcctcgaccggagaccggcctcgagaagctccgcaaggccgctacaacccgcccccttgtcatcaacaaagatggcgacggcgaggcgagcggagtggcgtacaagcggacgcagtcgatgccgacgaccccgacgacgccggtgacgccgtcgtcttcgtccccgacgacggcgacgacgacgacgccgcggggcagcaacgtgtggaggagcgtgttccacccggggagcaacctcgccaccaagagcctcggcgccaacctcttcgaccgtccccagcccaactcccccaccgtctacgactggctgtacagcgacgagaccaggagcagccatcgctgaactgaataatcccattgatcggaggctggtcgatctc

SEQ ID NO: 6728 - DNA, 456 bp, Oryza sativa
  Clone ID: uC-osflcyp174f03b1
cgccgatagcagcagcagcagcaatggccgccctcgccgccgcatccaccgtcttcgccgccaagccgcgcctggcgcgcgcgccgtcgtccccggccgcgcggttctccgtgtcgtgctccgcgtcgggcaacaacggcggcgccggcgagatggcgcagtcgctggcggcgtcggccaagacgttctccgcggcgctggcgctgtcctcggtgctgctctcctcggcggcgacgtggccgccccccgccgtcgtcgacatcgccgggctgacgccgtgcaaggagtccaaggcgcttcgcgaagcggtagaagcagtccatcaagaagctgccgtcgtagctcatgaagtacgcgccggactccgtgccggcgctcgccatcaacgccaccatcgagaagacgaagcgcctgttcgagaactacggcgagttcggcctgctctgcggcgccgac

SEQ ID NO: 6729 - DNA, 208 bp, Oryza sativa
  Clone ID: uC-osflcyp174f04b1
atgtgatccgcaggttgaaggagatgaagaagagaggtaaaactgatatggatgcttatgggtatgctaacatcgcaggagaaaatgatctggatcctcctccagagaacgtatcagttcccttacctgatatggtgctgcccccttcatttgactgtgacaatcccacataccggtaccgctttctggagccaaacttcgactgttc

SEQ ID NO: 6730 - DNA, 538 bp, Oryza sativa
  Clone ID: uC-osflcyp174f05b1
gctgcaccggctgctgaagctggcggtgctggacctggggttcaacaaggtcaccacggcgagggcgctgggccagctggtggccaactaccactccctccgcgccctcaacctcgtcggcaaccccgtccaggccaacgtcggtgacgacgccctccgcagggcggtcacgggcctcctcccccacctcgcctacctcaacaagcagcccgtcaagccccgcggcgccgcccccgccgacggcgccgtgtcgcgcgccgcgctcgaggccggcggcgccgggggaggctcccgtagcgcgcggaagcggtcgtccgctgcggcggcgtcgcggaggctggggcagcgcggcgaggggagcgggagcgggaggagcaggtccaaggggaggcagccgtcgagcagcttgccggcgaggaggtgaagacggcggcggcggcggcgagtgcgaggtccattttgtgttgttgcgatacattcgaatttagaatttgaagatcttttgaatctggaatttggattggagagagagagagcg

SEQ ID NO: 6731 - DNA, 574 bp, Oryza sativa
  Clone ID: uC-osflcyp174f06b1
gtctgctcatcctcaccgacccaaggaccgatcaccagccaatcaaggagtctgctctgggaaacatcccgaccattgccttctgtgacaccgattccccaatgcggtatgtcgatatcggcatcccggccaacaacaaggggaggaacagcattgggtgcctgttctggctcttggctaggatggttctgcagatgaggggtactatcctccctggccacaagtgggatgttatggttgatctgtttttctacagagaccctgaggaggccaaggagcaggaggaggaagctccagcacaagactttgctgccatcactgattacaccgcacctgaacaatggtctgctgaccagtggacctctgatgtggctgctcccccagctgctactgttggtgattggggcgcagctccagctccagttgctgctgccgaaggatgggatcaagcaggagcacccgtagccactgaagccgccgtcgttccaccggttgcgcctactggatgggacccggcagctcaaccagctgctcaaggctgggattagactaggcaatcactctgagatgtctt

SEQ ID NO: 6732 - DNA, 384 bp, Oryza sativa
  Clone ID: uC-osflcyp174f08b1
gtcgccgcagccgcggaggcgacccctcccccgccgccgccaagatgcagatcttcgtgaagaccctgacggggaagaccatcacgctggaggtggagtcctcggacaccatcgacaacgtgaaggccaagatccaggacaaggaagggatccccccggaccagcagcgcctcatcttcgccggcaagcagctcgaggatggccgcaccctcgccgactacaacatccagaaggagtccaccctccacctcgtgctccgtctccgcggcggcgccaagaagcgcaagaagaagacgtacaccaagcccaagaagatcaagcacaagcacaagaaggtgaagctcgccgtgctccagttctacaaggtggacgacgccaccggca

SEQ ID NO: 6733 - DNA, 485 bp, Oryza sativa
  Clone ID: uC-osflcyp174f09b1
gaacttgttttttgtatttttcttttcggtagctactttctacatctctcttatttggatcacgtattatcctttttcattccacgaccgacgaccaatgttccgacacctcgccgccctgatcctgtccgccgtcgtcttggcggcgtccacaagctccggcgtcgtcgatgcccgtcctgtccacaccggcccgtaccacgtcgtcatcagaaccgccgccaagcccagccgtcgcctgatcgggctcggcggcaatgccgccatatgccaagaggtgcactacaaggcgctgtgcggcacgctgacgacgctgccgggggtgatgacgccgcagcagctgctggacgcggcgttgcgggtggcggagtccaaggccatgatggcggagaagcggctggccgacgtgatgaagtcgcgcgcggtgaatggccgatgcacgagcatgtcgtcgacgctcgacacgtgcatgggcgcctactcgt

SEQ ID NO: 6734 - DNA, 513 bp, Oryza sativa
  Clone ID: uC-osflcyp174f10b1
tcgagcagaacggggttctagttccatcggcgccgcctgattctcccaagctcaagtacctgaggatatcatccttgaatagtagcaaatgtcttgtgaccaatggcgttagcacggtcttgtttgaagacacatgcgcggaggatgatattaaggatggtggtaaagttgcttcggaggagtgcactcggcagaactccggagaggctccatctgagatatgtgaagttgatcaggcctcaccagaaaaacatcctcatgagaactccgagaaggtagcagaggcgacatgtgagctttggctgcgtgtgctgagcaaggacgacgatgagtgtgtcgacgagcaacgtgaggtgatcgagcagattagattccttttgaaggatgacaacgagcttaggaaatacgcgggtgctaatggtattaccgagctactcatccactttgtgaagaaggcagtctgcagagatgatgttcagtgccaggtggttggaacaatggctctgttcaacc

SEQ ID NO: 6735 - DNA, 577 bp, Oryza sativa
  unsure (1)..(577): unsure at all n locations
  Clone ID: uC-osflcyp174f11b1
accacttcttctctacccggcggcgccaatccgagccgcactgctcctcctctcctccctcaacccccgccaccactcctgcttctcctcctccgcgtcacaccggatccggccgcttggaggtcggggccgccagatccagccaccacgcgcggcagcagcgcccctcctcctttgcgtcacgccggatccggccaccacgtgcagcagcagctcctcctccggccttcttccggcagcagcaccacggcaacagctcctcctctggtcttcctccagcagcagtgcaaagccaaggtctgcatggtggggttctaaatggggttgggaagggcgtggagacgaacaccgccaaggtggaggaggcagtcggcgacgacctccaagggctcctcctaaaggaataaaacgctagctatgaacttgtagcttgaacaaacaaaatgtatatgaatcaaaaggtcacaaacatggtatctaagcaatatataaggtcaccatatatatctactaagcatacangtagatcgggtaaaatcaagctcaagcacaatatgagagatggcaaaatggacaa

SEQ ID NO: 6736 - DNA, 531 bp, Oryza sativa
  Clone ID: uC-osflcyp174g02b1
ggtcaccagaaaacaattacttcactttcaaaatctgcagattggtcacatttcctaacaggctccttggataagtctgctaagctatgggatacaagaactctgaccctgatcaagacatatgtcaccgagcgacctgttaatgctgatgacatttctcctcttctagaccatgtggttatcggaggtggtcaagatgcgatgaatgtgactatgacagatcgtcgagcgggaaaatttgaagcgaaattctttcacaagattttgcaagaggaaattggtggtgtaaaaggccattttggaccaattaacgcactggcatttaatcctgatggacggaggtaatattcttaatacatgtgtaatattatatgaatgctatatttatgttctaccaccgcacttatgttctcgattagctttttgtttcatattaccttgtgtgttttctgctcaatgattaagccatgttaatccatggcaatatgcgctattctgaatcatattaagatgtcatacacattatgagag

SEQ ID NO: 6737 - DNA, 526 bp, Oryza sativa
  unsure (1)..(526): unsure at all n locations
  Clone ID: uC-osflcyp174g03b1
cgtgtggccgtccgccgctccgcgcctccgctctgctacctgcgcctgcgcgtcgtgctccctgcgtccatccctcgccacgccttgccgcaccaacagcgctccctgcacctccgcctccctccccaatccgtcccatctcctcgcccgccgccctcgcctgccatcctgccagcagaggtggcgccgccgttctcctgctcccgctgcattcgctcaccggtgagcatcctaatccatcccatccggcctcggcctcgtcctcgaatttcgtctcctcgcccggcgtcctcctgcatccaccgcatcatcgctcgccgttggggatcccactgacttgctgattgcaactgtcagtgtggtgattggactgcatcagttgtgggaattgaactggtcaagtctcagactaatacaatgcaaggcatttttgcatgtggttcaatttcctcggcccatggatcatgctttagaccagctngtctngcagtggatgatctgaggctgttttacaaaataaattcag

SEQ ID NO: 6738 - DNA, 543 bp, Oryza sativa
  Clone ID: uC-osflcyp174g04b1
caccccccaatcgctggcgcctttgactcccgccgcgggcggcgcagcgcagccgatggggatccccgccgcctcagtcgcggcccggacagccgtcggcgcggcgctggccgccgtcatcgccgcgcgcgccgtccgccgccgctcgctggacggctccggcggggcagccgggttcgtcgtcatggcgacccacctcgcctgcgggtacaggtacggcgcgctcgtgctggccttcttcttcacctcgtccaaggcgaccaagatcggcgcggacaggaagcgccgcatcgaggacgacttcaaggagggcggccagcgcaactggatccaagtcctagcaaatagcttaatagctactatattggtcatcatattggcaacaatgaccggaggacaagatcaatgcctggactcccatgagtcaaaggttataactggtattattggtggcatcattggtcactattgctgctgcaatggagatacttggtcatccgaacttggtgtgcttagtgatgaacagccacgtctaattactac

SEQ ID NO: 6739 - DNA, 526 bp, Oryza sativa
  unsure (1)..(526): unsure at all n locations
  Clone ID: uC-osflcyp174g05b1
gctcccggcctccgaagatggagacctcctccttcctccgcaccaccctccccaccgcgaagcccctcccggcgttccagaccctcgcaccccgcccccgcccccgcccgctccgccgctccaccatcagcgcggccatcacccgaggccgcaaggaggacacggtggccgccgtccgcgagcagctggagggctgctacctcctcgccgggatccgctacgagggcctcacggtgaagcagctgcagggcatccgcgacaccctcccggagacctgccggctgctggtggcgaagaacacgctggtggggaaggccatcgagggcacgccgtgggaggcgctcaagccgtgcatgaaggggatgaacgcgtggctgttcgtccacaccgtggaggtccccgccgcgctcaagccctaccgtgccttccagaaggaggagcgcctcgaggagaccaacgacttcgtcggcgcggtgttcgagggcatgttctacgcccncggngacctcaaggcgctcgagacaat

SEQ ID NO: 6740 - DNA, 442 bp, Oryza sativa
  Clone ID: uC-osflcyp174g06b1
catcaaccctggataccagggaggagggccaggttaccatggtggcaacccacctccttatcaagccggcaacccacctccttatcaagccggcaaccctgtctttgctggtggtgcaccaggctaccaaggccaaggaggcaaccctagttaccagcaaggcagcgataactacaatgccggtgcgccggcctataagagggatgagccagggaggaattaccagtagaacaacactgctagaacaaatgatatgtagagtctagtacgagcataacgctatttgctgtctgttttggagtctatcgcatgtatactcttaccctgctttgcaaactcagtttcttttgtgtcgactaattacttcgatgtgtctgaaactggcgattgtttgaggcacttctagcattataaatgtttagtcaactagtgttttttggcc

SEQ ID NO: 6741 - DNA, 545 bp, Oryza sativa
  Clone ID: uC-osflcyp174g08b1
gctgattctcagtatcaaattgtgacgacagcagaactgcagccatctgcagaagatatctctgaagagaaacagaccatggagctgattacacagtttgagaagccaacattagcttcagaaaatgccatgacaaaaggatttgatgttgtgaccgactgttctgatcaccactttgtcaaagaaattggtcacgaaaatgtcaaaagaggttgggtgaagaagatacaacaggaatggtcaatcttacaaaacgatctgccagatggtattcatgttagagtttatgaagaaaggatggacctcctgagggcatgccttgtaggtgcagctggaacaccttatcatgacaatcttttcttctttgatattttctttcctcctgattatcctcatgagccaccttctgttcactaccattccggtggcctccgtttgaacccaaatttgtatgagtctggcaaagtgtgccttagcctgctcaaaacatgggcaggaactggtagtgaagtgtgggaccctgaaaattcaactgttcttcaact

SEQ ID NO: 6742 - DNA, 305 bp, Oryza sativa
  Clone ID: uC-osflcyp174g09b1
gttgtctgcgtctgtatatgatgcgggtttgtcttttcggtcctaggattcatgttgtcaagatttctgtcatcggtttccgatgcgaaatgatgatttcagctttactcgtggacctgaggttacacataaaattgataaaagttccttgtttaccctcctgtttctttttcttctctttgcataaaaacatgtaatgttatatacatattgattaatgttattgtttcgccataaaaaaaaaaaaaaaaaaaaaaaaaaaaaaaaaaaaaaaaaaaaaaaaaaaaaaaaaaaaaaataaataa

SEQ ID NO: 6743 - DNA, 498 bp, Oryza sativa
  Clone ID: uC-osflcyp174g10b1
tgtatacttgacgcaacagcccatcgtctgatccatccacgccgcctgcctccgcgggaaggaaagggagagagagggaggggaggcagccctgctcctctgcctgccgccgactgttcgtccgtcccggcggcatgggcgcgaacggcaacgacgtggtggcggcggcggcggcggaggagagcccgatgggggccgcgagggtcgtcgcggagggcggggcgacggtgttccgcggcgcggactactcgctgccccgcacgacggtggcgctcgcgctgcggctgggcggcatccacttcaacgtcttcctcgtcctcgcctcgctcttcctcttccccctccgcgtcgccgccatggttgtggcgttccagcttctcttcatgctcatacccctcaacgacaaggacaaattgtgccgcaagatcgccaggttcatatgcaggtacgcgatgggctacttcccgattagtctgcatgtggaggactacaagtgct

SEQ ID NO: 6744 - DNA, 307 bp, Oryza sativa
  Clone ID: uC-osflcyp174g12b1
ttgtatctgaggccatttgtttggctgaacaggaggaaagatgcaccaacctgatcaatgggtcgtgggagagtagagctcaaaaagattgaaaatccgacaaaccgccaagttaccttctccaagaggaggatggggctgctcaagaaagcaaatgagctggccattctttgtgatgcacaaattggggcgattgtgttctgaagctctggggagatgttctagtgccccacgcccccttggaggattgcaaatatctttgatagatacctgaaagcccccagcacccgttttgaggagatggatg

SEQ ID NO: 6745 - DNA, 466 bp, Oryza sativa
  unsure (1)..(466): unsure at all n locations
  Clone ID: uC-osflcyp174h02b1
atatgatctcccccccctcctcgctccccgccgtcgccgccgttttcttggagaggagaaatccgtaggctcagaggatttttggtagtcttgtttcgtgatattcgtgaagagggggggagctaaggggggattcgtaagatcagaattggatcacgcgggggcgcgctcgggatcgggggttccaaacacagcttcttcgttgaatttaagtggatgtactaatggagtcaaagggtggcaaaaagaagtctagcagtagtcgttccttgatgtatgaagctccccttggctacagcattgaggacgttcgacctgccggaggcgtgaagaagttccagtctgctgcttactccaactgcgcgaagaagccatcctgatagccctttcggcttctccatcctagtagnttaagatttcttgcaattccattttggcacttttcttctgacctatttctctggct

SEQ ID NO: 6746 - DNA, 595 bp, Oryza sativa
  Clone ID: uC-osflcyp174h03b1
gagctttatgaagatcgccactcacctgcgccgctcctgcttcctccactccttctcggttgtcttcctctactggttttatgtgatctcataattctgggggaatcatcttctccgcgtcaatccgccattgttactagtagtagtagagctctcttgttgttgttcttcttcttcgtgttcttcttcggttgattaaataatcgtagcagcagaagaagcagctgtttgtagacaaggtgtttgtggaaatgtcgtcgtcgtcgctgtcgccggcggggtcgtcggacggggactcggcgggggtggtggtggcggcggaccaccggagggagaagcggcggctgtcgaacagggagtcggcgaggcggtcgcggctgcggaagcagcagcacctggacgagctggtgcaggaggtggcgaggctgcaagcggacaacgcgcgcgtgctggcgcgcgccagcgaaatcgccgggcagtacgcgcgcgtggagcatgagaacactgtgctccgggcgcgcgccgtcgagctcggcgacaggctgcgcagcgtcaacgaggtgctccgcgtcgtcgaggagttcagcggcgtcct

SEQ ID NO: 6747 - DNA, 547 bp, Oryza sativa
  Clone ID: uC-osflcyp174h05b1
ctcgccgggagctcgttcatgagccacgccaagaaggtgaacgagatggacccgctgctgaagccgaagcaggacaggtacgcgctccgcacgtcgccgcagtggctcggcccgcagatcgaggtcatccgcgccgccaccaagtccatcgagcgcgaggtcaactccgtgaacgacaacccggtgatcgacgtccaccgcggcaaggcgctccacggcggcaacttccagggcacccccatcggtgtgtccatggacaacgcccgtctcgccatcgccaacatcggcaagctcatgttcgcgcagttctccgagctcgtgaacgagttctacaacaacgggctgacctacaacctggccggcagccgcaacccgagcttggactacgggttcaagggcaccgagatcgccatggcctcctactgctctgagctccagtaccttgccaaccccatcaccaaccatgtccagagcgcggagcagcacatccaggacgtgaactcgctgggtctcgtctcggccaggaagaccctggaggcggtggaca

SEQ ID NO: 6748 - DNA, 539 bp, Oryza sativa
  Clone ID: uC-osflcyp174h06b1
ctccacctcgcgcactcagtctgtactacctgtacgtacgtggccgccgctagctaagctaggaattgaaatggggatggagaggccgcaagagaaggtggccaccaccaccaccgtcgtcttcaacctcgccgagtccggctacgccgaccgccccgacctcgacgacgacggccgcgagaagcgcacagggacgctggtgacggcgagcgcgcacataataacggcggtgatcggctccggcgtgctgtcgctggcgtgggcgatagcgcagctggggtgggtgatcgggccggccgtgctggtggcgttctcggtcataacctggttctgctccagcctcctcgccgactgctaccgatctcccgaccccgtccatggcaagcgcaactacacctacggtcaagccgtcagggccaacctaggtgtggccaagtacaggctctgctcggtggcacagtacgtcaatctcgtcggcgtcaccattggctacaccatcactacggccatcagcatgggtgcgatcaaacggtccaact

SEQ ID NO: 6749 - DNA, 532 bp, Oryza sativa
  Clone ID: uC-osflcyp174h07b1
tttgagcattcctgcagagccccctctttctgtacaagatgataaattgacgcaggactggccatcagaaggagaaattatgctcaataacgtccatgtgagatatgctccacatttgccatttgttcttaagggccttactgtcacattccctggaggcatgaagaccggtatcgttggaagaaccggcagtggtaaatcaactctcatacaggcccttttccgtatcatagaccctaccgttggtcagatactcgtagacagtatcgacatctgcaccatcggacttcatgatctgagatccaggctaagcatcatcccgcaagagccaaccatgttcgagggtaccgtgagaaccaaccttgatcctattggagagtacactgatagccaaatctgggaggccttggatcgctgtcagctaggagatgaagttaggaggaaggagctgcgacttgattcaccagtgatagagaacggcgagaactggagcgtgggtcagcgtcagctggtgtgccttgggaggtgatcc

SEQ ID NO: 6750 - DNA, 431 bp, Oryza sativa
  Clone ID: uC-osflcyp174h08b1
ctttgaggccttccagcttgggatggcaccagtctatatggcctttctccgtttcatgggtgatgaaaatgaggcaaggaactatagctacagccttgaggtcggcgcaaacggcaggaaaatggtatgggagggcaccccccgaagtgtccgggacagccaccggaaggtgcgggacagccatgatggcctcatcatccagaggaacatggcgctgttcttctcggggggcgaccgaaaggagctgaagctgaggatcaccggccggatctggaaggagcagcagaccccagacggtgcctgcataccaaatctctgtagctaagcaatcacaacattcagaagaaacaaagaaactcaactccactttgcggccggataacatctatcccgttgccatgtcttactggttttttgtatgctccgaggca

SEQ ID NO: 6751 - DNA, 390 bp, Oryza sativa
  Clone ID: uC-osflcyp174h09b1
gcccgcaagaagaacagcctcaggttggatgattgggtgctgtgccggatttacaacatgaagggcgggctggagaagccgccggccgcggcggtggcggcggcggggatggtgagcaacggcggcggcgtcgagaggaagccgatggtgggggtgaacgcggcggtgagctccccgccggagcagaagccggtggtggcggggccggcgttcccggacctggcggcgtactacgaccggccgtcggactcgatgccgcggctgcacgccgacttgagctgctcggagcaggtgctgtcgccggagttcgcgtgcgaggtgcagagccagcccaagatcagcgagtgggagcgcaccttcgccaccgtcgggcccatcaaccccgtcgtc

SEQ ID NO: 6752 - DNA, 512 bp, Oryza sativa
  Clone ID: uC-osflcyp174h10b1
attattttggaaggaattctggttttccatgattcacgtgtccgggatttgatgaacatgaagatctttgttgacacagatgctgatgtgcgattaacaaggaggattcgacgtgacaccattgagaagggtagagatatcaaaactgtgctagatcagtactcaaagtttgttaagcctgcttttgaagacttcatcctcccaaccaagaagtatgctgatattatcatcccacgaggtggcgataatgatgttgcaattgacttaatagttcagcatattcgtactaagcttggtcaacatgatctctgtaaagtacaccccaatttgtatgtcattcagactacttatcagatacgaggtatgcacacaataatacgggatgctgtcacaacaacacatgatttcatattctatgctgatcggttgattcgattggttgttgagcatggtcttggtcatcttccattcaaggaaaagcaggtcataactccaactggatcggtttacac

SEQ ID NO: 6753 - DNA, 473 bp, Oryza sativa
  Clone ID: uC-osflcyp174h12b1
ttaagccacagcactggaggatgggatgctgctgctgccaacctgaatgaatcatctgatgtggatgcacataaggactcatggggcaaagcaaaagatacaacagctaatgctgaagaaaaaaataatgaaagtggaaactggaacaaagctggaccactagacaaagtttgtggcagtgattggggtagtccaaagttttccagtggtgatggtccatccagctggaacaagggagacaaaattggaggagattctcaaaacggcagctggagcagacctggtggaaactttgaaggtggtcgtgggtttgggcgaggacggtgcagaggcaggggccgagaatctggggatttcggtggcagaaatgaccaaggaagctggaagaactcagggactagtgacagttctggaaggccctctcggaggtctgatagtcaagttgagaaggaagtgggagattctggtggata

SEQ ID NO: 6754 - DNA, 344 bp, Oryza sativa
  Clone ID: uC-osflcyp175a01b1
tgtggcgagactcgtgagagaggagaagatccagaaatcgcaagctgcacgctatagctaggtagctatctccggggaaagagagagtaggctgccatggagagcttcttcgtcttcttcacggcggcggcgttgccggtggtggtggcggcggcggtgatcgccgggctgtgcattacggcggcgtggctggcgaggccgcggcgcgtggcggaggtgttccggaggcaggggatcgacggcccgccgccgtcgtcgttcctggcggtgaacctcccggagatgaaggcgagggtggccgccgcggcgtcggcggcggcgccaacggcggactgggaggagac

SEQ ID NO: 6755 - DNA, 447 bp, Oryza sativa
  unsure (1)..(447): unsure at all n locations
  Clone ID: uC-osflcyp175a03b1
cttcttacatcagtgatcatctctaccatcatctcgttcgtcagcaaagctcatggcatcagtgttattggcgatctccccaagggattgaaccctccttcagcgaatatgctgaccttcagtggctcctacgtaggactggccttaaacacaggaattatgactggcatactatctctcactgaagggatagcactaggcaggacatttgcatccatcaacaactaccaggctgatggaaacaaggagatgatggccattggtgtcatgaacatggctggctcatgtgcctcctgctatgtcaccacaggatcgttctcgaggtcggcggtgaactacagcgcggggtgcaagacggttgtgtccaacatcgtgatggcgtccgcggtgctggtgacgctgctgttcctgatgccgctgttccactacaccnccaacgtgatcctc

SEQ ID NO: 6756 - DNA, 480 bp, Oryza sativa
  Clone ID: uC-osflcyp175a05b1
gtcggatctaattaatttacctcctccacctcctcctcctccccccgatcggatcggcccggctcctcctcctccgccgccgccaccgccgccgcagataggagaagatggccgcacttgataccttcctctttacctcggagtctgtgaacgagggccaccctgacaagctctgcgaccaagtctcagatgctgtgcttgatgcctgcctcgccgaggaccctgacagcaaggtcgcttgtgagacctgcaccaagacaaacatggtcatggtctttggtgagatcaccaccaaggctaacgttgactatgagaagattgtcagggagacatgccgtaacatcggttttgtgtcagctgatgtcggtctcgatgctgaccactgcaaggtgcttgtgaacatcgagcagcagtcccctgacattgcacagggtgtgcacggccacttcaccaagcgctctgaggagattggtgctggtg

SEQ ID NO: 6757 - DNA, 473 bp, Oryza sativa
  Clone ID: uC-osflcyp175a06b1
gtgttattccaggttatgttgtggaaggcacccttgcaaagaccattattaacgagccaagagaagtgacactggcgaatgggctcactgctcctcttcatatgcaggtccactatatttccttttctgctcatgctgatttccctcagacaagcaccttcttggatgagctccagccacccaacattgttcttgtacacggggaagcaaatgagatgtcaagacttaagcagaagcttatttctcagtttgatgggacaaatataaaagttgttaaccccaagaattgccaatcagtggagatgtatttcagttctgagaaaatggccaagacaattggcaggttggctgaaaaggtaccggaagctggagaatcagttaatggcttgcttgtaaagaagggattcacatatcaaattatggcttctgaggatctccgtgtgtacacgcagctatctacagttaacattacc

SEQ ID NO: 6758 - DNA, 427 bp, Oryza sativa
  Clone ID: uC-osflcyp175a07b1
tgtcgtcgtccgccgcgcgcacgccgccgccgtcatggggaggagacctgcatggtgctatcgccagatcaagaacaagccgtaccccaagtcaaggtactgccgtggtgtccctgaccccaagatcaggatctacgatgtcgggatgaagaagaagggtgtggatgagttctcccactgtgtgcatctcgtctcttgggagaaggagaatgtcaccagtgaggctcttgaggctgcgcgtatcgcgtgcaacaagtacatgaccaagtctgcaggaaaggatgccttccacctcagggttcgggttcacccgttccatgtgctccgtatcaacaagatgctttcgtgtgccggggcagataggcttcagactggaatgaggggtgcttttgggaagccacagggaacctgtgctagggtggatatt

SEQ ID NO: 6759 - DNA, 514 bp, Oryza sativa
  Clone ID: uC-osflcyp175a08b1
attcgcagttgccgcctaagagctttcgccttgccaggtttgagagctaatgctgctaattccttccttggatgtctgatgcaatgcaacaccaactgtattctctttaaattattgttttgccacttctataattaatgtttactgaatgtaagtgagctgttgatggacgcctaatgatgctaaaatttctcatagcatctgcagttactgcctaatagctttcgccctgccaggcttgagagctagtgctgttaaatccttcgttgaatgcatacccaagctcactattttgatcaacctgtgtttttaataaatataaattctaaaagttcgatgaaatgttgatttcatgtgaaacttgtctgttcgagttgtgaattcagctattgagacagtgaaaagagcagttattccacaagatccagctattgagacagtgaaaagagcagttattccacaagatcagaactagacaagaacacttccaacctgtaaaatcttattttgtact

SEQ ID NO: 6760 - DNA, 435 bp, Oryza sativa
  Clone ID: uC-osflcyp175a09b1
gtgctaaattgacagataaactggagcaacagatgcatgatcccttggttttaaggtctcgttgcctgcctttatggtgcactgaactgatgtctgcatgtcccttcttgttttcttttgaggcaagatggaagtatttccagctgacagcatttggttctttgaccccacaacatgggaatatgatggatacaagtggcagtggtgtaatgacagaaagggtgccttccttctcacggaaaaagttcaaagttgatcgcgacaatatacttgtttctgctgctaaagtgatgcaatcacatgctcggagtaatgcaatgcttgaagtagaatatgaagaggaagtaggcacaggcttgggtcctacgatggaattctatacattgataagtcatgagtttcagaagtctggtttaggcatgtggagaggggagc

SEQ ID NO: 6761 - DNA, 488 bp, Oryza sativa
  Clone ID: uC-osflcyp175a10b1
gtcgttcattctactccaccactccactccccaatccaaccaccccccgaacaaccggagaagagaggctgcactccactcgccgccggcgaccgatgctccgcgccgccctcctccgctcaggctccggcctccgccggcctcccatggccgcgccgctctccaccgccgccgccgcctcgtggctctccgacagcgcctcgtctccgcctagggtgcgcctcctcatcggcggggagttcgtcgagtcgcgggccgacgagcacgtcgacgtcaccaatccggcgacgcaggaggtggtgtcgcggatcccgctcaccaccgacgacgagttcagggccgccgtggacgccgtcaggaccgtcttccccgggtggcggaacacgccggtgaccacgcggcagcgcatcatgctcaagtaccaggagctcatgcgggccaacatggataaactggcagagaacaatacaaccgaacaggggaagaca

SEQ ID NO: 6762 - DNA, 463 bp, Oryza sativa
  Clone ID: uC-osflcyp175a11b1
tgttttctccttccttcctcttccagtcttcctcttctcctctccaccaccaccattcctccccccttctcccctcctccccgcgacgcgaaggcgaccaccacgcccatgccctccgttcctcgcggcggcgcgaccgcgaccaccaccaccagcagcagcagctagccccatggccaagtcgacgcccgctgcggcggcggcggcgcccgaggaggcgacggcggcggcgctgcgcctccgcctgcgccgcctcgtggtcgccgtgacagccggcggcgtcggaggggaggaggccttcgacgaggcggcgtctgcgctcgcggcgctgagagacgcggagctggggccaccgccgaaggaccgccctcgggccggggcggacaggaggaggagtgggcactccgaggcggcggccgtgccggagcaggtcctttgccctatcttgtaagagatcatgcgg

SEQ ID NO: 6763 - DNA, 429 bp, Oryza sativa
  Clone ID: uC-osflcyp175a12b1
tgttttcaactatcgcctgaaggagaagatggcgatggccaataatccacatgcttcacccttcccaaagaaatttccgatgcagcccgagaggaggacagcatttcctcaatcctctcactccagctactcgaagattctccctctatttcgccccaagtttaattcaaggtcaaggccagagtcgccagcagcgtctgatgcagcatcacagactcctttccggccaactgaaagtccaaatccaaggtgaaggttccccgctgcagaggcggctccttatgttccagctgggcacttccgtatgccttgccatagcatggctcctccagtcacagtcaggacttttatccctgttttctttgcttcacctctcccacccccaggtgcgcggacacaacagcttcctcctcttatgagccacccgcc

SEQ ID NO: 6764 - DNA, 539 bp, Oryza sativa
  Clone ID: uC-osflcyp175b02b1
gaagggtctcgtcgactcggacacattgcctctcaatgtatcacgagaaatgctccaacaacatagcagcctgaagaccatcaagaagaaactaatccgcaaagctcttgacatgattagaaaacttgctgaggaagatcctgatgagtacagcaacaaagataagacagatgaagaaaaaagtgcaatggaggagaaaaagggccagtatgccaagttctggaatgagtttggaaaatcagtcaagttgggcatcattgaagacgcaactaacaggaaccgtcttgcaaagcttctgagatttgaaagtaccaagtcggaaggcaaacttgcctctcttgatgagtacatttcaaggatgaagccagggcagaaggacatcttttacattaccggaagcagcaaggaacaattagagaaatcaccgttccttgagaggctaaccaaaaagaactacgaggttatctacttcactgaccctgttgacgagtacttgatgcaatacctcatggactacgaggaccagaagttccagaacg

SEQ ID NO: 6765 - DNA, 524 bp, Oryza sativa
  Clone ID: uC-osflcyp175b04b1
gttggtcggtggctcaaggacaggaaggagaagaagaaagaggagacacgggcacacaatgcgcaggtccacgctgctgtttcggttgcagcagtggctgctgcagtcgcggctgtcgcagctgcgacagctgcagcctctggttctggcaaggatgaccgtgctgcccgcaccgacatggccatggcatccgcagctacgcttgtggctgcgcaatgcgtcgaggctgcagagtccatgggagctgagcgtgagcatttggaggctgtcattggctcagcggtgaacgtcaggacacctggagacattgttactgtcacggctgctgctgctaccgcattgagaggtgccgccacattgaaagcaagggctttgaaggaggtgtggaacatcgcggcagtgatccccgtagaaaagggtacaatgggaggagggcaccatcacaagcagaatatgcagaagcagcaccgcaggctggagagcaatggtagtagtattagtgatgatctttcactcgaggagga

SEQ ID NO: 6766 - DNA, 441 bp, Oryza sativa
  Clone ID: uC-osflcyp175b05b1
gtgcattgaactttgcaggctatgagctcgccaagaaagcaatgatccaaactgagagtgactccacagactctgtacatgagaagagaaccacagtgggttccagaggatgacagatccaaattcacctggttactctatatggtgtaaagaaaggacaagccatgcaacagaaatgtttttgcccttgttgcaaagaattagaaccattttttggcattgccttcgtgatacatgtaccaaatgttaggtccttttatatccttcacatcctccccaacagagggaaatttgtcgaattcccattaccataggcctttattataccactgtatagtagatgacagaactacaggagtagacgtgctgccctttcttgcacagttcacttcatctgttgttatttctttagtaatccagagccttgatgacatgtttatt

SEQ ID NO: 6767 - DNA, 486 bp, Oryza sativa
  Clone ID: uC-osflcyp175b06b1
gtcgaccacctccaaaaccagaccccgaaatctcgaggagcttgtcttttttcggtagcaatggcgttggagcagaccttcatcatgatcaagcccgacggcgtccagaggggcctcattggcgaggtcatcggccgcttcgagaagaagggattctacctcaaagccatgaagctcatcaacgtggagaagtcgttcgccgagaagcactacgccgatctgtcctccaagcccttcttcggagggctcgtggagtacatcgtctccggccccgtcgtcgccatggtctgggagggcaagcaggtcgtctccaccggccgcaagctcgtcggggccaccaaccccctggccgctgagccgggcaccatccgtggcgacttcgctgtcgacattggcaggaatgtcatccacggaagcgactcggtcgagaacgccaggaaggagattgctctgtggttccctgagggcattgccgagtggaggagc

SEQ ID NO: 6768 - DNA, 488 bp, Oryza sativa
  Clone ID: uC-osflcyp175b07b1
ttttacgcgtccgcccacgcgtccgcccacgcgtccggctaattaagcaaaagaagaagaagaagaaagaagaagatgaagatgcagaccgctgctagcagtgtcgttggattgtcggccgtgttgcccgctgctgtgaaggggcgcagcctgcagattcaggctcctcgccgtgttgcgttgcgcgttcgtgcggcggcggcggcggtggcagtggaggctgcggaggtggactacagctctaacatctcggtgtttccgatggaggcgtgcgacctcatcggcggcgaggcgtgcaacgtgcagatgtacccagaggccaagctctcatcatcggctgctgttgctgttcctcgtgcggcggcggaggaagtcgacagggactacctatcctacgacgagcccaccacggtgttccccgaggaggcgtgcgaccatctgggcggagagttcatgcaggccacctgatcccattcccatccatggag

SEQ ID NO: 6769 - DNA, 482 bp, Oryza sativa
  Clone ID: uC-osflcyp175b08b1
tctttttgatcatggttactgcttgccagagaagtttgaagattgtacctttgagtggctgtactggccccaggctcgtgaaccattcagtgatgaaaccattgcatacatcaaatcactagacgctgaagaggacatcaagcttctcaagttccatgggtgggagctgtctgcaagatgtgctcgtgtcctgtgcatcagcaccatgcttttaaagaaaggtgcagcacgaggcctcacaccgtatgacatcgggcgtatactgtgcagggaaactgtgaatagagactctgagattgaggacatcgtccaggaagccgagggccatgttctcccagggtcaagtgaagtaatcttcttagaaaccgtatctgaaatcatagaccgtcacctcgacaagaagttcgcttagaaacccaaaataactgatctagttgttcagctgtatcccagtagtttggtgtagtatgttgacaagccac

SEQ ID NO: 6770 - DNA, 532 bp, Oryza sativa
  Clone ID: uC-osflcyp175b09b1
tttttgtgatgagggcctggatattgttgatgcaagcgaagcgatggcgaatggtggtgacggttttgatgctgaggagggtgaagcaaatgaggaggatggcgaggaaggtggttgggacctagaagatctggaacttctgcctgaagcagagaccccaaaaaatgctggcaatgcacgctcagcggtcttcgttgctcctccaccaggcatgcctgtcagcctgatttggactcagaaatcttctcttgctggggagcatgcagcagcagggaactttgacactgcaatgaggttgcttagtcgccagttgggcataaaaaactttgctcccctcaagcccctgtttcttgatctgcacatgggcagccactcatatcttcatgcacttgcaactgcccccatcataccagttgctgttgagaaaggttggagcgagtctgcaagtcctaatgtgagaggccctcctgcacttgttttcaccttcccacaaatggaagacagactcaaggctgcctattaggccaccaca

SEQ ID NO: 6771 - DNA, 219 bp, Oryza sativa
  Clone ID: uC-osflcyp175b10b1
tttgtcatattcataacctgccgattgagaacaggtcatctgttctcccaatgcctcccaacacaatatctgaagcctttgctaataccaccaggtggtggccttcctgggatccaaggaggcagttcaactgctcgcaaacttgtatggcaagcgcacagcttacagagcgaatacgttgtggcccttgttgcaaaaaagatgtaccaactccacaag

SEQ ID NO: 6772 - DNA, 411 bp, Oryza sativa
  Clone ID: uC-osflcyp175b11b1
tgtttgcgatgccgatggcggcgctggcgggggtggcgatcgcgacggtgctggcggcggcggtgctggtgacggcggggttccacgtgtccggcgggcacctgaacccggcggtgacggtggcgctgctggcgcgggggcacatcacggcgttcaggtcggagctctacgacgccgcccagctgctggcttcctgcctcgcctgcattctcctgcgctacctcaccggaggcatggtaagcacccaacccgctaccgtcgataaatctttctttctatctttgcctgtcaaaattaggatccgtgaacagaggaggaaatttttcttatttgggggtggaaacatgcctacctgtcgaattgtccggggccatcaacctctaaatttgttatctgtagctttttttggga

SEQ ID NO: 6773 - DNA, 58 bp, Oryza sativa
  Clone ID: uC-osflcyp175b12b1
acccacgcgcccggtatatgaacgaaattcagcagaaaatcacggcgcgtgagcttgc

SEQ ID NO: 6774 - DNA, 517 bp, Oryza sativa
  unsure (1)..(517): unsure at all n locations
  Clone ID: uC-osflcyp175c01b1
ttttgggaaagtcggtgggtcaagtcagaatggaagaaggatgagaacatggctggtgaatggaaccacacatctgggaagtggaatggagatcctgaggacaaaggtatccaaacctctgaggactacaggttctacgctatttcagcggagtacccagaattcagcaacaaggataaaaccctggtgctgcagttctctgtaaagcatgagcaaaagcttgactgtggtggtggatatgtcaagttgcttggtggtgatgttgaccagaagaaatttggtggggacacaccgtacagcattatgtttggaccagacatctgtgggtacagcaccaagaaggtccatactatctttactaagaatgacaagaaccatttgatcaagaaggatgtcccctgcgagactgatcagctgtcccatgtgtacactttgatcatccatcctgatgctacatacaccatacttattgacanatgtgagaagcaatctggcagcatctacgagcactgggata

SEQ ID NO: 6775 - DNA, 532 bp, Oryza sativa
  Clone ID: uC-osflcyp175c02b1
gtcctacttactctctccgattctctcccctccttccccgataggggagagatccagcagcggcagcagccaagctcaagctctcccaccgagatcccccgcgcgccgcgccccgtcggccgccgccgccgtcgtcgccgccatggaggcgtcttcctgggacgccctccgcaagcaggcaaggaggctagaagctcagttagatgaccaaatgagtgcttaccgtaaattgatttccatgaaatctgatggttctgagaatgatatcgagtccgatatagaaagatcgctgaagcaacttcagcaagtaaattctcaaatgcagacatgggtatcatcaggaggctcagaagtcctttctcatacattgactcgtcatatggagatattgcaagaccttacacaggaattctatcgcctccgatcaagccttagagcaaagcaacaacatgcttctcttcttgacttgagagattctgacagagcgaagtttgatgttgaagagggtgctgactctgatcaagctctgctc

SEQ ID NO: 6776 - DNA, 104 bp, Oryza sativa
  Clone ID: uC-osflcyp175c03b1
gtcctccctttttttttttatgttcggaactccgctcaaagaacctatttctttcggtttttggttctcaacctggagtgtgagaagctgccgtttggatattg

SEQ ID NO: 6777 - DNA, 511 bp, Oryza sativa
  Clone ID: uC-osflcyp175c04b1
gccgcgtgccgccggccttcttgcccgacgtcgaggacgccgagagccccatccacgagatcaagcgcaagggtggcgatttgagatattgtcagaaatgttcccattataagcctacccgtgctcatcattgtcgtgtctgcaagagatgtgttctaagaatggaccatcactgcatatggattaacaattgcgttggacatgaaaactacaagattttgctagtctttgtgctgcatgctgtagtagcaagcttatattcactggttctggttataggaggtgctgtgcacagcttgcctaagaatgaacaattaggcagtgattcttctagaacatcaattatcatttgcggggtatttttgtgtccactagctttggcattgcccattcttttgggttggcatgagtatctgatctttcataataaaactactattgagtaccatgaaggagttagggcaatgtggttggcagataagggtggaatactataccaccatccctatga

SEQ ID NO: 6778 - DNA, 410 bp, Oryza sativa
  Clone ID: uC-osflcyp175c05b1
tttccatccatggagctgtagcctgcaagcttccacagagaagagaacacttgggaggaggaggaggatcgagctgtagatctttctctccgttgtactcttctccttggcttggcttccggaccaaactaatcacggggggctttcgcttcgttagcaacgctggcgaagcttcttccggggttctagaaccttctagaaggagtgtggggttatggggaggcagcggtggtggctgctgctggcggcggcggcggtcgtcgtcggtgccggggcgcaggagacgtgctcggacatggtgccggcggcgccgcggcgcggggagtggatgtcgctggccagcttcggcggcggcggcggcgacgggcggacgctgagcacggcggcgttccaggccgccgtggcgagca

SEQ ID NO: 6779 - DNA, 555 bp, Oryza sativa
  Clone ID: uC-osflcyp175c07b1
ttgtttatcatcagcaaccaattcgcaccgatcgatcgatcgatcgatccagcaactagatcaacagtactagctaggaagcatggcccgtgcacagttggtgttggtcgccctggtggcagctctgctcctcgccgtcccgcacgccgacgtggccatcacctgcggccaggtcaactccgtcgtcgggccctgcctgacctacgcccgcggcggcgccgggccgtcggcggcctgctgcagcggcgtgaggagcctcaaggcggcagcaagcacgaccgcagaccggcgcaccgcctgcaactgcctcaagaacgcggcccgcggcatcaaggggctcaacgccggcaacgccgtcagcattccctccaagtgcggcgtcagcgtcccctacaccatcagcgcttccatcgactgctccagggtgagctgagccatcgatcagagagacggatcatatatatacaagagtgcgccggttgccacctagtagattctgcctgggtcgatgtgtggagccgaattctgtattcagtactagtagtatcatatctg

SEQ ID NO: 6780 - DNA, 414 bp, Oryza sativa
  Clone ID: uC-osflcyp175c08b1
gtcgcttctctcctcctctaatctcaagtctctgtctcgtcgtcctcgcatctccactcgccatgggcaagattaagatcggaatcaacggtttcggaaggatcgggaggctcgtggccagggtggccctccagagcgaggatgtcgagctcgtcgccgtcaacgaccccttcatcaccaccgactacatgacctacatgttcaagtacgataccgtgcacggccaatggaagcacagcgacatcaagatcaaggactccaagactctgctcttgggcgagaagccggtcaccgttttcggcatcaggaaccctgacgagattccgtgggctgaggctggtgctgagtatgtcgtggagtccaccggtgtcttcactgacaaggagaaggctgctgctcactcgaagggtggtg

SEQ ID NO: 6781 - DNA, 542 bp, Oryza sativa
  Clone ID: uC-osflcyp175c09b1
ttgttttgaacaagcacaaccgtctctacatggaagctcgccccttggaggagggattggctgaggccattgatgacggtcgtattggcccacgtgatgatcccaaggtgcgctccaagatcctgtctgaggagttcggctgggacaaggatcttgcaaagaagatttggtgttttggacctgagacaactggccccaacatggtggttgatatgtgtaagggagttcagtatctgaatgaaatcaaggattccgttgtggctggtttccagtgggcatcaaaggagggtgctctggctgaggagaacatgcgtggtatctgctttgaggtgtgcgatgttgttctccatgctgatgctattcacagaggtggtggccaggtcattcccacggtcaggagggtcatctatgcttctcagctcacagcaaagcccaagcttcttgagcccgtctacctggtggagatccaggcccctgagaatgcccctggtggtatctatggtgttctgaaccgaagagaggacatgtgttcgaggagatgc

SEQ ID NO: 6782 - DNA, 478 bp, Oryza sativa
  Clone ID: uC-osflcyp175c12b1
tttgtataaaaggatcaattacgcagatacccattttaaccatgcctaatgatgatattacacatccaactcctgatcttactggttatatcactgagggacagatctacattgacaggcaactacataatcgacagatctatccaccgattaatgtccttccttcactctcccggctcatgaagagtgctattggtgaaggcatgactcgcagggatcattctgatgtctcgaaccagctgtatgccaattacgccataggcaaggacgtacaggcgatgaaggcagtggctggagaggaagcgctgtcatcagaggacctgctgtacctcgagtttcttgacaagttcgagcggaagttcgtgacacaaggagcatatgacacacgcaacatctttcagtcgcttgaccttgcctggtcactactgcgcatactttcccgagagctgctttaccgataccaacgaaaaccttgacc

SEQ ID NO: 6783 - DNA, 542 bp, Oryza sativa
  Clone ID: uC-osflcyp175d04b1
gacaaattctccaggtatgcccactttgttcctctgtcacacccattctcagccctagatgttgcagtgtcatatatgaagaacatctacaaacttcatgggatgcctaaagtactgatctctgatagagacaaaatttttactagcaaattgtgggaatttcttttcttgaaatctggcattgccctgcaccttagttctgcttatcacccacagtccgatgggcaaactaagagggttaaccagtgtctggaaatgtttctccgttgtttcactaatgcagccccttttaagtgggttacttggttacatttagcagggtattggtataatacttgctttcattctgctttgaacaagacaccattcgaagtactctatggccataaccctcttcagttgggtgttactatggaaacttgtgcgattcccgatctggctgtttggcttcatgagaggaaactgatggcagaattgctgcaacagcatttgcaccgagtacaacaaaagatgaagtttcatgctgataagaacaggtcatt

SEQ ID NO: 6784 - DNA, 176 bp, Oryza sativa
  Clone ID: uC-osflcyp175d05b1
ttcctcacctggcgcgccgaagcttctctcctctctctcaactccggcgagaggaggaggcggcggtggggcgttcgtcgggagagagaccagggccggggggctagggttcggccgttcagagaggcggcggctgaggaggaggaggaggaggaggagggggtgaggtctgattt

SEQ ID NO: 6785 - DNA, 431 bp, Oryza sativa
  Clone ID: uC-osflcyp175d06b1
tttgtcaccaagccatcagcgaccacaagcaggatatcgccgataacaggtcaggccgaatgcatggccgtcaccgttgttcgggttggagctgtggctggaaaaccagacgacatcgtcccagtggctagaatgaacaactaagttatgatcggagaaatagacggtgtacgtcatcgtctagtggctatacataacaactaattagcacgcatggtttactagggaaaatgtgagtttctacttgggataactagggatgatggttataggctctgtcatatgtcatgtgtaactggccagtcatctaccacggtgtcgctagatgccatgaacgtaataatccatatatgtataagtttattatatgtcaataattgtgtgacatgcttgtaatgacatatatataagatacaaaagtggctactacc

SEQ ID NO: 6786 - DNA, 528 bp, Oryza sativa
  Clone ID: uC-osflcyp175d09b1
tttgccgccgccgccgccgccgcgccgcccaatcccaacgttctgcagctagccccacgcctccgaggcctcgtctccttcccctcctcatactcctcctcatcgccgttctccaaccgcctccgcctccgcctcccccgcgccgcctccatgtccgccgaggcgcgggtgcccgtggcgccgccggcccaccccacctacgacctcaaggccgtcatcaacctcgccctatccgaggacgccggcgaccgaggggatgtatcttgcttggcaaccataccttctgacgtgaaagctgaagccacctttattgcaaaggaggatggtgttgtcgctggaataagcctagcagatatgatatttaagcaagttgatccatcattgaaggttgaatggtttgaaagtgatggaaattatgtccataagggattgcaatttgggagagtttatggttgtgctcgcaacattattgttgctgaaagagttgtgctcaatttcatgcaaagaatgagtggaattgctacaatg

SEQ ID NO: 6787 - DNA, 323 bp, Oryza sativa
  Clone ID: uC-osflcyp175d11b1
aaacaatgaaagaaacttttagcaactaattaagttcagttcaactgggcagaatatcatctccatcctgtttgcatgagatgagggagttaaccttgttaaccctgttgttgtaagtgtgtaaaccttaaccttgttaaccctgttgttgtaagtgtgtaaacctttttcagtgacaattcattcaaatgtttccaaagatatggatatcccgaactgatcagcacattgaagaagtacaatatgctttgatagttccttgtaatgtgtcattaagcagaagttgaaaaacgttctagctggtccaaaaaaataaaaatata

SEQ ID NO: 6788 - DNA, 446 bp, Oryza sativa
  Clone ID: uC-osflcyp175d12b1
tcttgttccctcggatcttcggccatgaagctggaggtattgtggagagtgttggagagggtgtgactgatcttgcccctggtgaccatgttctccctgtgttcactggggagtgcaaggagtgtgcccactgcaagtcagcagagagcaacatgtgtgatctgctcaggatcaacactgacaggggtgtgatgattggtgatggcaaatcacgcttttccatcaacggtaagcccatttaccatttcgtcgggacttcgacctttagcgagtacactgtcatgcatgttggttgcgttgcgaagatcaacccggcagctccacttgataaagtttgcgttcttagctgtggtatttctactggtcttggtgctacaatcaatgtggcacagccacctaagggtgcaacgggggctatttttggtctaggagctgtaggccttgct

SEQ ID NO: 6789 - DNA, 541 bp, Oryza sativa
  Clone ID: uC-osflcyp175e01b1
atggtatcctgacctaggtggaaagatgaacatcaatatgatgccttcactcctggaggaattcaagagcaacaaaagcaaatcttatgagctctcagaaattgctggtcatgttgttgagttcagtgctgatcaatatggaagccgattcatacagcaaaagctagaaacggccagtactgaagagaaggacatggtcttttcagaaatcatgcctcaagctctcacgttgatgaccgatgtatttggaaattatgttgttcagaagttctttgagcacggaagccctacccagataaaggaattggccgaccagcttattggacgtgttcttgctctcagtcttcagatgtatggatgccgggttatacagaaggctatagaggttgttggtttagatcagcagactaaaatggttgctgagctggatggacacgtcatgcgctgtgtacgtgatcaaaatgggaaccatgtaatacagaaatgcatagaatgcatccctcaacatgctatccagttcattgtctcaacattctatggt

SEQ ID NO: 6790 - DNA, 426 bp, Oryza sativa
  Clone ID: uC-osflcyp175e02b1
acttctaccaccgccgcagccatggcgaccgggtgctatcgcggcggcggtggcgccagggaccacgctgaccagcccgacgacttctacgagttcgagcccacgctgtacggcggtggctacgacctctttatgacctttggacgtccgttctccgcccttcgactagacctgctacccttgctccgctccctacacctactactacgcctcgcactactgcgtcgacgagccctacccgtacgcccaccactacatgtcgcaggcagactacggtttccgacctcagcacgagcagcagcagcagccgtcctacgccttctccggctaccgttcccttcacgagcagaagctatcctacggctcctttggctacggatctaagcccaagcccgactatggttttcgtcccaggctgaggaggag

SEQ ID NO: 6791 - DNA, 389 bp, Oryza sativa
  Clone ID: uC-osflcyp175e03b1
gaaaagaatttcaaagcttagccgaagatgccaatggagaggtcggtgtcgtgcgccgtgaggccaccggcggcgttcggtggcggcgcagccgcggacctgcggtgctacagcgcgtcgtacgccacgtcgtacaagccgggcgctggcgcggcggcggcggcgggggcggggacgaacacgacgacgaaggtgatgaagcgcgccacgagcgccaacgcgtggtcgcggccgggcggcggcggcggtgtgcagcggagcgggagcaccaagacggtggtgtcctccgccgccgggtggagccgcggcggcgggccgacgcccgggttcaacctgcggagctacagcgcgtcgtacgccgcgtcgtactcgccgttcgaggacccgag

SEQ ID NO: 6792 - DNA, 524 bp, Oryza sativa
  Clone ID: uC-osflcyp175e04b1
gtgtcatgtttccaattggaaaagtaaggaacaagtaatattgaatttcggagctatcgcaatgactggttctgaaatagaacagtcgttccagaaagttgagtgtgccggggatattatctcattatttattaaatacctggagaacaatacgtatcctgatgacagcaggatctttgtcccaccactatacaagggcaaaggaggtatgaagaaaaagattaaagatgcactcggtggatccaacgaaaagaaatcagcagtggagtttcctcatcgatttatatactgccctgtcttatttctctggtgaatggattgtggtctgtttccaactgaagaatatgaaacagatcggtattctttgcaacaacggtggcgacgaaattaaaaatttcgctttggatttgggaaagaaattaaacaaagtcttaggagactgcaactacaaaacagtgtcatttgatgaaaaatctctgtcattttttccgtcttgtgtacagcccaatgacagtgtgttcgca

SEQ ID NO: 6793 - DNA, 457 bp, Oryza sativa
  Clone ID: uC-osflcyp175e06b1
tttgttttcgtactcgcctctctccgcgccctcctccgccgtcgctcgccgtcgttcgtctccgccgccaccgccgccgtcatgagggagtgcatctcgatccacatcgggcaggccggtatccaggtcgggaacgcgtgctgggagctctattgcctcgagcatggcatccagcctgatggacagatgcccggtgacaagaccgttgggggaggtgatgatgcttttaacaccttcttcagtgagactggtgctgggaagcatgtcccccgtgctgtcttcgtcgatcttgagcctaccgtgattgatgaggtgaggactggtgactaccgccagctcttccaccctgagcagctcatcagtggcaaggaggatgcagccaacaactttgcccgtggtcactacaccattggcaaggagattgctgatctgtgccttgaccgcatcaggaagcttg

SEQ ID NO: 6794 - DNA, 523 bp, Oryza sativa
  Clone ID: uC-osflcyp175e08b1
ttttgctctcctctttctctcttctccagtcctctcttctccagcggcggagcaacgcgagcggtggggcgaggggcgccgccagcggtcgggggtggagggcggtgggtacgaaaggcggtgggggcggagggcggcgcgggctgcggggcgatgcgagccgccgtgcggaggagaggcgagcagcgcaagcggctggccgacggtgggagcggaggggcggcgcgagcagcggagcgacaggagcggctggatctggccggagcgcggtttgtcggcgacgacggcatggcgtgcagcgctgcgcatattctctaccttcgctcctccatgccttgatccggattggggcgggagaaccagatggatgcggcggttacgggatggcgttaggagagagaaactccaaatctgccgattctttcttcggaatagcgcatgcgttatttttggaggcttcgatggcgcatctactggagcctgattttctccttccatgtgctatatttgagatggaagattg

SEQ ID NO: 6795 - DNA, 530 bp, Oryza sativa
  Clone ID: uC-osflcyp175e09b1
ttttctacgtggtgccgctcgacaaggccaccgggatgacgcgcccgctcgtcgagatcctccgggacctcaacaagcgcgtccccgacaagatcatcgaccccgacaccaacaccgtcccctggtcagtgctgctccccatccccccttcgatctcttctcctgcccgttccgctcttgcgctgcagaatgatccggctgatgttgcaataggatttaggcacagcgaagttatcgaattgatagggtgaatgaatgcgcgacatgaatcattttggggattttgctggagcaattatcgcaattcaggaatttgggagtaaaggtggtgccattttttcacgtatcgcattggatggaagatttagctttgctttcaatagctaatgaattttccaccggcgcgaacaattcgatcggttttgccttgtgttaattacaaaatgttctacctctaccatccaagggccaaacagggggcacgttttatcaactatcgatgagtatgggtccactggatattaggatga

SEQ ID NO: 6796 - DNA, 515 bp, Oryza sativa
  Clone ID: uC-osflcyp175f01b1
cctcttcctgttccccccccccccctctcttctgtccccccggccggggaagaaattttgcccccaaaataattttctgcacggacgatcaatgaaagggcaaaatttttctgcgcctccggttgaaggaagccgtgatccatgtcggacgagactggccgcaccattccaaagttcggcgcatgggacgtcaacaacccggcctctgccgacggtttcacggtgatcttcatcaaagccagggatgagaagaagggccccgtcaacgtggacgccagcaccaggtcaaactctgacatgaaagactccaataacaataaggcaacagagaagatcaacccctaccaccgcaggacaaactccgcatcaaagaagtggttttgctgtgtgtcgcccagccccacccaaccttgaggaagcataggaataccaaatataacatgatgctgctactgccgccttgtaatgcatatagtaatgattatacacacccagttgaaaatggccggtgttat

SEQ ID NO: 6797 - DNA, 100 bp, Oryza sativa
  Clone ID: uC-osflcyp175f02b1
tttcttgagtccctccaggacacccgcgcaaggcaatatagtggaagccgatagcctggacacgcatgctatgagagaggaggcagcgaagatggctgac

SEQ ID NO: 6798 - DNA, 96 bp, Oryza sativa
  Clone ID: uC-osflcyp175f03b1
gaggccctccagcgcccccgcgcggagtaatagagcggcagccgataggtcgggcaagcatgctccgagagaggaggcggcgaagatggctgacga

SEQ ID NO: 6799 - DNA, 308 bp, Oryza sativa
  Clone ID: uC-osflcyp175f04b1
ctttttgaggccctccagcgcccccgcgcggggcaatagaggggaagccgaaagctccggcacgcatcctacgagagaggaggtggcgaagatggctgacgagtctctggagaagggggagatgtacgggatccgattatgcaacgtagggtaccagagcactatgaccttcaagcggttacgccgaaagatgatactgggccagagccccctatgcctcggccaaagagggaacgaaggatgccagatactgttcacaggctcaatgctgtgcatattacaggccctgaggatgatgacacatgtgg

SEQ ID NO: 6800 - DNA, 102 bp, Oryza sativa
  Clone ID: uC-osflcyp175f05b1
ctctttgaggccctccagcgcccccgcgcggaccaatagaggggaagcctataggtcgggcacgcatcctccgagagaggaggtagcgaagatggatgacga

SEQ ID NO: 6801 - DNA, 547 bp, Oryza sativa
  Clone ID: uC-osflcyp175f08b1
tttttggaaagctcagggcccaaagagccaagtccatgaagttcaaggatggttacatgatctcatctggtcagccagtcaatgagtacattgactcggctgtgagacacgtgctcctgagacagggtgttcttggcatcaaggtgaagatcatgctcgactgggaccccaagggcaaggttggcccgaccacccctctgccggatcttgtaaccatccatgctcccaaggaggaggaggagctgcgccctccggtgttgatcgctgaggcttaagcttatgatgatatttcacatctttttgaagccttgggcatgtttgacagtaccctcttaaaactccagtttggccagttctagctaggtctctgtcttcagtaagggcaatgcaacagtcggttactttagttttattatggacaaaagctatgtactggggtaattttatttttctctaaacttaagtttgccgagacaaaagtttcagtcattatgatgccaaaatcttggtttgtagcctcaaatgcattccatcttgtttggagcgc

SEQ ID NO: 6802 - DNA, 368 bp, Oryza sativa
  Clone ID: uC-osflcyp175f09b1
ttgtttggtgatccactcccggtgggcgatgctgggcgcgctcggctgcgtcttgccggagctcctcgcccggaacggcgtatagtatgggcaggccgtgtgggctaaggaggtctcgcagatcttcagcgagggcgggctcgactacctcggccacccgagcctgatccacgcgcagagcatcctcgccatctgggcggtgcaagtggtgctcatgggcgccgtcaaggggttccgcatcgtcggcgggccgttcggtgaggtcgacgacccggtctaccccggcggcgccttcgacccggtcgggctcgacgatgaccccgaggcgttcgcggagctcaaggtgaaggagatcaagaacgggcgtc

SEQ ID NO: 6803 - DNA, 542 bp, Oryza sativa
  Clone ID: uC-osflcyp175f10b1
tgtttcctcctgcgcctccgccgccgccgtcttcttcgtctgctgagttcgtagatcagctcgagctcgccgccatgtcgtccagcgaggtcgcctgcacgctcgccgccctcatcctccacgacgatggcatccccatcacctctgagaagatcgccaccctggtgaaggcggccaacatcaaggtcgaggcctactggcccggtctcttcgccaagctcctcgagcaccgcagcgtcgatgacctcatcctctccgtcggatctggtggtggtgctgctccagttgctgctgctgctgcccctgctgctggcggtggcgctgctgctgccccagctgccgaggagaagaaggaggaggcgaaggaggagagcgacgatgacatgggtttcagcttgttcgactaagcagtccacagatgttagccagtccgcctatgctttgcaagactatcttatgatgtgtcttttaggttcacttaaagtactctcaagtttgagttttgatatggtgttatccagaattcttgtctgtgggatgag

SEQ ID NO: 6804 - DNA, 489 bp, Oryza sativa
  Clone ID: uC-osflcyp175f11b1
gcttggaggtttgggtgagatcggagcagcgaagcggaggcagccgcagccatggcgttggccgctcgcctcgtctcccgctcccggcagctatactctgctcaagctgccttggcaaatggaggcgccactcaagtccgcttgtatgccaaggaggcagatcgtactcccgtcaatggtgatgacctattgaagggcatattttttgaggtaaagaagaaatttgagactgcccttggtgtacttaagaaggaaaagatcactattgatccagatgatcctgcagcagtttctcgttatgcccaagtcatgaagactgcaagacaaaaggcagatcttctatccgactctgagaggattaaatataccatcgacacctttacaaagggcattcctgatgcacggacttacttgaatactcttcaggagatcaggataaagagtggccttatagatgatatgggtgctgaggctatgatgatggaaccc

SEQ ID NO: 6805 - DNA, 197 bp, Oryza sativa
  Clone ID: uC-osflcyp175g02b1
atttttgggcgcatgcaccttgtttgccattagctctggacgtaacctagagcgcaagcagcagcagcagctagattggttggttgccaatgatcccgggcatctcccccatgagggacggcgccgcgcctctgcttcccgagacgagccccgagagccgccagcaacgtgatccggacagggggaagaggcggacg

SEQ ID NO: 6806 - DNA, 510 bp, Oryza sativa
  Clone ID: uC-osflcyp175g05b1
gtttgtctcagggagggtttcgtttccgtttcttgcgcctcctccaaccgcggcggccgtcagtggggagcctcgtcggcgtccgcctccgccattcgcgagaggaattcaggtgatccctctccctaccagagccgcgctcccctccgatcctccccgaatctggatgatctcccccgattccgctcggcttcgctgatcccccctccgccgccgcggcgggtgggctatcccgcttgtcggaatcgatcgatttctgaggccttggattgtgatgaggtcatggatatcgggccgcatagcatccagctgatcgcgccgccgtccctctatcacgccgcctccgctgccgccatgggtgatcaccgcgacccggctatccccgcggcggcgggcggctgccggctgcccaagacgtcgtcggtgagcgtcacggagtccgtcaccacggtgcacgatctcaggtgacgggttactcgctgatcgaggggctgggcatcggcaggtacg

SEQ ID NO: 6807 - DNA, 408 bp, Oryza sativa
  Clone ID: uC-osflcyp175g07b1
tgtttcgcctcgcctcgcagtgtggaagaaaggaaggaaggctaaaaccctagcgagcgcgcgagcgagcgagggctctctgcttccttgcgatgacggcgccggcggacaaggggaagaaggccaagaccgacgccgacggcggcgccgccgaggagaacgagcagatcgacggcgccctcgtcctctccatcgagaagctccaggagatccaggacgagctcgagaaggtcaatgaggaagctagtgacaaggttttggaggtcgagcagaaatacagtgagattcgcagacctgtctatctccgaaggagtgacattatccaaacaatccccgacttctggctgacagcgtttctgagtcatcctctacttagtgagcttttgaccgaagaggatcaaaagatgt

SEQ ID NO: 6808 - DNA, 344 bp, Oryza sativa
  Clone ID: uC-osflcyp175g09b1
cattccacttgctaggagacaatgctgcctggtcaagcactgggactcggtcagtgaaagaatacaacttgtcggacaggaggggctggtacactacagaggcgactacatagggtggcccttatatggaaccttggctatcaggtctatttatgatggacgggaattacaatagttgcttgaaatatagaatattaacgtgttcaattactaaggatgccatatactttgcattgatgagaggataatttaagcgattcacctttgcgttgatggtggacaacaatcaggatcctaatggagtggatggatactctactacatgatcgggaaactgaacaggt

SEQ ID NO: 6809 - DNA, 532 bp, Oryza sativa
  Clone ID: uC-osflcyp175g11b1
tgtacaaatcccaagcttctgctcttgaggctcatgcagtccctaactgcaaggttctggtagttgccaatccagcaaacaccaacgctctcatcttaaaagaattcgctccatccatccctgagaagaacattacttgcctcacccgtcttgaccacaacagggcacttggccagatctctgaaaaacttaatgtccaagttactgatgtgaagaatgcgatcatctggggcaaccactcatccacccagtaccctgatgttaaccacgccactgtgaagactcccagtggagagaagcctgtcagggaactcgttgctgatgatgagtggttaaatacggaattcatctctaccgtccagcagcgtggtgctcgccatcatcaaggcgaggaagcaatccagtgccctatctgctgccagctctgcatgcgatcacattcgtgactgggttcttggcacttctgaaggaacatttgcctccctgggtgtgtactctgatggttcgtatggtgtgcctgctggtctgatct

SEQ ID NO: 6810 - DNA, 396 bp, Oryza sativa
  Clone ID: uC-osflcyp175h03b1
cgtcgtgtgggtttagatggtgaatctgatcaaccttatcgtgctgctggtactgcagggccaacacggctactggtgccagcttctcaagctggcagcctgattggcaagcaaggagcaaccattgaatccatacaggatgcttctaagtgtgttctccgaaatcttgaaagtgtaccaccctgttgcattaaattgacgaccgagttgttgagacacagggtgaacctttagatgtccacaaagcatttggaactgattgcaagtcatttaagaaaactttttgttgaccgcactgtgctcccttttgttcgaaatgcagatgaaagtgcacaatgcgcacagagagcaacctatgccacctcctgagacgtggggtactgcttcaccgtgggg

SEQ ID NO: 6811 - DNA, 524 bp, Oryza sativa
  Clone ID: uC-osflcyp175h04b1
ctatttttcagcaactgcaaatactattagttattatagttatgtcagttagtagtattagatacagggatcaattatcccttatttaattctccctaatgatccttttctgtgttttgtttactttctctctggatatatggtgtgccattcacaaagtgattgacttgctttatttcattgaggattctttccaaccttgtttaggctctggcttgtttgcccgttgattgagttggtccaagaatcaggatatatgatattcatgacttactggaaagctgttaagcaacagcactaacactggtactaagctaggcatgttcttttaccagatcagataattttcatctgtttactttctgttatgtgaaaatgatccgagatttattgctgtggagagcacacacgctggaaggaaaagatgagtatgggtgccatttttgggcttggagggtggtccttttctctgctgtacatttgttttctacaggatccctgctgacaatggtagtagcttcttg

SEQ ID NO: 6812 - DNA, 75 bp, Oryza sativa
  Clone ID: uC-osflcyp175h06b1
attgcggggacgaacaaggcggttgtgttgatgaacggcaagaaggaggttacgggccacctgtttaacaaggtg

SEQ ID NO: 6813 - DNA, 125 bp, Oryza sativa
  Clone ID: uC-osflcyp175h09b1
gcttgtattcaccgcggctaccggtctggggggagagctctttttatccttgctcgggcgctgcgcccacttattatgatgaaaaaaaccagcacctgcttggctcttgccatcacagggagcac

SEQ ID NO: 6814 - DNA, 256 bp, Oryza sativa
  Clone ID: uC-osflcyp175h10b1
tgtgtacgccaagaagcgaagtaagcggggcagggctttttggacatcgagccggggccacacccaactaaggtggtgggaacgctctccatggacatggaggagctgctgagatggggcacgaacgcggacaagatgtggaagagtgatctccacaaggagacaaaaatgttgacgcagatcgtagagaacttcgtcaagagcacaggacgaaactctgggtctgaaacaaggggcggccaccaacaaggacaag

SEQ ID NO: 6815 - DNA, 292 bp, Oryza sativa
  Clone ID: uC-osflcyp175h11b1
tttgttttcttcaagcttagtaagtgttgcagtgtttttttaacatcgagttgacgctgcacccaattattgtggtgggaacgctctccatgggcatggaggaagtgctcagatagtgctcgaacgtggtcaagatgttgatgattaatcatcagatggagaatagtatgttggtgcagttggtagagatcttcgtaacgagacaggtggcaactctgggtgtgatgcatggggccgcccacaactaggtctaggttggtgtcctcagaacgaacctcttcgtagggtatga

SEQ ID NO: 6816 - DNA, 243 bp, Oryza sativa
  Clone ID: uC-osflcyp175h12b1
gtggtctcccacgagctaagtaggcggtgcaaggctttttgaacatagaattgaagccacacccacttaatgaggtggatacgctctccatggacctggaggacccgctgacatggcgcacggacctgtgcgagatgttgaatatgcagctctaaaaggtgaacccaatgtttatgcagatcgttgagaacttcgttaagagacaggaggatactctgggactgaaaaaaggggctgccccca

SEQ ID NO: 6817 - DNA, 457 bp, Oryza sativa
  Clone ID: uC-osflcyp176a01b1
ttattccatcgcatcaaccaccaaatcgaaggcacgtaggtgagcaccaacagctacatcggccatggctcgcgcgctcgttctcgtcgtgatcctcctcgccgctatcgcagtggcaccgttcgcggaagcctcgacagtcaccggtggctccagggtattgttggcctccgacgcgcccgctgagagcccggctgggcctgcggcggccccaggcccagcggaagagtccagcagcgaatctgctccatctccgagcgccgctgatgcctgatcgagtaataatgaagtccaagtgaataattcttcatcccaagaacattgatcaagcatatatgtcctacccttccttcataaaggctaacagagcctcatttttatttttatttttcacatgaacggatacctaatgtattttgagacggttgcaaagtatacaggactgaataatatgccg

SEQ ID NO: 6818 - DNA, 462 bp, Oryza sativa
  Clone ID: uC-osflcyp176a02b1
ttgtcgcgtgggtggtgatttgaactccagaagaggacaggtcaatagcttcggggataaacctggtggcctgaaggttgtcgatgctttcgtgccacttgcggagatgttccagtacgtcagcacgctgagaggaatgaccaaggggcgcgcgtcttacacgatgcagctcgccaagttcgacgtcgtcccacagcacatccagaacgagctctctgcggcgaaacaggaggaagctagtactgcttaattttttttccagattttggtagatatactaaacggcgacaccggagcaggtggataataggacatccaagtgtatgtagctttgtagcgtcaagcccctcggggagatattgtttgccattgttttggacctgataatggccttgtcaagttcttttcttctttttgaagactgccttgttaaggttttcagaagagaaagcggtacctttt

SEQ ID NO: 6819 - DNA, 428 bp, Oryza sativa
  Clone ID: uC-osflcyp176a05b1
cttcgtttcagacatggcacaacacccacctaaagttcgagacccagtgtgttctcttgttattctccttcgttgccacgataaaagcaggccatgagtctatccctgacctatcccataagacgagccaacattcttcatcatataacccgcagcctcgggacttcccaaacgatcggctctaccgagcctaccttgtcatccagctcttcaagagcaccgtcacttccgacccaaagaacatcactgccacctgggtcggccacgacatctgcagcaacacagcctaccttggcttccactgcgggacaccagggcgtgataaaatgctcacagtcacagcattcattctcaatggctacaacttacgtgcgccgcggctgcaaggcttcatcgaccagcttcccgaccttgctcttttccatgct

SEQ ID NO: 6820 - DNA, 144 bp, Oryza sativa
  Clone ID: uC-osflcyp176a06b1
ttgtttgctgctgaaacacaagtctacattcctcgacggctgtaacacactggcgggacacacacatggtgctcgaggcgatgatgatcagcatagacaactcagatgtgtacgaccgaacgagtattactgccacacgctgat

SEQ ID NO: 6821 - DNA, 537 bp, Oryza sativa
  Clone ID: uC-osflcyp176a07b1
tcgtatttcttgccagaagtgcctctatctgttggtgatgattctaacagagcatcgagaagtgcggacttgtcatctgggcttgctttataccgtcagcagaatcgtgcacagactattttgcagagaatccgctcacggaaggttgcacagatggctcttacgtggcagcttgattatttaactaagctgaagttgcctcaaattgaacacgagaatgcaccatgggcatcacgtaccccattgtgtagtctgcatagctggtcatttactgggatatttcctgagccagcacctcgttctcctttgatggttgttggggctgcaggaagtgttgacagtgatatggagcgaagatctgtgacgcattgggaagaaactgagagtaccagggaggatggggagcttctggccgtggttcctgctgaaaacacgccaagtgtttctaaaatatcacactctgaagtgtcaccggaggttcgaaaccattctagaggcttatccctgatatcaaagagcgccacaccatctaaacta

SEQ ID NO: 6822 - DNA, 415 bp, Oryza sativa
  Clone ID: uC-osflcyp176a08b1
tcgttagcactctggtattctcccatggcgactgcgaccgaggaggttgccgctgcggctgctgccgccggcgaggcgccgtcgccgccgccgtcagcggtggtagaggaggtgaaggaggcggtggaggcaccgaagccggaggaggcgcctaaggctgaggagggggaggagaagaaggcggagggtgagaaggagaaggagaaggcgattaatgagaggaaaccgagggcgaggaagccccgatcggctgtgccacaccacccgccctacttcgagatgatcatggaggcgatcatggctctgtacgggaacggcaaggcgggatcgagcccgtacgcgatcgccaagtacatgggggagcatcacatgggggttctaccggtgaactaccggaaggtgctcgccgtgcagc

SEQ ID NO: 6823 - DNA, 543 bp, Oryza sativa
  Clone ID: uC-osflcyp176a09b1
tcttcgacgatacacaagcagaacgacttcaagcagcccgtggagaggtacaggtcgtgggcgccggatagacaggagaggttcatccgccgcttcgccggcgagctcgcgcaccccaaggtctcccctgagctccgcgccatctgggtcaactacctctcccagtgtgatgagtcgttgggggtgaagattgcgaataggctcaacgtgaagccaagcatgtgaagaaactaaggcacaagaatgcatcatctcttgttaattaattggagtactaccaacaaataaggccagacaatgtcagatgcacgcatcttctgttgtcgttgggccatcttttgtatgcatcctattgttaattactagtacatgatatccaagtgatcatctgcaaggctacagaaattctgtaatacgataaattaaaagaaaccaaaatggagcctgcatatgtgtaacttaattaatgtactggcgtattaatgccactgctgcatgttgtaatactccatcaaagagtctattactattaagtatttaaat

SEQ ID NO: 6824 - DNA, 312 bp, Oryza sativa
  unsure (1)..(312): unsure at all n locations
  Clone ID: uC-osflcyp176a11b1
ggcaggtaccgtncaattatttcttcgacccaccacgcgtttgatttttgctccagccgcgaacgattgggggggggggtttttgggcgntttttctggaccttccattagtcgccgtctcgccgtccagaagcaggcggatggccggatcggcggcgagcgagtgctcgccgacccgattctcgtctccgcgcctcagggtctacctcacgcgagccttccacgccatgaacaacgaattgaacacggtcttctctgaatcctgttccccttggatactagcacgggatggacactgcgaccaccgaatta

SEQ ID NO: 6825 - DNA, 543 bp, Oryza sativa
  unsure (1)..(543): unsure at all n locations
  Clone ID: uC-osflcyp176b01b1
ttgtgtttgagcggagaaaggtgactaaagaggatgtgaaggaacttatattccgtgaaatactggagtatcatcctcaacttcttaaggattacatgaatggaaccgaaaaaacaaacttcctatatcctagtgcccttgacaactttcggagacaatttgctaacctggaagaaaatggagggaagaatggagatgctgttccatcagacaggaaacatgtttcgctcccaaggactactacagttcattctgctccaattcctcccaaagatcatcaaaatataacttcccaagtaccccaaaggattccaggtagaacaggacgaggagcttgccctgtaataccatttgagaatttgagtgcaatgggcccatacaatcaacgaagggtggtaaggaatccagtgcttnctccagccaccaccaacctatcagcatatgcctaccaccgtaaatcggatagctcagaaagagagctccagcaggagcttgagaaagatcgcatgcggtaccagccatcagagcatttcatggatgcta

SEQ ID NO: 6826 - DNA, 527 bp, Oryza sativa
  Clone ID: uC-osflcyp176b03b1
aaaaaaaaaaacacaacaaaaccaaacccgacagatcttctcttcttcctcctccctttcccatcttcgacgaggcgacccggcgcgagagaagaagagatcgatcgatcgatcaaccgatctcgccggagaaggaagaggagcaaagatgtcgtcggtgttcagcggcgatgagacggcgcccttcttcggcttcctcggcgccgcctccgccctcatcttctcatgcatgggtgcggcgtacgggacggcgaagagcggcgtcggcgtggcgtccatgggcgtgatgcgcccggagctcgtgatgaagtccatcgtgcccgtggtcatggctggtgtgctcggtatctacggcctcatcatcgccgtcatcatcagtacagggatcaaccccaaggctaagccgtactacctctttgacggctacgcgcatctgtcgtccgggctcgcctgtggcctcgccggtctcgctgccggaatgggccatcgcatcgtcggtgatgctggtgtcagggcaaatgcacagc

SEQ ID NO: 6827 - DNA, 485 bp, Oryza sativa
  Clone ID: uC-osflcyp176b04b1
ttccattcccccaaatccatccatcatggagttccctcatcgccaccaccaccacggccaccgcggcgacgacgacgacgacgatcgccgccgccatcccgctcccgctcccgcctacggccacgactcagcccctccgccgggtccctacggccaagcgcctcctccggctgatccctacgctcgccacccgccttcccacgactacgctcatcctcctccggcgtatgggggagggggctacggcaacgtcgtccacgtttcccacgaggtctccgaccaccagaggcccacgccgcactacggtggatccgagtacatcagccccgtccaagagacccgcccttaccacggtggcggaggagccccaccggtgacccacaggatctactgcaaggccggggaggacaactacagcctcgccgtcagagatggcaagggtctgcctcgttcgcttcgatcgcgacgaccacacgcagcactgg

SEQ ID NO: 6828 - DNA, 435 bp, Oryza sativa
  Clone ID: uC-osflcyp176b05b1
tgttcggggtcggggagaccagctcctccgccgagatcaaggcctccttccaccgcctcgccaaggagacccaccccgacgtcgccgccgccgccgggtccagccgcttccttcagatcctcgctgcctacgagatcctatcggattcacagagaagggctcactatgatatctacctgcgatcgcggaagcgagtttttgggaagcattctaggccatctcatcatgtatatccaaatccaagtggttcaggcattgtagtaacaagagaaagtaatgttgttgagtggctaaaatggtataggctcactattgatgacatagttacaaagaagagggttgcgacagggtcaggttactttgataagcttggaagtgaactgtacacagcaatccatgctgcatactatggtccggatgttcggtctgtggatc

SEQ ID NO: 6829 - DNA, 478 bp, Oryza sativa
  Clone ID: uC-osflcyp176b06b1
tttgtttactagaaccgacaaagtccgtgccttgcgcgaggctttctaccgccagaatcttccaaatgtgaccaacttgcttgctactgttttagtcttcctcatagttatctacttccaaggcttccgtgttgtgctaccagtgagatccaagaatgcccgcggtcaacaaggctcatacccaattaagctgttctacacttcaaacatgcccatcattctgcattctgcactgattaccaacctctatttcatatcccagcttctctacaggaggtacagtggaaatttcctagtcaaccttattgggaaatggaaggaatctgagtactctggccattctgttcctgttggtggtcttgcttactatgtaactgctccatcaagtttagctgatgttctcgcaaatccattccatgcactgttctatgtggtcttcatgctgtcagcttgtgctctcttctcaagacatggattg

SEQ ID NO: 6830 - DNA, 574 bp, Oryza sativa
  Clone ID: uC-osflcyp176b08b1
tcgttcttctggtgattggcattgcagtagctgtatatgtaggttctgtggttctacccaagaaataacaacatcgtctgctgagttactttcttgtttacagtgttcaaggaaatatcatcaagtttgtgcacctggaaccatgaaagactctgttaaagctgaatccaattcctcaactgattgtttttgcagcccaggatgtagaaagatttataaacatctgagaaaactacttggggtaaagaacgctattgaggctggattttcctggagcctggttcgctgttttcctgataaactagctgcacctcccaaagggaaagctcatttgatacattgcaattccaagacagctgttgctttctcagttatggatgagtgctttctgccacgtattgatgagagaagtgggattaatataatccacaatgtcatatataactgtgggtcagatttcaatcgtttaaattgtacgaagttctatacatttattctggagcggcgtgatgaagttatatctgcagcaactgtcaggattcatggaactgacttagcagaaatgccattcata

SEQ ID NO: 6831 - DNA, 475 bp, Oryza sativa
  Clone ID: uC-osflcyp176b09b1
ttaaaataaagaatgaggttaactcatacacctctgcgaaggcactgcagaaagtaaagcgtttgccagcctcagcactgaaaaaggataatgctcctgatgtggctatgaaggaaagttctgatggtgcattggaaactcaaagtacaaaaccatccagcgatggtcagcagataaacaaagaaccaccatctgtggttgaggacaacaagcaggaggatgttgaaccaatgttatctgaatgtaatcctgagccgcaaagtgaatcaaggttgactgctggagggtcagatgagacgcaggaagctatatcgccaaagagtctaaaagacgctgtcaagccaaaacacaaaataaagaaaaaacaacacagcatgagttaaatttcatgtaacttataggcctgtcagcagtgttagatagcgcaatgtttgtgggcatggttggcaaaatccgttgttctcttgatggtgta

SEQ ID NO: 6832 - DNA, 446 bp, Oryza sativa
  Clone ID: uC-osflcyp176b10b1
tcgttcttgcagagatgatgaacagctcagtgctgttcttgccaagctcatccctgttcctcacaaagcagctggtacctgcaaccaagggcagagcatcagcagcagctgctgttaggtgcagcagtgggcccaatctgtcagaagcacatgaggaggaggatggtgtagcctccttgatggggaggaggcatgcaatggcttctgctgctgctgcctgtggagtttcagtgtttggttttgcaggtgagagcatggcagtgaagcagggccttctggctgggaggatccctgggctctctgaccctgatgaaaaaggttggagaacataccgtaggccagacgacaaggtccgtggacatggagttggatggagcccaatcattccctacagcttcaagttcgtgatggctgggaagaggtcccggtgtcgattgctgatcttg

SEQ ID NO: 6833 - DNA, 450 bp, Oryza sativa
  unsure (1)..(450): unsure at all n locations
  Clone ID: uC-osflcyp176b11b1
tcggcaaggcaccaaatccccccaccatggatcaccgcctcctcctcctcggcctcctcctcctctccccggcggtggccgccgcctcagtccccggcgaggaggagccgctgatccggcaggtggtcggcggcggcgacgacaacgagctggagctgaacgcggagcgccactttgacagcttcgtccagaggttcgggaagtcctaccgtgacgccgacgagcacgcgtaccggctctccgtgttcaaggccaacctccgccgcgcgcgccgccaccagctgctcgacccctccgcggagcacggcgtcaccaagttctccgacctcaccccggccgagttccgccgggcctacctcggcctccgcacgtcgcgccgcgccttcctgcgggggctcggcgggtccgaccacgaggcgcccgtnctccccaccgacgggctncccgacg

SEQ ID NO: 6834 - DNA, 534 bp, Oryza sativa
  unsure (1)..(534): unsure at all n locations
  Clone ID: uC-osflcyp176b12b1
ttggttcgtagggatcagcagcaaagagcggagagcgaaactgggaagggactctgcacgagcattaacgctgacgaagctgcgggatacggtgctagcgagcgagctgctgtgcttagagtagagagcaaggagacggcgcaagcaggacgcagccgggaacgtgcacgacgaaccaaacagagaacagctagctaatcgatcggtcgccatgaccaaggacgacgccgtcccggtggccgtggcgccggcgaagcgcccgcccatcaacaagtacgccttcggctgcgctctcctcgcctccatgaactccgtcctcctcggctatgatatctcggtgatgagcggcgcgcagatattcatgaaggaggatttgaagatcaccgacacgcagatcgagatcctcgccggcgtcatcaacatctactcgctgttcggctcgctggcggcgggcatgacgtccgactggctgggccggcggtacaccatggtgctcgncgncgncatcttcttcacggggcgcgctctcatggg

SEQ ID NO: 6835 - DNA, 466 bp, Oryza sativa
  unsure (1)..(466): unsure at all n locations
  Clone ID: uC-osflcyp176c01b1
tgtgttagttgaaggtgaggtgagctagagtgttcttccttggcttggcctccattgttacatccccctccactccatctcttgcttcccttaacccctcccccaaaaatcccccccccccttgccttaaccccaaccccaaatccatccttccaagcttcaaccttctctggagctttgctgttgatacctggacaaggattaatgggcgaccatctggcattgcttgtggatcggctgctgacggagtccactctgcacgcggcaatcaagaagcaggtggccgatctgcaggcggagacggtggcgatccactactgctgcgaccgcgacggctatggctgctcggcgaggaagatggtggagtgcatgatttgccaagaagaggattgngataccagcatggaggcaccctgtgcttgctgtggcagcctcaagtatgcgcaccggatatgcattcaacgtt

SEQ ID NO: 6836 - DNA, 436 bp, Oryza sativa
  Clone ID: uC-osflcyp176c02b1
gttctgcagatgccttctctggaatcaacttaggtggtgatggtagttttggtggaaacccagctggaagctttggtgatgctggaggttccactggcggtggtgatttctccggtgccggtggtgacagctttggaagccgcaagaacgatgagctcatggatgacctcttcaaggatgacgagcctgacaactatgccaacaagcagggctaattaatctacgtccttcgagcctcagtttgcagtctcttagtgatgaaccggctcacctgaatggtcatcacctgctcaagcatcaaattccagaacaatacacaatgactgggttttctttttcttctgttctttttcatagatgtggtgtaataacgtaaacatcactcaaggtactacttctagttatgttatgttgagatgacaatggaggtgttttt

SEQ ID NO: 6837 - DNA, 530 bp, Oryza sativa
  Clone ID: uC-osflcyp176c03b1
ttccgccgcgcgcgactcctcccttccccatcctgcgctcgcttcctccacatcgcgcgctccatgtgcgggcccgacgccgaccgctcgcttccttccccaatcgcgcgcgccaggtgcgggcccaccgccggcagctctcgcatcctcgcgccgcttctcctccaaccctctccctcccggcgcttctctccacaccccccctccggcgcttctcctcccccttcccctcccccctcccctggcgctgctccgtttgctaaatatcgatgataaatatttagctttctcctgattccattcctcctcttcatgctaaatatcgatgctttctcccgatgctctgcgagtatcaagtatgcaggctttcaatcccggcgcggcgctcaccacgatatcttatcattatccagtactcatgcggattatcagggctttcatcaatttcccgtccaattcatctggtggctcatatggattatccgggcattgatatgatctttcgattcagaaaacattggtcgatcttg

SEQ ID NO: 6838 - DNA, 528 bp, Oryza sativa
  Clone ID: uC-osflcyp176c04b1
ttatgatcaagcacgctggcgtcgggtcggccatcgagtacgccgtctgcgccctcaaggtcgaactcatcgtggtgattggccacagccgctgcggtggaatcaaggccctcctctcactcaaggatggagcaccagactccttccacttcgtcgaggactgggtcaggaccggtttccccgccaagaagaaggttcagaccgagcacgcctcgctgcctttcgatgaccaatgcgccatcttggagaaggaggccgtgaaccaatccctggagaacctcaagacctacccgttcgtcaaggaggggatcgccaacggcaccctcaagctcgtcggcggccactacgacttcgtctccggcaacttggacttatgggagccctaaatccgaccgtccgtccgttcagttcgtcagtttacgccaacgcttttgcataagtactacctgaggatatcgtccccgatcatcgatgtgaacgcgtggagtactactacgtacgtaccggatgggtcgatatatgtgaatg

SEQ ID NO: 6839 - DNA, 419 bp, Oryza sativa
  Clone ID: uC-osflcyp176c06b1
gcatgaagcaattcttgagctcaatcagcaacaacatctatctccttcttgcttagttaagtccttcgccctcccaagaagaagaagatgtcttgctgcggcggcaactgcggctgcggcagcggctgccagtgcggcggcggctgcggcggatgcaagatgttccctgatgtggaggccacagccaccaccaagaccttcgtcctcgctgctccatccaacaaggcgagctctggaggaatggagatggcggtggagagcggcgagaacggcggctgcggctgcaacacctgcaagtgtggcaccagctgcagcggctgctcctgctgctcctgcaactgaatctatcgtcgtcgtcgcccggctgcatgaggatttatcgtatggatgctgctactgtcgatcagagctttgatcga

SEQ ID NO: 6840 - DNA, 344 bp, Oryza sativa
  Clone ID: uC-osflcyp176c07b1
tcgtttcaattaaccaaagctaattaagctggctgatgctctaatccacatttagctagaatggcgccgtccaagttcacagccggcgacggcgtcctcctcgttctgctcgtcgcggccgcgggcggcggcgcaaaggcggcggcgacgacctgcgtggcgtcgctgatggagctgagcccgtgcctgccgttcttcaaggacaaggcggtgacggcggttccggaggagtgctgcgcggggctgtcgtccatcgtgaagggtgaggcggcgtgtctgtgtcacattgagaaccacactctggagcgcgccatccgcgtcgacatccacgttgaccgtgcctt

SEQ ID NO: 6841 - DNA, 555 bp, Oryza sativa
  unsure (1)..(555): unsure at all n locations
  Clone ID: uC-osflcyp176c09b1
tcgttagtttccactggaggaccttcagaggcagcttgaagaactggagaaggccaagactgagaagaaaaaggcaacttcaagtgcgtccagcggcggtagcagtggccctgccactaagcgcatccgggcaagcaatggaggcccgatgcctcctgcgaaggcaggtcgtctcactaacaatgcttgtgtgtcttctaccccagctgccaccacctttgtccgctccccctcgcacacatcgtacgccatggcctccccctacccttacgataggccggttggtcatggcctctactgcaaccaaagcccaccggcgatcagggagccatatgtctacccagccaaggaggtaactaattttgcgccaggtttgccgtactcttcccctcccataagctatccccacgcctatggcgggtacaacaatggaatgggagcttacaacaatggaatggcacctgccttccaccaggcttactaccggtaggatcagtcaggaaagtcgctgatgaatgacatgacanataactgatgatgtcgacgacaactcaa

SEQ ID NO: 6842 - DNA, 502 bp, Oryza sativa
  Clone ID: uC-osflcyp176c10b1
aaatttcctgatgcaccatctagggtatcttctcttacaaatggacaccaaagcagacagtccgaggggtctgctgtggaaggccaacatactaaaccattacggtctatcacgggcacagataatggctttggtaggacaatatcaaggaagtcacttgacatggcaatcaagcatatggacattcgacaaaacctgggtggtattcgtggtgcatctctattcccgcctagcattcgctctgccggtgcgaaggtccggtcagctcgaatgtctgatcccgctcatctcagtttaaatggcgattgtcattttactgacaatggcagcatcaatggacacttctctggagattcgaacggaactctttcaaacaacggtggcagctcaactggttctccagacagggaaagcattggaactaaggagacactgagtgaactagatctgtataccactgcacggtatgaggcattgttgttgagggaggacataacgaaca

SEQ ID NO: 6843 - DNA, 530 bp, Oryza sativa
  Clone ID: uC-osflcyp176c11b1
tggacgcgtggggcggcgacgccggcgagcccgcgactgcgaccttcgcctcgacgaccgctcatcgtcgcgcttcaactagccggggaaggcaaggcggagcagcggcggcggcaagaagaccgcagcaaggcggtagatatggcgacggctggggccagcagctttgaggacgagatcatggagtctgacattgagttggaaggtgaagctgttgagccagataatgaccctcctcagaagatgggagatccatctgttgaagtctccgatgagaagcgtgaccaggcgcagctgtgcaaaaacaaaggcgtcgatgcattttcagaagatgcagcattaaagattaatccagattctgctaaaggatataaatcacgagggatggcaaaagctatgcttgggaaatgggaagaggctgctcaggaccttcgcatggcagcaaaattggattatgatgaagagattggagcagaacttaagaggggtgaacccatgtactcaaaatgaggagcacaaggaaaaatatg

SEQ ID NO: 6844 - DNA, 510 bp, Oryza sativa
  Clone ID: uC-osflcyp176c12b1
ttgtctaatccctgtcagactctcccacgcgccgccgccgccgtcgccttggctcctccgcgcggtaggctgcaacctgcagctcgtcgacgccggttttgattccgatcgtctcaccctctactatactcgccgcaccagatccgcatcggcatcgttggctaggcatggagaatggggagggaggaattgtactcgtgcctgtcggtgcctcggggtggagtaggattaatcagagtcggggggtgctcctcgtatcgttgtcggctactcggccctctgactttagcagttgaaggtgctgacggcggcgaggaggtcgaaacctactcggcggacaatgctccacttcaccacgcccagagatgcgcatctctaccgtgagggaggagggcacgccagctgaggagacaggaacggcgaccgcaacggccatactggtggaagtggtagcgtacgaaggagccgtgcagcaccatattctcactgagccttgagatacacacacga

SEQ ID NO: 6845 - DNA, 389 bp, Oryza sativa
  Clone ID: uC-osflcyp176d02b1
ttcccatcgcttgcttattgtggttgacaactttgaagacaaatctcctcattatcaaaagttaattaaggatctctctcaaaagttttacacgtgttggatgagtaaagaaggcagtgtcacaattgtggagtatgactctcctaacactgaagagaaagagaccaaaagattggtggttatgtttggtgggacaatggcactggatgaatatatccaccaaaaaaatctctgtacagttgttttggtgaagacatctgagattaagctgctaagagatgctggaatcgaagaaataagtgctaagacacttctgagttttcgcaacatcaaagcaaaaccagttgtgccaaagaaacctcgggaggatgaggatctagagaaggggg

SEQ ID NO: 6846 - DNA, 533 bp, Oryza sativa
  Clone ID: uC-osflcyp176d03b1
ctcgagcaaagaaggagagagcttggtgagctgcagagatggccccctccgtgatggcgtcgtcggccaccaccgtcgctcccttccaggggctcaagtccaccgccggcatgcccgtcgcccgccgctccggcaactccagcttcggcaacgtcagcaatggcggcaggatcaggtgcatgcaggtgtggccgattgagggcatcaagaagttcgagaccctctcctacctgccaccgctcaccgtggaggacctcctgaagcagatcgagtacctgctccgttccaagtgggtgccctgcctcgagttcagcaaggtcggattcgtctaccgtgagaaccacagatcccccggatactacgatggcaggtactggaccatgtggaagctgcccatgttcgggtgcactgacgccacccaggtgctcaaggagctcgaggaggccaagaaggcgtaccctgatgcattcgtccgtatcatcggcttcgacaacgtcaggcaggtgcagctcatcagcttcatcgcctacaag

SEQ ID NO: 6847 - DNA, 457 bp, Oryza sativa
  unsure (1)..(457): unsure at all n locations
  Clone ID: uC-osflcyp176d04b1
tcagcccagatccagcagatccaggcccagttcttggcccagcagcagcagcagagggccctggccggcgccttccttcggccgcgtggccagccgatgaagcagtccgggtcgccgccgcgcgcggggccgttcgcggcggtcgccggggcggcgcagtcgaagctctaccgcggagtgcggcagcgccactgggggaagtggngtggcggagatccgactcccgaagaaccggacgcggctgtggctcggcaccttcgacaccgccgaggacgccgcgctcgcctacgacaaggccgacttccgactccgcggcgacctcgcgcggctcaacttccccaccctccgccgaggaggcgcccacctcaacggtccgctccacgcctccgtcgacgccaagctcaccgccatgtgccagaccctcgacacgagatcgtgcaagaacacccccggcgag

SEQ ID NO: 6848 - DNA, 445 bp, Oryza sativa
  Clone ID: uC-osflcyp176d08b1
tcggtggtggtggcgggcggcgctggcgctagcgcccacgtcggggttggggctggggctggggccgacgccggcgtcggcgccgccgtcggggctggcgctgacgccgccctcggggttggcgccggcgccgccggcgccgccggggctggagttggagctggaattggagccgccgccaacgtcgccgggtctctcaccggcgccgctgagggcgccgccggcgtggcacccaaggtgcatgtgtgagatcgatcgatcgatcgagcgcgccgcggcttccatctccacgactccatccgcccgcagcggctccggcgatccatatttttataaattcgcagtcgattgtttgttgttaatcaaagtttggttaatttatccgtcgagtgtttggttgtttatttcatatgcaaaccttgcgatttgtgataaataaataccg

SEQ ID NO: 6849 - DNA, 542 bp, Oryza sativa
  unsure (1)..(542): unsure at all n locations
  Clone ID: uC-osflcyp176d09b1
tctgtatgcttcttgttgagcaagttaaagttagcaaaggtagtccacttgtgacatgcctcttggaaggtcctgctggaagtggtaaatcggctttggctgctactgttggcattgacagtgattttgcttacgtcaaaattatatcagcagagacaatgattggtttcagtgaaagcagcaaatgtgcacagatttgcaaggtttttgaggatgcatacaaatctcagtttggcatcataattctagatgacatcgaaaggttactggaatatgttgccattggaccacgcttttcaaacataatctcacaaactctactagtccttctcaagagggttcctcctaagggcaagaacttgcttgttattggaacaacaagtgaagtaggctttctagaatccattggtatgtgcgacgtgttctccgtgacataccatgtccncaaactgaaaaaggaggatgctacaaaggtgttgcggcatctcaatgtgttcgatgaaagcgacattgatgccgctgcagaagcactggacgatatg

SEQ ID NO: 6850 - DNA, 584 bp, Oryza sativa
  unsure (1)..(584): unsure at all n locations
  Clone ID: uC-osflcyp176d10b1
tctttaattccacctcgatcagaaactctgtacgtcggggtccttcctcctctgttgctgggctgagtgatggctcaaatagggttgcatctaccaagaagttccggaagaaccgatctctgttgaggactggtaggcgtgaattctcaccttctaacagtgggctagttcatggttttggtcaagaccatggatctaatcccaatcatacaaacaagaggttcagggttagtaacaaggaaacctccaagaagcttaagcacactcaagaagatactgcagataatgacttctcttatgaaagtgatgtaccagcattaggacaaggngatgatcaatacgatgcggctcaacaagcaggaatttcacagatgtattatgaaggtgaagagcctgaaactgaaatgcaatgtgcatcaccctccagaagtgatcctgtagactgcagcaatgatatgagcagcgattctttgagtcccggaaataatgagacggcagatgatgttttgggtggaggctatagtgtagcaattggtgatccatgctctaatgagaaatctgcatatcatgcttatttccccacg

SEQ ID NO: 6851 - DNA, 517 bp, Oryza sativa
  Clone ID: uC-osflcyp176d11b1
tcgttcgctatgaaaataggccaattgttgaacttgaggttgcggcacatgaagaactgaagataactgaactgcgtcttgcaaagctttttgcatcagagcctgttgcccccccttcttcaacagttggaggtcctactagccaatcggataaagcagcagctcctgaaattacaggtagctccaaccgaactcgccctccaatcacaacccatgttttggatgtcgctcgtggatcgccagcatcaggaattgaagttcacctagagatgtggaaggatgcatcaacacccccatcattcaacaacaaagatttcaatggatgggtgaccctgggctcatcggttacgaacaatgatggccgtagcggtcaactgatggacattgtcaacaacgtcgctcctggtttctatcgcataagtttcaacaccagcaagtatgcaccttcagggttcttcccttatgtgagcatcatatttgagataaagaagaaccagacgaccgagcatttccatgt

SEQ ID NO: 6852 - DNA, 516 bp, Oryza sativa
  Clone ID: uC-osflcyp176d12b1
tcgttgttatttcatctatttcctatttaagttatttgtaaataatattcgttttcaaacactcgtttattaaatttttatcccggtttttcattaatcttgtgttgtttttatagtttttatttttatgacgaatttagttgttgataaattgtatacatgaactcatattttgatttttctaatttcgaaattttttatttattattctaattttaattaatctcgtattttgtactatgattgactattcttttcatattatactttttttatttttaaatttcagttatttctaaattggattcaagctttaactctgatttttatttacataatttcagaatttaattttaatttttagtctaaattttaattattctttagttgtgttctatatggagtcatattttaatattacttatttatcattcagaattgattaatttccggatttaatggattatttattttgaattttattaatacttatttaaatattccaactgttgattt

SEQ ID NO: 6853 - DNA, 542 bp, Oryza sativa
  Clone ID: uC-osflcyp176e01b1
ttttcatcggatctaccgactgcacagtaatcaagctgagaaactaccctgatgattgggatgaaaaaaaagaaaggtgattatttgctcacactcgcagaagtaaaccacggagttcttaaagataagttgaagagtagggatgattttcattggccgtttgtgaagctgcctaagctggagcagaacttaccaccaatgttacagcaaattcttagtggggagagacagatgaaaagaaagttcgacgtgacattcttttgtgattatatcaacctcttgagaaactcctacaagaaattcaatgaattaccagaaaatgttaaggctttatgcataaaccaggatggcttcattaaactgatagatggggtggtctcctgagttttggaccaagatctacgagaaaattgggtggccagattataatatctggaagtggccttgtaaaaaatagctttagtgctttgcatttgaccagaacactgctcgatctcaatgatggcgatgcccgtgcccgcgctgacatctcaagacatatg

SEQ ID NO: 6854 - DNA, 543 bp, Oryza sativa
  unsure (1)..(543): unsure at all n locations
  Clone ID: uC-osflcyp176e04b1
ttgttacacagccatcaaaaatctgctctcaggttggtctgtgtacttttgatgggaagcatggtgttagtgctggaattaagagtgtagtagatgatgaagctggggaatcgaatggtctccaaagcggtcccatgtgcaatgcctgtgagatggctgttgtatggatgcagaaccaacttgcacagaacaagactcaggatctcatcttgaactacattaatcagctctgtgacaagctcccaagtccaatgggagaatcatctgtggactgtggcagccttgcatccatgcctgagatttcattcaccattggaggcaaaaagtttgcactgaagccagaagagtatattctgaagggttggtgaaggagctgctgcccagtgcatcagtggattcacagccatggacatccctctncccgtggtcctctctggatcctgggtgacgttttcatgggtgcctaccataccgtgttcgactacggcaagatgagggttgggcttcgcgaagtcggcctaaaacgtgtgttgcacgttccta

SEQ ID NO: 6855 - DNA, 404 bp, Oryza sativa
  Clone ID: uC-osflcyp176e05b1
ttcctcttctcacatgcgctcgcgcctccctgctctcggctgccacagcaagaagacgacggtgacggcggacaaggcggcaacggcggacaaggcagcgacggcgacggcgaaagcgacgcgcacgaggtgcgcgcggggtggattagtccgtgggatgggcacgtccgggcctccccttgccctccagcgtcacgctgccaacctcctctccgactccaacttgtcccctgacctcctctacctcaccatcgccactccagctcgctccaccctccctcccccctcccattctgcctcccctgccgcaccgcgatgggaggcctagatctgggcggaggggagacgaccggcgggtggcggcgttcgtccacctctctcccctctccaccggcgagatcgat

SEQ ID NO: 6856 - DNA, 503 bp, Oryza sativa
  unsure (1)..(503): unsure at all n locations
  Clone ID: uC-osflcyp176e07b1
tcgtactccaatattcaagagagagcgaaagctttggaagcgattcaacatttaaaggagacataccacaatggagtgtgtgatgttgcgattgttgatgatggaaaattgcaagcagaatcagattctggtgaattctgggttctttttggaggttttgcaccaatagggaagaaagctatatgtgacgatgatgttgttcttgaaaccacagcccccaagctttacagcatcaataatggtcaattaaagttagaagacacagttctgacaaaatcaattcttgagaacaataagtgctttttggtcgactgtgggtctgatttatttatatgngttggtcgactaacacaagtggaggagagaaaagctgcaagtgcagcagttgaggaattcattgctactcaaaataggccaaagacaacaagagtaacccgagtgattcaagggtacgagaatcatacattcaagtctaagtttgaatcatggccagtaaataatgc

SEQ ID NO: 6857 - DNA, 486 bp, Oryza sativa
  unsure (1)..(486): unsure at all n locations
  Clone ID: uC-osflcyp176e08b1
tcgttctctcttcctctcgtcgccggaggccatcgacgctgcagtgaaggggggcctcgcaagtcgcgatctccggtgagcgcgcgggggaagatggctgacccagagttggaagctatcaggcagaggagaatgcaagagctaatggcacagcgtggtgcggcaaatccgcaaaacgctgggcaacaaaaggctcaagaagatgcaaagcaggaagctgaggaacggcggcagatgatgcttgctcagattttatcttctgaagctagagaaaggctctcccgcatagctttggtcaaacctgataaagcaagaggggtggaggatgttcttctgagagctgctcagtccggtggaatatctgaaaaggtgtctgaagaaaggcttatctcacttctggagcaaatcaatacccacactagncaacagacgaaagttacgattcagaggcgccggagcgtccttgacgacgatgactagctgcat

SEQ ID NO: 6858 - DNA, 542 bp, Oryza sativa
  unsure (1)..(542): unsure at all n locations
  Clone ID: uC-osflcyp176e09b1
ttgtcttgaagctcaaggaagaatatggaacataatttcctgagaattgtgcatgcccaccaccaagcaagggaaacatgatcacaattctgagtattgatggaggtggggtgaagggtatcattcctgctgtcatcctctcattcctggaatctaaacttcaggagcttgatgggaaggatgctcggattgcaaactactttgatgccattgctggcacaagcacaggtggtcttattgcaggcatgctagcagctccatcactgggcaatgccaatcaaccatgctatgccaaggatattgtcccattttacctcaagcattccccccacatctttccgcacaggactggattttttggttggttcttcaacatcctgngcatcataaagatggccattgggccaaagtatgatggaaaataccttcacagactaatcattgatcttcttggcgagacgaggatgaaagaaacattgacaaatgttgtgattcccacttttgatgtgaagtgtgtgaagccaataatattcagcacattc

SEQ ID NO: 6859 - DNA, 437 bp, Oryza sativa
  unsure (1)..(437): unsure at all n locations
  Clone ID: uC-osflcyp176e10b1
tcgttcggacgcggtgctcgacgcgtgcctcgcccaggaccccgacagcaaggtggcgtgcgagacgtgcaccaagaccaacatggtgatggtgttcggcgagatcaccaccaaggccaccgtcgactacgagaagatcgtccgcgacacctgccgcggcatcggcttcgtgtccgacgacgtcggcctcgacgccgaccgctgcaaggtgctcgtcaacatcgagcagcagtcgcccgacatcgcgcagggggtgcacggccacttcaccaagcgccccgaggagatcggcgccggcgaccagggccacatgttcggctacgccaccgacgagacccccgagctgatgcccctcagccacgtnctcgccaccaagctcggcgcccgcctcaccgaggtccgcaagaacggcacctgcgcctggctcaggcccgacg

SEQ ID NO: 6860 - DNA, 457 bp, Oryza sativa
  Clone ID: uC-osflcyp176e11b1
ttcttacgagggagactactcccacgaagtggccaacattatcagcaatgcttcctgcacaaccaactgcctcgctccgttcgtcaagatcttggacgaagagttcggaatcgtaaagggaaccatgaccacaactcactcctacaccggcgaccagaggttgctggacgcgtcgcaccgtgacctgaggagggcccgggcggcggcgctgaacatcgtgccgacgagcaccggcgccgcgaaggccgtggcgctggtgctcccgcagctgaaggggaagctcaacggcatcgcgctgcgcgtgccgaccccgaacgtgtccgtggtggacctggtgatcaacaccgtgaagaccggcatcaccgccgacgacgtgaacgccgcgtttcgcaaggccgcggcggggccactcagcggcattctcgacgtctgcgacgtgccgctggtgtccgtcgac

SEQ ID NO: 6861 - DNA, 543 bp, Oryza sativa
  unsure (1)..(543): unsure at all n locations
  Clone ID: uC-osflcyp176e12b1
tctttcagacaatttccttatcggcttaggccggaaagcgaaccaggtgtacataattgattatgggcttgctaagaaatacaaggatctccagacccataaacacattccctacagggagaacaagaatctgacaggaacggcacgttatgctagtgtgaatactcatcttggaatagagcaaagcaggagagatgatctggagtctgttggctatcttctcctatattttttaagaggaagtcttccatggcagggtcttaaagctggtacaaagaaacaaaaatatgacagaatcagtgaaaagaaaatgctcaccccagcagaggttctgtgcaaatcttatccatcagagttcacctcatatttccactactgtcgttccctgcgattcgaagataaaccagattactcttatttgaagaaactctttcgggatggtattactcgtgaaggataccaactngattacataattgactggactacaagcaaaaatcctcagatgggttctaccaataagcttattcaacaacaaagtgg

SEQ ID NO: 6862 - DNA, 318 bp, Oryza sativa
  Clone ID: uC-osflcyp176f01b1
ttgtttaaagagatggggtgtgtggatgaggactaattacaagcaggaacctacgctatggcgcaggaggaactgtgaaccgaatagcatggggcatgcaggtattgactctgagggcagaaaaaggttcggacattattccacaaaactctgaggcatactggaatagatggctgacgcagagatgcacaaggcaggatttggagggagttttgccggggacacgctcgtcaagagggtgtacaagtactggaagaaggccgtgccgtggtagtatcctcacgtggcgccggttccggaggcggtaaaggcgataga

SEQ ID NO: 6863 - DNA, 546 bp, Oryza sativa
  Clone ID: uC-osflcyp176f02b1
tgcagccgccgccgcagcctcctctcggctgctcccatcctctccttcgagttagcttcctccttattcaaccatgggtaaggagaagacgcacatcaacattgtggtcattggccacgtcgactccggcaagtcgaccaccacgggccatctgatctacaagcttggaggtatcgacaagcgtgtgattgagaggttcgagaaggaagccgctgagatgaacaagaggtccttcaagtacgcgtgggtgcttgataagctcaaggccgagcgtgagagaggtatcaccatcgatatcgccctgtggaagttcgagaccaccaagtactactgcacggtcattgatgcccctggtcaccgtgacttcatcaagaacatgatcacgggtacctcccaggctgactgtgccgtgctcatcattgactccaccactggtggttttgaggctggtatctccaaggatggccagacccgtgagcacgctcttcttgcttcactctggagtgaagagatgatctgctgctgaacaagatgatgcaccactcc

SEQ ID NO: 6864 - DNA, 521 bp, Oryza sativa
  Clone ID: uC-osflcyp176f06b1
gtggaatctcctcccgtcccatctcctctccaccggcgatgcagcagatgaggtccgccgccgccgccccctgctccctcgccgccatgctcctccgccgcttcgcctacacctcctactcctcctcctgtgggcccatccgccgtcacgccgccgttgccctctcctccaccaccaccaccaccaccaggttcgccgcctggtcccctcctcctccttcgggcggcgccaggagcagggggttcgctgcctgggcgtcggcgcccgggccggcggggtccacggattcccccgccatgcaggcgctggagaccaagatcaaggagcagctggaggcggacacggtcaccgtcgtcgacacatctggcgacggccgccatgtctgcatagatgtagtttccaaggtattcgaagggaagtctgccgtaaatcggcagagaatggtttacaaggctatatgggaggagctccaaagcaccgtgcatgctgtggaccaaatgacgaccaagacgccttctgag

SEQ ID NO: 6865 - DNA, 342 bp, Oryza sativa
  Clone ID: uC-osflcyp176f07b1
tcggctccatccatggcgtctgcggatgcggtctcgccggcgccggcgacgtccgccgcggcgcagcagcagctgcggaccgtggtgctgagggtgtccatccactgcctcggatgcaagaagaaggtcaggaaggtgctcaggagcatcgaaggcgtgaaggatgtgaaggtggacgccgcgatgcacaaggtgacggtgaccggcacggtggacggcgacacgctcgtcaagaggctgtacaagtccgggaagcaggccgtgccgtggcagcacccgcacgtggcgcccgcgccggaggcggtcaaggcgatagaggccgcgccgcaacagcctgaggct

SEQ ID NO: 6866 - DNA, 552 bp, Oryza sativa
  Clone ID: uC-osflcyp176f10b1
tcgttgatcttgtgcactataatcaactctctgggaatgggctgactcaatcaactaacaccagcctcacattcggggtgtgacacgttgcatcagaagtcaagagacaattcaagcctcgaagtccagaaaagaagattcctatagaccccagtgtcatgaacttcttcaggggtatgtctgcacctgtcaaggaggccatcaagctatcggactatgagcgaacgctgaagaaagcatcttctggaaagtctaaaccagtccctcagcttggagagcaaccaaaccaggagatcgagccgttggtgaccgggaaagacatgacgatagaagaatttattattgacaccggtctaactacggatcaattgctaggagttgaaccaatagaaaaggcggaattgaaatacatgtacgaactcggtaaatcgcttgtcaagcccaagctggtgcagtccctacccacacaaatgtacaggttccatcagctgtacgtggagatgagcgccaccggtagagagatgatcggagcgaggatcagggacttggact

SEQ ID NO: 6867 - DNA, 523 bp, Oryza sativa
  Clone ID: uC-osflcyp176f11b1
tcgttcgactcaagtgaagagtccgccgcctttccctcctcgccgccgctcggatggggatggcccccgccggtcgcctcctcctcatctcctgcctcctctgtgtgcccaattcatttggatttgcatttgctgtggaggaggaggaggacggcagcgggctgatgccacagctctcacccaccggctctcccaaccccttggttcccttcctcgcgcccgcccctctcgcgccattcttcaacaccacccctcctaacttgtcaggcaagtgctcattgaattttactgctgtcggtgacctcatcaccaccactgctgtcgactgctttgcgtccttcgccccgttcctcgccaatgtcatctgctgcccccagctccaggccatgctcaccatcctcattgggcagtccagcaagcagactggctcccttgctttggatcccaccgtcgctacctactgcctctccgatgttcagcagctattgttgagccagggcgctagtgatgagctccacaacat

SEQ ID NO: 6868 - DNA, 556 bp, Oryza sativa
  unsure (1)..(556): unsure at all n locations
  Clone ID: uC-osflcyp176f12b1
tcgttttggcttgtggaaacactgttgtgctcaagacggctgagcaaactcctctgtctgctctatttgcttctaagctgttgcatgaggctggactcccagatggtgttgttaacgtggtatctggttttggacctactgctggtgctgctcttgctagtcacatggatgtcgataagattgcattcactggatcgaccgatactggaaaagtcgtccttgagttggctgcaaggagcaaccttaagtcagtgacactggagctaggaggcaagtctcctttcatcatcatggatgatgctgatgttgaccatgctgttgagcttgcgcattttgcactgttctttaaccagggacaatgttgctgtgctgggtctcgtacatttgtgcatgagcgtatctatgatgagttcgtggagaaggccaaggctcgtgctctcaagcgtgtggttggtgatccattcaagaatggtgttgacagggccctcagatngatgacgagcaattcaacaagatcttgcgctacatcaagtatggtgttgacagtggagcccac

SEQ ID NO: 6869 - DNA, 466 bp, Oryza sativa
  unsure (1)..(466): unsure at all n locations
  Clone ID: uC-osflcyp176g02b1
gtgttagcgagaatcggcggcggcggcggcgagagcggagagagacaggagggggcggcggcggcggcgggggggcgcggagatgacggggaaggcgaagccgaagaagcacacggcgaaggagatcgcggcgaagatcgacgcggcgacgacgaacaggggcggcgggaaggccgggcagaaggaccggctggggcaggacaagggcggccacgccaagctcgagtgccccctctgcaagaccaccgtccccgacatcaagtccatgcagatccaccacgaggcgcgccaccccaagctccccttcgagcccgacaagctcaacaacctccacnggcggcggcgccggcgccgccgcggcggagagcncgtcgnctnctccttcaagcccaagcccggcgtccgcggcagcctcaagaagtaaccgcaatcgaatccatcatcacccgaatctgctactactacc

SEQ ID NO: 6870 - DNA, 482 bp, Oryza sativa
  unsure (1)..(482): unsure at all n locations
  Clone ID: uC-osflcyp176g03b1
tgaccaccttctccgtgtcccaggcgaccaccatggaccgccacatcggcgcctccttccagatcccggcgggctccctcaccgtcttcttcgtcggctccatcctcctcaccgtgcccatctacgaccgcctcgtcgtgcccgtggcgcggcgcgccaccggcaacccgcacgggctcaccccgctccagcgcatcggcgtcgggctggtgctgtccatcgtcgccatggtgtgcgccgcgctgacggaggtgaggcggctccgcgtggcgagggacgcgcgcgtcggcggcggcgaggccgtgcccatgaccgtgttctggctgatcccgcagttcctgttcgtcggcgccggcgaggcgttcacctacatcggccagctcgacttcttccctcgcgagtgccccaaggggatgaagacgatgagcacggngctgttcctgagcacgctctcgctggggttcttcgtcagctcggcgctc

SEQ ID NO: 6871 - DNA, 509 bp, Oryza sativa
  Clone ID: uC-osflcyp176g04b1
ttccaccatccgctgtctttcgcaccccagcgcgcatgtccgtgcactcagcatgtccgtccttcgcgacatcttgaacagcggacaaataaactccagtaagctcatccaaggggaacaccggaatggcatccagagcccaacctaccagtgcttggcagcaagcatcatcaactggcaagccgatgtggagagatgcatagagtgggaagcccacagccgccgcgccaccgggctgacgctcgccttcctcaccgcggcggcgaaggagctcggctgcccactcacttgctgacaaggccacaccatgactgtcactgcaagcagctgctgtaggatcagcgagtaggaaaggatgacttgccggtcagtttcctgagatgtgatttaagactgatattagctgatgttcccaagcatgatacggggcttgctcccaagatgtgatttttactttacttttgttaatgtgctaccgctgacattagatgttcaagcatatgaaaact

SEQ ID NO: 6872 - DNA, 435 bp, Oryza sativa
  Clone ID: uC-osflcyp176g09b1
ttccgttctgcgctgcgccgggagatcgtggacaccctttccagcatctctatcaaacaccgccctgttacaaaccgagtggttgaaaaggtgccagaaccgatctaactataccaaggttagaaggtcgcatgaagattactcaccaaagagaagcttaagctcatacgggcgcagtgccacatggatcaagtgcaaagactccaggacgagcttatccttccaacacttgcatgcttgaaccagctgcacgtgaagcgcgtttcaatacactaacacctgacaccatctcaacagccattgccgtacaaccttcatcaatgatgagaggagactccttgccgatgaggactgaccgcttctttgcaatacacacagaacctactgtatacttgctaaattcgaagacacccgtaggatcatgacacaagactg

SEQ ID NO: 6873 - DNA, 525 bp, Oryza sativa
  Clone ID: uC-osflcyp176g12b1
tttttctcccacccccctcaccggcgctcttcccccgcggcagcatcccggccggccgccggcgagcccttctctcgcgagccgcgctcccctggacgaggatgcgttgacagcgcctccccctccgttcttccccacggaagcgtcctcctcctcctactcctactactgggctcgtggactggtggtccccccccctccgaccaccgcctccctccccggcgacgaccatccatggagctccaccgctcttcctcctcctgccgcagtggtaaagttactcaacagtgaggatttctaaagctcaacagaactagatgatacttgcataatgcggccctcagatatttggaaggcgcatgcagggtcatcacagtcagagggatcagcactggatatggagagaaacggatgcaaccataactgttgcccatctcctctccaaccaattgcatcaggtggtcagcactctgaaagcagcgctgcatatttttcttggccaacatctactctaatgcacgggtc

SEQ ID NO: 6874 - DNA, 237 bp, Oryza sativa
  Clone ID: uC-osflcyp176h01b1
ttgtcccacatgatgagcaagcctgacagagcccagagcggcccgagcgtgcacatcatcatcaggatcaagacgagaggattctacctgacggggctgaaggtcatgaacgtggttaggtcctttgcacaaaccctctatgccggccctttcgactagcccattcttcctagatgggtggagaacatcatctatggccccataaaggcaatggtactggaagggaaggatgttctt

SEQ ID NO: 6875 - DNA, 468 bp, Oryza sativa
  unsure (1)..(468): unsure at all n locations
  Clone ID: uC-osflcyp176h02b1
ttaatacaaatgaagtgctttctgaggagatccaagagcgtgacgagcctgctttgaaatatctgaaagatatcaagtgggctagaattgacgatcctaagggtttcaagctggattttttctttgatacgaaccctttcttcaagaactctgtcctaacaaaaacgtaccacatggttgatgaagatgaaccaattttggagaaagcaattgggactgaaattgagtggtatcctggtaaaaacctgacacagaagattctaaaaaagaaacccaagaaaggttcaaagaatgcaaagcctattaccaaaactgaagtctgtgagagcttcttcaactttttcagtcccccgcaagtacccgatgatgatgaggacattgatgaagacactgctgatgagcttcanggtcaaatggaacatgattatgacattgggacccaccatagggataagatcatcccacatg

SEQ ID NO: 6876 - DNA, 488 bp, Oryza sativa
  Clone ID: uC-osflcyp176h06b1
gttcgcagtcgcagcagcggtggtgtgcgagtgcgaggcgaagccgcgagcctttttcgtgtttggcgactcgctggtggacagcggcaacaacaactacctgatgacgacggcgcgggcggactcgccgccctacggcgtggactacccgacccaccgcgccacggggcgcttctccaatggcctcaacgtccccgacatcatcagcgagtacctcggcgccgaatccgtgctgccttacctcagcccgcacctggacggacccaagctgctccacggcgccaacttcgcctccgccggcgtcggcatcctcaacgacaccggcatccagtttgtaataataagctgctgctgctgctgctgctagtacttaattaattaattatatgcatgcataaaatggaactaattaataagaaatatatatatattgaatgaaattaaggccaacatcatccgcatcgagaagcagcttcggtacttcaatc

SEQ ID NO: 6877 - DNA, 498 bp, Oryza sativa
  Clone ID: uC-osflcyp176h09b1
tcgttttaatgtagcggaggcacatgctgtatgcttatcttctcaaggggtcattctggtttggaatgaatcaaagaaaagactatctacattcactgtcaatggactccctattgctaccacagttctatcacctttttgtggacgggttagttgcattgagatttctactgatggccatttcgccttaatgggaacatgttcttcaagcaattataagtgtgaggacagtactgagactggggatcatgaacctaatgaaccaaatggcaaggatggcatatctaaacaagctgaaactaggcaatctgttcatgtgccttctgtatgctttggtgatctgcataaacttaaggtatttcatacaatggagctggggaaaggccaggacgtcacagcaatcgctctaaacaaaagagacacaaatcttctactgtctactgctgataagcagctaatagtgttcactgatcctgctttgagcttgaaggtagtgga

SEQ ID NO: 6878 - DNA, 567 bp, Oryza sativa
  unsure (1)..(567): unsure at all n locations
  Clone ID: uC-osflcyp176h10b1
tcgtgtgccactacttctccctagggaatgtcgggagacatgtgaggtcatgggttacgatatccccataggtactattgtgcttgttaacgtatgggcaataggtagagatcctaagtattgggaggatgctgagacattcatacctgaacgatttgaggatggccatatagacttcaaaggaacaaactttgaatttataccgtttggagctggacgaaggatgtgccctggcatggtatttgcagaagtaatcatggagctcgctctagcctcattgctttaccactttgattgggagctccctgatggcatctcgccaaccaaggtggacatgatggaggagttgggtgctacaattcgaagaaagaacgatctttaccttattcctgctgtccgtgtgcctttgtcaactgtcttatagttgtctacacttacaaatagtatgtttgtctcgtataaatagtatgtttgtctcgtatgtacgtgcctaaatgataagctatgtaacttttgatgatgtgtactcctacttcctatnctacctattataaatattatttaagt

SEQ ID NO: 6879 - DNA, 518 bp, Oryza sativa
  unsure (1)..(518): unsure at all n locations
  Clone ID: uC-osflcyp176h11b1
tcgttcccgatggccgcctccgcctccgccggcggggccggcgccggcaagtcgctgttccagaccttccgcaagttcttcaagaagccgtgggagatcaccggcccgtgcgcctcccccgagtaccgcagcgcgctcccgggcgccctggagtaccgccaccgctgcccggccaccctgacgaaggacacgatggccgtcgtgcccacctccgagcccgagaccgtctacgacatcaagtactacacgcgcgaccgccgccgtgaccgcccgcccgtccgccgcaccctcctccgcaagcccgacctcgagcgctacatggccgccaagcagttcgaccccgccaaggacttccccgtgccttacgtgaacaccgccgtggaggaggactacgacgccgtcggcggcggctaccagaagtgatggtcgaggtatctacctttcttgtgcttgcacttcgtcagaagttgcattgtcttcatttgtgcccttngaatccattttgatttcagaggaaa

SEQ ID NO: 6880 - DNA, 458 bp, Oryza sativa
  Clone ID: uC-osflcyp176h12b1
ttgtaaatccgtaggctcagaggatttttggtagtcttgtttcgtgatattcgtgaagagggggggagctaaggggggattcgtaagatcagaattggatcacgcgggggcgcgctcgggatcgggggttccaaacacagcttcttcgttgaatttaagtggatgtactaatggagtcaaagggtggcaaaaagaagtctagcagtagtcgttccttgatgtatgaagctccccttggctacagcattgaggacgttcgacctgccggaggcgtgaagaagttccagtctgctgcttactccaactgcgcgaagaagccatcctgatagccctttcggcttctccatcctagtagtttaggatttcttgcaattccattttggcacttttcttctgacctatttctctggctgctgcttcctgataatcgaccagttctctagtcttgctccctgcac

SEQ ID NO: 6881 - DNA, 461 bp, Oryza sativa
  Clone ID: uC-osflcyp177a01b1
gttgttatcatctgaagaatccaaacgtgttgaggatggagctgatctgtcatgtggtgatgataaattcttgatccctgatggcaatgctgcatgttttgtggatggagaatcatcagagggagctgtaagcattgagctggagatgccgttggccatccaggacagtgacgcgtctgacgatcatatcgcagatgccatttcgcctcctgaatgtgtgtacaaagctggtgaacagttacttgtggatgacatgtgtgatgatggatcaggaaatgagtgtgcaggttcagagaagaagagcactcagattgtgatggcctccgagaagcgtgaaaaatctgggcatggaactaaatcgaagagtttgtataatgtttcagtaaaaccgaaggtgaaagagacatcgactgcaacgcgaagcaatgcgtcaagccagaaaattgtaagaacattggatc

SEQ ID NO: 6882 - DNA, 222 bp, Oryza sativa
  Clone ID: uC-osflcyp177a04b1
ccaccgcccgtttcgtgtgaagaagagaccgaccgatcgatcagggggggttttcattgaaagaagcggagcggacatctacccggtgtccagcggcgatgagacggcgcccttcttcggttccctcggcgccgcctccgccctcatcttctcatgcatgggtgcggagtaccggacggcgaatagcggcgtcggcgtggcgaccatgggcgtgatgccgcc

SEQ ID NO: 6883 - DNA, 402 bp, Oryza sativa
  Clone ID: uC-osflcyp177a07b1
ttctcatgttgctaccactgggacaagctccgggcctggctctggtctaagcatcctgatgtgatactccaagaaggccagcacaccgtcatctccattgcgtctccgagcaagacaacatctgatcacaagaacgagaaagcagagaaagagtgtggtttgcccgttattatgcctggggacaggatccccaaattcttcgccaggccgtgcccgcatgagaagtgtttgcctgcagcataggaggaggaagctgaggtgcaagtcaaatgttctgttccacaatctagttagtagctgtaaatgaagccatacagagtgggtgtatataagcttttattagaacctctaaaaaaaattccatttcctctatggtcctatgaaaatattcaatttcttcaa

SEQ ID NO: 6884 - DNA, 547 bp, Oryza sativa
  Clone ID: uC-osflcyp177a08b1
ttgaagatgtctacaagagtgctgaggctgttgagtgggttacaaaagaactagggggaaggattttgcggcagccaggtccactaccagggctcaacacaaagattgcctctttccttgaccctgatggctggaaagtggtatggctcctgtcttcgtgttccactatattttactactgttaaccatcaaatgatcggtacatcaattgtatttaagcctagagcatttggcagttcttgtttaagaaagcctggtcaaaaaggaaagcaaaccatttgcttacacacaacatagtaatttttagtgcaggcacaaaactaaaacatagtcacaaaggaccaaagtacaagggctagtgtttaggcattactgtttaccagctaggtccattcttctcggctaatccgccagattatcaccgcagattatttgcaccatgcttccaaaaattctcttcaccagcattgattgattaacctttctcaatctatttggtagggttataatggatataatatttattatactcataaacaagcatatc

SEQ ID NO: 6885 - DNA, 378 bp, Oryza sativa
  Clone ID: uC-osflcyp177a09b1
ttctgtctcaggtggctcgacacatacgatgaaggaggggttcgttgctatgaaccaggaagtgatgcatctggggcaggccctctacagccagcagggtgccccaggagcaggacctaccccaggagctgatgctgccgctggctctgctggcccatccgagaagccaggaggcgaggaaggtgatgtcatcgatgctgattttacagacagccaatgagcaggagagtagctaggtccgaaattttaaggaacgtttcgcgacgaggttgaaatttgttccacaagattgtaggatctggggtgtatctttatgttagatgggcacctttgcttcctatttgaggagttctgggcggcggagtttttgagctctgg

SEQ ID NO: 6886 - DNA, 398 bp, Oryza sativa
  Clone ID: uC-osflcyp177b01b1
gaaggtttttatcatggcggaagacgatgaggcaagggtggaatgatgggtggatttgttttggggttttgaggtagtagcaaaattacccacaaaaaaattaggtgaaaaaaaaaaagaggagtagaaatggaggtgattcagagtctcctgtgtgcatagggtgtgtggaggtgaaggaagcacggaaggaagaagatcatggcggaagaagatggccggatttcggccgacgtctcggtggcggcccctgccctatttcagtgattgctgggggttcatcctctgttcaatagtaggtggatcatcgactagctgatgaagatcatcgatcgatttaaatcaagtccccccttcttgtggatttcctatttttgatgatgtaaccttttgctctg

SEQ ID NO: 6887 - DNA, 453 bp, Oryza sativa
  Clone ID: uC-osflcyp177b02b1
gttctttatttcgagcgccgcccttttttttttttttgggtgggataacgtgacacacccatatatacacgacgaaccgatcaaaacaacaacacacaagacggtaggttcaccgacggcgagaaatggttggcacacggccatgaacggctgagatcgcacacacatagagacagacaatgtactttcagaaacgcacccattacacgatgaaaaccaatcaaacacgaaaaaaaaaaagcacaaaagaccgacaaacaacgcctgcgacgacggaggcatgtgggggccagagaggggcaccgcgtcactgacgctgggccccaccgccctcgatgacaaactcttttatttagccccacgttacgcgtacccacacacacctacggagtcgagtactaccacttcagcttacttaacttatcactcggtacacgcacacgtacgtacaac

SEQ ID NO: 6888 - DNA, 405 bp, Oryza sativa
  Clone ID: uC-osflcyp177b03b1
tcggtctttatttgagcgccgcccttttttttttttttggggggggataacgtgacacaccgatgtgtacacgacgaaccgatcaaaacaacaacacacaagacggttggttcaccgacggcgagaaatggttggcacacggtcatgaacggctgagatcgcacacacatagagacagacaatgtactctcagaaacgcacccattacacgatgaaaaccaatcaaacacgaaaaaaaaaaagcacaaaagaccgacaaacaacgcctgcgacgacggaggcatgtgggggccagagaggggcaccgcgtcactgtctctgggccccaccgccctggatgacaaactctttgatttagccccaacgtacgcgtacccacacacacctacggagtcgggagctacc

SEQ ID NO: 6889 - DNA, 582 bp, Oryza sativa
  Clone ID: uC-osflcyp177b04b1
gtcctttcccttgcgaaggcagagtctgggatagggaggtcggggttgtttgagaaggcgacgtcgcccacatgaagctgttcgtgaagaccctgaagggcaccaacttcgagatcgaggcgagccccgaggcgtcggtggctgaggtgaagagaatcattgagagtactcaggggcagaatgtgtacccggcggatcagcagatgctcatacaccaagggaaaattctcaaggatgatacaactttggaaggcaacaaagttgctgagaacagcttccttgttattatgctgtctaaggccaaagcatcatcaagtggagcttcaactgctttaaaggcacctgtgagccagtcttaaccagcaactccagttgcctcagttgcaagaacaccacctccacaagcacctgttgttacacctgaaccggcaccttcaagtgcacagccttcagttgcttctgccactccagctgctgctgccactccagctgctgttgtgaccgcatcaagtgatgcggatgtctacagtcaggctgcatcaaattttggttcaggtagcacctagtacagacaatccacca

SEQ ID NO: 6890 - DNA, 476 bp, Oryza sativa
  Clone ID: uC-osflcyp177b05b1
caacatttcagacttcaaagagctgtaccccacgttggcggagggttatattcgctactacatatatgagctactcaaggcattagactactgccattcacaaggcattatgcatcgagatgtcaagccccacaatgttatgatagatcatgagctccgaaaacttcgattgatagactggggcctggctgagttctatcatccagggaaggaatataatgttcgtgttgcttcaaggtatttcaaggggcctgagcttcttgatgatttgcaagattatgattattctttggacatgtggagccttggttgcatgtttgctgggatgatattccgcacggagccattcttctatggtcatgataaccatgatcaacttgccaagaacgcaaaggtacttggaacagaagcactaaatgcttatttgaacaagtaccatattgagcttgaacctcaacttgaagctcttgttggga

SEQ ID NO: 6891 - DNA, 505 bp, Oryza sativa
  Clone ID: uC-osflcyp177b08b1
ttcgctctctcctctctctccctcttccgccgccgcgcgtggggatggaaggagaaagcaagccatcggcccccgcctccgcctccgaagggacattgttgctagttggtgatggctgagcaggctaatcaaccgactgtccttcagaagttcggtggccagttccaccttggctccagcttttctgaaggtgtacgggctcgcaacatctgcccatctgtctcatcctatgacaggcgctttaccacaaggagctacatgacccagggccttgtcaatggtggcatcaacgtcccaatgatgtcgtcctctccaatttttgctaatgctccagctgagaaaggtggcaaaaacttcatgattgatttcctcatgggtggagtgtcagccgcagtttcaaagactgctgctgctccgattgagcgtgtgaagctgcttatccagaaccaggatgaaatgatcaaggctggtaggctctcagagccatacaagggtattggggact

SEQ ID NO: 6892 - DNA, 51 bp, Oryza sativa
  Clone ID: uC-osflcyp177b09b1
tgttcgtcatccactccctccctcccagatccgacgggatgatgggagaaa

SEQ ID NO: 6893 - DNA, 182 bp, Oryza sativa
  Clone ID: uC-osflcyp177b11b1
tgctgtcacaaggagaccgaaccccacgcagggggggggttgaattgaaaagcccgggtccaagccacacaaggcgcctgggaaccgtgagactgacagcgttcttggggagaccgcccgggcacaaaaccctgcagaacagtccagagataaggcaccctgcggtgggtatcgaggaggcc

SEQ ID NO: 6894 - DNA, 448 bp, Oryza sativa
  Clone ID: uC-osflcyp177b12b1
tttcgtttaaggaaaaaaagagagaaaaaaaaaggaaggggttaaaataaaactcgcgcacagcaaccgaatcatctgcctcctcctcaagtagtctagtcctcctctcttctccggagtctgcgtgcgatcgaagcagaggcgcggcgctcctcctcctcctccggctccgatccccatggcgttcatgcgttcccactccaatgcatcctccggtatgggggttgctcctgacatcagggacacattccttgagcttcagatgaagaaagcatttcgctatgttatcttcaaaatcgaggaaaagcaaaagcaagttgttgtggagaagacccgggcaacaactgagagttatgatgatttcctggcatctctcccagaaaatgactgcagatatgccctctatgattttgactttggtacctgggagaatgtgcaaagagcaaga

SEQ ID NO: 6895 - DNA, 556 bp, Oryza sativa
  Clone ID: uC-osflcyp177c01b1
ggcattgtatgggtggagctgaaaacaagacaagacacagggggggttagcaaccttcagaagtgtgcagacttcgtacatgcttttatgcttggttttgacatcgccgatgctgttgcgctgctccgtctcgatgacctgtatgtggattccttcgagatcaaggacgtgaagacactccgaggagagcatctgtcacgtgctattggccgcttgtcaggaaaaggaggcaagaccaaatatgccatcgagaattctaccaggactcgcatagttatcgctgatacgaagatccatatacttggatcctttgttaacatcaaggttgctcgggattcactctgtagtcttatcttaggttctcctgcaggcaaagtctattctaagctaagggctgtttctgctaggttagcagaaaggtattagatggtgcatcgtaccgttgcagttatggcctcgtaatatgttgtattggctgtttgtgtgcctgggctcttaatgtatcgttcgatgaacaaacttaaaatgctgagagttttgtaacaatacatatgca

SEQ ID NO: 6896 - DNA, 530 bp, Oryza sativa
  Clone ID: uC-osflcyp177c04b1
cgcgaacgcgcctctctcgcttatcctttctccttcgagagcttcgtctccgagggattgggtagcattgagcggcgcaggcaaagggaagtggcttctatcaccctacaaaattgcgttgtttgctgaaatggggggcatagtcgggcggggtgattctccaaggcacacttcaccagcatcaaagttagagagaaagatggttgaagccatgcagcagagagcacagaaaggaacttctgttaaatcattcaatagtgttattatgaagttcccaaaaattgacgagagtttgagaaactgcagaattatctttcagcaatttgatgaagattccaatggtgaaatagatcaacaagaacttaagcattgttttcaaaagttggatatcttattcacagatgaggagataaaagaccctatttcaggcatgtgacatttatgaaaacatgggcatgaaatctaatgagttcaatgtcttcctgtgccttggttatcttctgaagaaccgttggtgcagaagccagaaa

SEQ ID NO: 6897 - DNA, 580 bp, Oryza sativa
  unsure (1)..(580): unsure at all n locations
  Clone ID: uC-osflcyp177c05b1
cgttgttgccctcttcattcgctcgctcccctcctcggggcggggtcatctagggtttcgtcttctcctccgccgccgaccgccatggctcgccgcagctcagcaaggtctcgccctgcaccacgtgctgctcccgtgaggaaccctccgcagccagcaaggcaggctcctcctccagctcctgcccagaacggaggtggctctatcctgggaggaattggttccactattgctcaaggcatggcttttggtactggtagtgccatggcacatagggctgttgatgctgtaatgggtccccgtaccattcagcatgagactgttgtctccgaggctgctgcctctgccaccccaatggccaacgccactccatctgactcatgcagcatccattccaaggccttccaagactgcatcaacaactatggaagtgacatcagcaagtgccaattctacctggatatgctgaacgagtgccngccgggtggtgcatctgcttaggctggtggcctttcggaactttattaattgggcctcgcgtaactctcatgatatacatgaataacctgggcaattcatg

SEQ ID NO: 6898 - DNA, 216 bp, Oryza sativa
  Clone ID: uC-osflcyp177c06b1
gaaaataaagagaggccacgaagagagctcagctgcggcctggatctaactaaatgacaccggaggaggaggaggaggacaaccctgaaacacttgtccccaacgtaccaacaaaatcccacattagctgctgcatgcgaaagagaattctcgccagctcttgatggcaactgccgaaccccaaccgcggccaatgctcctcctgacaaggatggg

SEQ ID NO: 6899 - DNA, 525 bp, Oryza sativa
  Clone ID: uC-osflcyp177c07b1
ttttgtctcgtctagttgagcagccgcgacgagcacgggggtgactacgacctccgccgcgacgatggccgcgcgcctcctcctcctcgtacttttcgccgtcgtggcagcgcgcgtaggcgcagcggcggcctatcagcccggatctgctgaggggcacacgatcgcgggccgcatcaagatcgatgctgcaagtgcaattgcaaagggctttggtcttccagccaagacatcaaacacaaaagtgatacttaacggtggtcagagggttacatttgccaggccagatggctactttgcattccacaatgtgccagctggtactcatttaattgaggtctcctcattgggctacttattttcaccagttcgggtagacatcagtgccaggaatcctgggcacattcaagcagcattgactgaaaacagaagagttctaaatgagcttgggttgggacctttcagagaagagcaatacttcgagaaaagggagccctttttcattatgtaacttttgagagccct

SEQ ID NO: 6900 - DNA, 426 bp, Oryza sativa
  Clone ID: uC-osflcyp177c08b1
gtcagggggcagactatatcatcacctgagatgggggggtctattaacaaatcaggggaggggagatcaatggataaggaaatactgagcgataacatacatcagcaggggggacaggctacttttcaagagctgaagagacctatgggtttgggagcagtagggaattcaacatccgggggacagagagatttctttggaggggtttcaaataagtctgagaagatggagaaggctaaatcctatccagccttttactacccccagcttccacaatatagccctgaagttggggacgggtttcaatcaataaaccgaactatggcgggaacagcacagtctcctactggcgataaggagagggagctccagaaccctagaagacgtcaatctttcccaccttcccgggacataaggggtacacac

SEQ ID NO: 6901 - DNA, 511 bp, Oryza sativa
  Clone ID: uC-osflcyp177c10b1
ttatggcagcaacagcctccctgaagagcagggggcgggtaccatttactatctgtgactggagtagtgcaccactctccatctcaacccaggctaggaggaggtcatggcagccaaggggggcaaggatgcagggagcatcagctgcagactccaagaacattcttgtgatggggggaaccaggttcattggtgtcttcttgtccaggctccttgtcaaggaggggcaccaggtcacattgttcactagaggaaaggcccccattacccagcagttgccaggagagtcagatgcagagtatgcagagctctcttcaaaggtgttgcacttgaaaggtgacaggcaagactttgatttcgttaagacaagccttgcggcaaagggcttcgatgatgtttacgacatacacgggagagaagctgttgaggtagccccaatcctagacgcattgccaaaccttgaacagtacatctactgctcatcagcaggagtgtacctgaaatcagacct

SEQ ID NO: 6902 - DNA, 456 bp, Oryza sativa
  Clone ID: uC-osflcyp177c12b1
tgtttgttagtggacgaaatgcttccagcagttgcgcaaggtgctattggaatagcttgcagaagcagtgatgacacaatgatgaattacttgtcctcattgaaccatgaagataccagattagctgttgcatgtgaaagagaattcttgtcagttcttgatggcaactgccgaactccaattgcggcatatgcttctcgtgacaaggatgggaattgttcattccgagggctattggcttcacctgatggatctacagtatatgagacttcgagaactggaccttatgatttcgatatcatggttgagatgggtaaagatgctggccacgagctgaaagcaaaggctggccctggcttctttgatagcttgcaatgaatatagaaatccaccattggccaactagagtgttgagtggattattttgattttttttgtaccctagttctactagag

SEQ ID NO: 6903 - DNA, 593 bp, Oryza sativa
  Clone ID: uC-osflcyp177d01b1
cggaactgacagtcccgacccaccccaccgtttcgacctttttggaggtactttggatgtctccctgggtagcattgattaaagtatttgtgaggttaacgcaacacctggcgacactcaccttggcggggaggactgtgacaaccgtctggagagccactttgtccaagagttcaagagaaagcataagaaggatatcagcgggaaccccagggctttgaggaggctcagaacatcatgtgaaagggcaaagaggaccctctcctccactgcccaaactactattgaaattgattccctctttgagggtggggatttctattccaccatcaccagagccaggtgtgaggagcttaacatggacctcttcaggaaatgtatggagcctgtggagaagtgcctgagggatgcaaagatggacaagagcactgttcatgatgttgtccttgttggtggttcaactagaatccctagggttcagcagcttctgcaggatttcttcaatgggaaggaactctgcaagagcattaaccctgatgaagctgtggcatacggtgctgccgtccaaggctgtatccttagtggagagggga

SEQ ID NO: 6904 - DNA, 348 bp, Oryza sativa
  Clone ID: uC-osflcyp177d02b1
tctggtcagtcatatgagcgggcttgcattgagaaatgggggggcaattgtaacacaacctgcccatagactcccaatgaattattccagctctccatgacgcccaactattgcatcaagggtttgatagcttcatggtgcgagcagaacggggttctagttccatcggcgccgcctgattctcccaagctcaagtacctgaggatatcatccttgaatagtagcaaatgtcttgtgaccaatggcgttagcacggtcttgtttgaagacacattcaccgaggaggatatcaccgatgaggctccccacaggtgcttcatgaccatctcccccttgcttatcccgact

SEQ ID NO: 6905 - DNA, 517 bp, Oryza sativa
  Clone ID: uC-osflcyp177d04b1
gtacttgcgatcatatggcattgactaatatttgatggggtgggtttatgtaggtcttacaacaaagatatgatctggtggtctactgaaggaaccattattcagtgttgcctacaaactgtaagtttgggtgtgatcaatactgaggattcctttgacaagggtttccaaaaagaatttcttcaatggaactccttgatttgatggacactatgtttcttctgttcttgtgtcctttgatcttctttgtagtttcattacttgctcttcttggtgggttgttatattatgtgataataaaaaaagaagaattagtaatagttataaattgatcaggaaactggtcttgtgtcctttgatcttctctgtagtttcattacttgctcttcttggttggttggtatattatgtgataataaaaaaaataaattagtaataggtataaattgatcaggaaactgggcagcattaggaaaggaatcaaacatgaggaggcgggtctattttttgacataat

SEQ ID NO: 6906 - DNA, 188 bp, Oryza sativa
  Clone ID: uC-osflcyp177d05b1
atcgctgtggttcgccacccacctcgccgccgctgctgctggacttgactcagatccgcgccgccgccccccgcgaatcccctctcctccccgaaccctagccccgctctcgggggttccccctcctcctccgccgcccgccgcgtgcgccacttccatcggaggtgatcgatcgagcgggggtgggg

SEQ ID NO: 6907 - DNA, 410 bp, Oryza sativa
  Clone ID: uC-osflcyp177d06b1
aaaaatgattccatttcagaggcagcaaccaaggcccgaggatcttcttcccgtcccagtcagatcgatcgcgggaggaagaggggcagcagcggaggagatgggggagatgaactgggtgagcaggaagatccatctctacaacgtcaccatgggcctctacatgctcgattggcgggagcgctgcctcttcaacataatggggctgattctgctctggatcatctgcttcaatggctctcgctttgccagtgacgtcttctagagtcatttgaaggctcggattatgcccggtggaaactatggcatgggtgtcggtatgccatcaacctaaggttgcattgacaagtcaaaataagggggaggggctgacattatggaagtggcttccttccttacaactcttttcg

SEQ ID NO: 6908 - DNA, 450 bp, Oryza sativa
  Clone ID: uC-osflcyp177d07b1
ggcaattgctaataaacatggtgtggagacgggcagtggtttcatatacttgaaagaatcttcacctgagtttgaggcaggcagccaggaaacttcggttagtggctcccatatttcagatgctgaaccttctgaaagtacatgcaataagaccgatttggtttcacctaagcaatctgcagtatctgtatctgaggccaaacgccatacttcattgttctttgcactttgcacgaagaggcccattcttcttcaacatctgttcaatgtttatggaaggtctccaaaagttgtcaagcagtgtatccattggcatatacccaatcttgtaagaaacctgggatcctcatgttctgagatgctggctattattcataacccacctgaaggcagtgaagagcttgttaccttgatattgcaaactctgacagaagattcaactccttcagc

SEQ ID NO: 6909 - DNA, 406 bp, Oryza sativa
  Clone ID: uC-osflcyp177d12b1
tgttggtcttagatgtgctgccaaaacatgctgtgatcatgcattcccttccaaggcttgatgagatcacaatagatgttgacagtgatccgagagctgcatattttagacaggccaaaaacggcctctacatcagaatggcgttgctcaaacttctgcttgttggtcgctgacagctttcttagtgcgtggcgctgtggtgttgatgggggtcaaaaaatgtttgtcttaatcaatggctccaaatcaactgattagtattgtactaggcaccataagttagatccttgcaaggatttaaccatgtctagaactctagatgcataattttcgatgtaacaaaatattctgaaacagagatttgttgctctcatatgttcttgtgaatcattatcaaactaattaa

SEQ ID NO: 6910 - DNA, 325 bp, Oryza sativa
  Clone ID: uC-osflcyp177e01b1
cttctttcgtttcctcctcgtgagctcgcccctgcgcggccggggccgatttaaatcccgcgagcgtgcaccagcgcccggcgctggcgccgtcgctcgtcctgttgcttccccccgcatcctggcgagcctccatccgctaccctacgcgcaccctcttcctcatctctctctggtctcttcccacgcacttcttctcgaatttgcgaagaaccctatggattctgttctagaaagctgccttaatctgactaactagtcacagtttgtttgttcccccaagtagtttggggcttcaattgaacccccctgtcagacccacgct

SEQ ID NO: 6911 - DNA, 559 bp, Oryza sativa
  Clone ID: uC-osflcyp177e03b1
ctatagggtaggttgggacgcctgccggtagggggaccggaattgaattgtcgacccaaccgtccggtttgtttgttgacgaccagttcatttcagcagaaaatctcagggacatctcagaagatctatgcagatggattggttaagaaagcatatgaggattggatgcatgttgtagaatatgatggcaaggcactactgagcttcaagcagaaaaagaaatctgtcacaacaagaagtgacacggctgcagcagcaacaaacagccctgtttcctatggttcatccaacacacacaaacaattgtctcaaccagcaaaagcagggcaaacttctacaggcactacaagtgaagcagatggatctacaagtgcatacaatggaaatcaggcaggacgatatgcagtcaattctcaaagcatacctgcaaacgtcactacacaatatgagcggagttcactgacacctgaaagccagttcaatggttccgcactgcaaaatcaagtttctaggggctccaatatactggcattgggaccaccacagcaacaacatcagc

SEQ ID NO: 6912 - DNA, 285 bp, Oryza sativa
  Clone ID: uC-osflcyp177e04b1
gctgtttttctattcttggaaccctacaagactaaggggatgggtttaattgaaaagggagggaggcaacccaacatcaccattggaattctggtctccatcggtgccctctttgtgactgcgctcttcaggatcctgctcggcggcaagaagccagcggcttctgtgaagcccgcagcccaggtcaaaaaaccaaagtctaccgggtcccaagcagctggaagcaactgtggctaggaggaccagaaggaagaggaagagaatgatggatcttttgccccacgc

SEQ ID NO: 6913 - DNA, 263 bp, Oryza sativa
  Clone ID: uC-osflcyp177e08b1
gtagttttaggccatctgagggcctttgaatgggtgtgggccttcttcatttttcatagcgtttgtgtagtgtgtgcaaatccatcatcgcatcttcatatctgaagaaatgaaggggaccactcagctcaagcccatggcctcctcgtcgacgtcgccgtcaccgtcgcggctgccgcggagcgcgagcggcaaggcgcccacctacgcgccgtccagctccaacgcctcgtgccgccaccaccagcagccggcgcgggcct

SEQ ID NO: 6914 - DNA, 498 bp, Oryza sativa
  Clone ID: uC-osflcyp177e09b1
gtggttgagttaggcaaagtccatgaaatccaggctggtgtcttgtctacaccacttctgtacttgctgtcgatgacatcaaagaagtcaaatgcccaatttctatacttggtgctgaaattgacaagacgtctccaccagagctgttaaagcagtttgagcagatcctttctcctaaccccgagattgctcacttcgtcaagattttccccggcgtacagcatggatgggctgtgagatacaatcacgatgatgcagctgccgtcaagagcgctgaggaagccctggaagacatgatggattggttcaagaaatacctgaagtaaaaactgaattagcagctctccatgtaccaagatattgctaagtgctagctaatgcacgaacagctgatcttgagatgccattttgggcctgaacttcggttatgccattgtgttcgaatggcgtgtgtgcttcccttcatgtgcctcatgatacttacttttaggactattt

SEQ ID NO: 6915 - DNA, 382 bp, Oryza sativa
  Clone ID: uC-osflcyp177e10b1
acccaacccacccgtgcgttcaccttcacccaacgggcggtaaactatagggagaggtcggatactagacgatggacgacgactccaacatgcaccaagcggagagaaaagagaatggcgtcacgaaggcgtgctcctggggatgagcaaccccctgactcaacatctaccccgtctttaactacacctacctcaccaagtctgacatcaagctgaacaatgcaattatcgctgaggaaaagcactagactatgtatgatgagatggccaacaagggcaatgctgaatatattgccggaggagccacccaaaactctatcagggttgctcaatggatgccttaaactcctggtgcaacaagttacatgggttgcattggaaa

SEQ ID NO: 6916 - DNA, 380 bp, Oryza sativa
  Clone ID: uC-osflcyp177e11b1
gcaaggtgttatgtacatatggagaacacaggggctgggggggctttttaagggcaatgggtccaattgcgccataattgtgacaaattctgacgtgaaggtttacagctatgagcaagcatcaagtggacatactatggctttatcggaaacaaacaaggaatgaggaaggatagccaagtatcaggattgcgcaagggggccagccgggagactcattggtattccattattttggtcacggagcacaacaaagaaactacagcggagaagaagttgatggaatggatgaaaccctctgcccattggattttgagacacagggaatgattgtggatgatgaaataaatactgctcttgttagaccacttactcctgga

SEQ ID NO: 6917 - DNA, 537 bp, Oryza sativa
  Clone ID: uC-osflcyp177e12b1
tcttatctctcccccatggctctcgcgtgcgcggcggggcttctactcgccggcgccggaactccggcgagatccttccactcccagccctaccaagccaaggtcggcgtggtggagttcctcaacggggtcgggaagggggtggaaactcacgccgcgaaggtggaggaggcggtgggaggcgacctccagaggctcctcgagacccgcacgctgcggctcaagaagctcggcatcccctgcaagcataggaagacaatcttgagttgtgctcacaagtatcgtcttggtctttggaagccccaagcagaagcgaagaaagcgcattgaagttgagctgtcttgaagtgggtcactatgaaaactatcagctgtcattatacttaactgggaaaatgcaatgaagttattttctgattactcctgaagtgctctacttgcaaaatgatctgctatcgctggacttaagaacttgtgagacattgagcagatgcagtgcattttctatgcaacaatctgaactatgcccatgctttc

SEQ ID NO: 6918 - DNA, 292 bp, Oryza sativa
  Clone ID: uC-osflcyp177f01b1
atagctaaccttcgcatggctgggcttggatgtatgctttaagaagtataacatgactgccatgtaaaacgcctgatgcactatgatcatatttcttgatgagttgggtcctgaagaaacatttttttcagttaaaatagccctccatgaaactttttttttgtttaagaaaataaactatggctgacaagatttccatgggcttaattgctttcagtggggagtgctttctgagctctaagactagtgttctcttaggctaggtggctacaggagggtaacatgctgtccg

SEQ ID NO: 6919 - DNA, 363 bp, Oryza sativa
  Clone ID: uC-osflcyp177f02b1
gtcgttctctttgacattgagatctacaagcataacagggaagattggattgtacagacatgggggacaactgcacctgggctgccttatgttgatgaggcgattacaaatgctggtgattggttaattggtggtgactaggaggttatagaaccaatcaagtacaatgatgggcttgatcagtatcgctagtgtccagcccagctgtatgaagagtttgccagacacagtgctgatgcggatttcgcgtttcagcttagcaatcctgtacacaatggacatgctttgctcatgactgatacacgcaaacgcctttcttgagatggggtacaaaaaatactgctcttttggttcatccattgg

SEQ ID NO: 6920 - DNA, 415 bp, Oryza sativa
  Clone ID: uC-osflcyp177f03b1
ccgccgtcgttgcctttggcgaacatcgaggtcaagcggcaagagcgcatttatgatctgtgggtgaactcctggaacttttatcaatgcagtgcgggcctacaaaagaacaaattatacccctaaggaatgagagatgaatcagatgggttattaatcaggagctgcaagcaaattaggcgttaaatccacgacctttttcgcctgttcgttgcttttcctcggctgttatatctccagggatcaaagatgaagaaaaaaaataacttctgatgatatatatgtcaagcagattcccaatcatggagagcataacgcactagtccctggagaaatcatcgtagcagttgtaccaaatgcagtttgtacatgtaataccaacacgatgaatacaaattaattccagatcgatctc

SEQ ID NO: 6921 - DNA, 363 bp, Oryza sativa
  Clone ID: uC-osflcyp177f05b1
cgtctttatgttaaaaaaacaaaacacaccaagccaaggggagggtttaatggaattgctcacgaggaacatcgccctcgtcgtcgccctggtgtcaaaactggtcggaggagggtcatgcggccctcccaaggtgccacccggcccgaacatcacgaccaactacaacgccccgtggctccccgtcagggccacctggtacggccagccctactgctcctggtccaccgacaatggtggcgcgtgcgggatcaagaacgtcaacctgccttcctacaacggcatgatcttctgcggcaacgtcccaatcttcaaggacggcaggggatgcgggtcatgctaccaggtgaactgtgagcaacc

SEQ ID NO: 6922 - DNA, 485 bp, Oryza sativa
  unsure (1)..(485): unsure at all n locations
  Clone ID: uC-osflcyp177f06b1
ctttctccttcccctgctttgcggcgcgccagccaatgaccggattcccctcccagtcccagcgatggatcagcgcaagggcagcggcagcgacgccaacggcggcctggcggaggcgacggcgtctaggctgaggttcgaggaccccgacgagggcatggaggagaaccccgccgccgccgccgccaccgtcagggcggaggaggaagggggagaggngantanncaattcanataagatctttttgccatgctctctattttctatttaactactggagtataacgtctattttcccctgggccaaatacagatgatttgttctgcagagtgtaaaattgggcacacacacgctgagtaattgcaccatatatcaataaatcactaccgacttatacagattggagctgtgtattttccttccactcagcttcttgctgttggtgcaaatggacttgcaataaatcaaatgccctgtcatgag

SEQ ID NO: 6923 - DNA, 493 bp, Oryza sativa
  Clone ID: uC-osflcyp177f07b1
ggacatggagggtatccccccggaccagcagcgcctcatcttcgccggcaagcagctggaggatggccgcaccttggctgactacaacatccagaaggagtccacccttcacctggttctcaggctcaggggtgggatgcagatcttcgtgaagaccctgactggcaagaccattacccttgaggttgagtcgtccgacactattgacaacgtgaaggcgaagatccaggacaaggagggcatccccccggaccagcagcgtctgatctttgctggtaagcagcttgaggatggccgcacccttgcggattacaacatccagaaggagtccacactccacctggtgctccgcctccgtggtggccagtaagtcctcagccatggagctgctgctgttctagggttcacaagtctgcctatttgtcttccccaatggagctatggctgtctggtctggtccttggtcgtgtccccgttcattgtgtactattta

SEQ ID NO: 6924 - DNA, 415 bp, Oryza sativa
  Clone ID: uC-osflcyp177f08b1
catactgcagcaactaataaacgatggatcgtggcaagctctccttggacatgggggggcgactggcagtggcggcggtgactctgccggcgccgtcatggcagatcttcgacctatttctgcccggcgggcccagtcaccggtcctactgcggaggggctggcaagtgggtgctgatgaaccacaaggagtacgtcgagaagaagtcgctgtacgccatgaaggccgtctgcgacatccgcgggaagaccatcaacacgagcctctatgatgtagatgaggcccaggtgacctaggatggtgagcataacgcactagtccctggagaaaccatcatcaccaattggccaaatgtagttagggcatgctatgccaacaccatgaatgcaaacttattcctgagcgatctcaaccg

SEQ ID NO: 6925 - DNA, 469 bp, Oryza sativa
  Clone ID: uC-osflcyp177f10b1
tttgaaggaaactttagtaacactaattcaaccgtggggggatgtactaacaaaggcaggggcattacccgttcttgcaagttctctccagattgcaatgagcaggaggcttggtattgaagaacctcagttaatgaagataattagaacaacacttcacacgcacagcgaatgggttaagcttcagatgtgcaaggaccgttttgagcactttttgaagattgattctctaaaagaggttgatccatctgcggggagtcacaatatgtccaagggtcttacagatgaatgtgctaatggatcttctcaaatcacaacatgctctagtggcaaggtgctagatgaaggtagtagccctcaggagtcatcagaagttacctgtgatgaaaacgccatactcaaggtcatggaatttcttgctttgccaaaggctgacgcgatcccactgcttatgcaatatgggggggat

SEQ ID NO: 6926 - DNA, 558 bp, Oryza sativa
  Clone ID: uC-osflcyp177f12b1
ttcctgactctttcaggacatcgacataactaggacatggtcaggtaagagttatgaggtattaaaggcctgagattcatggaaaaacatatcctcgggcaacatgttcattaatgtaccaatgtgcttgatagaatcccactgcaaggaaatttgtattgttctgatcaaggcacaagtacaggagaaaattgacgtatttttggatatgcaagcactgggcattcaaataagatctttttgtcatgctttctattttctatttaactactggagtataacgtctattttcccctgagccaaaatacagatgaattgttctgcagagtgtaaaattgggcacaaaaatgctgagtaattgcaccataaatcaataaatcactacgtacttatacagattggagctgtttattttccttccactcaggcttcttgctgttggtgcaaatggacttgcaatcaaatcaaatgcccctgtatgagaaggaagaggtggcctggccagccgaggtcgcgaccgatgtgcttgcaatcagcggcaaagtggaagctagagca

SEQ ID NO: 6927 - DNA, 161 bp, Oryza sativa
  Clone ID: uC-osflcyp177g01b1
agcagtttagtttctgcctccttctctgatcattcttggggacggatcaatttaagaaccaggtcggggggcaaggaggtggacgtgtccactctcgaggccggtggcgcccgggactacatcgacccgccgccggcgccgctgggcgacttacccccact

SEQ ID NO: 6928 - DNA, 517 bp, Oryza sativa
  Clone ID: uC-osflcyp177g02b1
cacactttctttacccaccgccgttgccgaagccgcagttggagcgctagtaaaaggggctagcggaaaccccagcagcgtgagggctaagcttcgcggcggattggagatgacgcagaagcagagccagttcaaggggcaggggaagaagaagaccatccctcccaaccgccatggcaaggcgccccacgtccgcaaagggaagagggccgtgaagccgaccaagttcaccaaggacatggacgccgataaggaactcacaaaattcatcaaccagtgcaacgagaagaaggctgcaagtcttgccagcaaagaaggcggcgacctcagtatactcaaggcggacgttgatccctccaattcaaactaggaatctgtggctacctctgcctacggctatgtgctatagaagatgagtgtgtggaatggatattatgttacattgcttacttgcattctagtatttccctgcagaaatgtaataattctgaatttctctgaagaaggtatgcttact

SEQ ID NO: 6929 - DNA, 466 bp, Oryza sativa
  Clone ID: uC-osflcyp177g05b1
gtacattaagtcgatttcagtgagaggaggaaaaggcgggaatgtttaatgaacattgcagatgatgccagcattccaatgtggacaccagaaaaagtaagggctggggtttcttcatatagcaaggatgagaatgaagacgatgccgaagatgaatccaccacaagtgttttgcaggggggcagttttacatggaagacccttagaaggaaaaggtcaagccacttctccaattcctcagattcaaaagggcgctcggcattctaatcttgggattcaggaatgttgttgccctgatgcatttgtttgaatcctctcctttgagaaaggagtgctcctggatagaaattaacagggggtatttagggtacatttaagcttacaaattttaggattagtggtattgtatggatttcttggtattaaattgtgtccatcagaactaaaacatcgaagttgggcttct

SEQ ID NO: 6930 - DNA, 462 bp, Oryza sativa
  Clone ID: uC-osflcyp177g07b1
ggcggttctccacctccgccacctccttctccactcccacgaagcctgtctcctcctcctcctcctcctcaagtcccaactccgtctgcttcgccagggcgtcggggaggtgcaggatggcgtccgtggtggtgagggcggaggcggtggacgcgaccatcagcccgacggtgagcgcgctgcggccgtccaagaccatggccatcaccgaccaggccacggcgctgcggcaggctggcgtcccggtcatcggcctcgccgccggggagcccgacttccacacgccgcacgtgattgctgaggctgggatgaatgcaattaaggatggttatacaaggtacactcctaatgctgggactttggagctgagaaaggctatctgcaataaactccaagaggaaaatgggatatcctacagtccagatcaggtgctggtgagcaatggagctaagcaatgcatta

SEQ ID NO: 6931 - DNA, 318 bp, Oryza sativa
  Clone ID: uC-osflcyp177g08b1
gaaatttcccccctctcgccctcgccttctccggggtgggagcatatgcaccccggattttccttcagatttgcctagtttttctccctcgctcttgactcgcgatctcccgatctggttcgaaagatcgcacccttttctctctgttttttttaatctatctctcccccgagcgggcctcactcagatcacccaggaggagggcggttgcggcggtggtgtcgtttgcggattggattctttgtctgatctcgcctggagaggatcttgcctgaggatccacgactttctttggatcggaaagggggaatgctggca

SEQ ID NO: 6932 - DNA, 180 bp, Oryza sativa
  Clone ID: uC-osflcyp177h02b1
ccgaaccccaatttccacctacacccaccgcggccattcactacacccccctggacaagacgaaacggggagggctcctttttaaattatgctggcgttcgcgagctagacttccacagtccgctccacacgcattgcccgatcgcccgcccgcccggccgagagcccgagcggctagag

SEQ ID NO: 6933 - DNA, 316 bp, Oryza sativa
  Clone ID: uC-osflcyp177h03b1
ccgaattccggtcacccacctccggaacttctattcgttcttatagagcaggtacaaagacggtgggttgttctttgaaatagagatcggcaactccgccgtcgaaaatggctgaattctcttggctcacggcgctcggctccatgttcctcacgacgctcctcaccgtcatgttcagctataaagaccccgaactcatgccgcttggcatcaagatcgtcgtgtgggcgatggcaacggccacgacatgcggcggcttctatgccttcttcatccacgaagagaagcagccgcagtacatggccgtgccggcctc

SEQ ID NO: 6934 - DNA, 506 bp, Oryza sativa
  Clone ID: uC-osflcyp177h04b1
aggtctttgttttagaagaggaaggaaacgaaattgtagcggggcatgatttcaaagctaagcgagcttgaagactcggaaaccgaaggaggcacaactcaggcgccaagcaagaagcatggcctatggccactcaccgcgctgctgagaaggctgttcacgaggagtgacggcagcaaggagccgatgctgtggctggtgctgaggctgctcattccggtggtgctgctggtggcggtctgtgtggctttctacatgcgcagcggacctcctgaagtagactgcatcaactgttaaattcttggatattgtcgtctactttacatccggctgtagaggtccgtctgccagctgtgcttcacaatcggagtcgactactactggtcacggtaagctatttccgaggctgctgttgcgttcaatatgtatagaggacaggcaagcattgcattaactgcacctgtgagctagacaccgtcgagtgattgaaccatacataggaaaaa

SEQ ID NO: 6935 - DNA, 117 bp, Oryza sativa
  Clone ID: uC-osflcyp177h05b1
cgatgtccagtttcaggtcggcggcttgcaatctcggggcgggcattatttaaaaaaccccggccccttatcctccttcacccacctcctatcaactctcccatacccccccattaa

SEQ ID NO: 6936 - DNA, 248 bp, Oryza sativa
  Clone ID: uC-osflcyp177h06b1
agagatgccttcttcgccgccgccgccgcactccacggggcgctcttcgtatccggccgccgccagacaagatggtgagagtcagtgtcctcaatgacgctctgaaaaccatgtacaatgctgagaagcgtggtaagcgccaagttcttatccggccctcgtcaaaggtgatcatcaagttcctcatcgtcatgcagaagcatggttacattggtgagtttgagtttgttgatgaccaccggtctggc

SEQ ID NO: 6937 - DNA, 264 bp, Oryza sativa
  Clone ID: uC-osflcyp177h07b1
tgcacttctcgcatcgcaaagctcggcagcaaaggcagggcaaagtcaaaccaagcttgaagctccccgcactgagccaagaagcctccacctcaatccgaaagagatctcgtgcgcgcacggcgatgcggtgaatcgggcatggcgccgccacaggagcgggactacatcgggctgtcgccggcggcggcggcggcgctggcaacggacctgcgccttgggctgccggggactgcggaggaggctgagtcggagggccggctg

SEQ ID NO: 6938 - DNA, 531 bp, Oryza sativa
  unsure (1)..(531): unsure at all n locations
  Clone ID: uC-osflcyp177h09b1
gcgggggcggcggcggcgatcaacctgtggagcggcggggcgacgatgctgccgctgctggtcgcctgcgtcgccgacgcctggctcggccgctaccgcaccatcgtgctcgcctccctcctcttcgtcgtgagcatggggatgttaaccctctcgtcggcgctcccggcgttccacggcgacggcggcggctgcagctacacctccaagtcgctgtcctgcgctccctccaccgcgcaggtggccatcttctacgtgtcgctgtacctggtggcgctcgccgaggccgggcacaagccgtgcgcgcaggcgttcggcgccgaccagttcgaccagaacgacgccaaggagtccgtctccaggagctccttcttcaactggtggtacttcggcatgtgctccggcaccgccatgaccaccatggtgtcctcctacattcaggacaacatcggctggggcctcggcttcggcataccctgcctcgtcatggcgtcgccctcgccatgttcttgctcgggacanggaactacc

SEQ ID NO: 6939 - DNA, 499 bp, Oryza sativa
  Clone ID: uC-osflcyp177h10b1
agaaaggcgtcttcgtactcgcctctctccgcgcctgggggcttttcctcctcctctgccctctctcccttctccgccgccgtcgcagcatcaacccaatccgccgccatgagggagtgcatctcgatccacatcggccaggccggtatccaggtcgggaacgcgtgctgggagctctactgcctcgagcatggcatccaggctgatggtcagatgcccagtgacaggactgttggtggaggtgatgatgctttcaacaccttcttcagtgagactggtgctgggaagcatgttccccgtgctgtatttgttgatcttgagcctactgtgattgatgaggtgaggactggttgctacccgcagctcttccaccctgagcagctcatcaatggcaaggaggatgcagctaacaactttgccccgggtcactacaccattggcaaggagattgttgatctgtgccttgaccgcatcaggaagcttgctgacaactgcactg

SEQ ID NO: 6940 - DNA, 491 bp, Oryza sativa
  Clone ID: uC-osflcyp177h11b1
tttcatggcaccaaatccccccaccatggatcaggcggggcttctactaagactcctgctgctctccccggcggtggccgccgcctcagtccccggcgaggaggagccgctgatccggcaggtggtcggcggcggcgacgacaacgagctggagctgaacgcggagcgccacttcgccagcttcgtccagaggttcgggaagtcctaccgtgacgccgacgagcacgcgtaccggctctccgtgttcaaggccaacctccgccgcgcgcgccgccaccagctgctcgacccctccgcggagcacggcgtcaccaagttctccgacctcaccccggccgagttccgccgggcctacctcggccttcgcacgtcgcgccgcgccttcctgcgggggctctgcgggtccggccacgaggcgcccgttcttcccaccgacggcctacccgacgacttcgactggagagaccacggcgccgtcggccccgtcaaga

SEQ ID NO: 6941 - DNA, 534 bp, Oryza sativa
  Clone ID: uC-osflcyp177h12b1
gtgtgtgtgcaagaccaatcaattggctctttgggaaggtgttgagaagggaagctcattggcagagtgttcaacttattactcaaagagaacatgtttgccagtgaaacaccatctgaatcgaaagagcatagctcaatttcagagtctgtacctcatgacagtgcaggattcgaaccatgcagaaaatgtttagcaaaaactgttcacaatgccacaccaaggcgacttctgcaagccagggagctggcttctaatcaaacacaaacacaccccaaaagccaatcatctccagttcaatcatgagcatcacacctggtacctcgttgggctatttacgcattgcctgttgctggagtccttttcattgcagcagtagctactgccatatatgtattcttctcccgtagaaagaaggataatactgtcatgccatggactacagggctgagtggacagctaaagaaggcatttgtaacaggtgtgccttctttgagaggacagaactcgaggcggcatgcgagggtttataat

SEQ ID NO: 6942 - DNA, 308 bp, Oryza sativa
  Clone ID: uC-osflcyp178a02b1
ctgcaggtccgtacaaccgcaatccgggggggccttttatcacctcttgcctggtgacactgcaatgcaaaaacccgtcattttgctgagaaaatgaatataaaccctctattctgcggcactatgttgctccattgccactcatgctggatacgtcgaactgaaacatgcagcagctcatacataatatagccagacttctgaatgtgatgctctggacagatagctcaagacacgccacggcagcatggaggcctgagtactgagcaaaatgaacattaatgtgactctttggaagagacgactat

SEQ ID NO: 6943 - DNA, 184 bp, Oryza sativa
  Clone ID: uC-osflcyp178a03b1
ctaccacgtgttgcggtggcgcctgatcaacgactggctcgacggctgcggttgttgatgggcaccctagctctatgagcactggcgaggcacgggggacacagcgcacgggcctgtgacgaaatgggccacgctcccgaggctgagctactggtccagcgtctggccctacggtgaggcgtgc

SEQ ID NO: 6944 - DNA, 463 bp, Oryza sativa
  Clone ID: uC-osflcyp178a04b1
gcagtgcatttttaggttggatgtagcaatgtccaatgctggggtgtgtgtatcagatgatgaaattccaacagacccgctgtctgatcccataactgatcctaaaggtcttccaatgccatctgggaaaatcagcttcggtgctggggcccaactgaaaaatgctattggcagctggtctagatgtcttactgacttgtttggcatggatatggacgactatcaagaacttgacaatgaaggtggtgaaaatggctttggcgaatctgccaagccattctatcacctgaatgcactgagtgatcttctaatgctttccaaggatgtgctcatggataccagtagcaggaaagagctttgccctacctttagctcatcaatcatcaagaacatcctggatgtctttttaccagatgaattttgtccagatcccattcaaggttctttacttcaagcactagag

SEQ ID NO: 6945 - DNA, 507 bp, Oryza sativa
  Clone ID: uC-osflcyp178a08b1
gtattgttcaccagctagttactagcgtcaaatgttgggtcagagtaccatcgtcagctgcttgaaaataccatgttatgtggtggcaccgcatcaatgactggttagttgccttttgtttttgatgtgcacctttgctctattcaaccttgtgaggtataggtcaaatagcgaaagggcctctaacgtaatggttaaggcttccgagtagcatcttcaggtcttggttcgatccctaatttcgggcttggttaaaaaaatcccctcgctgtgtcccatccgttctcggttatgtcctgcgcgtcacccctctggctgggccgctgcagagtgggcagaatggattttatcggtcaagaccatgtttcgatctcttcttaatttaatattgggagggcggtctttccctacccggccgagtttttttagctataggccaaatgcatatcaattagctgtatagggcaaggtatatcattttggtttaaacttacatatgttttctag

SEQ ID NO: 6946 - DNA, 511 bp, Oryza sativa
  Clone ID: uC-osflcyp178a10b1
ttatgtttgcggagattgagataaaaacagcagggggggactttcgtttacctacaacaaaccaaacaaggcattgttttactcgctatgtcgagtaccacaggtgtttgaatgccaaaggggatgatgctggtgtttgcgaaaaatttgccaagtactacaggtccctttgccctggagaatgggctgagatatggaacgagcagagggagcatgggacgttaccaggacctctctgaatgtaccgaccgagacctccagttggaccagtcaacatgttggccagccagtcctactggtccattctggattcctacttcccggatcgcaaatggcttttgtctcttgctcttcaaccagtcaccacaaaactgttagtgatgcctatcgtatgcaaccctaataatttggctacagtggcctcacatgcagccatggtttgtgtgttgactgcggacctatatttgttcacttttttgtggtaacgtctgaaaggacttgcatttttttt

SEQ ID NO: 6947 - DNA, 289 bp, Oryza sativa
  Clone ID: uC-osflcyp178a12b1
tttactcagagaagttctcaagagtgaagcctagggaggtggtgacctgggtggtgctgtacacatagcttacttcataatggatgaaatgactccaggacaaagaggatggcgggaactcgaagctcttggagataagattaatcagtttagcggcataatagaaggctatatttgggctcctaaaggcagtgattcaaatgatagacatgatgattgggcttttgaggagggaccacactctgattttactgggccaaattgtgggagtacagcctgtgtagctttg

SEQ ID NO: 6948 - DNA, 431 bp, Oryza sativa
  Clone ID: uC-osflcyp178b02b1
cttcttcttcttcttcacacaggggtgctccttctgctcttgtgctaagtagctagctcacaacagaagaggacgagaggaagcaaggcggcggcggcggcagcaacaacatatacaccgccggccgtggcgccatgggcatcctggaccacatgtcgcatgtgtgcagcatcacggagacgaaggaggcgctcaagctcaggaagaagcgaccgctgcagacggtgaacatcaaggtgaagatggactgcgaaggttgcgagcgtcgcgtgaagagcgcggtgaagtcgatgcgcggcgtgacgagcgtgacggtgaacgcgaagcagagcaagtgcacggtgaccggggacggggagcccgccaggtgctggagcgcgtcaaggccaccggcaagaacgccgagatgtggccctacgggccctacacgc

SEQ ID NO: 6949 - DNA, 494 bp, Oryza sativa
  Clone ID: uC-osflcyp178b05b1
gcagtgcatatctaggttggatgtagcaatgttcaatgctatgttgcgtgaatcagatgatgaaattccaacagacccgctgtctgatcccataactgatcctaaagttcttccaatcccatctgggaaattcagcttcggtgctggggtccaactgaaaaatgctattggcagctggtctagatgtcttactgacttgtttggcatggatatggacgactatcaagaacttgacaatgaaggtggtgaaaatggctttggtgaatctgtaaagccattctatcacctgaatgcactgagtgatctcctaatgcttcccaaggatgtgctcatggataccagtagcaggaaagagctttgccctacctttagctcatcaatcatcaagaacatcctggatgtctttttaccagatgaattttgtccagatcccattcaaggttctttacttcaagcactagagttggaggaccacctggaggttaacaggggca

SEQ ID NO: 6950 - DNA, 445 bp, Oryza sativa
  Clone ID: uC-osflcyp178b08b1
ctgtttttctgcttgagaaggctgaggagctcatgagggggggcttgcatccgagtgagctcatcattgcctacaccaaagccatcaacaagacaatagaaattttagaggatcttgatgagaaaggctcacagaacatggacgaaagaaacacggaggatgttgcgttgaggatgagatctgctgacgcatgcaagcagtctggccaggaggatatgctgagccctcttgcggctgatgcctgcaatcaagtctgccccaaaaatcctgccaactttaatgatgacaatgctagactggctaaactacttggaggtggattgcacaattcttctgtgggccgagaattggatctgaaaaatgatgctggtgggagcattaaaaagacggacaaggcaaagactgccctatctgctggtggagtcgacacctcagcacctgaaac

SEQ ID NO: 6951 - DNA, 297 bp, Oryza sativa
  Clone ID: uC-osflcyp178b10b1
atgtttcattacaggatagcaacataccaagctggggggcttgtatttctgcttagtgttttgtctgcgctaccgggcgccacgcacacaggagatagagagctgccctaagaacaggatcacaagggccgttccactgatgtttctggaaaggaggggaccgattgaggagatatgatgcctactaatgactatgggcgcttcgatccgactccagggtgatgcaaggacaactccaagcttatacccagctaatgacactcacacttgctgcatctacatgctcactacatggat

SEQ ID NO: 6952 - DNA, 446 bp, Oryza sativa
  Clone ID: uC-osflcyp178c01b1
cttctgtttggtaaagcgacaggcagaactaagtacagggggggatgtttgaaagcatcaggccggttgcaagagcgccaacgagctgctcccgcccagcgccagtttcgtgaagctgtcggacatgagccctaaacagtggagcgcattcctcgacaagctccaggagctgctcccaggtgccctgagcgcccggaagcacgctgccggtgtcgtcggccagcgctcgatgccgaggctgggcacgccttgccagttctgagagttgcagaagagaagcccaccgacccaagggtccacgaacgcgcttctgttcgagctctggtgtgcagcagacaagcaggtacggagtattatataatgcttgcagcaagtgctctgggcccgtggtggcagagagggttcccgaataagatcatccatggcatgtgagatgaggctgcggg

SEQ ID NO: 6953 - DNA, 430 bp, Oryza sativa
  Clone ID: uC-osflcyp178c02b1
gtcacgctctacggcttcgacttctggttcatgggctgggggaggttctaggcgtccctgcaggagctggagaaggccgtcgcgcagtcgcagtcgcagtcgcggtcgcaatgacctgaggcgatccgccggccggcccggcgtttgttgtgctcctgtgtcgcctgcttcatctgtgttcatatgtagtagggtttcggttttcttgatgatggattgcttggcgttcttggcattggagcaagtccggtatacattgattatacaggagaacaaaaaatgggatattagattgattacgtgatcggtgatgctgagtaaatcttctacggcgccagcgtaaaagtgtcttcgatgaggtttacatgtaacatgtgtcatgaaaaccacaaatgcttgtgcgacgaaatagattgtggtaactgaactc

SEQ ID NO: 6954 - DNA, 460 bp, Oryza sativa
  Clone ID: uC-osflcyp178c05b1
gtgaagttattggcagagctaccagcaagtgggtcatggtgagcctaaatacacggagacttcagcgggtcagtgatgacgtgagggatgaggtgtttatgcactgtccaaaggctccaagattagcattcccagaggaaaataatggcagtttgaagaagattccgaatctttcagaccctgcagaatattcaagacttggactagtgccaagaagagctgacctggacatgaaccaacatgtcaataatgttacttacataggttgggtcctcgaaagtatacctcaagatataattgatacacacgagttacaaacaatcactctcgactacagaagggagtgtcaacaggatgatatagttgattctcttacttgcatagaggaaggagaggagaaaagcatgaacggctctgcttctgcagcagcgcctcacaaagaagagcggcagcagttcct

SEQ ID NO: 6955 - DNA, 443 bp, Oryza sativa
  Clone ID: uC-osflcyp178c06b1
cccactcgttcggggaggatgagtatgcaaggattgggggagattgtgacaaggtcatacaatggaacggttatcgagttttcggtgttcttgcaatgtcgcgatcaattggtgacagatatctgaagccatggataattccagtcccagaggtaacaatagtttcgcgggctaaggatgacgagtgccttattcttgccagcgacggcctctgggatgtaatgtcaaatgaagaggtatgtgaaatcgctcgcaagcggatacttctgtggcacaaaaagaacagcacaagctcatcatcagccccacgggttggtgattccgcagactcagccgctcaagcggctgctgaatgcttgtcaaagcttgctcttcaaaaggggagcaaagacaacattactgtcgtggtagttgatctgaaagcacagcgcaagttcaagagc

SEQ ID NO: 6956 - DNA, 437 bp, Oryza sativa
  Clone ID: uC-osflcyp178c07b1
atgacttttgccatggtcaaggacgtgatgtcgagagggaagttttaggatcggcgccagatctccgacaaggccaaagacatcaagaaactctccaacgagttagctgaacttcgtgccaagtacacggtaaggggcgtgggtgctgatctcgccgcgagcaccggcatcgacccccgtgtcatcaatctgtacaagaaagagacagatctcgttggcatcgaggagtcaagggacaaagccatcaggatgctgtctatggggaccaaagatgacgatgcgcatgaggctcatcaggatctaaagatagtgcctatagtcggggttggaggactaggacattcgagaagatgctattggaactcgatcgcgagtgtaaacaagttgacatggccagatgggatctagaacaatttataaatgaactggatgaattc

SEQ ID NO: 6957 - DNA, 457 bp, Oryza sativa
  Clone ID: uC-osflcyp178c08b1
cctgtttttcggccaagccccaaccatctgggaacagggtgactttaagaacgccatacggtacaaagggcttgctgcccagagccgcttcctggtgccagtcatgctcagggagtgcggcaaggcggtgcttcgtgggatcgactcgttggtcgacgttggcggtgggcatggtggcgcctgcaccgacatcgccgctgtcttcccgcacctcaagtgcagcgtgcttgacctcccgcacgtcgtcggcggggctccatccgatggcaacgtgcagttcgtcgcaggcgacatgtttcagagtattccggcagcaaccgctgttttcctcaagacgggtttacatgactggggtgacgatgagtgtatcaaaatattgaagaatcgcaggcaagccatattttcatgcgatgaaaggggggaggtaataattatggacatgggagctggatttgat

SEQ ID NO: 6958 - DNA, 270 bp, Oryza sativa
  Clone ID: uC-osflcyp178c10b1
ttcctgattcaaaaacttgggcagagcctgagggactgggttctgtataccgtcatttggttgctcatgcaaacaggcagagccaagctcgttgagccaactgacggacactaccggacgaaccttgccccctagtacaatgaccagtatctgcaccccacggagaatttgcccaagggaacaggccagtcggacctgattggggctcttacacaaggtgagccaattgatgactctagacctgcaggtgctgatatcctaggtggacaa

SEQ ID NO: 6959 - DNA, 416 bp, Oryza sativa
  Clone ID: uC-osflcyp178c11b1
tttcttgaccttattcaccggtagccggactcgggggggatttcatgatctactcgggatgatataccagttacacgtgaaatatcaggcagtgctattggcttatcaatgcactaccctgatgcacacttctgcactgatgctaacggaaaatacatacagaccaacttgatatcctcgggacactgcatagtgatcagttgatcagaacagatcatatcaacgctgtaaccacagtcagggtccttggaccgctacaaccctacaggctgcactgccagtgattgcctccaaagttgcactcaccaccttaagggttcacgtgacgttgctccacatagaagtactggcttgagaagccttttactaggaggaaccgtctcaaagacaatgggagtgacgccttcgggaatatt

SEQ ID NO: 6960 - DNA, 371 bp, Oryza sativa
  Clone ID: uC-osflcyp178c12b1
ctctttcttcttcacaatccatgtgacactcaaggagggttttaggtatcacagtcacgaggttatgggctgggaggccactgatctggcttatggtgacatgaactagagggtcatccggagctgaggtcctacataggtctccgatgtcgagaccatcttcctcgggcgagaacatgccggtacatggggaaaggcacttggggcataggtgctatgactgaaacaacatggggtagcacgatcttgctcaaggatgtcccctcaggctccaaggcttctgtcatactaaatacggtctggctacattgcccaaatcagcatcacactgcttggacaggtagagctatgagagtgctctcggttctatg

SEQ ID NO: 6961 - DNA, 530 bp, Oryza sativa
  unsure (1)..(530): unsure at all n locations
  Clone ID: uC-osflcyp178d01b1
agaaggttttatttccccaaaccctagcttcggatctggagggcgaacccccgcgtcttcttcgacatgaccgtcggcggtgccccagccggccggatcgtgatggagctgtacgccaacgaggtgcccaagaccgcggagaacttccgcgcgctgtgcacgggcgagaagggcgtgggcaagtccgggaagccgctccactacaagggctctaccttccaccgngtcatcccccagtttatgtgccagggcggcgacttcacccgcggcaacggcaccggcggcgagtccatctacggcgagaagttccccgacgagaaattcgtccgcaagcacaccggccccggggtgctctccatggccaacgtcggtcccaacaccaacggctctcaattcttcatctgcaccgtggagaccccctggctggatggcatgcacgttgtcttcggccaggtcgtcgagggcatggaggtcgtcaangtcatcgagaaggtgggctccgcagcggcgccaccttcaaggaggtgaag

SEQ ID NO: 6962 - DNA, 137 bp, Oryza sativa
  Clone ID: uC-osflcyp178d02b1
cccacttcgtctgcccacgcgttcgcgtggttgtagaggggggatttattaggatacccgaatcgcttgtttccacctggccaaggtcgcgcactgaatccccagtacgagatgtagattatgggaatagagtgccg

SEQ ID NO: 6963 - DNA, 350 bp, Oryza sativa
  unsure (1)..(350): unsure at all n locations
  Clone ID: uC-osflcyp178d04b1
cttggtctttttgcatgtcaatcgccattgtttctgggggnggtttccatctatatttagggtttctttcttgctggccttttgagcgattgagtctgtgtatattgcattagcatgatctgcacacccttcccccacccaccccagaaaaaggaaacaactgcagtgagagtgagctactggtgaacagaacagaacagaagcgcatgcatccatggtgtgtccgtctgcaaaataattaagtggtggcctcgcaaccgaaccgacgaaggatttttgccataaccatatatatgatatgttggtggatgtatagtagtgcaccagcgtacatgaattaaacaaagttc

SEQ ID NO: 6964 - DNA, 411 bp, Oryza sativa
  Clone ID: uC-osflcyp178d05b1
gtttgtcttgcttattgacaattttgatgctcaataggggggtgttgaaaatgatggggatgaatttacatttttgaccaataaaagtgcccctaagaataagctggtaagggtaaatataaaaatccagagctgtggactgatgttctctcagagcatgaaaaagatgtgctcgaatcagccgacgccggtaacaataaccaacttttggtgaattatatgtcagatgttaagcatattctgcagataagagaccttacaactggaaactttattcatcaggtgcctttggagatcggttctggttcagagatctcgtgcacacgagaagacaaggaagtatttattggcttcacaagctttctttctccaggcattatttttaggggcaacttaacatctacaatccct

SEQ ID NO: 6965 - DNA, 465 bp, Oryza sativa
  Clone ID: uC-osflcyp178d06b1
aaacttttggtgcaggttctaggcaataaagggggggggggggttctaagttcgaaacctgtacaatttttgatcaaaatgcctgaagttttctgtgaaaaattgaaatgtacattgagttttacgatgttatgtctgttccaatggcaattgctttgtctggtcaaccgctgcttggacaagcagtgatggttaagccatctgaggctgaaaagaacttagttcagtcaaatgcgacatcaggtggtgcggcttcaggtggagcaagaaagttgtatgttggcaatcttcactcaaatattactgaagaccaattaagacaggtatttgaaccattcgggcacgtggagcttgtacagcttcctctagatgcaatgactggactgtgcaaaggttatggctttattcagtttgcccggcttgaagatgcaaaagctgcacagagtctgaatgggcagcttgata

SEQ ID NO: 6966 - DNA, 289 bp, Oryza sativa
  Clone ID: uC-osflcyp178d08b1
cccatttcgacgcggatgagcccaaagagcgagggagggggaaccaggaaacgagcggcgcaaggatgccgcaaacgcagctccgataccgggagcaccaagagggcccgcggacgcaccgaaagcagcgcgaagcacggcggaggcaagcgccgcaggaccgaggggggagacaagagcgcacaggggagcacggacaagagcaaggcccatggagggggcaagcgaagcgcctggagcaccggccgcgacaagtccgcgaggggaaggagaggccaatgcgcagcgc

SEQ ID NO: 6967 - DNA, 404 bp, Oryza sativa
  Clone ID: uC-osflcyp178d10b1
tttgacttgagctcttgaaaactgcaattgagaaggctggttacactggcatggttgtcatcggaatggatgttgctgcttcggagttctacagtgacaaggaccaaacctatgacctcaactctaaggaggagaatcatgatggttcacagaagatatctggcgatagcttaaagaatgtatacaaatgttttgggagcgaataccccattgttgcgattgaagatccttttgaccaggatgactgggttcactatgctaagatgactgaagaaattggagagcatgtgcagattgttggtgatgaccttctcgtgaccaaccccactagggttgctatggctatcacggagaaatcatgcagtgcccttctgctcaaggataaccaaatcggatctgtgact

SEQ ID NO: 6968 - DNA, 402 bp, Oryza sativa
  Clone ID: uC-osflcyp178d11b1
gtttgttgtgaaggcagcggacgcggcggaagagggggcttttgtaagagaagctcgtgacccaactcttcgccaagaaggagatgcggattcttatggtcggtctcgacgccgccggtaaaaccaccattctctacaagctgaagctcggcgagatcgacacaaccatccccaccatcggtttgaatgttgaaactgttgagtacaagaacattagcttcacggtctgggatgacgggggtcaggacaagatcagacctctctggaggcattacttccagaacacacagggtcttatcttcgctgtggatagcaatgaccgtgaccgagctcgtgaagccagagaagagctgcacaggatgcttaaccaggatgagctacccgatgctgtgctgcttgttt

SEQ ID NO: 6969 - DNA, 484 bp, Oryza sativa
  Clone ID: uC-osflcyp178e06b1
tgattttttttggatgagcctgtaaatgatctcccaacgggggtgttgtacaattcattgggatctgttatccacatgttgattggatcaagatatgctgtgcagcgaagtggaaatgtactgatgtcctttaacaacaaggaggcaagctctgcgatcccactattttcacctgtaattggtcctatggcacagagttttggccctatattctcccaattggcatcgtatccaacaatccgatttggggcagaagcagctattaagcagcttgagaatctaaacccacctgttggtaagcaacttctacctttactttaacaacttcctccgttgtatatggacctaataaaagggcgggaggacttcattccaaaaccagaaaagacacgccggctgataaaaacctactatggaatttctcggaatctttagtaaagttaaagatgatcaaattgatgaaacctctacccttgcacaagta

SEQ ID NO: 6970 - DNA, 437 bp, Oryza sativa
  Clone ID: uC-osflcyp178e07b1
ggttcttgaagaagtatagcaagaagtacgaacagggggaccatgttgcattcaatcaggtgagcgagcaggaccgcaagaggcggacacagcttcaggaagaatgggactcatgggttgccaagtggaagcagatgcatgaggaggagcgtgcttacaggagggagctcagggatggggaggccagcgacgacgaggaagagtatgaggccaaggaagttgaggtggaggaagtcgttgatgtccgtcaagaagttcttgcattcgacctagatcaggagtgaaaacacttattatagaatctgttgatttctttcctgttggtgttaaagttcattggggtcgcattgcataataggccctagtgatcaagtgcgcaatttactgaatcgtggactgcttaattggacacttgctgcttgaaattgtggatcatg

SEQ ID NO: 6971 - DNA, 287 bp, Oryza sativa
  Clone ID: uC-osflcyp178e08b1
tgacatagatatgagccatccacaaatgccaaagggaggggaggtagtaaagattgcgggcctgacatgcccatttgagccaccgaagcctaagaccaagcataaggttgacattgatactgtcgagaaagcccagacactgggtgagcaagagcagaaacacttcgatgaaatgggtcagaagtgcatagatgctggtgcaaccctgggtatttgtaagtggggttttgatgagtgaagccaatcatttgttgatgcatagaaatctgccagctgccagatgggaa

SEQ ID NO: 6972 - DNA, 396 bp, Oryza sativa
  Clone ID: uC-osflcyp178e09b1
tcgtcttcttttcgcgacaggatacataaaacacggcgggaggttacatatctagtgaaggatacattagacaagcttaaacaagctagcgaggcggatcatcgcgttgaagacagcgctaccaaaaagattgctgatgcaaagctagctaaagattttcaagcagtcctaaaagaattccagaaagctcaacgattagcagtagagagagaagctgcatatgcaccttttattactcaagcgggcctgccacagagctacaactcaaatgaagcgaacaatggtgctgataagttggcagagcagcgcacacagcttctagaatctagaaggcaggagttggtcttcttggacaatgaaatagtgctcaatgaggccatcattgtggagagggat

SEQ ID NO: 6973 - DNA, 441 bp, Oryza sativa
  Clone ID: uC-osflcyp178f01b1
cgaacgcgccgctgttttatggaggctccgcccacgccactgtcggggagggtctttttagaagaggagggagaaggccaccatacgcaagcccaaacgacttaagcagccaggggagaggcaccgaatcctgggacgccgaccgacaggaccgattcgtgaggagactcgccgactagcttggacacccaaaggacagccaggagcttaggttcctctggatagacctcctcgccaagtgcgacgcgtcgctggggatgaagattgccacccggctcaacatgaagccacacatgtgatgcattatgcctgcgctgaaaaaaaaagaagacgcatacatgtcgcagccaggaacaaagattctgtcatatataccagacccgcacgcatgggcatacttccatatattgttccgcccgggcccgtgtacgcctttgtacc

SEQ ID NO: 6974 - DNA, 53 bp, Oryza sativa
  Clone ID: uC-osflcyp178f04b1
tttctttttccctcacggcaccacctctaccccagggggggttatttaaaaac

SEQ ID NO: 6975 - DNA, 445 bp, Oryza sativa
  Clone ID: uC-osflcyp178f06b1
tgcttctgagggtctgaagttttttgtctttgaggtttgcctagctgatcgggggggggtttaggatcaagctggcaggaaaatcaggctccgtgctgaagatgtgcagggcaggaatgtgctcacaaacttttggggtatgaattttaccactgataaattgagatccctagtgaagaagtggcagacattaatcgaagcccatgttgatgtcaagacaaccgacaactacatgttgcgtctgttctgcatcggcttcaccaagaggcgcccaaaccaggtcaagagaacctgctatgctcaggcattccagatccgtcagatccgccgtaagatggctgagattatgatcaaccaggcttctacatgtgacctgaaagaacttggtttgaagttcattccagatgttattggtatggagattgagaagtttaccttcagcatt

SEQ ID NO: 6976 - DNA, 382 bp, Oryza sativa
  Clone ID: uC-osflcyp178f07b1
acatttttcaggaggtctatgaagctgactggaaggggcgattttttgatgctggaatccggtatgagcaccgccttattgatgacatggttgcgtacgcgcttaagagcgaaggaggctatgtgtgggcttgcaagaactactatggagatgtgcagagtgatttcttagctcaaggttttgggtctttgggtttgatgacatcagtgttggtgcgccctgatggaaaaaccatcgaagctgaagctgcccatggcacggctacccgtcatttccgtgtccaccagaaaggaggcgataccagcacgaaccagcattgctttggacctttgcatggacaagagggcttgcccacagggcaaagcttgacgacaacgctaga

SEQ ID NO: 6977 - DNA, 119 bp, Oryza sativa
  Clone ID: uC-osflcyp178f10b1
gtacatttgctctgttgggatggctttttggcgaggggaggttttataggggataaattggatcttatcccctctgcctgctgcctcattcaaaacggcttccaacgccgaatcagatc

SEQ ID NO: 6978 - DNA, 212 bp, Oryza sativa
  Clone ID: uC-osflcyp178f11b1
gctagcccggaggaagttgttactggggggggggttttatatatactagccatggattagcaaccggatgagaacacctggatagtggagccgtggatggacaaatcgggctatccatacgaagcggggaactagccgaccgctatgtagactgcctggttccgatattagactgcgctcgtatgggcttatgcatgggacatggccatgtg

SEQ ID NO: 6979 - DNA, 389 bp, Oryza sativa
  unsure (1)..(389): unsure at all n locations
  Clone ID: uC-osflcyp178g03b1
gtcaactttgtatcctgttaaggtggttgtcgctgacaggggggactattttaanattcaaatctggcaaaaatgcccatattgaaaaactatgccccctggtgcggacactgcaagaagctggcgcccatcctggacgaggcagccaccactctccagagcgacgaggaagtcgtgattgccaagatggacgcgactgccaatgacgttcccagtgagtttgacgtccaaggctacccgaccttgtacttcgtgaccccgagcgggaaggtgacatcctacgacagcggcaggacggcggacgacattcgcgacttcataaagaagagcaaggggaccgtcgtcttcgtcgcaccaccacccaggtgccaccggcattcgagaaggca

SEQ ID NO: 6980 - DNA, 338 bp, Oryza sativa
  Clone ID: uC-osflcyp178g07b1
ccgttggtctcgtgcgccagaagatgaagtaccgggggggtctctttatgcggatgagcacctatccatcccatgggcccatccacttccgcgccccgtccaagatcctgtggcgcaccatccgcgggatgattccgcacaagaccaagaggggggaggcggctctggcgaggctcaagacgtacgagggcgtcccgccgccggacgacaagaccaagcgcctggtcatccctgacgctcttaaggtcctgagggtgcaacctggacacaagtactggctccttggtgagctttctaaggagggcgggtggaactaccatgaccccatcagggagctt

SEQ ID NO: 6981 - DNA, 414 bp, Oryza sativa
  Clone ID: uC-osflcyp178g08b1
gttcttttaaaaggatggagcttctggtgctacgggggggaatgtttaagatgcatgctgttactgctctgccatttgttgaatactttcttcataaattgagggatcatggtgcaccctccttgcttgcacgctctcgctcttccgaccttgtcttgagcactgctaaaggtgctgaattcgtggtattcagaccctcagagattgctgccagcgttgctcttgcggcgattggggaatgcagcagttctgtaattgagagaggtgctactagctgcaactatttggacaaggagagggttttaagacgccatgaaatgattcaagaggagattgctgtgggaagcattgtcctaaaggctgctggaacatcaatttcctctgtgccacgaaagccccatagcgtcctggatg

SEQ ID NO: 6982 - DNA, 419 bp, Oryza sativa
  Clone ID: uC-osflcyp178g09b1
tgcttctgagggtctgatgctcagagtctttgaggtttgcctagctgatgttgaaggtgtcgaggatcaagcttacaggaaaatcaggctccgtgctgaagatgtgcagggcaggaatgtgctcacaaacttttggggtatgaattttaccactgataaattgagatccctagtgaagaagtggcagacattaatcgaagcccatgttgatgtcaagacaaccgacaactacatgttgcgtctgttctgcatcggcttcaccaagaggcgcccaaaccaggtcaagagaacctgctatgcttaggcatcccagatccgtcagatccgccgtaagatggttgagattatgatcaaccaggcttctacatgtgacctgaaagaacttgtttcgaagtttattccagaagttattggtaagg

SEQ ID NO: 6983 - DNA, 292 bp, Oryza sativa
  Clone ID: uC-osflcyp178g10b1
cttactcgtccggtcgagaaagattgctgtgttgggattgatcaatacagcctacatgtttgtggaatttggctgtgggtttgtgagtgatagtcttgggctgatctctgatgcttgccatatgttgtttgattgtgctgcactggcaattggtctctatgcgtcctacattgcgagattgcctgcaaatgggatgcacaactttggaaggggcaggtttgaggttctgtcagggtatgtcaatgcagtgttcttggctcttgctgctgtgatatctgtgttatcttccctt

SEQ ID NO: 6984 - DNA, 412 bp, Oryza sativa
  Clone ID: uC-osflcyp178g11b1
cttcttgtgggctcgaagcttgcactcttgtagggggggttttttaaaagcggaggcgcgagaggccacgaagacgaagagcagcactctgttggggatcctagcactccaggcccttccgctatctgcggccggggccaaaggacctgcagggccgacgacgaacaagcagtgctggcgcggcgagcgcaccagctgctccggcgtggggacctgagacgacctcctcaccaagtgcgcggccacctgcaagaactgcgtccccgtgtccacggacaagggcgccaccaagcacaggtgccgtgactttcttcccaaaaactgtggctgcaagatccactacagactcatccaaggccaccatggccgcgcgccacagcggaacagccgatggatccttccatatgcatgc

SEQ ID NO: 6985 - DNA, 257 bp, Oryza sativa
  Clone ID: uC-osflcyp178h01b1
gacattttcggtattgttgagggtctgatgaccactggggatgccatcactgctacccagaagactgttgatgggccctcatctaaggactggaggggtggaagggctgctagtttcaacattattcccagcagcactggagctgctaaggctgttggcaaagtgcttcctgtcctcaatggaaaattgactggaatgtctttccgtgtcccaactgtcgatgcttctggtggtgatctgactggtaggcttgagaa

SEQ ID NO: 6986 - DNA, 187 bp, Oryza sativa
  Clone ID: uC-osflcyp178h02b1
gtgggtttcttttccaccgccgttagaagaagagctcgggggggccttgtttttgagagaagatgcctaatcacacccatgagattaaggacttcctcctcaccgcgaggaggaaggatgcccgttcagtgaagatcaagaagagcaaggatgttgtcaagttcaaggtgcgctgctccaagtactt

SEQ ID NO: 6987 - DNA, 371 bp, Oryza sativa
  Clone ID: uC-osflcyp178h03b1
gaaaatggttttctatgggggagttgatcatgctttgagaggggaggtttttgaaattcttgttgcggtattcatgaatatgattcaacatatgctgagagggaataccttgctgtcatgaaacgagcagaatatgaagtcataaaatctcagtggaagagtatctcagccacccaagctaaaagatttcaccaagttcagggaaagaaaaggcccaatcgacaaagaagtggcgagaacagactggtccattccctattatgaaggagatgacaatcagaacgttgcagctttacgtgaaatttctgtaacatattccttctacaatttcgaccctggttattgccaaggaatgagggactttttggctt

SEQ ID NO: 6988 - DNA, 334 bp, Oryza sativa
  Clone ID: uC-osflcyp178h04b1
ctttgttgttcctactgggtggaaattttttggcaatgggagggatgcttgaatgtgctcaatatgtggtgaacaaagcttcggcactgggtctgaccacattcgtgagaaagatggcatctgggctgtgcttgcatggctttctattattgctttcaagaataaggacatccttggaggagataagcttgtcactgtatgaagatattgcccggcagcactggtccacatatggtcgccatgattacacacgcctatgactatgaaaatgcctatgctggggctgctaaggagtctatggtgatcctagaaagcatgcgaggatcactttctg

SEQ ID NO: 6989 - DNA, 202 bp, Oryza sativa
  Clone ID: uC-osflcyp178h05b1
cttggtgattagctgaacgaggatgcaatgcttgggaaacgggatggtatgaaggatgtgatcgaacatgtgaacaggcaatttaaagatccagacttgacaacttttgtatgtgttagtatcccggaattactttcattggatgaaacaaaaagattgtggcatgagttagcgtagcatgagatggatgaacatctttatt

SEQ ID NO: 6990 - DNA, 107 bp, Oryza sativa
  Clone ID: uC-osflcyp178h06b1
cgcggcgccttttgtgacggggaacgctggtgttgatctcggggagggggtgttgaatatgaaggggctgatggacgacggctcagacctctcgtcgaggggtgtct

SEQ ID NO: 6991 - DNA, 493 bp, Oryza sativa
  Clone ID: uC-osflcyp178h10b1
gtgaaccctccgatctttcagcatgttattcttgagggggctggttttgcattcttcactacctatgcactgttagcgcttttctgggccgagatactttaccaagcacgtggaataatgactgatcgacttcgatcaggtttctacatcattaattgtgttgtttatgcattgcaggtaaagcatgatctttctatttactaagtctagtgctaactcactttgtataaatttttcatgcattgtcggtgtctgtttgctgaacggcattaacatttttaatttctttgtatatggtgctattccacattattagaggcctttcttttaagaaaagacattattagaagccaattggaattgtagaagaattcattactttggcatagcgagaaaaaaatatttctgatatttaaaactctaatgtcaaaatatagatgcttactaactcaaatataaagtagttagcagcagatcaagatagtgcacagag

SEQ ID NO: 6992 - DNA, 381 bp, Oryza sativa
  Clone ID: uC-osflcyp178h12b1
attgcttataccccaatcaacaaaagtccaattggggggagtgaactcaatggacatgattcgatcagtgccatgagtttccttgacccggctggtggtctggcacatcagtcctttatcactgatgatgctctggatcaagtattctctcctgtattgatggaatcttcgttgttccatgatgcagatgaggatctacttgcacccttgtcagagactgacgcagcattaatggaatattaagcttcacatgtgcactatgtaatattttgaccactgcagacgcagcctggaggttattgtggcttatgttcgtcttattgactattcggctagctgcttgcgagttgcaaccatgttgagatacagatggcttatcag

SEQ ID NO: 6993 - DNA, 511 bp, Oryza sativa
  Clone ID: uC-osflcyp179a01b1
gtttggttgttatacgtacaaggcaaagaaattaatggggcttgtatcaactctagttttgctgttcaccaggatgttgatggaagggcaactgatgttgctctaggatggtcagttgcgctgggatctcccttcacatttgctactaccttagaacaggagtacaagagcgatatctttggggagcgaggcattcttcttggagctgttcatggcatcgtggaggctctgtttaggagatacacagagcaaggaatggatgaagaaatggcatacaaaaacaccgtagagggcatcactggaattatctcgaaaactatctcaaagaagggaatgcttgaagtgtacaactccttgacagaggaggggaagaaggaattcaacaaggcctacagtgcatcattctatccttgcatggacatactctatgagtgctaccaagatgttgcctctggaagtgaaatcccggagtgtgtgttggcttgacggagattttactgagaacgaaggc

SEQ ID NO: 6994 - DNA, 306 bp, Oryza sativa
  Clone ID: uC-osflcyp179a02b1
gattatgttcggtgagccggatcgcggtgggcgcccggggggtgttgtcccacccggacacggtcaaggccgccgtcgccgagttcatctctatgctcatcttcgtcttcgccggatcgggatccggcatggccttcagcaagctgacggacggcggcggcacgacgccgtcggggctgatcgccgcctccctggcgcacgcgctggccctgttcgtggcggtggcggtgggagtcaacatttccggcgggcacgtgaacctggtggtgtcatattgtgcgttagtgtgggggactcttcttcttt

SEQ ID NO: 6995 - DNA, 320 bp, Oryza sativa
  Clone ID: uC-osflcyp179a03b1
cttatactgcaatgctgcatccactgagacattgagcggcgggtttaattaaaaaaaggcgttggtcaaccacaataaaaaaaaaaactaacaacagcttaattttactatctacttacatctaatattattgatactcaaaaaaattaacggccgtccccttaaggggatccaattttacttcccctgctctccatcgtaaaccttcttttatagcgtcaccaaaataaaactcacttgccctccgttcacaacttatctacctggaaaacccttggcgtaccccaactaaatcctcttttcttaaactccccttttcc

SEQ ID NO: 6996 - DNA, 483 bp, Oryza sativa
  Clone ID: uC-osflcyp179a04b1
cctttcttctcctcctcctcctccaacagcagcaggctggcttttttttaacgctcccgtcttatcctcaacacccccgtctttgccgcccccgttgctcccggtgtgatggacgccgtcgtctaccggctaaaggatgggttcgtcaagttcaagacctgagtctatgacaagaagccggagctcttcgagccgctcaaggccggccaggcacccaagtacatggtgttcttgtgcgccgactctcgcgtgtgcccgtcggtgaccatgggcctggagcccggcgaggccttcaccgttcgcaacattgccaacatggtcctagtttactgcaagatcaagcccgctggcgtcgggttcgccatcgagtaccccgtctgcgccctcaagggcgaactcatcggggtgttggccacagcctttgcggtggaatcaaggcccttctttcacttaaggatggggcttctgattcctttccttcgt

SEQ ID NO: 6997 - DNA, 473 bp, Oryza sativa
  Clone ID: uC-osflcyp179a06b1
aaggaaggaagctagggttagctagctgtgcatgggggagcctggccctgaggaagagaaggaggaggaggaggcgcgcttcgacttcctcgagtggatcggcccggacacctccgccgccgttttcaccttcctagaccaccccgctgatctcgcccgcgcctccgccgtctcccgttcctggcgccgattcgttgttcggaatggcttcagcaagatccaatgcctgcgcctttgccctgaagcttcaaacttcacccgtattattaccaaacaagccattgcctttgcttctgagtcggatgcggagcaccagcacagggcgtacatgcatctcagctatgcccttttcttggatgacccccaggactgcatcatccgctgcatcggtgccttcaccacccacaatttccctgtggagaccatacaaaacacccttgtgcccccccattgggtgggcctgatgaggccct

SEQ ID NO: 6998 - DNA, 431 bp, Oryza sativa
  Clone ID: uC-osflcyp179a07b1
gagaaatccgtaggctcagaggatttttggtagtcgtgtttcgtgatattcgtgaagagggggggagctaaggggggattcgtaagatcagaattggatcacgcgggggcgcgctcgggatcgggggttccaaacacagcttcttcgttgaatttaagtggatgtactaatggagtcaaagggtggcaaaaagaagtctagcagtagtcgttccttgatgtatgaagctccccttggctacagcattgaggacgttcgacctgccggaggcgtgaagaagttccagtctgctgcttactccaactgcgcgaagaagccatcctgatagccctttcggcttctccatcctagtagcttaggatttcttgcaattccattttggcacttttcttctgacctatttctctggctgctgcttcctgataatcgac

SEQ ID NO: 6999 - DNA, 492 bp, Oryza sativa
  Clone ID: uC-osflcyp179a09b1
aaattttaaaaatatttgaaaaatatcacatgtgggtaaggtgatattagacaatcatacaaaatatcaagatgaaactcctctccatctatgagataggaaatcgagaaacagtgaaaaacaaaataacaaaaaaacaggtatagtgtttcttcattgccattgttaattttatatctcacaaacgaagtctgaatttgttgttaaaaattttgtatggttgtctaattacatcttccctacatttgtgattttccttatatattttctgaacttccatgcaaaagtttccagctaagttgtaggttccactacatattttcccatatctccattactcttctgcaatatccaattcgtgtggaaaagttggcctgcacatttaccatagacctctgctttacagtcacctctgacccaatatagtgtttatggcccagataagaataatatctggccattctactatattggctgaaaattgtattgcaa

SEQ ID NO: 7000 - DNA, 326 bp, Oryza sativa
  Clone ID: uC-osflcyp179a10b1
gtttttggtcaagttggtgcacttgtgctatgtcgcgacaagggagctagcttaccagatttgccatgaatttgagaggtttagcaagtaccttcctgaggtaaaagttgctgtcttctatggtggcgttcacataaaaaaacacaaggatctgttgaagaatgactgccctcatattgtggttggaacacctggaaggatacttgctctagctagagaaaaggatctttccttgaagaatgcgaggcatttcattcttgatgaatgtgacaagatgcttgattcgcttgatatgcctagagatgtgcaggagatacttcaaaatg

SEQ ID NO: 7001 - DNA, 508 bp, Oryza sativa
  Clone ID: uC-osflcyp179b01b1
ccgtctgctaactttgatcaaaagattggtgtacggatcatttagaatgctttgaagacaccggtgcacacgattgcttccaacgcaggtgtagaaggggctgttgttgtcggtaagcttttggaacaagataacaccgaccttggctatgatgcggctaaaggtgaatatgtggacatggtgaaggctggtatcattgacccactaaaagtgatcagaactgccttggtggatgctgcaagcgtatcatctctgatgacaaccacggaatccatcatcgtagagatcccaaaggaagagaaggaggcgccagcgatgggaggcatgggtggaatggattactaatcaacacccattaaagtaaactaaaaacatactcctgggatttaggattttttttgcggtgcaagttcatcgtcgatgtattttttgttcttgttgatgaggtggttgtcagacaattttgattccactggcggtaggacctctcggttggaacgaataaaat

SEQ ID NO: 7002 - DNA, 172 bp, Oryza sativa
  Clone ID: uC-osflcyp179b03b1
gttgtgtgtgtgaatctaggcggcggaggcggtggagcgtgtcttggagaagccgtcggctgcgaggggagatggaggctacggtggacgagctgagcgaggcgtaccaggagttcgtggtggcggcggcggcggtggtggaggcgcgggggcagtcggggggagagaagat

SEQ ID NO: 7003 - DNA, 201 bp, Oryza sativa
  Clone ID: uC-osflcyp179b06b1
gaattacttcatgggctaaagccagccaaactgggggaggttttaaaacccaacgacgttgtcacctaaataaccatcaagtcaccactctccccccaacgaagtatgaatggacttttgagggctgttgtgcccagttgaactcatatgtaccctaccttgtgaagtccgtttcagtctggcaggctgttctacctgact

SEQ ID NO: 7004 - DNA, 392 bp, Oryza sativa
  Clone ID: uC-osflcyp179b07b1
caagcaggagcacccgtagtcactgaagccgccgtcgttccaccgggtgcgcctactggatgggacccggcagctcaaccagctgctcaaggctgggattagactaggcaatcactttgagatgtcttccgcagcttaagttaaatatttcccgaggcatgaatgaacacccaaaatccaatgtgatcatctatagctacaccatgaactcaactgtttttaggaatttctagctgaacctgtgttgtttgtccgtccctatttcgaacaacaatgctgtgagggtgagctcggcaagatgtgtggtatatgttaagctttctacttttgtcctaagtttattctgtagcgtttaaaaaaaaaaaaaaaaaaaaatttcatatttaacattt

SEQ ID NO: 7005 - DNA, 492 bp, Oryza sativa
  Clone ID: uC-osflcyp179b08b1
gtctccactcacacgcattgcagaggagaggcgacaatggaggggaaggaggaggacgtgcggctgggggcgaacaggtactcggagaggcagccgatagggacggcggcgcagggcgccggggacgacaaggactacaaggagccgccgccggcgccgctgttcgagccaggggagctcaagtcgtggtctttctaccgggccgggatcgccgagttcgtcgccaccttcctcttcctctacatcaccatcctcaccgtcatgggggtctccaagtcctcctccaagtgcgccaccgtcggcatccagggcatcgcctggtccttcggaggcatgatcttcgcgctcgtctactgcaccgccggcatctccggaggacacatcaacccagcagttacttttgggctgttcttggccaggaagctgtccctgacccgggccatcttctacatagtgatgcaatgcctaggggccatctgcggagctggagtt

SEQ ID NO: 7006 - DNA, 456 bp, Oryza sativa
  Clone ID: uC-osflcyp179b11b1
ggcaggaggagggagacacctcgaggaaaccacagcactcaaagaacaagaaaggcaataccccttctcccaccaccaccgtttccgtccatctccatcctcaccgccggcgacgctcacctccgacgaccgatcggcgacctgcttcagccatggcaatggcttacaagatggcgacggaggggatgaacgtgaaggaggagtgccagaggtggttcatggagatgaagtggaagaaggtgcaccggttcgtggtgtacaagatcgacgagcggtcgcgcgccgtgctggtggacaaggtgggcggccccggcgaagggtacgaggagctcgtcgccgtgctgcccatcgacgactgccgctacgccgctcttcgacttcgacttcgtcaccgtcgacaactgccagaagagcaagatctttttcttcgcctggtcacccaccgatctaggataa

SEQ ID NO: 7007 - DNA, 174 bp, Oryza sativa
  Clone ID: uC-osflcyp179c04b1
agatgagtagagagggagccaaagaaagctctcggggggcttttattaaactccatctcgtgcgtgtcttcttcttcttcctctcctcctcctcctcgcttggaccccggattttttgcaagggggtcaggaggcgggaggagatggtccggcctccccccctccctcttctct

SEQ ID NO: 7008 - DNA, 246 bp, Oryza sativa
  Clone ID: uC-osflcyp179c06b1
gaaagctgaacccctgggttgaccaaaccataatacctccatctacccacccctacggatttttttcccacaaatccacaacacacccacgcggtcgttttaaaaaacaaaatccccccctccaccccacccacaatacaccaacttaaaccatcacccaaaccagcgcatcaacacatccacaaccaaactacaaccccaaacctttaaaaccctaaaatccacgcccatcacagtcacaacccc

SEQ ID NO: 7009 - DNA, 410 bp, Oryza sativa
  Clone ID: uC-osflcyp179c07b1
gtacgatgaaaatgggaagagctctccaaggagatgagcaaaatcaaaatctgtcccagtgtcttcatctatatttgacaacgtagcagtgaatgctcaatctgcaaattctgaagggactccgaaggtgtttacaaagtcaggtagagcaaaattatctttcacggggaaaatatcaagttttttcttcccaggcaataaaaggccaacaaaagagaaaacttccctctcatctgatagctcaggcgagatatttggatgtatcgggcacatggtgccgcagtctgatcacaatcttggtcctgatgaacaaatggctttttgcaaggatgaagctgataattccaccaatcatgctccctgttctacaaaagatgctggttccatagaaagacctgtatcttctgact

SEQ ID NO: 7010 - DNA, 498 bp, Oryza sativa
  Clone ID: uC-osflcyp179c08b1
gaaaaacagcgctaatggcccagaacaagaccatggcggtggccctgctccttgccacccttgtggcggtcatgggaaaggagccagagacgctagaggaggcagtgagagctgggtgcaaagaggaatgcagtgagcagaaaaagaaagcccccatcgacgagaaacaatgtgaagacttctgcttcatcaagaccaagtctatatttgaggcccataagggagtgaaggatctaaaggcggatagattcatagatttttgcaacaatgagtgtaatgcagtatataaggaggatcccgccacaagcaagaagtgtgcagaaagttgcgaagctgatgctaaggaggccgaggtattccttgataaagtcgtcgcttatattcaaacaacgaaacaagcatgattatattatgtagtacctccccatctgttccttcatcatgaccgagcgacgacattattaatggttctcacccaacggccagccctgcattaca

SEQ ID NO: 7011 - DNA, 423 bp, Oryza sativa
  Clone ID: uC-osflcyp179c09b1
tattttttcatcaccaacctctctctcgtcttgttctccttcttcttcttcttcttcttcatcttctacctttgatagtttgattgaggtgttgttcctttgagtgcagcaagaagctgatgattttgatgatagcttaaggatcttgccaaactcttgtgttgggagtagttgcttgcagatcgagctgcaaaggtcccattttgcttctccatctgagcttggttaggttgcgtctgagtacacttctgaggcttctttggtcgttttggcctcgagctccgttcttaaactctgcctcgatcgatcgatctcatctcatctgcgctgttcttgttgctgctgctgttcaattttgagaagaaggtgccgatcgagttgagccgatcgggtttcagtgaaattcacttgcgtttatgagag

SEQ ID NO: 7012 - DNA, 417 bp, Oryza sativa
  Clone ID: uC-osflcyp179c11b1
tcgggtgtatcactctcgtcgttctcgccacgtgcccccttatagtcagcggccacattagcgagaaaatgttcatgaaaggctacgggggcaaccttggcaagtcgtatctgaaagccaacatgctggccgtggaggcagtgagcaacatccgaacggtggcggccttctgcgctgaggagaaggtgataaagctctacgccgacgagctgaaggagccagcgaagcagtcattccggcgaggccagggcgccgggctcttctacggagtttcccagccctacctcttctcttcctacgcgttggctttatggtatggttcggagctgatgagcaaggagaaggccagcttcaagtcggtgatcaagtcatttatggtgctgattgtgacggcgctggccatgggggagacgctgt

SEQ ID NO: 7013 - DNA, 517 bp, Oryza sativa
  Clone ID: uC-osflcyp179c12b1
cgtaaccctcctctcctctcctcgcctcggcgccgtcctgacgaaggaaatcccaccctctccccgccccgcgaatccgccgcggtaaaccaccccccgcgccgccgccgccggtgcgggccgaggcggcgaagatgtcgtacgcctacctcttcaaatacatcatcatcggcgacacaggggtgggcaagtcgtgcctgctgctgcagttcacggacaagcggttccagcccgtccacgacctcaccatcggcgtcgagttcggcgcccggatgatcaccgtcgacagcaggcccgtcaagctccagatttgggacacggcaggccaggagtcattcagatcgataactagatcgtactacagaggggctgccggtgctcttttggtttatgacattacaaggagggagacattcaatcatcttgcgagctggctggaagatgcaaggcaacatgcgaatgctaacatgaccataatgcttgtggaaaataatctgatctatcttataggcgtgct

SEQ ID NO: 7014 - DNA, 504 bp, Oryza sativa
  Clone ID: uC-osflcyp179d01b1
aatttacctcctccacctcctcctcctccccccgggcggagctgtttggctcctccttctccgtcgccgccaccgccgccgcagataggagaagatggccgcacttgataccttcctctttacctcggagtctgtgaacgagggccaccctgacaagctctgcgaccaagtctcagatgctgtgcttgatgcctgcctcgccgaggaccctgacagcaaggtcgcttgtgagacctgcaccaagacaaacatggtcatggtctttggtgagatcaccaccaaggctaacgttgactatgagaagattgtcagggagacatgccgtaacatcggttttgtgtcagctgatgtcggtctcgatgctgaccactgcaaggtgcttgtgaacatcgagcagcagtcccctgacattgcacagggtgtgcacggtcactttaccaagcgccctgaggagattggtgctggtgaccagggacacatgtttggaatgcaactgatgagacc

SEQ ID NO: 7015 - DNA, 421 bp, Oryza sativa
  Clone ID: uC-osflcyp179d02b1
tgtttccttgtctcccctctccttcctcctctcctttgggctcctttgtacccccctctcacaagagagagagcgccagactctccccaggtgaggattcagccatgaagggggccaaatccaagggcgccgccaagcccgacgccaagttggctgtgaagagtaagggcgcggagaagcccgccgccaagggcaggaaggggaaggccggcaaggaccccaacaagcccaagagggctccctccgctttcttcgtttttatggaggagttccgtaaggagttcaaggagaagaaccccaagaataaatttgtcgctgctgtaggaaaagcagccggtgataggtggaaattcctgaccgaagcggacaaggctccctatgttgccaaggccaacaagctcatggccgagttcaacaaggc

SEQ ID NO: 7016 - DNA, 361 bp, Oryza sativa
  Clone ID: uC-osflcyp179d03b1
ccttgctgttccgccctctccggcctcctcttcgggatgcgttttttgaagtttgacgtggctgagtacacggaagggttccctcaattgttctacttccaagattcctggaccaaggtgagcaacgtgatatttctggacgcgccggtggggacggggttctcctacgcccgtgaggaacaagggtacaacgtcaccctcacacagacgggacagcagctggtggtgttcctcaccaaatggctgggcgatcacccagagttcgcctcgaaccctttctacatcggcggcgacttctactccggctacaccggcccagtgacggcgctccagattgccaaccactactactctccgggcg

SEQ ID NO: 7017 - DNA, 304 bp, Oryza sativa
  Clone ID: uC-osflcyp179d06b1
gatgcgagattttcttcggtttttttgttcctctttttggccataaacctcccataaagctcggtttcttggttcgttttttctttctttcttcctctccttcgagaatcgcccgagtgtgaaatccaagatcccgaattccgtgtcttcttcttcttccgtagaaatcccggggtgggcaaagcggtgggatttctggagagggggagagcgctacaaggcaagaagcttgggtgtccgtagtccgtacggttcttgatctggggtcgccgccaatgcagccggacccgagcgggagcggcgg

SEQ ID NO: 7018 - DNA, 455 bp, Oryza sativa
  Clone ID: uC-osflcyp179d08b1
tctcttcttcctccctttcttctcctcgccacctagcgtcgtcgacgctcgccggcggcgaggtgtgatctgtgaccgatcatcgatggggcctcagcaagaccggtcggcggccaagccgtacgcgaacggcagcacggcggcggcggcggcggcggggaggaaggagaacaacaaggtggtgcggtacagggagtgccagcgcaaccacgccgccagcatcggcggccacgccgtcgacggctgccgggagttcatggcgtcgggcgccgatggcaccgccgccgcgctcctctgcgccgcctgcggctgccaccagagcttccacaggcgagaggtggaggccgccgcggccgaatgcgactgctcctccgacaccttctccggcaccggccgccggtgatcgccgtggatttgattcggctcgtcgtgcgagtagatcagcatcatcagta

SEQ ID NO: 7019 - DNA, 312 bp, Oryza sativa
  Clone ID: uC-osflcyp179d10b1
ctttgccgccgtgcagctcgggctgtgcatgaacgttttcttcaccatgccggtgatgatgcaccccgtgtacgaggtcgccgagcggctgctccacggcaaacgctactgctggtggctgcggtggctgctcgtcctggccgtcggcctctcggccatgtacgtgcccaacttcaccgacttcctggcgctcgtcgggagcagcgtctgcgtcctgctcggcttcgtgctgccggcctcgttccacctcaaggtgttcggcgccgagatgtcctggtccggggtgctcagcgacgtcctggtcgtcctgct

SEQ ID NO: 7020 - DNA, 514 bp, Oryza sativa
  Clone ID: uC-osflcyp179d11b1
gtgtggttcttcttctcctcgatccggttgaggacgttgaggtagagagaggcagaggcgacgaggaaggatctgatctatcgatggcgcgcgtttcgcattccagaaagcggactagggctccctccaactccaactccaagcccacttcacaaacccaaccgccgccgccggagctcaccgaccgccctgtccgcgtctacgccgacggcatcttcgatctcttccacttcggccatgcccgcgccctcgagcaggccaagttgctgttccccaacacgtacctgctagtgggctgctgcaacgacgagctcaccaaccgctacaagggcaagaccgtcatgacccaggatgagcgatacgagtcccttcgccactgcaaatgggttgatgaggtcattcctgatgctccatgggtcctcacgcaagagttcattgacaaacatcagattgactatgttgctcatgatgcactgccttatgccgatactagtggagctgctaatgatgtcta

SEQ ID NO: 7021 - DNA, 446 bp, Oryza sativa
  Clone ID: uC-osflcyp179d12b1
cggtgaccgcggcagcttcgtcgacgaccagccggtgacgggcctcgacaaggccgtcatcgccccgggcaagggcttccgctccgcgctgggcctcagcgagggcggcccgctgttcggcttcaccaaggccaacgagctgttcgtcggccggctcgcgcagctcggcatcgccttctccatcatcggcgagatcatcaccggcaagggcgccctcgcgcagctcaacatcgagaccggcgtccccatcaacgagatcgagccgctcgtcctcttcaacgtcgtcttcttcttcatcgccgccatcaaccccggcaccggcaagttcgtcagcgacgacgacgaagagtagaattacgaggatcgatcgatctaccgaggtttcgccgccattgttgtgcttgcgcatcattgagactttctttcaagtgtatatgtactgtgta

SEQ ID NO: 7022 - DNA, 483 bp, Oryza sativa
  Clone ID: uC-osflcyp179e03b1
atttgctttaccatgctggaagctttggatgtgagtggtgtttaatacagatcaatgttgtgattatgactacaacaatggttacatcctcccaacgtatgaggaaggtcatcatttggaggaggattaagaatgaaactgaaggaatttcacaaaagcacgacatcgttcactgcccttgacaggaactatctgactccatttttcaccagtcaaactgatgaggatgatgatgtcttcggtgaacaaccctaaaaccagagacgcggattctatgaccaatagcttggatgagttgccacctgacagccacatacacgatacttagcatggtagcatgtgatgagattggaagcgatcgtaagtatacaacctctcatagttgaatagcatatgaaagagcttacctgtacgatagatttcataacacaaccttgttttcttggtgatgatcaaagcatgctgcttaatgtatataattta

SEQ ID NO: 7023 - DNA, 487 bp, Oryza sativa
  Clone ID: uC-osflcyp179e04b1
ctttttgtaggtaacaagcctgccgccaggcctgggttgcagtctttgccgacaatgccggtgccaccatccaccaccaccggattggaaccgtgcctgggcaccaccaccttcgtgccgcctttgtgaaccaatttcttcacattctttgcagctcatgaatgcctcatttcaaaacaaaaaaaacattatctattataccataagagctcccctttagcaattggttatatcttcagtaatgacatttgaacatggacagatagaggtacaaattatatgccctaagagcatgcaattactaaatttggtatggagtagggcaagtatatatatataaattagttgtacggagtagaacaggtatataatggaattcgtgtttaccatgcaaatttgaattggtgatgaaatttcataggttttatatgtgcgaggttatcactgctgctgctgatgttatagtaaatgaggaccaccttgttat

SEQ ID NO: 7024 - DNA, 97 bp, Oryza sativa
  Clone ID: uC-osflcyp179e05b1
ctctcctttcttcgcgattctccacgccagagggggaggggtggttatgagcacgcggcggggtggcaacctagcacggcggggtgacaaccatgat

SEQ ID NO: 7025 - DNA, 451 bp, Oryza sativa
  Clone ID: uC-osflcyp179e07b1
tgtggctaagaaatccctagccggtaaggctggcagacttgatacgggtaagggatgcgccgttaccaaggctgacgcagccacggtggctaagaaatctccagccgataagacgggtaaggaatctgtcgttgccaaggccgacacggctacggtgacaaagaaatccacagctggcaagaccggcaagaaggttgcggcaaaggaatcccccgcatcccacaagaccagcatggaggccgcaacaaagaaatccactgctaacaagaccggcacggagaccgcagcaaaggaatccacggtatccggcaagaccgacacagaaaccgcggcaaaagaatctacagcgcccggcaagaccgacacgacggccgcggtcaaggaatctacagtcggcaaaggcgatgcacccgccatggctgaaaaatccgcggcaggtaaggccgaggca

SEQ ID NO: 7026 - DNA, 497 bp, Oryza sativa
  unsure (1)..(497): unsure at all n locations
  Clone ID: uC-osflcyp179e08b1
ggcgccggctgagaccgagcggcggctgctcgtggggatcggggcaggaccccgcttgtcccgtccaatccggcggtggctcggtgacgagagtaggggcggcgagagctcggctcctccctcgcctcttctcccctccaatcccggtggcagcggcggcggcggctccgcgacaaggaagggcggcgggagcttggttcctccctcccctcttctccccttcaatcccggcggcggctcggcgacaagtgcgggacaagggcggcggctcggcaacggcggctcagcggcgacgacgacgacagcgacatgggaggggccttggcgactttgacgacgaccgtgacgacggagggcctcgtcgacatcgactgcgcgcggtggacggcgacgagcggatccggcaccacctnctncatccaccgcgccacctccatttccgcccccagccacctcgtcggctttccccgcctcgctcccccagccagggaagggac

SEQ ID NO: 7027 - DNA, 494 bp, Oryza sativa
  Clone ID: uC-osflcyp179e09b1
cggacgcgtgggcggttccgcttctcctctcccctcgccatgtcgcttgccgtggccactcccgcctccgcccgcctctccccgctcaccacctcctcccccgaaccctgccgccgccgccgcctcctcctctccgcagccgcccctctccggcgcacccgtctccggcgccgcatcgccgtcgtcgcgtccgtccccgaccccgcggcgcggccggcggagtacacgccctggctcatcgccggcctcggcaaccccggcagcaagtaccacggcacgcgtcacaacgtggggtttgagatggtcgatcgcatcgcgcgagacgaggggatcaccatgaacacgatccagtccaagtcgctgctcggaataggttcgattggggaagtgcctgtcttgttggtaaagccacaatcatatatcaactacagtggggagggcaatggacctcttgctgcctattatcaagtaccattgcgggatatccttgggat

SEQ ID NO: 7028 - DNA, 148 bp, Oryza sativa
  Clone ID: uC-osflcyp179e10b1
ccgacaccgagcccctcctcctcgacctcgccgcaaatcctccgccgctcctccgccgctagggcataaccgcccgcctctcgccggcatccgcatctcccggggaagggaagggaagggaagggaaggaaggaaggtgagggcggat

SEQ ID NO: 7029 - DNA, 514 bp, Oryza sativa
  Clone ID: uC-osflcyp179e12b1
caggggagcatgggcagcaagtcgtacccggcggggagcgatgagtacctggcggccgtgggcaaggcgaagcgcaagctccgcggcctcatcgccgagaagaactgcgccccactcatgctccgcctcgcgtggcactctgctggcaccttcgatgtgtcgtcgaggaccggcgggcccttcggcaccatgaagaaccccggcgagcagtcccacgccgccaacgccggcctcgacatcgccgtcaggcttctcgaccccatcaaggaccaacttcccatcctctcctacgccgacttctaccagcttgctggcgttgtggccgtcgaggtcaccggcggacctgaggtccccttccatccgggcaggcaggacaagcctgagcctcctcctgaaggccgtcttcctgatgccacacaaggttctgaccacctaaggcaggtcttttctgcgcaaatgggtttgagtgacaaggacctagttgctttttctggtggtcacaccctgggaagat

SEQ ID NO: 7030 - DNA, 510 bp, Oryza sativa
  Clone ID: uC-osflcyp179f01b1
caataatctgccgaataatgataataagcccgcatgcacgttttaataaaaaaaaccgtcccctaaaaacccccccaaaaaaaacaaaaaaaacaacaaccaaacccccaacacataccaccccaccccaccccccaaccccacacgggcccccccctctagaggacccaggccaccccccccccccacgccacccccaacccctcccaaggggccccccaacaccaatcccccgcccccccttaaccaccccccgccccggaaaaccccggccgcccccccaccaacacccccggcccccccacccccctttccccaccgggccaacccccaaaaaggccccccccaccccccctccccaccaagtcccccccccccaatgcccacaggaccccccccccccccccccccccatacccccctccctctcccccccccccccccactcaccccaccccccccacccctccccctcccccccccctccccccccccccacaccccctcccc

SEQ ID NO: 7031 - DNA, 378 bp, Oryza sativa
  Clone ID: uC-osflcyp179f03b1
ggttggttggcttctcctccccctcccggttcggttcgggtcggttcgggtccggttcgatttcggcttttccttcggttcgggggttggtgggaaagcatggcggcgccggatgttgagtaccgctgcttcgtcggcggcctcgcctgggccaccgacgaccgctccctcgaagccgccttctccacctacggcgagatcctcgagtccaagatcatcaacgatcgggagacggggaggtcgcgcgggttcgggttcgtgacgttctcgagcgagcaggccatgcgcgacgccatcgaggggatgaacggcaaggagcttgacggccgcaacatcaccgtcaacgaggcccagtcgcgccgctccggaggcggaggc

SEQ ID NO: 7032 - DNA, 370 bp, Oryza sativa
  unsure (1)..(370): unsure at all n locations
  Clone ID: uC-osflcyp179f05b1
gcttcattttccaacattgaaagatccctgtccaggtcatttttaatgaccaaagccggcggcctactccttgcagncatcgcggcatcggccgtgttagtgcaagtggaatgcgacgcccccgtcgagaagagcttcaacaagggcctactcgcccctgtcgataagcgcttggatgaggcagctcaggccatcaacgaggccgccgactccgttgtggctgctgccccaccagcaaaaaaggatgaagttgaagctgccacgtggaagcggagaatcttcgccataactgctcttgggatggcccaaggagatgagaagaaagttgctgcaacttcacttgcctacaagaaagccgctaaagctgtcc

SEQ ID NO: 7033 - DNA, 488 bp, Oryza sativa
  Clone ID: uC-osflcyp179f06b1
gtccccgttgccgtgctggcgtggttccccttcgggtccgagttacagacgaggctgctcttcaaccaggccttcagccgaggcctccagatctcccgcatcttggcaggcgggaagaagcagagctgagcccgcacaaagtccaccaagtgaccgtacataagcatgcacaggtttaggcgaacagcatcacaagaggttaggtccaggattgatcgttgtacagtggagaagtttgttcaggaggcgtcgtacagctgctgacttgctgacccttcagaagttccgttacttttgtacacacagggcgatgatttttttttctttttaggcattttcgaggtattacatctccataccatattattcttacgtctgttacataggctgttgctgagtattgtatagatagatggtgtatgcccaccaaacggggcatcaaagcatcttcgttgattaaatgcccaagatgagattggttatttttt

SEQ ID NO: 7034 - DNA, 472 bp, Oryza sativa
  Clone ID: uC-osflcyp179f07b1
tgcaagacataatgaagatggagtagatgaaagctgggactgttgaacaggctaccatgtaaatgcttgctcttatgagcactacatcaacacaccatcagttgctagccgatcaagtgacacccctaaaagcaaagtctctgaatggagctcatcatgctttcacaaccacactgataaccagattgacacacagatgcatcaaccttcaagtgatggtgtgggaggtgttttggaggcccttcaacgtgccaagatgtcccttagagaaaagctgagcaaaccaagtccacctagcctggaaatgttagcacttccagcaccagagtatcactacgcaacggatgattcgccagtcagagacacagagctttcactttgcatgtcaacgtttcctagccaggaaatattggcgctaccagaaccagcagagtatcgcagcaggatcataccacgggatgacgtgaaagtg

SEQ ID NO: 7035 - DNA, 503 bp, Oryza sativa
  Clone ID: uC-osflcyp179f09b1
attttagccgccgccgccgccgctcacccgcgccttcgacgagctccagcccgtagacctcgccggatctccccgatggccgtgaccttcaccgacctccacaccgccgacgggctcaaagccctcgagcagcacctctccggcaagacctacgtctccggaaacgcgatcagcaaggacgacatcaaggtgttcgccgccgtgccatcaaagcctggagctgagttcccgaacgctgctcgctggtatgataccgtcgctgcggccctcgcttcaaggttccctggcaaggcagttggagtgaatctgcctggaggaggtgcggcatcgtctgctgcagcggctgcgccagctgctaaggatgctgatgaagatgatgatgacctggatctttttggtgatgagaccgaggaagacaagaaagcagcagatgagcgtgcagcttccaaggcctcttcaagaagaaagaaagcggaaaatcatctgtcctgttggatgtcaaa

SEQ ID NO: 7036 - DNA, 482 bp, Oryza sativa
  Clone ID: uC-osflcyp179f10b1
ctcggatctgtagcaaagagcgaagagcgaagctggagtctgtagatacgcttgttcgcttgagacctagggtacgagcaacaataatagagagtgactgagtgagcgagcactgagtagcaagggcccggcacaaacaggacgcagccggcaacgtgtacgtcgaaccaaacagagaacagctagctaatcgatcggtcgccatgaccaaggacgacgccgtcccggtggccgtggcgccggcgaagcgcccgcccatcaacaagtacgccttcggctgcgctctcctcgcctccatgaactccgtcctcctcggctatgatatctcggtgatgagcggcgcgcagatattcatgaaggaggatttgaagatcaccgacacgcagatcgagatcctcgccggcgtcatcaacatctactcgctgttcggctcgctggcggcgggcatgacgtccgactggctgggccggcggtacaccatg

SEQ ID NO: 7037 - DNA, 457 bp, Oryza sativa
  Clone ID: uC-osflcyp179f11b1
cgctgagaggagggccggatcactactaaggaccaaccgacagtcgtgaggaaggtaaggacttgcttggcttgctcctggctatggtgcaggagcaggagtggctcgccgccggcgaggacgacaggatcaccgacacggaaatcaaggcccttatcctgaatctattcgtggcgggcacagacacaacatcaaccatagttgagtggacaatggcagagctgattcgacacccagatatcctcaagcaggcccaagaggagctagatgttgttgtgggtcgtgataggctcctctcagagtcggatctatcacatctcaccttcttccatgctatcatcaaggagacattccgccttcatccatcaaccccggtctcgctgccacgcatggcatctgaggagtgtgagatcgcaggctaccgtatcccccagggtgcagagttgctggtcaatgt

SEQ ID NO: 7038 - DNA, 452 bp, Oryza sativa
  Clone ID: uC-osflcyp179f12b1
cattagctgcttccttttcttcttcttgggagtgggatccacccctcccttcctcggctccgattcttgccatggccgaaatggcagtcaccgccgccctccggccctgctccggcgtctcgccggcggtgtccgggaccagccaccggcgccgccgccccgccgagtggcgggctctcgcgccgccgccgccgcacgctgggctgaggctgtcctctcctgctgtcagggatcctagagctgcttcctctgcggctgacgaggatgggagctctagcaacactgacacagttcctaccccgaaagttataatagatcaagactcagatccggatgcgaccattgtagagataactttgggtgaccgtctccgtgatcttcttgataccatgaatgccctgaagaatttaaggctaaatgttgtgaaagctagcgtctgcctcgattctact

SEQ ID NO: 7039 - DNA, 509 bp, Oryza sativa
  Clone ID: uC-osflcyp179g02b1
tgcaaaccaacagtgtgttagtccttatcagccatgatgtgacagagtgcagcacatggcttccaggcttcagctcttgtacttcattgccattacagtgctcgcttcggtgttccaaccttgcacgtccattgagctccaccgtgagctctctggctggtcgaatggcattgctacatggtatggcgatcctaatggtgcaggaagtgaaggcggtgcatgtgggtaccagtatgctgttgaccagccaccgttctcatccaggattgctgctggtagcccctacatctatgactctggcaagggatgtggttcgtgctaccgggtggtgtgtgctggtaatgaagcttgctctggtatccctgtaaccgttgtcatcactgaccaggggcctggtggcccatgcttggaagagctagtcgatggtcaatgcatgaatgaagcagctcactttgacatgagcgggacagcattcggtgccatggcgaggcctggccaggctgatcaac

SEQ ID NO: 7040 - DNA, 431 bp, Oryza sativa
  Clone ID: uC-osflcyp179g03b1
cgaggatggccgcacccttgcagactacaacatccgaaaggtttccaccctgcaccttgtcctgcgcctccggggcggtatgcagatctttgtgaagacccttactggcaagacgatcaccttggaggttgagtcctctgacacgatcgacaatgtgaaggccaagatccaggacaaggagggtattccaccagaccagcagcggctcatcttcgctggcaagcagcttgaggacggccgcacccttgctgactataacatccagaaggagtccaccttgcacttggtcctccgccttcgtggaggtatgcagatcttcgtgaagaccctcaccggcaagaccatcaccctggaggttgagtcgtctgacacgatcgacaatgtgaaggccaagatccaggacaaggagggtatttcaccagaccagcagc

SEQ ID NO: 7041 - DNA, 511 bp, Oryza sativa
  Clone ID: uC-osflcyp179g04b1
gcggaagaaccgaggtaccccgcctcggattcgcggggagcggaggcgccatctccggcgccggcgagataagtcctcgactccgtcgcaatccgccaatctccgggaacgtgaccgcgtcaaatcggaacaccgtcgcgctctggacgccgctgcttcgcctttgctcgtcgcccggcttccatagttcgttacaggctgagccacttcgtcacgagcttcatcaacacctgtagatcaagaatcccgaaggaatcgacgcgaggtggaccacagtgggagatcctcttcttcttccccaatcccagccgccgacgccattcctttctttctccttctctgtagaagcctggggatacgccgtcgacgacgaccgtagcagccgcgctgtcgccgaaccagtacaccggcgccaagacttcgctgagctgcgtttgcttcttgacgattcgcagcccagtctcgaggaggcctactttgtagctgagcaaggaggggaagagcaagaaat

SEQ ID NO: 7042 - DNA, 458 bp, Oryza sativa
  Clone ID: uC-osflcyp179g05b1
gtcagaacaccgcagagcaagtgtgtgtcctgccgggcgtgaaagataagcggcgctctgctctgctcgccgaggagagagagaagagagagagagagagctagagatggcggcggcctcagcggcggcgcaggcggagggaacggtgatcgcgatccacagcctcgacgagtggaccatccagatcgaggaggccaacagcgccaagaagctggttgtgattgacttcactgcatcatggtgcggaccatgccgcatcattgctccagtttttgccgatctagcaaagaagcacacaaatgctgtttttctgaaggttgacgtcgatgaactgaagcctattgctgagcaattcagtgttgaggctatgccaacattcctgtttatgaaggaggggaatgttaaagacagggttggcggtgctatgaaggatgaactggcgagcaagcttgagctac

SEQ ID NO: 7043 - DNA, 375 bp, Oryza sativa
  Clone ID: uC-osflcyp179g06b1
gcttctggacatactctactactactagccagtaagctagctaactaactacgtggctatggcccccaccgtgatggcctcctcggccacctccgtggctccattccaagggctcaagtccaccgccggcctccccgtcagccgccgctccaccaactcgggcttcggcaacgtcagcaatggcggaaggatcaagtgcatgcaggtgtggccaattgagggcatcaagaagttcgagaccctatcgtacctgccaccactcaccgtggaggatcttttgaagcagatcgagtacctgcttcgatccaagtgggtgccttgtctcgagttcagcaagtgttgggtttgtctaccgtgagaaccactgctttcccg

SEQ ID NO: 7044 - DNA, 498 bp, Oryza sativa
  Clone ID: uC-osflcyp179g09b1
cgccgtacctggcgttgctgaagcccaacgggaagattatcctcgacggcctcccggagaatcccctggaggtccctcccttctctctcgtccacgggaacaggactctggcagggagcaacatcggcggcatggcggacacgcaggagatgatcgagctggcggcgaagcacggcgtgacggcggacatcgaggtgatcggcgccgacgacgtgaacacggtcatggagcgcctcgccaaggcggatgtcaggtatcgcttcgtcatcgacgtcgggaacaccctccacgccgccgccgccgagtgatggcatcgcctgcaaactattcgtgtggtctgtaatctgtatgaaattgttcatggtacgtacacgatatatagattgtggcgtgtcatggcgtataggaatgaacccgatcgaggaagctattggtggaaggctgatgctagtcagctcagtgtttgactgtttgcattaccgattgaaattgagcttt

SEQ ID NO: 7045 - DNA, 399 bp, Oryza sativa
  Clone ID: uC-osflcyp179g12b1
ttaccgccacggcctctgcctctcgctctctgtctggctaggctgcgcaaatggcagcctgcgtcgacaagtggccgccggcggcgtacctgtgccgcctgccggagaagttctactgcgtcttgccggactgcaccgctacggaccgtccggtggtcaccgcatcggcggcgccggcgccggccgctagcgggagcagcggcgactacgtgtgggacgtgctgcgcgccgaggcgcaggacgacgcggacgacgagccgctcctccgcaagttctaccacgacctcgtcctgtcgcggccgtcgctggagtccgcgctcgcctcgctgctggcggccaagctctgcatccccggcgcgctgccgcaggaccagctccgggacctcctcgccggcgcgc

SEQ ID NO: 7046 - DNA, 444 bp, Oryza sativa
  Clone ID: uC-osflcyp179h01b1
cttttctctcctctcctcttctgcttctcctcccaggtctgtttgcaacaccccaccggcgccagcgacgcgaggcgggatcaggccatggacggcggcggcggcggaggaggaggcgggttctgactgggcggtctccagtggacggcggaggaggcgtcgacgatcgggggcatcgcgacggtgtcgctgctgcactccttcatccccacgcactggctccccttctccatcgtcgcccgcgcccagcggtggccgctctcccgcaccctcctcgtcactgcatttggaggcgtccttcatgttgtttccactgctcttcttgggataactgctgttactatggcaaatactatagcaggcgaggaaacagtgcataaacttgcatcactgttgctgattgttcttgggggaagttatatcctgctgtttgcactgcgaaaa

SEQ ID NO: 7047 - DNA, 432 bp, Oryza sativa
  Clone ID: uC-osflcyp179h02b1
cgattagtgtagaacttttgctcggtcttttttgcgtgggtcttaagaagaagaagaggatgagggcggcggctatggcgaggcggctgatcccgtcgctgaaccgcgtgctggtggagaagctggtgcagcccaagaagagcgccggcggcatcctcctccctgagacgtccaagcagctcaactctggtaaagtggtggctgttggccctggcgaacgtgacaaggatggcaagctgatccctgttgctctcaaggaaggagacactgttctcctgcctgaatatggtggactcgaagtcaagcttgctgctgaaaaagagtcccttctcttcagagagcatgacattttgggcacccttgtggactgatttggatcgtcatgaacgccctcactcattcgttgcccttatgcatggcatggtttttttg

SEQ ID NO: 7048 - DNA, 397 bp, Oryza sativa
  unsure (1)..(397): unsure at all n locations
  Clone ID: uC-osflcyp179h05b1
cagtactattttcttcattcctccagatggatcgtgtggcgttatgattaacagacttagcgcgcangtgaaacctcttatctgggtagaagcacaagtggagaaacattcaagaagtcggatacagatcacagtgaagacaagaagtcagttcaaagaaaggagcacagcaacaaatgtagaaattgaagtaccagtgcctgaggattcgacaaacccaaatataagaacttcaatgggctctgcggcatatgcacctgagagagatgcgatggtctggaaaataaaatcatttcctgggggcaaggaatatatgtgtagagcagaatttagccttccaagcttaacatcagaagatggaatgcccgaaaagaaggctcccatactggggaaattt

SEQ ID NO: 7049 - DNA, 379 bp, Oryza sativa
  Clone ID: uC-osflcyp179h06b1
gttactattttattaatcagaactatataatattattatgttttatattacaactaaatgccattgatagccaattttttattaaaaaaaaaaaaaaaaaaaaaaaaaaaaaaaaaaaaaaaaaaaaaaaaaaaaaaaaaaaaaaaaaaaaaaaaaaaaaaaggggggccgtttaaaaggatcacaagattaaaaacggttgcatgttaaagaaaaacaattttttataaggccacccaaaattaaaataaattggccgtttatataaacaacttaatgtaatggaaaaatgcctggcggttaaccaaatttaaatcctctggaaaaaccatcccctttcaaaaagttaggcgaaataagcaaaaaaggcccttaactg

SEQ ID NO: 7050 - DNA, 399 bp, Oryza sativa
  Clone ID: uC-osflcyp179h08b1
tgcctctgggtcacacacacatactccccatggcaggtgtaggggaagtggtgatgcttggtggcattctcctccctctcctcctggttgtcgccgtctccggtgagccgccgccgatcagccggaggagcttccccgaggggttcatcttcgggacggcctcgtcgtcgtatcagtatgagggtggcgccagagaggggggcagaggaccaagcatctgggacacattcacacaccagcacccagataagattgctgacaaaagcaatggggacgtggctgcagactcctaccatctatacaaggaagatgtgcgcatcatgaaggatatgggagtggatgcatatagggtcttcatctcatggacaagaattctttccaatggaagtctgagcgggt

SEQ ID NO: 7051 - DNA, 268 bp, Oryza sativa
  Clone ID: uC-osflcyp179h10b1
taatttaggtcagcattttcgttccatgggtgcgagtgcatgttctgcgaggtcagtctcacctgttgttaatctagttctcttgctagatagcagtagctacttcattgtgtttgattattgtatcaatttttggttcgaatacatgtacttgtgcaaaacggcacttgtagtcaatactgtacatattaagcccttggtgctggaaaattctgatgttcaagttacaaaggttaattggtgtaatactaatatcttcgctgtccag

SEQ ID NO: 7052 - DNA, 504 bp, Oryza sativa
  Clone ID: uC-osflcyp179h11b1
tcggttttagtggcctggcaccatctgcgcctgaaccggtcactgttgcgccatcaacggatgctgccgctcggagccgctccagacgttcacgatccatgggctgtggccggactacgacgacgggacctggccggcgtgctgccgccacaccagcttcgacatggacaagatattgcccctgaagccgacgcttgagaagtactggccgtccctctactgctcatcctcttccacttgcttcagtggcaaggggcccttctgggctcatgagtgggagaaacatggaacatgctcatccccggtagttaaggatgaattagagtatttcaccactgctcttgacctctacttcaaatacaacgtcacggaaatgttggcaagtggtggtatctatgtttcaaatggtaaacaatatgcgctaactgatgtcattgatgccatcaaatgtgcttttggggcctcaccgcaaattgtttgcaagaagggctcaattgaagaact

SEQ ID NO: 7053 - DNA, 549 bp, Oryza sativa
  unsure (1)..(549): unsure at all n locations
  Clone ID: uC-osflcyp141h05b1
gatttctggtgcttggtgaacagtgtgtccccttgttggcgacgttggatctggaagcgaggggtcagaggaggagcatgctgcccatctccaccggatctggctggactcccctctccggtgacctctctccccaggcggcagcgttcagatcagcccctcagcagacgtgaggcgcgagccatcggcggagggctccatggaggcggcgtcctggcctcctgggggtcggcggagtggcctcggcgacggcgtatcttgtgccgctggcactcacctctccctcgccatcttcctccgccaccactgcccctcctcatcggacgacgagcttgatggtggcggcgcaagagcaagccagggtcatgtcgttccttacaccccttgcctttgccccccactctcgccagatggcgagctagatggtgccggcgcccctgctctcctttcctggccggccatgaggtngggtggcagattggcagagggggcgacatcctcgacgacggctgccacatcagcggtggagcggatctagagtggccacgg

SEQ ID NO: 7054 - DNA, 104 bp, Oryza sativa
  Clone ID: uC-osflcyp001a01b2
aatagtaccacaacaatctacgttacatatatattacctcttcgagcaaattaaacaggggaatttttctagcttcttggacatggatactgtagttgaataat

SEQ ID NO: 7055 - DNA, 354 bp, Oryza sativa
  unsure (1)..(354): unsure at all n locations
  Clone ID: uC-osflcyp001a02b2
aaatactggacaagagcatgtttgacgcctcgcattatcgcatatagcggatgaaaaaacgtcaggccagctctgcgcgacaacngtctagttacagataagagcagnaactgcaagttcaaattacaactcttttttctgcttccatagttagnagcttttgagtcaggcgtaggccgggccaaacatttaaatttatttcaaattttattttaaatgnnatattgattcacttcctttgnnatcaatcttcaaccactatttaggaaaccaaaacttttcgcttaacccgcgattttttacctattttttagttttgtccaccaaacctttcaattgaggggtttggtttcg

SEQ ID NO: 7056 - DNA, 94 bp, Oryza sativa
  Clone ID: uC-osflcyp001a03b2
aagcatacaaacaagttttattgcctattattatcttttcccttacttcccttactacaaggaggaatacctcgaggacaaccatactagaccg

SEQ ID NO: 7057 - DNA, 162 bp, Oryza sativa
  Clone ID: uC-osflcyp001a04b2
gatcaggtcagagataatcacatatatatataacagagcacaagaagaaattaaaaagcactcatcactatatatttaagctggagagataaaagtacttattattattacttaaatcatgctctccgcctaagcttagttaagtagtaccccaaagcaacg

SEQ ID NO: 7058 - DNA, 254 bp, Oryza sativa
  unsure (1)..(254): unsure at all n locations
  Clone ID: uC-osflcyp001a06b2
aagcttaacatataccacacattttgccgagctcaccctgacagcattgatgttcgaaatagggacggacaaacaacacaggttcagctagaaattcctaaaaacangttgagttcattggtgtagcctaatagaattgaatcacaattgggatttttggggtgtttcatatcattgccttccgggaaattatttttaaccttaagntcttgcgnngaagacaatccttcaaagttgatttgcccctaagtcta

SEQ ID NO: 7059 - DNA, 136 bp, Oryza sativa
  Clone ID: uC-osflcyp001a09b2
acgatcagatttcaaattttcaatacaacaaagtacatacattttctacatgtatttgtcaattactgatatgacgtaaagcgttatgtgaaccctacaagcagtggttaacaaccttgttagcattcaaagggta

SEQ ID NO: 7060 - DNA, 319 bp, Oryza sativa
  unsure (1)..(319): unsure at all n locations
  Clone ID: uC-osflcyp001a11b2
aagcttaacatataccacacattttgccgagctcaccctgacagaattgatgttcgaaatagggacggacaaacaacacaggttcagctagaaattcctaaaaacagtttgagttcattggttgtagctaatagaatgaatcacattntggaattttggggttgtttcatttcaatgccttccgggaaaataatttaaactttaaagcttgcggaaagacaattctcaaaagttgaatttggcctaagtctaattcccaaagccttgaagcaagcttggttgaagcttgccgggttccccattccaggtagggcgccaa

SEQ ID NO: 7061 - DNA, 254 bp, Oryza sativa; identical to SEQ ID NO: 7058
  unsure (1)..(254): unsure at all n locations
  Clone ID: uC-osflcyp001a12b2

SEQ ID NO: 7062 - DNA, 135 bp, Oryza sativa
  Clone ID: uC-osflcyp001b02b2
gcccaagacaagtcaatactacaacatttgtggcgagtacagaggtacaaaagtcaggcaccgtaagcctttcgattaaaaaccaaactgaaaacactgcacgaatattttttaaacagccccacgaaaaaacaa

SEQ ID NO: 7063 - DNA, 115 bp, Oryza sativa
  Clone ID: uC-osflcyp001b03b2
aaccccaccttttccttgttcttttcttgcttgtaacacatcactgacaaacttaatattacacagggcgcatggacttagaaagaggaggaaagagtagcagagagtaggaggt

SEQ ID NO: 7064 - DNA, 78 bp, Oryza sativa
  Clone ID: uC-osflcyp001b04b2
cgagtaaaatagcgggcaacgccacagttaaataatgctaaatgaaacaaaatttaaaacaaatggaatacaaaacaa

SEQ ID NO: 7065 - DNA, 91 bp, Oryza sativa
  Clone ID: uC-osflcyp001b05b2
ggaaagcaaaaacaactaatacttagccattcttgtagcaaaacctcattacatatttacaaggaaaaccccaatggaatcaaaaggagaa

SEQ ID NO: 7066 - DNA, 105 bp, Oryza sativa
  Clone ID: uC-osflcyp001b06b2
gctcccacagtaccaaaattaacactggatataatcattcgctgaatcacaaaatagtttttagtatatatcccatcaacaaactcagggaagagcaacggagca

SEQ ID NO: 7067 - DNA, 231 bp, Oryza sativa
  unsure (1)..(231): unsure at all n locations
  Clone ID: uC-osflcyp001b07b2
ccacttccaagagcattccgtttcattcatgtaaatgaaggagcttttgctcaagactcgtccactaactcccacgaatatcacatacagacatacacangccttcgtattcatgggttcaacaggaaggcaacctcaacttgcacttgttatttacccctttattcnaatacgacacaatncnnatcaatttctttgattnccttcctaatacaaacatatagttacagg

SEQ ID NO: 7068 - DNA, 85 bp, Oryza sativa
  Clone ID: uC-osflcyp001b08b2
ggttgcaaattaatttcattggaagacataaagaggaaataaagaactagccaggctagctaggcttcaaacataacttatacat

SEQ ID NO: 7069 - DNA, 148 bp, Oryza sativa
  unsure (1)..(148): unsure at all n locations
  Clone ID: uC-osflcyp001b09b2
gattaaagacctttattcatgttgggatactacatcactacatgccagtttttattggtagtactaactgatacgaacgatcatgcaatanggattaacaatccgtatggaatgcgattcgatacacttcagcattagctaggctgga

SEQ ID NO: 7070 - DNA, 56 bp, Oryza sativa
  Clone ID: uC-osflcyp001b10b2
cccaaactaaagggggaaatcaatttaattaaacaaaaagacttgcttaaaaaaca

SEQ ID NO: 7071 - DNA, 82 bp, Oryza sativa
  Clone ID: uC-osflcyp001b11b2
tttttttttttttttttttttttttttttttttttttttttttttttttttttttttttttttttttttttttttttttaac

SEQ ID NO: 7072 - DNA, 343 bp, Oryza sativa
  Clone ID: uC-osflcyp001b12b2
gaacataatatccactttattttgattaattgatgttcttgaacaactccattattgaaaatatcttccgaaagaaattagaaactgcacgagcctttgcatcggcaaaattaaatggccgagagcaaatgaccgaaatcaagataagagttccatataaaacggagttgaattcaggcacttcatagttgatagttcgtttagccggtgttctgcattccagcagcaattcccttcatggtcaggatgagggtgtcctccagccccggcgcatactcactggtcgggttcagcttaaccagctccgcagccggtttagaccagtccatgatctccttggaca

SEQ ID NO: 7073 - DNA, 70 bp, Oryza sativa
  Clone ID: uC-osflcyp001c01b2
cgaaaaatccagttgtttttgtttactccatgcacaaggggacacctgacaagccatatcatatcatacg

SEQ ID NO: 7074 - DNA, 64 bp, Oryza sativa
  Clone ID: uC-osflcyp001c03b2
gtccaaataatgggttttcataaatctcagttactaagaaataatagggggtttttgttccaat

SEQ ID NO: 7075 - DNA, 157 bp, Oryza sativa
  Clone ID: uC-osflcyp001c04b2
gattgcaacacaatttcatatgaatgattaagcactcgaatttggggttctacaaaccgatctagcggcgaaactgttcttgacagaataatctaagcaaaacccgactctaaacaatagacggcctcacttgattaaagtatgcattttgggcacg

SEQ ID NO: 7076 - DNA, 120 bp, Oryza sativa
  Clone ID: uC-osflcyp001c05b2
ataattaattcacaacaccatatttcattgatcaggttcagaacctgcacagaaatacacactaccggtacaggatctcaccttctcttccaatacttctgtacattccattccaccgcg

SEQ ID NO: 7077 - DNA, 197 bp, Oryza sativa
  unsure (1)..(197): unsure at all n locations
  Clone ID: uC-osflcyp001c06b2
aaccgaacagaaataaacgagagtattaaacgactgacatagtgcacattgcgagcagatattaacggtccatgaaacgagagccatgcccgggggcaaaatcttaacaaataactaggaacttaggattatcntcaacctgccaggacattgcaacacnncaccattttgaaaacgcaggctacaccttttcttct

SEQ ID NO: 7078 - DNA, 101 bp, Oryza sativa
  Clone ID: uC-osflcyp001c07b2
gcataacaatatatatagaataacactaagcatggccactgttatgatcttgtacagcaggcagccaaacttgcttagcgctggtttagcgtccaggccaa

SEQ ID NO: 7079 - DNA, 405 bp, Oryza sativa
  unsure (1)..(405): unsure at all n locations
  Clone ID: uC-osflcyp001c08b2
cacgaagtgctctgcttcatcacaactactaagaacgtatacatgagcacatgacaccaggatctgagtgcaccaacaattttcaggagttccagaattatccttcacaaaaaaatcaaacctaatgtgctgtctgaaaaagcctagaaancgtatcaaaagagcctntggagaagaaatgcagtgcaacttgnanncggggccacttgttaggaaatgtttgtccgtggacttttgaatgctataactnnctctggttggcttcaaacttagtccaaaatttttcgtgataatatgnncacaacgatttaccatttacacctccctgttattccttgaccttggaagtttttcttccccagttgtttctttatncagccaaagtttgtttcccgagttagtgta

SEQ ID NO: 7080 - DNA, 385 bp, Oryza sativa
  unsure (1)..(385): unsure at all n locations
  Clone ID: uC-osflcyp001c09b2
attgcattcatgtaatcttgagtaccaaagttcaactgaaaatttacatgtagaggccggaacgatatccattatctaaaaattgaaaaatttacaatnnggcattctaagcttttacattttaagtgtttcaaaagggacnacatattnnntctttaacttttgaattttggctggcaaaaccctcttgttccttccaggttttttgggtatacttnnttctcaatacttcagggcttttgtaataattttaaagcatgtttgttttctttttctttttttcatttggtttgcagttcacccaaaatcccttttcaaaggtcaaaaaaggaaaatagggtccaaatatntacaacccttttggacaattacttcaaaatccccg

SEQ ID NO: 7081 - DNA, 128 bp, Oryza sativa
  Clone ID: uC-osflcyp001c11b2
attacaacatgcagcagtggcattaatacgccagtacattaattaagttacacatatgcaggctccattttggtttcttttaatattatcgtattacaggaatcttctgtagcccttttgcagcatga

SEQ ID NO: 7082 - DNA, 81 bp, Oryza sativa
  Clone ID: uC-osflcyp001d07b2
tttttgttttttttattttttatttttttttttttttatttttttattttattttttcttttattattttttttatttttt

SEQ ID NO: 7083 - DNA, 107 bp, Oryza sativa
  Clone ID: uC-osflcyp001e03b2
aagcggcaattaaggaagtaatagtatagttgtagcagtagaagagtacagcaacacacgttaattaatcacgcgagaagcgtattggatggatcggcacggttaag

SEQ ID NO: 7084 - DNA, 252 bp, Oryza sativa
  unsure (1)..(252): unsure at all n locations
  Clone ID: uC-osflcyp001e11b2
gtacttcaaaacaagagaaaatatatcccatatttgggaagaaaatccatcatgcaaaggtttcatacaaatgctatgctccaggctagatctaagaaacantagcagacttaaccaaggaggnnagaaccccaaacaaattacgagcaggaattaaggaattcacanacagnaatgaanaacttannatttttgtttaccttgtgaaactatgngagttaaaacattttcaagggccttttacaccctcct

SEQ ID NO: 7085 - DNA, 126 bp, Oryza sativa
  Clone ID: uC-osflcyp001g03b2
gtagtcatagctcaaagcacaccatcatattggatcagtacatacaaagcgtgcgtattgacaccgtctaattggattagtacattcgaagtggataagctaggcttttggtttcaccaggtccca

SEQ ID NO: 7086 - DNA, 302 bp, Oryza sativa
  unsure (1)..(302): unsure at all n locations
  Clone ID: uC-osflcyp001h07b2
gcaaaatacagagtaccagtatagtactcttaaactttcttgtgcaaccataatgcagcctcaacagtatgtataagactaccaactaccaagaccgacgacacggttcaacaaaaagttcaaaaagatttagacaaccttgttgagtcctgttgnacttaatgnnagtctatgaaccttgagaatcttccacgccagttaaggaggttaaaacttaagnaacaagaggaggagaccccaccgggacccatgncggacggaaagggctgtncgttcaggattgaaagaacatgtttgttcca

SEQ ID NO: 7087 - DNA, 302 bp, Oryza sativa
  unsure (1)..(302): unsure at all n locations
  Clone ID: uC-osflcyp002a11b2
ttggttttttatttttttggggtaaaaaatttctaacattcatcctgcnatgctttgcacttccatttgctacaacataatggattcttcaaaccaaaattcccatacttcaatttccaactacatgaaaagataaaataagtaatctaccacgtcaatcgcacaatcttttctcatgcctaccaccatttctgtttcttatcaaggctgaatcagctcttgtcatctcacaaacacatcatccaccaaagcatccccttttacctcaactatcacatcttcgtaaattggatagcacagga

SEQ ID NO: 7088 - DNA, 436 bp, Oryza sativa
  Clone ID: uC-osflcyp002a12b1
tcgtttccactaagcaaggcaatgtctaagcagataaaagaatatggattcaaaatctcgccacgagagggaattgtaccaagagatgagagatacactagagcagagattatggagttcattgacttcataattgcagctcctgaaaacagaagccggacgctatcgttcctgcggcgcatcgaggcagcttctattgatgattcttcttcaccgccttcactgccaggagggatgggtgtttcgttgttgaagcgtcttcgtttggattggataactgtttgttgactaggatgtgcagttgctctttaccctttctaccgcagagtatgaatgactttgttataaaaattcactatgttttgaggacaaatacatattctctgacctgcttgattagtaccaaattaatccttaatcaaagaccattttatgt

SEQ ID NO: 7089 - DNA, 455 bp, Oryza sativa
  Clone ID: uC-osflcyp002b07b2
ttggtttttttaaattacggagtagttttatttcccagagaaaagcatccctcctaaaagaccacaaacgatgtttttcttcaactaaaatgtactgtaataacaccaaaggagcattctgaaaattgtcccgcccaaattgtacagttgacacgagtgaagcattagtgttactcagatttacagtctggctaatcaactctaacatcatttccggaattatcagaatcacaactcgtcatttactggagagttgtcggccatcagctcctcaagggagaattcgtcctcttcaataacctcaccatctttgccgtcccatggttcagattggactatcgttggggtaccgtccaaaggaagattacccttcccaccgcgccctgcttccttcacaaactcagttatttcatcaagctggaaagcactaccgagtggagcatatgccccttttt

SEQ ID NO: 7090 - DNA, 338 bp, Oryza sativa
  Clone ID: uC-osflcyp002b08b1
tcgtttttcaccttcccttcgccatgtccgtctccgccgccgtcggcgacgtcttcacttaccgtaccctcgtactcgcccgtcaccgatcgccgtcggcatttagggtcgtggctgacaagccgagggcgtccgtaatcctttggcccccatccccttgccgtttatcccgccacccgtgcccccgccatggccaccgacggcgccgccgtcgccgacgcggcagggtcgaagaagaagaaggaggtgctcatcttcgacgccgaggaggaccttgcggtgtccctggcgaagtacacggcggagctgttcgtgaagctcgctgccgagaggggcgc

SEQ ID NO: 7091 - DNA, 433 bp, Oryza sativa
  Clone ID: uC-osflcyp002c03b2
tttgttttgataggacacagggatactgcaatctctttatactcattctgtttacagattacatacaccattcacttctctgtaaatgacattgctcccttgcattcgcgaattagatgtatatacataaacactgctactctgctctaccactttcatttttgtcgctctttacattcttacccactataaagatatagtaaatcctaccaatacgatccgacattctaaaaaccacatcagcaattcagcatcgtagggagaaacaccataactgacagaggccaccaccacttccttcaagtagcaaaaggtgccttgaggtatccacatcaatttgcatgtcctgtataactcttccacaggcgtctggaaattatcttcagagagtacacatttttggctcagaaaagtccagtggtcccaattcagt

SEQ ID NO: 7092 - DNA, 475 bp, Oryza sativa
  Clone ID: uC-osflcyp002c04b1
tagtaacccaaccagagagcttgcggaagcgggggtttggtgcgggcgcgcgcgtgtgaggggggagagaaggccaggaggaggcgacgccgtcgcccgagggaggcaaaaatccgatcctcctcctgccctgctcgctcgctcgctcgcctgcgctgcgcgcacttggccccgtcccgtccgttcccgctcgccaggcatagaaagatggtgctctgggtcttcggctatggctccctgatctggaaccccggattcgacttcgatgagaagatcctgggcttcgtcaagggctacaaacgcaccttcaatcttgcttgcattgaccatcggggcacgccggagcatcctgcgaggacctgcacacttgagtccgacgaggaagccatatgctgggggattgcatactgtgtcaaaggggggcttaaaaaggagcatgaagcaatgaagtacttggaaagaagagagtgtgagt

SEQ ID NO: 7093 - DNA, 452 bp, Oryza sativa
  Clone ID: uC-osflcyp002c11b2
tttggttaacaagaatgtttggtgaacatgaaggggcttgtacaagatgttacattttatgtatatgacacacacaactctacaactgatattccacatgctgagattctactgatatttacattacaaaaaaagtaattcccgtgctgtcgcggaataagtccgttttacgaactccgcgagatcttgaattttctgttcattttttcctctatgtttttgctatgatctcatgggtgatcggttcttcaggttcatctcaagcttctgcctttctccctcaacttcagcaaactgcacactgagctctgagtacctgccctgcatgtctttcagctcactttctactgccacttgccttctcttcagctcaatcgtatcctgtatcagttcattgatgtccctgaagctctggaatactgctgcttcatattatggtgctcaagaatgaa

SEQ ID NO: 7094 - DNA, 362 bp, Oryza sativa
  Clone ID: uC-osflcyp002d07b2
tttgtttttttaataatttgggctttttatttatttttttttttttttttttacttatttaactttacaacttccttgtaaccccaaaacaaactaccaaaacaataaaaatccaccaaaccatagaccaccaactacaaatattaaacccatacctaaaataaaccaacactatttttaaaagcaacaacaccagaccagagaagtaccctacaatttaagctgtccttattaaataaaccataccaaaaccaacaaccacattaacgaaaacttcaagcacacatcgtccaacaaaataatcattaccccctttgactaacacatgaacccaaccccccttggtgacccactcctgaaac

SEQ ID NO: 7095 - DNA, 454 bp, Oryza sativa
  Clone ID: uC-osflcyp002e03b2
tttgtttttttttttttttgggtttttttttttttttttttttttttttttggaaaattaaaatagcaggctactacaaataaattagactccaagatacaagacaaaactgggttgggctattataaaaaacctccgaggggctgtcaagaggggaagataaaaacgaagggcagatagaactagtcagagggcccagccctgctcctaaagggctccttgaagtccatgatatcaccttcccacctgggcaccgcctggttttcgcacacccaaattttttgagcaacctggttgataagcctgaagtcatgactcaccaggaccaaaccaccgtcccacttgttcagggcctaagccagagaatcgatggtctcaatgtccaaatggttcgtcggctcgtcaagcaacagcagttgaggctgcctgtaagccagccacgcaaagatgacgc

SEQ ID NO: 7096 - DNA, 542 bp, Oryza sativa
  unsure (1)..(542): unsure at all n locations
  Clone ID: uC-osflcyp002e04b1
gttcaagcatttcaaagaagaatctggacacataatccaagagtattttctctcagatgatgtcccagaactcattataagccttcaagagctttctgccccagagtacaatcctatcttcctcaagaagcttatcaccctcgctatggacagaaagaatagggagaaggagatggcttctgccctgctttcttcactcagcttggaacttttctccactgatgacatcatgaagggattcatattgctcctgcagtcagcagaagacactgccctcgacattgtggatgctcccagtgaacttgccctcttccttgccagggcagttattgatgaagttctgattccactgaatttggatgagatcggtaacaggcttcgccctaacagcagtggtagtcaaactgtccagatggctcgtgcccttcttgctgctcgccactctggtgagaggatactgcgttgctggngtggcggcactggctgngctgtagaagatgctgaggacaagatcgcaagctccttgaagatacaatactggc

SEQ ID NO: 7097 - DNA, 391 bp, Oryza sativa
  Clone ID: uC-osflcyp002e11b2
tgggtttcaaggtaagtgtggtgatattgcctcaattaatcaaatattcaaatgggagcaaaacttttgtaatattccccaaaatctcaagggctccttgctatcattcaacctaattaataccaacttgggatgtgaacctgctatccttggctttctttggggccaccagactccagtctgatctgcatccagaattcatttgacactcaaaatcccaaagggaggcttctcgtctaggggacactgttaatcagttgaggcaaaaatgtgccatgtaggatcacatgacaatcttagcaagcatcttgctttcatcaagtcctcaaatcttctgacattgcggaaggtatacaatgcgttgtcagaatatcctgagtagccacctttg

SEQ ID NO: 7098 - DNA, 289 bp, Oryza sativa
  Clone ID: uC-osflcyp002e12b1
tcgttgaggcatcagtgcaggggccggaatgggggttgatctcatgttttgtggactagttgagggatcgtgttaccgcgcgcggtgtgtactcgtcttgggcgatgctggcctaccttctattatggctggcctataagtaggacgacgattacttatcccgatgcgctgtgcttgggatggtgggcgtagcgacggatttgggaggggtgaactgtggaacctgccaacggggcctacatgcaggtggagaacgagtctgggaagtccaagacgaacattgagcttt

SEQ ID NO: 7099 - DNA, 474 bp, Oryza sativa
  Clone ID: uC-osflcyp002f07b2
tttgttttttaaactggagggggatttaacttttttgttttaaggaaatgacttatacagttctgagagtaaacagcaccttggatgaaagaaaattacatacaggatcgctaatcgagagaaggaaagctaacaaaaaatgcacctacagagtacaatatgactcctacatgatacgaggacagtaacagagggaaccatacaaataccaaagggggatcccatatctctaaaaatgcagaaaaacattatatatatgttctagatatatatatatagcctgcatccaactaatagaagattactagattggcaaataacaaaggtggaaaaggagaggttcacgaaaggcttcatctactatatgtataagggggtgcggggttcatgatcatactaattggccatacagagggggtccagctatgtacgcagtgtttttcatggggggtgacttacttatgctactctatg

SEQ ID NO: 7100 - DNA, 316 bp, Oryza sativa
  Clone ID: uC-osflcyp002g03b2
tttgtgttttgaaattcttgggttttaaatttttttttttttttttttttttcacaaaatctttagctgtaagaatgcttataggttagaaaagacactaaacctaacaatattatttgctaaagagacaaaacagggaaaatgacgaggggatggggggaccaaaaacaaaaaaagtacgagggggggagccaacaaaaaaggcagcctgcctgcctatggaggcaagaattgatctcctttccccttaccaaaaaatccaaacttggaaaggctccacccgacaaccctagttcatgggaactagccaagcccc

SEQ ID NO: 7101 - DNA, 559 bp, Oryza sativa
  Clone ID: uC-osflcyp002g04b1
ttttattagagagagaagagagaagacggggggggaaaaaaatcacaagagaggaggagaaaaaaaaatcgcagcagcaaaccctcctcctccgccatccgccgccttccctcctcccccacgatctccggcggcggcggcggcgatggcccggaagaggaagacggacgcggcgccgcggctggacgaggccgaccggacgctctactccaccttctgcggcgccgccaactccctctcccagctctacacccaggccatggcccagcagaagctctccttccaggccggcgagcgccactccctcgaaaaactccaccagtggatattgagaaagcatgaggaagagtcgaggctcacggcggctgatataatgtctcatatccagcatgagttggattatggaggtaatgatccacatgtttcccccagagtacatcagcatagtgcaaatccgtttgcaaactcaagcatccaaccctcagctggttcctatggtcaagcaacagtaggatttgcgcctagacccagcatcagcgatcagtcaagaatccaattt

SEQ ID NO: 7102 - DNA, 404 bp, Oryza sativa
  Clone ID: uC-osflcyp002g12b1
ttgtacataaccaaacccgacagatcttctcttcttcctcctccctttcccatcttcgacgaggcgacccggcgcgagagaagaagagatcgatcgatcgatcaaccgatctcgccggagaaggaagaggagcaaagatgtcgtccgtgttcatcggtgatgagacggtgcccttttttggctttcttggcgccgccttcgcccttatttttttatgcatgggtgcggcgtacgggacggcgaagagcggctttggcgaggagtccatgggcgtgatgcgctcggagctcgtgatgaagtccattcgcgcccgtggatatggctggtgtgctcggtatctacggccttaacatcgccgtcattattagtacagggatcaaccccaaggctaagccgtactacct

SEQ ID NO: 7103 - DNA, 261 bp, Oryza sativa
  Clone ID: uC-osflcyp002h08b1
tcgtttacagatacacgagctgtgacgcgaaccacctatttgtgccgtgtacggtggattacgtgctccaagtgatcgacttcttatcagcgcttggtgtgcccgttctatcatgagcacgtgcgtggagaatgaccacaatctgttggtgacaagtggacaaagacgacgttccgcttcgtgacaagcagagcttgcacgtggagactgaaggcagtttggactcggttgctcaatcatgaggacattgggtcactgtac

SEQ ID NO: 7104 - DNA, 133 bp, Oryza sativa
  Clone ID: uC-osflcyp003a03b1
ttggttttttaagtttggggggtttttttttttttttttttctcatatttttttcatttgcttttgttttcaatacaactatccgtaacactagacaataaaaagaacggaaatacgccggcgtaaacttact

SEQ ID NO: 7105 - DNA, 326 bp, Oryza sativa
  Clone ID: uC-osflcyp003a11b1
ttggttttaaaagattttggggctttattatttgctgtcctctcgcagttttatcacgagcttaaattttgtacacaattgtacatcatgcaaggccatgtaaggaatgaatactttcagggttaaacttcttctctgggggaagaccggggattagaacatctactgcctatccaagaacatgtaatccgcagttgtggactggaacccattgtgagccgccgttgcatctgccatctccttgaggaaggagacgaccttctttgactagttaagcaagtagcgggcgttggaccgcttccttccaacagcggaggagaaataat

SEQ ID NO: 7106 - DNA, 446 bp, Oryza sativa
  Clone ID: uC-osflcyp003b07b1
ttggtttttttaggtgggggggtttgcttattacgtttaatataatcatttgcgttccttcaaatcacgcttgcgccacgcaacatcaaaattaagcgttttgtgggagcatgtccacccacatctgaccgcggggaattattgctcaaaccctacgagcaaatctaaagcaccatcttcacaaaatttacggaaacgaagtggttctattcccatctagtagggctccactggtgcacggaatttggcttcggcatagaccgcaccagcaccaagctcctccttgatcctaaaaagctggttggacttggcaaggcgctcaaatctgcaaggagctcccgtcttgatctggccccgggataaaccaacctgccgatcagcaatgaatggatcctcagtttcaccactcctgtgactggggattacaccccagtcagaacgttttg

SEQ ID NO: 7107 - DNA, 113 bp, Oryza sativa
  Clone ID: uC-osflcyp003c03b1
ttggtttttggagtgaaggggggttttatttttttttttttttttatattcatttgttaatcattataaatcaacacaacgggtgatggccctaaaaaaaatacggaaagacc

SEQ ID NO: 7108 - DNA, 367 bp, Oryza sativa
  Clone ID: uC-osflcyp003d07b1
ttggttttttaattttttgggtttttttttttttttttttttttttttttttttttttgggggaacaaacgtacaaacacccactactcatataacaaagcgaaaggagggtagcatacaggctatacatggattgcgtccaaaaatacacgggacttcgccccataaacccagatatttttcgacaccaaataagcgcgacatcagggacactccaacacccaaaaattggggcaggacccttggcttactcaacaaaaaaaaacttatggtcttttttttttgccaggaataggcgtatttatggggggcaaggtgaatgccgtagactgggaacccaaaacccttacttgcacttgaagccctg

SEQ ID NO: 7109 - DNA, 81 bp, Oryza sativa
  Clone ID: uC-osflcyp003e03b1
ttggttttttattttgggggggtttttttttttttttttttttttttgttttttgttttgcttttgtttacggtatatttg

SEQ ID NO: 7110 - DNA, 321 bp, Oryza sativa
  Clone ID: uC-osflcyp003e11b1
ttggttttttaatttttggggaggttatatattgtttatgctttattacgaaattattacctgcctgtgctggattccataatttcataatcaaagacacaatttgatcgaagcagtgctcaagttttgcagcccactagcactgaaccccccacaggggttactgacattattcatctacaggctgtctacacaccctacaacatcggcggcaaagtaacaaaaccaccccctgggccatctcccgtctgcagctagcattgcatttcaaaacctttagaagatgtttgatctggttcagttcagggaatcaggaagaaa

SEQ ID NO: 7111 - DNA, 346 bp, Oryza sativa
  Clone ID: uC-osflcyp003f07b1
ttgttttttgataaatatggggagctaattttttatttgtttttgtttttttttattttttttttttttttttttttttttttttttttttaggaaacccggggggattttttttaaaaaccccgccccccattaggggaggggcccgggaccccggaggggccccccagggtgaaaggggccccccccaagctgggggggggcccccccaaaattgggcgacacggccaaccctggccaaccacgcccccggttttttttaagctcaaaaaaaaaggggagggcctcccaccaaaaaggcggggtcccaagggaagcaaataaaggcccctactaaaattttgta

SEQ ID NO: 7112 - DNA, 217 bp, Oryza sativa
  Clone ID: uC-osflcyp003g03b1
aaagatgaggggttttttatttataattattctgtttttatttgagtacacataaaccatcaaactgtgaaacggtacaggatctgagataattaggaaactacagagcagcagatacaatattaaccatagcagctgcaggataaacacggagctaaataggcaggctttgttcttctttcacagtctggatatctggaaggggaccatgacttca

SEQ ID NO: 7113 - DNA, 443 bp, Oryza sativa
  Clone ID: uC-osflcyp003g11b1
ttggtttttaaacaatatggggacaactatataacttaataagcacattacagcacacacatggccaaggcagttatttgaatcagtctccaacatacttcaaatcatagaccacaccatacagcaaacatagtataaacattgtcatagagagtacagctgatagcagcttgtaatattctagcattactttggtagcatccctctacaaaacatagcagacatcaccagctcttcatcttggccatacacattcaacatggtttgctagtgacagaccacactgaccagaacatttcgtctcctcagtaggcaccagctgccatgagcagctcatcaaggctccagatgccctcgttgcttgccccgtcttgtgtagcatcattttgcagaaggttggccattgattcatctgagctgctctaacataaggaatggaaata

SEQ ID NO: 7114 - DNA, 355 bp, Oryza sativa
  Clone ID: uC-osflcyp003h05b1
ttggtttttgatttttttgggtttttttttttttttttttttttttttttaagctgcaaaatatattggaggcttcaaggagacagggaaaagataagtttgtaattcaaaagacagaaattcaccaccaggacgggatggttctgctactgattacacgaggacaggttggggcgattttagcacagttaatactcccacaaccacacattcactaactttgggcttttacacataactggcgatcaaagacttcctcatgtcatcaacaatcgcggcaggctgcccttttttcagcttgaagaccctctcaatgaccgatagcttaatagccggagtggctgagccacaaaaa

SEQ ID NO: 7115 - DNA, 539 bp, Oryza sativa
  unsure (1)..(539): unsure at all n locations
  Clone ID: uC-osflcyp037a01b1
cacgacgctcgctctctcctctctctccctcttccgccgccgcgcttggggaaggaaggagaaagcaagccatcggcccccgcctccgcctccgaagggacattgttgctagttggtgatggctgagcaggctaatcaaccgactgtccttcagaagttcggtggccagttccaccttggctccagcttttctgaaggtgtacgggctcgcaacatctgcccatctgtctcatcctatgacaggcgctttaccacaaggagctacatgacccagggccttgtcaatggtggcatcaacgtcccaatgatgtcgtcctctccaatttttgctaatgctccagctgagaaaggtggcaaaaacttcatgattgatttcctcatgggtggagtgtcagccgcagtttcaaagactgctgctgctccgattgagcgtgtgaagctgcttatccagaaccaggatgaaatgatcaaggctggtaggctctcagagccatacatgggtattggngactgcttcggacgcactatcaaggatgagg

SEQ ID NO: 7116 - DNA, 535 bp, Oryza sativa
  Clone ID: uC-osflcyp037a03b1
ggcggccaaccttctctctcgcgcgctcctccctgctctaaaccctaacccaagcagccacagcaaccgcgtcagcccttcggccgtatctctccgctgccgccacggcctgacggcctccgttcgcgcctctctctccacggcagcgccgtccccgccgccgcggccggcggcggcggcggccgacggtcgggcgccgaagcgctgtttccggcgcggcgccgatgggcacctgtactgcgagggggtggtggtgggaggacgcgatgggggccggcggaagcggacccccttctacctctacagcaagcctcaggtggtgcggaacttcaccgcctaccgcgacgccctcgaggggctccgctccatcgatgggtacgccgtcaaggccaacaacaatctccgcgtgctgcagctcctgcgggagctcggctgcggcgccgtcctcgtcagcgggaacgagctccgtcttgccctacgggcaggattcgatcccactaggtgtatatttaatggaaatggtaagacattggaa

SEQ ID NO: 7117 - DNA, 294 bp, Oryza sativa
  Clone ID: uC-osflcyp037a10b1
tgaattcagagcagaagtagtatgaagcttcttgacacatgcatgccaaaacatggctccgtttggagaaggcttagcaattagcatgtttgaggatgtgcaagaggaggttcatccaggacagtctataaagtgcacaccatggaacctgacaacttgaagctcaccgaatttcttggtttcactcatcatgcataagccaccaaagtagccaacacaatcgaaaataccaaaaccgagagtgtcaatggttgttttgtcagaggactagcattaggcaaccatggatatgca

SEQ ID NO: 7118 - DNA, 294 bp, Oryza sativa
  Clone ID: uC-osflcyp037b09b1
gacgaggaggcgtgcatgtacgcgctgcagctggcgtcgtcgtcgatcctgccgatgacgctcaagaacgccatcgagctgggcctgctcgagacgctgcagtccgccgccgtcgccggaggaggggggaaggcggcgctgctgacgccggcggaggtggccgacaagctgccgttcaaggcgaacccggcggcggtcgacatggcggaccgtatgctccgactgctcgccttctacaacgtcctcaggtgcgagatggaggaggtcgccaacgacaagctcataccgcctata

SEQ ID NO: 7119 - DNA, 310 bp, Oryza sativa
  Clone ID: uC-osflcyp037c06b1
atcaagtcagcaacgaagaactttgatgaatcactggtgattggagttggtgggtttgggaaggtgtctcggggtcctgctgacgacacctcccccgtccttctcctccagccccccccccctgctcaccccccccttctccccatccccccctccatcatcctggtcccccccctcccccccaagtcccctcgcaccatcctcccctgcacgagccccatcccccccggtcctcctcttccacgccctcttcttccccgccccccccacctcgcactttacccactacaccacctcctcccttcctccc

SEQ ID NO: 7120 - DNA, 525 bp, Oryza sativa
  unsure (1)..(525): unsure at all n locations
  Clone ID: uC-osflcyp037c09b1
ttcacgaattgacagtgctaagggtgttgctcttcttgctgtggtaattcttatcctctcaaatgtggcctcaaatgttcccacagtactactgctcggcacaagagtggctgcatcagctgctgcaatctctcacgattcagagaggaaggcctggcttatcctagcgtgggtcagcaccgttgccgggaacctcacactactgggctcggctgcgaacctcatcgtctgcgagcaggctagaagagctcagttcttcggctacaacctctccttctggagccacctccggttcggggtgccgtcgaccatcgtcgtcacggcgatcgggctgctcatcgtcaccagttactgaagaagaagaagaagaagaagaagctgacagcagcataaggtagcgtacaagaaggagatagatgaacgaaccctttggatcaataagagagagtacatgtaaaatttctaaaataggctngtcctgtaaaactcgtgtgtgttttgtgtgtatctatgccagctgctgcg

SEQ ID NO: 7121 - DNA, 524 bp, Oryza sativa
  Clone ID: uC-osflcyp037d04b1
ggtgcctgcaaggcaagcaaccaccgccgccgacgacgacgacgttgacggcgacgaggagacgatgagctaccagaaagtgccgcctcctcaggacggctaccctcctccagggtactcgcagccatacccgccgccaccgtccggcgggcagtacccacctacgcagtactacccgccgccgaaccagcctcctccggggtaccagggctacttcagcgaggggcagcagccgccatactactacccgcccccgcatgatccccaccaccaccatggtcaccaccaccaccacgaggaccattaccaccacggccaccaccaccatggccaccacgacgatgactgctgccttggcttcctcagaggatggttggccattctttgctgctgctgcgtgctggaggaatgttgctgctgctgctgctgatggcctgaatgctttgaagctccctgttatcaactattctggaatggaaaattttatgtgtgaatttgattttctgtgattgatggacagtacg

SEQ ID NO: 7122 - DNA, 535 bp, Oryza sativa
  Clone ID: uC-osflcyp037d05b1
cttaattatgatagacaaaggccatagtgcaaatgatatttctttagtaaacagttatccagagatgaatgatgtaactatggattcgaaagaggttgagaatactacagtgataccatcaaacagttccacattgctttccaacacctcagggggacaaattcctgtggaagaacatctaaatggtcaagcagcaaaaggtgttaaagatttatgggagttgcctgaacctgatgattcctattaccttccactggagaatagtagcgtgtataatggttcaggtggcttacagattgggcatagacatctccctgctggacaacagggttctgtagtttgcatggagaatggtattttaagtcagcagcagtcacaagtcaccattgcggctgccttcccaatggacaatccagcgtcatttatgcaaccttgttcaaaccggcaaagcaatggtcaggtccagacagtagctaatgacattggaatgctttcttactcccttgaacatacagattgcattgggcagtcaact

SEQ ID NO: 7123 - DNA, 560 bp, Oryza sativa
  unsure (1)..(560): unsure at all n locations
  Clone ID: uC-osflcyp037d09b1
ctagatttgatctaatctttattgttaaagatgtcagaatgtatgatcaagacaagcgaattgcaagccacatcattaaggtgcatgccagtggtgctgctgcttcatccaagaatacagatgctagtgaaggagagaattggctaaaaaggtacattgagtattgccgtgttacttgtaaaccacgactctcagaaaaggcagcagagatgcttcagaacaaatatgtggagattagacagaaaatgagacaacaagctcatgaaacagggagggctgcagctatacccatcactgtgcggcagcttgaagccattatacgtttgagtgaatctcttgcaaagatgagattgacaagtgtggctacaccagagcatgttgaagaggcatttaggctgttcaatgtctccactgttgatgccgcaggatctggaatcaatgagcatttgaacctatcaccagatattgcaaatgagatcaagcangctgaggcacatataaagagaaggatgggaattggagccacatatacgagcgacgcctgatcgatgaactaaata

SEQ ID NO: 7124 - DNA, 367 bp, Oryza sativa
  unsure (1)..(367): unsure at all n locations
  Clone ID: uC-osflcyp037e02b1
tatatttcctccattcccccaaatccatccatcatggagttccctcatcgccaccaccaccacgggcaccgcggcgacgacgacgacgacgatcgccgccgccatcccgctcccgctcccgcctacggccacgactcagcccctccgccgggtccctacggccaagcgcctcctccggctgatccctacgctcgccacccgccttcccacgactacgctcatcctcctccggcgtatgggggnagggggctacggcaacgtcgtccacgtttcccacgaggtctccgaccaccagaggcccacgccgcactacggtggatccgagtacattagccccgtccaagagacccgtccataccacggtggc

SEQ ID NO: 7125 - DNA, 388 bp, Oryza sativa
  Clone ID: uC-osflcyp037e04b1
tgtctttctttccctcctctgctcatcctctccccagatctccagccccaggagctccggagggtttccaatggcggtgaaggtttatgtcgtgtactactctatgtatggacatgttgctaaactagctgaagagatcaagaagggtgcttcatctattgaaggtgttgaggctaaaatatggcaggttcctgaaactctacatgaggaagtacttggaaagatgggcgcgcctactaagccagatgtgccaacgatcacaccacaggaacttactgaggctgatggaatcctgtttgggtttcctacaaggtttgggatgatggctgcgcaagatgaaagcattctttgatgcaaccggtggtctgtggagtgagcagagtcttgc

SEQ ID NO: 7126 - DNA, 367 bp, Oryza sativa
  Clone ID: uC-osflcyp037e05b1
cccgcatctccctcctcgcctctcgctgccggccgcgcttcgccaagatgaacaaggagaggcttatgaagatggccggcgccgtccgcaccggcgggaaaggcaccgtgcgcaggaagaagaaggccgtccacaagacggggaccactgacgacaagaggctgcagagcacgctcaagagagtaggtgtcaacaccatccccgcgatcgaggaggtcaacatcttcaaggatgatctcgtcatccagttcgtcaatcccaaagtgcaagcttccatcgccgcaaacacatgggtggtcagtggcttcacacagaccaagaagcttgatgatgttcctccctgagatcatgaaccaattgtctcctg

SEQ ID NO: 7127 - DNA, 259 bp, Oryza sativa
  Clone ID: uC-osflcyp037f02b1
tatggtgaccgccctcttctccgccgcctccctgttccgtgacgccgacgacgaccagggtggacgccgatgagcaggtgcagtcggtgcagtacgaggaaagagcccacaagttccccggcatggaactgaaaataagggaattctcaagtcatcagctgaatgctaacatgctatggtctgggacgttcttatttgctgattggctggtaaagaataaatcgattgtgcgtggacggtggatcctggtattgggaag

SEQ ID NO: 7128 - DNA, 337 bp, Oryza sativa
  Clone ID: uC-osflcyp037f05b1
gttttctttttcttgttgggtttctcttcctcctgctcgagtttgatctcttgattcgtgaggagtgtggcgaagatgagcgcgagtttcctcgagatccagccttcggagctctcattcccctttgaactactgaagcagagctcatgctccatgcaactcaccaataagaccgaccattatgttgcatttaaggtcaaaacaaccaacccaaagcaatactgtgtgcgccctaatattggcgtcgtattgccggggtctacatgtgatgttacagtgacgatgcaagcacagagggaggcacctccggatctgcagcgcatggcttagttccctt

SEQ ID NO: 7129 - DNA, 534 bp, Oryza sativa
  unsure (1)..(534): unsure at all n locations
  Clone ID: uC-osflcyp037f06b1
cccccagcagccgccgccgcagcctcctctcggctgctcccatcctctccttcgagttagcttcctccttattcaaccatgggtaaggagaagacgcacatcaacattgtggtcattggccacgtcgactccggcaagtcgaccaccacgggccatctgatctacaagcttggaggtatcgacaagcgtgtgattgagaggttcgagaaggaagccgctgagatgaacaagaggtccttcaagtacgcgtgggtgcttgataagctcaaggccgagcgtgagagaggtatcaccatcgatatcgccctgtggaagttcgagaccaccaagtactactgcacggtcattgatgcccctggtcaccgtgacttcatcaagaacatgatcacgggtacctcccaggctgactgtgccgtgctcatcattgactccaccactggtggttttgaggctggtatctccaggatggccagacccgtgagcacgctcttcttgctttcactctnggagtgaagcagatgatctgctgctgca

SEQ ID NO: 7130 - DNA, 548 bp, Oryza sativa
  Clone ID: uC-osflcyp037f07b1
ttatccccaaattccccgatccccgcagccgctcctgcgactcgtaggtctcgtcaagtcggcggcgacgactttgatctctattcaagatgcagatctttgtgaagactctcactggcaagaccataacccttgaggttgagtcctcggataccattgacaatgtaaaggccaagatccaggacaaggagggaatcccaccggaccagcagcgtctcatcttcgctggcaagcagcttgaagatgggcgcacgcttgctgactacaacatccagaaggaatccaccctccaccttgtcctccgcctccggggaggcatgcaaatctttgtcaagaccttgactggcaagactatcacccttgaggttgagtcttctgatactattgacaacgttaaggcaaagatccaggacaaggaagggattcccccggaccagcagcgtctgatctttgctggcaagcagctcgaggatggtaggacccttgctgactacaacatccagaaggagtccacccttcaccttgttctcggctaagggaggaatgca

SEQ ID NO: 7131 - DNA, 406 bp, Oryza sativa
  Clone ID: uC-osflcyp037g08b1
gtatggtttatcccacttacaccaataatggaggatctatttgtcagcggcattgaagagattcccgaagacacttctgtgcatcaccagcaaactgatgagccaccaccatcctacaacaccattaggaggggtgaaggcacattaatggctgaactgcgtgaggctacggagcaactacgtttgtctttctatgccaacacagatgaagaaactcgggcacaaatgaaacagttttgggatgaagaattcaatgcaatatctgaagaagcaactattgagagaggtttagagtggatgccggcggaggttgttgaggcatttcagttcacacagtggggctaatgtggttgcatattaccttgaagatattttttaccagcgtttgatttttgaagattgtgcc

SEQ ID NO: 7132 - DNA, 314 bp, Oryza sativa
  Clone ID: uC-osflcyp037g10b1
gttgtgctcatacacaacccatgtgagcaggtttcatttgctagattaggatatgacaagagaacatggctgtcaccacacttgagatttcaggattgcacctacatggatggcctattgtatgcagtgacgttattgggggaaattttcgtgattgatcttatcatcattgctatctttagtatacatactttatggacagtacaatggtattttttttgttatattattatatttttcatatctttttactttgtattctctatttcctttctcttttatattttctttttttttactgtttttttattttt

SEQ ID NO: 7133 - DNA, 467 bp, Oryza sativa
  Clone ID: uC-osflcyp037g11b1
gtggtgctcatacataacccatgtgagcaggtctcatttgctagattaggatatgacaagaggacatggctgtcaccacacttgagatttcaggattgcacctacatggatggcctatcgtatgcactgacgttattgggggaaatggttgtgttggatctcaacactcactgtgatcacagcagagatcatcatggacaggacataggagtattcgcgtgagagaatttatattgttcacgctcgatggggtgatctgttgcaagtttggagaccaccacacggagatgggcgtgtgtatgatgaaattactggccgttcagctcttgtgagcaacactgagaggacaaaattatatagagtgatactctggctaaagagctagtggaaataagtgacctgggtgaccatgtattgtttatggggaataaccaaacttattgtctttgtgcacaggaatacccact

SEQ ID NO: 7134 - DNA, 225 bp, Oryza sativa
  Clone ID: uC-osflcyp037h02b1
gtgtttagagggagccaaagaaagctctcatcttgctcttctcaaactccatctctctctcttcttcttcttgctctcctcctcctcctcgcttggaccccggattttttgcaagggggtaaggaggcgggaggagatggggagggaggagagccttcttttccttccccttaattttgctgttttagcattcatttttaggttctctttatggtcatcatctct

SEQ ID NO: 7135 - DNA, 236 bp, Oryza sativa
  Clone ID: uC-osflcyp037h06b1
cctccctccaagatggacgccgccgtcgaccgcctgaaggatgggttcgccaagttcaagaccgagttctatgacaagaagccggagctcttcgagccgctcaaggccggccaggcacccaagtacatggtgttctcgtgcgccgactctcgcgtgtgcccgtcggagacaatgggcctggagcccggagaggtcttcaccgtccgcaacattaccatcacggttctagcttactg

SEQ ID NO: 7136 - DNA, 224 bp, Oryza sativa
  Clone ID: uC-osflcyp037h08b1
cagaacccccgcgaccacccccgccggtgatgttagggagccaaagaatgctctcatcgggggggttttaatacaacatctctctttcttcatcacttagcgcaccctatccctcccaaaagaccaccatattttaggcaagggggtaaaggaaggtatcagagatagcgagggaggactatactaagaacccattgctttcatatgcgagctaaacgtaaatc

SEQ ID NO: 7137 - DNA, 471 bp, Oryza sativa
  Clone ID: uC-osflcyp037h10b1
gtggtgctcatccataacccatgtgagctggtgtcatttgctagattaggatatgacaagtggacatggctgtcaccacacttgagatttgaggattgcacctacatggatggcctattgtatgcactgacgttattgggggaaattgtcctgttggacctcaacaccactgtgatcacagcagagatcatcatggacaggacatacgagtattcgcgtgagagaatttatattgttcacgctccatggggtgatctgttgcacgtttggagaccaccacaaggagatgggcgcgggtatgacgaaattactggccgtttagatgttgtgagcaacactgagaggacacaattatatcgagacgatactctggctcacgagctagtggaaataagtgacctgggtgaccatgtattgcttatggcgaataaccaaacttatagtctttgcgcaaaggaatactcactgtgg

SEQ ID NO: 7138 - DNA, 175 bp, Oryza sativa
  Clone ID: uC-osflcyp050a05b1
gcggtttccttgtgcgcccaccacaacaaccactacgacggggccatgaacttcatgcaccgggacgaggaggtggactactacccgtcgcgccacgcgccgctccgccacgcgccgccgacgcccatcacgccgcgccccgaggtggggaggaggctgatggtctctattcaca

SEQ ID NO: 7139 - DNA, 420 bp, Oryza sativa
  Clone ID: uC-osflcyp050a10b1
ttacttgacatactctactactactagccagtaagctagctaactaactacgtggctatggcccccaccgtgatggcctcctcggccacctccgtggctccattccaagggctcaagtccaccgccggcctccccgtcagccgccgctccaccaactcgggcttcggcaacgtcagcaatggcggaaggatcaagtgcatgcaggtgtggccaattgagggcatcaagaagttcgagaccctatcgtacctgccaccactcaccgtggaggatcttttgaagcagatcgagtacctgcttcgatccaagtgggtgccttgtctcgagttcagcatggttgggttcgtccaccgtgtgaaccacaggtcctccggttcccaccttggctggctttgtctctatgtggcaccttcttccata

SEQ ID NO: 7140 - DNA, 121 bp, Oryza sativa
  Clone ID: uC-osflcyp050h03b1
gtttcgttatgcctatttcggatctatccattcgggtgaccgtggcagaccggcaatcccggcggacaggaggaggaggacgacgacgacgacgatcgtgatgggcctccctgaacaagct

SEQ ID NO: 7141 - DNA, 443 bp, Oryza sativa
  Clone ID: uC-osflcyp050h05b1
tgctccatgtgaactaggcaagtctctgcaaggattcagtcagctatcaaagcttaggacgttgaaagttcatcttttttggtggtcagatgctgaggagtgtcaaaattacgtgtcagctttgctatctagcatccttcatcatctatatttgaccggtggcccactgatcatggagaagtggttccctgctagtccttgcttcttccggaagctttatatcataggctgctacatctttaaggccccaaattggactagttttcttgtgtttccctctgacttacatcttttattttcatattatggtctcgatttattatttttattttcgattctttttccattttttgtttttttctacttctatccttccttttttttcctttgtttatctcctcctctacttctttttagtttcttttattcctcctttttttatt

SEQ ID NO: 7142 - DNA, 369 bp, Oryza sativa
  Clone ID: uC-osflcyp050h06b1
cctttttagatctgatgtcatgaaaccactgaaaattgagcaactcatggacaggcaggttccaactctttctggaggggagctgcaaagggttgcgctttgtctttgtcttgggaagcctgctgatatttacctcatagatgaaccaagtgcccatcttgattcagagcagcgccttcttgcagcgaaggtcataaaaagatttatcctccatgaaaagaaaactgcttttgttgttgagcatgattttatcatggcaacctaccttgctgataaggtggttggtttttgagggcaaatctttttctcttccctttctatcacattttccttaaccccctggttccttatatatattccatatttttt

SEQ ID NO: 7143 - DNA, 219 bp, Oryza sativa
  Clone ID: uC-osflcyp050h08b1
tcggctgttgctgctgcctgggcggacccgatggcggtgcttgcatgacctgtcaggagatgaccactgccacttacagcttccttggcgctgccaccaacaaggggtctggtgctgcttccggaggatcagagatgggggcggtgaactgcagctgcggttgcaacacctgcaagtgcggttccagctgtcgctgttccttgctgcatctgctacttg

SEQ ID NO: 7144 - DNA, 283 bp, Oryza sativa
  Clone ID: uC-osflcyp050h09b1
ggtcgccctttttttttttttttttttttttttgttttttttcagcccaccgatcttgactgtatatatacccacagagttacagatacactagctatacacatgccgagggagaaaaacgatcgagaagagattaacagatggattaatttctgggtatactgggatggatcatacatgagagattgtagttaaaagaggaggatgaagaagatgagaatcagaggctctggaggatcttgggggcttcgccaaagtgcttctcgggctggaactggttgtt

SEQ ID NO: 7145 - DNA, 173 bp, Oryza sativa
  Clone ID: uC-osflcyp051a02b1
gtcatagtcttttgtgcgttagccaacgagttcagggcgggacatgatatagttgtcgacctggtcaaccaagacgacctcgacgatggccgacgccgtcgacaatggcgtagtcggcgactacttaaatttcggtggggcggagcgcgagccggagtcgcacgacaggcagg

SEQ ID NO: 7146 - DNA, 260 bp, Oryza sativa
  Clone ID: uC-osflcyp051a08b1
tttcctatattccgactctcgtaagattaagggcggaggattattaaaaccaaaccgctgttttacccaacccccccccctcccctatcttctccccccccttcatcttctccccacccctccccccccccatcccccctcccctccccccccttccctccctcccccccccccctacttccccccctctccccccctcccccctcccccacccttccccttccccccctccctctcccccctctcttccccatcccttc

SEQ ID NO: 7147 - DNA, 402 bp, Oryza sativa
  Clone ID: uC-osflcyp051a11b1
tacattattaagtgccgaagattacatattaggagggccaaaagattttagtgtcgcttacatctcctcaccagaaattggattcttgaaaaacgtgggtgctaagctcaagaaaagcaacaccaagctaattttccggtttcttagagaagacgtcgctgagcataccaccaagaaaacgtatggagagatcctgaaagacctgaaattccgcaagggctttgcctaaaggattcttggcccccagggaatacattgggccattgggcagggaccagtatctgcggctgcctactagtttggtcaaggatgcacatgcccttgggcttgaagcctttcgcctctggatttgccaatgatgccttcatgaggtacaactacagctttgatccccgtgcagag

SEQ ID NO: 7148 - DNA, 201 bp, Oryza sativa
  Clone ID: uC-osflcyp051a12b1
tgctctttgaagattcgccagactaccaatattgggagagattgttcatagacctttttattcaagagggatttcagtttgattatgtttttgaccggacatctcctgcagtatcaacaggtcccagaggaccagggctccaccatacgccaatgcccctgccacaggacacaggtcgccgatggctcctataccaataaa

SEQ ID NO: 7149 - DNA, 335 bp, Oryza sativa
  Clone ID: uC-osflcyp051b02b1
gcgtgcgtccaccaccgagcggcgtagcttgagcgatggcggtggtggagatcaccgagggggtgaggaacctggccgtggagggggagcctgcggcggcggcggcggcggcgggaggtggtgtcgtggttgtttttctctttttcttggtttgttctctttgtgcctttctctttatatccgtctacttccttctatctatttttttgttcttcttttgttttctatttcttcacttctgttttattcttttttattttattcacaactttattttcttctttctcttcttttatattatttagtttttctattttatctttattttctttttt

SEQ ID NO: 7150 - DNA, 214 bp, Oryza sativa
  Clone ID: uC-osflcyp051b04b1
ctgttcttgaagcagcagagcgaggtagacatggcgggcggcaccatggacatctcgtgcccggcgctggccggcaaggccaccgcgaaggtgttcggcgaggggcgcattaccatacgcaagtggaccgcgaaacccaatcccgtctaatcccggagcctgggccggactccgaaacccacgccgctcttccacagggagggttacagggagg

SEQ ID NO: 7151 - DNA, 98 bp, Oryza sativa
  Clone ID: uC-osflcyp051b06b1
gtgataacctggtgcggaagctcggggcggagcacggggggtttatgggccaggtgggcttcttctacagccacgagacgagccgcctgtcgctggag

SEQ ID NO: 7152 - DNA, 95 bp, Oryza sativa
  Clone ID: uC-osflcyp051b08b1
gcgtagcagggttcacaaggcaggagaaaatgggggagatcttttaaagtaatggggggctatgccacctcgaagcagaagcttccgaagatgat

SEQ ID NO: 7153 - DNA, 205 bp, Oryza sativa
  Clone ID: uC-osflcyp051b12b1
taatttgctaaaagtcaaactgtggctgggggtgggctaatatcagtatgctcacttgtggcaagatcatcttgacaaactttttgacctgtatgcctctggaaagctaaaggtttcccttgacccgaagaaattcgcgggtgtagcttctgcgcctgatgcggttgaatatcttcattctggccagagagttgccacggtcctc

SEQ ID NO: 7154 - DNA, 422 bp, Oryza sativa
  Clone ID: uC-osflcyp051c01b1
aagctatttcatctgagagagtatgtcgatgatacggaggattatattaacatcatgttggatgacaagcaaaatcaacttctacagatgggggtcatgctctccactgcaactgttgtcattactgctggagtggccgctgttggtctttttgggatgaatatcggtatatcgctttatgctgatcctacaaatgaggaggagaaacgagcatcaaacatgaaattttgggaaaccactttgggaaccattgctggctgcacggttatgtacatagtagccatgggttgggggaagagaagtggactgctgcaataatgagggtgccacgatgaattcacacaagttgtcgattgcttgcctggtcagacaaagctctatcaacaggaagacaacatatggctcgactggttacctccttg

SEQ ID NO: 7155 - DNA, 342 bp, Oryza sativa
  Clone ID: uC-osflcyp051c04b1
aaattaaaaaggccttgtttaatggcactaactgcgcatgggtaatgtatcatactattagggaaatatgtactgatgtactttacactcctattatgcaaatgctaagttacaatatgtactttacactctattatgcatgttataaaaccagcctcgaaatcaacatcggtagctaaacacggaagaaaacgccataggagatccaaaatgatgaccacaccgaggcacgatatttgataatggagttcagctcaggcttacatattctgggcacttgattacgggcgcttctccccgatccaggatatacagcgtcttagagttacaacgacttagggc

SEQ ID NO: 7156 - DNA, 365 bp, Oryza sativa
  Clone ID: uC-osflcyp051c06b1
tgtacctatatctgcttgaactcagtgaaaagaatagatggggtccttctacgggtgtgagcgaccttttgaattcccatctcttgagtatctttttattgaacatttaacagcactagaagagtgggttgaaatgacaggaacccatctggatactctgatgaaactaaggaagagtaccttgaaaatcctagtgatattggaatcaaatccaatgttaaacccaacatgaaggcacttgaaaatccataaaaagtcaaggattccattctttagtggaaagtttgatcaggtacgtgtcaacctgccgaatggggacatgggtaggtcacactggtgatattgaagccacagtagttgcttgc

SEQ ID NO: 7157 - DNA, 234 bp, Oryza sativa
  Clone ID: uC-osflcyp051c07b1
ttttgtttaggacgaacagggcgactgtgtctcgggtactggtttgtgactgggaaggaccttttagatcttcaggtggttggcttcttttttgtagaataggtttttgtttttttactttatttcgtgcttttttagttattccgttcttttatgttcaggagttttggagggtttttgactttttgttctaatatcttgagagcctttacactttttttttttttttttgac

SEQ ID NO: 7158 - DNA, 192 bp, Oryza sativa
  Clone ID: uC-osflcyp051c11b1
tatttgggggaacacctacaccttcttcacccggggggccaatgccagataccccatgttccactggaagcccacctgaggcgtcagctgcttgatggaccacaaggccacactcgtcagcggttagaaccatcagccctcgccatctatgacctctacgactccattcgccgccagctatcttcccaattg

SEQ ID NO: 7159 - DNA, 336 bp, Oryza sativa
  Clone ID: uC-osflcyp051d01b1
ctcatcattagcaaccaattcgcaccgatcgatcgagcgagcgatccagcaactagatcaacagtactagctaggaagcatggcccgtgcacagttggtgttggtcgccctggtggcagctctgctcctcgccgccccgcacgccgtcgtggccatcacctgcggccaggtcaacttcgtcgtcgggccctgcctgacctacgcccgcgggggcgccgggccgaaggcggtctgttgcattggcgtgaggagccttaaggcggcagtatgtacaaccttagattggcgtaccggctgctactgtcttatgaacgcggcccgtggtattaaggggtt

SEQ ID NO: 7160 - DNA, 187 bp, Oryza sativa
  Clone ID: uC-osflcyp051d06b1
tgaatctgttgtggtttacacaaggagggctcacaggaagtatgctttcgagtcatatatttgccaaagaatgtttggtggtttccaagaagagagcttctctgtgaaggctgttaacattactgtttccaatgagggtttcttccattcagttcctggcagtacgagccctggatccttcggatgt

SEQ ID NO: 7161 - DNA, 216 bp, Oryza sativa
  Clone ID: uC-osflcyp051d07b1
ttgctgcctcctcctctcgtcttctccttcgggggggggagctacttaacttattcaaccatgggtaaggagaagacgcacatcaacattgtggtcattgggcacgtccactccggaaagttgaccaccacgggccatctgatctacaaggtcggaggcatcggccagggtgtgtccgacaggggccccagggtgacctacgcccacagctagagc

SEQ ID NO: 7162 - DNA, 225 bp, Oryza sativa
  Clone ID: uC-osflcyp051e09b1
tcgtgctagagcggcaagcttgcatgcactacatagggggaggaccattacaccaagtgaggcgggtgtacatgctccgaagcatggaccgtgcacagatggagttggccgccctggaggcagctctgctcctcgccgccccgtacgccgccgtggccatcacctgcggtcaggttaactccgccgtcgggccctgcctgacctacgcccgcggcggcgccaggc

SEQ ID NO: 7163 - DNA, 202 bp, Oryza sativa
  Clone ID: uC-osflcyp051f03b1
ctgttccatacctgctgcaacgcttttagcactcgagggggatattgtggaggctcctgcctctgctgacgtacataataacatctctccacgaatacgtccaccaaacccaatgcttccattaccaaaagcaactcttatcagcttatcaataactgttaagatggaggaatttaatcacttccacggtctatttgaccca

SEQ ID NO: 7164 - DNA, 243 bp, Oryza sativa
  Clone ID: uC-osflcyp051f05b1
gaactatttattctccggtgcgctcccatccgccgggggggcactatagagcttcaaggcggagaacaaccagttctccggagcactaccggatgacatgtcgaggctcgccaacctcaccgagctgatcctcgctggcaaccggctatccggctcgatttcgtcgcctatcacatcattgactatgccgaccccactcaaccttagtagaaacccgatttccgccgagaacctctccttcct

SEQ ID NO: 7165 - DNA, 246 bp, Oryza sativa
  Clone ID: uC-osflcyp051f10b1
tcttctcctcctcctctcttccatcgccgctgctgggttccttcccctctcccacgagagatggcgtctcacattgttgggtacccccgcatgggccccaagagggagctcaagtttgccctggagtctttctgggatgggaagagcagcgctgaggatttggagaaggttgctaccgacctcagggccagcatctggaagcaaatggctgacgctgggatcaagtacatcctcagcaacatcttc

SEQ ID NO: 7166 - DNA, 243 bp, Oryza sativa
  Clone ID: uC-osflcyp051g04b1
cttatgatgaaaaattcttcccaacaaatgcagcaggttgctggagaagagaaaaacgagctgctgtattacttgagatcgctgtcacctgagaaggttgttgaactctcggagtcttcctgccctggtgtggaagaagctgtttactccgcggtacatgggctgctagcaactctctcccccaaaatgcatacgaatcgctctccgacctcagagaacatggcgggtggagctgtatatttt

SEQ ID NO: 7167 - DNA, 101 bp, Oryza sativa
  Clone ID: uC-osflcyp051g07b1
taaatgtatcatgatggacgcccttcttatcgggggggtaatgctgatgagagtgcggcgggcactggcacggccggagaaatcatgcggcacgaccccca

SEQ ID NO: 7168 - DNA, 115 bp, Oryza sativa
  Clone ID: uC-osflcyp051g10b1
taataatctagtctttcgacgagctctccctgctctgattactgctgatattgatcttggatctcaatttccaaccaagaacacacagacagagaatggaaggagaagaagattt

SEQ ID NO: 7169 - DNA, 178 bp, Oryza sativa
  Clone ID: uC-osflcyp051h01b1
ctcatcctcgccgcccacttcgagggctttggctgggacgacctccactccgcccacgccgacgcggcctcggcagacgacgaagacgacgaggggctcgacgtcgagctcccgcccgcggccgcatttccctctccacttaaactcctttcccttccggtaacaccaccaacaccac

SEQ ID NO: 7170 - DNA, 197 bp, Oryza sativa
  Clone ID: uC-osflcyp051h05b1
agcatattctgttcctgatgctgaacatggtgtcaggggttgggttcatactgacattcaagccatttttcgccttgccggatatgcgatgatgtgtagttaggtaacaaaaaggccagaatttatcagacttcagcctggatcctaacctgcaagaggaatatatgtactgtaccgtgtgtaatgtttagttgtgt

SEQ ID NO: 7171 - DNA, 235 bp, Oryza sativa
  Clone ID: uC-osflcyp052a04b1
agcaaacaagggattggttcgtcgttggggggttacttagagccagcggactgtacctagcatttctggatgattggacagatgcgaccccctattggcgctggttactgaagccatctgtgttaccgggaccggtgatgacgattggccggcgagcttctcatattgctgttcctcgtgcggggttgaccgtatcaactaaggggtgggagggaacaaatcgagggctaacttg

SEQ ID NO: 7172 - DNA, 191 bp, Oryza sativa
  Clone ID: uC-osflcyp052a06b1
accacctcgaaggtcttgagctccatctccggcgacggcggcgacgacgacgacgacggcgaggaggagctagtagctagctgagccagacagcatggggttcgcggtggtgaggacgaaccgggagttcgtgcggccgagcgcggcgacgccgacgtcgtccggcgagctgctggagctgtccatcatcg

SEQ ID NO: 7173 - DNA, 301 bp, Oryza sativa
  Clone ID: uC-osflcyp052b05b1
gccgctggtcctttgcctgcagttgcgtgcagcagtgggcggaaggttaacgccggcgatccatcctcgtcgtgggcgtctctgcacgaggacttggtgagcctaatcggatagcgagtggcagccggcgacttccgcgactacatccgcttccgggccgtgtgtgcccagtggcgctccggcaccatctgcccgcgccgccgtggcatactcgacccgagcttacacccgtgcgggtggatgctgctgcccgagggcacgtggcctacacccgggccacggcaagctacgtggtcacgtc

SEQ ID NO: 7174 - DNA, 336 bp, Oryza sativa
  Clone ID: uC-osflcyp052b06b1
ttttgggtttttttttattttttttgcgggtttttttttaattttttttttttttttttgaggggcaaattaaggcgatttttcgcccttttccataggggcctggccaattttggattttaaaaaaaacggggttttttttgaccggccctgggccctcaaattttttcaggggccccctaaccccagtttttttgttttccatggggggagcccttaataatacgagcccggtttttttcgccgattttaaagcccaatctttcccaggggggggggacccaaaattttccccctttttaaacaaaattaaaagggtgcctgttttggccccag

SEQ ID NO: 7175 - DNA, 393 bp, Oryza sativa
  Clone ID: uC-osflcyp052c02b1
cgtccgagtctgacatgcctcacagtgacctgtactgaaccgtccccgtcaccgataaggattgctgaatgctacctggccatatttcccttcagttttttttttccatcttgggatgttgagcatgggggccaatgcccatgatccttgggacttctaagagttatccgctggttggttcgtgggcccgaaggacaccgtgtgcatctaccatggttcatgcatcatgcatagctgcccctggaccagtgtggatcccatgccaggaaggatggctggggaggcagcatttacatcacctggcattccctgcgcgattggcccattcgtgtttaattctgctgtgtgggggttgtaggagccatggcattctttgtccagggctcacttttg

SEQ ID NO: 7176 - DNA, 498 bp, Oryza sativa
  Clone ID: uC-osflcyp052c05b1
gcagatgtttctcctcgggggcgtgggcgcgatcctcgtcgtcgtggtcgtcgtcggcgtggtcgccaccgtcacccgctccggcaacaaggccggggacaacttcaccgtcccgggggaggccaacctcgccacctccggcaagtccgtcgagtccctgtgcgcgcccacgctgtacaaggagtcgtgcgagaagacgctcaccacggccaccagtggcaccgagaaccccaaggaggtgttctctaccgtcgccaagtcggcgctcgagtcgatcaagtcggcggtggagaagtcgaaggcgatcggcgaagccaagacgagcgacagcatgacggagagcgcgcgcgaggactgcaaggcccttctggaggactccgtggacgacctcaggggcatggtcgagatggccggggcgactcaaggtgctgttcagccgctccgacgacctcgagcactggcttcaccgcgtcatgacattcatggacacctgcgccg

SEQ ID NO: 7177 - DNA, 433 bp, Oryza sativa
  Clone ID: uC-osflcyp052c08b1
tcttttcttcactagctacttctccaagttgaagagatcaatgctagaatgggcagctgcaagattctcctggtcacagctctcctggtcggcattgcctcccagcagagctctgccaccaggaacctgcacggagatcatcacgtcgcggaaaagaagttcggcggcggcggcggcggctacggtggcggtggcggtggagggtacggtggcggtggcggcggcggcggctactcaccgtcgcccacgaccggtttcaccgggagctgcgatttctggaagagccacccggagaagataatatcgtgcatcgggtcgctggggagcatcgcggggtcgttcggggacgtgtgcagcggcttcttcgggagcaagctgcagacgctgcaggacgcgctgtgccagcacccgaaggactgctacggcgacctgc

SEQ ID NO: 7178 - DNA, 441 bp, Oryza sativa
  Clone ID: uC-osflcyp052c09b1
gttcattggagcaattatggttagcccagaaatatcagatgttattcattctcagagcaataagctcggttcatttgctcatggatttacatactctggccatccagttgcatgtgctgtcgccatagaagccctgaaaatttatcaggaaaggaacattcctgatcatgtgaagcaaatttctccaaggttccaggagggagtcaaggcctttgcaggaagtccgattgttggagagatacgtggtgtagggttgatacttggaactgaattcgcagacaacaaatcgccaaatgatccattccctgctgaatggggcgtcggcgcgatctttggagcggagtgccagaagcgcggcatgctggttagagttgctggagacaacatcatgatgtcaccaccattgataatgacccctgatgaagtcgaggagctggtgag

SEQ ID NO: 7179 - DNA, 457 bp, Oryza sativa
  Clone ID: uC-osflcyp052c10b1
cattagcaacatcttccaacattgaaagatccctgtccagttcattagcaatggccaaagccgtcgccctactccttgcagccatcgcggcatcggccgtgttagtgcaagtggaatgcgacgcccccgtcgagaagagcttcaacaaggccctcctcgcccctgtcgataagcgcttggatgaggcagctcaggccatcaacgaggccgccgactccgttgtggctgctgccccaccagcaaaaaaggatgaagttgaagctgccacgtggaagcggagaatcttcgccataactgctctcgggatggcccaaggagatgagaagaaagttgctgcaacttcacttgcctacaagaaagcagctaaagctgtcctcgatgcccccccaactgacaagtttaagttgatggatgaatccttcaagtggctgttatgcaggtaatcgcatcatgagcc

SEQ ID NO: 7180 - DNA, 389 bp, Oryza sativa
  Clone ID: uC-osflcyp052c12b1
ccgtgacctctctctctgtgtctccgccgccggcgcctccttcgctcgccgcatccgtcggaggcgagatgggcatcaagggtttgacgaagcttttggcggacaatgcgcccaaggcgatgaaggagcagaagttcgagagctacttcggccggcgcattgccgtcgacgccagcatgagcatctaccagttcctcattgtagttggaaggacggggatggaaaccctcacgaacgaggccggtgaagtcaccagtcatttgcaaggtatgttcaaccggacaataaggttgctggaggcaggaatcaagccagtatatgtttttgacggcaagcctcctgatctgaagaaacaagagcttgcaaaaggtactcgagagggaggatgc

SEQ ID NO: 7181 - DNA, 343 bp, Oryza sativa
  Clone ID: uC-osflcyp052d01b1
ggaccaaccaggccggtgttttatctattgaagtagagcgagtacatggtgggatcctttgagggtgccttgactttaggaagcaaggagggtgtctgactaccgggagaaccacaggctttcaggatactatcatgggaaatattgaaccatgtgaaagcagctcatgtggaagagcagcgatgtaacgcatttgctgaaggcgctagaggaggcctataaggcctacccggaggcattggtctgaatgataactttggacagcttgaggcatgggccgacgactagctggattgcatacacgcccccatgctgccaggagcctgcatgcaactaagctaag

SEQ ID NO: 7182 - DNA, 152 bp, Oryza sativa
  Clone ID: uC-osflcyp052d02b1
tagttttcgagagatcaatacatacatctcatcaatgtggggttgctatttgagagagaggatgaggcagaggaagagaggaggagaagagcacggtcgctagggctgcttgggcctggccggccgccggttgctgctggcctcggcggtgg

SEQ ID NO: 7183 - DNA, 337 bp, Oryza sativa
  Clone ID: uC-osflcyp052d03b1
ccgggccggaaccgccgggacgaaccacgccggcttgtctcgcccctgctaggagacccgcagcggggggctgttttgttacgggtccccccataatccctgcctacccgcgcccagttgcctctatcccacgggagcgcccactcggagaagagctccagaggacgacatataccggaggacggggtggcttagattcgccattaccgtcgttattgcttccaccaagattaccaccccctcctcctcctgtgatcgagcgctcgcatcgaatttcaggctgattcttgattctgccaggaggttgaaatctctcgtggtatgaacctgatttcgg

SEQ ID NO: 7184 - DNA, 475 bp, Oryza sativa
  Clone ID: uC-osflcyp052d05b1
ggcgttaatggcgacgagcgggctgaggagctgcagcgcggtgggcgtgccgagcctgctggcgccgtcgtcgaacaggagccgcctgccggtctgcgcctacgccaccacctccgggcgcgtcaccatgtccgccgagtggatgccgggccagccacgccccgcccacctcgacggctcctctcccggtgacttcgggttcgacccgctgggcctcgccaccgtgccggagaacttcgagcggttcaaggagtcggaggtgtaccactgccggtgggccatgctcgctgtgcctggggtgttggtgccggaggcgctggggctgggcaactgggtgcaggcgcaggagtgggcggcggaacccggcggccaggccacgtacctcgggaacccggtgccatggggcacgctgccgacgatcctggtcattgagttcgtcgccatcgcctttgccgagcaccagcgcaccatggag

SEQ ID NO: 7185 - DNA, 489 bp, Oryza sativa
  Clone ID: uC-osflcyp052d09b1
cgtacgcgtgggttttgtgcgtattttagttgcaaactttattgctccgcgttcttcctttctctgtgtttgtttgtttccagttgccactaaccagccagagccccgggggggagaagagcgagagaggaggagaaatcttgcagcaatccctcgcttagattcgccattaccgccgcttttgttcccaccaagattaccaccccctcctcctcctgtgctcgagcgctcgcatcgcatttcaggctgcttcttgattctgcgaggaggttgaaatctctcgtggtatgatctgatttcgggttgattttcgtcacgcggtggattccttccccccaacactatttcggtgccaacccttttttgtttttttgtttttttttgtggctgttcttggcgtcgcctctactggcttcttgcctgctgcaaattgcaacagctgccattccgtcgtttcggtggagtgcaccccttcatcaccaaggggga

SEQ ID NO: 7186 - DNA, 431 bp, Oryza sativa
  Clone ID: uC-osflcyp052d10b1
gcttatattaccaaccctctgcctcccttccggcgacgttcgacgacgaatgcaagccatcctcgccgctgccatggccgcccagaccctctggttctccgccaccgacccttccgcctcccttttccagttcccttgctctgcccgccctttacactcgctccgcctcgccgccggtcccgcgggcgccgccgctgccagggcgctcgttgtggccgacgccaccaagaaggccgccagcgtgctcaagggcacctcccaggttgagggagtcgtgaccctcacccaggatgaccaaggtcctacaacagtgaatgcacgcgtgacgggacttaatgacggacttcaaggggtccaccctcacgagtttggcgatactacgaacgggtgcatctcaacaggaccacattttacccaaacatttgacgcac

SEQ ID NO: 7187 - DNA, 431 bp, Oryza sativa
  Clone ID: uC-osflcyp052d12b1
gcttggtgaaggcttactccttagcatcttggccaccctcttgactcctttgagatggatattttcgaagtttgcagaaagctattattccattccaatgaagaagtatggcatggtgcctgaccatagcctatttgaagctttgattacatgcttgattgccattacacccaaagaccattacaagagattagaagaaggcagcatcgttctcaagaaatcaaagacatttagcttttgcaatgaaggtgtgcttgttgaaggcgaatcttcgccgataaagagcgatatagtgatctttggaactggattcagagggggacagaagataaggaagatgttcacttctgaatactttcagagcattgcagtaggctctgcatctatcactatacctctctacagggagatcattcaccttaagatcccgc

SEQ ID NO: 7188 - DNA, 486 bp, Oryza sativa
  Clone ID: uC-osflcyp052e06b1
gcgattttcttggtttcactactttaggtgatgttgcagggtcagttgatgatgatattaatgttttgagggtttcataccgcactcactagttttgtgtaatctttgttttttcccgtacttattgtaattgctaatatacgcttttgcttccagtatggaacttattttactcagtcataggtaaaccttgctaataagatggtggctcaatttgtttgatataaaccgtgcatttgttgctctctattaaatttgtataaatgcggcatcccaaaactcagtaccagatgtatgtagaatcgtacatgctttaccctactgacaatttatacattttacttaaagaaataggaatgcacggccaaatggaaatttgtaaacatccttagcccacttatgttatgctatgtctattgtttaaagccttcagattgctatatatgtccattagcctttttaatttctggtgctcatttttgtttg

SEQ ID NO: 7189 - DNA, 61 bp, Oryza sativa
  Clone ID: uC-osflcyp052e07b1
tatataaaaaaaaaaaaaaaaaaaaaaaaaaaaaaaaaaaaaaaaaaaaaaactagatcgg

SEQ ID NO: 7190 - DNA, 376 bp, Oryza sativa
  Clone ID: uC-osflcyp052e08b1
tttttcgagctcatggactcaggtatccatccgggcatcatagcgaacgatgaccttagaaggaaaggctaccagatggttctggagcagaccatgagggctatgaagaccatccagggcagcgattgagaagtactactagcgaaagaccatgaatatactgaccaactagaacgggctagtggaggtgtgcgatttgggacttgagcgagtgtgattcaaggaggccggtttaacaatataccggacggattatattgaaaccaggcgggaccggggaatttagttatgggtgtaagaggaggagagagagactcctgtgaacgatatttggaggattgggtgcatagatgttgaagttatcactgggagacca

SEQ ID NO: 7191 - DNA, 484 bp, Oryza sativa
  Clone ID: uC-osflcyp052e10b1
tttctccgtccgccgcctccgccgtcgcgccgggctccctcatcacggcgagcagcggtgaccggcgtcctgctgcttcaggccgccgcgcacacccgcctctgactccttgcgccgcccaagccaatctccctgtccccctcggcctcgcctcccggagaggtctccttcgcgatcgagttcgcctgccgcctgcgcggctgcgccgatcccgagcaccggtgccggcgccctgctgcttccgcctccgaaatttgaggcttcagatgaatccccaggcccgaagttaggtccgcccctggttagaagatggctgaagcatgtacggtttcacaagataatggtaggcgctgcctccccgcatggatgctgaagccatgctcaaacgatgaaagggtcaaagcttgatatcggagtgagccggtgttggaatccaataaacaaccagctgatttggatcagaacaagccagccaaaggaaaag

SEQ ID NO: 7192 - DNA, 231 bp, Oryza sativa
  Clone ID: uC-osflcyp052f01b1
ccggggggtgccgcgccgtaaccgccgggaccaaccccgccggcttgtatccatggatggggcaagggccccaccgggggggaggttgaagaccaactccgccttcccccaacgccagtagacaagcctgtgccactctctcttcaggacctgaccacgatcgtgcgggaatgggaccgtgcctgaggggcccgtccggactgcacccctcacgcctgggagggcggggac

SEQ ID NO: 7193 - DNA, 413 bp, Oryza sativa
  Clone ID: uC-osflcyp052f02b1
cgctgtatatccctcgccgccggcgctaggctcgcgacggcgacgttgaaggcgccatccgaccccgccgtggccacccacccgcaggcgggcgccgccgcggcggcgtcctccagcagcggcctcaccttcaagctccaccccctcgtcatcgtgaacgtctccgaccaccacacccgcgtgaaggcccaggcggcgtgctccggcgacggggcctcgtctgcggcggcgggggggcagccgccgagggtgttcgggtgcgtgatcggggtgcagcgcgggcggacggtggagatcttcaacagcttcgagctcgtcctcgaccctgtctccgggaccctcgaccgcgcctttcttgagaaaaagcaggagctttttaagaagggtttctccgacttctatgtgctgggttg

SEQ ID NO: 7194 - DNA, 336 bp, Oryza sativa
  Clone ID: uC-osflcyp052f04b1
atgtttcatcaccacagatcgatcgagacagctactgacatcaacgtgaaaaagggaagatgaactaaccatgtccatgcaggagatgctccgcattggagacgacgactgccggagcgatgctggggaacgcgagctcaaggtgaagctgaggtggcgcggggatgcctcatcggccaacggtaccaggcaggagcagcggaggcggtctgagcattgcgatcgtcgacgagggcgaaagggaggcgctggctgattgggttgttgctgtcgaggtcgaggccaaggcctagggggtccgtctcttcgggcgcgaggagcttattcacaaggtct

SEQ ID NO: 7195 - DNA, 479 bp, Oryza sativa
  Clone ID: uC-osflcyp052f06b1
gtggtgccagctttggagctctcgggttttgatccagagcgtttggaattgggaaggattgatcaagaactggggatcctgagttgaatatgatatcaaatccggtgaattggtacagtttcggtcccggatagaatttgtagtgatgccagattggagggtgggcgagtttgaaggtaagctcaaggatggatttgctcggagcaataatagcgaacatgaaaatggagccgggactgtgagtatatccagcaagaagtcgaagcatggggttgccagtgaaaaaaaaccccatgttgacatctctggactgattgattcagattcgcagaaatgtaattcagagcaaatccattcagctaatgggatagtatcccgggatgtcaaccatgatcacatagaaaactgcaaagttgaatcaaatgatttttccttgaatactatctctgaaacaagatatccaacagacaattggaaca

SEQ ID NO: 7196 - DNA, 349 bp, Oryza sativa
  Clone ID: uC-osflcyp052f08b1
ttgttatcatggcatcgggaaatagcgatgggggggaggatttacaaggcgggcccgatgtctgcaaagaagacgacttggcggccaggaactaatccgctgacacgaagcctcgcgacataccaagtttgaagtggtgcaggcgtacagctatatgatttcataggctggggtaaggacacacgagagaaacattgagagcaccaacaataggctagccacctactaccggccggagaatactcctggagcgtacaaattacaggcgcgagggagagacccctcaaatgaaagctggatactgagcaacaggggtgcgcaagctgtagcaaacagacaaacgtcggga

SEQ ID NO: 7197 - DNA, 482 bp, Oryza sativa
  Clone ID: uC-osflcyp052f09b1
tttttcctttctcctccacccccccccccaaacgacttaaccgccgacgacctcatcctcgtcggcgccgtcggattcaccagcgagggaggttgcggcggcggcggagagcgcgagggaggaaagcgggggaggtgaccgccagcgatggggcagcagtcgctgatctacgcgttcgtggcgaggggcacggtggtgctcgccgagtacacggagttcaccggcaacttcaccaccatcgcggcgcagtgcctccagaagctccccgcgagcaacaacaagttcacctacaactgcgacggccacaccttcaactacctcgtcgaggacggattcacatactgtgtagttgctgttgaatcagttgggcgacaaatccccattgctttccttgacagagtcaaggaagatttcaccaaaagatttggtggtgggaaagcagctactgctgcagcaaacagccttaaccgagaattcggatc

SEQ ID NO: 7198 - DNA, 410 bp, Oryza sativa
  Clone ID: uC-osflcyp052f10b1
aacggggggagctgtggccacacctctgcccccacctactactcctctaggggtgcctcccaatcccctgcatggccaagaccaagcagggcaagaaggacgtcgaatcctacaccatcaagggcaccaccaagatcgtccgagtgggggattgcgtgctgatgcgggcgtcggacacggagaaggcgccgtacgtggggagggtggagaggctgcagacggacgggagggggagcgtgcggatgctggtgctggggtactaccggacggaggagaccaagggcgggaggaggcagatccatggcgccaaggagctgttcctatacgaccacttcgacacctagagcgcccacaccagtcagggcaagtgacgtcaccactccttcaagaactacaccaagctcgacaac

SEQ ID NO: 7199 - DNA, 237 bp, Oryza sativa
  Clone ID: uC-osflcyp052g01b1
ggactgaatggccggacccacccacgcgaaatcattgaagaatatgacgaaccgatcgacgaggagatgtatatatggcttgcagagggtcgcctgcaagaaagtagataccaaaccccatgcaggactatggacccactcggataagcacaacatgcagggagggaaccaggggatggacaatgacggtatcaccataactggcgcaagggagaacggcgcacaacaggcccagaa

SEQ ID NO: 7200 - DNA, 387 bp, Oryza sativa
  Clone ID: uC-osflcyp052g07b1
ttcaacccccattcccacgcctcgccctcccctgctccacctcctccggccaggcgaagcacggcggcggcgatggaggaggacttcgcgcgggcggtggaggacggcctcaagctgtccaagcgcctcgtcctccccggcggcgcgccctcgccccgccccgtccccgggatggaccgggggctgctgcccgacgccgccgacgcctcctcgctgctgccgtccgcgcccatggcgtacgccgtcgtcgtcgacccggccgccgtctacagcctcgacgtgcccagctaccagccccacgtttacggtcggctcgacccccccgcgctcatcccgtttcacatgcgcgagggtcgccctctccgtctactgcgcccgcccccggtt

SEQ ID NO: 7201 - DNA, 333 bp, Oryza sativa
  Clone ID: uC-osflcyp052h05b1
cactgtagccgcctccgcctccgcctccgccgatccccattcattcatccggcgagcgagcgagcgaggagggtcgccgtcgctcgccctgctgcttccgccgcatccgttccctacttatattattttgaagagatgggtagatctccaaggggccggaacctcccagctcgtcgacgtggatcatcttcatccactagtgatataccttcctgctgctggaagatgaaaggaacatgcgagcaaaatgatttagcattggtctttgagaaaaaagaatggaaaggagcttcttgcccacgctgtctggagcttccacatgatgctgcactt

SEQ ID NO: 7202 - DNA, 405 bp, Oryza sativa
  Clone ID: uC-osflcyp052h06b1
cattctcttaggctcatatgggctctcagagacgggggtttttgtgaatccccccacggttgcccccaagacctgggggaccacagagagggtgcagtgcaaaggtggcagccgtgagcttgctggagaggtggcactgactgttctatagatgaaggccgctaatgggatgaccatgcgcgtgggagcgcagacagcaccccataccagtttgttggaggaggactctgtgctcaacagctttctttggtggcctcaagtcaggtggcaatgcttatgttattggtgatgcattcaagcccaagaagaagtggcatgcctacctatgccacagaagagcccgagcagcccatggctacactcgagacgtgcatgactgggctggatgctaagaaagctgaggtg

SEQ ID NO: 7203 - DNA, 277 bp, Oryza sativa
  Clone ID: uC-osflcyp052h08b1
ggtcgccctttttttttatggaggagttccgtggggagttttaggagaagaaccccatgaataaatctgtcgctgctgtaggaaaagcagccggtgataggtggaaatccctgaccgaagcggacaaggctccctatgtagccaaggccaacaagctcaaggccgagtacaacaaggccattgctgcctacaacaagggcgagagcactgccaagaaggcacccgccaaggaggaagaggaggacgaccaggaggaatctgacaagcccaagtccga

SEQ ID NO: 7204 - DNA, 474 bp, Oryza sativa
  Clone ID: uC-osflcyp052h12b1
tttgtacattctcaaccctatgctattccaggggggggttcattgcacggaccgattggagctgtcccacctgtgcctcaacctggaaacagaaactttggacctcgaggaaattactggtggccctattggtgggcaccttgctcaccaacagagttctcagcaagctatgggaagcatggggtcagcttttaactttcctggtctggagaatccgagcaggcagccttttggtggaggtccaatgtcccatactggattgatgacacagatgcctgtccaaggttttagctaaacattccgcgaagggtttttcattggtgggatgtctcaagacttttttggagatgattttaagagctcaggatcttatgtggcgtacaacattgctggttttttccacttcagcttttaaggaagctatggggttgctacctttaaggccccaatctggattttctgggaattttttga

SEQ ID NO: 7205 - DNA, 426 bp, Oryza sativa
  Clone ID: uC-osflcyp053a01b1
gctggctctgggttggccgtgccctcctgtcacacctagcgccgggtagaattcatgcttgttcatgctccaccaccatgcacatgaatgcatttgagcagaaacctggagaatgaagctggcctatcatgccgagctgacacacctcgatgaagtcgacgctgctgggtgccgcacaaccgaccggggggattattcggccctttaactctttcctttgccaggatgatatggtgaatcacattctgagggctcctctataggatttgacaggatggggaagaagcccatcgcttaaggcagacaagcaaggccatgatatataggcttgttagtcgtggtacaattgaggagcggatgatgcaacttacaaagaaaaaaatggcattggagcaccttagttgctgggcgtctcacgaaaggcac

SEQ ID NO: 7206 - DNA, 246 bp, Oryza sativa
  Clone ID: uC-osflcyp053a03b1
gatgtagttcgttagcggcgcgcgctcattgtcccctggggtagggtttaattttaatgaccctgaaccacattacacgttacagatggtatcaaatcggcgatcgactaaggaaaattctgacagatacgtgcgccactttgaactggaaaatccatcctcccggaccacttatcaagctggccacccgctagaaattctaccaagtcagagcccatcagctgatgactctctcaccgaacgctc

SEQ ID NO: 7207 - DNA, 197 bp, Oryza sativa
  Clone ID: uC-osflcyp053a10b1
gactagatgagaatcgagagagagaaaaagaataaagagaggaaatgttgtgctactccgtccggcgcctggacaccacccgtgccgacgacgtcgacggccgcattatcagggcgcttttgacagcggaggtgcctgccgaggcggtcacctactccgccttcgtggaggcgttgaagatggtggtcttctatatg

SEQ ID NO: 7208 - DNA, 460 bp, Oryza sativa
  Clone ID: uC-osflcyp053b01b1
ggaaatgtgttgttattgacaaggagaacaatgtccaacaggctggtgagagataccggtcatttgaccctgccaggcaagatcgttttctccagcggtgggttgatgctctctcagatcctcgcattacacatgaactccgcggcatctggatctcctactggtcgcagtgtgatgcgtcccttgggcagaagctggctttacgtctcaacctgaaaccaaacatgtagatcggccaggaggaattcagtgggggtgcttatgttggacagtcaaacatgaactgtaatgtgtcgaccagcctttatcgtgaattataagtgatacggtgacatgtatacttggtgacgcaaggtgcgaaactgtatctggaatcacgaaaacatggctttgctgcgtccttgggaaagatattataaagactgatacaatgggtgctatatgtttgaacttgcctatt

SEQ ID NO: 7209 - DNA, 490 bp, Oryza sativa
  Clone ID: uC-osflcyp053b02b1
atcgcgtttctttcatcctctcgcgcatcctcctccgacggcctgggttgggttttgggggcggttggagatgtcggactccgaggagcaccacttcgagtcgaaggccgacgccggcgcgtccaagacctacccgcagcaggctggtactattcgcaagaacggtcatattgtcatcaagaaccgcccatgcaaggttgttgaggtctccaccttcaagactgggaagcatggacatgcaaaatgccactttgtggccattgacatcttcaatgggaagaagcttgaagatattgtgccctcctcccacaactgtgacgtcccccacgtgaaccgcactgattatcagctgattgacatttctgaagatggatttgtcagccttctgactgaaagtggaggcactaaggatgacctgaggctccctagtgatgaggctctgcttactcagatcaaggatggattcgcccgggggaaggatctgattgtt

SEQ ID NO: 7210 - DNA, 185 bp, Oryza sativa
  Clone ID: uC-osflcyp053b05b1
ttgcctttttcaacctacgcgccgcaccggacgggcgcacgcgggtttgcaacctccccggcggcggatcccctgatctgcgccggtcgactccttcaagccttcgcgacgcgcacggcagagatgtaccgtatcggcgggagccacctgcgctctctcaagagatacagggatagtaggtttgc

SEQ ID NO: 7211 - DNA, 317 bp, Oryza sativa
  Clone ID: uC-osflcyp053b06b1
ttctgatttcattgattgctatcctgctcctcctgctgggttccctatatctctagagaaatggaggacaacctaccagccaatgtccgggagtatcaagaactcgccaaaaaagcggtgccaaagatggcttatgattacatcaatgggggagcagaggatgagcacacactgagggagaatatcgcaacatacacaagaattatattacgatctcgcgttcttgtggatgtgagccagatagacatgtcaacaacttttattaggatacaccatgcgtgcacccataaattggggctccactcgggggcacaaaa

SEQ ID NO: 7212 - DNA, 217 bp, Oryza sativa
  Clone ID: uC-osflcyp053b10b1
tttaatattgaacggtggaacgcggacttacacacaagttaggggcatgagatggcaccatgcatggagagcgcctcgcccacggaacttacactggcactgtttgcgaaaagcggcagcccttgtccgacacttcatgcgcggagggcgtgcgacagaagtcatctaatcgactacagcaacaggggtgggattgacagatttctccgcttggcat

SEQ ID NO: 7213 - DNA, 209 bp, Oryza sativa
  Clone ID: uC-osflcyp053c04b1
gtggaattaaaataagagatggataaaccccacataaggggagatggtcgaatacaacctggaccgccggtcgccaacaccacgcgctctcatatcccaggcgctgtccaaccgactaagagcctacaaggccaaataggaaaccaagctccgaattctgacagcggtactggcttaggtaatcaccataacgtgatcgacctataggt

SEQ ID NO: 7214 - DNA, 350 bp, Oryza sativa
  Clone ID: uC-osflcyp053c05b1
gcctaatttgattttgacaaataatacaaccattaaagaggctggggtggattaaaattatgatcgcggattaaaacaaccacctacgtggctttctttttctacgatattgtcatactgcgtaccctttatgaaagattactgtacattgctcttctgtacagggctgttttatagagcaatgctattgcgctgcgatggctctggttgaacgtctacagctgtttatgaggtgattacctttcgctaaatagccgcgatagtcatatcctgggcataccaaaacttgacgttggtttcctagtgtttgccaattcctatcgattagctgtgggccaaacccgttctat

SEQ ID NO: 7215 - DNA, 311 bp, Oryza sativa
  Clone ID: uC-osflcyp053c06b1
cggaactacccgttgagctcaagcatataaataaacccgggccagggggaggtggaagacgaagatgaggaacaagctgggcacccgcttccccgcggcgcggatcaaaaggatcatgcatgctgatgaggacgttggcaagattgcactagctgtccctgtattagtatcgaggggcctggcattgttttcgcaagatgtaattgaccgaacttacgaaattacactgcaaagtggtgcaaagacatggaactccttccaccctaaagcaaggtgcgaggaggtgcacggacttatgacttcctaactga

SEQ ID NO: 7216 - DNA, 188 bp, Oryza sativa
  Clone ID: uC-osflcyp053c08b1
gtaaatttttgttgaaaactgcacaaacaccaggggaggggttaaatttaaaagcggtgtcggttcccagacgacctcaccagctagaggaattcactctcgttgaagcatccatcgatacttcacacaggcagacatgaaatacgagtctatatctgtaacccagcactgcttaaatcatcaccctc

SEQ ID NO: 7217 - DNA, 392 bp, Oryza sativa
  Clone ID: uC-osflcyp053d03b1
gtctactttaccctttctctcgccgtcgcagatccgatccgggaagatttcgtcgccgccgctgccatggcgctctccgtggagaagacctcgtcggggagggagtacaaggtgaaggacctctcccaggcggacttcggccgcctcgagatcgagctcgccgaggtcgagatgccggggctcatggcgtgccgcgcctagttcggcccctcccagccgctcaagggcgcccggatctccgggtccctccacatgaccatccagaccgccgtcctcatcgagaccctcaccgcccttggcgccgaggtccgctggtgcttctgctacatcttctccacgcaggaccacgccgccgccgccatcgccagggacttctccgccgtgttcgcctg

SEQ ID NO: 7218 - DNA, 104 bp, Oryza sativa
  Clone ID: uC-osflcyp053d04b1
gacaaatttaatttttacatgcaacaaccccacatacggggagattttaaaaacctctgtgggttgcctcacgccctctccaagtgtacacctaacaattacat

SEQ ID NO: 7219 - DNA, 140 bp, Oryza sativa
  Clone ID: uC-osflcyp053d05b1
ctcgaatttagttttcaaatagaaatatgccacatacggggacattttggattcttataacgatggcattgcgctgtcaccatgtggtgcactggccattatgccaaggcctggatgtctgggactacattggcatgaat

SEQ ID NO: 7220 - DNA, 268 bp, Oryza sativa
  Clone ID: uC-osflcyp053d11b1
gttggttttagcaccggcgaaatacacgcagcgggagagggtagatttataaattgcctctcccctcgctaagggcagcttattccgaaggtcctaagactcgtaggagcgagaacattatttttaccaaacgcctgggcgtattccgtaccgaggaggatgcccagccaacctatcccagcatggacctccgctcacttattattaagaggtagctaacgaagatcaaggagaatgagacctgacttccgccacctcaaggggacca

SEQ ID NO: 7221 - DNA, 423 bp, Oryza sativa
  Clone ID: uC-osflcyp053e01b1
gtatgcttctgttgtcattgtgatcggtgtagttttgatgctctgttggtttaagaacaagatatggtaactgcactaaactaaggaagctgggcctgcattaccacactggtgcaagaaaaaccgaaaatttaggtagattctggatcaagagatatcaagagatgctttggtgacttgtatcccgtatctgcccattcaagcgactacttcagctgcctttcaccctcctcccgacaagctattcaagccaattcgttgtagcatacagtagaccttataacggaactcggacttgattttgtgaacccttggaaccgtatatacaagagctctgtagagttgaatttttttatattgggatgatattgcattttattttgcaaactcatgtaagaattcaggctgaatatcctatattac

SEQ ID NO: 7222 - DNA, 294 bp, Oryza sativa
  Clone ID: uC-osflcyp053e02b1
cttgaagtttctttctattcctctcctcctcctccgcctcctccgggggcgttttaagcgacagtagcggctcccggccatgggttgcggaggcaccaacgaggacgtggccaccggtaacaccaccgcccccgccgacactctcagcagctatgcttttacggatgaagtccaaccgtatccgccagccatccgttcttcctccatgtcgtcttccaatggatgcacctacgtctccgtcaaggacgtctcgacaaagaatgatgaggagaccgaggccgtccccgtcctgga

SEQ ID NO: 7223 - DNA, 210 bp, Oryza sativa
  Clone ID: uC-osflcyp053e04b1
aagatgtctaattttaacaacctcgcctagcggaagaagcagcacgagttcgacctccaaagggaaaaggaggcgaaggagaaactggccaagaagctgtatgccaagacatccatgatgaagatagatggcgatgtgaaaaggaagggtggcaaatttaatgttggtaagattattgtccatactcaattttttgctttatacacaagc

SEQ ID NO: 7224 - DNA, 121 bp, Oryza sativa
  Clone ID: uC-osflcyp053e07b1
ttctcactctgtctccacccccgcgtcggtcgctacgggggtactgtaggagagcaaaggcggtggatgctgacacagacaaatcaaaagcatgccacaccacatcaagaagccactgact

SEQ ID NO: 7225 - DNA, 224 bp, Oryza sativa
  Clone ID: uC-osflcyp053f01b1
gatagtttcagtttgtcgctcgacaagacacaaggagaaactagggcatgcttaaaacgcgccttgctttttggaagagagcaacgatgcacccatcattgcagccatcacatgaaatacttacatcagtgatgtaacgaacaggcaacccaccttacctaattacatcaacacatacacccattgctacatctacaagatcgaacacatgcataaacgcaggg

SEQ ID NO: 7226 - DNA, 292 bp, Oryza sativa
  Clone ID: uC-osflcyp053f06b1
attatagtttgacgtcgccgccgatcacccgcgccttcgacgagctgggggcctttgacctcgccggatctccccgatggccgagaccttcaccgacctccacaccgccgacgggctcaaagccctcgagcagcacctgtccggcaagacctacgtctccggaaacgcgatcagcaaggacgacatcaaggtgtctgccgccgtgccatcaaagcctggagctgagttcccgaacgctgcttgctggtatgataccgacgctgcggccctagcttcaaggctccctggcaag

SEQ ID NO: 7227 - DNA, 551 bp, Oryza sativa
  Clone ID: uC-osflcyp053f09b1
ctcgccttctccgccgccgagcgcctggagcagggtcagccatggccgtaggtaagaacaagcgcatctccaaggggaagaagggatccaagaagaagaccgtcgatccctttgctaagaaggactggtatgatatcaaggccccgtcggtgttcaatgtgcggaacatcggcaagaccctcgtgtccaggacacagggtacaaagattgcttctgagggcctaaagcatagagtgtttgaggtctccttagctgatctccagaacgatgaggatcaggcgtacaggaagatcagacttcgtgctgaggatgtgcaagggaagaacgtgctcaccaacttttggggcattgcgtttactaccgataagctcagatcacttgttaagaagtggcagacactgattgaggctcatgtggatgtcaaaccaccaaccgcttcatgctgcgtctgttctgtatcggcttcaccaagcggcggccctaaccgggtgatgaggactttgtatgctcaagcaagtaagtccaaacagattcctcgcaagatggttgaa

SEQ ID NO: 7228 - DNA, 305 bp, Oryza sativa
  Clone ID: uC-osflcyp053f11b1
ttcgactttcccaagcttgaacccgttccgagaggacccgggcgattttggaaacctaagccactgccaccttgcgcgccgcgagcaccagcgccctggaacccgtgcgggcgaccccgttctcggggatatcctcttgctgatgctgagggcggctcgggagcgcatagccacgcaagacagctgccctggctgactgggacaaaagcgaagccgatcaaggaggagaggatgggccgcaaccaataccgaagactgaggacgagctcgtccaaccccacggcggtaatcggagaactaaggag

SEQ ID NO: 7229 - DNA, 361 bp, Oryza sativa
  Clone ID: uC-osflcyp053f12b1
tttgtttttagtttctacgcgcgcgacctgttcaacgaaacgcctgtgcgcgcgtgctacgacgacatggaggggtagactagcaagaggaggggggtcacggccccagcgcacactgacgactgggactggttcagcgacgacccggacgacgtcatcctcaacatcatgtctttcctgaccacgcgccaggctgtgcagacgtgcgtgctgtcgtggcggtggctcaacatctggcgctccgtgccctgcatcaacgccgacgtaggctaagtccagcggagcgacactgagtgggaagagtatgatcaagagagggagtcggcattcaagatgttcatggatagggggctagagcttc

SEQ ID NO: 7230 - DNA, 172 bp, Oryza sativa
  Clone ID: uC-osflcyp053g05b1
agacagtttagcttgctcggagctgagagagatccttcggtctcgatttaatttacggagaccattacataagcaatggaagctctactctccggcgctgatgaatctgcaagagccaatggccgttgcggaactattagggatgctgatgattatcttgtaagtcctcaga

SEQ ID NO: 7231 - DNA, 197 bp, Oryza sativa
  Clone ID: uC-osflcyp053g06b1
gaattatccaaaggttttactcaacacaaagaagtggggcatgtttaagaagccagtcctgggtggcaaccgcttatgtaagagacattggcctcggctttaagacccccagtgaagcaaccgaagggacatacattgaccactaagtgcccattcactggaactgcttctatcaataggcagaatcttcgcttgaa

SEQ ID NO: 7232 - DNA, 408 bp, Oryza sativa
  Clone ID: uC-osflcyp053g10b1
tccgactctggcgctgaccatcgcaccgacagggacgcctttgactggatacagctcgtccaccggtaagggaggagagacggcggcccgagccacggtacacagcaacagtggtgggtgaggcttgcatcaccgtgcttgcttggagaactccacctcagaagcccaggggcggtcatgaccgattgagaaggctcctgcacacggaggaaccagagcaagggaatgcttgcagtacacttggagcagggtgactgtattattgatggaggaaatgagtggtaccagaacactgagaggagggtgaaggcaatggaggagcgtggtctcctctatcttgggaagggtgttttcggaggaagaggagggtgccctctatggtccgcccttgatacctgttggttcatt

SEQ ID NO: 7233 - DNA, 211 bp, Oryza sativa
  Clone ID: uC-osflcyp053g11b1
ctgcgcttttgacgagctccgatccgacggccacggggacggtcgactgttaagagcacctcctgccgcgacagaagggacggcgcgctcggtagaaatggatcactttcacacgtgggggtgagcttgctaggcgaaacctccctcacaggataaatttaaagcccgagggtctcctggaccgtttataagtgttttactactttaatag

SEQ ID NO: 7234 - DNA, 306 bp, Oryza sativa
  Clone ID: uC-osflcyp053h02b1
gggaattacatcatttgattttaagatttaatagcttaggtagcatttgggctcactaaagggcttcctttttcttatctttcagacttccactatgaattatttaacacgcataaaagaacttcccttgcatgatttttttattatgaaatcaatatttatattgacaaacctgcttagcttcagttggacaatgataagctgcagtaaggctctttctcattgaaggacattggtggattctgcactgctgttctattacttaacttcagtagataatatttctgcccatttgcttgacataac

SEQ ID NO: 7235 - DNA, 481 bp, Oryza sativa
  Clone ID: uC-osflcyp053h08b1
ggggcatttgagtttggcattcctcctgaaaacatcatggcgaagctacttttttgaggaacatctggagagtatgctggattcgatcccactgaacccactacacgaagtgggggtgaagcactagcagcccatcaaattatacagggtagatttagttcatgaccattcggtatggcatttatcacttgttgccagattatttatcttctgcatctgttcagaaccatggatataagacacttgttatgattggagatggtgcaactgatcttgaggtatggaactgaaatgctcctggatattatatacgatgtaaatatgattctttggcaagagaccaactaccgggtgcagcaaagatgtaagcggataactgctttatttgttatattgctgagatattgcactccctttgggcagtgtgggtaataagttgcatgagagttagcatctaccaaaaagaaatgcgttacaaata

SEQ ID NO: 7236 - DNA, 485 bp, Oryza sativa
  Clone ID: uC-osflcyp053h11b1
gtagaatatactttctccttccttgtgcgtgagcgtgagtgacaatttgatgaaccgcgggttggcgcagcggcgaacctgctgttcctggagagccccgtgggcgtgggcttatcgtacgcggcggtgaagccgcaggaggtgtacagcaccataggggacaacatgacggggcacgactcgcacaccttgctgctccggtggctcgaccggttcccggaatacaagacccgggacctcttcatcgtcggcgagagctacgccggccactacgtcccggagctcggcgtcaccatcctcgacaacaacttgctcccgcacgcgacccccatcaagctaaaaggaatcgccatcgggaacggcatactggagttcgcggctgagcaaacgcagcttgaccagtacctgtggcagcacgcgttcatattggactcggcgcacgcgctcatcacgcagagctgcaagtaccccgacgaccacccgtc

SEQ ID NO: 7237 - DNA, 254 bp, Oryza sativa
  Clone ID: uC-osflcyp053h12b1
ttgctgcggagttagagtctcggacgcagcgacggcctctacctgcagactcgcgacttggggctgctgaggaagaagattctttcgagttgtgagtttcgacgccatgccctagccggagcaacaagcaagtcagacaggcaagtttaattttcttcttttcttcttctaaacttactattgttccttttgctcctttcaaatgtcaggcaatgaggatagacagaggattagatagatggaagatcataact

SEQ ID NO: 7238 - DNA, 475 bp, Oryza sativa
  Clone ID: uC-osflcyp061a01b1
tcggttacgagtgggagcggaagctccgcgacgtcaagatccgcaaggaggacatgaaccgcctcgtcatgaacttcctcgtcaccgagggcttcgtcgacgctgcggacaagttccgcgtcgagtccggcacccaaccggatattgacctggccaccatcacggatcggatggaggtgaagagagcggtgcaatcagggaatgttcaggaggccatcgagaagattaacgatcttaatcccacgattctggacacaaatccccaactgtactttcatctgcaacaacagaagctaatagaattgattcgtgcgggaaaaataaatgaagctttggagtttgcacaagaagaactcgctccaagaggcgaagaaaatcaagtctttcttgaagaaatagagaaaactgtagcacttttgggttttgaagatataaagaactgtccatatggggaactattggatggttcccaacg

SEQ ID NO: 7239 - DNA, 428 bp, Oryza sativa
  Clone ID: uC-osflcyp061a02b1
tcgttaaaaaaaaaaaaaaaaaaaaaaaaaaaaaaaaaaaaaaaaaaaaaaaaaaaaaaaaaaaaaaaaaaaaaaaaaaaaaaaaaaaaaaaaaaaaaaaaaaaaaaaaaaaaaataaaaaaaaaggggggggccgttttaggggacccaattttccgtccgggggaatgcaacttattatttttttttttgggtaccttaatttaatttctttggccggtgtttaaaaactttgggattggaaaaaccttgggtttcccaaattaattggctttgaaaaaaatccctttttcccaagttggggaaatagaaaaagggcccgaactgttcgcttttcaaaaaatttgcccatcctaaatggcaatgggaaccccccttttacgggcctattaagcgcggggggtggggggtttcccccaagggggacc

SEQ ID NO: 7240 - DNA, 514 bp, Oryza sativa
  Clone ID: uC-osflcyp061a03b1
tctttcacaccaccagctttgctcccgctagttcccgctgatcgatcttttttcgggagggcgttgcttgctcggatcggcggccatggctgagcccgctggggaggcggccccgcaggcggacggcgtctcggaggaggtggcggcgaggccgagggggtttaggcttcttggggaggacaagtccgtgcaccaggctctcggcggtggtaaagctgctgatgtacttttgtggaaagacaagaagatctctgctgcagtgataggtggcgcaactgtgttgtgggttctctttgaagttgttgattaccatttcctcactctgatatctcatgtcctgatcggagtactggccatcttgttcttatggtccaaggcaaccatcttcatcaagaagagtccacctaatattccagaagtgaagatatctgaagatcttgctgtgaatgttgcactagcactgcgcactgacattaaccaagcacttcacttgcttcgggagatttctctaggg

SEQ ID NO: 7241 - DNA, 515 bp, Oryza sativa
  Clone ID: uC-osflcyp061a07b1
gtggtttcttctctgggcaatgtcagttacgcatctttggttaggtatcaataagttacattgaaactgcggcaaccactatgaagagacaggacgatctcaagcactactacttcacttgcacatgtccccgttgtgttaaggtttttgatttcattgcttactattcttggatgtcctatgggaagctgacacattcttgataatgaagtgttctctagctataattttttccccaaccttacaggattctgaggaagatgcgctccttgagggatacagatgcaatgaccaaaagtgtgatggatttcttctgcctaatgcaggaaacaaaggttatacatgccagaaatgtagcacttctagagatggggaagagttacaaaagatggctagcgatgtactactattatctgacaaagtctcttccttagtttcatctggaatagataacagtgaggtaggttctatgtacaagaccattgaagagctagagcggaagctttaccatcctt

SEQ ID NO: 7242 - DNA, 477 bp, Oryza sativa
  Clone ID: uC-osflcyp061a10b1
ccgccctcgccgacctcgtcgccggccgccgcatcaccaccgacacctccccccatcgccgcctgtgagagttgggtggtggagcgagcgtggccgacaggggacgcggaggggcggcggcggcggcgattgttcgcgggatgagcagcttccgcggtaccatcttcgtcgactcctgtggtgggaagaggctcgagtactggcggacgcatgtcgtgaggcccaagggcgcgcacaaggccaccatcgtctggttccacggcctctgggacaacggagccagctggtctcaactactggaaacccttcccctttccaatataaaatggatttgccccaccgggcctacaaggccagtggcagtttttggtgggttcccatcaactgcatggtttgatgttgctgatctttcataagacgcttctgatgatgttgaggggctggatgcctcacctgcacatgttgcaaacttattat

SEQ ID NO: 7243 - DNA, 504 bp, Oryza sativa
  Clone ID: uC-osflcyp061b01b1
tgcgccggctggtgccgccccggcattcccggcgcgacccacgacgccgctgctcctatctactcactaatgttgcacaagctgccataactgacgttgttgcgggcgagatccaaggggggagggttatctgccatggcgaacgataccagaccactaccacaccctgggggtgagatgcagaccctctctgcctcgccgtagatcaatgaacgtgctatgacactgacggcgaatcacctacttgccagacgatgaatgctgagaacccagatgcgaagataaatatgaggtgctacgagaggcgtacctaggtttaagcgatccttcacaaaggcaggctaatgataagcatggaacgtgaagggcttgctgaagattaacataatggatcctgatactggctttggaaagcaatttggaagtgactattatgactatgatgttggacagcgagaactggcatacatagcctgaggggaagtctaggaaaacttatgctgt

SEQ ID NO: 7244 - DNA, 458 bp, Oryza sativa
  Clone ID: uC-osflcyp061b02b1
ttcttggtacatccttaaagttgacgtttgaggggacaaatcagttggtatatccagagacttggttctttgtgcttatagtggccacttgtgtgctaacacagatgaattacttgaacaaggtctgtttgttaatgcccttagggcactgataccataggtttgtgatatttatatgttctttgtcaaagtactccagctagtcagggattgattaataaagcgccaaatttgaatataaagaattattgctatatcatatactatgtcaaaagcagtattatgtcactcttatcaacaactgaacaatagaatgcttttcacaaatttgtggagatatgttttgttggtatcatgtaaacctatttagattagtcttacttcaccattccattctagctactggttctattggtgttatcaattctatgacttctgctttgcattatctggataac

SEQ ID NO: 7245 - DNA, 499 bp, Oryza sativa
  unsure (1)..(499): unsure at all n locations
  Clone ID: uC-osflcyp061b10b1
tcaacacctagattcccttccctggtggttgatcgatcgatgcgcccagcccacatggccgcgtgccgatcgccatcatgacattgccatggcggtgatcgccgccgccggaggggagggggacgcgggcgtcatcgcgcatgtggtggtcgacgtcgacnagagttgtgcggcggcggcggatgatgatgatcgcagccggcgcccgagcacgggctgcaggatttgccacctcggcggcggcggcgacggcgagatggcggcggagagcgggagcgggcggctggtgaggctcgggtgcggctgccgcggcgagctggcggcggcgcaccggcgttgcgccgaggcgtggttctccgtcaggggcaacaggcgctgcgagatctgcggcgagacggcggagaacatcaccggctggggcggcggaggcaaggagttcatgaagcggtggcacgcgacggcgggcgtcgacgtcgaaggctcctccaaggcatgcagc

SEQ ID NO: 7246 - DNA, 439 bp, Oryza sativa
  Clone ID: uC-osflcyp061b11b1
gacgggcgcaaggccagtccatggcgatggctagggtgcgtgcacggcggtgcggatgccgtgatcacatcacatgatggcggcgatttgccaaatcggcaagtcatcaatccgattcgcttagggatttgccaaggttctaattttggggatttttttgatttagggtttctgaaatcatgccaagtgtggtatttttgtatgttgtatattgaagttctcatggtgtaaccagggttgcatttaccgcggtaaaccgcgcggttaccgcgcttaccgcgggggtacggtaaggggtaaaccgcggtaaccgcgtcaaattcaaataaatttgaaaaataatttgaatttttgataaattttgtacggtttgtcgcggtttgtcacggttaccgcggttaccgtgcggtaaccgtgctagtgtagcgagatgtgagag

SEQ ID NO: 7247 - DNA, 521 bp, Oryza sativa
  Clone ID: uC-osflcyp061c03b1
taaggaatcagaacacatatcctcatctcatgggtctgcagacacctacttctccgttgggaccaccatcaatttactcggctagtggaatgtatggatacaatgggagttcatatgggtccggcctatggtatggatcacacctgtatggttctggattgtacgggggatggaatgcactgtcggatggcaaatacaatcccagaggaagaggtaatggatcctatggttatatccatggaaatcaggatgggtttaatgagctaagaagagggccaagaagtggtcttttcaataaccaacagggagttggagctactgttgcacctgtgaagggacaagagctttcagccagcgatagctcgctttctgtcatgaaggatcagtataaccgggctgattttgtggaaacatactcagatgctaaattcttcatcatcaaatcatacagtgaggatgatgttcacaagagcattaagtacaatgtttgggctagcacatccaatggtaataaaaagctt

SEQ ID NO: 7248 - DNA, 423 bp, Oryza sativa
  Clone ID: uC-osflcyp061c04b1
gaaggaggaggatgtccggctgggagccaacaagttctcggagaggcagccgatcggcacggcggcgcagggctccgacgacaaggactacaaggagccgccgccggcgccgctgttcgagccaggggagctcaagtcgtggtccttctaccgcgcagggatcgccgagttcatggccaccttcctcttcctttacatcaccgacctcaccgtcatgggggtcaacaactccacctccaagtgcgccaccgtcggcatccagggcatcgcctggtccttcggcggcatgatcttcgccctcgtctactgcaccgccggcatctccggcggccacatcaacccggccgtcaccttcggcctcttcctcgccaggaagctgtccctcaacaaggccctcttctaacatggtgatgcagtggctcg

SEQ ID NO: 7249 - DNA, 509 bp, Oryza sativa
  Clone ID: uC-osflcyp061c11b1
tttctctcctccctcgccggcctcgtcgccggtcgccgaatcaccaccgacacctgcctccatcgccgccggcgagagttgggtggcggagcgagcgctgccgccaggggacgctcaggggcggaggaggcagtcattgatcgcgggatgcgcaccttcggcggcaccagctccatcacctacggtgatgggaagaggctcgagtacgggctgacgcatgtcgtgaggcccatgggcgcgcacaaggccaccattgactggctccacggactcggtgacaacggagccagctgggctcaactactggaaacccttgcccttcccaatatacaatgggtgtgccccaccgcgcctacaaggtcagtggcagtttttggtgggttaccatcaactgcgtggtttgatgctgctgatctttcagatgacgctcctgatgatgttgagggtttgtatgcctcatgtgcacaagatgcctactcattattacctgagccagctgcgtcaaactt

SEQ ID NO: 7250 - DNA, 418 bp, Oryza sativa
  Clone ID: uC-osflcyp061d06b1
tttttaatggcaactaccagggccacatcgacgctgctgctgctgctgctgctggtttcggcaacatgggcggtatcggcgccgacgactagtcggccgaggaacgtgataacacatcgtgcaagggtgttccaacggttaggcttgtcttcccacctgtaaacagggtatgtatcaggtggacaacacctatacctgtgagctcttctactacttcatccagtcggagcgcagcccctccgatgaccccctcatcctttgtatcaccggcggtcccggatgatccgacctttccggccttctctttgagatttggcccttctcaatgtttgactgaactgggtacacggaagggctcccctcaattgttctacttccaagatttccggacctatgttagcaacgtgatattttttgg

SEQ ID NO: 7251 - DNA, 503 bp, Oryza sativa
  Clone ID: uC-osflcyp061d09b1
tgatctcaagacgtcgctcgagaagctgggggggttcgagatgaccaacttccacacggccgtggacaacctccgcacctggttcagcgccgccctcacctaccagggcacctgcctcgacggctttctcaacaccaccaccgacgccggcgacaagatgaaaagcgccctcaacagctcgcatgagcttaccaaggacatcctcgccgtcgtcgaccagttgtccgccacgcttggcaggctcaacatcgggcgccgccgactgctcgccgacgacggcatgccggtgtggatgtcggagggcgggaggctgcagttgttggaggctgacgggcccgaggccgggcccgaggagttcaagccggacgtgacggtggctgcggacgggagcggcgacccgaagaccaacggctaggcggtggccaaagtgccccccgaaaacatggagcggtacaccatctacctgaaggtcgggacctacaaagagttcgttgtcggggggc

SEQ ID NO: 7252 - DNA, 514 bp, Oryza sativa
  Clone ID: uC-osflcyp061d10b1
tatctgcactggtctccagggcttccttgtgttcaacgctgttggaggaggaacgggctccggtctcggttcccttctccttgagcgtctctctgtggactatggcaagaagtccaagctcgggttcaccgtgtacccgtcccctcaggtctccacctctgtggttgagccatacaacactctcctctccacccactccctccttgagcacaccgatgtcgctgtcctgctcgacaatgaggccatctatgacatctgccgccgctccctcgacattgagcgcccaacctacaccaacctcaacaggcttgtgtcccaggtcatcttcttactgactgcctccctgaggttcgatggtgctctgaatgtggatgtcaacgagttccagaccaacctggtgccctacccgaggatccactttatgctttcctcctacgccccggtgaactcggccgagaaggcctaccacgagcagctctccgtggcggagatcaccaacagcgccttcgagccc

SEQ ID NO: 7253 - DNA, 57 bp, Oryza sativa
  Clone ID: uC-osflcyp061d11b1
tttttatgctcatttattggtctatgatccgttctacgacgaagtaggttgcattgt

SEQ ID NO: 7254 - DNA, 511 bp, Oryza sativa
  Clone ID: uC-osflcyp061e01b1
tgttcttctcgtcctccccctcccaggggatcgccggagaggaatcgcgcggaggaaaaaaaaagaaaagggcttccccgtcgtctaagttaaaaggaagccatggagcacaaggagactggatgccagcagccagaaggcccgatcctttgcatcaataactgcggcttctttggcagtgcggctaccatgaacatgtgctcaaagtgccacaaggagatgataatgaagcaggagcaggccaagctggcagcctcctctatcgacagcattgtcaatggtggtgattccgggaaggaaccaattattgctggtcacgctgaagtagctgttgctcaagtcgaggtgaagacgcttgttgcgcagcctgctgagattgctggtcctagtgagggggtcacggtgaaccccaaggggagggaaggaccaaatcggtgctccacttgtcggaagagggttggtcttaccggattcaactgccgatgtggcaacttgtactgcgcaacgcacc

SEQ ID NO: 7255 - DNA, 457 bp, Oryza sativa
  Clone ID: uC-osflcyp061e04b1
tctttcacagcgagtgcaagcatgatagcggtgaagcgggtgaactgcttccaccgggaagggtacggcgccggcgactgcggcgcgtctgggagcacgtacatggtggtgttcggcgtcttccaactcctcctctcccagctcccctccctccacaacatcgtctggctctccgtcgtcgccgtcgccacctccttcggctactccttcatcagcctcggcctctgcgccgccaagtgggcctcccacggcggcgccgtccgcggcaccctcgccggtgccgaccttcgacttcccccgcgacaaggccttcaacgtcctccttgccctcggcaacatcgccttctcctacaccttcgccgacgtcctcatcgagatccaggacacgctccgcttgccgccggcggtgaacaagaccatgaagagggccttcttctacggcctttccatgaccacc

SEQ ID NO: 7256 - DNA, 436 bp, Oryza sativa
  Clone ID: uC-osflcyp061e05b1
tcgtttcatcacagctaagctaagctaagcctacgtacggtggtcatggcgtccaagaccatggtggtgctgttcgtcgtggcggcgtctctcctcctgctctcgcaggacgtggcgtttgccgccagagagctcgctgatgccagtggcgaggccagtaacgtaggccataagaaggaccacatcagcatctccattggagtgaccgtaggcgccacgcctgtagtgaccataaacaccaagcccaaacaccatgggaagacgccgagctttagccactctcacccatgacgctatctcagctatctgcactacaatgactctcgttaatacagtgatgattcgatgttaaatttatatttaacagaatgtgctttacctgaagaatatatatgtgtaaatcatcatgtctctcacgcttattaaaagattcatt

SEQ ID NO: 7257 - DNA, 183 bp, Oryza sativa
  Clone ID: uC-osflcyp061e12b1
tttgaatgctcattatttggaatttgatcctgtctatgatgtagcagcttgaagtgcattagtgtacgcactgaaaaggtgcatggcgatttaatagcagtcgattatggggtctcgcatatggaagggggatacgcgaatagaggcataccgcatttggaggactacatatgcgaaaattag

SEQ ID NO: 7258 - DNA, 459 bp, Oryza sativa
  Clone ID: uC-osflcyp061g02b1
tttgtattagcaaacatgcacatatacaaagagcaggtggctgaaccatccactggcctgatgatgccagagccagcacctgttgcttcccccggctccggacgctcaggtggctcaggctcggtgggagctgagaagattgagagcaggggaaagattgagatcaagcgcatctagaacacgacaaaccgtcaagtgaccttctgcaagcgccgcagcgggctactcaagaaggcgtatgagctctccgtgctctgcgatgccgaggtcgccctcgtcgtcttttccagccgtggccgcctctacgagtactccaacaacagcgtgaaggaaactattgagaggtacaagaaagccaacagtgacacctccaacgccagtacagttgcagagatcaatgcccagcactaccagcaggaagctgctaagctgtaagcacagatcacccacctgagaact

SEQ ID NO: 7259 - DNA, 523 bp, Oryza sativa
  unsure (1)..(523): unsure at all n locations
  Clone ID: uC-osflcyp061g03b1
ctactcctcgtccgacgaggaagacgccggcggcgagccgccggccgccgcggcggcctctcccgctcccgtcccctcatccttcggacctcggccgaggcctccctctccctcgacgtcggtcggcgccgctcctcagcctccgccccacagccagaatatttcttccactagttcaagtaatatctccctgcccacaccgtcactagaccttccagatgttgcagatctgttttcttccccttctctgccctctagaggatctacttctatgatggacagcacatcaaggaaacgagaatcaaatggatctgcatttcaagacccacgcagtaaatttccaagggttcaatcgggacaatctcgtggtgccaggatcgctgctgggaacacgttagttccaccacagcttagtggaaggagcaacgttgtcactgaagatatgaccaagttgtttgtggctagacgcanagagtagtgctgatgtttttggtagcctctaattganaccatcaacgaatct

SEQ ID NO: 7260 - DNA, 406 bp, Oryza sativa
  Clone ID: uC-osflcyp061g05b1
tcggttccgggttaagcttgatccttctaggcccttgagcaaaaggaagcactgggttgttgccgagattcttcgtagagctaaggtgtattctccatcagctgctgcagcagcagtttctgctcaacctggtgccacagttcaacaggcagaagctgctagcaaatcataaacatagactcctcttctgcaataaatggacactttttcgggattttcttttatgttgagtaactgaagtatcatctttgtggctcccttcaaatgcactcgtgtttttgaaccatgtgaatggtggttatcaactcactgagggtgcatcttcaaatacttagaaattcatggatgcaacacaccatatccatatgtagaacggaatcttctattatgaattgtattcatccaa

SEQ ID NO: 7261 - DNA, 517 bp, Oryza sativa
  Clone ID: uC-osflcyp061g07b1
tcgtttccgccgtcgcttctcctcggggcgcagccatggtggccgcaaagaagacgaagaagtccacggacaacatcaacaacaagctgcagctcgtgatgaagagcggcaagtacacgctcggctacaagaccgtcctcaggaccctcaggaactccaaggcgaagctagtgatcatttctaacaactgcccacctcttcggaagtcagaaattgagtactacgctatgttggccaaggtcaccgtccaccatttccacggaaataatgtcgatctggggacagcctgtggtaaatacttccgtgtttgctgcctcagcattattgatcctggtgactcggatatcatcaagaccacgggtgagcagtaaggatgagcggttccgctggcgcttcagatgctgtcacactgagctgttctagacattgtagttgttgctggacttgatttggtctctttcgtgtatcgaacagcttttaccagtcaaaccaagtttcgggggacattgttctttgg

SEQ ID NO: 7262 - DNA, 444 bp, Oryza sativa
  Clone ID: uC-osflcyp061g09b1
cctgcctgcacgcgccgggacggactggccgggccgacccaggccgtgtcggttccgtccgcgctctcttacgcggttggctaagggtagacaccctagcgcgtccgtgcgggcgccgttgcgacccgctgtagaggccctcgacgctgccgaacccctcgggctgaaacctgaccgacgagcgatagggcggccgccgtgaaaaccgagcggagacgaacctaccgctagatgtgggagggggagcactgagcgggatgctgacgatacgcctccatgaggaacgcaaggcaaatccggtcacacggcaagggcattccgccgcctctgcagctgatctggagtgcccgaggtcctgtcgggagctggccagtccagtggcagtacaactcagacagccacgcgtctgctgtgaaaggaggctgacgtcatcgccaagcacgt

SEQ ID NO: 7263 - DNA, 520 bp, Oryza sativa
  Clone ID: uC-osflcyp061h01b1
ttaactttatcatgcctatggttcagcaaggacaacagccgcagcgtccggctggtaggcgtgctggtgctggtggaatgcagcaacccatgccaatgggtcagcaacagatgatggctaggggcggccgtggctatcggtatcctacaggacgtggcatgcctgatcctgcaatgcatggtgttgggggtggtgtgatgccatctccatatgagatgggaggcatgcccatgagagatgctgctgcgtcacagcctgtacctattggagcattggctactgcactggccaacgcagcccctgatcagcaaagaatgatgcttggtgagaacttgtatcctcttgttgatcagctggagcatgagcaggctgcgaaggtgactggcatgctgctggagatggaccagactgaggtgctgcacctgctcgagtctccagaggctctcaaggccaaggttgcttgagccaatgaggtccttcgcacggccccgcagatccagacgaacgcgacgcctgaaca

SEQ ID NO: 7264 - DNA, 488 bp, Oryza sativa
  Clone ID: uC-osflcyp061h03b1
gttgtttgtgtagttgtacttggcaaagttgggaggaatgttgcagctggaatgacgggtggccttgcctatattctagatgaggatgatacactcgtcccaaaggttaacaaggagattgtgaagatgcagagagtgaatgctccagccgggcagatgcagctgaagggcttgattgaggcttacgttgaaaaaacaggcagcgagaaaggtgccacaattttgagagaatgggaggcatatctgccactcttctggcaactggtaccaccaagtgaagaagactcacctgaagcttgtgccgagtttgaaagagtacttgccaagcaagcaacaacagtacaatcggcgaagtgatcaactgcaattcccaagtgatcagattagacaacaggatggtgttctttggtactttccaggtgattttttcctgggaccgcatcaaggaaaacaaaataacaactggcatacttgtgaagcaccgaagt

SEQ ID NO: 7265 - DNA, 341 bp, Oryza sativa
  unsure (1)..(341): unsure at all n locations
  Clone ID: uC-osflcyp061h11b1
atgttccaaccatggcgaccgccgccgaccaaaaccctaacgacgcggagcaccgggaggccgcggcgggagccaatgcggcggcggaggagtacgaggaggaggatgaggaggaggaggaggtggagctnnncngtccgtcagtcgtggtggcggtacggtatatggttcatgtcgcgttctttcctttgttattggatcctgtgggcattcgcgatcacgacgtgtttcattaagggcaacgccttgactaaggaggagctcattgaggcggaggtcgtcgatctcctctgcgccgtactcaccgtgcaggacctgctgggcaacgccagtattgtctg

SEQ ID NO: 7266 - DNA, 526 bp, Oryza sativa
  Clone ID: uC-osflcyp070a02a1
gtggggaagagaaggccagtatatcccctaaacttcgaacagaagttcatctatcaccctgaatttggtttcgactttcgacaaatatgtcaaacaggaagctccaccaaaaataagctcagcgcttttatagtttttgacaactagttcccctacacttgtatttaagtatactgatcggataaagcagcgtttgaaatgatgtatctatttttcattccagaagccgcttggtgtatacaaaatggcaaaatatacagcgtcaccttttcatcaggacaccaccgtcataaccatgcgtgctgctaactcatgcgtgggaacatactttctcttgtctagaactgccgcagcacaaacggtcgtcatcaacataagtagtattcagccccatcattccatgaacctactgatatgtcatcatgggcatagctctgtagcgatgcactgtttatgttaatgtagcgtgccaaattgttagagaggataaacaagcaccggaagcatggcgaaaatacgtttttga

SEQ ID NO: 7267 - DNA, 251 bp, Oryza sativa
  Clone ID: uC-osflcyp070a03a1
cgcctccttttttttgggggtaattttggggaaattgacaaccataggttgcactcgcagggggtacacgagagctgccgctgctcccaatccactgggttcagagttcataattgtgactgacgaatacatcaaaagacctatacaatcttttggtaacaactaacaagcaaaactgaaacctgcgatgcacaactttaaaaagcttaaaccccagaaaaccaagttagtcccttcaaacaatggattta

SEQ ID NO: 7268 - DNA, 540 bp, Oryza sativa
  Clone ID: uC-osflcyp070a04a1
actggctatggaaaaacagatcacacatcagattgaagcattttttgtgtgtgcacactttaaatttggttcctatgccaaaaaataaataaataaagatcacatatattgaattttttttctaagtagtgtacaaatctccagttgcacagtcctgattctacgcatgatttacagaattgatgaacattttattatttaacctttcgtacatctgatcacttcagcaaggaaatgtttgtggatttactctgttaagcatttgcagaacacccatggacagaagttgcaccatatattgctcaaaatttcaggtaacaactagatgacgaaacacattttccgacaatacctggctgaggcactgtcttttttttagaccccaaatagatgaaaattcctcttgagtatggatacagatttttgactgcctttgttaactcctagcaagatgctgcagcatgtgagtgcatattttcacccaaatatttccattcgatgcgtatgaccagtactccttgacaagatctcggaagagag

SEQ ID NO: 7269 - DNA, 324 bp, Oryza sativa
  Clone ID: uC-osflcyp070a06a1
atgattcatttgattctggaagagaaacaattatcaaattacaacagtaaccaacatttattctacagatgccatcgctttctttgcttttttggcaacgcaagtaaaccatttcaccgtcacaccacccaccatatatgccacccaaataaaaatcaagaacccaaacaattcccctttaattaattcccgcttaattaataaacaccagccttaataataaagtaataaattaactaatggctcgttctttccagtcattttgccttagctgtggaggatggccgggctacagtacgggccgttgagccagccgtcagtgat

SEQ ID NO: 7270 - DNA, 447 bp, Oryza sativa
  Clone ID: uC-osflcyp070a08a1
tttttgttttttttttttttttttttttttttttttttttttttttttaaggaaaaatggggagccttatatgcctatatgcatcataaaaaattgggcttgagcctgctattaatggcactccaatacatgaaatttggtacatgaaacaattggaatatcatggtccttgggtctcggtggcactcgaaaacaggctcctggcaaaacttctccgggggcctcttgaccttgcagcttttaggctcccaaacttcaaccaagcttccccggcaataggcttccattgctgagcacatgagaatctgagggccatcccaacagtcaacccacgtaaaagttggatagttcgaagcactgaaaaaagctcttcagggaagctctgcactcccactttatttagcgaagaatccccggtgaagggcgacacaacagccccccctgggg

SEQ ID NO: 7271 - DNA, 521 bp, Oryza sativa
  Clone ID: uC-osflcyp070a09a1
tttgttgtttttttttttttttttttttttttttttttttttttttttttttttttttttttttttttttttttttttttttttttttttttttttttttttataatatattttttttattttaaaaaaaaaaaaaagagggattataaaaaaaaaaaaaaagggtatataaaaacaaaatataagaacaaacaaatgttttttttaaaaaaaaaaggggtccaaataaaaaaaaaaaaaataataaaacttttaaaaaaatatgataaattaaaacataaaaaacaataaaaaaaacaaatttatttatctttctacctaatatcttaaacacaaaaacaaaacattcggtttttaaaacaccaaaaaaaaaattaataaaataaaaatataaaaaaaacccttccttattatttaaaaaacaacaaaaagtaagaaaaaatttttcgtggacgagggataaaaatagtaaaaaattcccccctaaaaaaaagaaaaataaaaaaaccacccctcttttt

SEQ ID NO: 7272 - DNA, 333 bp, Oryza sativa
  Clone ID: uC-osflcyp070a10a1
gggtttggttattgtaattcttttttttctttttttttttttttttttttctaaaaggactggccccaaattttaaaattttaaaaagattgcgcagaactcaggttttacaaggggtttttaactttttagcaagattgaatcaatttacaggcccatgggtagaaaatttacagtttgggcaaaagtaagcctgaaatggaaaaggggtggttttgaaattaaagggaagcccttattcttagcaccattttgggcccctttgggagaaaaatttacagctggggcaaaagtaagctgaaatggaaaatgggggttttgaatttaaaaggg

SEQ ID NO: 7273 - DNA, 337 bp, Oryza sativa
  Clone ID: uC-osflcyp070a11a1
tggttggtttttttttttttttttgtttttttttttaaacaaaggaatcattaattatttttttcccatattgaatatggctcgcaggtacagcttaataataatcaattcttattggtcgtactgctaataatactcattaagtaaccaattttgttaagcgtcgtgcgccaaacaagcttagttgcagcgcacgtaccccaagaagaacgcgacggggtggatcgtacggcccggattgcccaaccgggtgggcggaaatgcgaccgcgtacgtacacgtgtacgccttttcagaggggacttacgagacgtccactggcttgcccaggaagagc

SEQ ID NO: 7274 - DNA, 472 bp, Oryza sativa
  Clone ID: uC-osflcyp070b02a1
ttttctttcgcccttcctttttttttttgcggaataagtatgaatgaaatatagttcaagacatttctcatgcacccttaatttatcccctcctgtttgctgattcagattagctaggaatccattcaagctgagtagccggagcttagtgggaccaaagggatagcttattgacaatgatattaattagcgttaccgctaggttcgataatgtgacaaccttaaactacttttacagcgtcataaacaacagggtcacacgaagtgtgattagcaaatgccagaatgcagtatatacactttgttagctttctgaaattcaggtaccacacctcacgtaatcatcctgtgttctattctctgggataagtgagcatcattgcttcacatctctgccacgagcttgctgacctgatctagagcgaggtcaaatgaagtgaatgaataaggagagagcgctgctttcattttt

SEQ ID NO: 7275 - DNA, 513 bp, Oryza sativa
  Clone ID: uC-osflcyp070b03a1
gtaagaagatgttactagtatgtgaaaagagaacgtaacgctctctgtcctctactacacgataattgtccagtgaagtaaacatcatgatcatatcaaggtgaagggcataagtcatacaatacacacacacataaaaaagggctgtgctggtgctacactcgtgcctacgcattcatctattctcagacaagggcaatttaaaaaaacagatggatgccgtgccgcctccttttccttggatctggctaactcgcaaagggcaacatctagaacttgaagtctttcttcttcgacttcccgtccttctcctgcttcctcttcctcttgcttgcgttctccgccaccatgtcgctgaaatcttccttctggttcccgagcttctccttctcccgggcttcctcgtacttggcagccaaaacatcatccataactttaagctcctcaggttgtatggtgacatccaccttatcagacttctgattcttgagaagatccacccttttaggacca

SEQ ID NO: 7276 - DNA, 306 bp, Oryza sativa
  Clone ID: uC-osflcyp070b04a1
cttgccaatgtgccaatgtcatggctccatagcctcatacagaaataagtacaacagttgcagtttgtcaaagaaatgataagcaagttttcggtctttaagaggtggaacaaaaagaaagaaagaggaagcaagggaggataatacatcaaattactagctgataattgaggatttttcttatgtctatatatatatatatatatatatatatatatatatatatatatatcacatcaagattgctcctgtgcgtgcgtgtgtgttgttctaatctttcactctctctcgggccctcacttttct

SEQ ID NO: 7277 - DNA, 323 bp, Oryza sativa
  Clone ID: uC-osflcyp070b05a1
tttttgggttggttttttttaagagaatgcacgttttctgggggcatgaagtcaacttacaatttataaatcttccattcacacttacagtatgtaaagagaattcccacccaaaatttctttcatgaacagacccaaagatgagggcattatattcatgggcatgtgccaaataaatggcaccttaagcattccatttcagttgggggggttttaataaccgccaggacgatggtttccagagaaggccgccccactcgtgctataatgtattgggaaaaggatgcggtttttattttgtggacctgtcaacttaaactttt

SEQ ID NO: 7278 - DNA, 349 bp, Oryza sativa
  Clone ID: uC-osflcyp070b06a1
accagtaaactcagaacatttgattaaataatgttgtacattaagtgccaatacaagctagcagatatcgaacagactatatatctacacaaaaaaaaagcatcggtattaagttgctccatttggtttacactccaaaaacgtgacatcggattgacatcctgctggacaccggcctcctaccgtttctggaagttcaagcacttgatgccgtatccaaagaggaagaagaagatgatgacgtagccgaaatgggccagcacaacgtagccgaggaagtcgtgcttaaagcccatgttcttttccaagaaattcttcaccaccatggtgtgtgcttggccaggaacgg

SEQ ID NO: 7279 - DNA, 519 bp, Oryza sativa
  Clone ID: uC-osflcyp070b07a1
tttgtggtttaatattataatctttaaagatattataggaacgcaagcattgagattagagttacgcaaacatgacgactttcattgcgtaatacaggtcgttgaaagaacaaccaacaaagcgaatgcacctcttttgggttcttttttaattgctaggcggccttgcaactacatcaaccaatataccaccactatatgctcatgctattgtctccatagagactacgctacttatcaactcacacttgcttggaataaataccaactaaatgaattgacttgatctcttctcatacaagtcacagacccgaattgggtagtgaagaatgaatggacaagagaagagaacaaaatctatacattcgtgcatcaatgtacttgaggtgcgtcttttaatgctacattcaaactgttttccattatttgccaccctagtccaacgctgctgccttgcatcatggctacaaattcggcgtaatcaatttgggcgtcattggtttgatcaacctctgaaat

SEQ ID NO: 7280 - DNA, 440 bp, Oryza sativa
  Clone ID: uC-osflcyp070b08a1
gacaactgaaatatgatcgagactataaatccaaggaccaaggattattttataatggggttacatccagaataaggaaaacaactcagtttcaggtttagcacagggggggcccttactgctagaaatgctagctggcatgcatatgtcgtacttatcatataagctgtagctacagttttgaagctttaattttccgcatgaagatcttttttaaagggttcctaagtccatcataatataagccttcatagaattttgtttccatccaaatttgggtaagaacttgtctccaattatcggaaaatacttaaacaacctgttcaaaagaattttcccagggactggcgctccgttgggacatttcccaataatccataattccttgaatgacaaggtatctaggaaagcaatgtcctctgaaaactaaatttttaaaa

SEQ ID NO: 7281 - DNA, 484 bp, Oryza sativa
  Clone ID: uC-osflcyp070b10a1
tggtttttttttttttttttttttttttttttttttttgatggatgtaagttctttattcagatcaagcgactacatgatggcaagggcgaccaacatgaagaaatgcactcgggacgccattctttccaagccccctaaaccatggaagcccaatttgcacaatgctggagccgttcatggctcgaacaccatgttttcggcctcccttttgatcgattcgaagaggacagacgacaggtagcgctcaccgaagctcgggaagaccacaactacgagcttccctttgttctcgggccgctgcgcgaccctgatggcagcgactgcagcagcaccagatgagatcccaaccagcagccctttttttaacgctagctgctttcccatgctgatggcttcatcaccttgagacttgggcccacttatccaggagattgacattaagtacaccaggaacaaaaccagcaccctattccttggatttt

SEQ ID NO: 7282 - DNA, 330 bp, Oryza sativa
  Clone ID: uC-osflcyp070b12a1
tttttggtttttttttttttttttttttttttttttttttttttttttttttttttttttttttttttttttttttttttttttttttttttttttttttttttttttttttttttttttttttttggggcccaaacacaattttaaaaaaaagactcagagaaaaccaaaaaaaggggggaggcacaaaaggaaagtttcaagcacttcttttaaataaaaaaacccttggggacttggtgcataaaaaaaaaaaatgtttatttttttcccaaaaaaaggaggaaaccccaaaaaaggggttaaaaccccccctaaaaaaaattgggg

SEQ ID NO: 7283 - DNA, 452 bp, Oryza sativa
  Clone ID: uC-osflcyp070c01a1
accctgggaaaatgaatttaatttccttccaagactggtagatgaacatagatggagagtctcaatttgggtctttaataattaacattttctgttgagttacaaactcatagctcaggttttggcacataaacattcttcatgggtggaccaaaacttatggttacataacatggttccatggaaaaataggttcaggaattaatttacaacagaggatacaacaaacttatgggaactgtacacttggcttgggcagtctgcacccctacagattttgaggtttccttggggttggggatcttccttccattggttgcagcctttgttttagatggaacactttaatttggaactggaagggccttgcgcgttctcctggtaaaacttccgaagtggagggaagctccttctgggtttcatccatgacagcctttcaagaacgccaccct

SEQ ID NO: 7284 - DNA, 106 bp, Oryza sativa
  Clone ID: uC-osflcyp070c04a1
tttgctttcgcccttccttttttttttggcgggttgaatacgttcgtttccttatttgatttttctgtcctgaccccttatctttttttcatagaaaggaatgaat

SEQ ID NO: 7285 - DNA, 89 bp, Oryza sativa
  Clone ID: uC-osflcyp070c06a1
ggggtgggtaaattaatacccttcggtctcaacatcatataattttttctttaaaacaagtaatccttaaacgaaccaaacaaaaagct

SEQ ID NO: 7286 - DNA, 487 bp, Oryza sativa
  Clone ID: uC-osflcyp070c08a1
cgataaatattgcttcacttgtacaaagtacagataaaaatacattgatacatgacacggagagagccatgcacaccacttatttggacacacagagggcaaggctgcagagaaaatcaagcaacacaagctgaactcacggccccacctgtcagcctctcactggtcgaggccggagactcttgtgaaaaacagcaacaccacgcatgcagaagaagacaaattattacacacacaaatcgacgacacggcggccggcgacgtacggcgaggtcgtcgccgccgccggcgacgttgtgatgaggtcgatcagccgaagaggtggtgcttcttctcgccggtggactcctcggcgctcttgtggtccttcttcttctcgtggagctcgcggaaggcgtagccgccggcgtctaccgccggcgtggccgcaatttctccgggaacttgtgcctgtgcgcgttttttcgggtccttcttcgcctcgtgc

SEQ ID NO: 7287 - DNA, 344 bp, Oryza sativa
  Clone ID: uC-osflcyp070c10a1
gaaaaacattctagttttaagatgaaatagagaagtagagttgcagacataaacatgatctgcttttacatcatcaccctgttaggacttaggagagcatagatttgtaccgcaaatactatcttattgagagctgcatagatggaacaaatgtgctcatgtacactgggtataggattgggcccaaatatatatggatatccttattgcactcttattcttataaggattagcaacaccttgatctgcattccgtgcaacttccaatgcattccctttaggaaactctgatgaccatgatgctccgccttgctggccatgaagagcttccctccacgtgactt

SEQ ID NO: 7288 - DNA, 358 bp, Oryza sativa
  Clone ID: uC-osflcyp070c12a1
tttttgtttttttttttttttgtttttaaacaataataacagtctatatttaaaacaagtcaacattaaggagccacaaaaaacaatttcaacacataaatccggaaacccctctttaaaagaagcttaaagcttgaggtgcaggtttaactagcaggactttgggctccactgttctcaggagcagtaggtgccggaacagcggttgtcgcaggcgcagcccgggctgcaggggcagaagcagattggtcctgggaggcagcggcagttgtagcttcagtagaataagcggcgggctgcacgtagcttccactgccataaggatcaccgcatgacttgtggtgaccataacctgggt

SEQ ID NO: 7289 - DNA, 59 bp, Oryza sativa
  Clone ID: uC-osflcyp070d08a1
ttgatgggtttttatctcttttctgctttatccttcttaacttttctctttttcctctt

SEQ ID NO: 7290 - DNA, 151 bp, Oryza sativa
  Clone ID: uC-osflcyp070e07a1
ctggaaaagaaggacaacttcaacatttttgttcaaacgggcaggcttaggaaaccgtgaccccgagacgttcttaagcttacatattaaggttttgtatccacccaacaaggtttctaaggaagtccacagatcccatttgggatatcaa

SEQ ID NO: 7291 - DNA, 429 bp, Oryza sativa
  Clone ID: uC-osflcyp070e12a1
atcagtcacataaacgttccagttaatcaattgtaggttcaagttcaatcatacccttacaatatagccggataacaggatcttaaaaaaaataagtccaatcaagccacgagttcagcaagaaaactggaattacacttttgtcgctttacctaaaccatttgatactcatcaccttcctggagactttttgcacaacccctcaacccttatgctaaaagttcaacatcctcaatcctaaatagtgctcatgatagcaaccttacctatcaaattgtgcaaaaaggactttattagccaaccaaaagttgcaaatggaaaggaggggattgcaatcagggtcgacatacttagcaacagaacaaaagagggggccatggatgcttaggaaaccatactttaaataaatagctattttagttaattgac

SEQ ID NO: 7292 - DNA, 420 bp, Oryza sativa
  Clone ID: uC-osflcyp070f07a1
ggagaaaagctgcagggatgagacctgaaaaattgcatatcccacaacgcgggaacacacagggaactgctctacatatagttttcggatctcctttataaaacctttgcatagccactaaaagggtgtccaaggattaactacctcaataatgacataccctctttttccgctcatttagggatgctgatacaacagcaggacgcacacccttaggtggaaacagaggatggagataaggggcaaacaaaactttttacccacggcgacggcaagggcacaaccgccatgtatttagaacaacttggtgcgacttaatcctcagcttactcctcccagcaagcttaactagttgaagcaagcctatgcaggcagagatcgacctgaaattggagaactcaatcgctaaatgatttatcc

SEQ ID NO: 7293 - DNA, 114 bp, Oryza sativa
  Clone ID: uC-osflcyp070f11a1
cttctttcggtggtaacatgagtaagcttctgacatgtctcatcatttcttcctcagcctaagaacagcttgcccctaaagctatcacatcatcgtcccccaatacattccaca

SEQ ID NO: 7294 - DNA, 167 bp, Oryza sativa
  Clone ID: uC-osflcyp070g01a1
tttttgggtgggtttttttagaggagtgcaaacattctttattgattggattgaaactttgtttatacagcaggccacaagacccaactcaagcccgcaagacacggatacataggcccaaaagtgtagacacctgggaaaccgcaccagaggccctccatggatcc

SEQ ID NO: 7295 - DNA, 500 bp, Oryza sativa
  Clone ID: uC-osflcyp070g12a1
gacaattcgcacctcgtgcagttgtcaatagtcgacacagcaaaactatcatctttacataagcagcttcatcaaattattccaagaaaaagaaagcaatcttgcaataaaaaaaaggataagtaggggtaacgattcatcgtagaaacaacgggtggcaactcaagtaagccacgtcagttgaatttgcctatcattattgacagctttgttggttttggacaaagaaaacaaggaaaatggtgctcaaaaaaatttcctccacgtcgcacacacaatgtgcatggacgaggccataatatactgatgccaaaagaggcaattatcttgcctttgcagaatgtaaacatagcccatcggttggagagtctagcaacggagcatgtaggtccggcgcctgaaccagttgtagtccggaagaccctgaatgggtcccattgagcaatagcgatatcctggtcaaaaatgaaacggttggccctcgcttgactgtgcttgcg

SEQ ID NO: 7296 - DNA, 471 bp, Oryza sativa
  Clone ID: uC-osflcyp070h07a1
ggagggataatttaaattcttaatagtaatagactttttgatggagtattacaacatgcagcagtggcattaatacgccagtacattaattaagtcacacatatgcaggctccattttggttccttttaatttatcgtattacagaatttctgtagccttgcagatgatcacttggatatcatgtactagtgattaacaataggacgcatacaaaagatggcccaacgacaacagaagatgcgggcatctgacattgtctggccttatttgggggtagtactccaattaattaacaagagatgatgcattcttgggccttagtttcttcacatgcttggcttcacgttgagcctattcggaatctttcacccccaacgactaattacactgggagagggagttgacccatatggcgcggagctcaggggagaccttggggtgcgcgagctcgccggcgaagcggcggatga

SEQ ID NO: 7297 - DNA, 197 bp, Oryza sativa
  Clone ID: uC-osflcyp070h11a1
ttggttgtaatattacgtaatcaatgatcaaattaattaattcccaaacatgtacatctatccatataaccggccggcggtggcggtggtggaggccgcggcggctgccggccgtgcagcggcggcagcagcaccggcgtggtggtggtggctcggtcaggacggcccttgaggactgtgcaccgacccctgcccat

SEQ ID NO: 7298 - DNA, 387 bp, Oryza sativa
  Clone ID: uC-osflcyp070h12a1
tttttggtttttaggctccaactataaccttttttatttccaggctcagcacatggcaaattaaacatcgatatgcacaaagtccatcccgtcatactatggcctcttattccaaacgatcagaacagatgggcgcgccatgcgtatgcgcatattacattacagcttggaaggggatttgtaccatccccacggcttatcggaggcgtactccgtcacttgcttgacgcttaggtagttgccaatgcccccttctccgagcttgcgtcccaagccgctgcgcttgttcccgccccatggagcttggcaaaagcagggttgctgagcagctcaacccagatactcccgggatcgatcttcctagttaatctctggaatcgcttcgcg

SEQ ID NO: 7299 - DNA, 95 bp, Oryza sativa
  Clone ID: uC-osflcyp071a01a1
tgctgggggttttttttatgttttgggattttttccgtttcttttttctgtgaagccgagtgataaggttaatggcctccaacgagcgaagagaa

SEQ ID NO: 7300 - DNA, 405 bp, Oryza sativa
  Clone ID: uC-osflcyp074a01b1
taagctgagccgcctccccgggccgtaccggacctgcattcccgacccaacccacccgttcagttagaacctatgtaaggcggacccttacaagcgggctcatttgaaggaacttgcgactttttgctacaacatcggagcttatactgtttaactaataaatgctcacatttatggacatggatgtctcacttgacttatctgaacgggaatatatttaaagatgcagcctcttgggctaaacatacatacccccttatggtaactgatgtgctatataacacttgttctagcgtacgtagcacgactgatttatgaattctatttctctaatcattatgacatcgtggagagcttattacgagacaactaatgcaccaaatgagagcacaagaaggcccgtta

SEQ ID NO: 7301 - DNA, 441 bp, Oryza sativa
  Clone ID: uC-osflcyp074a04b1
gcttcagcaggtggagccggcaatcgtcgccgcggcggggacagggaccataccggcgtcggcgttggcatccgtcgcgccctccctcccttccccaaactgcgccctctccaggtcgcaccaccaccaccaccacatgtgggctgccgcgtccgccgggttctccggtgccgactccggggtaatcggcgggatcatgcagcggatggggatccctgccgggatcgagctccagggtgggggagcggggggctgggtggtggcagcggcggtggccgcatcgggtttgtgcccatgtttgccggccacgcggcggcggccatgccggggctagagctagggctctcacaggacagccatatttgtatatggatctagggattactctgctactgtccagttaattagcctcatttgtttgggtgattaatgcaggtcccc

SEQ ID NO: 7302 - DNA, 314 bp, Oryza sativa
  Clone ID: uC-osflcyp074a05b1
aaccgccggttcgacccacacccacgcgtgcggctctgtcctgtccttgtatgacactccgcctgcggctcgcttgtagctctgggtggccgagaattaggggcgagggcgctgctgggcaagaaggcgactgccgcgggcttgccgggcgagggactcttcttactcctgtgaagggagtcacgagcggcacggtgcgaggcggacggagcccggatccaccctccgccgaccagagtgcgaggaggagtccctcttccacccttacccacacgagggcgacaacgactaccacgacaaggcgggagcaaggg

SEQ ID NO: 7303 - DNA, 382 bp, Oryza sativa
  unsure (1)..(382): unsure at all n locations
  Clone ID: uC-osflcyp074a06b1
aatccccttctcccatttttcctctcctcgcttcgcgccgtagacgccgccggctgctcctcctatcgccatggccgccgctgctccccccgcgggccccgggctctactccgacatcggcaagaaggctagagatctcctgtatagggattaccacacggaccagaagttcacgctcaccacctacgccgngaacggagctgcaatcactgttgctggcacgaagaaaaatgagtccatcttctctgaaaaccagagccaggtgaagaacaacaatgtgtccgtggatgtgaaagcaacttcagactcaaaattgatgactaccattacaggtcatgagctgggcacttccaggcctgagggaaatctatacattcctttt

SEQ ID NO: 7304 - DNA, 273 bp, Oryza sativa
  Clone ID: uC-osflcyp074a07b1
tcgtgtaactctgctgggatgcgaaccctgacaagggagctgatatggccgacgcggcgtctatgttgtaggcgatcgatacttcgaagggtggaggcatgatccctgtagatcaacgacaaggatgcctttcatgcttcaggcaatacaggggtccgtgacagatggagcacgctggagttgcatctgtagattgacggatacatgtcgtgtaagtagattacattcgttttaaggtacgtaagcaaactgattatggagctagtatgctta

SEQ ID NO: 7305 - DNA, 478 bp, Oryza sativa
  Clone ID: uC-osflcyp074b01b1
tcggtttgcggcggtcctagcctcctccccgacggatgtgccgactcgaaggagagagaagcgagtcaccgccgcctcttcttctctttcatagttttatctccgcctcaccaccgactcaccgcctcttcccttacgcatgccggcgtcgcaatctcacactcctccaaccctcaacgaagcgcttccgccacagccctcaattttcgtcgccgcatctgctagcaaagatccaggcgcctggagaagaggaacacgagctaccactaccttctttcctttcatctgccagtgaggatggtcgcatcttggtgaggatggcggcaactcgccggcgcgtgagtcccccacagcgtcccccaactttttttctttatagcggggggcttcctccccctcgcatcagaaaatttctttttctagggcaatgcatgcatgggaaattcccatcactttcccacagggaacttcccccatc

SEQ ID NO: 7306 - DNA, 260 bp, Oryza sativa
  Clone ID: uC-osflcyp074b03b1
tctgtttaaaagaaaatacgccccaaaaaggaagacgcgaggttcgtaccgcgcgccggcatttatccaccttgcaccgagcaccggcttctgcgacaaatgcaccgacgcgtgctgcgggcttctccttctgcaaggggtgtctacaacttgattctttttgcccatacaccgtgctgtctgaggcgacctggtgccctgccaggaagaggggcgcgtctggcaaaggcagaagatcaaccgaaggcatgaaacttgtt

SEQ ID NO: 7307 - DNA, 428 bp, Oryza sativa
  Clone ID: uC-osflcyp074b05b1
gttcgcaaccgcaaatccccatttggtctcacctgaaaccctagctcgctcacccatggctccgaagaagcgaaaggcggatccggcggagtccccggtagcctcgtcggaggccggcgccggcaccaaccaccaccaggagacgccctcctcggagctcaagccccgggggaccatctacttccccatcaccgacgaccccccggagccgagcgcagagggcggcgccgagggggaggacggcgccggaggggacgacgatgaggaggacatcgcgaagctgctcgagcccctgtcgcgggagcagctggtggcgctgctccgcacggccgcggagactacccccgcgacgatggcggccgtgcggagcgcggcggaagccgaccccccgagcaggaagctcttcgttcacggcctcggctggggcg

SEQ ID NO: 7308 - DNA, 499 bp, Oryza sativa
  Clone ID: uC-osflcyp074b06b1
atctccgccaagagaagagaagagacacccaacggcccaaaacctagcgcctctgcgctcgaggcccccccgaatccgcgaatccgccgactcccatggcgagccagggagagccctcctcctcctccgatccgaaggggaagaaggatttctcgacggcgatcctcgagaggaagaagtcgccgaaccggctggtggtcgacgaggccaccaacgatgataactccgtcatcgggatgcaccccgacaccatggagaagctccagcttttccgcggcgacactgtgctgctcaagggtaagaagagaaaagacaccatctgcattgttcttgctgatgacacctgcgaggagccgaagatcagaatgaacaaggttgtcaggaagaacctgagagtacgacttggtgatgtcgtgtctgttcatcaatgcccagatgtcaaatacggcaagcgtgtgcacatacttccaattgatgatactgctgagggcatcaccgg

SEQ ID NO: 7309 - DNA, 370 bp, Oryza sativa
  Clone ID: uC-osflcyp074b07b1
tcggtttcgagcgtccttgggatccatcgctgcggggtgcgactagcacggagatggcgttgagcatgcggcggccccggtggtcgatgacgacgtgtgggaggctgaccatgacttcaaggacctgtagcagaagagaaggcgctggacaatctcaccgaccgcgtcaaggaccgacagcttgattccttccgcgtacaatccgctatggcagctcttgcttcttccaaagaagctgattggaatgccatgagattgaaggaaaaagaattagcttccatcaagaacaaccctgcttgatgtgaaattatcgctaacgagcttgaattggacaagaagattgcacaaagaacactaccggagcacaaag

SEQ ID NO: 7310 - DNA, 428 bp, Oryza sativa
  Clone ID: uC-osflcyp074b08b1
gtatatattttggggtcttcatgtgcatcttcgctgccgtgatcttgcttttccttgggtcagaggagggattcaggacaaagagccagccttgcacatacagcaaggacaagtactgcaagcctgcccttttcaacgcgctctttagcactgcatatttcttgctgggagcgatcacctctttggtctctggttaccttggaatgaagatcgccacatttgccaatgccagaactaccctggaagcaaggaagggtgttgggaaggcatttatcattgctttccgctctggtgctgttatgggcttcttgctggcatcaagtggtcttgtggttctttacatcgccattaatgtatttaagttgtattatggtgatgactgggaaggtctttttgagtctatcactggttatgggcttgggggaatc

SEQ ID NO: 7311 - DNA, 494 bp, Oryza sativa
  Clone ID: uC-osflcyp074b09b1
ggtccggaactgcagtttccggcccaacccacccgtttcgttcgaacgaaaatacgccccaaaatggaaaacgggagattataacgaacctgcgccgttgttcctccttccacggagcaccgcctgcttcgccaaatccaccgccgcggcgcgcggactcctcctccgcctcggcgtgccggcacctggatcttttttccgcatgcaccgcgctggcggagtcgacctcgcgcccgtccaggtggtggtgtgtgccgtgtagaggaggaggaggaagcgagggcgtcggacttgtgcgtgcgcatgtccaggggcaggacgacattcgacgcggtcgccgacgagacaactcatggacagatggagtagtacttggaggtgcaatattatagcctaggaacacgaacaaatgcagaaaatggaggtgctgatgctaatgatcctcgaaaatatgcccttagctggtgaagaaaacgttccaggtgttaattatg

SEQ ID NO: 7312 - DNA, 208 bp, Oryza sativa
  Clone ID: uC-osflcyp074c01b1
tcggtttgactacccgctgagtttaagcatatacaggggcttattgagaagaaacttacgaggatggctctagcaacggcgaggcgaggataatggcggcagagcacgcgcacccgctctccctcgccgtcctcccgtcggccccggtttaagcgacgcctgcggcgctatttctgagggacgctgctctccgtcgcggcgggagatg

SEQ ID NO: 7313 - DNA, 530 bp, Oryza sativa
  Clone ID: uC-osflcyp074c02b1
tcggttgtgatgtgccaatggcacagatcatcgaatgctttaatgcccgaattagacaagttcatcttgcacatgcttgatccaacgcatatgttagtgcagactgacgtgggggatatgatcagaagtacgatatcagagttcagggacgcagaacatgctactgagagcatgattagtgatactatcgaaggactcatatctgtcctgagactcccatatatgcatacgaccggttgttgctaagactgtaatgtggagtagagataaggtgtgaacatcagagctcactcatgactgacaagactgattgacatctcgtgtcatcatgctacttttagagcgatagaccctgcaattgtgagattgtcacggaatcactggatacgagtatgagaaactagtcgagttgtgatggtggaatcccgacgactgggagccgaggccggctaggtaccaggtgcgccgcccatgttctgccgtgcgcacggcacgttttactttggtccaggttaacgacgtaagcattc

SEQ ID NO: 7314 - DNA, 430 bp, Oryza sativa
  Clone ID: uC-osflcyp074c03b1
gttgtccccaaccaagcagcggcgagccagcgagggcgacacccactgcccaaaccgcggcgctcctcgccgccgccgcggggctgttgctcctcgcgtccggggcgctgccggtcgcgcggtgcgaccccggcggcgacggcgacggtaccgcgtacgacgagctcgggtgccgacggctcccgctggacttgctgccggcgaacgtgcgcgggcacacgctggactccgggtcgggggacttcgcggaggaccccggctcgcgatgccgggttgcgcttccccgggcgagcctcgttggatacccgagggctcgccttaccggtcgagttgcggacccggggctcttttggcgtgcaccgtgacgtccgggacgtgtttgtgccccttgacgacctcctcggcggcgcgcacgacgggagagagccca

SEQ ID NO: 7315 - DNA, 376 bp, Oryza sativa
  Clone ID: uC-osflcyp074c05b1
tcgcttatcatcagcaaccaattcgcaccgatcgagggatcgatcgatccagcaactggatcaacagtactagctaggaagcatggcccgtgcacagttggtgttggtcgccctggtggcagctctgctcctcgccgacccggacgccgtcgtgggcatcacctgcgggcaggtcaactccgccgtcgggccctgcctgacctacgcccgcggcggcgccgggccgtcggcggcctgctgcagcggcgtgaggagcctcaaggcggaagcaagcacgaccgcagaccggcgcaccgcctgcaactgcctcaagaacgcggcccgcggcatcaaggggctcaacgccggcaacgccggcagcataccctccaagtgc

SEQ ID NO: 7316 - DNA, 411 bp, Oryza sativa
  Clone ID: uC-osflcyp074c07b1
cgcgttcggtttggctacgcgctgagatcaggtatttgaatgattaaatgagcagaaacgaacagttcatcttgtacaagctggaatcagagaatatggacgatcagactcgcgtactggatatgatcagatgttacatgtgagatcgcaggtaccagaacagttacgagacaccatcatgaactatcaaggatcatcctgtcctcagactcccatatgaacataccaccgtttggcgataagtatgtaatgtggagtagagataagttatgagcatcacatctaacttatgatgatcaagagtgattgacatgcggtttcagaatgtcactttgagagtgacagatgacgctgctgagaagaggtaatggaataacgtgattttaaaataagaagcaagtcgagattgtg

SEQ ID NO: 7317 - DNA, 356 bp, Oryza sativa
  Clone ID: uC-osflcyp074c11b1
ctacggtagtactgtgtcggtggggcggacggcgaccaacgggaggatgataggagacggcatcgggaagaccatcatcacggggaacaagaacttcaagatgaacctgacgaccaaggacacggcgacgattgaggctatcgggaacggcttcttcatgagggggatcacggtggagaacacggtggggccggagaaccaccaggcggtggctctccgcgcgcagagcgacatggcggtgttctaccagtgcgagttggacgggtaccaggacacgctgtacccggacgcgcagcgccagttcttccgtgactgcacagtgtcggggacaatcgacttgatattcgggaactcgc

SEQ ID NO: 7318 - DNA, 211 bp, Oryza sativa
  Clone ID: uC-osflcyp074d01b1
tcgttttaaactaaatgaagaatcaaacacacggaggcgcaaattaaaaaaggagtggcattttctaaaatggccaaagaactgtgtatggtaattccagagaccaacccacaaaatcttagattcaaacagaacctcataagttggttaaaatcaacatttgcccgacccgaaaagccctgagggaacaaacccgatgcctaaatagctc

SEQ ID NO: 7319 - DNA, 492 bp, Oryza sativa
  Clone ID: uC-osflcyp074d05b1
ctcggtcgcagccagctaacttcgagtgtgaaggggactcacgctagctagctttctcaaggccacatacgctagctccgcctccacgcgcggcgtacgtctagtttgattgaggctgaagagagtgcgtgtttggtagaagaggctagctgttgacgatgtcgagcagaaggtcgtcgcgtggctccatctcggaggaggaaatcaacgagctcatctccaagctccagtcgctgctccccaactcacgccgacgcggctccagccaggcgtcgacgacgaagctgctgaaggagacgtgcaactacatcaagagccttcaccgggaggtggatgacctcagcgaccggctgtccgacctcatggccaccatggatcacaacagccccggcgcggagatcatacggagcattctccgttcctgatcggcaagcaacaccagcaagccggaccggtccggccgtcgggctatgtctactacgagataggccg

SEQ ID NO: 7320 - DNA, 428 bp, Oryza sativa
  Clone ID: uC-osflcyp074d06b1
tcgcttagcttatagcttaaaccatcagagctgcaaaggaaattaagtaccaaagtactgtactgtactgtactacagtttcaagccaagaaaggcaagacttgtgagagatttttgtgcaaagcaagatggctaagcaaaagattgttgtgaagatgcccatggataccgagaggaagaagaggaaggccttcaaggccgcagttggcatgacaggcgtgacatccgcctcgttggatggagacaagctcatcgtgatcggcgacggcgtggaccccattgcgctgacgacgatactccggcgcagcctcggccacgccgagctgctcagcgtctcctccggcgacgacaagaagatgggcggcggcggcggccacggcggcatgggcatggggttcggcggtggccacggcggcatggggttcggg

SEQ ID NO: 7321 - DNA, 295 bp, Oryza sativa
  Clone ID: uC-osflcyp074d08b1
cccgtcacctttcgagatctcgatccatcgcctccggtgggggctagaatgaaggtcatcgcacctcttcaggcatagctatagactgtgaacactgagggcgcagcaatgagaacatgcagcggtcctcaaacatccagatggtaaaataacctactgctgattctgtgttgcttactccctccgagccatataaaatctgcctcggaccggatgtgacacatactacgactacgactctggacatatctctatgcacattcactatactagaagaccttgcatccggtactag

SEQ ID NO: 7322 - DNA, 504 bp, Oryza sativa
  Clone ID: uC-osflcyp074d11b1
gtctccatcatccaaaccaagtatctcgtgcctcgcaggggagaagggaaaaaaaagaacctagtatctcgtgatatctgtctcctccaaacaaaaaagaatctgtgcaagatctctctccctcgatcgatctatcagcttgcagcagtgtgcacatggatcctaatgccgtgcacgtccaaatgcccgccgttgacaccgaagcgtgctgtgacgatgagaagaatccgcagcctgcacgggagatcatcagcgaccacgtcgccgttcggccgacaccggcggtggacaagacgctgtcgggcgcgtcggacctgttgaagctcctgccgacgggcacggtgctggcgttccaggcgctggcgccgtcctttagcaaccacggcgtctgccacgccgtcgccaaccggtacctggtcctggcgctaatcggcgcctgcgcggcattctgcatgctcctctccttacggacagccttatcggccacaatggaagctctactac

SEQ ID NO: 7323 - DNA, 429 bp, Oryza sativa
  Clone ID: uC-osflcyp074e01b1
ggtcgattgctattcgggctattttacacaatgggtggggacccttatactacaccggtgcccaatatatggctgtgcaagaggttgatgatgcttgcactattggacctgctacttaatgtcttgctgggcttgcttggtgttacaaagtgagccatgatgcctatgtgtgctattggtatgagcattgtcctcagctttagccttgctgccatgtctggtgttgctgtggctggtcttggaatgctgagcacaattgccacaggtcttgctatcgatgcctatggtcccatcagtgacaatgctggaggaattgctgaaatggccggcatgagccacagaaattcggagagaactgatgctctggatgctgccggaaacacaactgccgcaattggaaaggggttttgccttcggctttgcaagctt

SEQ ID NO: 7324 - DNA, 222 bp, Oryza sativa
  Clone ID: uC-osflcyp074e02b1
ccggaactgactgtggccgacccacgcgatcgcggttgccatcccatcatgcgcgattctccggcagcataggaggaggcagttaaactaccgagctgcccaatccatggcggcggcggaggcggaggcggccggtcctctccggcgggctctcttcgtactcgccgagctcgccttgctgctggtagcggccccggcggccgaggcgtggacggcggagat

SEQ ID NO: 7325 - DNA, 466 bp, Oryza sativa
  Clone ID: uC-osflcyp074e06b1
tcttgactacggctgctgctcctcttaaccggaccatggattgctttccggctatgataaaaatcgtcactatgtgctagggcgttggaatgatccttctgtgtcagttcttagttaaagtttaacatcaggatttctcgcgaggatttaaggagctctttttgaccgccttccctgtggattaatttatcctagtacaggaactacagattacttgctgcttgacctgctcagtttgaggtacagatctcgtgatttccctgtttactggtgttagttttaggaaccttgatgctttggtttagggctatggttaattgcaatttattgaaatttcaatatgtcaatattgtgcagttggcttgctttcattacaagcaactgtccaagaacattttatttgtaatacgaacatttataaaccagaaaaattgaagcttgttggatgggattggtcattgtagga

SEQ ID NO: 7326 - DNA, 475 bp, Oryza sativa
  unsure (1)..(475): unsure at all n locations
  Clone ID: uC-osflcyp074e10b1
caaggagtgggtagtagcaccttgctctcctttgccttgggagaaaccggaagcaatggcgtctgctactctcctcaagtcatctttccttcccaagaagtctgaatggggtgccacccgccaggctgccgcccccaagccggtgactgtctccatggttgtccgcgctggtgcctacgacgatgagcttgtcaagaccgcgaaaaccattgcatcaccaggaaggggtatccttgccatggatgagtcgaacgcgacctgcggtaagaggcttgcgtcaattggccttgagaacaccgaggccaaccgccaggcttaccggaccctccttgtcaccgcaccgggcttgggacagtacatctncggtgctatcctcttcgaggagactctgtaccagtcaactgtagatggcaagaagattgtcgacatcctcactgagcagaaaatcgttccagtatcaaggtcgacaagggtc

SEQ ID NO: 7327 - DNA, 316 bp, Oryza sativa
  Clone ID: uC-osflcyp074f01b1
gttcgcttcagcaatggctacaacgtcgccgacgggatagctatgaagctggggtcgaagaagagccctccggcttacctgtcgctgctgcaggggcctgcagctgcagccaatctcactctcgccatcaaagctctcaccggaggcgacagctctgcttgcggaggagcccgcgttctcgactccacttacgcagggaaatgcatcccgctgtcgacgcagctgcggagcatggaggcgaccagggcggccatggcgtccaaggtcggaacccgcgccgtcgccgcccacctcgcccgctccttgttcctcctcg

SEQ ID NO: 7328 - DNA, 151 bp, Oryza sativa
  Clone ID: uC-osflcyp074f02b1
tctgttttctgctggattgaacaacagtctggggacagggtgtttcttatactggagcgaggttcttgaacatcaagggcatgatcggctcagcgtccgtattctaattccacgctggtgagaatggttgaccctattcgaatcgatctat

SEQ ID NO: 7329 - DNA, 466 bp, Oryza sativa
  Clone ID: uC-osflcyp074f03b1
accgtcccggaattgaattgtcgacccacgcgacccgtggtgtttagatggagacagacatgaccaatagcactactaaatacatatttaatgggccgcgcgcgttacgtagaacgagcaggctagcgaaaatgcggtgttttaactacttggacgagcacctgttgacaccgaccgaatggaactatcatacatccatccggatcggtcgacaccaatgtacatcttgggctcaaagggccgacttagctaagatgaaaccggtggagatgaccaacatcatgaaggacttccacgagtcggggttcctcgacccgaccggactgttttttggaccaaccaagtacatggtcatccaaggtgaacctggcgctgttattcgtggcaagaagggatcaggaggcataacagagaagaagaccgggcaggcgctggtggacggatttacgacgagcccattgacccc

SEQ ID NO: 7330 - DNA, 410 bp, Oryza sativa
  Clone ID: uC-osflcyp074f05b1
tcggctgaaacaaacccctctcactcccactaccatgggtccttggaagttccgggcggcgagctcgttcgacacgaagacgacgacgacgaacgcgggagctccggtgtggaacgacaacgaggcgctgacagtggggcccagggggccgatcctcctcgaggactaccacctgatcgagaaggtggggcacttcgcccgggagcgcatcccggagcgcgtggtccacgcccgcggcgcctccgccaagggcttcttcgagtgcacccacgacgtcaccgacatcacctgcgccgacttcctccggtccccgggcgcccagacccccgtcatcgtccggttctccaccgtcatccacgagcgcgggagcccggagacgatccgcgaccccgcgcgggttcgccgtcaag

SEQ ID NO: 7331 - DNA, 515 bp, Oryza sativa
  Clone ID: uC-osflcyp074f06b1
gtgacttccttccttccttccggttgcttccgcggatcgacttctcgccccccagagcgattcgccccccgcctcgatcgatcgattccgcggcagcgccccttcgatcggttggagatggccaggacttccttcaagctcgagcacccactggaaaggaggcaagcagaatctgccaggatccgtgagaagtactcagacagaattccggtgatcgttgagaaggctgacaagaccgatgttccagaaattgacaaaaagaagtaccttgtccctgctgatctcactgttggccagtttgtctatgtggttcggaagaggattaagcttagcccagaaaaggccatctttgtctttgtgaagaacacattgccgccaactgcttctttgatgtctgcaatctacgaagagaacaaggatgaggacggcttcctctacatgacttacagtggcgagaacacattcggctctgcgtaattcatcaactggtgctgctgctgaaaaaaacatggatg

SEQ ID NO: 7332 - DNA, 498 bp, Oryza sativa
  Clone ID: uC-osflcyp074f08b1
tcggatcgatgcaggcaggcaggccttctagttctacaaagatgcctctaatggatcggtttcctttcctatcgatggcttgattgatacaaagccggttttttcactcctcgggcgtgcgtttcttgacaccggccggattgatctatcatccatccatcgagtcgagtcgagatcgatcttgatctcgatctccatcgatggaggaagcccagatgggagacgttgccaccatccgagccgttctggcgatcctccaatggtggggcttcaacgtcacccgcctctttttgtacacatgggtctttcagagattgggagatcaagactcctcttactggctcgcgtgtccccatttatatgcgctttgattggggcgtacatatcaaatcaaattttcaagaggggaacccctctgtttggcgtcccccccagggatcggtcgacatgaattttcccaaggccatttgctttcctaataaacatcgtcctggaaaa

SEQ ID NO: 7333 - DNA, 323 bp, Oryza sativa
  Clone ID: uC-osflcyp074f09b1
gttgtgagttagcaagagacaaacctgaccaaatccaccggagctactaattttcttggccgcgcgcggcaggcagatcgagcaggcgagcgaagatgttcgtggcagacgtaccgtctaccgagcacctgatgtgcgagatcgagggccaccaccttaccttcgtcgtcatcgttggtcacgacggtaccgtttgggcacagagcgccgtctttcctcagtttaaaccggaggagatgaccaacattatgaaggacttcgacgagccggggtttcttgtccccgacccggactgttttttggaccaaccaagttcatgggta

SEQ ID NO: 7334 - DNA, 466 bp, Oryza sativa
  Clone ID: uC-osflcyp074f11b1
gctcttgttatccttatccttgttgccattgtttgccgggcaagcaaatctcacggcagtgccctagctcagaaaaggtttcagacaagaacctccacaagactagcaaagacatggccagtacaaaaggaaaggatgacaaaggtggtttggtggtctcagcagatgagcttggtgctcctcgaaagggctctacatctgaagcactaagccaagaagagaagctgtcaggcgtagggggattttccccattcaaaggtaggcgcttctcttggccaccagattttggagaggcatacacccagtaaggcctggcacggatggatagtatatcacctgacagggtagcaggggagttgcgcttcctggatgaaacaattactctgacaccgggggaattgtcaagggcacccgcctgaggtcttgggaggagccttccacggaacttcgtcagagaacacttggg

SEQ ID NO: 7335 - DNA, 160 bp, Oryza sativa
  Clone ID: uC-osflcyp074g01b1
gcggttgtccgagcgttcattgcgacatcgctgctcaggtgctattatggagatatagtgtgcttaactaagaataagagagagcgagacagacatttggaggggctccacaagaaggcaaaggcgaggggagctagcctgatcgttgggaatgacaact

SEQ ID NO: 7336 - DNA, 318 bp, Oryza sativa
  Clone ID: uC-osflcyp074g02b1
acccgttcttttcctccaagttagcaccatcatccaagctctcatactattgacacggacccgcatgtggacatatgctgagcgccctggatctatgctggtctttggtttctaggttgcacagctgattgctacactgattgatgtgaatgctgactgggcggcaaccctaattaaaagcttttcagggggactggcaggtaatgggtggcagtacgatatactcatcttctgagcacccgccaatttcagtttcatacccacgaacgctgtgcgaagaaagggatccaatgcatgtgctgatccagatgaacgaac

SEQ ID NO: 7337 - DNA, 414 bp, Oryza sativa
  Clone ID: uC-osflcyp074g04b1
gtcctttaaaggaaaagacatatttgttatctttgaatgtatgctttgtactgggaacagggttgtggatacacaatctggattgcactaatgaaaacaagagaaacaaagctggggtacgcaagtcatcgtgaaccacagcagttgtgtggcagccccttcaccgtatcttatgaactgccactgggttgcaaagaaatatgaatggcggtcccaaaaaaaaaaaaaaaaaaagaaaaaagaaaaaaaaaaaaatattaaaataacgcaaattcaaaaagattcagaacaaaaaaaaataaaaaataataacaaatatataacaataatgggggggccgttttaagggaccaaagttttcttccccggggcttggaaccaaaaagttttttttatgggggccctttaatttaa

SEQ ID NO: 7338 - DNA, 516 bp, Oryza sativa
  Clone ID: uC-osflcyp074g06b1
ttgtcggcctccacggactcgccaccgccgcacctgggtctgaacccccgtcttgctgccgccggaaaccgcgtcgagaagttaaccatggggtctggctcactcctcctctccctcttgctggtgctcgacgtcgtcaatgtcggggtggcggtgaaccaggacgggctgtccctgctcgacgcgaggcgcgcgctcgccgccccggatggcgcgctggcggactggaacgcgcgcgacgccacgccctgcagctggacgggcgtcttctgcgacgccggcctccgacagcacggataactctggagctgtgcactccagtccggcaatggaggacagtaagctggtgggtgcccggtgttcttgggtgtccttgctgtatgtggacccgtgccattgatgccccgagggcagatcgtttgcctgctgtcattgagagaagaaacgtctgagaccgatcaaaggaggcgtgccctgtattagactgctctttgccttcctcctgagatagctaga

SEQ ID NO: 7339 - DNA, 90 bp, Oryza sativa
  Clone ID: uC-osflcyp074g07b1
tcgtttatacatgagttattgcaacatggatgcgggagaactattgtcgagaagctgtctgtttcactgttgatggcgcccagggtgaca

SEQ ID NO: 7340 - DNA, 297 bp, Oryza sativa
  Clone ID: uC-osflcyp074g09b1
tcggttcgcttcagcaatggctacaacgtcggcgacggggatagctatgaagctggggggcgagaagagccctccggcttacctgtcgctgctgcaggggcctgcagctgcagccaatctcactctcgccatcaaagctctcaccggaggcgtaagctttgcttccggaggagccggcgttctcgactccacttacgcagggaaatgcatcccgctgccgacgcagctgcggagcatggaggcgaccagggcgggcatggtgtccaaggtcgggacccgcgccgtggccgcccacct

SEQ ID NO: 7341 - DNA, 195 bp, Oryza sativa
  Clone ID: uC-osflcyp074h03b1
gcggattaatcgccatatgcgcgggcaccagggggccggggcacaccgacgcctgcacccacgctgcacgccgcccgtgactccgcccaccggcgttctgcgcccctgcgcccgggcgattactccttctccttctgtccgtcccggccgtcgtccgggggcttgttggccgcttcccttcttgggccttgactt

SEQ ID NO: 7342 - DNA, 510 bp, Oryza sativa
  Clone ID: uC-osflcyp074h06b1
tcgtcttcgccggccatctccgccctctcgaggggaggcacttcaaacatctcggtggcggatagaggcaggtcgcatcgcgtgattgggccgcctctttggtctcccctttccgtgtgtgaatgtctctgcatttctggcttctcccacagtgctctccgctctgctcgacgtcggcgtcgcgatcatcgtttccggtcctcaggtttggggctgcgttgcgcgccactcgaccggaatggcagccggatgcttccaaggttgacgctccatccagctcgccggacagcaacggctcggcggacggccggaggcggcaggatcggactgcggaggaggggttggaccacccgatcgacggctggatgggctccttgtctcgcatcggtagcacagggagtggctcagttccgtcctcgcggcagccaccactttacagattgtcacttcccaggtgatggaaatgtgcaggcgccgcgcttgctgcccgctcgcttcacgatcgagctg

SEQ ID NO: 7343 - DNA, 404 bp, Oryza sativa
  Clone ID: uC-osflcyp132a02a1
agaacgggaaaccagatcaaattggacagcattacataacagcaaaccttccaaggctttttattgggtccattacaaagggcgattttaccaccaaatatgttagcctaacaaagcaagcaaatacaaagtaatttagagctagaatcaatgactgatgcatgtcccgagttataaagaaatagcatcacttgtattaccgcaaacaagagcaacttttcacctaaatgttcataggagaactgaacccatgggtagactatgtgctcaaaggaactttgcaggttgttttattggggccataaccctggcacctgctgcaccggacttgccttttaaatggcaagccggggtctggcggtttttcctttgggctgccaaccccttgtcgggtttttattggg

SEQ ID NO: 7344 - DNA, 440 bp, Oryza sativa
  Clone ID: uC-osflcyp132a03a1
caaaaggaaaacatgtgtaaaattcactatagttttgaagatgcgtacactgataaaagacccaaacgaaatgggaagaaaatacaactgttacacgtacgtgcaacatctaagtagccggccgattgattaatccggcccaaattgacacaaagaatgaacaattaaacgggcttccaaaacagaattggttggccccaatgaacgcgattcatcgcgtcggcgccgtcgtcgccgttgcacttgtattaactacttgccttttgccggtggacttgaactcgagtaattagtcgccttcgctgacgcagtggaattactcgtcgtcgttgacgcagttgagttgctagtcgccgtcggcgcttttgcagttgaattgttttcctttttattagccgatgcagttgagttactactcgccgtcggtgcttccgcggttg

SEQ ID NO: 7345 - DNA, 461 bp, Oryza sativa
  Clone ID: uC-osflcyp132a04a1
tttttgttattctgttatatgcaatttttattcaaatggacacgtacacaactctgtactgaattacaacctttttccagaagcagtaactaatagccgtcttcaccgacacatgcttgattatcatagatcaaattttcttttcattgtctcttttaaatgaaaataccagcttagaaacccccaaagtctctctctctctctctctctctccaaaggttatatgtgaatgcttggcaatactgaagaaccctgatgccgatatgcaaaggtcactactagcttttagagttttaagccttctttgtaaattatacatggcataatcgatggtcctctggcaagaagttgtatgaatcagatctaatggataccatactgaacatttctttcctagtctagtaggatggttttgggcttgtctcaaatttttttagtgatcaatacatgcctgctaaaaa

SEQ ID NO: 7346 - DNA, 340 bp, Oryza sativa
  Clone ID: uC-osflcyp132a05a1
tttttgttagaataaccaaaacataggaggtttcatttcttcttctcaaagtagtgtagcatctttccttctttcaccattacataagcttaagcaataacagataacaaatcctcctcctcctctaggtaaaatattcaacacaatacccttataagtacttattattaggaaagtagcgtgcatgggcataaatggcagcggggggcaggttaagaatcacaatgctgagcagcgaggaaacaaaacaccataatgggacagagcaaaagcctccgaaagggagcttttaggcagaaggcttctcccacttgaggggcttcaccacctcccaggtgaa

SEQ ID NO: 7347 - DNA, 113 bp, Oryza sativa
  Clone ID: uC-osflcyp132a06a1
tttgtgttattttattttttttttttttttttttattttttttttttatatttttttttttttttattttattttgggggaccaaactaaaaaccccacctcccttgaaaatg

SEQ ID NO: 7348 - DNA, 505 bp, Oryza sativa
  Clone ID: uC-osflcyp132a08a1
ataattaattcacaacaccatatttcattgatcaggttcagaacctgcacagaaatacacactaccggtacagatctcaccttctctccaatactcgtacatccatccacgcggtccacacgaatacgtacatctatacggtacacgtacgtacatctactgcaccgcgtacacacacgcacactctcctgcagagacgcgcatcgtcgtcaacctagctagcttagctgaaggcgatgcgtcgccatggcagcacggcggcggcggcgctcacttgccggggacgaagttggtggcgtaggcccaggcgttgtttgtgacggggtcggcgaggtggtcggcgaggttctcgagggggcccttgccggtgacgatggcctggacgaagaagccgaacatggagaacatggcgaggcggccgttcttgatcttcttcaccttgagcttcgggaaggccttcgggtcgtcggcgaggccgagcgggtcgaaagttgccccggggtag

SEQ ID NO: 7349 - DNA, 392 bp, Oryza sativa
  Clone ID: uC-osflcyp132a10a1
ttgttttagccaaaatgcaggaacagcatcactctattccatgcatccattgattaactgaaaacccaatagcaatacagcatggactacgttacacactgtagcttgcagttcaacggattgaaatccagcgtacagtagtagccccccaggcaattgcaacagctacgtcaaaagcatgagtagttgcttcaaagaatggaagcaaagataggtacaaccagatccgtattatagtgtgttttcttgacattcttcctataacagcaagacagggaacaaacaatgtcaaataataaacgatggaggccgataaggcgaacgtttccttaggagccgcagcatgcaaatccagaagctgctggtttgtcggcaccctgatccgtcttgtt

SEQ ID NO: 7350 - DNA, 458 bp, Oryza sativa
  Clone ID: uC-osflcyp132a11a1
agaagttgaatgtagaataagcatatcatctttgttccagataaaatggttaaactctacaggcactctcagtagcttataaataaacaagctactgaaaatagagaatgaccttcagaaacagaaacaaaactccctctcccattgtcacatccattggcatgttcaccccttgcattcttgaacctcttgatcgtccctctcccatggttcgtgagcgagcttgatgataccagctagtgatgttcccttcgatttgcagattgtttgctccgcaaaaggagatggaaccctaaagtactgaattgcttgatcgattgatccagaacgggacaatatatatgcctttccgcgtgatgcttcttccacctgccaggtcgccaatgaaacggaagaatgatgatgatgcaggtatatgcccatggaagatgtaatcacatatgtaggagaggatttga

SEQ ID NO: 7351 - DNA, 123 bp, Oryza sativa
  Clone ID: uC-osflcyp132b01a1
ttttttttttttttttttttttttttttttttttttttttttttttttattttttttttttttttttttttttttttttttttttttttttttatttattatattttttattttttttttttt

SEQ ID NO: 7352 - DNA, 274 bp, Oryza sativa
  Clone ID: uC-osflcyp132b02a1
ggttcttcttgtccgttttttcctatccaacaccttgccaaagccaaccggccacctgctttgcatggacaacaagcatagcagattagacaggctgcatacgacatgtgcagaggtatatgaaccttgagcatcctataatacaaggaaaaacatcaggatcgtcatggaaagatggagtgtactcaagccaacacaacacggacttatacgtgagacacctgtagcttgactgtactaggaggactgtcaccacttattgggggtacctatg

SEQ ID NO: 7353 - DNA, 291 bp, Oryza sativa
  Clone ID: uC-osflcyp132b04a1
aaagaacatggcgaccattcatttaaacattgccaggattatggaaattttgcaacatttcaagggaagcaccgggctcccaaaaacatatcccttccccaacattttccaacgaacacaaccagttttgcattacaaattgcccttcttcaaaaactaaggaacaccacccctatagccttcccatggtaaacacaactttgtacattgacgatgcattcggatcagctttaaaataaattcagccatgcttatgaatctccgaaattttctcaatcctcttagatggca

SEQ ID NO: 7354 - DNA, 470 bp, Oryza sativa
  Clone ID: uC-osflcyp132b05a1
ccaagacagtaagcggcgaggcaatttatactctagatgtataatcttgaacattttcttccgaaaaggagcaatcacgcaggcaaagtctcaagcttgaatttgaagcctgacaacagcggttagatgaattgcagaaaaggaaaagaagcaaaaacaaatatggtgcgattcttcctgacgcatctctatacaggttcatttttgcaacaaagaatggcagaaatgcctgaggacttcttcaccaatgcttatttctccaggctatcatatcatattagaagaaataatgccgccatcttctcgttgtcagcctatggaagagtagctctcaattccttcctgtctgccccaaatgacttccacaccaaaacccttgacatatacattcgtaaagagctcagaaatatcaggcataggactcttctttgttttcgcaaaggcaacatcgactttcttttttgattctt

SEQ ID NO: 7355 - DNA, 439 bp, Oryza sativa
  Clone ID: uC-osflcyp132b06a1
aaaaaaaaacatttatactcaacgagaacaatgtgtttcaatcaatcgtcagaaacaaagatacaaacagcacgagtaaatcacaatccacgtttgcggttaagcacacatgagctgttacatgctctcccagaatcctcttgccaggtgattcaaccattaccgaatctcaaactcccaatacaagtgactggactaagtcactaatacggtgcagctccatgactgctgctaatcgacagtcagcaatagtcccgttcttttgtctattgggcacgaggcctactgttctccgcagccctcacttggagaaagtatgggtgtgccatagctttacgtgcagtaggtctattctggtgatcatagcgaaaaaccttgtcaaggaaattgatggcctctggggatactagatgttggttggcagcattaataaactttg

SEQ ID NO: 7356 - DNA, 338 bp, Oryza sativa
  Clone ID: uC-osflcyp132b09a1
ggggaaaaaaaacttttttttaaaacaaaggttttacaaaaaaaacttttaaaaaaaaaagggggaaaccccccatttttgtttggtggagcccctggtggtggttggttggttttttttaacaaaaaaaaggggggggaagggatccctggacattggtgtttggcaaggggggcttgaagggccttaggtcttcaaaccaaatattggccttgtgggaaatttaacgggggggggggaaaatattttttttcccataaggccccttgagggacaagggcaggtcctcccaccataaaatgggtaaaaccctaattttttttttaaagaaaattagg

SEQ ID NO: 7357 - DNA, 477 bp, Oryza sativa
  Clone ID: uC-osflcyp132b10a1
ggcggcaggtgcggcggccgggccttgggcggcgccgccgccgctttcttggtcttggcacggatggcgtcgagggcctcgacgtacttctgcacccgcttctcctgcactcggcgctgctccttgacctcgccgtcggcggcgatggagtcgagcttgaccagctcattcatcagcgcctcggtgagcgccaccacgtcggcgtcaaccaccctcccgcccttgctcacgatcgcctccagcgccgacaccttggaggcgagcttgtcgacgtcgagggcgacgcgggagacggacttggcggcgcgctcggccttgcaatggcggcgctccttcgaggaggcgcttggcctgggcggtggggtcctcgaggaggagcattttggaccggtccttgacgccggcgatgtcgaggaacgccttggagtccctcttcttgtccctgtccaccaccttttggtcgtcggggtggagccc

SEQ ID NO: 7358 - DNA, 457 bp, Oryza sativa
  Clone ID: uC-osflcyp132b12a1
gggatgaaagcagaggtagattatattaagaagcctggcacgcatgaggagatggagcaggagtacatgatgagatcaccatgatgatagatgatccatccaagctagctagggatccatccaacattgatcgacacacgcacacactgacaacgacgacgacggttttatttaggcgtcagagcaaaaggcaaggcctgcctacatataagctgggtactaatgcaagcaaattaaggcctcgatcaaagctctgatcgacagtagcagcatccatacgataaatcctcatgcagccgggcgacgacgacgatagattcagttgcaggagcagcaggagcagccgctgcagctggtgccacacttgcaggtgttgcagccgcagccgccgttctcgccgttcttcaccggcatcttcattcctccagagctcgccttgttggatggagcagcgagg

SEQ ID NO: 7359 - DNA, 332 bp, Oryza sativa
  Clone ID: uC-osflcyp132c03a1
cattacaacctcaagcagcatatgcggacaggattacactagcagaccatttgcagcgcacgagattaaccagggttgacgtcccaaccatgtagagttgctttgctagctcgatcatacttattcatcagcagtgcagggtatagctagcacacttaagcaacagtattataggagttgtatgctgtaagcgatctgtaggtagcttttaggggcgccagagcctaaacaaggccgtcgtacgtcgttatcagccctgcaggctgggcagcgtgtaagcgccccacttggagcccaccggggcggttggcgagtttgcaacgcttggggat

SEQ ID NO: 7360 - DNA, 362 bp, Oryza sativa
  Clone ID: uC-osflcyp132c04a1
cattggcaacttatttgctcattttataaaaagggagaatgcgtaaatgacaggctgtctaggctgtttagcgaaagtagacaaaacttcacttttttaaagggaaaatgggacttcactttttttaagggaaaatgcgtaaacaataggttgtctagcgaaagtagacaaaacttaccaaatccaactttatgcctattttacatcacccctgctgggccggggttttgttccgggatttagtaggatgtaaaaggctcccctataaggaaagaaggatcggtttgatgagttttgctcattatcctttaaaccaaatagcttccttccccaccccaaacattttgccttggggagaaaaa

SEQ ID NO: 7361 - DNA, 179 bp, Oryza sativa
  Clone ID: uC-osflcyp132c05a1
agacagaagctcagtaatcttttgattttttacccgagggcatgagtggaaggaaaatcggctgacataacatagccgtccagactgcaaatcaaactcaaccatatgatggtaaacgtgactgacgattaacgacctgcgcctatgacagtgataaggaggataaacgctgtgcacca

SEQ ID NO: 7362 - DNA, 440 bp, Oryza sativa
  Clone ID: uC-osflcyp132c09a1
tttttttttttttttttttttttttctttttttttttttttttttttttttttttttttttttttttttttttttttttttttttaagaaaaaatttttttaaaaaaaaaaagcaaaaattaaaaggggcacacttggggcccggggggaaaatcccaacaagccaaaaaaatgggggggaaggaaaaaaatagggccccccctattaattttttagggggcaaaaagaaaaaatcaaccttttccacttaaaaaccccgggaggggggttggttatctaaaaccctaaaccaagaaaaaaaaaatttgggaaaaccccaaatggtggggaaaaaaaccaaagcctccaaaggggaagggggattttttaaaggggtggaaaaggccccccctagggaaaaaaacctggaaaaaaacccggaaaaaattaaagggggccc

SEQ ID NO: 7363 - DNA, 80 bp, Oryza sativa
  Clone ID: uC-osflcyp132c10a1
ctgcggttttctttctcttcgtctcttcctctttcttttcttccgtcttttcccactccctctccttttttttttttaac

SEQ ID NO: 7364 - DNA, 360 bp, Oryza sativa
  Clone ID: uC-osflcyp132c11a1
ggggtgaaaactcagtgatttactacggtacaccgtacaacaggcttcacaactggcaccatatgacgccacggcctttactgatttagcataccagcatggtggaaggactcatgagaaaagtatccaagtctcaaaacgaaagcatgttctagtttacagcagtaacacgactatggcaccaacgacgggggaaagagaaaaacggcaatacagtttcatacagaatgcaacacatttgcttccaggaaaagaatgacaagaaaatggttgaccatccccaacgggaaggaattgttggcagaggagctgtagcaaattaacgccttttcgctcctggggattgcagtaaccggcctg

SEQ ID NO: 7365 - DNA, 436 bp, Oryza sativa
  Clone ID: uC-osflcyp132c12a1
agatgaatgaagatgtacatttttcatgtttttggacagatatgcttagattctgccttttacggatacatccatgctattttgcaagccatgtaactgatttataattaatgcagcctttccggtggttccatgacgatcatcgcattactcgttatcatcattagccaggtcgaactgcttgagcagcgcgccgcagatgggcagtgggatgttcttgaggtagccgagtgggttggctaagcgcaggttgtcacagatgccgacatttctggtgagcaaaacacgggcacgatccctttcggcctcgatttcagagcagtttgcaagggggctgtggacgaggacaaccttctagatgtcctcctcatggctgtccttgagctaaaatttgtatgttcccgtcttattagtcacaccgttaattcgaacgctt

SEQ ID NO: 7366 - DNA, 101 bp, Oryza sativa
  Clone ID: uC-osflcyp132d01a1
atctatgttattccctttcggttttttaaaccatgttctcattccaaaaaggccactcaaaccataagtgacaaataacaaacccgaaaggggcgcccccc

SEQ ID NO: 7367 - DNA, 491 bp, Oryza sativa
  Clone ID: uC-osflcyp132d02a1
caacagatccattctatgatttcaagtctcaatagaaattaagtgttcctttctcctcataccatacaattatcctcattcctaattctacagatgcacaggtcattgttctatgatttcaagtctcaacagaaactaattgttcctttgttctcttaacataacagttattatgagaggaaggcagaggttaccgttcaagaacaacgatttttttgggtgtatcctgcaaagcatgtttcggaaatgcttttttgaagaaatcatcatttgctatgagatccccaccctcgcaccagatgacatacatgcaagctacgcaaaacagatcaagcagtacatgattgaattgtaatgtgaaacgatcataataacatcagttgaccttatgttgacatgatgaaacccaaccaggcaactgaagcccaacattcggcagaatctattataatccatacgaaaagcctgggatttgagagagaataactgtc

SEQ ID NO: 7368 - DNA, 302 bp, Oryza sativa
  Clone ID: uC-osflcyp132d04a1
ttttttttttttttttttttttttttttttttttttttttttttttattttttttttttttttttttttttatttattaataatatactgggaatgaaaacaaaaaaattaacaaaattaacaaaaagaaaaagaaaaaaaaaacccacaaataaaaaaaaaaataaaaaaaggcaaaaaagtaaaaaaaaaaagaggaagggctaaacaaaaaaacgagagaatactaatagaaaaaaaacctaaagtgcaattctcctgaaaacacacatgaaaaaaaaaaaaaacaataggggggttct

SEQ ID NO: 7369 - DNA, 326 bp, Oryza sativa
  Clone ID: uC-osflcyp132d05a1
caaaaaggaaagggcatcactcatccctaaatattcaaaaattttcttagggagggacccaaaagctaatagagaaataccccccatttcctttcctatttttcttttaattcccctatagggaaagagcccatgcccaagatggaccaaaacttttttttttgaatccagcagggaaccaaggctagtcaaaaaagctaatttcacctttgaacgggaatggggaagcaatgaagtccagaattacaggaaaaggtggcatttgaggagagaattaggagcctgtcacaactcacaaggttttatacaagttcaaaacctgaacc

SEQ ID NO: 7370 - DNA, 420 bp, Oryza sativa
  Clone ID: uC-osflcyp132d06a1
ataattaattcacaacaccatatttcattgatcaggttcagaacctgcacagaaatacacactaccggtacagatctcaccttctctccaatactcgtacatccatccacgcggtccacacgaatacgtacatctatacggtacacgtacgtacatctactgcaccgcgtacacacacgcacactctcctgcagagacgcgcatcgtcgtcaacctagctagcttagctgaaggcgatgcgtcgccatggcagcacggtggcggcggcgctcacttgccggggacgaaattggtggcgtaggcccaggcgttgttgttgacggggtcggcgaggtggtcggcgaggtttttgagggggcccttgccggtgacgatggcctggacgaagaagccgaacatggagaacatggcgaggcggcc

SEQ ID NO: 7371 - DNA, 362 bp, Oryza sativa
  Clone ID: uC-osflcyp132d07a1
gaaatgggagatcttgattctcaaactagactttgaaaaagcatttgatacaatagagcatgccaccattttggttaaagttttttgcatggtctaatttcgaagtaagcttttgaaaaggatcaatttgtcaaaaaaaaagagggggaccaatccaagcaaccaagtataggtaatacaagtaccccagagagagggagggagggggagagagaggccatcagtggtttgaggccaaaatctttaacgcagaaacggttacagtgcaatgttaagtctaagcttctaacactgaccagttaacaggggtatcacaatttataacttgtttgctttaaacgaccaattatattgtatatatg

SEQ ID NO: 7372 - DNA, 311 bp, Oryza sativa
  Clone ID: uC-osflcyp132d09a1
atatatatggagaacaaaggtaggctgaatgtcccaggagaactattgatgtacaagctagctgatcacaacataagggatggaaaggagaggacctagtgagggagctgacatagatgaaaactggaaatggcactgatttttttctagttctgaaaccggttgcggctgatgtatgaaaggatgcctccatgggtgaagagagccagttcgacctttgggcgaaagggaagagttcattttaacgattgacacgggcaggatgtgactgtcatgcactgcctaggactgatagagttgacgtaggccgg

SEQ ID NO: 7373 - DNA, 482 bp, Oryza sativa
  Clone ID: uC-osflcyp132d10a1
aaatatgaacataagtactgcaagttaaaaatacaaattacaagttcctaaaattattgtaagtgcttattcatacaaattacatgttccacaagaaatttaaacctgaaattacatttgattcaaactccacaacccatcggcaacccagtcccgatattgattcattacctgcgagtccaaatagtctgttgcatcatttgatggagaagacatttttccagccaatggatcatagttttcatcttggtcacaatggttgaattctgtatcggctagttgactgtctttaatgaaattatgcagtactattgcatgcgacaattattttgctttgctttttctgcgagtaacttgctaaatgaaacaaaatcctccacttattcttcaagactccaaatgacctctttatgacattccgacacgaagaatggcagtaattaaagcgctcttttttttcctctgggcattatgcattcgtt

SEQ ID NO: 7374 - DNA, 326 bp, Oryza sativa
  Clone ID: uC-osflcyp132e01a1
aacaaaaataaacaagttaataattggggagtatatttaaaatcgggggagcggagtagtacacacacacgggtaattagatccaatcgccaccacgcgaaatcaatcgcccaccagctagcttattgtcgtcgtcgatgatcaatactcaaatacacatgtttaattgcgacgcgcgcgtgccgtccgtcagccggggaaccggttgatcctgctgaagccgcgagtgtacgggttggcctcctgcattttcgagacccccaggagatccacggcgttgatgggggaatcgaagaccttgtctacggtgggggctatggaggggg

SEQ ID NO: 7375 - DNA, 421 bp, Oryza sativa
  Clone ID: uC-osflcyp132e02a1
aatattataatctttaaagatattataggaacgcaagcattgagattagagttacgcaaacatgacgactttcattgcgtaatacaggtcgttgaaagaacaaccaacaaagcgaatgcacctcttttgggttcttttttaattgctaggcggccttgcaactacatcaaccaatataccaccactatatgctcatgctattgtctccatagagactacgctacttattaactcacacttgcttggaataaataccaactaaatgaattgacttgatctcttctcatacaagtcacagacccgaattgggtagtgaagaatgaatggccaagagaagagaacaaaatttatacattcgtgcatcaatgtacttgaggggcgttttttaatgctacattcaaactgttttccattgtttgcc

SEQ ID NO: 7376 - DNA, 464 bp, Oryza sativa
  Clone ID: uC-osflcyp132e04a1
agggacaagctagttagcttcacatttcacattgatcacagcgtcatttgtcctggctactttcttctccctcgtaatccatcaacttccagtggccatcggcgcccctcaccatgcccttgtccctctgcacgctccacgacggcgggacgtggtactcctccttgagcgcgtccacattcttgttcaccagcgccacgtcccggtcgacctccagcttgaacccgccgcgcttgccctgcgccccggcgacgccgtgcatgtagcactcgaggctgtgccacaccgtctggttccccggcgacttgaggtacggcgacctcctcgtgtcgacggggagctcgacgccgacgtccgcgtaccccatcggcgggtacttgggcacgacgtccggcgagttgcaaaccccgaggaggcgaaggccggggagctcgtttaaaagctttttgaacccggattcccca

SEQ ID NO: 7377 - DNA, 351 bp, Oryza sativa
  Clone ID: uC-osflcyp132e05a1
gaacataatcaaacttggataagattaagttcaaaggcagaagaacgcatgggatgcccttaggagtgataggcataccgacatagagcttttgtccttgctatccaagttaacaggttttacccaacactgcctttacattacatgctactacgaaatacatacctgaataaagaaggcataccgaaattgcattagaaggggggatgtccgaatttacccaaatactatacagttgccaattggtaccacttgctcacttgtttcacacatggagggcagttggctacagcgacatgttgtgctgctggagcccactttctgaatagcataacgcattgccgcgattcg

SEQ ID NO: 7378 - DNA, 411 bp, Oryza sativa
  Clone ID: uC-osflcyp132e06a1
gcagttgtgctgagtactataattcagtacttgcaaagtcaaaagtagcacggacacagtcacgcccaaagctgatgacactcgacagacatactgtactgtgcctggagactcaagtagccaaagcccacacactgtcaaaactcaaaaccaccactagctcatatcactacattacagatcagtttacattgcagagtgcagcagcagcagcagcagctaacaccaggtcgagagaacgggggatggtcagagcagccttgggctggtgtaagggccattgaggatgctgttggcgatggcgtggtagccggcctccgtcaggtggacgccgtcccagttggcgtacgccgacgggtccgtgcacacgctggagccccgcacgccgcaagtcgccttcgggttgaagtt

SEQ ID NO: 7379 - DNA, 491 bp, Oryza sativa
  Clone ID: uC-osflcyp132e10a1
ataattaattcacaacaccatatttcattgatcaggttcagaacctgcacagaaatacacactaccggtacagatctcaccttctctccaatactcgtacatccatccacgcggtccacacgaatacgtacatctatacggtacacgtacgtacatctactgcaccgcgtacacacacgcacactctcctgcagagacgcgcatcgtcgtcaacctagctagcttagctgaaggcgatgcgtcgccatggcagcacggcggcggcggcgctcacttgccggggacgaagttggtggcgtaggcccaggcgttgttgttgacggggtcggcgaggtggtcggcgaggttctcgagggggcccttgccggtgacgatggcctggacgaagaagccgaacatggagaacatggcgaggcggccgttcttgatctccttcaccttgagctccgcgaaggccctccggtcgtcggcgaggccgagcgggtcgaagc

SEQ ID NO: 7380 - DNA, 319 bp, Oryza sativa
  Clone ID: uC-osflcyp132f01a1
gggatagaatttccaaaacatgggaggcattcattttttcttctgaaagaggagtaacatctttccttctttcaccatgacatacgcttaagcaattacagataacaaatcctcctcctgctctaggagaaatattcaaacacaatacccttatgaggcctcaccattaggaaagtagcgtgcatgggcataaatggcagtggggggtaggttaagagtcacaatgctgggcagcgaggaaacaaaacaccatattgggacagagcaaaagccttccgatgggagcttttagggagaagggtttctcccattgaggggc

SEQ ID NO: 7381 - DNA, 433 bp, Oryza sativa
  Clone ID: uC-osflcyp132f02a1
gggatagaataaccaaaacataggaggtttcatttcttcttctcaaagtagtgtagcatctttccttctttcaccattacataagcttaagcaataacagataacaaatcctcctcctcctctaggtaaaatattcaaacacaatacccttataagtacttattattaggaaagtagcgtgcatgggcataaatggcagcggggggcaggttaagaatcacaatgctgagcagcgaggaaacaaaacaccataatgggacagagcaaaagcctccgaaagggagcttttaggcagaaggcttctcccacttgaggggcttcaccacctcccaggtgaagtctgggtcgtcccttccgaagtgaccgtaagccgcccgcttgaggtaaccgccgttggccccttttttgaggtcaaggttgatgatgatcatgc

SEQ ID NO: 7382 - DNA, 440 bp, Oryza sativa
  Clone ID: uC-osflcyp132f04a1
attcaaaatccgggcctcattttattcgggaaaaagatgctcaggccagttccagggcacctgatggcaagctcacaagttcagacagtcacgcacacacatacaatacttttggacaaactgtaacaagatgcaagctcccttgagattatcttatctcactctacgatgactgccggagctttgggcgcacgaaatcggcgttggcaggcacggagatgtcgacggggggccgcagctcaacgcacaccttgattgccccatggacggggtcggacatgaagttgctgatgaggtcctggttgatgggagcatccttgtccactgtcacgaatgcttgctgggtcaggatgtagtccaagcgtggcgcccatttccttgatcccagaccagccgtcgttgagcagttgtcaaccatgaaggccacttcccgagcatgc

SEQ ID NO: 7383 - DNA, 388 bp, Oryza sativa
  Clone ID: uC-osflcyp132f05a1
ggcaaatgggttcaatgttttcagcaaatgtcctgcgaatcaccaggcaaaaaaaagggagctagtacaaagcctcaatacacactggagtaaaaccagcaacggcatttgcgctccacatttcgcgatgtgcagcggtctgagataaacagtttctatgtgatggaacttaaaagtcttttttattcaaaaacacgggagcgggcaatcgctcactatctgtccctctgggtattgcttagttttagttgaggcatgagtaagcgagcgttttttcctccgacagcttctgggcagtcgcgtccatttttttccttgagaactcgtcgatcgggagaccctgaacaatcgtccattcgcccccactgcatgtttctgggaacgagtt

SEQ ID NO: 7384 - DNA, 516 bp, Oryza sativa
  Clone ID: uC-osflcyp132f06a1
ggaacaattatcagaggctcctctggattatttatttataaccaaaaaacaagggccccgtacaggcagtgacaattcacaaacaaggttttgcattccggccgggctgacccacacagaagcacaatttttatgtcaaacatatatggcctacaaaaaggtcaaaaccatcccataaaggccacgcagcgtgtgaaaatggaaattacaaccatcaatgtgctaatctctctccctccctcctaattccatctaatcgatcttcacattcgaatacaggagggtgtccctggtaagtggcatattcataagcaagcaaaccccaatgagagtagagacaagaagaatgatccctgtaatccatgccaaactctttctaacaagtatttcagaagaggctattgtagcggtagtttggcttgtctctttttagccatctcgaaatgtgcagtgaagatgctggacccactaaggatggtgaagccctctttgtggtattactaaccaaccattttt

SEQ ID NO: 7385 - DNA, 398 bp, Oryza sativa
  Clone ID: uC-osflcyp132f07a1
ggaaacaaggatgctacaatatattattgcagaaacggcaccaaggccgtttctattattcataggtaacatcccagcaacaagaggagacagagcaccaaccacacaccacattccactgaactcacccccaactaaatcaaactagaaaactcccaaattcaatcgaccttactttcttaaggaaaaagagcagtgcctaggaatgcaaagcatcctgaaatatctctcttctcttttcatctctgaaaccagagaatggaaacaaagcaaagaaactccaatgctctcctctttcagagtctcagcctgagatgttggcccactcacttgttcgacggctcgccctcgacggccaacgggacggtgctagccatggtgcgggacttgagggcata

SEQ ID NO: 7386 - DNA, 432 bp, Oryza sativa
  Clone ID: uC-osflcyp132f09a1
ggatgccaagagaaactaatatttacagaacagtttaactaacatcctttgcaagttacattcttttcaactggacagactttctatagaaagccatatgaaagctcagaagtgggaacatgccgaactagcagctcctgcagctgctgaaaacatctactacgagggggaacctcaaacctggtacaggatttggcgatgccatcgtgtaactaactagtcattggcgactaactctaagtttgcattctctaacctctggaggacaagcttcttttgtggagcaaggcctttcgcgatcgccacggagcttacgtcgacgaggacggggtcgtcttttttgaagtcgcccttcaggacactgagggcgatcttgttctctaaccgtctgctggatcaccctttttacaagcctagcaccgtagttagggt

SEQ ID NO: 7387 - DNA, 385 bp, Oryza sativa
  Clone ID: uC-osflcyp132g02a1
aaatctggaatgctacttcttttcactgaactcattttgtgcatttgtacaatggcgatgcaactgcatcctgaggggaaaaagatacatacagaaagggtgaaacagaaaaaaaggaaccccctttggtcttctaacttatggaacatctttcattcctgtatacaaagtgtgtttgggttttctacaatcttcttggagaatcaaatggtggtgctttcagttgagagatttcgagccatggatctggaacatggttgcttggtctttttgggtagagtgcattgttgatagggctgtagttagctgctccagctgaataggctggatgaggaggcgacggcatgcaactcccattcgactgccggtactgccgtaatgggct

SEQ ID NO: 7388 - DNA, 326 bp, Oryza sativa
  Clone ID: uC-osflcyp132g03a1
aaaaacaaaggggcagggatatttttgaactttcgcttacccatagatggcaggcagtctaggaggggaccaatccggccttttgcccccatacaggcactcacacgctactacgctttttttacagggggaacatatacctatatggggacaaaaaagggcatttgacatataattggggggcacatgggggcatgctgctgctgcatgccgcgctagattattcgttcgcagcaggtagccaaagtgggggaccagttttggcagggggggcccggttcaccaggaagagccgcgggaaccttagggggggccgggaattcctg

SEQ ID NO: 7389 - DNA, 512 bp, Oryza sativa
  Clone ID: uC-osflcyp132g04a1
aaaaatcaaaacttactacagtgttgaaggtcaggtttagcaagacaacacgtacaatcatacactctgtgcccacaaggttcctgtactacaaaagcgaaaattgaatactttaggcagaaaaagagagttggcaacaaaccaaaccaagcaacaagaacgagtcagtccatttttctgtccccagcggcctaatctagccaccgagtaactccatcttcttcactcgcagctgcaaggatctcgatacagacgtccaatacagccgatgaatttctgcaattgataagtttgcaaccctccaacaaggacccctccagcatccagctctcccaaacatcaaatgtatgacttgcaaacacaaactccatcctcctattaatctgcaatagtttaccaccagcgacgaaggaacgtaatcccatggtatccttgtttttgaaagtgactaggaactgagcagaagggtccctgtttgagcatttgacacgatatcaggatccaaccaccac

SEQ ID NO: 7390 - DNA, 284 bp, Oryza sativa
  unsure (1)..(284): unsure at all n locations
  Clone ID: uC-osflcyp132g06a1
ggggagcataaaggcggggcaccccttgaaaaaacgggggtgatttttgccaaaaaggggggggggggcaatagttctttattgggggtaaaaaaaacgggggggccccgggtaaaaaccaaaggacaactcccccgggttttaaaaaatgtttccaaacccccgggggtgtttttttacccaccccanaaaaagcggtgggggggggccttttttttgaaaaaaaaaccccccggggtggaaatataatttttttgggaagggggaatttttacccgggggaa

SEQ ID NO: 7391 - DNA, 318 bp, Oryza sativa
  Clone ID: uC-osflcyp132g09a1
aaaaaaaaaaggatggctgaatgactgaatgatattatgataatgttaaatgaacttgaactgttcaagataggatagataggagggggggagccccccggagggtggaaggcggcggcccaccaaaccctaaattcctttcattttccttttttttttcccgcatccgacccattgaggcaggggaaattcttttcttaaccttctaaggtttcgttcttgcattcttctcgaagcaagaaaagatgtcaatggcgtggggtccccccccagttcaacaacgggtgggcccggacaacgcccccacctgggcccact

SEQ ID NO: 7392 - DNA, 433 bp, Oryza sativa
  Clone ID: uC-osflcyp132h01a1
gagaaaattacagcatgtaataaccgagataaccatgagatacccgcacggtttcgtaaaccatgatcacaagccaggtttttcactctttctagagggagaaataacagcccattagactggcaacaatgccagcgcgaccacacacacacacacacataaaaaaaaaaaaagaagacagagagcacaaagaaacgaacaccctacagcaccaagaggcagcgcaatgaaccacacatcagcaggttaaaatgtcttccatggttatacgcagattatgatatagaggtgtctcctttgagtcgaaaatacgacggactccataaggcattaaacagttcctaagggttccagctaagtcatcaaaaagaaaaaagaaagaagcaaccgagggtcacgcaacttcgcccttcagagtgacagcatccacaaa

SEQ ID NO: 7393 - DNA, 309 bp, Oryza sativa
  Clone ID: uC-osflcyp132h02a1
tttttttttttttttttttattttttttttttttttttttttatttttttaaatttttaaaatttttaatattatttttatttaaattattaaaaaataaaaaaaaaaaaaaaaaaaaaaaaaaaaaaaaataaaaatagaaaaaaaaaaaaaaaaaagaaacaaataaaaaaaaaaaaaaaaaaaagaaaggacacataaaaataaagagaataaaaataaaaaaaaaaaaaaagaagcttaaaaaaaaaaaaaaaaaagataacaaagggaaaaaaaaagatcaaaaaaacaaaaaaacaacaacac

SEQ ID NO: 7394 - DNA, 414 bp, Oryza sativa
  Clone ID: uC-osflcyp132h04a1
ggctcaataaatggaaaacggtggctttaaggaaaacaggaaaaattaatggggaattggtttaaaaaaaggaaagggccccagtttaaataaaggggacgaaaactccgttaagataaaaacaaagttatggaaaaaaaacaaagtgtgaaacaaaccgtccacattaatattttacaaggccccaaaaaaattttccgtgttgggaattttgatggaaaccaggggcgaaaaaaatggtcaaaaatttttctcggggggaaggccattaaagtttgggttttttttaaaacccccggggttggggttaaaggaccctttggaacaaggggtaaaaaatctatccggcttttttttttttggaaaatatgggggggtttcgctactttgaaaaaattgtgggttgtgttaaaa

SEQ ID NO: 7395 - DNA, 426 bp, Oryza sativa
  Clone ID: uC-osflcyp132h05a1
gcgggtaacatacttgatcagcatgttaaaatcttaaggacaatgaagtgaattaattccatacctacttgatgctgccgtgaaaaggtcaagtgtagaatataatgcacagctatctcatgtagcgtccagccaagtcgatccagaaccagagtcacataggaaagaaaagaagggaaatccagacgaacaaacaggcagcatgtgagaactgagaaactacccacgaaattgtcaagtcagtcatcatccttgtaggggtatttcctctgggacttgcttggtaagctttactcgcatctcgtaggcattatccccacgaagcatattacggacccatgtaaccttggtcttcatggacaccatttccagtgcacccctaataactccacttagcacattgcagtactgaagacctttggcaag

SEQ ID NO: 7396 - DNA, 340 bp, Oryza sativa
  Clone ID: uC-osflcyp132h08a1
aacaatatgactaaaatgcttccaatttccaatagtcgagaggacagaggaaaagcagacaacttctttaatggagatcccaaacaaaaagatgggaaaaagaacgggaaaaaagggactttttttttccaaatggcaccacatcaagggaggaaccaaataatatcccttttcttatgaatgacacaaatattctttggtttagattatgttctttccttcttttttccttctcctctcttcttgatgggcgtttctttggtccgagagaccgttcttgcgtcactgcgccgcgacggtgcgggaggacgaggactgtaccgccgccgtcggtgcggag

SEQ ID NO: 7397 - DNA, 318 bp, Oryza sativa
  Clone ID: uC-osflcyp132h09a1
ggctgccacataaatttttccctttttaacccaattccagagggaaaaaaaaaggggtgaaatgaaaaacccgggaaccgttcttcaacccattaaaaattgtttccagggattcccctacttacaaattcaagaagccttcacatttgtccactaaatccgaaaatttcagggctcataaaatctccactgtttccaatgctgggactcaagttgttagttggggattcaatttcatccactgcaaagcggtttggaatgcaagttcctttaccaacaaatccctggttttttcctcgcccttgatcacgggctttt

SEQ ID NO: 7398 - DNA, 404 bp, Oryza sativa
  Clone ID: uC-osflcyp132h10a1
gaccaatatagtttgctgccaattaccatataccacgaccgtcaaaacaagaagctgaagcatccagcacagtaaaacacggttcaacaacatccagggagataacaacggaagcataaaagtctaatatgacgattgatttaaccagtccatgaacccggcgagtgacgctctagttcttgatcttcttcttgggcctcagctggttgctgtgaccacacttcttcttgcggcagttgacagccctagggtgcaggcgcgcatagcatttgcggcagatcatcttgtcctggttgtacttgcgggcaagcgcctgaagcgacggctcgatgataccgccacggagcctgaggacgaggtggagggtggactccttctggatgttgtagtcagccagggtgcgt

SEQ ID NO: 7399 - DNA, 404 bp, Oryza sativa
  Clone ID: uC-osflcyp134a01a1
ggggggggcaattgctcgaatcagttatgttttgtacggctcagtgcattgtacaaactgtaagacggttttccaatcttattagtgctttcgacaatctctttcaccataagaaatgaaactttggctctctaagggaactcatcttgcaaacggacggagcacacatgggaaacatttgctgcttctttgtaagaactcgaacttctgttgttggagggattgagtgtcacactcttcgatgctgctccagaatacaagtgtggttttgcattttctatgtagaccgggataatcgcccttactgaaatgcaaaacattcactatctagggccccagaccaaaattggccacttagggtcctttattggataaagggctttctttttgtcaacaattttccc

SEQ ID NO: 7400 - DNA, 393 bp, Oryza sativa
  unsure (1)..(393): unsure at all n locations
  Clone ID: uC-osflcyp170a03b1
caaacaaagctgttctgtagattctgtaaagagaggatatggttctacagattttaccatcaccaaagtgaagagagtccacagaaagaatcgagttacgcaaaccttgggaaaactatacaaaaattaccccccggtatcacacttttatagcctctttttattttatttgtcagagttgcatcaggggcaaggccatcaccgcaccaaaaacagaaaacataaccagcatcatccagaagggcactcgcttcttctgcttctgctcgcctgcggcctcgccgcaggtttcgccttattggctactactgcagcctgttgttggaccgcaggagatggagctggggccagggttctcttgagtcttctggttccgctaanggtttgctccca

SEQ ID NO: 7401 - DNA, 314 bp, Oryza sativa
  Clone ID: uC-osflcyp170a05b1
cagtgtttatatctgctaaactctctgactttggtctggcaaaagctggcccagaaggcgatcaaacccatgtatcaactcgggtgatgggaacatatggttatgctgcccctgaatatgtgatgactggtcacttgactgctagaagtgatgtctacagctttggggttgtccttcttgaactcttgactgggcgtaagtccatcgacaagtcacggcccagcagggagcatagccttggttgactgggccctccccgatgctgatcgacatgaggaggcttatcctaattattgacccaaatctgtgaggta

SEQ ID NO: 7402 - DNA, 382 bp, Oryza sativa
  Clone ID: uC-osflcyp170a08b1
gtcaggctttcagacttcagaagttcagagacttcatttaaactggtgtgcctctgtctagaatcctatgttgactggagttatatatctgccttgaccggccaaaagaagccagatctaggaaaatagataaacctagaaataatagaagaaaccaaaatctcaaggacattgccataggaggcccccaacaaatgttttccgtgtcaaggaggatgtccgccctatattctgggctaacagaccaaagagctatatttcaaggaccctcggttgggatcaatacccacattggcggtggtgtgattcccggaacccatcgtatggagcactttactgactaccagttcactcgaccccctgggaagggttaagaagcttc

SEQ ID NO: 7403 - DNA, 482 bp, Oryza sativa
  Clone ID: uC-osflcyp170b06b1
aatgtcttccagaagtgcatgacgtttccgccctctagcggttaggcacaacagcagcagggttcatgctgtgatgcagataagaatcccaaggatgtgccaacctatgagcgctccgtgtcactgcccccaactttgaagatcatatctgctatgaaaggaagccgccaaaagaatgggatggcttcatcaactgaaagtcgccacgtcaaatgggcccctgacgtgtatgaccccccagtgacatctgtatgtcattcagtgaataacagctaccagcgtcggtccaaatcccggaagaaggacaagaataagcagaagcagaaacaaaagcaaaaggtgtaggtccaagaaaaaccaccagaatgctatccagagttcaagcagtgctccaagctcctggcgaacttgataggctcaaggatgcctgaaccacaagttgtaattcagcaccagacgatctctacaaacatgagaccgat

SEQ ID NO: 7404 - DNA, 177 bp, Oryza sativa
  Clone ID: uC-osflcyp170b09b1
agatgctgcagcctgcggagcagaggagaaagaaacagagtttcagtttccgacatgccgcggctgctgcctggaactggaagggcctcctccttgtcctcttctttgctactgctcctgctgctcggtgccgcgatggcggccgctcctttggctgcgtttatgttaactaagacc

SEQ ID NO: 7405 - DNA, 103 bp, Oryza sativa
  Clone ID: uC-osflcyp170b11b1
ccacgcgatctgtctcgccgcctcctccccctcctcgtcgtctccgttttcgaacgcacgaacgtcaccagcctccctggcctcgatggaacgctcctttccg

SEQ ID NO: 7406 - DNA, 274 bp, Oryza sativa
  Clone ID: uC-osflcyp170c09b1
gttgtgagttgttgtaaagttgcgagagagagagagagagatcagttagtttgttgagtggaagcagatcaggaagatgctggagaagctgtgggacgacgtggtggtcgttcctcttccggtgtccgttctcgtgtagcttcgtccggctgttacttccctcccccttgtctttttcttagttgtcgtctgcttgtcgtgctgtttttcttcctagcttacttatttcgcttccttctacctcctcttctcctttattctcttttgatttttt

SEQ ID NO: 7407 - DNA, 294 bp, Oryza sativa
  Clone ID: uC-osflcyp170c10b1
ggggtgaagggggaaaacgtgcgggctccggctggccctaccgtccccttcccgtacgacgtgctccttgcggcgagcggcgacggcgacccctcgtcgcccgtggccatccgcctccatcgccgccgacgtcttcttcgtcgtcgcggctaccgcctccgacttctcctccttcgcatcgtagccctacgactccgtctgcatcgccgttgtcgtgcccttcgttaccgtgttcaccaactacgcttcgtctccatctctgtctcattgtctccctccgtctttgctagcctt

SEQ ID NO: 7408 - DNA, 322 bp, Oryza sativa
  Clone ID: uC-osflcyp170c12b1
tggtatcggcgccgaccgcgtcctctacctcggcccgctctccggcgagccgccgagctacctcaccggcgagttcccgggcgactacgggtgggacaccgcggggctctccgccgacccggagacgttcgccaagaaccgggagctggaggtgatccactcccggtgggcgatgctgggcgcgctcggctgcgtcttcccggagctcctcgcccggaacggcgtcaagtttcggcgaggccgctgtggcccaaggcggtctcgcagatcttcagcgagggctggtatcgacttccttcggcatctcgagcctggatccacg

SEQ ID NO: 7409 - DNA, 445 bp, Oryza sativa
  Clone ID: uC-osflcyp170d03b1
gcatgacttgtttatgagagccccaacatgaatagggcagtaagctttgagtacatgaaccggcaactggtttggaatgaattttcggaaatgttgcttttgctttttcccctcttaaactcatcctcagtaaagaagtttcttctacctttctccaaagataaatcagcaagttcttctggcgatgaagcagactgccctatatgtcgctccagtcctagcattcccttcgaagctctcccatgtcaacacaggtattgctattactgcctgcaaacacgttgtgcagccacaaactcgattagatgtgcaaggtgtaatggacttgttgttgcaattcaaagacaaggatcaagttagtttagagttgaatccatatacatacagtgtaacaaaagccaatacagcttactggattcgcgacatctcacatgattttttccca

SEQ ID NO: 7410 - DNA, 550 bp, Oryza sativa
  Clone ID: uC-osflcyp170d05b1
ggtttcggttatggaggcggcccatcgtgtgctggagcatgtgactacgacggacgcgtcgtaggccgaggcgctgtacctccgtgttctacgacgccttcgtgctgaggggcatccgcgaggaggccgaggagcccggccgcctgctatgccgcttcaccgcgccctacagactcctgaattcgggcggcttcctgcacgggggtgccacggcctcgctcattcacctagacgactccgccgtgttgcacaccaccggcaacagcagctgtagctctagctctacctcgcccctggagatgaacatctcctacttggatgcagcttgccccgatgaagagattgagatcgaagcaaaggttcttcgtgccgagcaggcagttggcgtggcgctcgtggacctcatgaagaaatcgggcaaactcattgctcaagcccgatacttcaactaccttgcaccatttagcaaactctagtaatcatctgtaatagggagataggaaaaccaattcgccataccaagagtgagttcatcattcatccatccatc

SEQ ID NO: 7411 - DNA, 111 bp, Oryza sativa
  Clone ID: uC-osflcyp170d08b1
atctgcggtgcaaatgatcagtcattagcatcagctcacgatgaagaaagaagtcctgatcaatcggttgcgattatttctgatgatcacaaagcaattgtcagttcctcc

SEQ ID NO: 7412 - DNA, 129 bp, Oryza sativa
  Clone ID: uC-osflcyp170d11b1
gttctagaacgcgagcgccgccctttttgggttgggttaagtaaaaaaggggggacgaaaaaaaaaaaaggaaaaaaggagagaagaaaaagggaggggaagaaggaagaaaggggggggaaaagagag

SEQ ID NO: 7413 - DNA, 416 bp, Oryza sativa
  Clone ID: uC-osflcyp170e01b1
cgccaccacaaaaccctagccgccgccgccgtcgccgccgccgccgccatggccacccaaacccgccccctcgtctccgtcaaggccctggagggcgacatggccaccgacaacagcagcagcctcgccctcgccgaggtgttccgcgcgccgctccgccccgacgtggtccgcttcgtccacaggctgctctcctgcaacaagcgccagccctacgccgtgtcccgccgcgccggccaccagatcctcgcggagtcgtggggcacggggcgcgccgtgtcgcgtatccccgcgtccccggcgcgggacgcaccgcgccgggcagggagccttcggaacatggcgccggcgggcgcatgttcgcgccgacaagacaggcgcaagtggaccgtcggttaaacgtcactcgccgtttt

SEQ ID NO: 7414 - DNA, 223 bp, Oryza sativa
  Clone ID: uC-osflcyp170e05b1
gatctctgtgatcagtaggtcataaagataggaatgaaatggcacagtaaatcctttgttttctggaatagatttgctgcagtagccacaagttgggtgattcattttgatgttgccgctagctgtgtcattctcttagactattttggataagttggcaaagcattagtgcaatgctttatttgaggtattgactacatttttcgattgctcgtgtcttttt

SEQ ID NO: 7415 - DNA, 372 bp, Oryza sativa
  Clone ID: uC-osflcyp170e07b1
ctatcgttgcgtgcagcactgctcaagctgttgaatgggacgcagactggtccaaaaaccttgatccatctggtcgtgctgctcttggtgttcatgatgctgcatatgaagatactctacaaaaatctcctgcctctgccaatcctgtcttggataacggctttggtccagcccttggggaaagcatggtcaaaaccgttgcttcagccactgccgtttaactttctatcgtcgcataaaactccgtagttttgttgctcttggttcaatcccagcttctttcagacgtcgctagtttcttcaaacatgtaatgcagatgacgtgattctcccggctctgttagccactgtatgctttgtcatgttgtattg

SEQ ID NO: 7416 - DNA, 326 bp, Oryza sativa
  Clone ID: uC-osflcyp170e10b1
tgctgctgaagctcaggaagccgaaggtccctgtcccggcggaatgtaacggcggcggcggctccccggcgccgaagacgaaccgtttcttgatcaagttccgagtggacgacgcgcccttcgtctcgctcttcacgcgcgacaacagctctcgcacctccgacgccggcgccggcgccggcgcagccaggccggctgtgcaggcgctgcagactcccgaggcggcggccatcaccgccgaggaatcggcggttcgcgaaggagatgctgctcaagtacctgaacaagatcaaaccgctttacgtcaagggtctcccgccgctacg

SEQ ID NO: 7417 - DNA, 372 bp, Oryza sativa
  Clone ID: uC-osflcyp170e11b1
gtgttagattgcgaataggctcaacgtgaagccaagcatgtgaagaaactaaggcacaagaatgcatcatctcttgttaattaattggagtactaccaacaaataaggccagacaatgtcagatgcacgcatcttctgttgtcgttgggccatcttttgtatgcatcctattgttaattactagtacatgatatccaagtgatcatctgcaaggctacagaaattctgtaatacgataaattaaaagaaaccaaaatggagcctgcatatgtgtaacttaattaatgtactggcgtattaatgccactgctgcatgttgtaatactccatcaaagagtctattactattaagtattttaaattattcacttc

SEQ ID NO: 7418 - DNA, 481 bp, Oryza sativa
  unsure (1)..(481): unsure at all n locations
  Clone ID: uC-osflcyp170e12b1
tcggttccaagcatcacagaccaaccatatacggcaaagatgagctccctaagagggcttggaaatatcgccagaagatggagagagctcaatggtgtgagttactggaaggggttacttgatcctcttgacgttgatctccgcaataacatcatcaactatggtgagctttctcaggcagcctacacggggttaaacagagagagaagatcaaggtacgctgggtcttgcctcttcagtcgcaaggacttcctcagagggtgngatgtatcaaacccaaatctgtatgtcattacaaagttcatatatgctatgtgtacttgtcagtttgcctgatgcattcatgataaagtcatggtcgaaggctgcatggagcaagcagtcaaattgatggggttgctttggcggtggccacagatgaagggaaagaagtgcttgggagacggatgtggtggttggatggcgtggaacaatcggatgt

SEQ ID NO: 7419 - DNA, 487 bp, Oryza sativa
  Clone ID: uC-osflcyp170f02b1
caaaatcgcatagaaaaaaaaatctcccctcgaagcgaagcgtcgaatcgccttctcaagatgcagatctttgtgaagaccctcaccggcaagaccatcaccctcgaggttgagtcctcggacaccattgacaatgtcaaggccaagatccaggacaaggagggcatccccccggaccagcagcgtctcatctttgctggcaagcagcttgaggatggccgcaccctggccgactacaacatccagaaggagtccaccctccaccttgtgctcaggctcaggggaggcatgcagatcttcgtcaagaccttgactggcaagaccatcacccttgaggtcgagtcgtctgacaccattgacaatgtcaaggccaagatccaggacaggatgggcatccccccggaccagcagcgtctcatcttcgctggcaagcagcttgaggatggccgcaccctgtccgactcaacatccaaaggagtctaccctc

SEQ ID NO: 7420 - DNA, 93 bp, Oryza sativa
  Clone ID: uC-osflcyp170f03b1
attcctccgggctgtggatgacctacggcggctggcgacgtgtttattgacttaccatgagagcacccctcccataagaccccaacccattcc

SEQ ID NO: 7421 - DNA, 242 bp, Oryza sativa
  Clone ID: uC-osflcyp170f05b1
gtccggggttgcgccgtctgggttaaagaacagcagtagcaccagcatgggtgctgagaagttgcctgatcagatgcatgatctgaagataagggacgataaggaagttgaagcgactattattaacggcaagggaacagaaaccggccacataattgacacaactactgttggcagaaatggtcagccgatacagacagttagctacatggctgagcgtattgtagggcaaggctcatttg

SEQ ID NO: 7422 - DNA, 159 bp, Oryza sativa
  Clone ID: uC-osflcyp170f08b1
gcttataaggaaaaaaaaaattcagccgcgagcccgcagcctccggtcgcctcctccgccatctactcggagctcccggatcgaggggagcgctcgccgccgccgcagcgacctcgccggatcacggcggcgggggccgatcgatcggaggccggtcga

SEQ ID NO: 7423 - DNA, 297 bp, Oryza sativa
  Clone ID: uC-osflcyp170f10b1
aatttgcaacccgcaatcacatatacctacaatcactatgcaccttccatttcaacaaaacaactcgcctggaagccaccttcgatgttctataaagaacatagcaatactcatggctatgttgcagccattcttttgctgccaccaaccaggttgatcactgtcaagataacctgtattagttctaggccttacatggtaatcatggaacctcctaatatgaagaaacatctatatatgtacttactgctattagagacctctaaatatcaagatgcctgtgtgtaatttgtactt

SEQ ID NO: 7424 - DNA, 466 bp, Oryza sativa
  Clone ID: uC-osflcyp170f11b1
ctttggaattggctctgatgtaatttctccccgtaaaattagcacttccctggctgaaaacgttgattttggaagacaatgcctaacagcagttcaaattcatggtgataattatttaattctgtgtggtaattgggagaatagttttcagatcatttcccttggtgatggaagaattgtgcagagcgtccggcagcataaagatgttgtcagctgtggggcagtttcatcagatggaagtgtaattgcaaccggaagttatgacacatctgttatgatctggcatgcattccgaggaaaatcagctgataaaaaatcaagaaatgcaaattatgatctgtctactaaggatcatgttattatcgaaagcccttatatattttatgtgggcatgatgattttatcacatgcttatttgttggtacggaacttgattttgttttcagggatcctaaatggaacatgt

SEQ ID NO: 7425 - DNA, 95 bp, Oryza sativa
  Clone ID: uC-osflcyp170g05b1
ccgcttcatgctccgccgattcctctcctcctcctccgcctcctcctccggcgtcgtcggcgtcagcagcggcgccggccatgggttgtggtttt

SEQ ID NO: 7426 - DNA, 155 bp, Oryza sativa
  Clone ID: uC-osflcyp170g06b1
cgggtgagtctcgtgggtttggcttcgtcaccttctcctgggagcagtcgatgcgcgacgccatcgagggcatgaacggcaaggagctcgacggccgtaacaatacccgttattgaggcccagtcccgccgctccgtcgtcggaggcggtggcta

SEQ ID NO: 7427 - DNA, 527 bp, Oryza sativa
  Clone ID: uC-osflcyp170g09b1
tcgggcttcttctccgcgctcgactacctccgcctctccaccatctccgccgtctccgtcaccgtcggctacctctccgggatcaagccggggatccgcgggccatcgatggtgacgggagggctcatcggggtcatgggagggttcatgtacgcctaccagaactccgccggccgcctcatgggcttcttccccaacgactccgaggtcgcccgctacaagtacaagctgtagtgagaaactttatcgattcgctgcgttctctctctctctctctctgctgctgcaagcgtttacatctttttttttctttttcctgatgatctcgttttagcgtcacttgttgatgtgcgagatgtgtggccttggctgataaatgttgtacgctgcacgcttgggaggaattcgtgctacaatttagctccctttggcatgttttagtgccattcggttgccgatctggaaaaattattggaccttaatggaccccctgcctgggaaattggggcattctataatactcatct

SEQ ID NO: 7428 - DNA, 175 bp, Oryza sativa
  Clone ID: uC-osflcyp170g10b1
cagtctcttctctcctcctctaatctcaagtctctgtctcgtcgtcctcgcatctccactcgccatgggcaagattaagatcggaatcaacggtttcggaaggactcgggaggctcgtggccagggtggccctccagagcgaggatgtcgagctcgccgtcgttttcatcccttt

SEQ ID NO: 7429 - DNA, 132 bp, Oryza sativa
  Clone ID: uC-osflcyp170h02b1
ggagtatccctctgaaaatattggagctaagttggttaggggagcagctgcaaagaccaatgatttagctggagatggcacaactacttctgttgtgcttgctcaaggggctggttgctgagggtgttacgg

SEQ ID NO: 7430 - DNA, 439 bp, Oryza sativa
  Clone ID: uC-osflcyp170h06b1
ctcatcgccattgccatccaaagcaaagaagagagccaccctgcagacacagtacgcacacgcagagagagagagagagagagagcaagggatgaggcttctcggagctcatcgtgctgctctgctggtgctcgcgtgcgtcgtcgtcgtcgtcatccatggcctaggagaggcggaggccttgggaggagggggcggcttcgtgagggcgcaggggacacggttcgtgctcgacggcaacccgtactacgccaacgggttcaacgcctactggcttttttgcttggcccgcgaccgttcgcagagggccaaggtcaccgccgccgtggtcgaggccgccggtcacggcctcaccgtccagggcgttgtggcgttcagcgacggcggcggcggcaacccctgccaattgtcccccggcaactacaacgagaacaccttc

SEQ ID NO: 7431 - DNA, 322 bp, Oryza sativa
  Clone ID: uC-osflcyp170h07b1
gacgtgctcgtcaccaccggctgcggcggcgaggcaggcatccgcactcctcggcgtcgggccgtcgtcgttgtccgctacctggaaaagatggctggtggctttaagggtattgcatcttgtcaggccttttctggctttcctgcctgaagtacagagtgctgataggaaaataccatttagagaaaaagtgatctacactgttatttccctattcattttcctggtatgcagccagctaccactgtatggcatccattcaactactggagctgatcctttctactggatgcgtgttatccttgcatcaaaccgtggcact

SEQ ID NO: 7432 - DNA, 211 bp, Oryza sativa
  Clone ID: uC-osflcyp170h09b1
gcgcggtctcgtgggcttaatttaatttctctcttcatcatcatctcgctctcgatctcctacagaagctacaatagccagcaaatcaatcgatcgatcgatacgtgcaatggcggccatgaaggtgaacaagattgccgtggcggcgctgttcctggtcggcgtggtggtgctactggggctcaagatgtgttccaggatattgcaccct

SEQ ID NO: 7433 - DNA, 279 bp, Oryza sativa
  Clone ID: uC-osflcyp170h10b1
ctcccgtactccggcggcctcgacctggtcacggtggcacttggggccgtgagcttcaatccggacgacgataagtaatttatctttttaatatattgttttatattttcaaatattatttttatattgtttatattcttattcatttttttattttaaaaatttatttatgattatttttcaatattttattttattaataataatataatattataaactttaatatattaatttttaacattttattattcttaattatattatatattttattaa

SEQ ID NO: 7434 - DNA, 271 bp, Oryza sativa
  Clone ID: uC-osflcyp003b05b1
ttgttttttaaagtttggggggtttttttttttattgttttctcatattttttgcaacagctcaagttgtcgacacaattgtccataatgcaaggccacataaggaatgaatacatgcaggggtaaacatacgttacgtgcgaagaccacggactatgagagcaactgactatccaagaacacgaactgagaagctgctgactgggacgctaagttagacccactatacatcggccatttgctggaggaaggaaactcggtcttctgacga

SEQ ID NO: 7435 - DNA, 340 bp, Oryza sativa
  Clone ID: uC-osflcyp005a05b2
ttttgtggtttttataaacaaatggggggtatcaatataaatttttcaaaacattcttaaacttacaaacatcttataactaactgggtaggccggtaccactgcagacaatctgactatagagcagtcggatagtccgactgcatcagaacaatccaatcagagcatcgccagagaaaaactataagtgacctggaaaatagaaatagaaatgaaaaaataatggtggtggtggcaggatgtagcgtgggttgatcgtttagaagcacgaaagctccttgaggcagccggtggcagtgcccttggcattcttgcagacggccatggtcttgttgttttt

SEQ ID NO: 7436 - DNA, 430 bp, Oryza sativa
  Clone ID: uC-osflcyp005f11b2
tttgtttgctccagaacaaaggcatgcagattaggctaccaacaccagcctgaaactgttcatggacttgctgcatacaaacaacacagtatataccatgagccctacaaggctatatgaatactgctgagaaagggagaaaaaggtgaggtaagaatgtagaaattaatagatactgtaaacaaactgatattccaatactaccatcatcttgacaacagcttgcttaaatcagaaatccacagttaccaacagtaatataacaagagttaacttcaacagtatttatttgtgcaacttaaaagacaccataggaagccttgaagctatcacccctatgctgaagtactgaaatgagaggaaaccatgtcgttcactcctttttgccgactccatgagacatgttgtacaccccacggcctatcataaa

SEQ ID NO: 7437 - DNA, 496 bp, Oryza sativa
  Clone ID: uC-osflcyp007a04b2
ttttgtttttttgaggcatggggtaaaataaaatatctgtaaagtcatgtacataaccacaagacgcatgtgcgcagtgatcttgaaacttcactgtaacaacgatctactgttatctgaaaccttatcgatcagaacaatctaaaggatgaaaggaaagtgaagaaataaacaggcctaaatattaaatgcaacacagatgattaatctcaacatagatccacccacttccatttaacgatttcattttgcctcagcgcaccacatagttcctcaatcgtttctaatgcatactacacagagatattccctctgttctcaacaggggctccacgaactaaagtagttaaagttatcaatgatggacaggtcagatctcatcgtcttcggtggcttcatcatcaacagcagagctgttcccgttagcaggctccaattgcttgccattggaccctggggacttgccgttggacttattctttgttgttgttttttg

SEQ ID NO: 7438 - DNA, 241 bp, Oryza sativa
  Clone ID: uC-osflcyp008c12b1
tattctcgaagaaggagaagaaggagaggagcagccatggcgtcgtcggtggcagcggcggcgagcacgttcctggggacgaggctggcggacccggcgccgcagagcgggaggatcgtggcgaggttcgggttcggcggcgggaagaaggcggcggcgaagaaggcggcgaggccgtcggcgccgacgacggacaggccgctgtggttccccgcctcggtggctccttactaccttgacg

SEQ ID NO: 7439 - DNA, 449 bp, Oryza sativa
  Clone ID: uC-osflcyp009f05b2
ggacggagaatatttttccatttcatcgatagattgtctcacgcttacaggctagcgttatatacgccttacacacaactcaacaacccccggtcccacatattagcatctaaactcaacagacccatttcatacgtatctgctactcgattacacatttctgaatcccgccttcactgtggctcatccggcacaggcgtaacagttgctccccctggaattggagcttgtccccaagcgacagcatctggaaatcttgtgcgaacaacatcaaaatcctcccaggttgccaaagcagcaggaagagagccccaacccaccagaatctgaaccaccgcagcattgcctttttcaccatgtgcccagtccaaaatctctgaaggaagtaattcagcaatatccaactgagcagcagtcggtaacagagaaaacacaggcttggtatccgg

SEQ ID NO: 7440 - DNA, 457 bp, Oryza sativa
  Clone ID: uC-osflcyp009h11b2
ttgtgtttttttaaacaacggggaagattaacacaaaacatcaatcaatcaaatggaacaaattagtgaactcagtacaaaatgataaacgtaaaaggccctcttcttccacgttaaaagacctacacaacaaacgcaggtcgggtcgtgataattaacaaatttagacactgtcaagaaaataaaacacaaaattagtaaatgaatttctgtaaaagaaggaaaaaccaaacccaggtcctccccaaatccgtggacatcctgatcgaatgacgtgacatctcatattctcatcgattcagtccttcatgagtctcatatcatgctggccagtgtcatgcagttttgtgccatctggttgagctctacgtcgatcttctccaaggggttgttgatcccggactgcttgaagggccgatcgcacgactcaaagtcctgcacagcgagctgcaacatg

SEQ ID NO: 7441 - DNA, 499 bp, Oryza sativa
  Clone ID: uC-osflcyp012c05b2
gacagcaactcaataatctttcgatatttcaccgagggtaatgtatggtaggaaaatcgccagacataacagagccggccagactcaactcaaactcaaccctatgatggtaaactgtttgcgattaacgcctccgcctatgacaatgtttggagataaacgcttccaccaaaaaacgaatgtcggggagtgttctcccctacaagaattattattgttttcaatgttaaaaaggcaaaattcaccagatcccgttagtgcaggaccaggaataaacacttgttcgtcatcattttctgccagtttaggcaccgcccgagccgtacttctttccaaagaagaggatctgcagctggtcatagcctgagagcacaccagcaccagcaatggcacgtaggatgttggcaccagcacccttgaacagtgacttggcaccctcgttcttcaggatctgggagaaagcatccatggagctcttgtacttgacagcctcttcaga

SEQ ID NO: 7442 - DNA, 389 bp, Oryza sativa
  Clone ID: uC-osflcyp013e12b2
gcaactcaataatctttcgatatttcaccgagggtaatgtatggtaggaaaatcgccagacataacagagccggccagactcaactcaaactcaaccctatgatggtaaactgtttgcgattaacgcctccgcctatgacaatgtttggagataaacgcttccaccaaaaaacgaatgtcggggagtgttctcccctacaagaattattattgttttcaatgttaaaaaggcaaaattcaccagatcccgttagtgcaggaccaggaataaacacttgttcgtcatcattttctgccagtttaggcaccgcccgagccgtacttctttccaaagaagaggatctgcagctggtcatagcctgagagcacaccagcaccagcaatggcac

SEQ ID NO: 7443 - DNA, 394 bp, Oryza sativa
  unsure (1)..(394): unsure at all n locations
  Clone ID: uC-osflcyp014g03b2
cagacaccagcaggggtaacgtaaattgagcgctcaaagtctcaaatgcaaatgcagtcatacagatatatactacactgccatcggttattctctggaaaaatatgtacatcagtggagcaacaagggttgccgctatgtacaaaaatgcaacacctcccggccttcttatttcaggtgacccagcggacgaacgactccttacaccttaactccgatcctttctgcgacctccttgaaagagtaaacatcactgccccagagccaggcatcacagcctgcatccctggctccccagagatcattcctgcggncatcaccaatatgcacagcttcttcaggcttcacacctaaaaactcgcaagccttcaagaatattgttgggtttggcttt

SEQ ID NO: 7444 - DNA, 406 bp, Oryza sativa
  Clone ID: uC-osflcyp014h05b2
cttaatgatatagagtttatggaaactatgtgtagtgtcttgggttgggactggccttatgccatcccaatgcagcattgcacccacaccaccccaaacggcagttatagacgcgaaacaccgtgatgttcaacagtcaccaccccggttagctactttgcttcacttacaaaaaggacacccattatggttctgggtatcgaagtctctgggcaaaatgtgagaacacctgtggactcagggaaccaaaggctcttggacaaaaagtgaggcgccttggacaaaacgtgtaggagaggaccagagcgccttgcccaccttgcgaacacccatgctgttcacctagcctctgtgcttgcagatgccttcaaggacgccagagcttcccgtaatgcatcctccatct

SEQ ID NO: 7445 - DNA, 490 bp, Oryza sativa
  Clone ID: uC-osflcyp016c01b1
ttttcaaatcctgattgttccttcacagccaggtgcctgtgctccatatgatgacgacccataagcaacacctgttatattgataatcgtgtaacgtgcttcgttatctgaagcgggactcgacaatgaagcatccgcatgctggttttgtggcggtatggctcacaccatggcttgtggcatgccttcctgctgggaatgggttaatgtgctggatcgagatggaaccatttgttggatcagtttgcttgccaggtattactccctggcctgtttcggcctggggatattgctgtgtcgccagcatcacctgcattaatccgtgtggtggcatctatgttggagatgggacaacgatgattgacttgtgagtgtcatgattgatggaagaaggttgtatcatcttagtgggtatggagcagtgttatgttttgatccaggaaagggaaatgattgagttcatacttcacacccctccttggctaaagga

SEQ ID NO: 7446 - DNA, 150 bp, Oryza sativa
  Clone ID: uC-osflcyp017e06b2
cgcgccctctttttttttggttttttttattttttgggggtttttatttttttttttttttttttttttttttttttttttttaaaaatttataccaacaactttaccttgtaatttttttccaaacaaaaaaaaactcccccccaaggg

SEQ ID NO: 7447 - DNA, 399 bp, Oryza sativa
  Clone ID: uC-osflcyp019d05b2
tttttgtttttttatttttctgtgtttacaactttctttatttttttttttattttttttattttaacaatacaaatcttttaaccaaggccaaacaaaccttaaaaaaaccacccccccaaaagacaaagaaaaaaacaaagccaaaacataccccacacagagctaaaaagatacaagcaccccacaagaatcaccacaggccccaaatcaacggtccagactttatttaccttgccagattaaggttgctacctaaaaacaacttttcaaaaaaccccacccttcaaaaaaaatgtaccaaacaaaagcttaatattctaaacccttgaccactaattaatacccacgaaagatcccaaaaaccaccggtggagcaacaaacacaagcccgggttg

SEQ ID NO: 7448 - DNA, 419 bp, Oryza sativa
  Clone ID: uC-osflcyp020f12b1
tctcgattagctatctagcttagctactgggtcattttatcatcgatcatcctacgatcaaatcagtaatcttgaatatggcggctttgaacggtaaggcggcggcggcggtgatggtggtggcgatggtggtggcggcaccagtagcgtcggcggcgatcacgtgcggtcaggtgggatcggcgatcgcgccgtgcatctcgtacgtgacggggaggagtgggctgacgcagggatgctgcaaccgcgttaaggggctaaacaacgccgcccgcaccaccgcctaccgccaggcggcctgccgctgcctcaagagcctcgccggcagcatcaagtcgctcaacctcggcaccgtcgccggcgtccccggcaagtgcggcgtcaacgttggcttccccttgaggctgtccactgagtgc

SEQ ID NO: 7449 - DNA, 169 bp, Oryza sativa
  Clone ID: uC-osflcyp022a05b2
ggatcaaaggaatgaagtttatatgtggatctatgtaacggtacgaagttacagagagaaagacgtggggcgtaaacagatccaatgatgcaatatgctggtgactaagccacaaggaggattctggtatcttgaaggagaaattcctatgaaagaacaccttttactg

SEQ ID NO: 7450 - DNA, 317 bp, Oryza sativa
  Clone ID: uC-osflcyp023c11b2
ttgggtttttttttttttgggtcagaaacactgctttttttcttttaatttttgttgttaggttttaactcgtttttcttcacccagggggaacaattttacccccagtaccttctccatttaaaagacatttccccgcaacagattgtaccagcagcttaattttataaaaaagccacagacgccctcatccctggagggtgtttcccccattagaaccccaatttttagaaaaaaggaatggggatcaaaaaaacctgagtgaattatcccaatagttgctcaggaacaaccccctgctatggcgacagccttac

SEQ ID NO: 7451 - DNA, 375 bp, Oryza sativa
  Clone ID: uC-osflcyp024f05b2
agcatcaccagtcatgcatcgttccccgtatgattgtatgcagggatacattaatgatccggacctacatgtaagggacaaagttaaggggcctcaaagatggaagcatcctggtccagcggggagatctcggggagcctttggagcaaaatttcgttccacatgtcgacggggcccggcatgcaccaggggaggcagtcgctgacaatgtttttttgccaccttttggcgatggccgcgccgggggggccgtcggcgcgcaacattatggcctttgtcacgttgagcacctcgaacctcctcgggttcccgctcgccgggggcgtcgtcgccgtcgttttcttacccgcataaccttcttttggtggaccctcc

SEQ ID NO: 7452 - DNA, 438 bp, Oryza sativa
  Clone ID: uC-osflcyp026a01a1
atcccaaacaagcgatatatatttcataatgaacataaatctgcttctacaatatactccatcagtaacatgagcaccaaccacaaggtttattagagacaatgccagccccatgctaggacaagcttatttcagctgttcttcctcttcatcttcttcatcatcgtcctcctcttatcgccataatttatcgccattttcgcatacgtccataagattatacctatttctttccccagttctgaaatgtccaaacatctatgtgtttacaaccacgcggcgttcttgatcggcgtgacgacggccttgacctgcaggtagttcttcaggctgtcgatgcccttctccctcccgattccgctctgcttgtatccgccgaacgggatcgcggcgtcgaagacgtcgaagcagttcacccacacggtcccgaccctgagc

SEQ ID NO: 7453 - DNA, 526 bp, Oryza sativa
  Clone ID: uC-osflcyp027b06b1
ttatgtactcgagcaaagaaggagagagcttggggagctgcagagatggccccctccgtgatggcgtcgccggccaccaccgtcgctcccttccaggggctcaagtccaccgccggcatgcccgtcgcccgccgctccggcaactccagcttcggcaacgtcagcaatggcggcaggatcaggtgcatgcaggtgtggccgattgagggcatcaagaagttcgagaccctctcctacctgccaccgctcaccgtggaggacctcctgaagcagatcgagtacctgctccgttccaagtgggtgccctgcctcgagttcagcaaggtcggattcgtctaccgtgagaaccacagatcccccggatactacgatggcaggtactggaccatgtggaagctgcccatgttcgggtgcactgacgccacccaggtgctcaaggagctcgaggaggccaagaaggcgtaccctgatgcattcgtccgtatcatcggcttcgacaacgtcaggcaggtgcagctcatcagct

SEQ ID NO: 7454 - DNA, 400 bp, Oryza sativa
  Clone ID: uC-osflcyp027c06a1
ggtataaatattgttcatcaacatctctctttcttggcgaggagaaagattcttttttccccccttgaatgaaaaagaaatgaacaacacatcatcatcagcatgaataatgagttgttttctaaaccaaaaattgattattactcttgtttaatttgtgtttctcaattattggagtatcatataaaaagaggtaatagtaagtataggtattattattcggttatattaggatgagtttgaactttgaagtgcagggataggcgtggtgtggttggatgaataaaatgaaaatggaattaattaatagtcgtcgtcgtagccgccggcggcgtagtcgtcgactctgtcgagatcgtccttcaccttctccgccacgcccttcttgaacttgtcctcc

SEQ ID NO: 7455 - DNA, 52 bp, Oryza sativa
  Clone ID: uC-osflcyp028f01a1
ggggccgggaaattttttatgcccgggacaaatttatacaggggcattgccc

SEQ ID NO: 7456 - DNA, 542 bp, Oryza sativa
  Clone ID: uC-osflcyp029e11b1
tgcggatcaggctgccgtataccaggaagatcatcgacgccatccactccggtgagctcctcaccgccaactacaagaagacggaggtgtttggcctggagatccccactgaaatcgacggcgtcccgtctgaaatcctcgacccgatcaacacctggacggacaagggcgcgtacaaggagacgctcctgaagctggctggcctgttcaagaagaacttcgaggtgttcgccaactacaagatcgggggagacagcagcctgacagacaagatcctcgctgctggaccaaacttttgagttactgaagaataaaaaatatgcagataaagaacgcgatgaagctagtcagttggttacaataaagaagtgggtctatgcgtgtttgccaatgatgatgacgaaaatgttggatcgatgtgcagctaccggtagagtttagctagcttcctataagtttcatgcgtgtctgttaggttctgtcagtttgtctagcttgatggtgtgtatgcagtatgctcaattccccctcccctggacaca

SEQ ID NO: 7457 - DNA, 64 bp, Oryza sativa
  Clone ID: uC-osflcyp029h06a1
aaggaaatacaacatgttaagtaaatgagtacagattacagactggatacagggagaagcccag

SEQ ID NO: 7458 - DNA, 402 bp, Oryza sativa
  Clone ID: uC-osflcyp033e03b1
ttctgagaacgcgcacaggcacaagatcacggaggagatcgcggccacggcggcggtcggcgccggcggctacgccttccacgagcaccacgagaagaagaaggaccacaagagcgccgaggagtccaccggcgagaagaagcaccacctcttcggctgatcgacctcatcacaacgtcgccggcggcggcgacgacctcgtcgtacgttgccggccgccgtgtcgtcgatttgtgtgtgtaataatttgtcttcttctgcatgcgtggtgttgctggctttcacaagagtctctcgtccttgaccagtcagaggttgacaggtggggccgtgagtacaactagagttgcttgattttttttgcagtcttgccctgtgtgtgtccaaataagtggtgtgcat

SEQ ID NO: 7459 - DNA, 694 bp, Oryza sativa
  unsure (1)..(694): unsure at all n locations
  Clone ID: uC-osflcyp033h01a1
aaataaattagcgggggttcaaaattttccccctttttcccttctttccccccaattaattctctccaaatcacttcccccccatttttcgccccccaacttttttttttcataatttttgcccattacccccccccaccattttattacaccccaccaaatttttttttaaaataaacccccacaaatgtttttcttcccccctaaaaaccttttaaaaatcctccccacccccccccccaaaatatataaaaagccccccccccttttggcggtccccccttttaaaaaccccccctttataatattttttnaacaccccccccccccccgtctcttttttaaacaaccaaaaaaaaaaatcttttgagggggggtgaaaaaaaactctttacacccacaaaaaaaaaaaatcttttttcccacccccttccgccaaacaaaacgcgtgcacacaaaaaaaaaaacccccccccccctcttttaaaaaaagagggcccctctttcttttccttaaaaatctcctcccatggatttatttttttttttctcaaaacatcccccccccaaaacaaaataaaaacccccccccccccctctgggggttttttttcccccaaattttttccacccacattttctccttctctttgtatccccccccctccccccccttttataacaaatttttttc

SEQ ID NO: 7460 - DNA, 385 bp, Oryza sativa
  Clone ID: uC-osflcyp035b07a1
aagaaacgctctttatacaagctctccaactttataacgcggggtagtagctcgcataaactttgtttagcatgcaaagaacgagccaaatttagaccaaaacctcctttgaagatagcgtgccattgtcaaacagcttcccaagtaaaccggcaattaattaaaccggcaatttctttaccgtgtacagtgtacacgtaagttagttgttacagtctcatcaagttgtcagattggagacaccatcttcgatactttcctcttcctcgtcctcctcgaagtctccttcctcgacttcctcctcttcctctgcgagggtctcctgtggcactggttcagggaccttggtaaggtccatgtttttgcagactccaatacatgatgc

SEQ ID NO: 7461 - DNA, 520 bp, Oryza sativa
  Clone ID: uC-osflcyp037g07a1
aattaaatatccttgctcatcctgcagccttaattatatatattacatatggtacatacactgggaagaaaaataaaaaaaataactccttgattaattcccccatttgggtcaagcccaaccacccaacccaaaagcggccacgaacacaacaagatacattttgctactgctcctccgacctccaatcgttcgatccgagcccatgcacgcgcccgatcgatgcaacagctagcgatcaaacacgaagcgcgcatgcaagcgaaacccaactctgtgtgtcagatccatggcgagcgagagcggggttgattgctcataggccgagggcgccgagcggcgtcttgccctggccggcctcgaagtagaagatgagcatggcgagcatggcgaggcgggcgtgcttgatctcggcgagcttgagccggtcgagcttgtcggtgtccgggatgtagacgccgaccctggtctcgccgccgaggccgagcgggtcgaagaacttgccgccggggtagccctg

SEQ ID NO: 7462 - DNA, 482 bp, Oryza sativa
  Clone ID: uC-osflcyp040b01b1
ggcttatagacacgagcagcgaggaggagctcccaggtgagccttatacaatggaggagggcgtccacctcctcaacaacttagccgcgcatggcggcgagttccaactctagccttgggtggagaaggactactcctcgtcgtggacggtggagaaagacgacgtcccgctcgtcaacaacatcgtcgcgcacggcgatcccgagggcagttcgaactcgctcgccctatcaggaggacatttggccaatgtccacgagggagccggcatgttttatcagcccaacttcaagtacattttctgtgatatggatggcacactgctggatagtagcggtctagttccagaaaccaacgctgaggccattagggtggccaggtcaagaggggtacaaacaatcattgcgacaggaaagtcccgccctgctgttattgaagttcttggcaaggttaatttagctggcacaggtggtatcgtttca

SEQ ID NO: 7463 - DNA, 500 bp, Oryza sativa
  Clone ID: uC-osflcyp041d08b1
catttatccgcgcgcggtgcgtagtagcgagaagaggaggggttgagggcaaagcgggggctccgatgaagctgtacgggtcgacgctgtcgtggaacgtgacgaggtgcgtggcggcgctggaggaggccggcgccgagtacgagatcgtgccgctcgatttctccaaaggcgagcacaaggcccccgaccacctcgtcaggaacccctttggtcaggtgccggctttgcaagatggtgacttgttcctctgggaatcacgtgcaatttgcaagtatgtatgccgcaagaacaaaccagagctgctgaaggatggcgacctcaaggagtcagcaatggtggatgtgcggcttgaagtggagtccaaccagtacactcctgcactgaaccccattctttttcagtgcctaatgcgtccgatgatgtttggggcaccccccgacgagaaagttgatgaggagaaccttgagacgctgaacaaggtgttggaggtgcccgag

SEQ ID NO: 7464 - DNA, 441 bp, Oryza sativa
  Clone ID: uC-osflcyp042a11b1
cacccctgcataccccccgggaccccccacgccggcttttttaagcgccacccaagaacgagggcaaggggggccatttttaaaaccccgggggtgcgtagcataagcacccccgccctcctaaaaagaatacacactgcagtcgccaccccacccccctacatctggcgcaccaggtccgcccaggaagaacttgagcaatcgatcccgcccgatgcccatggatgccgagatctcaaccgggagactgagggccaactcatcttctcgaccaaaggccctgccgatgacacccctcataagctggatcttgagctctttgatgctgtgaacgtccaagcgagcacggcacctccgggggcaaggtccatatgctatcctatcaagaaagcacagagcaagcggtggcctaggctgctcaagaaggaaggcaagccacct

SEQ ID NO: 7465 - DNA, 373 bp, Oryza sativa
  Clone ID: uC-osflcyp042g01b1
cgcttttccgcaacccaaccccctcgtggcctcggggggcctgtgtagctcgctcgaggccgtgcgcgcgcgcgctaggtcgccatggcctcggaccaaaccctccccgtcccggtctcggtcgagctgccccccgccgcgcccaaccctcctgacccgaccgcacccctcctcccgcacgcggacgacccctccgcaccccccgccggcgccgccgccgtccgcaagctccccgtcaagcgccggtccccgccgccgcgcccctcctccccctactactccgacccggcctcctccgaccccgccgccaagcagcagcctcagcagccgccgccgccgttcaagttccagcggatttggtccgagtccgacg

SEQ ID NO: 7466 - DNA, 452 bp, Oryza sativa
  Clone ID: uC-osflcyp045d02b1
tttatgaacattatattgcagcaatggcatcctcctcccttctactcgcctgtgttgtggtggcggctatggtgtccgccgtctcctgcgggccacccaaggtgccaccgggccccaacatcacgacaagctacggtgacaagtggctggaagccaaggccacctggtatggtgcgcccaagggtgctggccccaacgacaacggctgcgcctgcgggtacaaagatgtacacaaggctcccttgctcgacatgaactactacagaaacgaccccatcttcaaggacggcaagggctgcggctcatgcttcgagatcaagtgcttcaagccggaagcctgctccgacaagcccgcccttatccacgttaccgacatgaacgacgagcccatcggtgcctaccaatttgaccttttcggccttgccttttgcgccatggctaaagatggcaag

SEQ ID NO: 7467 - DNA, 436 bp, Oryza sativa
  Clone ID: uC-osflcyp048a02b1
ggcagttttgtttattcaacaggtgaccctatgctcacctagaggcgtcatgacccactgaccggcggccaagaagaggaggttcctcgcgttctgatgaaatggagatcaacacttcaattttcaaaggcaaatccaattcgatcatttcagttgaggatcgagctgggcgagtctacgaggggtgcacgtaccatgttaaccttggagctgaactcctggacgttgtcggcgccgccgccgaagttattgtacacgctgccggtgatgagcagcaacaccggcatcgagagtccgtcgcccacggtgcccaggagcccaagcaccatcaacaccacgttcaccgtgttcgtgtgcatgaacaccgtcatgaacgatccgagcactggcttccccttcccggcgctgcgaacgtcgtcacccatggccgccgtga

SEQ ID NO: 7468 - DNA, 357 bp, Oryza sativa
  Clone ID: uC-osflcyp049c08a1
tttcttttttttttccccccttttttttttttttttttttgtgtttttttttattttttttccctccctccttcccccttcttcggacaataaaaaaaaaaccaaacgggcccaaccaaccccaaaaccacccccacccccaacccaaccagccccccccggaccccccccaaccccccccaacaaaacccacaacccaccccccccaggcccccccaaaaccgccccaacaaaaaaaaacaataacacccccccaccacccccccacaactcccagacagacaccccccaacccccacccccacaaaaaggggaacgccccccccccccagggccatcccaacaaaccccccccca

SEQ ID NO: 7469 - DNA, 423 bp, Oryza sativa
  Clone ID: uC-osflcyp050f02a1
aataaagaaagtaaatattccagtagtgtctccctctcccagctagcccaggaagcagcacagcctaacagctacaaaaatttccaaacatagttgcatacggaaaagagaaaaacatggaagccgtccttaaccacaattcaaatagaccccgtccttaccactcctcccaaacgagaaagttggtcatattaaaacaaaaacaaaaacaaacttttatccagaaccttacttcctaagacataatctagagaaggtcagcgacgttggccggcagctcctcgatggtcacattgtagaacctctggatgtcgaacagcatcctctcatcatcgcgggtgacaaagttaaaggcaacttccttcctgccaaaccgaccactacgaccaatgcgatggaggtagttctcaggctgggtgggca

SEQ ID NO: 7470 - DNA, 79 bp, Oryza sativa
  Clone ID: uC-osflcyp053c02a1
attatttgggtttttttattattttcaatttttctacatttattttattaaattttctattttttaaaaaatataattt

SEQ ID NO: 7471 - DNA, 500 bp, Oryza sativa
  Clone ID: uC-osflcyp054e09b1
caagaagcaattcttgagctcaatcagcaacaacatgtatctccttcttgcttagttaagtccttcgccctcccaagaagaagaagatgtcttgctgcggcggcaactgcggctgcggcagcggctgccagtgcggcggcggctgcggcggatgcaagatgttccctgatgtggaggccacagccaccaccaagaccttcgtcctcgctgctccatccaacaaggcgagctctggaggaatggagatggcggtggagagcggcgagaacggcggctgcggctgcaacacctgcaagtgtggcaccagctgcagcggctgctcctgctgctcctgcaactgaatctatcgtcgtcgtcgcccggctgcatgaggatttatcgtatggatgctgctactgtcgatcagagctttgatcgaggccttaatttgcttgcattagtacccagcttatatgtaggcaggccttgccttttgctctgacgcctaaatataaccgtcg

SEQ ID NO: 7472 - DNA, 465 bp, Oryza sativa
  Clone ID: uC-osflcyp054h09b1
cgctgactgaacgaagcttacctagctactcgatcgagtcatccatcagtctagatagatatggcggctttgaacttcaaggcggtggccgccgtgatggtgatggcgatggtggtggcggcgcctggggcgtcggcggcgataacgtgcgggcaggtggggtcggcgatcgcgccgtgcatctcttacgtgacggggaggggtggcctcacccagggatgctgcaacggcgtcaaggggctgaacaacgccgcccgcaccaccgctgaccgtcaggccgcctgccggtgcctcaagaccctcgccggcaccatcaagtctctcaacctcggcgccgccgccggcatccccggcaagtgcggcgtcaacgtcggcttccccatcagcctctccactgactgcagcaaggtcagctagatcgattaatcctgcgtagaccgaccgatcgatatatcgatcgatgct

SEQ ID NO: 7473 - DNA, 180 bp, Oryza sativa
  Clone ID: uC-osflcyp055b12b1
tttctttcgcagaggcggcagccaccacggggggctcttgctactcctcatgcggcggtgtgcaaccaagcgatggagttctccggcggcgcgaccgtgtcggagccgatcggatgctgccgtgcggcatgtggcgcggggggggcggttgcgggggccgagggaaggagccggggggtt

SEQ ID NO: 7474 - DNA, 357 bp, Oryza sativa
  Clone ID: uC-osflcyp055h03a1
attatatacccatttattttttatgttatctatgtcattatctacttcgttcatggttggtccggtggaaaacaaattattcatggggccgttgccactgacagacaggcccgaggagctcaagaccagcctcctcacaacaacagaggaaccatcacagaataacaccgggccattttcaactgggagagcagggtcattactacatgcattaacaaggcggcccgcagcagcaacatgttatatatgggaggccgtagcctcctcaagggggggtggggccgggggacacacagcaaaaccacttttttgaggccgagaatgaccgcggagggcggggctgaacccccccggggc

SEQ ID NO: 7475 - DNA, 447 bp, Oryza sativa
  Clone ID: uC-osflcyp058b08a1
aagaaggggggaagatttcccaaaaacggacatatatacccccggggatgaattagtataggaaaggaattcaaagctcgccggccggagagggccaattgtcgagcatgtcgaggcactccttggggcgggaccccggggcgggggggccaccccccttgacgggggccaaggggaggttggggtccaaaaccgggggaaaaccggcaacctggcggggggaggaccacggactccaggcgggcaccacgttggagcccaacgtccggaaccactggtgggggccaacaaacgccatgtccagggcgggggccccggtgtacaccaaccccctgtaaccccccttcgtgagctctcattggtaagggatgggccttaccaacttctgccggaagagcggaaaccccaggcaatggatccaggaggaaagggagcccttcggggttc

SEQ ID NO: 7476 - DNA, 471 bp, Oryza sativa
  Clone ID: uC-osflcyp062h06a1
gacctgaaaattgagttgttaatgaatccgctttattcgctgactctatatgatatttctttttctttgaaggaaaaattttataacaaggtttgagaccttgcatctattcctcttttttctatactagtagaatttcattgcattgagttctttcttagatctagatggggtggaatagagaaatagaaaaaagtcctttcggatgaaaatggaagaattttacgccatatatcccacttggacaaattagaagcaattttcttttatcccaatttgttccttcctttagataaatactcaaaatccccttacaataatgcaattttgaagggaccttttccctcgtgttgaaaaaactaggcttctttcattgctttttcattcaattaatttcaaaaaattcaattggtcctcaaaatacttccattggtatgcgcaagaaataagccaattcggcagctttttgtt

SEQ ID NO: 7477 - DNA, 427 bp, Oryza sativa
  Clone ID: uC-osflcyp064g09a1
agattgagaacatttatctttaaaaaaaaacagagagagaacattgttttcactaataatttcaagtttcctagtacagagatgccaaatcacactgaaaaaacatatattgatcatgtgatatacaccgttacaaaaaaacaatctcactaatgtaaatgtggtcttagtcaggattcaggaagaatacatcacatttcacaagtagttattttgtcagttcagacttcagagccgagggaatgaaagaaggttggatagtccaagggtcggatttccttcgagctattgggttcaaggaagctgcccagggtaagggacccaaccaaagtattgagaacagacccttcagcttagggcaaccattcggatatggaaaggcacggtgaaatggatcccttttaagcctttttatatgaagagaacc

SEQ ID NO: 7478 - DNA, 476 bp, Oryza sativa
  Clone ID: uC-osflcyp066f04a1
agtagtaaccaagttgtattaattagttcactcatctaagtgtatttacagtcccttttacacgagcagtgtaaaaaaaaaactaaaaatgttacaagatggaattaagaaatattcaagcatatatctacttaattgtgatcttaatttaattttgtgttgagttagctcgtaattacagagctgtgactactgctggtttgctcacttgggctctgcgcctgcggctcaccgtcgccggctagaaactccggcgccgccgccgccgccggcgtcttcacctccgtcgacgacgacgacgacgagccggaggcggcgccgcagctgcagcacacggccgccgccacgtgggcgccgccggctcggcgcggctcgacgccggggtggcgaggaacgtcggccgctcgtcgccggccatgatcaccaccacgtggtcccggcacttccgcgccagcccgtcgacgttcgcgcccgag

SEQ ID NO: 7479 - DNA, 162 bp, Oryza sativa
  Clone ID: uC-osflcyp067a02a1
gaggatgcatgcgtgcgtacgctaggatgcattatatcgtgcggccgtcctttttttttttttttttatgttagaccttggtactatctaattttattcacttagtctggctatctaggttaaataccggctcgaactttaattcggatcgcctttccatat

SEQ ID NO: 7480 - DNA, 224 bp, Oryza sativa
  Clone ID: uC-osflcyp071d09a1
ttctgggtttcgcaccatttggttccaaaccgtccttataaacggataatgtaacaacacgccgcccaccattgcgtcgagcggtgcttctggccttcgcgcatcatgtccagaactacagatgctgcaaaaccaccttcgctgacagttctagcaaccccatcctcacaattcataacatagtccagcttagccccaactgcaatcaatgccaacatgattcc

SEQ ID NO: 7481 - DNA, 557 bp, Oryza sativa
  Clone ID: uC-osflcyp077d03b1
tattggtagcctagtcgcacgctcaatgccagtgaatgtgtggctcgggggtgtgcactgcagtgcgcaatgcttagtcccacattccgcgttcgagaatatgaggtccaagatgcaattccttcttcgataggattttgcacgagtgaaggcccaatttcaacattaccaagtaacgcgctattccagagaggtcatccccttcccagtgtgaaggtcgttactctgcataagaacagcaaatttaaactggatgcattttatgtggatgagaatgaattgcctcctggtacctcaacaaaaattggtgctttccagattggccctttccaagcacatactgaaaagtctaaagtcaaagtaagaattcggttaaatctccatggacttgtttcagtggaatcagctgctctgattgatgatgatcaaagcgatgcacattctgctgactctatggaggtggattccaatggtgaaatggggcaacaggttgataagtcaagaagcgaaaggttaatccaattgcctattgtcagtccatttatggtgcaatgagt

SEQ ID NO: 7482 - DNA, 275 bp, Oryza sativa
  Clone ID: uC-osflcyp078f09a1
gccgcgtcggcggtttatatctcgggcgccgggacgatgacggggtgggttccagcattgaagaaggaggctattgccatgcgacattcattaaggtacacgaggacgcgctgcatgacggtcttgtacaagccattggataacacaatctgttgggccccgctgatgatcactatggtatgatgtactagcgattcacacaaggattgctacaacttgaggggctaacggcaacataagatgcgggcctgtgacattgggaggactcaatcggt

SEQ ID NO: 7483 - DNA, 368 bp, Oryza sativa
  unsure (1)..(368): unsure at all n locations
  Clone ID: uC-osflcyp078g12b1
aagaaaccctagacctccgtctccggcgaccctcccgggacctcctcgccgcggctccccccgcctgacctccgcgcgccccccgtcgactcccccccgcgaatccggatcccgcgcgcgcgaggaaggagggggggaggaggagcggtagatggnaaagaaaccgccggcatcatggcgcgcttacgtcatggattcgcttgccagcgacgatatagtagagaccttgccgacgacgacgacgcctcaggtcacggcgaccccagcgatcgactagaagtgcaccgccggcggtcccctccccgttatagcggtcaacaggcgtccggttccgacgaggaactccgtgcaaccgcctacgaggtcct

SEQ ID NO: 7484 - DNA, 278 bp, Oryza sativa
  Clone ID: uC-osflcyp079b07a1
gagggacccgaaaggcatctgatttttatttcagaaaaagtagcccaacacaagatagcttgagaccaggcattattgctccagaccctcggagatttagggttcaacaaagggatttatgaccgagtctacaaacaaacaaaaagggccgatttttcgtttcccaccgatgataaggatcgatttttctaagcggctgaaaggaaggccctgctgcttgatcctaaaaagcctctcattttccaaaggggggacctggcccaaaatgtacacaacct

SEQ ID NO: 7485 - DNA, 399 bp, Oryza sativa
  Clone ID: uC-osflcyp079f09a1
gacacgggaaacacattaaggtttgataaataaaaagatctccacctggagtgggacaccacatattctctgaggactggctgggactctgggcttatttattgtccaacattgcagatatgatagtgcacagtacaaacaaactggaagcactcatgacgcgaactggaaatacttatgacaaaccaaatactgaaaagaccatctggcaaagtaggcgacgatcgggaggagattcagtgcatcacctcttacttagattcagaatccgtgctttggagccactccacgaacgggttggaattacctaaccacctgggacttcttgccaccagcaacagattgattattcccctgggttattacttgttcatccaggaacggcccatcatacagggc

SEQ ID NO: 7486 - DNA, 434 bp, Oryza sativa
  Clone ID: uC-osflcyp080g05a1
cgttctgggcaacggaaaagggcacaatttattttggtcacacaactaacgggtaaagaacgaaaggaggcccaacaaataacaatggggggaatatgtccggtacatccacaattagatgaacatttccaggcccagaagcaaaaggaacacttttttttatggggcattaccgtaaacagttaacgggcaaggggaaccaatcaatcacgcagatcgaatcactatggggggaaaagaaaaactaggggctccaggaagttactttttgagtttagggcgcctttggggggggcgctccccccggcggcggcgggtgtgggaaacaataagcgggggcctgggggcgccctaggacctccttggcctgcctccgggcggggaacattttctgggtttcgacgacaacgaggcacttgacctgggggagcatg

SEQ ID NO: 7487 - DNA, 486 bp, Oryza sativa
  Clone ID: uC-osflcyp081a03b1
ttttccatcaccagctcatccctctctagcgcgcgttcgtccgaccctcccccgcggcggccctacgagcgccgcgcttctctttctagccccctcttccgcattactccctcataaaggaggaacagaggaaagactgggcagaggagaggacctatagctgagaagaagcagagcaagtgaaggagaaagccccgtaatcttggccatcctcctcctcctgctgctgctgcaactccggctctgcctttaaacagtgcagcccgggcggcgccggccacgacgctcgtactcctagctagcagcggagaacgaacagcgtgcagggactcgcctcgatagcacagtaaattccattccatatcatataccattccagccatcactctccaccggcaccctgcatttactgctcccccatcactcgccccggcttccttgagcgcgatctccagatcatcttttgtgtagcgagaaagctgacca

SEQ ID NO: 7488 - DNA, 380 bp, Oryza sativa
  Clone ID: uC-osflcyp082h03b1
agtgcgttgttttcttcgctcgctgcaccctcgactcggtgatccatccatggctgccaggaagttcttcgtcggcagcaactggaaatgcaatgggacaggggaggacgtgaagaagatcgtcaccgtactcaacgaggtcgaggtgccctccgaggacgtcgtcgaggtggtggtgagcccgccgttcgtgttcctgccgcaggtgaagggtttgctccggccggacttctccgtcgccgcgcagaattgctgggtgcgcaagggcggcgccttcactggcgagatcagtgccgagatgttggtgaaccctgcaggtgccttgggcgattctgggacactctgagcggatagcgctgttcggcgaatcaagtgttctt

SEQ ID NO: 7489 - DNA, 419 bp, Oryza sativa
  Clone ID: uC-osflcyp085f02a1
gcaaaatctgctctcattcatgatatcttagcacaggtacagactccaggattgcaggaatccagacgagaagatgagaagaaccagcgacaagtttctcaacgaccccaaaaaaaattagcagtaatatgggaacatgtatatatattcctgtgtgcgcgtgcaagtggcactgtggcaggttcttctcatgagtgctcctggtcctttacaacagcttccgcgacctgctccggggacgcttcttcttcttccttggctgcctcctccgtctccgggtcttccttcgcgggctccgcgacggcgacctcggattcgacggtgttctcggcggcggcggaggcggccttcagcaggttgtcgtagctgccggactttttgaacagctgccagaagtggttctggcagtagaggatccc

SEQ ID NO: 7490 - DNA, 338 bp, Oryza sativa
  Clone ID: uC-osflcyp086h09a1
tttttttttttttttttatttttttttttttttttttttttttttttttttgttacatattttttatgattttttaaaaaaccacacgcaatacacaggaaaaatgggcttaaagggttaaaaccaaaaggttaaaagccaatttaggagggaccgataaggaagaagctaagaaacttggtccagcctaatattgcaattaccggaagaaaggttcactgccaaaaattttttgggactttagaatttaagttggtcacagcaaatattaacgtactaacatacttttatagggaaactagaagggcccgaaagacaaatgcgggttttggggtgtc

SEQ ID NO: 7491 - DNA, 454 bp, Oryza sativa
  unsure (1)..(454): unsure at all n locations
  Clone ID: uC-osflcyp087e09a1
ctcgttgggccatacatataagtcttgcgatgatctcattcgtatcgttcacagcttaaagctgcttctgaatgttcataacactgtcgggactcaggaacagttaaacatctctaaaacatgtacacgctctctggggaaaccatcctttaaactatatagtacagtttcaatctcccacatacatataagcataagctctagtgacaacaaataggttctacaaantctgatagcccaagtcacatgcgatgctatgcgaatcgcgctcctcaatgtgatgtgccgaacattaacactttcactctcaagaccttaaccttttaagngtccctttcaccgcgatcgtaattcctgtgcttatgcctatcctttcttttttggttgtcaagctccggagaacggcactcttggctgtctatggacaactcaccttcctcagtgtttccagtca

SEQ ID NO: 7492 - DNA, 109 bp, Oryza sativa
  Clone ID: uC-osflcyp089c03a1
ggccaaacaaattgttccattcactcacaattgcccaagcccaaagtagggggtgttcctggttaaaaacaatccccaagatgccattgttttaaagcaaattttgctt

SEQ ID NO: 7493 - DNA, 329 bp, Oryza sativa
  Clone ID: uC-osflcyp091h03a1
ggggggggaaaacaactttttttggttaaaaggaaaccctaaaaaaaccttttaaaaagacccctgaacctggaaaatttaaaaagccctttggggggaaaaatttgaatgcgggggaaagggggcaaaaaaaaaaaatttccccattggggggggaaaccttttaaaattttttttttaaaaaaataaacgggcgggggaaaaaacggaccaaacggaaattttaccgggcgggggccctcgggggggggaacccttttttaaaacggaacaatttttgggggaaaattccaatccccccgggaaaaaaaaaaaaaggggggataatc

SEQ ID NO: 7494 - DNA, 433 bp, Oryza sativa
  unsure (1)..(433): unsure at all n locations
  Clone ID: uC-osflcyp098b02a1
gttgttgttaacacttgtagatatcaaaatttttactcaaaaactcaaaacgagtaccttgtctagtacatggcaaaagaatctcttcctcacacaggaatacacatgttagctcaccacactctgatgtgtttgctacacaacattttgcttgcagtatacatttcgcaattgttacaaaaattacaggnagnacgtggtatttcctaaaacanngatgttatcccttcctgaataatgctagaggttgcaactatactcttcttctctttgcaatngccattcttcttctagnttagttgttatctctacttgatagcaacgaacaaaacaaaagggtgtcggaaagggtaccattcggcaatcaaacataagaggtcaagcgcacctgcatcacatttgtgtgtggaatgctcatcgacatcatcgccct

SEQ ID NO: 7495 - DNA, 422 bp, Oryza sativa
  Clone ID: uC-osflcyp098b04a1
ggcgcggagcgtagccgcgagtcccgaggatcccatcggtgtgccagcggtggggctggccaacgacatcgacattcccgaaggcgcgcacggcgggcgcggcgcgcgacacggcggcggccagctcgacgcgctcggactcgggcgcatcggccgagaggtggagcaggtagcggttcctgggatggtagaccgcgagcagcagccgcagcagcttcctcccctcccctctcccccccgacagcacgtacgcgaaggacggcggcgcggctgccccgcggcggacgtaggagggcggcgggaggcgcgcgaagagcgaggaggaggcggagaagcccgagagcgcggggaggaagagcagcagcgagacgaaggagaccgacacgagcgggaggagccacttgtcggcggctcccaggctg

SEQ ID NO: 7496 - DNA, 285 bp, Oryza sativa
  unsure (1)..(285): unsure at all n locations
  Clone ID: uC-osflcyp099d10a1
ggaaggttcacccatcatgcattcaggagtaccgattgattgttgtgtcctgaatttttgctagtatatgcatataagtagatactactccactacagtacagaggcagaggattgacattgactagcctagtccacttaanccgtctccttactactatcagaagaagctaatttaattaagtggagtcaaaagccaaaatgagggcgtggcgctgggcctcattggtcgtccgtttgtcggtcgggtgacgaaactttgcccggttccgggggttgatggcgg

SEQ ID NO: 7497 - DNA, 312 bp, Oryza sativa
  Clone ID: uC-osflcyp101g04a1
agcaaatcgatccatgcgaccatgcgtgcaaatcaagttggagcacaaatttacatgttacacccacaccctacacccatgcataataatacatcgtatatacgtacgtacatacatacccctctcgatcacacgcaccatcgatcgtacaaagttgcgtacatacatacgtacacacatatacgcatacgcacgtacatacatacataattaaaaactcgtaattaattaaatacgtagttgatggcatctctaatggaacttgaggctggtgaggatgttgttgtggacgggatcagcgaggtgatcaag

SEQ ID NO: 7498 - DNA, 159 bp, Oryza sativa
  Clone ID: uC-osflcyp102c01a1
ttttttttttttttttttttttttttttttttttttttttttttttttttttttttttttttttttttttttttttttttttttttttttttttttttttttttttttttttttttttttttgggggtaaaattttttttccaaaaaaaaactttttat

SEQ ID NO: 7499 - DNA, 187 bp, Oryza sativa
  Clone ID: uC-osflcyp103g08a1
caccgaaactgttcacttccacaaatggtttaaatcattcacaatagtcgttcaaatccatttcccaacagttttacattttttttttaacaatggccttggtgggggttcacagcagcaggggaaaaattggccgaggaatcaaggaatcattccatcacaacaggatctccaaattggccattta

SEQ ID NO: 7500 - DNA, 84 bp, Oryza sativa
  Clone ID: uC-osflcyp108d04b1
acttcgtcgaacggcacactaacctaaacacatgggctaattgaaatcatcggccggttcacttctctaatcttcttatgcatg

SEQ ID NO: 7501 - DNA, 496 bp, Oryza sativa
  Clone ID: uC-osflcyp109e04b1
tttattcagtgaatgaagggcatgcttaaaactgggaatggtccaaccacaaagtatgtaaagaaatgcaggtttcctaaagatggttctttcgctaagtctctgagatatgtgggaagtatggtagccgatgttcatcgcacactgctttatggaggaatcttcttgtacccggctgacaagaaaagccccaatgggaaactgcgtgttctgtatgaagtcttcccgatgtccttcttgatggagcaagccggaggacaggccttcactggcaagaaaagggcgctagaccttgtgccggagaagatccatgagcgttctccaatatttcttggtagctacgaagatgtagaggagattaaggctctgtatgctgcagaggaatagaagaaataagattctcattctttttatttcatcaactcttctctcttatatctatggcttcttctgttgagacaaacaaatgacttatttatacaagggagactttttt

SEQ ID NO: 7502 - DNA, 461 bp, Oryza sativa
  Clone ID: uC-osflcyp109f10a1
gccctcaagtgaagactaaagacgttaaatatcgattcagttttaacagttgtagcactgagaaaaagaaggaaaaaaaatcgggagccaaagaaattaatctagtggcggatagtctattggttgttctccatcatgatgaataaactctcagacatagatgctgactcggactcccaaggatctgatttaaccagttccttccaacagttttcgacaaaaggggtgaatgaaaaaagcatcacaattcgctggatcgcggaaggctataggtgatggttaagcgatcttcccgtaaacaatccagcttggctcaagcggtcaggtcgacgccactcgatttaaacgtggcttcaccggtgccttagaagggctcaccctgacaggcagcgtacccaaaatcatcccactgcaattcagagccatgatggcacactcggcatggacaaactcaacaaagc

SEQ ID NO: 7503 - DNA, 527 bp, Oryza sativa
  unsure (1)..(527): unsure at all n locations
  Clone ID: uC-osflcyp110e06b1
ttttctctcccctcacggcggccgtcgcttcgttcgccgattagccggcgccgccgccgccgccgccggtagagaacccaccccctccccgcatggccgccgcgggcggggccgcgcagccgccgcggcagtacaagctggcgccgcagagcgagctgcgggtggaggtgccccccgacgcgcccgtccgcgtccgcctcgtcgccggcacggcggaggtcttcggcaccgagctcccccccgagggctgggtccccgtcccgccccgctccaagatcgccattttcacctggcacggcgcgacggtggagctggacggggtcagcgagagcgagtacacgtccgacgagacaccgatggtggtttatgtgaacacccacgcgatccttgacgcgaggagggcgagggcgagggccgtcgcggctcagggtgccctgccggagtcctcgcagggacccagagtgatcattgcggcgccaagtgattctgganaaagtactttgtgcaaaatgctccttagctgggct

SEQ ID NO: 7504 - DNA, 210 bp, Oryza sativa
  Clone ID: uC-osflcyp111a05a1
cattatgcctcaattatcaatttgatggaaccgtatcaagcctcggggatggtaacaaaccacccatctgaactagctctatcaagatgggggcaaacatcaagtgattcctggggcttaaacccccacttagtttacaggcacaaaactagcttatacctcccttgttatgagaagaccaagggcaacttctggcgctcggagacgtac

SEQ ID NO: 7505 - DNA, 56 bp, Oryza sativa
  Clone ID: uC-osflcyp112c10a1
ttttgttttttttttattttttttttttttttttttttttttattattataataat

SEQ ID NO: 7506 - DNA, 422 bp, Oryza sativa
  Clone ID: uC-osflcyp118g07a1
accctaaaaaaacatttcagatatgtttcatcttttttcaggttcgcatggccaccagaaaccttgcaagtcacaaacaaccctaccgcgtaaaaaaaaaagaccaatttcacaatatgttcttctgggtacatatctcaccagaaaaggatcttttatgccctcacaaaacaattgccacacaaaaaaagggcatatggcatttcgacagttaggcacattgctttgacgatttatgccggaggtatgtcatggcattacaggtacctataaattgatcgcccagctcggatcagtactctaaagaaaactccagcgaaaactgagaagggactcctctaacgcttgcagagtgatgacatgaggcccattgtatgaaacaatgacatgacccctggaaataccaactctcccagcagtgg

SEQ ID NO: 7507 - DNA, 424 bp, Oryza sativa
  Clone ID: uC-osflcyp120a01b1
gtttggttgaggaggatcgaggcagccgtcgcggcggggctcacgctttgctggcagcggaagcatacggattataaaagagggggcgcgagatccagatctggcgccgctgcgccccccctacctgctcttcctgaccctcgacttcgcgctcctacggatcggccacctccacgacctgtcccgtctgcacgacctcctcttcatctacctcatgcggctgacggtacgctgacacaaaaggtcctgaagttgtttctggcaacggattgcgaggaaatcgccttgcttgttcagttgctcaacattaagcagccgcttgtaccggtccttcccacgaggtgctctgacaagttctagaagtgacactgattaggtcagtcttggttacctcagaaaagatgtctttggaaattcacgacag

SEQ ID NO: 7508 - DNA, 357 bp, Oryza sativa
  Clone ID: uC-osflcyp128f01a1
gtggagaattacaacatttttcattcttatgaggatcaaattatagccctatacaaaaaggaaggatatgcagcgcacacatccgtccgtacagtcaagctaaccaaaagccactggggattcattcacttgtcgaagtagccctcgggcctgcccttgaacccgatctggccgaaggtgagcgccaggaacagcccaaggtgccacgtcaccaaccacagccagaacggcgagtcgagcgccggcggcgaggggaagtgggagagctcctggcccatgctggagaagaagagccccgtgaggctgctgccgttgatcgccgggacgctcgacggggcgaaccacccgatcagcccg

SEQ ID NO: 7509 - DNA, 332 bp, Oryza sativa
  Clone ID: uC-osflcyp129a05a1
acaagggggaaactgtttttgcttattattcaacttttaaactggggggtcactttggaaaggtgggtccaaacacaatgggtggtcaagaacacccaattcccttagaaaaactagcttagaagggcttattcactccacaaggtgttcctggtgcacacagggtaccaaagggttcttaagaagcccaatggttggtggttaagaaaacaacctgcttagggaagtgaccaaaagaatctggtgggttctcatggacaagattaggcctgggagagctttccaggaggggattttcttttcaccaatttttcccagggatcggggggttt

SEQ ID NO: 7510 - DNA, 504 bp, Oryza sativa
  Clone ID: uC-osflcyp129b04a1
accctagtctgactgacggatgaacatgatatgagctgatgaatcggtagtttcagagtcttctttcctcctgcaattgcctgcagattttgcagcagatggattgtggcactggaggagtagaggttgcagctagctaagaggaaggaggccgctgtggccggcggtagccgagctccatgacgaactccttggcttgagcgcccagcgacgcctggacctgctccaccggcgagctcttcagccacagctcgagcaggccttgcaatgtggtcgagggggagattgcctcgccatggcatgtgatctccacctcatcttcacttgctaggtcaagcttattcatgatgtacctctggatcaaggaagtctgcagacttccatctttaattctcacgtaatatgttggtagctgaggcagcctgggatcttgtttctggtcaggtgaagggacaagcaaaaaccatactggtctagttattccatcatgcaaagcaccagttc

SEQ ID NO: 7511 - DNA, 396 bp, Oryza sativa
  Clone ID: uC-osflcyp130e01a1
aaagattattgacaataaagatcattaaaaacaagagtataggcaaaccactactgtggctaatgcataactattattattacgattcgccatagacggagaaaggaacacagatcactcagcaggtttggcttacctgcgattgctaccacctgcagaggctcaggagcctcccatctccacaagggagcagatcattgagtcgacgtcctcgacaaaaatgctataggcttccatgacctggatgtagttgaagcccattgccaggaggagcctgatgcagcgagttagcacggtgaccgggagaacgaagcactcctcgcccactctattggcaggcccagctgaccgagaagacccactaatcgcaggagaagaagatggctccgcccctga

SEQ ID NO: 7512 - DNA, 429 bp, Oryza sativa
  Clone ID: uC-osflcyp131g10a1
gttgtaaattcagccacatgttatcatatcttggatgttcgaagtcacagctgctacatgaagcattcagaggtcaaacatgttggtaagctagtacagcagaagttctctaaagaaataacatggtagcatcatgattacagtggttgctacagtagtatttaactgatgaaataataccagcattcatcacttcaagttattgacatactggactcttcaaagttcaaacatgttcctacagatcacgattacgaatcggcacctaatgaagccatctgtttgttgagctcatcatcagcctttttcaggaacacatcccagccactgccctctccccaatccagcatatcatacggcactgctgtcattaatcctggcctcacagcaccatgttgcatcaccactcttacctccacctcctttttt

SEQ ID NO: 7513 - DNA, 336 bp, Oryza sativa
  Clone ID: uC-osflcyp132c06a1
ttttttttttttttttttttttttttttttttttttttttttttttttttttttttttttttttttttttttttttttttttttttttttagggggggaaaaacagttaaaaaaaaaattaaaatggggaaaaaaggcccccccttaaaggaaagaaaaaaatttaaaaataaaaatggaaaaaaaagggtggaaaaaaaaaaacagaaaagggaaaaaaactctggattaaactcccagggatgaaaacccccttaatataaaaattccagtttaaaaaacccaaaaaaattatctcgtttttttggaaaaatagggcccctttgggaatatggc

SEQ ID NO: 7514 - DNA, 495 bp, Oryza sativa
  Clone ID: uC-osflcyp134c07a1
aatctccaaattcaagtatcaagtgtagtatatcatcatcatgcaagtacagtgttacatagattaatcacaatgcagtttgattaagcagtgggcatcatcacatcgcattcagaggaaggctatcttagattacagatgaatatgcagacacccagcttggtgttacatacatagactggatttgggtgaaatttagccggcgagggcgctggtgttgtagacgaggagggcgccgccgccgaggagcccggcgagggtcacggcccagatcagaagcccggtggttccaccaacgtaggtgtcaccggtgggagaccattcctccggcgagtagattgggctgtagccgtcgacgtttgcgccgtacttgtcaacgaattggtacacacccttccccgtgctcttcctgccagatgcatcaatatcgactgacatgccacctccaatcccgtagggcttgtcggtcttgatcttcttcccaccgctgcagac

SEQ ID NO: 7515 - DNA, 305 bp, Oryza sativa
  Clone ID: uC-osflcyp135h01a1
gggaacactataacttagacagcaaaaagatgatccaggttccacatccgttacatcacgacagagtaaaaatagtttctcagtagcacgcgaacataggattgttgatgtgaaacacatgcattcgacaaaagggaaatgaaatacgacaacgaaagcagttctcttagcagtagaccaactagaacatgtaagggtaacggcacaacacatgcggcggccaaaaatttagagcttgtcctcgaaatcggagaggggagtcatctgctccttgagacccttccttttgcggatatcctgcacca

SEQ ID NO: 7516 - DNA, 146 bp, Oryza sativa
  Clone ID: uC-osflcyp137f06a1
tttttttttttttttttttttttttttttttttttttttttttttttttttttttttttaaaccaaaccttttattttttccatctagcatttaaaatgctaaaccataggccatattgccccaaaaagggggggaactatccccc

SEQ ID NO: 7517 - DNA, 307 bp, Oryza sativa
  Clone ID: uC-osflcyp139b11a1
agaatatcatcatcatcatcagtagtagtagtcgtagtaataaaagactgagagaagcagtaataaaagactcagagagaagtcttacaagcaaaattacagactcagacggaaagggaaactacagttccgtagaaacgaaacaaaacaaccgtaaaagagcccttattcttttacactgggcgcccttccttaaatggcaaacaacgaagcaccgttgccacggtcgaacctcaataccaattttattcgtccaggtcacaaacgccagcataccattccattcaacttgggtaagaaccattca

SEQ ID NO: 7518 - DNA, 339 bp, Oryza sativa
  Clone ID: uC-osflcyp140e06a1
aaaaattcatcaacattgctataattgatttaggcgagtacacaggctacaaacaaaagtataaagagttctccaaaagcggtaatgatacaaatagcccagccccgtatgacgattctagtaacacaatatttcaggtgaacaacaaaggtgtatcagaatttattggaacccaaattccacaatgaactgcgacacaaataatggtgaaacccaactattaagtatgctccagtgacatctttcgccaaatgcgatgcagcagcttaggcctggttcttcttgggcacttggaggcgctcccggaaatcatcttccatgagcaccaagccatcacgc

SEQ ID NO: 7519 - DNA, 566 bp, Oryza sativa
  unsure (1)..(566): unsure at all n locations
  Clone ID: uC-osflcyp140f05b1
gcgttaattttttaggagcacgacgngancgcgccggggacggttttcaaggagagcatcatcatttgcctcctctccgncgatggcctcaaggtccttcacatggacaggaacgattactatggaggagaatctacatcccttaatctcactaagctctggaagagattcaaaggcaacgagaccgctcctgaacatctgggtgtcagcaaggagtacaatgttgacatggttcccaagttcatgatggccaacggtgcactggtccgtgtactcatccacacgagtgtgacaaagtatctgaatttcaaggctgtcgacggcagcttcgtgtacaacaatggcaagatccacaaagttcctgcaactgatgtcgaggccttgaaatctaatctaatgggcctttttgaaaagcgccgtgctaggaaattcttcatatacgtgcaggattacgaagaggatgatccaaagtcacacgaaggcctggatctgcacaaggtcacgacgagagaagtcatctccaagtatggccttgaggatgacacangtgactttattgggcatgc

SEQ ID NO: 7520 - DNA, 444 bp, Oryza sativa
  Clone ID: uC-osflcyp141g11a1
ggcgcttcacatattccttttacatttcagtgtaacttttgcaatatataacatgtatactagtatagcagctcaggtgctcagggacatcaaagaatacattacacatacacaaaacttcacataatccaaacgcccgaactatacaaacacaaataacaacacaccaacttaaatatgaaaaataatttagccacaagtactgcttggagttgcttcagcatcaagttctaccctagattaggcatgccaagcttaatataggagggggcttccttccttaaacagtacaaagatgctgctgccatcacctctggagattctaagctcatcatcaaggtaggttgtgagcaaccaagactcagcattgtcagtcctaattggtatctttaggggaggttgaccagagatggttctagcaactgaggatgctgcattttcaat

SEQ ID NO: 7521 - DNA, 366 bp, Oryza sativa
  Clone ID: uC-osflcyp144h02b1
accaattctataccctaacgacaaccctactctctctctccaacaatcaaagattcgatggccgtgctggtggcgaggcaggggcgggagctgcagcggtacacgagcgccgggggccgcatcgtggtgggttgcatcccgtaccgggtgcgcagcggcggcgagatggaggtgctggtgatcacgtcgcacaaggggcacggcatgatgttccccaagggcgggtgggagctcgacgagtccatggacgaggccgcccgccgcgaggcgctcgaggaggccggcgttcgcggcgacaccgagacgttcctcggctgctggtactacaagagccgccgctacgacaccacctacgagggcttcatg

SEQ ID NO: 7522 - DNA, 68 bp, Oryza sativa
  Clone ID: uC-osflcyp149h11a1
aacagaaactctcacatcatattaaaaacaacacaaactcttcaatgcacaaatctctccggagctaa

SEQ ID NO: 7523 - DNA, 551 bp, Oryza sativa
  unsure (1)..(551): unsure at all n locations
  Clone ID: uC-osflcyp152g12b1
ttcngctccctcgccgtcgccagcgcggcgaggtccgtgctcgcggttgtcccggtcgccggagtaggcggtggggtcacggtgaggcccgcgctggggcccgacgacggccggatctccgcggtggagtgggtcccgctcgtcggggaggacgccgaggaggctggtggggagggagtggccgtcgccgtgggcaccgacgccgggtggcttctgttctactctctcgcaggcgatctactgcacaagcagagtatttatccttcaaagatactgaaacttaacttccgtgagaggaaggaaaacgcctgggaagattcgggttcagatgagctttctgtggttttccctggtgttattgcacgttttgatggtgctgaccttcagaacatgcttcaaaaatcattacatgaagttaaatcgcacctgtggaaagacaaatctgaacaggaagatgctgaggaagatagttcctttggaagaataccttttcaaatttggaatgtaagcaaattcagttcttgtgcagatgctgcaattgttgggctgat

SEQ ID NO: 7524 - DNA, 351 bp, Oryza sativa
  Clone ID: uC-osflcyp153a12a1
agacagatgctactaatattacttgcatatacatatattcttcttctaactagggaggagggaggggggcaggttaaaaatcacaatgctgagcagcggggaaacaaaacaccataatgggacagagcaaaagcctccgaaagggagcttttaggcagaaggcttttcccacttggggggcttcaccacctcccaggggaagtctgggtcgtcccttccgaagggaccgtaagccgccgttttgagggagcgtccgttgccgccttttttgagggcaagggtgatgatgatcatgccaggcctgaaagcgaagttctccttcacaatcttgaggatctccttggcagggat

SEQ ID NO: 7525 - DNA, 493 bp, Oryza sativa
  Clone ID: uC-osflcyp154d06a1
aaatacttaatagtaatagactctttgatggagtattacaacatgcagcagtggcattaatacgccagtacattaattaagttacacatatgcaggctccattttggtttcttttaatttatcgtattacagaatttctgtagccttgcagatgatcacttggatatcatgtactagtaattaacaataggatgcatacaaaagatggcccaacgacaacagaagatgcgtgcatctgacattgtctggccttatttgttggtagtactccaattaattaacaagagatgatgcattcttgtgccttagtttcttcacatgcttggcttcacgttgagcctattcgcaatcttcacccccaacgactcatcacactgggagaggtagttgacccagatggcgcggagctcaggggagaccttggggtgcgcgagctcgccggcgaagcggcggatgaacctctcctgtctatccggcgcccacgacctgtacc

SEQ ID NO: 7526 - DNA, 308 bp, Oryza sativa
  Clone ID: uC-osflcyp154g10a1
tgttttgtgttgttgaggaatacattacacatgaatcgtcgcatggacacgatcagccacacacgaacagggcgtgcagtggcttactacgaagcagagatcaaaaccgacttctacccaccacagctccattacactgtcatctcaccacactcagagccaatgtttaattatgtacacagacgccagacagcgaccttactcatcttgggccatcttgcaccccggggcatcgacggcgacgacgaccactaccatgggactgtgccactattacatggacctctcggggaacacccactggtgga

SEQ ID NO: 7527 - DNA, 315 bp, Oryza sativa
  Clone ID: uC-osflcyp157a06a1
ttttgttttttttagtttggggggtttaaacccgcaacgattcagatgcagatgaaacactgctgattcccactcagattacacacaatacaaatacaccgacaaactggcttaaaaaccaccaaattgattcaaaagtaaaacgggtatgagggatcttcccaccgagactgactaaacctaaccacagacaattggatccactggacccagattattcaaaaacagatggctatgacgggatcgtccttgcaaccgaagggaacttggagctatggaaatcctcactttgcgctggcaagctgggtgcggatg

SEQ ID NO: 7528 - DNA, 288 bp, Oryza sativa
  Clone ID: uC-osflcyp157e09b1
tatatacacaccactccatttctgagctcttctagtttgagtgagagagcagcagaagggagtagtgcaagatgccgatccgcaatatcgccgtggggagccaccaggaggtgtaccacccgggtgcactcaaggcggcgttggccgagttcatctccaccctcatcttcgtcttcgccggccagggctccggcatggtcttcagcaagctgaccggcggcggagcgacgacccccgtcgggctgatcgcggcggcggtggcccacgccttcgccctgttcgtggcgg

SEQ ID NO: 7529 - DNA, 314 bp, Oryza sativa
  Clone ID: uC-osflcyp158d01a1
ttggttgtttttttttttttttttttttttttttttttttaaagacaaaggaattagcaatgtatactcgcattccacaacagtcgaagggaataataagtcttaacatccaaattaaacccgacagaaaatagagttttaaacgacttacatagtgcacaaagcgagcagatattaacggtcaatggaacaactggaaatgaccgccacaaaacttaacgagtactaaaagagctagatatctcaaatgcagatatggaaagcaccacttgaacgaggctcatttcttcttggcggcagccttggtcaccttg

SEQ ID NO: 7530 - DNA, 387 bp, Oryza sativa
  Clone ID: uC-osflcyp158h03b1
acggagttgcttatgatgcacaacaggacatactgcgctgagattgctcacaacgtctgcacccgcatgcgcaaggagatcgtcgagcgcgctgcgcagctggacatcgtggtcaccaacaagcttgccaggctccgcagccaggaggacgagtgaaattttctgcagattttcgtgcttatggctgcattgttcgtagggcagtgccttggtaccttaaaattatccattttgtgttgctgttagatttgcccgtatggacatcattttgctgtgagtgacctgtctagttttagcaacaatgagataaaaagactttcagcttttcatcatcataaacttatgtggtttctctaagaaacgaagggggggttgaataatgagaaa

SEQ ID NO: 7531 - DNA, 151 bp, Oryza sativa
  Clone ID: uC-osflcyp159f06a1
ttttggtttttttattttttttttgtttttttttttttttttttttttttttttttttttttttttttttttttttttttttttttttttgggacaagaaaaaaaaaaaaatattgattcctttttaaaaacaccaaaagagggccggggg

SEQ ID NO: 7532 - DNA, 421 bp, Oryza sativa
  unsure (1)..(421): unsure at all n locations
  Clone ID: uC-osflcyp159g12a1
tgtttttgaaggtattaaatacttaatagaatagactcttgtgggatacaacatgcagagggataatcccagtcataataagtacacatatgcaggtcattttggtttttaatttatcgattacagattttgagcttgaatgacactgattatgtctgaataacatggtgcatacaaaagaggccacgacacagagagcggattgcattgctggcttatttgtggagtactccaattattaacaagagatgatgcattcttgtgccttagtttcttcacatgcttggcttcacgttgagcctattcgcaatcttcacccccaacgactcatcacactgggagaggtagttgacccagatggcgcggagctcaggggagacnctggggtgcgcgagctcgccggcgaagcggcggatgaacc

SEQ ID NO: 7533 - DNA, 438 bp, Oryza sativa
  Clone ID: uC-osflcyp161d09b1
tgtttttgttctctcaagtcttcagcaaattgatcctgttgctggtcaagttggtgcacttgtgctatgtcacacaagggagctagcttaccagatttgccatgaatttgagaggtttagcaagtaccttcctgaggtaaaagttgctgtcttctatggtggcgttcacataaaaaaacacaaggatctgttgaagaatgactgccctcatattgtggttggaacacctggaaggatacttgctctagctagagaaaaggatctttccttgaagaatgtgaggcatttcattcttgatgaatgtgacaagatgctcgattcgcttgatatgcgtagagatgtgcaggagatcttcaaaatgacaccctatgataagcaagtgatgatgttttcagcgacccttaacaaggggatccgcccagtttgaaggaaattatg

SEQ ID NO: 7534 - DNA, 417 bp, Oryza sativa
  Clone ID: uC-osflcyp168c07a1
ggcgacataacttaggggtagattttccaagggctaaatagctggatcgctcaacagggtttagatcccatgtttacaccaaaatttggggttattaaaaccattggcgacagggaacataattttgatggataaaagggataataggaatccatggatattttgcactatgtaaatggccacttccaagggctttttgcatactgaagggttggtggtccatatgatcaaagggtcaaaggcaaagccctcatttttcaagcaagggctactgtttacacagggcagtttcaactggcaaacaattttgagtttcacctgcctatagggaaaaaagtttttaaactggagcaattaactgatcaagattgcaacggggggcaggagggggccatgggcttctgagtttttcctggt

SEQ ID NO: 7535 - DNA, 404 bp, Oryza sativa
  unsure (1)..(404): unsure at all n locations
  Clone ID: uC-osflcyp169f01a1
aaataattcgatggatttgacgagagcggagcacactaagattcattcattcattcatttgatcaaagcaaacgagacgagctttcttcttgcgatcaaaaacacagatgggcaaccacacagttaacacaaactagatagttccacacaaaactaacgatgataacgatcggatgatgatgatggtagctcgattagatagatagataacttggccatgagggccccaccgctcagttcctccagttcccgtcggagttgccgccgccgcggctgccgtagccgccgccgtagccgccgccaccacgggcgccaccgtagccaccgtcaccggcgtagccggcttcacggtgctggccgtagccaccgtcgncggcaccaccaccgtagccggcgacaccgta

SEQ ID NO: 7536 - DNA, 401 bp, Oryza sativa
  unsure (1)..(401): unsure at all n locations
  Clone ID: uC-osflcyp170b12a1
cggatcctctctagctttcgccctctttnattatttctttaacacaacaacaaactgtcgttttttttaaatacacaggcgtcatatttacataccaagggagaatccgcaggactcattctcctttctttcacgaagcctcagcagtggagaaatgcattttagcagccgattcacgcaaaaagctgcttccacatttggcgtcttgactgctgatgccataatccaatatatcggtctcatgtttgttgagatcgtctggtgctgaattactacttgtggtttcagcatccttgagcctatcaaattcgccaggagcttggagcactgctgaactttggatagcattctgggggattttcttggacctaaccttttgcttttggttctgcttctgctta

SEQ ID NO: 7537 - DNA, 437 bp, Oryza sativa
  Clone ID: uC-osflcyp170h07a1
ggaatcaaatataggagtccattttaaaagataatgaaaattgatcgcaacacatccagttactacgatggccattgctgtactcggggcaggagcaggacaaataactccatacactggcatgaacaaaacgcatactgctacaagattctcattgtaagtaagtcggcaacctaagctgattctgaggtctcccattacatgacagccggccaagcagcactgcgactcgcaagaagttccagctaggagttatacagctaaggtgatcaaaacccaaagaaacctagctcggtagccctttctttctcgaatgtctcaaaatactggtagatgattgtaacagcgagcagtatcccagttcctgaaccaattgcacccatgaaatcagctaggacagtcaatgcaccaatgcagactccaccaaatgcagcagc

SEQ ID NO: 7538 - DNA, 364 bp, Oryza sativa
  Clone ID: uC-osflcyp172c01a1
ctggggagcaaaacaagcggcgccactttattcgcaggagtataactgtgtaagaccagttaaagtacatgcaatgttggtatagcatccttcacaaacgagaggctgcacaattacaatcacgccgaagcaattggttgcctgcctcccctacactacaccccaaaatccagcacccagctgagccgcttaatccttcctaatctagtaagatccaattttattgggtatatcttggtgtacttttggttgggctttttgggggcactacttggtttgaagtttctctttcgacggcttggaacccggacacgatgtgtattacaacacttctaatgctgacttccaataaccaaacatgaaa

SEQ ID NO: 7539 - DNA, 409 bp, Oryza sativa
  Clone ID: uC-osflcyp173a04b1
tcttttcttggcttgtgctctgttttaatttctttgcaatgatggggaggcagagctcgtcggcggctaggagggtggtggtggtggtgtgcgcggcgatggtggtggcggcggcggcggcgcagaagtacaatgcggtgtacaacttcggggactcgatcacggacaccggcaacctgtgcaccaatggcaggccgtcgcagatcaccttcacccagcctccctacggcgagacctacttcggctcccctacctgccgctgctgcgacggccgcgtcgtcgtcgacttcctcgcgagttagttcgggctgccgttcctgccgccgtcgaagtcgactagcgcctacttcaacaagggagcgaacatggtgatcaccggagccaccgtcatggacgccaacttttttcc

SEQ ID NO: 7540 - DNA, 381 bp, Oryza sativa
  Clone ID: uC-osflcyp173e07a1
aaaaaaaagggggccttttatttcctaaaaaaagggaaatacccaaagccatgcccaatctgggccaaattttcaaatttgggcccccggggcccatgggcccaaatgggccaaaaaatgcccccccccccaggttttccctatcaaacccccggctcccaaaaaaaaagttccccccccctttgaagagcccggggccaaaaaacattctttttaaccaacaaggcccggctccaatttaaaacagttttgcatttttaaacaatcggccaggggggcccccatttatgtatccggggcccccaaaaccctgttttgcctgaagggccacccggggtgccctttcccccccaaagagaatcccccccgcccatttcttgg

SEQ ID NO: 7541 - DNA, 515 bp, Oryza sativa
  Clone ID: uC-osflcyp174f06a1
gaataacaaactgagcgtatagaaccatgccattgcaccgaggaaaagattgatataaacgctacagaataaacttaggacaaaagtagaaagcttaacatataccacacatcttgccgagctcaccctcacagcattgttgttcgaaatagggacggacaaacaacacaggttcagctagaaattcctaaaaacagttgagttcatggtgtagctatagatgatcacattggattttgggtgttcattcatgcctcgggaaatatttaacttaagctgcggaagacatctcaaagtgattgcctagtctaatcccagccttgagcagctggttgagctgccgggtcccatccagtaggcgcaaccggtggaacgacggcggcttcagtggctacgggtgctcctgcttgatcccatccttcggcagcagcaactggagctggagctgcgccccaatcaccaacagtagcagctgggggagcagccacatcagaggtccactggtcagcagacca

SEQ ID NO: 7542 - DNA, 368 bp, Oryza sativa
  Clone ID: uC-osflcyp174h01a1
tttggttgaagaggaaatgaagagggttttctataatggatatacagtagtggagcgataagttggatacaatgatacaattgctgctgacagcgttttagacttgagagcatgcaccatagatccaacaagctcatatgcaatatatacatactcacatcgggagaggaccaatactgtacagatgtttttattatacacatgaagacatcctaatagctattatgccatccattttccctaagaaatcttattaggtccacataaacatcatctttcgccttcacgctcataacaaaatcaatatggccatagtcaccaatgtacagaagttctggtgtagatcccagctctctgatagtacgctg

SEQ ID NO: 7543 - DNA, 523 bp, Oryza sativa
  Clone ID: uC-osflcyp176b07b1
tcgtgtgcggcgcaggcgctgcctctcctcgccccgttgcgcggcgccggcgccggcgcctctcaccgcatccgcccgcgccgccgcctcctctcgccgcagatgtcgccgcagcctcctgtcgccgcagaagtcgccgccgccgccgcctcacgtcggatctgcacgtgccgtctcaccggatctgcgggcgccgcatccctttgttccccggtgccggcgcctcctcccttcctcccacggtgcacgacctcggcgcagccttctcttctccccacggcaagcaggtaatggagctactgatagccttgcagtaatgccttctgctcttgcacttacggagaatttggatttttgggactcttactttctgtttgtatgaaatgaatgtaattagttttcagtggcttatcctagctgattgtggtgatgaatatgatgtttaaatgagtaaatcatgtattgtgaatgggtgactgattgtggtggctgaatggatatgatgcaagcaatttttagaaca

SEQ ID NO: 7544 - DNA, 572 bp, Oryza sativa
  Clone ID: uC-osflcyp177c03b1
catttgtattttgcttggatttatgctacttgcgctgggctggaaattatataacccccctggggtggacctaatcatagcaattctaaatgatgggaccatcatgactatatcaaaggatcgggtaaaaccatctccactacctgacagctggaagctggctgagatttttacaactggagttgtcctcggtggatacttggcaatgatgacagtaatcttcttctgggctgcatataagacagactttttcccgagaatatttcatgttgaaagccttgagaagacagctcaagatgatttccaaaaacttgcctctgctggttacctccaagttagcaccatcagccaagctctcatctttgtcacaaggtcccgcagctgggcatttgttgagcgccctggatttctgctggtctttgctatcttggttgcacagctgggctgctcctactctctcactggctccctcttataatttgcttcaggaggtaaaacccgcattgacgtaaacttttgggttaaacaaatacagattgctacactgattgctgtgtatgctgactgggcgt

SEQ ID NO: 7545 - DNA, 386 bp, Oryza sativa
  Clone ID: uC-osflcyp177e01a1
ttttgtgttttttaaaaaaaaatcatactacttcgcacccaatggcttaacaatggagtttaagatgcatttcctccgttttcaaacaattcaaagagttctctcggattacacttggtgagttggaatcataccaaaatggttgggtataggcttgcatgtgacatgccactatgaaacttcacttttgtcagctacctcttccatatgtgacttcattttcttacaacagaaaaggcgggaataagaaaaaaaaaatcagtcatctgggaagccaaaaaacttgttaatcagcgatacaactggtttggcatcccctggcacataagggttgggttgtctgtgaagacgcacatgccaccatgtgggatgggcgcctcctcgat

SEQ ID NO: 7546 - DNA, 392 bp, Oryza sativa
  Clone ID: uC-osflcyp178g07a1
tttgtttttttaattttttttgtttttatttttttttttttttttttttttattttttttaatttttttaatttattttttttaaaaaaaaaaaaaaaaaaataaaaataaaaaaaaaaaaaaaaaaaaaacaaagaacgaaaaaaaaaaaaaaaaaaaaaaaaaaattaaattaaaaaaaaaaaaaaaaaaaaaaaaaaaaatagaaaaaaaaaaaaactaaacccacgaaaaaaaaataaaaataagcccaaaaaaaaaaaaaaaacaaaaccccccaccagtaaaaaaaaaaacccaaaaccaataaaccccaaataatatttcaggcccccccttaaaaaaaagaaaaaacataacccaaacttttcatgcaaaaaaataaaaaaata

SEQ ID NO: 7547 - DNA, 521 bp, Oryza sativa
  unsure (1)..(521): unsure at all n locations
  Clone ID: uC-osflcyp002a06b1
tttgttcctgacggttacatgtttgagcttatccagaggggtccaacacctgagcctctttgccaagttatgcttcgtgtgggtgaccttgatcgctccatcaagttctacgagaaggcccttggtatgaagctgctgaggaagaaggatgtacctgactataagtataccattgccatgttgggctatgctgatgaggataagacaactgttattgagttgacatacaactatggtgtcacagaatataccaagggcaacgcatatgctcaggttgctattggcactgaagatgtctacaagagtgctgaggctgttgagttggttacaaaagaactagggggaaagattttgcggtagccaggtccactaccagggctcaacacanagattgcctctttccttgaccctgatggctggaaagtggttttggttgataacgccgactttctgaaggaactccagtgaagatgagagatggcccaagttctgtgctaggaggcaaagcgcaaaccttatgt

SEQ ID NO: 7548 - DNA, 297 bp, Oryza sativa
  Clone ID: uC-osflcyp002a07b1
atccgggccttcaaaaaaactcctgtaaaattggcccgtttaaaatctttttttttttaatagggcaaccgggaaacatgcctgaactgatcctcagtacatttttttaaaaaaaaatatttccccaacatttgaaaacgcaattaatttcgtgttgacaaataatagaaggcgtgctaccacttgtttagatattttaggcctgaagattttttagcagcagtagcagcggtcgttcattacatacgttttggattgagtggatttgtccatacccttatgacaggagtgtatttg

SEQ ID NO: 7549 - DNA, 432 bp, Oryza sativa
  Clone ID: uC-osflcyp002b01b1
gtgagagagagaagagagagagagagagagagagagagagtaattaaggctgggaggataggcagcagcagcagcgagagggaaacgagcgagcgagcttagctggtgcttgcctataggtagctaagcaaaatggggcagaggaggaggtcggggccgcggcgtcagagccagagcgtggtggtggtggtggtcgccgtgttgctggcgacggcgtcctgcgcggcggcgcagctgagccagagctactacgcgtcgacgtgccccaacgtggagacgctcgtccgcggcgccgtcacgcagaagctcaaggagaccttcaacgccgcgcctgggacgcttcgcttttcttccacgactgcttcgtcagggggtgcgacgcgtcggtgctgatcgcggggccggacgacgagcacagcgcgggcgccgaca

SEQ ID NO: 7550 - DNA, 507 bp, Oryza sativa
  Clone ID: uC-osflcyp002b03b1
taatatcggacacaaacttctgtctaagatgggatggagggaaggtgagggtcttggcagtgagagaagtggacgtgcagatcccattatggctggagacgtgaagaaagaccatcttggtgttggcgctgtccaacctggtgaggtcacatctgaagatgatatctatgagcaatacaagaagcgaatgatgcttggctaccgttataggccaaacccactgaacaatccaaggaaagcatactactgatataatgggaggtcatccaaggggcgatcagagaagccaagaagttcatttattcagcatataatctttgaatgccagaggcttcccggtgttctgcagtagctttggttttacgtagtgttacatctatgctactttcaacatgtcatttggtgtgtgtttccccttttgtttcacatggtgatgtattcatgttgctattgatgaataatgtatcttcatgattattcaactcatattgaacttatgtcacgtga

SEQ ID NO: 7551 - DNA, 201 bp, Oryza sativa
  Clone ID: uC-osflcyp002b12b1
tcgttcttaacacatatgtaataatctcttccctccctctccgaccggttttattgtaagagtactacaattatcgttgggtgaggatatgtgaaaacaaagctccggctatatacacacaagatatgtatctagagcatatctgataaattcgtcgacaataaaaaaaatggatggtattacgtaattatgtttgttttt

SEQ ID NO: 7552 - DNA, 396 bp, Oryza sativa
  Clone ID: uC-osflcyp002c01b1
aattccattctcctctctctcctgcttctctctctcctcctcttcttcacctccttgtctgtccatagatcgagccgctcagaccaaatcttggatgcgttctctcttctttctcgctgcgagggaggcgggttgttcgatctgcgggtgaaatcgagcgagaggtgtgatttttgtttctcttgtttgtttcttgaagttgaaatcttgtccgtgtttgtttgttttttttttttgttttccctcttcgtaatcatccggtcgcgaggagatttactttggtttgttcgccgatttgcttcaagatccctagacctccccctacttctctgtagctgtacatatttcaagagaggaaattttgggctggtttctgataccgttcgagaagatttt

SEQ ID NO: 7553 - DNA, 436 bp, Oryza sativa
  Clone ID: uC-osflcyp002c05b1
ttccaatgtttccagggtacggcgttatatatagaggttatgtgggtgctgcaccctctattcagcatgatagtaatggtgggagcgatagcaaaaaggatcaaacttcagtagatgtacaagaagttgacagtgctgcttccgttgcaacaaaacttgagtttatgaagctagggtcacaatgactttctggacaaattacttctaaattgatgacaccagagttcgacattttgggaaccctcaattgtgaagacttgagctgagattctttggttgacaagtacatcattggaattcaacttacccaccctcattccttgctttatctgcctgtacactgaaaacgtgcaagttgacctcactgctttttgtaccgatgtttaaaattctttgttgatttaatgtaccaggatcagaacatccattccttaaa

SEQ ID NO: 7554 - DNA, 521 bp, Oryza sativa
  Clone ID: uC-osflcyp002c07b1
tcgtaaacctagcagcagcagcacacgtacgcactcgatcacacgtgcgcatcatctccatctcctcaacaatggcgggctcgacggcggcggcgctgaagttcacggtgaggaggaagccggcggagctggtggcgccggcggggccgacgccgagggagctgaagaagctctcggacatcgacgaccaggacgggctgaggttccacatcccggtgatccagttctaccggcgcagcgccgccatgggtgggcgcgacccggcgccggtcatccgcgccgccgtcgccagggcgctcgtgagctactacccgttcgccgggaggctccgggagctcgaggggcggaagctcgccgtcgactgcaccggcgagggcgtgctgttcatcgaggccgacgccgacgtgaggctcgagcacttcggcggcgcgctgcagccgccgttcccgtgcctggaggagctcgtgtacgacgtcccctgcttcgcagaggtgcttcgctcgccgtgctgctgtttaggt

SEQ ID NO: 7555 - DNA, 443 bp, Oryza sativa
  Clone ID: uC-osflcyp002c10b1
tcgtgcaagagcacaagagtgcacgaagacgagacgagagcgagctgttcatcctcccactccacctcggagctgagctctgcttctctcccgatctctccacccaccgcagcagcatcctttcgacctctctagggttccagcctcgagttggcctcgttcccccccccccccttcccacattcgctgcgaggtttgggattctcttccggatcggattggtggagtggcagggaattgttagatctggtgtggtttgcggttaagagaagggggaaatagctatggagtgtctgaccacaagttttactaggaatccgggaagggagtataacctcatatgttccggcgatactttgcttgaaaacaaaggattcaaagaagggtcttatgcttatttacagcttcacaaactaatgacgatgccgcaagttcacaactat

SEQ ID NO: 7556 - DNA, 539 bp, Oryza sativa
  unsure (1)..(539): unsure at all n locations
  Clone ID: uC-osflcyp002c11b1
tcgtaaaattggaggaacaacgtactgaaatattgtcattgctccagaactctggacacgagttggccaattttaaagaacagaacaaggatcttactcaaaaacttgctgaacaaactctgaaggcagaagagttcaagaatttgtctatccatttgagagagctaaaagagaaggctgaagctggaaggaaggagaaagagggatcattgtttgccatgcaagaatccctcagaattgcattcattaaagagcagtacgaaacaaaggttcaagaactgaaaggtcaggtgtttgtttccaaaaagtatgctgaagagatgttactgaagctacaaagtgctttggatgaggttgaaactgggcggaaaaatgagattgctcttgctaaaagaattgaagagctatcaatgagaatttctgaaatggagttagagaatgcaggatgcatcagttgataaaagagacctgtctaatgcatatgacagcatagtaacagaactggaatgcacaanactaaactttgattgctgcatgga

SEQ ID NO: 7557 - DNA, 479 bp, Oryza sativa
  unsure (1)..(479): unsure at all n locations
  Clone ID: uC-osflcyp002d03b1
tttcttctaacccggagcctctcgttaccgagagagagagagagagagagagagagggcagtgcaggtgtcgctggccatggcgaggaggagcagcagcagagcgtgcgcggccatggcgacggccgccgtctttgcgctgctggccgcgacggcgacggcgtcggggctcgtacgggtggagcacccggccaagagcgacgggtcgctgagcctgctcgtcgtcggcgactggggccggaagggcacgtacaaccaatccagggtcgccgagcagatggggaaggttggggagaagctaaatatagacttcgtcatatccaccggtgacaatntctacgaggatggactcactggcgtcgatgaccaggcgtttgaggaatcgtttaccgatatctacacggcaaagagcttgcagaagccatggtacctggtgctgggaaatcatgactacaggggtgatgtgctagcacagcttag

SEQ ID NO: 7558 - DNA, 485 bp, Oryza sativa
  Clone ID: uC-osflcyp002d09b1
tcggtagcagccgaaggcgatcggagctcgcgcaacaggagagctgtctccatgaggaagctgtgcccgaacctggagcgcgatgacgcgctggacacggtgctcgaggtgcccatcccggaggagatgttctcacgcggcagcggcggtggcggctcccgcggctccaggttcggctgcaccaacgtcaagtcgtgggtgcggccgaacgcgtccgaccgctccggcggcgccggagagccgtgctccatgagccgcggcgagctgcagctcatgctcggcgtcatcggcgcgccgctgataccgttccccgtcgaccacgccaagcagtcgccctgctccgtcctctgtgaacagctcaaggccgatcccattgagtcgtccacggccaagtacataatacagcagtacattcgtggcgttgggcggtgagtgggcgctgaacaaggtcacgaacatgtacgcgatggggaaggtgaggatga

SEQ ID NO: 7559 - DNA, 448 bp, Oryza sativa
  Clone ID: uC-osflcyp002d10b1
tctatttaatatcaggtattgccgatggatttgaatttactggcatgtcgaccaaccaggatgatgccgatgaagatatattctgcactggaggaggaatggaacttgaaaacaatgattccgtaaaaggtgacaaagttcaggatggatccttcaagagccaaatttcttcaggacactccatcaataaacaaccttcccgaactcttgtagtcagaaatattactgctaacattgaggattctgatctgacggttctgttacagcaatacggggacattcgcatgctctataccttcttcaagcaccatgggtttgtaactgtttcttattatgacataagaacagcccaaaatgcaatgagagcgcttcatagcaagcctctggggctgatgaaacttgatgtgcaaatttttttttctaggaaaaagtttcaagcaggatattg

SEQ ID NO: 7560 - DNA, 359 bp, Oryza sativa
  Clone ID: uC-osflcyp002e01b1
ttgtttcgtggggcttcccctcccctcccctctcccatccggaggcgccgctccctctcccccaatccctcccgtctcgccggcacggcgcggagaaggcgggcgcggcggagacggcggcgacagccgtcccttcccctctccctctacctatcgacctcgacggccgtccatccctctcggcgatggcgccctctccaccctcaagatccggcggcgccgtcccaacggcggcgttgacagcgatgacggtgtcggtggcattcgcgggtggatccgtcggccgtggtggcaaccgtgggcggatctggcagcggcggctccctccaccgcctcttttctcaaatccctccggtggc

SEQ ID NO: 7561 - DNA, 435 bp, Oryza sativa
  Clone ID: uC-osflcyp002e06b1
tgttattctgatggagatggacccaactgcggagcagcacctgcatggcgggtacggacgttatcaaggacagcgttgatcaagccatgtatgaaccttccactgcccaggagattcagacgaactcatacgcctgaacagcagcttgattatatgaaactgaatgactcgcaaccattgctactaagcatatggactacagcgatatctgatccataatatagctatctaatcatataaagaattgaaaactactatggtacgtggatactaggaaccatagaagaagtgcaagatgaactaagcatcaaggcgaatgcgcgtggctaggcaatattgtttgctcagatctttcatgtggcagtataaggcataaaatagagtgctcacaacatttcaatggcagaatgtcaccttttcctatttcaagcccca

SEQ ID NO: 7562 - DNA, 398 bp, Oryza sativa
  Clone ID: uC-osflcyp002e11b1
ccatcaaattatttctccattttattcagcaggcaacaaactaaaagaacccaatgggatcaatggaacaatcaggaattcagcagctagcaatatacaaacaatttgatccaaaagaatcaacaattgcatagatctgtcgttgctaatgctaaacaatcatcagttcatcaccagagagctaggcagttcaattcacccatgtcaccggcgtctcatcgtcgccgccaatgcgccccgaaacgccgatgcgcgcctatggatctcgagatcttccactccggcggcgtcgccgtcgtccgcccggcgctgtaccgccggcggcaagttggtcttcttcggcgccaacgccgagtggtcctctcttgcgagcaacacgttgtggagcattgcgcatg

SEQ ID NO: 7563 - DNA, 534 bp, Oryza sativa
  unsure (1)..(534): unsure at all n locations
  Clone ID: uC-osflcyp002f02b1
ctgtatgatagaaaatgacatggtcgccgtggaaagggtgaatcagtacagtactcttccttctgaggcagcatgggaagtggcagattgtcttccctcaccaaattggcctagaagaggagatattgacgttaaagatctaaaggttaggtatcgatcaaacacacctctaatcttgaagggcattactattagcattaacagcggagaaaagataggagttgtgggaaggactggcagcggaaagtcaactttagttcaggctttgttcaggcttgtggagcctgtagaagggcatatcatcgttgatggagtagatattggcactttgggccttcatgatctcaggtcgcgctttggtgtgattcctcaagagcctgtgctctttgaaggaaccataagaagcaacatcgacccaattgggcgatattctgaggacgagatatggcaagcccttgagcgttgtcaactaaaagatatagtagctgcaaaaccagagaaacttgatgcactagttgccgacatggnggagaa

SEQ ID NO: 7564 - DNA, 442 bp, Oryza sativa
  Clone ID: uC-osflcyp002f03b1
ctcctcctccatccattcccctcctcctcctcctcctcccatgcatgggaggccgtcgaggccattagcttcctcctcgtcgtcgtcgtcgtcccgcgtcttctccttcttcttggcgccgcgggttttcttgttcttggtggtggtggtggtcgtcgtcttcttgccgggtcggtcgtcttgctggtggctggagggcacggaggagttggaggaggagatggggtttgccggggactgctcgccggtcagcggtggcgggctcagtgaaaacggcaagttcagttatgggtatgcaagtgctcctgggaaaagggcttcaatggaggatttctacgagacgagaatcgatggtgttgatggagagaccattggattatttggcgtattcgacggccatggcggagctcgagcggctgaatatgtcaagcagcaccttttc

SEQ ID NO: 7565 - DNA, 478 bp, Oryza sativa
  Clone ID: uC-osflcyp002f06b1
ttaaatttttggatcatccactcagccggcgaacgcctcaccctgccgtcaagatggccagaccagctgggatgcggtgaagaaggagcggctagtgcagtcagcacagctaggggtcgccaaactccacatcggagtggcgttagaggacctgccgttgagggggagccgccgtcatccgatcagatctggagccaccgtcgccatggctcttcaccgtggaggcctaggcagccaaggacacgaggtgactgccaagcttctccaacgcctgccgcagcgccgtccacccctcccgccatcggcgatgttcatgaaggaaacgggatgtaacccgatccgctgggaccagcgccggtggcaccaggagagccgcgacaggtccggggcatcaggcatggcttccttctccttgctcatcacggaccagcgctgtatcggtgagacctggcggctggaggctggccgtccctgtgct

SEQ ID NO: 7566 - DNA, 435 bp, Oryza sativa
  Clone ID: uC-osflcyp002f07b1
tcggtaccacccgcactcgggccaaatcgcggtgccggacatagagacgatcgtgggtgggaacctggctactggagtggatgcaagtgcatgccggcgagcgaatgaagacaatgatcatcaacaagtgacggactcactgctacatgacgacttgcaaagagaaggtccaatagaacgcagcaagtttatcaagatggaaatgttaaccaacaggtaacttgactatgatgaccggagatcaactacaattgcaattgaataactcaacgctagacacttggaggggcagacaataaaagttaatggggcatatgccagcactaagagagaggatacctgaggccattttaatactaatgatgtcaatgtacgctcagaagaaacagatgctgctaaggttgctgtacgtgcatgattgaccagaggctcaca

SEQ ID NO: 7567 - DNA, 406 bp, Oryza sativa
  Clone ID: uC-osflcyp002f11b1
ttttctaccccgcaacccaaacgctaacgcaacaatccccttctctccaaatccaattccaaattcccatccgccgccgctaatcggaatcgcggcggatcaccctccgcctccgacgagggttcgacccgatcgactccccctgccccggcgggctcgcgggcggcgggcggggggctgagctgagagctgaattcgggttcgatctgtggccatggacatggcgagcattgagtgcgttttctacttcgaccgtatggatgactaccactaccatggcgtctgcgtctgcggcgtcttccacctgccacgccccatccttcgtaagcccttcttcggcgtctgcgcctgaacgtgggtcttgttttcctcggcaactgaaggggctctcttggaggaagaagaa

SEQ ID NO: 7568 - DNA, 383 bp, Oryza sativa
  Clone ID: uC-osflcyp002g01b1
ttcgttcgtctgtcgtctgttccggttgctttggcgggcagctagggtttaggcgcggggccctcccgaatccccgatgtacggcgtcggcgtcggcggcggcggcggcgggaactacgatggcgggggagggaacgccagctccctcttcggcggcggcggattcatgccctcgcaggcgaccaacgccgcggaggggaccagcggcggcggcggcggcttccccaagagtcggaacgcccaggcgctgctcccgctcaccgtgaagcagatcatggacgcgttccagaccaacgacgacaagtcgaattttgctgtcaatggcatggaggtgtccacggttaggcttgtaggacgcatgttaaataagcttgatcgggtta

SEQ ID NO: 7569 - DNA, 439 bp, Oryza sativa
  Clone ID: uC-osflcyp002g02b1
ttacatgggacaacggcaagccgtatgcgcaagctgccaacattgaagtgccaatggtggcacggctgatgcggtactatgctggttgggctgacaagatccatgggcttgtcgtgccggctgacggcccacaccatgtacaggtgctgcacgagcccattggtgtcgcaggtcagatcatcccatggaactttccgcttctgatgtttgcgtggaaagttggccctgctttggcttgtggaaacactgttgtgctcaagacggctgagcaaactcctctgtctgctctatttgcttctaagctgttgcatgaggctggacttcccagatggtgttgttaacgtggtatttgggtttggacctactgctggtgctgctcttgctagtcacatggatgtcgataagattgcaatcactggaatcgccgatactggaaaag

SEQ ID NO: 7570 - DNA, 541 bp, Oryza sativa
  unsure (1)..(541): unsure at all n locations
  Clone ID: uC-osflcyp002g03b1
ttgagaggacgctcctggctatgccagaaaatggcattggcttgttcccggacgttggctttgcttacattggtgccaaagctccaggaggtggtgctgttggatcttaccttgggatgacagggaaaaggatatcatcacctgctgatgcccttttctttggtcttggaactcattatgtaccttcagcgaacctgggacctctcagggaatccctcttgagtgctaacttcacagatgatcctcacagagatgttgagtcattgctgacaaagttcaagaacgagccagagtcagggccccagctagataagtttttaccatatatcatttcttcctttggtcctgacaaatcagttgctgaatctgtggaagagcttaagaagtgtagtcaaagtgatgatgctgcagtggcagaatgggccaacgaggccttggcaggactcaaaaaaggggctccattttctctatgtttaactcaaaaacanttttctcaagttgcatagcatataggaataatgaacactatctatcgaagttg

SEQ ID NO: 7571 - DNA, 429 bp, Oryza sativa
  Clone ID: uC-osflcyp002g11b1
tcgttctcgcgtgccctaatttctcgctgctccttgtcccccacctcctttacttgagcttgctcaccactgcctccatatacagagagtcttctctgtatttctctctctcagcgggaggctcacaagaatctttcagctcacatctcactgtccttgcctttctctagctaggtactactactgctagtactaaccactgctcgtgttcttgggacttcttcttcttcttgctcttgctcttaaaatcatttggggttttgagcttcagggaggtccaagaacagagcatcaggatggtgcagtggcgtttttgagagccgcatgagtacttgcaccaaccacctgggatggttggcgatggcaaacaccgatgcagtcgtcgtctatgagggagaggcagcttgtggcggtctgaggaagacgcca

SEQ ID NO: 7572 - DNA, 495 bp, Oryza sativa
  Clone ID: uC-osflcyp002h02b1
tttattatagcggcggcggcggcgggagagaacgagaggtgaccgatggcgacgggcggcgccgccggcgaggacgtccccggcggcggcgagttctacctgcggtactacgtggggcacaaggggaagttcgggcacgagttcctcgagttcgagttccgccccgacggcaagctccgctacgccaacaactccaactacaagaacgacaccatgatccgcaaggaggtcttcgtctccccctccgtcctccgcgaggcccggaggatcatccaggagtccgagattatgaaggaggacgacaacaactggccagagcccgaccgcgtggggaggcaggagctcgagattgttatgggcaacgagcacatcttctttaccacctccaagattggctccctcgtcgacgtccagaccagcaaggaccctgagggccttcgcaatttttactacctcgtccaggatctgaaatgtttcggttttcactcatcaatc

SEQ ID NO: 7573 - DNA, 497 bp, Oryza sativa
  Clone ID: uC-osflcyp002h05b1
gttctggctcgccgtcgtcgtacaccgtggagtacatgcatggcccgcgcgcgccgccgccgccggcgactcgccggagttgtacgtacgtgtgcgtgtagcgagtgatgagttgagtgagctggagtggtagtactcgactccgtaggtgtgtgtgggtacgcgtgacgtggggctaaataaaagagtttgtcatcgagggcggtggggcccagcgtcagtgacgcggtgcccctctctggcccccacatgcctccgtcgtcgcaggcgttgtttgacggacttttgtgcttttttttttcgtgtttgattggttttcatcgtgtaatgggtgcgtttctgagagtacattgactgtctctatgtgtgtgcgatctcagcctgtcatggccgtgtgccaaccatttctcgccgtcggagaacctaccgtcttgtgtgttgttgttttgaacggatcggcgtgtatatatgggtgcgcaacgtctgagaagtaaaaa

SEQ ID NO: 7574 - DNA, 252 bp, Oryza sativa
  Clone ID: uC-osflcyp002h07b1
tcgtgtttaaagatacacgagcagcgacgcgagccatctatgaaagccttggacggtggataatgtcatcaaatctattttactattttatccgcgcctggcgtgccactttcaacactaatcgtgggtggagaaggaccaccttctgtttgtggacagtgcagaaagactacgtcccgctcgttgacaagcatggtcttgcacgtggatactgaaggcagtttgaactcgcttgctgaatcaagaggatat

SEQ ID NO: 7575 - DNA, 364 bp, Oryza sativa
  Clone ID: uC-osflcyp002h09b1
tcgtttaaagctacacgagctgtgacgcgagcgacctatttgtgccttgtacggtggactatgtcataaaagctattgagatcttatcaatgaaaggtgaggactgttatcatgagtcgtacgtggagagagaccacatcttgtttgtgaaagtgcagaaagactaccttccgctcgccggctacatgggcttgcacgtgagagactgaaggcagttaggacttgcttgctgagatccagaggacattaggtcactgtacactacggcatcggtttgatttatcacccctactttaaatacattttttgtgaatttgattctacacttgcgcatagtagctcttctagttttagaaaccatcgc

SEQ ID NO: 7576 - DNA, 335 bp, Oryza sativa
  Clone ID: uC-osflcyp002h10b1
tcgttcatagatacacgagctgtgacgcgagctatcctatttgtgccttggactgtggattatgacataacagctgattgacttcttatcagtgcatggtgtgccctttcatcatcaatcgtctgtggagagggaccaccttttgtttgtggaaagtgcacaaagactaccttacgcttgtcggcatgatggtctttcacgtggatactgagggcagtcaggactcgctcgctgaagcaagaggacattaggtcactgtacactagggaatcgtgatgaaagaacaacccaacttaaaaaaacattttttgtgattttgattgctcactgattaa

SEQ ID NO: 7577 - DNA, 306 bp, Oryza sativa
  Clone ID: uC-osflcyp002h11b1
tcggtcaaagctgcacgagctgtgacgcgagccatctattagagccttgtactgtggactttgtcatcaatgtgattgacttcttaccaacgcctggcgggtcctttcatcataagacgtatgtggagagagaccacctttttgttagtgacagtggagaaagactacgtcccgctagtcggcatgatggtcctgcacgtggagactcgaggatggctggaattggttgcttaaacaagaggacataaggccaatgtacactacggcattcgggatgatagaatagccctacttaaaaaacatttt

SEQ ID NO: 7578 - DNA, 499 bp, Oryza sativa
  Clone ID: uC-osflcyp002h12b1
ttgttcaaagatacacgagctgcgacgcgagccacctatttgagccgtggacggtggattatgtcatcaaaggtattgacatcttaccactgcatggtgagcccgttttatcatgaatacgaggtggagaaggatcacattctagttgtgacagtgtgacaaagactacatcccgctaagtgaatggatgtgcctgcacggggatactgaagacagttaggaatcggttgctgaagcaagaggacattatgccactgtacacgagggagtcgtgatgatagattatcctaacttaaaatctcttttctgtgttttggatggcacactgatgtatgagtagtcggctagtttcagagaccaacgttgatgcctattagggttgtcaggtcacaagagatacaaactatcgttgtaaaagaagagttccgctctgctgatatcgatgttcttgttcaagtttattttgctgacataactgtaagcctttaagaatactctt

SEQ ID NO: 7579 - DNA, 116 bp, Oryza sativa
  Clone ID: uC-osflcyp003a01b1
ttggtttttggttgttgggggttttttttttaactatttttccacaacaccattatacagcatttgatttaaataaacataacggagcaccacaacatcatacagaaagaccaatc

SEQ ID NO: 7580 - DNA, 484 bp, Oryza sativa
  Clone ID: uC-osflcyp006a02b1
gtctttttagccggagcctccggatgtccacgccgtcgaccatcacctcgccggccgacgggtcgtagaaccgctccagcagcgcgatcaccgtcgacttgccggacccgctaccgccgaccagtgccacggtgcgccccgccggcacgcggaggttgaagctgacgaagatggggctctccggccgtgacgggtagcagaacttcacgttccggaactccacctcgccggcgacgttgcccagctcctcgccggtgtcgctctcggagtcgatcttgggcacccgccggatcacctccaggatccttttcgtcgccgagctcgcctccgagaggccgccctggataacggcgtatgagacgacgaagacggtgccacccttgtagccatgggacatgacgaggcggcttccgtaccagacgttgaaggccaagatggcgaatgtgatgccgttgctaccgatggcgaccgccttggcaagccc

SEQ ID NO: 7581 - DNA, 431 bp, Oryza sativa
  Clone ID: uC-osflcyp006a03b1
gatttaaacccgccgtttccaagcttgctctcctctcccccccaatccttccctcccgagtggcagggtgctcgacgggatggcgcagaaggaggccaatggcagcagcaacggggagcacaccacccgcccgccgccgacgccctcgccgctccggttctccaagttcttccaggcgaacctgaggatcctcgtcaccggcggagctggcttcatcggctcgcacctcgtcgacaagctcatggagaacgagaagcacgaggtcattgtcgcagacaactttttcactggttcaaaagacaacctgaagaagtggatcggacacccaagatttgagctaatcccgcatgatgtcacccagcccctggttggggagggttgaccaaatctatcaccttgcttgccctgcttcaccaatcttctacaagcac

SEQ ID NO: 7582 - DNA, 198 bp, Oryza sativa
  Clone ID: uC-osflcyp006a05b1
gcttcaaagccttttgcctctctatcaactttctttattgactgataatgttatatacccaaccttaagcatccatgtacccttatgaacatgacagaaaggatgtaggatgaaaacacattacaccatttatcccattcgtcatcttcaagaacctttggcgaaggggtgaagcaccggtgccgcctttaaccaggc

SEQ ID NO: 7583 - DNA, 254 bp, Oryza sativa
  Clone ID: uC-osflcyp006a06b1
ctggtacgcctgctggtaccgctgcggacagtgtattgccgggatcgaccacgcgtttgtgatctcgcatcagaaagtggctgttgcaggctcatcagggagcgacgacagccgtgtgacggacacgacccctcgacgactgcggatatgggcgctgaaggacgactacgctaagttggagcttcgtgacaccgactccagcatgggcaacgccctttcgcgcgtcatgatcgccgaggtttccaccgtcgtca

SEQ ID NO: 7584 - DNA, 427 bp, Oryza sativa
  Clone ID: uC-osflcyp006a07b1
tacctctggtgcttctaaaggtgttgaaaatgcccaatgttatgttaaagctacagagttggtatttgcggacaaacatgggtcatggggcactcctttagttcaaatggaccggcctgctgggctcaatgacattggtatggtagcttggaccttgaagatgtccactcctgaatttcctagtggtagggagattattgttgttgcaaatgatattacgttcagagctggatcatttggcccaagggaagatgcattttttgaagctgttaccaacctagcctgtgagaagaaacttcctcttatttatttggcagcaaattctggtgctcgaattggcatagcagatgaagtgaaatcttgcttccggttgcgtggtctgatgatggcagccctgaacgtgggtttcagtacatttatctaagcg

SEQ ID NO: 7585 - DNA, 354 bp, Oryza sativa
  Clone ID: uC-osflcyp006a11b1
taaccccaagggcttggagtactacaacaatctgatagacgaattgataatgcatggaatacaacctcatgtcaccatctaccattttgatctccctcaggcccttcaggatgaagaagattactcggcttatgccgaggtgtgcttcaagaacttcggtgacagggtgaagcactgggccacctttaaccagccgaacatcgagcccatcggcggcttcgacgccggcgaccggccgccgcggcggtgctcctaccccttcggcaccaactgcaccggcggcgactcctcgacggagccgtacatcgtggctcaccacctgctgctcgctcatgcctcggcagtgtccatcta

SEQ ID NO: 7586 - DNA, 411 bp, Oryza sativa
  Clone ID: uC-osflcyp006b04b1
ttctaacccaaaggcaagggagaagaggagcggacgccatggatgcttctcgcgttggcgagctccgcactttcgtggaggcctgcaagaaggacccctccctcctcgccgaccccaacctcgccttcttccgcgactacctcgagagcctgggcgcccacctccccgtcgccgtcttcaccaaggccacccccaagcccaagccgtcctccatggatgacatcgacgatgaatacgacgacgacgacgacgacgatctcaacatgagggatgccactccggagccggacgagcttgaccaggacatcgtcgagttcgatcttgaacttgaaggagacattgtcgaatctgaccatcaggacccttcgcaaaagatgggagatccttctattgatgtcaccgaggaaaatc

SEQ ID NO: 7587 - DNA, 493 bp, Oryza sativa
  Clone ID: uC-osflcyp006b07b1
tcgttgtgacattccattgtccaaccgcttctacaaatgaaattactggatcagtggtgatgaggcaagcatctttcagaatagatcatccagcttgtgaaaatgatgcttcagttgctgaattccaccaagagcaacaggtggttaccgcacaatttgatccatcttttttagctgtactcgctgatgcccccatgtactcaacgcacaacagcttcaaagagagtgaatgccacgaggcgctacaaaagctgtctgaagactgatttccctaagaacaatgaacattcattttgatgcatatttaggtcaagtactgttttgagtctcattttcttaatatgccagcttggtattagtgattgcttctattaaattgtaatgtgctcatattcttgtactatttactggatcattattatttagttacaagaactttggctttgtgcatgctagatgcagaggccggggatgcaattcatcttccctatta

SEQ ID NO: 7588 - DNA, 500 bp, Oryza sativa
  Clone ID: uC-osflcyp006b10b1
tcttagaaggaccccgagaagaagaagtaccccggcggcgccttcgaccccctcggcttctccaaggaccccgtcaagttcgaggagtacaagctcaaggagatcaagaacgggcgattggccatgctggcttttgtgggtttctgcgtccaacagtcggcgtacccgggcaccggcccactggagaacctggccagccacctctcggacccgtggcacaacaacatcggcgacatcatcatcccgagaaccatctacccttgagcttggcacgaaccggtgcgtgcgttcgggcgtacgtgaaggctatgggtggtttttatgtgcgtgcgtactgcgtgtgattggttgattattgcgcgcgcgtgcgcacgcagtggttggtccgcaggcagctgctggctggccttggaaatgaaagctttagcagaggggggctctctggtgaatcccgccatctaaatttttggatcaaacacgacatcaaactggtcttagtt

SEQ ID NO: 7589 - DNA, 442 bp, Oryza sativa
  unsure (1)..(442): unsure at all n locations
  Clone ID: uC-osflcyp006c02b1
taatcacaagataagtgcatatgatatgttgtacagtaagttttgagatgaaagctgagggtgctattatccaactcattatgttcatatagtcatatgatctgcctcagtgataggtatttgtggtacatatgcaaatgacaactccagatttatatcatacagctgaaactgcaccaccaattttctttcaacgtttagccattcgtcagctctgctttgaggtactagctgaagcattaccattcaatctgaaagtaccataatntgcatgggttttttttctgcatcctactgaagattccagccaacctagaagcattccctgtgtacaaagagcagcctgcctaatcttattggtgtcaataatatacttgagttcaaagttccctgtttgaggaggcaaattcagtaccatttgttcaagaaatctccacgtctt

SEQ ID NO: 7590 - DNA, 458 bp, Oryza sativa
  Clone ID: uC-osflcyp006c03b1
tggacgcgtgggctctccacgcctccacaaataaagctcgtcccgaggaagggcggcgacccaccccccccaatcgccaaaaccctaactccgatccgatcgagctctgcttcccatggcgactgccgcgagccaggcgagcctcctgctccagaagcagctcaaagatctcgcgaagaaccccgtggatgggttctcggcggggcttgtggacgatagcaacgtgttcgagtggcaggtcaccatcatcggcccgcccgataccctgtatgatggaggctacttcaatgcaataatgaccttcccccagaattatccgaatagtcccccatcagtaaggtttacctctgagatgtggcatccaaatgtttatcctgatgggcgcgtatgcatttctatccttcatccacctggcgaagatcccaacggttatgagcttgcgagcgaacggtggacac

SEQ ID NO: 7591 - DNA, 401 bp, Oryza sativa
  Clone ID: uC-osflcyp006c06b1
ttccttctccctccccggcccctagccgccgcacccccaccctcgcccgcctctcgccgtcgccggaacggaaaatcatgggcgcggaggcagagcaccgcatgtctccctcccccgctcccgctcccgctccccctacccctgttgggaggaccgacggcgacgcccctcccatggtgctgggcctgcagctgtcggcgctcatcgaccacgtcgcgcgcgtcgactggtccctcctcaaccgcatccccggcgaccgcggcggttcacagcaggtctgtattgaggagttgaatcatattctggctgaagtgaatgctcaaatcctcccttgccgggatgacctttcttcaataaggactatagccggtggtagtgtcgccaacacaaatcgaggtctc

SEQ ID NO: 7592 - DNA, 468 bp, Oryza sativa
  Clone ID: uC-osflcyp006c07b1
tcgttacccattgtccgtgatgcaggtagacaatctaaggcgccaagccaccaacattgtatcaacaaggctgagccgtgcagaaccaccactgcggaaggaaattgtggagtacatgctggatgttgactctcatatgtggagcatgcggaagagcaaggcaaactttttccgtatcatgggtgtcctaagccctctgattgcggtggccaagtggtttgatcagatctgccattggagaaatccgctgaccaccatactgatccacattctctttgtgattttagtcttgtatcctgagctgatactgccaacaatcttcctctacctgttcctgattggagtgtggtactaccgctggcggccaaggcagccacctcacatggacactcgcctctcacatgcggagagtgctcatcctgatgagcttgatgaagagtttgacacattcctactttttcgtcgctg

SEQ ID NO: 7593 - DNA, 337 bp, Oryza sativa
  Clone ID: uC-osflcyp006c11b1
tcgttctcctccaattcacctcgacggttcaggcgctctaggagggtggtggccatggccagcgtggggcagaaggtgtacgcgcccggcgtggcggtctccgagggcaatggcgggctgccaaagatcgacctcaagtccccgcatgggagtgaggctgaaattcatctatttggagcctgcgttacatcttggaaagcccccagtggaaaagacctcctatttgtcagaccagatgcggagctcaacggtcagaaacccatcagtggaggaatcccacactgcttcccccaattcggtcctggcaccatgcaccagcctggattctgtcggaaca

SEQ ID NO: 7594 - DNA, 404 bp, Oryza sativa
  Clone ID: uC-osflcyp006d02b1
ttttatatggggctccagacagctctattgctgaggataagcctgatgaaccagaagaatcgttgatagtagaagaggttccagtaactgcaagtagtgagtctgaggataaagaacctgctgcggtacctgaagaagtagcagcctcaagtgagaaaactgcagatgttgctgttgcaggagctgaagcaagcacggccacagcaactatttctcctgctcttgtcaagcaattgcgtgaagcaactggagcaggcatgatggactgtaagaaggctcttgcagaatcagggggtgacattgagaaagcacaagaattcctccgaaaaaaggtttggcggctgctgacaagagggctggcagggccactgcagagggaagaattggtttttacatacatgaca

SEQ ID NO: 7595 - DNA, 371 bp, Oryza sativa
  Clone ID: uC-osflcyp006d11b1
tcgtatgaaccggcggagaagcagaaagttcacaagcaacttgtgcaatgggaccagacacaacctcaaacaagctcctcatcatcctccttcatgatgagggaagcccttccaacaactaatatcagtaactaccctgcagcatctggcgaaaggatagaggatgtagcagcagggcagccacagtatgttcgtattgggctgccaccatggatgctgagccacatcaacggttaaggaggtttcagatccataccagtaatcacaagttgcaacctgacctggtccggtcgcctgctgctctggattactaactagcactattgtcatcttgcggttgcaagaccaggaaagcatttttaagccctaaa

SEQ ID NO: 7596 - DNA, 290 bp, Oryza sativa
  Clone ID: uC-osflcyp006e01b1
tattcagcaaaaaaaatcaaacaaaaagaaaaaatattccccatctgtgaaattcgcaaaaccctagcgcggcggtgatgtcgaacacgagggtgttcttcgacatgaccgtcggcggagctccggcggggcggatcgtgatggagctgtacgcgaaggacgtgccgcggacggcggagaacttccgcgcgctctgcaccggcgagaagggcgtgggcaagagcggcaagctcgtgcactacaaggggagcacctttcaccgtgtgatcccggagttcatgtgccagggc

SEQ ID NO: 7597 - DNA, 363 bp, Oryza sativa
  Clone ID: uC-osflcyp006e02b1
tagtttccaattcgcaccgatcgatcgatcgatcgatccagcaactagatcaacagtactagctaggaagcatggcccgtgcacagttggtgttggtcgccctggtggcagctctgctcctcgccgccccgcacgccgccgtggccatcacctgcggccaggtcaactccgccgtcgggccctgcctgacctacgcccgcggcggcgccgggccgtcggcggcctgctgcagcggcgtgaggagcctcaaggcggcagcaagcacgaccgcagaccggcgcaccgcctgcaactgcctcaagaacgcggcccgcggcatcaaggggctcaacgccggcaacgccgtcagcattcccttcaagt

SEQ ID NO: 7598 - DNA, 332 bp, Oryza sativa
  Clone ID: uC-osflcyp006e07b1
tctttaaaagccccactgggatcaagatacccccctgctgctctcaacgagcgcatcctttcttccatgtctcaaaaacatgttgctgctcatccatggcacgatctggagataggtccaggagctccagcagttttcaactgtgtggttgaaattcctagaggcagcatggctaagtatgagttggataaggcaactggtctaattaaggttgatcgtgttctttactcatctgttgtttacccacacaactatggtttcattccacgcacactttgtgaggacggtgaccccatggacgtcctcgtcctgatgcaagaacaagttgccct

SEQ ID NO: 7599 - DNA, 76 bp, Oryza sativa
  Clone ID: uC-osflcyp006f01b1
ttatttataaccctacctctcatctgcagagagatgatcttcttaagccgtcagccgacagcttccaaggctcgag

SEQ ID NO: 7600 - DNA, 305 bp, Oryza sativa
  Clone ID: uC-osflcyp006f04b1
ctatggcctgcgccaaaccctagctccgtgcgagagagccatcatcgccggatcatcctcaggggggagaaagagagcggaggctgctgcaggggcacgacgccgcaggtagggcatgaacccatctatggtactactatacctcatacccaaaagagccactctctaccattcttctattccaaggagaaccgcggaaaacctctatcctccccagttctttctctgcacccactgccagcgccgcaagtgaatttacccaagtataaccaaccactctccggcggctgaggcaccctacctta

SEQ ID NO: 7601 - DNA, 450 bp, Oryza sativa
  Clone ID: uC-osflcyp006f05b1
gtattactatatgtcgacatgccacgtgaatcgcagaatgcctctggtcagattgttttggactataccaaagcaatccaggaaagtgtctttgagcagttgcgtgtggtacgcgaaggacatctaaggatagtttttaatcctgatctcaagatcgcttcttgggagttttgtgcatggcgtcacgaggagcttattccacgtagatcaataatcccacaggttagtcaactgggcgcagttgtgcaaaaataccagagtgctgttcaaaattcgacaaatttgtcaactcaagacatgcagaataattgcaactcgtttgttgcatgtgcccgccaattggctaaagcactggaggtgcctttggtaaatgatctgggatacacaaaacgatatgtgcgcttgcttcagattgctgaggtggtaaactgtttgaaagatttgattggt

SEQ ID NO: 7602 - DNA, 282 bp, Oryza sativa
  Clone ID: uC-osflcyp006f06b1
ttttgattaatttcagagatagagtgagtgctcacacgagtgttgatgcataaacatggttgcctctgacatggcttctatgcttctgaaaccatctgcagctgcattactagaacgttcgaagcttcgagggaaagggacaatggcaaggccatctgtgatcatagcggccaagaaagcaaagaagactcagacattcgagccctatgggcctgctggaggagtcgcgtccatttcaggggtgcgcatgcttagggccatcgctctgcagcttcaccagct

SEQ ID NO: 7603 - DNA, 443 bp, Oryza sativa
  unsure (1)..(443): unsure at all n locations
  Clone ID: uC-osflcyp006f12b1
taaattgacaaggatttgaagtctatgcaaccactttccaataagaaagaaaatgatgaagttttcatcaaactgggatctgacaaggatgctttgaagaagaaagaaaatgctgaacgtgatgagcgtgctaagaagtctgtgagcatcaacgagttcctaaaaccagctgaaggagagaggtactatggcggccgtggtcgtggcaggggccgcggggatcgtggcggtttcaggggtggatatggtngagggccatcgctctgcagctccaccagctccagaaatcaaagaccaatcccaattccccactcttggtcggaagtgaaatgcatgtactgcctgcagtatcaagttatgtttgcggtcaactttgaattttgtctaatccgaaatcactgtgcaggtgctgatctgatcaaacaataatggtgtcgcttttg

SEQ ID NO: 7604 - DNA, 449 bp, Oryza sativa
  Clone ID: uC-osflcyp006g01b1
ttcctaacttcccgccggacaacccgcagaagttcgtgcacgtgcaccgggtgttcggcgcgagcaacgtgaccaagctgctgaacgagctccacccttaccagcgggaggacgcggtgaactctctggcgtacgaggccgacatgcgcctccgtgaccccgtctacggctgcgtcggcgtcatctccgtcctccagcaccagctccgccagctccagcaagacctttcccgcgcccgctttgagctctccaagtaccaggcggcggtggcggtgtcgttgtcgaacgggcaggcggtggcggcggcggcgatggcggatcacttcattgggagcgcggtgcaaacgaactgcacgagaactttattagtggtggttgtgtggtggcggcggccaatcggctttgcggaggggccgcggtgggtttcctgaactaccacccccgttttt

SEQ ID NO: 7605 - DNA, 375 bp, Oryza sativa
  Clone ID: uC-osflcyp006g02b1
ttcacctcgactccccaaacatggcgctcgccctcgtctcgccaatggcggctctctcactccactccgggaggatctcagcggcggctatcggcggcggcctccgctctcgcagggcatccccgatgggcgccgccgccaccccgttcctccggagctccttcgtctcctcctcctccacgtcatccgcctccgcctcccccgccgcgctctctgccgcggtctcggcgtcgctgaccttcacctctgcctccccatttgctggctcatctttgggaatcgaattcagctacaacagagttacaacaggaagacccccgattctgcagattagggctggaaaggctgctccgcgcctgaccaagagaaatagat

SEQ ID NO: 7606 - DNA, 324 bp, Oryza sativa
  Clone ID: uC-osflcyp006g07b1
tatcgacctcaactcggacgacgagcagtcaccgatgtcgtcggacttatcccccacggcgacggcgacggcggcggagttgtcggcggaggcggcgggtcacgatcagggcggggagcagcagatgatgaacagcagcaagaaaggaggagggtgggcgcgagggggccgagggaagctgcaggtggcggcgccgcacagcccgcagtcggcccccgccggcagtgtggggcacttcgagccggcgagccctcgtcacaagcttgcggtgagcccccgccaaaagtgccctttcagcccacgccagtcgcctccttacgccca

SEQ ID NO: 7607 - DNA, 338 bp, Oryza sativa
  Clone ID: uC-osflcyp006g09b1
tctgtcgcccttttttttttttttttttttttttttgccttatctcgcgaccgtaattccgtaccatatgttcattactaggccatacacacgcatacaccttttttttttctttcaagatgacagcacatttattcaaaaatgtttgccttcatccttatgatacatgctgcatagagtttgtgagcgttacacactatttcccgccagcaagaagcagagcagagacttcttcatgacaggttctttactacgagtacgcagggcactgcaacatttttcatgacagaacctctggcacttatgctttggcagccttcttttcacccttttgggct

SEQ ID NO: 7608 - DNA, 438 bp, Oryza sativa
  Clone ID: uC-osflcyp006g10b1
tcgtttcaccggagtgggtggagacgagacgcgagcaaacccaaaaccctcgcggcgacgccatggccgccgcgctccgcgccgccctccgccgccgccacgccgcctcttcgccggtggcccgcctcctgccgtactcgtcccctggaccctgcgccaagggcggtggcgccgccttcaccctccacgccgccacgcgcggcgcgcccgctccgtcgatccaggcgccctccgttgttcgtcgctactgctccgccgggggaggatacgccggcgcgcgccctgctcgcggtgcctccccgctccaggcaccctttatggtccgccgctccgggtccacccacgggagccactgctcccgtcacccctgccgctggcgtcacttgcctttcaccgggaatctccacttccctttttggtgccccgccgacctcccga

SEQ ID NO: 7609 - DNA, 435 bp, Oryza sativa
  Clone ID: uC-osflcyp006h04b1
ttcttagatgacgatgagacatatacaatgaaggttgtacacatgcgaccaacaaaaggcacttcaagtgcatcatccgtatcatcagcaactgcagaaagtccagctaaggaagagaatgaaagctcattggaaagtagtgctatatctgagggcattaccgatgaagcgaatacagatactacattaaagggagatgaagatgttgaggataaagaacaagatgttggtaacgccaaggatagtagtgttgaagggtttgaaatagcgttctgaatttcttcaagtcttggattcctgaattcaaagttcaagtaataaatgttggatgtgtctgaggaagctgaattagtttcaaattcgtcagaagaattagtgcaagatgatgtgaagagcaccttagagaacttattggaagattctaccactgaggag

SEQ ID NO: 7610 - DNA, 472 bp, Oryza sativa
  Clone ID: uC-osflcyp006h05b1
tacatcgcagccgccacaaaacccttctccccgcgcgcgcgccctccgctccttcctccgcccggctgcccgccgctcgttcgccaccgccaccgccgccgccgccgctgcgtcgatcgaagatgtatctccagtactacatcaacgagaagggggacaaggtgtacaccaccaagaaggaatctcctctcggtgttcccacgcagtctgctcacccagctcgcttctctccagatgacaagtactcacgccagagatacctgttgaagaagagattcgggttgctgccaacccaaaagccagcaccaaagtactgaaggagaaacctcggaccaccatgttccatggatcccacgaagagaatcagtcttgcctacctcgctatttacctgtatcactcaaatgatccggtgtatcgcgatgctatctacgaatcgtactttctcttgaccatattagtatgaccatgaaa

SEQ ID NO: 7611 - DNA, 341 bp, Oryza sativa
  Clone ID: uC-osflcyp006h07b1
tcgtactgctcttcagtcggtggattgccaccgcctgctgtctggttaattcttcagtgcctgcaagctattgaaggttggctggcaccaggtatagctttgaggggcaagttatctttccttgatcccagcactattgatcctcacaattttatggctttgcttgaggagcctttgacttctaacaaaggcaaaccaaatataaatattgctgaagtgaatgccaagataaatgaagaaccccgaccaggtgatattgcagatatccctgagtcatttagttcctctgttcaagatccggacaatccgatgctaattggtcaattagggttggcttatcc

SEQ ID NO: 7612 - DNA, 338 bp, Oryza sativa
  Clone ID: uC-osflcyp006h11b1
tctttcagggtaagccccttgtggatcctgttgtcaccctttttggaagtgtccatgagaagatgcctgagataatgggaagcatgcggagcacattgtttcctaactttggcagcatgtttagtgtggcggaacagcagcaagctaaaggtgattgggatgctgagagtcaacgggagggtgaagattatggatcagaccatggtggggatgacattgaagatagcctccaaagcccacttatttctcgtcaagcgacaagcgtggaaggaaaggagatcgctgcacctcatggcagtataatgggtgctggggaaagaagttttttgttctatgca

SEQ ID NO: 7613 - DNA, 373 bp, Oryza sativa
  Clone ID: uC-osflcyp006h12b1
ttcgatgagaagctgctctccgtcttccgcgagggtgtgaagtatggtgctggcattggccctggtgtctatgacatccactccccaaggatcccgtccacagaggagattgcggaccgcgtcaacaagatgctcgcggtgctcgacactaacattctctgggtgaaccctgactgcggtctcaagacccgcaagtacaacgaggtcaagcccgcccttaccaacatggtttcggccgccaagctcatccgcacccagctcgccagcgcgaagtgaggatatccatagctgcaagttcccttcggttgcgaggacgatgccgtcatagccatctgtttttgaataattctggtccagtggatccaattgtctg

SEQ ID NO: 7614 - DNA, 175 bp, Oryza sativa
  Clone ID: uC-osflcyp007a02b1
tcggtgatatctcgccaaaggcagcgtgtgacgcggcaatgtttgaatcaaacaggctttactcccacataataaatataaccacaatgacatccatacttttcccagaggttatggataaacaataggaggcgggggcggtaggttactagaatctatagggaaactgcgggag

SEQ ID NO: 7615 - DNA, 186 bp, Oryza sativa
  Clone ID: uC-osflcyp007a11b1
atcggtaatggcctcacggatccagcaatccagtacaaagcttacaccgagtatgcagggccatggagccgtagtacgtattcgctggcctcgcgcaggcgccggaggaccccatcctcggggtgacggtagtgtacaacaaggattccagccccgtgaaggtcaatattggcgttcgcgcctacc

SEQ ID NO: 7616 - DNA, 394 bp, Oryza sativa
  Clone ID: uC-osflcyp007a12b1
atcggtaatggcctcacggatccagcaatccagtacaaagcttacaccgagtatgcacggccatggagccgtagtacgtattcgctggcctcgcgcaggcgccggaggaccccatcctcggggtgacggtcgcgtacaacaaggattccagccctgcgaaggcaaatctcgcccgtggttcatggagcgccatggcagggagtcggcgcaatccgacgcggcggaggcggcggcgaagccttcgggccccgacaagcccgtgccgccgtacgggaagcgtggcgggttcgtgcccgggcggtcggaggacttcggggacggcggcgccttcccggagatccacgtcgcgcagaacccgctcggtatgggccggtccgaccagaagggcggctcg

SEQ ID NO: 7617 - DNA, 98 bp, Oryza sativa
  Clone ID: uC-osflcyp007b01b1
ttggtgatatcccggcaagagctgcgcgggggggggggttgtttagatcatgcttgcaattcgagcactcatgaaacataatcaggaggccatccata

SEQ ID NO: 7618 - DNA, 97 bp, Oryza sativa
  Clone ID: uC-osflcyp007b04b1
ttgtttatatccgggcaaggggagagtgagccggggcaatgtttggatcctgcaagctccaatccaacacaaaatgcgaaaccagaatgccaaccag

SEQ ID NO: 7619 - DNA, 375 bp, Oryza sativa
  Clone ID: uC-osflcyp007b05b1
tcgttatgtctaccccaagctctgttatggatgagattatgaagaggataccctcccatctctctccctatcacaccccccccccccctcactccctcctccccccccactacccccttcccccaccaccccccccgcgtcctcactcttccatcccacttacccccttccccccccccctcccatcctcccccccactctcccttcacccacctccctcctctccaatacccctcctccacacccccacccccctcccttctccacacccccccctcctctcacccatccccccccccactcaatcactcccccctcccactcccacctatcccacccatcacctcccctaccccacttccccacccccccccc

SEQ ID NO: 7620 - DNA, 295 bp, Oryza sativa
  Clone ID: uC-osflcyp007b09b1
ttaattgctgaattctgaaaaccacaatcttacattctcatttgatgctgccgtcaacataatctctcgtgaatgcaagagttttaacctacctaatgcaaaactgagttttcttccaacgattaacaatgaccattggactattttctgcttcaacttcaaccacaaacgaatcgatatacttgattcattaggacatgacagagacgagaaagctctaaaggctatgaaagacagagtggttggtaggttccttgatgttcttgatgtgatgttcccaaagaagttcacagat

SEQ ID NO: 7621 - DNA, 406 bp, Oryza sativa
  unsure (1)..(406): unsure at all n locations
  Clone ID: uC-osflcyp007b12b1
tttaattccaagggagagatattaattatagattcaaaatgcatcaaggaacatgctgtgattcccatcccaggtggaacagtagttaaggatattgttttcagcagggatggccgatatctactcacaaactctaatgatcgggtgattagagtctatgataatcttctgcctgttaaaggttctggagaggagatagaaaaaataagcagtaacaacattagctatgagagtcactacgagaagctaaaagcaaatggtgcaagctgcctagctatttcttgtgaacttttggatgctatcgcaaagataccgtggaaggcaccatgctttagtggtgatagtgagtggatngtttggtgctttagcaagcaaaggagagcacagattgtgcattatgaaccga

SEQ ID NO: 7622 - DNA, 412 bp, Oryza sativa
  Clone ID: uC-osflcyp007c01b1
gccgagcgcgttcgtatacgcttcctcatgctatcctccggttggatcttgctggccgagacctcactgaccatttcatgaagattctcacagagagagggtattccctcacaacatgcgctgagcgggaaattgtcagacacataaaggagaagctcgcttatgtcgcccttgattatgagcaggagctggaaacttctaggagcagctcctctgttgagaaaagctatgagatgcctgatggccaagttattaccattgggccagaaaggctcaggtgccctgaggttctgttccagccatcttttgttggtatggaatctcctggcatacatgaagctacatacaacttcctcatgaaaggtgttgcacacataaggaaggtcctgtatggtaatggtgtcctaagtgg

SEQ ID NO: 7623 - DNA, 66 bp, Oryza sativa
  Clone ID: uC-osflcyp007c07b1
taaccttagccgccgccgcagccgcagccgcagccgcgcgtcgtctcctccgcccgcgagctcctc

SEQ ID NO: 7624 - DNA, 84 bp, Oryza sativa
  Clone ID: uC-osflcyp007c10b1
tttaatgtagacaaaaagcgtgaaagctgacaggagcaatatttgcaaggatgcacagtttcacctctcggagaaccagacgac

SEQ ID NO: 7625 - DNA, 74 bp, Oryza sativa
  Clone ID: uC-osflcyp007c11b1
gtgattatccaccaagagccccaagggaccccggggggccaatatgaagcaagagccggtacagccccaagcaa

SEQ ID NO: 7626 - DNA, 260 bp, Oryza sativa
  Clone ID: uC-osflcyp007d04b1
tcgtgatctgaccaccattggttcctgaaattgagttatgtttgccaagctagctggtctccacagactccgcgaacgcctcggtgccaccttctcgtctcatcccaatgagttgattgcactcttctctaggtatgttaaccaggtaaagggaatgctccagcgtcaccagttgcttgcggagttcgattgccttgatcgaagcttgacacagagatatatgctccctttgaagacattctccggactcctcaggaagc

SEQ ID NO: 7627 - DNA, 293 bp, Oryza sativa
  Clone ID: uC-osflcyp007d07b1
tacatgggctcagcctcttcccggaatcgttcacttctctagtaactctaaacttttcatgcttagagggggaggtcaatatcactgtacttgaacggttagtgaccagatgtcacaacctgaagactcttaagctcaacaatgctattccccttgacaagcttgctagcctccttcataaggctccttagctagttgaactcggaactggcaaattctctgctgattaccattccgatctgtttgcaaagctggaggcggtgtttggaggcttgtaaagcttgagaaggctt

SEQ ID NO: 7628 - DNA, 173 bp, Oryza sativa
  Clone ID: uC-osflcyp007d08b1
gtgaatccgcagaaagagcagcaagcgacgctgtaacgagatcatgcaaaaggggttgcaagagaaaaggggctggagcaagagaggccacgcagaatggaggaagatgagatggaagaagaagggaaatctggaaacagataaatagccagaactcatgacaaggtggatga

SEQ ID NO: 7629 - DNA, 79 bp, Oryza sativa
  Clone ID: uC-osflcyp007e01b1
tcggtacactccaccccactccactattgcgctcggctaatttaacatcaacctaccttgattttattgcgaccgatcg

SEQ ID NO: 7630 - DNA, 89 bp, Oryza sativa
  Clone ID: uC-osflcyp007e02b1
ttcgtgaactcgacgccagaacagaaaagagcacggttaatataacatcaatcttcggaggatccacccaaatccaccgatagcagcac

SEQ ID NO: 7631 - DNA, 534 bp, Oryza sativa
  unsure (1)..(534): unsure at all n locations
  Clone ID: uC-osflcyp007e07b1
ttattttttatcataccctacaggtaattctcaaaatcggagagatttacaaggacacaatagcgatataagtatgactccctcggagctctaattatatagcacaaggatgattcaggactcatccaccatataactataactctctcagggctccaatcatatagcacaaaaaggattcagaactcatccataaacagtgacgatgacccgcaaccactgcgagaaaaccttgaccacggacaacgtcagagattttagccacaggataacaaactcacaggaaatggaaggaaagtgagaaatatctgcagccgccgtcagcctcaggcctcagtcgctggcaaacgcaccgcatcagcagcagcagcagcagcagtcattccaagcgagagagctntgctttcgcgagtcgcgcgacttcgtcaggacaggaaaaaaccggaaaaaaaaaaccccgcaataaaatttcctcaacttccgttttttcttgcttttccaacaaaacaaacacccatttccatttaccatccc

SEQ ID NO: 7632 - DNA, 481 bp, Oryza sativa
  Clone ID: uC-osflcyp007e09b1
tatagtttgatgttattatttgcggaagaaaaagacatgggctagttagtgatgaagacatatctggtgtccgaattggcttggtgtttcaaagtgcagctttgtttgattctctcacggttcgtgaaaatgttggattccttttatatgaaaattccagcctgcctgaggagagaatagctacactagtgacagaaacattggccgcagtaggcctaaaaggcgttgaagatcgaatgccatctgaattgtctggtggcatgaaaaagcgtgtagctctagctcgttcaataatatacgatgatacaaaggaaacaatagagccagaggttattttgtacgatgagcctactgctggacttgaccctattgcatccaccgttgttgaagaccttatacgttccgtacatgtaacagggaaagatgctcttggtaagcctggaaagaatagatcttatgtggttgtcactcattagcatag

SEQ ID NO: 7633 - DNA, 163 bp, Oryza sativa
  Clone ID: uC-osflcyp007f01b1
tcgttaaaaccccgtaaaaaaccgcaagtggcgttgttacgatacgattcagcggccttatctcccaccaagcaggcagatatagagagttcaccataatgtagaattcagttgctggcatatcctgtctccacctatccttataattacttgacgggggagc

SEQ ID NO: 7634 - DNA, 331 bp, Oryza sativa
  Clone ID: uC-osflcyp007g01b1
ttctgttacctctctggctggcccctatccaaccccgagacgctaggcagaccatgccatctctctgttgtactggaagatatggctggagcagctcaacctcttgcttttaggcagcaacgcactttagatgttacaggaatttcacacccacttcaagttgctgttcacgaatctgttttaagacaagcgctgagtaatcttatagagggtgctcttctacgcactcatcttggaggccgagtttcagatatatgctggtgaagcacctgcaggacgcattctccgtcgccattgatgatgaaggcccctgcatgcaatacatgacaca

SEQ ID NO: 7635 - DNA, 273 bp, Oryza sativa
  Clone ID: uC-osflcyp007h06b1
tcgctaccccccacccctctcgccgccgcagccggggaggctacccctcccccgccgtcgccaagatgcagatcttcgtgaagaccctgacggggaagaccattacgctggaggtggagtcctcggacaccatctacaacgtgaaggccaatatccaggacaaggaagggatccccccggaccagcagcgtctcatcttcgccggcaagcagctcgaggatggtcgcacccttgccgactacatcatccagaaggagcccaccctccacctcg

SEQ ID NO: 7636 - DNA, 283 bp, Oryza sativa
  Clone ID: uC-osflcyp008a01b1
atgcgttatatcgggtatagctagcatcttactagtgttacatatttactggtggaaactcatatgcttaatgataatgaaacaattgaacaataaaggacaggttggagaggatgttcgatcagattctgaggatgaagagtgatggagcgattctttgacaactgtgatgtgtgccatttcattgctgatacttttctgtgcctgcttttggtactaaattgttttggtcttggcaagctaggagcatagataagaaagacttgcctctgtatattggcct

SEQ ID NO: 7637 - DNA, 562 bp, Oryza sativa
  unsure (1)..(562): unsure at all n locations
  Clone ID: uC-osflcyp009a03b1
tcttcagtgagactggtgctgggaagcatgtcccccgtgctgtcttcgtcgatcttgagcctaccgtgattgatgaggtgaggactggtgactaccgccagctcttccaccctgagcagctcatcagtggcaaggaggatgcagccaacaactttgcccgtggtcactacaccattggcaaggagattgttgatctgtgccttgaccgcatcaggaagcttgccgacaactgcactggtctccagggcttccttgtgttcaacgctgttggaggaggaacgggctccggtctcggttcccttctccttgagcgtctctctgaggactatggcaagaagtccaagctcgggttcaccgtgtacccgtccnctgaggtctgcacctctgtggttgagccatacaacagtgtgctgtgcacccactccctgcttgagcacaccgatgtcgctgtcctgctcgacaatgaggccatctatgacatctgccgcctctccctcgacattgagcgcccaacctacaccaacctgaacatgcttgtgtcccaggtcatctgctcactgac

SEQ ID NO: 7638 - DNA, 555 bp, Oryza sativa
  Clone ID: uC-osflcyp009h10b1
ttagctgcggcaaaaagcttgaaaatacttcaggctgacaataataacttcagcgggagttccatccctactctgtattacaacatgtccggactatttaaactgagtcttcgaaactgcagtttgcagggtgctattcctgatctgagtgccatacctcaactggactatttggatcttagctggaaccagctgacaggatctatcccaactaataagcttgcttcaaatatcactacaattgatttgtcacataacatgcttaatggaactattccatcgaacttttcagggcttccttatcttcagctattgtcacttaaaaataatcttttagatggttctgttccctcggaaatttgggctggcgtcaaccctaacagaaacggaagccttgtactggacttccaaaataattctctcaatatgcttccagctgaaattagtcctccttcaccaaatgttactgtcgtgttatatggaaatcctatatgtgagaattctagtgaaactctgataatcaacctttgccgctgcagtcaataaacctggaaa

SEQ ID NO: 7639 - DNA, 425 bp, Oryza sativa
  unsure (1)..(425): unsure at all n locations
  Clone ID: uC-osflcyp018a04b2
ttttgttttttttttttttttggttcatcagaaaaagattttattagcaaagaacaggggataaattattccacatgccgacttgatgaatgatactaattatttccagtgttaaatggaattaagttggcgtaaaaaaaaattctagctgaaacaacaccagttgaactggcatgccaattggcggtacgctgccttattctatttacttttgaccgggatacccttcggctgttcttgggataattttctatggtttaccattcaactggactttagctagcttctctccgtttttttcggcgccatccaccttaccaggaaatgacctcccactacttgtgacaagttccttgatggttgcttggatgtccttatncgccaacagcgaatccaatgtcacatgtagccggaatctccaataa

SEQ ID NO: 7640 - DNA, 314 bp, Oryza sativa
  Clone ID: uC-osflcyp018a05b2
tttttgtttttttattttttggggttgctttttttttttttttttttttttagaaaaagcagggtgcttatcctggtacaactgcatccttctcaaacaccgggtggttagcgacaacaaaaaaacaagggcccacaccccgcagctggctttgtttcccccaaaacacacaccagttttacaggacaagcccattttagaaaatttacaaggaccctcttttattgaaccaaaggggtcgggaatctatctccttcttggaccctaccctaagctgctggcagattttaatatcttcttcttcttcttcaaaa

SEQ ID NO: 7641 - DNA, 382 bp, Oryza sativa
  Clone ID: uC-osflcyp018a10b2
tggttttcgaacactttcgggtctcccagaatggtatttcattgcatcccaaaagatagcaacaagcagcacaaacaccataaccaaagcgaactcaatccatggtaacataacggacgaagaacacctaacactggatggatggatagagggcttctcgactcgagagagccactggacacagataaccactccactcgatgataagatgattctgacacggataggtaaggataactggccacgatgggccccaccaatcaatggctccaggtcccgccggagtcaccgccgtagccgccggcacggatgccaccgaagacgtccacgccaccgccacgggcaccgaagaagcctccgccgccaccgaaggcgtcctcac

SEQ ID NO: 7642 - DNA, 431 bp, Oryza sativa
  unsure (1)..(431): unsure at all n locations
  Clone ID: uC-osflcyp018a11b2
ttgttttttaaaatttttggtttacaattttttttttttttattttttaaaaatatttttttttatattcttttaaaaaaatataattctttattaacaaatataaaactaacaccaaaacacaaagttcccacacccaacaactgtattatattcccacaaaacacaacaccanactacaaaaaaaaccccaattggtatgtttaaaaaactccattcacaaacaaaagcaaaaagaactaaaatgaaaactcgtcaaaaaaaagaagcaaaaaacccccaaaaaaaaaaaaaagtttatacatccatcaaaaaacaaaaaaaaaaccggcctttttcgaataggaaaaaaaaacaaaacagtgagaaaattttctttgcaaccccccaaaaattaaaattccaaaaaaaaaaaaaaaagcctttttttt

SEQ ID NO: 7643 - DNA, 234 bp, Oryza sativa
  Clone ID: uC-osflcyp018a12b2
ttgtgttttaaattttgaggcgaggcaaatcttatacataacccaatgaagtccgcgcctagtgcatcgttatcgacatctggtaatggtgggggatgttgttacctaaaaaaagattaagacaaactgggaaatagtggcgataatgtttgacgatgttgcccgtccatagattggccaagtgtatgtgggttcgtcaatgcgcccactcaaagcctgttactacaatctctt

SEQ ID NO: 7644 - DNA, 396 bp, Oryza sativa
  Clone ID: uC-osflcyp018b01b2
ttggtgttttaatatttttgggggtttttttttttttatttttgttttttccttgttaatttttggaccggtaccagtaggggaaccaaccccccctaaagcgagacgaaaaaaaaccgggcgaaaaaaaggccaaagcaaaacccggggaaaaaggggaaagcgggggaacaaggggacacaacaaacaagccggaagaaaaaagagaaaaggcgggggggccaaaagagggggggaacaaaaaagaaaggaaaagggctaaaagcccgctagccagccgggaaacctgacaggccagaaacaagaaagaaccggccaacccacgaaaagaggaaagacgcgaaaggggcgccagggcggatgggctcctcaccaggcagacgggaaacaaacga

SEQ ID NO: 7645 - DNA, 417 bp, Oryza sativa
  Clone ID: uC-osflcyp018b04b2
tttttgtttacagaagttatctggacaacaagattaggcattgcatccgcaacgcaaaaggtattcctagtatacaacaaggtgaggccctcagaatttacatgaccatgaggttcccacatgcctgaatggcgcaacaaagcaactatcatatatagctggatgcggaagcaagattaaataactttggatcacatgtgcagctacactaaacaaacagccccgaaaaggttaagcacttaagcttgccgtgaggatgatgattcacccagtgaaacagaagtaaacgaggaagcccaagctcgagcattgcttgcgcctttcctaaggtcccttgtcttattgctcagtctaagcttgctacaaagcctcttcacatcaagtacattcagcgctcgttccaacagttggcttgat

SEQ ID NO: 7646 - DNA, 413 bp, Oryza sativa
  Clone ID: uC-osflcyp018b05b2
ttttgttttttttttttttttggtttttttttttttttttttttttttttttttttttttttttttttttttttttttttttttgggaaaaacgggggaaaactttccctgggggggattttaaggccccgggttcccggggggtttggcctttaccaaaaaggaaaaggcccatccctttgttttacagggggggcccggggaccaggaaaaccttttggctttgggaaaaaaaaatttgggggtccggggtccggggacccccaaactaccgacccgttttagggggggaaacacccccttagggggggggggcatcaacattgggaaacattcccggttcccccggtgggcccccccgggggggggcccttggaaaggaaccccccatttctaaaaacttttcttggggg

SEQ ID NO: 7647 - DNA, 394 bp, Oryza sativa
  Clone ID: uC-osflcyp018b06b2
ttttggttgaacaatgaaacgggtcagcactcattcataaagaaacatgtggtggtctagcgttccagaatcatttacacataaagggtcccaaaattatgttgaagagaccatcgtctcgaatcctaatattgtttcagatgaggctaggaaatagctgcttgaaaaatactctctctctcccggcgaaaaaaaaatattcagttacctatcactaacaatctaacacagactagtgatatctcgtatcaattggttgccgggtgtttcgcctttgaatgatccttcagagcaccagaggagttgaaaggcttattgcctgagttgcagacatagctagccaaacgcttagagctgacgttctttatgggctgtactctatgcctgttttgct

SEQ ID NO: 7648 - DNA, 362 bp, Oryza sativa
  Clone ID: uC-osflcyp018b07b2
gtttttttttttttttttttttttttttttttttttttttttttttttttttttttttttttttttttttttttttttttttttttttttttttttttttttttttttttttttaaaaaaaaaaaaaatttatcaaaaaaaaccaaaaaaaacttttaaaaaaaaggggaaaaaaaccccaattaattttaaagggggttccaaaaaaaaaaaaaagggggggccccccccccccaaaaataaattaaggcaaaaagtttttcttaaaaaaaaaccccaaaaaaagggttaaaaaggttttaaaaaacaccctaaaaccccttggggggggccccttggccaagggttaattttaatggggg

SEQ ID NO: 7649 - DNA, 417 bp, Oryza sativa
  Clone ID: uC-osflcyp018b11b2
tggtttttaactactaagggcatcgcttgaatgaccattgactggtacgtaaccaacaactatcccatgaatagcattagcaacacagcaccaaaatgttcttcagtctacacaaatgcacgcacgatccgggtcagattttcctgacttacacaggccataattaagctaagacagaacattacagtccaggtgagtatgcaacaactaacaaatctcgctcgaatgatggataaacaacagccaacaaacacagactggccacaaactacatattcagaactcttccggcgagtcgtcagaccagcgcgatgctgctcccgccgacaggaggcttactgacgcctccgaagtagtcccgggaggccaccttcccatcggcgaagatgttgctgccactcatctccttgagcttcg

SEQ ID NO: 7650 - DNA, 419 bp, Oryza sativa
  Clone ID: uC-osflcyp018b12b2
ttgttttgcaactcaatagtgtttcgatatttcaccgagggtaatgtatggtaggaaaatcgccagacataacagagccggccagactcaactcaaactcaaccctatgatggtaaactgtttgcgattaacgcctccgcctatgacaatgtttggagataaacgcttccaccaaaaaacgaatgtcggggagtgttctcccctacaagaattattattgttttcaatgttaaaaaggcaaaattcaccagatcccgttagtgcaggaccaggaataaacacttgttcgtcatcattttctgccagtttaggcaccgcccgagccgtacttctttccaaagaagaggatctgcagctggtcatagcctgagagcacaccagcaccagcaatggcacgtaggatgttggcaccagcaccc

SEQ ID NO: 7651 - DNA, 396 bp, Oryza sativa
  Clone ID: uC-osflcyp018c01b2
tcgcgatctatagctggtgtttagatcgcgagcgcccccttttttttttttttttttatgatggaccattgctgataactattactgattgaaatgtagcaagcatgggacatagtacatcacagagctagctaaatgagacaccacaatactgaccgaaaaccaccaagaataaagattacacaacatacccaacacgcaaaccacttgacttgactgagaggatgaattctttcggctgccaggatgcagtgtgcatcacaaagttgaacaatttaagaaatgtagcagccgacaagaagaagtgtgaggatagagcagcaaaggtggatgttgaaatcttgtaggttgcaatccattccacgcccctagccgccttagatcttgtcgagcttc

SEQ ID NO: 7652 - DNA, 348 bp, Oryza sativa
  Clone ID: uC-osflcyp018c02b2
ttggttgttttattttttttggtgttttttttttttttttttttttttttttttttttttttttttttttttgggttttttttttttttttttttttttttatttttttaaaaataattaaaaaaaaaaaataaaataaaataaaaaaaaactaataactacataaagtccaaaaaaaaaaaaaaaaaaattatttttaaatatttaaaaaaaaaagaggggaaaggaaaaaaaaaagggccccggaaaaaaaaagcaaccaaccaaaaagccctaaaaaaaaaaaaaaaaaaaaagggggccatcggtgggaccgcccccaaaaaaaaaaaggaaaaattttttttc

SEQ ID NO: 7653 - DNA, 385 bp, Oryza sativa
  Clone ID: uC-osflcyp018c03b2
cagagagaagatgtcaactcagatatacacgggcagttcaagccattgtgaagacaattacaggcttagatacataagaacagttatgcaatcaaccggtataatacaggcccaagttcaggctatctgataaggaatacaaatgttgtttctttagacaggccttaagaaaaattgtcactataacaataatccatgctcattcgcccaacaagtgggcataaaattaatagatgcacaaagcaaggggatttggcttttctagagctaccgatcttcagatgccagcattgataaattgctctgagctcttagtagggaggatccggattaaatgccaaggattccctccagatgagttcttttatatgttcttcagtaaagg

SEQ ID NO: 7654 - DNA, 411 bp, Oryza sativa
  Clone ID: uC-osflcyp018c05b2
tttttgttttgtttttttttgggcaaacagccacgatacggctcatttttattccaatccaacagaaccacatgcgcatgccaacagtatgaatcaaaagctgtttcgaggtgaagcacaatgcgcatcactccctggccgatacgtatccatcagcaataacagaggaatcagtagatgtacgggacgaacgccttgcgcgacgccgggtacttgtcgccgaacttgccgacgtaccaccggcggtgatccctggccctcggcccgaggttggagcaggtgtagaggaagaaggcccaggccgccggcgtccacgccaccagcgcgtagccgagccactccacggcctcgccgaagtagttggggcaggtgaccacgtcgaacagcccgccgcggggaatctggtaccct

SEQ ID NO: 7655 - DNA, 389 bp, Oryza sativa
  Clone ID: uC-osflcyp018c07b2
gttgtttttttttttttggggagcaagatagcgctatattagtatatttcacttgcaaaatacaacaacggaatcagaaagctgccagccaaggccatgaacgctgcaggcgccacggcattgcagcagcaatctcacacgattacaacacggataaatacagcaagctcaaaaaggaaaaaaaaaacacggacggagaaacaacgtaatctgctgatgagcgtacgagaagccttcaggatcctgaattcctccctttcttatttcggggcacgtatcgtctcttcctggatcttgtcgcgttcgcgggtggactggttcgatcagcagatgggcaggggctcgccgttccactccttgaggcactcgagcatcgggtcgatgagctc

SEQ ID NO: 7656 - DNA, 381 bp, Oryza sativa
  Clone ID: uC-osflcyp018c08b2
gtgtttttttattattttgtggttcttttttttttttttttttttttttttttttgggcctcaatccaaggggaaaacatattggcatcccaatattttaagaaaacacaaaagggaactgaaaaccaaatccccacaagggtacaaaaactgaaccgccggtcaacaaaaaaaaaaacaggcttccccacagggtaaaggtccaaaacacaccaaggacatactacaaaacttggaggctcaaaaataaaaggccaaccaagttaaaaaacccccccccccctcagggggagagcaggtagctgatcagtgggggtatttgcctgatgatgcggagcaataccgaaaacttccatagcctcaaggaccttggccttaaaa

SEQ ID NO: 7657 - DNA, 389 bp, Oryza sativa
  Clone ID: uC-osflcyp018c09b2
ttgtttttttttttttttttgttttttttttgagaagaacaatatttcttcagcatatgcctggttcagatatgataaaactgaccattgtctctgcgcttgggagaatctaagctcacaatgtcatcatgaaaaggtttatgtttgagccgctccccttgcctgagcaacagcactctgataaaggttttcgtactgggaagctggagaatcccagctgaaatcaatctgcatatccttctgcactaactgtttccaaaccataggttttctgctgtagtagctgaatgccctttccaagcaactgcttagatcctgctcatcagtcctagcaaatgtaaagccattccgcagctccacaggtatagtttcatcatcaaaatcaaaaa

SEQ ID NO: 7658 - DNA, 345 bp, Oryza sativa
  Clone ID: uC-osflcyp018c11b2
cctttccggtgtttttttacccttggggaaacacccaccatacggttcatttttattccaattcaacagaaccacatgcgcatgccaacagtatgaatcaaaagctgtttcgaggtgaagcacaatgcgcatcactccctggccgatacgtatccattagcaataacagaggaattagtagatgttctggacgaacgccttgcgcgacgccgggtactttgcgccgaacttgccgacgtaccaccggcggtgatccctggcccttggaccgaggttggagcaggtgtagaggatgaaggttcaaaaacgcggtgtccacaccaccagctcgtaggcttttttttt

SEQ ID NO: 7659 - DNA, 365 bp, Oryza sativa
  Clone ID: uC-osflcyp018c12b2
ttgtttttttattttttgggttttttttttttttttttttttttaacccaagataaattcatattacttcagggcatacataagattgggagatcgacaagcaaaaacatactggggccgataaacagaagttttaaagaacccagcttgggaacatcgaatgatggaattcagagtctgatctccctaacttgcctggcaaaatgataacagcttctctaaatcaaacacaaagcaaaactcaaggaagaacgaacgagattaggcaaccaattttgattactctggtccaatccaacaggattgagccaccgccgccattgcctccaagttggcagttcttagtttcttcagttggttacatt

SEQ ID NO: 7660 - DNA, 355 bp, Oryza sativa
  Clone ID: uC-osflcyp018d01b2
cttctggaccatgatgactgtccatcaacagcagcaggtacacaaactgaaactttaatggcacaaagtcagaaatttatttcaagttcacaaacagcaccttttaacaaagtttcagttcaccaagaagagcaaacaagatgaaaaagatcaagctacaataataatttacatcaatgctccaacaaaaaaaaaagaaaaaaaatagaagtggccaggatcgttgtaaccaacgaacaatcagaaggcacggggatctacatgatgatgacaggcccgaagagtatggacatggagattcttttgcagcacagcatcggccatatgcataaagcgtccgggccagtcggatgcg

SEQ ID NO: 7661 - DNA, 355 bp, Oryza sativa
  Clone ID: uC-osflcyp018d03b2
tttttgtttttttttttttttttttttttttttttttttttttttttttttttttttttttttttttttttttttttttttttttttttttttttttttttttattttttttttttaaaaaaaatttgggcattttaaaaaaaacccaaaaaaaaaatgggggggggggaacccccaaagaaaaattttgggggaaaaaaaaaaaacaggggggccccccaaaaccaaaaaaggggtttttttagggccaaaaaaataaataaaaaaaagggggggggtttttgggaaaaacaaaaaaaagggttttaagggaaatttttgcaaaaaaaagcttggggaatttttaaggggggcc

SEQ ID NO: 7662 - DNA, 147 bp, Oryza sativa
  Clone ID: uC-osflcyp018d05b2
ttttttttttttaaattattggggttttaattttttttttttttttttttttttttttttttttttttatatttggaaaacaaaaaaaaaaaactaaaaataaaaaaaaaccaccgtataaatcaaacatataaagtaataacaacc

SEQ ID NO: 7663 - DNA, 361 bp, Oryza sativa
  Clone ID: uC-osflcyp018d07b2
tttttttttttttttttgttttttttttttttttttttttttttggagaagatcagtcctactttattcatgccatgaccatgcatccatatgggctttcacagacccatgaagaattttcttggccgaaaccgaaacatacatttttaggggttttcaaggggggggggcaaaattaaaaagatcaagcgcaacccttgcctgccgtgggtgctcccccaaaatttaaaggccattcgaaaattttttaagcccccgggggcctttttttaaaactaaaaagagggtcatcccaaaagagggtcccaaaaaaaagggcctgacaaaaagggacatggcccctagaagaggctcccactac

SEQ ID NO: 7664 - DNA, 378 bp, Oryza sativa
  Clone ID: uC-osflcyp018d08b2
ggtgtttttttttttttttttttttttttttttttttttttttttttttttttttttgaaaaaagaggtatgtcaccctaaataagaatttttgttccccaaagccaggttttttggaagcatggtcagacctaccaaaaatgcccaagcttattaggggcgctgggggtcccccattgacaaacattcagatcaactggtggggggggggccgcccaaaaaagggaattcaaacaactttttttgtactatcagacaactttaataacaaggatgatgttggggaacccccctctttggggtactaacccaaacttttgcacaaaaaggggcggggcccctggaggggttttgcccccaaacccaaagaagcccgaa

SEQ ID NO: 7665 - DNA, 332 bp, Oryza sativa
  Clone ID: uC-osflcyp018d09b2
ggtgttttttttttttttgttgttttttttttttttttttttttaattttttttttttttatttaatatttttttaaaattaaaattaaattaaaaaaataaaattaaaaaaaaaggaaaaaaaaaaaaaaaaacaaaaaaaaaacaaaaacaaaaaaaaaaaaaaagaaaaaagaggagggaaaaagaaaaaactagacttgaccgagaaaaaaaaaaaaaaaagaggccacaaaagctttaggaacaaaaggaaaagcaaaaaaaaaaaaggataccataggaaaaaaaataaaagatatagaacaacaaaggggggtgaaaaaaacagg

SEQ ID NO: 7666 - DNA, 406 bp, Oryza sativa
  Clone ID: uC-osflcyp018d11b2
ttgtttttttatttttttggtttttttttttttttttttttttttttttttttttttttttttttttttttttttagggaaaaacaacagaccattatttatatttaggcccgggttaattttaccgggggggggggacccccttacaaaaaccaaaagggctggggccaaaggtaccgggggtacggggcacactggggattcaggtttaaaacaaggaaggaaaaggggcccttcttaacggggggggtaggtgcaaaagggggggggggaaaaaacacccaaacccgaagcagctcaatgggggggggggggtttaggccaaaagcaaaaaactataggggggggcctcactcagggggggggcccccggttttatttatttaggtaaacacctttgggaagg

SEQ ID NO: 7667 - DNA, 392 bp, Oryza sativa
  Clone ID: uC-osflcyp018e01b2
tttttgtttttttttttttttttttttttttttttttttttttttgcccaaagccgaacacggccgctttgcaaaattttgctctgacctgataaaatatcttgccaacaatgtaatatcatgggagaatgcttacataaacataactaggcagatttgacgctcggatcgtcactagaattgacttgtttagctaaaacaggcatttcaaaacgcagtacatcacagcagagaaaacagatgcgcccagagtattttcacgcgctcagaagttctgtaatgcaaaatctcagttggtctggttgttgactcagctaaggacagggaatatgcgagttacatgctcgaacggaacagtttcagctgtgttcttcttgagctcagggtgattg

SEQ ID NO: 7668 - DNA, 377 bp, Oryza sativa
  Clone ID: uC-osflcyp018e02b2
ggagatgagcaccacgacgcacttgatgctcttgcacaccgtctggatcaccgtcggcccgggctccgggatcgtcaggttcaggttgtcgccgaacccctccgcgtacggcggctcgccgaccaccacgatcgcgtagtcgtacttgtcgccggtgaccacgctgctgtccgggttctccgagtacaccaccgtcgtgctgggatcaacggtggccttgatcgccgacaggatcgtcgtgccagcagtgatgttgttgccgggctgtccttgccaggtgatggtccatcctccacactgtctgcccaaatcatcagcatggcttcccgcgacgagaattttaccggctttcttcgggaggggaagcaccggagagt

SEQ ID NO: 7669 - DNA, 390 bp, Oryza sativa
  Clone ID: uC-osflcyp018e03b2
tttttgtatcaatgaaacagcatattgtatacggagtattctgttcgagtatgtttcaggattctttgataattgataccctaccacaggtctaacaaatgaattacggtataccactaaacaaagaattttaaagtgacattaagttttctctgagatttttcatgccaacagcattacaggattctagcatgacgaacaaacatcctttggccaaatgattcttctttagcatcccataatatgatacagggaagccgtcttgaggttgagagtaagatatcgacgccaaatttcctaccaggcttaagatgacgcttgcttctgagttgagctactttcgagcccttgctgcatctccagcaatttctgctgctcctcatcattcta

SEQ ID NO: 7670 - DNA, 394 bp, Oryza sativa
  Clone ID: uC-osflcyp018e07b2
ttgtttttggatgaaaagcaacaacactgttgagttcagggaaattgagctccccatcacctgaacttttacaaaacttccaacctgaacttgtacaaaaatttcaaacacttgctgcaccgacaagtcagtttgcacgtttaaagtgacaaagcaagcagatggcgcatacaaaagctctacttgcaaccaaagccaaaataaggagttccaacattccattaagcattaatcgccagtcatcagactcgcagctcattacaactaatcccatcctgacagtgcacctgatcctacctccggcacagaggatagctgctcaagagctgaggagccaaagacggtgcctttggctttcttcttcttcttggtgtgatcgattaccaggccacca

SEQ ID NO: 7671 - DNA, 381 bp, Oryza sativa
  Clone ID: uC-osflcyp018e08b2
cggccccgatttttttgtgctacgcacttgagggggttgcacaccgtttggatatctttttttttttttttggttattttttttttttttgttgtttcccaactttttttttttctgtgggggggcaaccaccatgggtgtgtttttccacacgaccccggtgaccaccctaatgttcggggggttccagtcaccacccgcggggttggatcaaaaagttggcttgaacgcccgacgggaaccgtcgggcaattaaagatagaaacccaccggagggggttggcagtagaaggcccattctccacaccaaatttcctaccaggcttatgtgtgggcgagaacagaattgtacccggtttatttgggaggggaagcaccgga

SEQ ID NO: 7672 - DNA, 376 bp, Oryza sativa
  Clone ID: uC-osflcyp018e09b2
acgacaaaccacgaacttggatattaaagatgccacaaagaaggttcacataaacaacacaggtcacagcagcgaaagctacaagcaaaccctgcataatcgaaaagcaaatgtttttcaaaaccagacacacaaactgatagatagaagcccacacggacagatcataggatagcagcagtaatcaagcattgccaaggcaccaggcaagaaccctgaacctctctagtactggtcaccctcatcaccctcgtcaccatcgtcgaactcggagccgacctcctcgtagtccttctccagcgcggcgaggtcctcgcgggcctcggagaactccccctcctccatgccctcgccgacgtaccagtggacgaaggcg

SEQ ID NO: 7673 - DNA, 408 bp, Oryza sativa
  Clone ID: uC-osflcyp018e11b2
ttgttttttttttttttttggcagttacacaattttcttttccttttcctgagaaaaggttatcaacagcagatggcagactcattgtcaaaatgctgcccaaccagcacctgtgctttttgtttgcgccgactctgtcgatgacggtaggttttgcttcatagcagaaagatctgaaaaggcgtcgctatttctcttggcgggttcttttggagccctgattccagcattagagccagaattcatccttgcggcagcagggtcatttggtggaggtggaagaggagatcgaagcttcccagctgaacccggtggcggcgcaaggagcatgcttgccttgggttttgcactggcccctccagataaaccagctgatgaaagcataccacttccagttgatggcttatt

SEQ ID NO: 7674 - DNA, 368 bp, Oryza sativa
  Clone ID: uC-osflcyp018f01b1
tttgaatttgcatgagggtcctcttgctggtggctacgcatctgagtatctgatactgtgttccatatatgtctctcatgctgtatgtctgcataataaccgccaaataaaactgatatagctatgcatggcaagcagactatggttaatacaagaacaggctagagatgcagaccttggtccagtgatcagcaaacaggctaaggaacgtatctgcaaattaatacaaagaggtgctgatggtggtgcaggagtacctacctcgaagaaagaaaatatttgggggtcctaacttccgagaatgggaatttttgttggcccaacactccttgctgatgctaaaagtgaaatggaatgctacaaggagg

SEQ ID NO: 7675 - DNA, 367 bp, Oryza sativa
  Clone ID: uC-osflcyp018f03b2
gccctctttttttttttgcatacaatccaggcaagatatatcctgctgcaaaatctgactccatcggatcttataacacggttcctctcatccgagggtaaaaggcatctaaattcttggacaccacacatgcagccacacagggcgaaacgaacaatcttacataggcgtatccctgcaaacaaaaaggattccgggataccacggggaggcgacagtagtaagccgacccatcatcgcctggacctacagcagcacgtaatatagatagaagcaatgctcgtggtatgatgttaccaacgccgggaggccagcagcatcgcaggcttgcagcaacgctcgccctcctcggctctgtacatgatca

SEQ ID NO: 7676 - DNA, 283 bp, Oryza sativa
  Clone ID: uC-osflcyp018f07b1
tttagatgccacactgaatgcccttattgctgctggttttggtgctgctgggcaaaggtgtatggcattgagcactgctgtttttgttggaggctcagagccatgggaggatgagctagtcaaacgagcacgcagtcttagcccgacttcacggacaggaaggggaaggccggcaaggaccccaacaagcccaagagggctccctccgtttttttcgtttttatggaggagttccgtaaggaggttcaaaggagaagaaccccaagaattaaacctgcgctgc

SEQ ID NO: 7677 - DNA, 333 bp, Oryza sativa
  Clone ID: uC-osflcyp018f08b2
tttgtttaaaacgacggaattagaaacaatttaatctaacatacgcaaactgatattatcacaatgttagccgatgacaatggaaagagtaatctaggtacaagcggatcattgacggtggagacaagacattggctgcaccacaacacccaccagtggcgccaacaaggagcgctatccgttataggacgagagaaaaagtaaaacatcacgatgtgaagtgaaactgaataattctagtagacgatgatgatgatggataggctccttaggacgcccgccgcccttagcgtcttgctgctcccatcttgtccactggaaggctcactcgtc

SEQ ID NO: 7678 - DNA, 386 bp, Oryza sativa
  unsure (1)..(386): unsure at all n locations
  Clone ID: uC-osflcyp018f09b2
ttgtttttttatttttttttgttttttttttttttttttttttttttattttttttttttttttttttttaaaatttttttttttttttttttttttttttttttttggnnagggttttttttttttttttttaaaaaaaaaatgaaaatagaaaaaacctcaaaaaaaaaaaaaaattttcctaaaaaaaaggaggaaaaaaaaannaaggaggtttttttaaaaaaaaaaattttgggcaaaaaaaaaaaaaaaagaaattcttaagttttgtaaaaaaaaaaaaaaattttttaaaaaaaaagaaaaaaaaaaggaaaccactgggtaaaaaaaaggggaaaaaaaaaaaatttttaaaaccccaaaggtaagcaaagtggga

SEQ ID NO: 7679 - DNA, 402 bp, Oryza sativa
  Clone ID: uC-osflcyp018f12b2
ttgttttttttttttttttggtttttttttttttttttaattaactagcatatttaaatttaaaacgtaactgtttgagcaaataccacgaaatgttcaggcgctaagatacgggaataccgatacatccagcatagcaaaaatggggaagagcacagagtcagataaagctatagagaactagggctccaggagatgggggccgaatgacaaccatggggcttagtcgacctcctccattttgctctcgccggcgtcgtcctccagcggcggcatgtcggcgtcagcctcagcagactcgtcctcgtcgatgctcaggccgagcttgagcatccggtggatcctggtgcccaaggtgttggggtcctcaaggctgaagccggaggtcaggagggcagtctc

SEQ ID NO: 7680 - DNA, 401 bp, Oryza sativa
  Clone ID: uC-osflcyp018g01b2
tttttgttttttttttttttgttttttttttttttttttttttcagaaaagttttatcagccgttcaaatgcattcaattgatatggggtcgaccccataatgttgcccaagcaagtgagatgagcaaaaccaggaaatttgtggcccctcccaacgacaataacgccttcctcctggtgtccaccctaacagctcaccatgacactccacatttctgcatccggcattttagtaaaaggggacgggggcaatggcagccgcaacaccggcaacggcagcgcaccttttgagagcaccggaaccggaaaaatcggcgtcagccgcataggcgggcccatcggcgacgggagacaccacggtggccaacggcgtaggggggatggacaccttgtcgccacca

SEQ ID NO: 7681 - DNA, 413 bp, Oryza sativa
  Clone ID: uC-osflcyp018g03b1
tttcaccaacagcgaggtgactgagagacgctagcttgggagaataatccatggcaggctagatgtctacaattgtgatgatggtggatctcgattgtgacagatggtccaagatagtcctttctcggttggcaattggtgatcttgcaacacagtattttgcagaccgaaacatcttatcatgtgtcccaactatgtccctggccagaagaagagatctgtatgtgaagagtgtccagcgtactgtcatctggatgggaaagaaacaagaatctgttgaggatgttccctgtggtaacactgctgctatggttaggttggatcagttcatcaccaagaatgccaccctgactaatgagaaggagtcagatgcctgcccaatcagagcaatgaaagttctcagtgtcccctgt

SEQ ID NO: 7682 - DNA, 348 bp, Oryza sativa
  Clone ID: uC-osflcyp018g08b1
tttgaactgtcttggatagtaatgacaaagatacaaaagaaaacccttcagaaaatagtaacacgataggtagtgaagaagtcttgagtcacggtaaccaggaggaccagaaggtgcctgaaatggataataccaactgcaagattaggcgagcatcaaggccatctcgtacgacgagtagaacggccgagttgcagaagaggatttacaacgtgttgcagcagcaacaggtggtaccgttcagacatcagtgaataatgtcattgatgaggtacttggtacttgcgaagttttcgaggaaaggcaagtgggcaatgaacggctcaatatattcagtggttgcccttt

SEQ ID NO: 7683 - DNA, 259 bp, Oryza sativa
  Clone ID: uC-osflcyp018h01b2
aaaaaaaaaaaaggggtttaaaaaaaaaaaattaaaataaaaaaaaggttaattagggccctattaatgggggggagcaaaaaaccggagggggaaaaaaaaaaaaaattttgggcttttgggggattaaaaaaaaagggtttttaggaggtttttaaaaaaaggggggggggcaaaaaaaggtttaaaaaaaaaaataaaaattctaaaaaaaaaaaatttgggagggaaaaaaaaaaatttggggggagtttttttt

SEQ ID NO: 7684 - DNA, 405 bp, Oryza sativa
  Clone ID: uC-osflcyp018h03b2
ttgttgttagtgcagtaaatgaatccataagatctaaagaatgttttatagtagctcgatcgcagcaagatacaagtccgattcacacagcaacgttaggcttacagctccaactccaagttggaggattaaaatttgaaaaattgaaagaacgaagcattcgccttgggattactctctcttaatggattttacaggttgggtttaggctaataataatattccctcttcatcttggattagtagagtacttaattagcagcgcatctagtagtgctggctttttttccatcgtctagtgcgcgccaaaaaaagttgaagcacaccacatcagagcgcatcacggccgtccgatctttttggcgggaacggaggaatggatcaccacgatctcgggccgtccgc

SEQ ID NO: 7685 - DNA, 361 bp, Oryza sativa
  Clone ID: uC-osflcyp018h07b2
gtgttttttttattttttgggttttttttttaaaatgggatatcttagctgtaagcagcaaatatgatattaatccaccagcgaatagtacttccaacttccacgtacaattattgaagtttaaatatggtacgcttgcaaatggatgctgcaagcaagatatattaggccctaccacaccacagtagaaatgctaagccagctaggtggaatcattttctagaggtatttgtaaatggcctgtgccacgccgctttctgcgttgctcgcgccgatgacgtcggggaccacctttggcaccttacagccggtgcaaagggcgacaccaaggccggcaaggtggagcatctttttatcggtt

SEQ ID NO: 7686 - DNA, 401 bp, Oryza sativa
  Clone ID: uC-osflcyp018h09b2
ttgttttttttagtagggaaatcaataccattatcaattgtagcatgcacatgagagcagctggacaaatcaaagcatgatcgaattaaaaatgaaagggaaacgggcaacattactacagtagtttattactacatgcctcatgcagagagcagtgctgcgaattgatctgccaggctcttcacagtcgtcggagaaactgcagattctccacccaggtaccacttctgaatcatctcggccacattcttgttctccactgtcagcttcgcctcgcccttgccttctgtcacaaatgatatctctgcaattccaggggtggtaggaaagtggaaggtgatgacggagttgggcttgaaatacttggactgaaagaattcggtgaccttctccagagcctc

SEQ ID NO: 7687 - DNA, 420 bp, Oryza sativa
  Clone ID: uC-osflcyp019a01b1
ttttgagcttggcttggcaacgcggagggagggacaatactgacctctgagaaagaagacattgagggaggaataaacacaatgccattggcccgttgaggaagggtgagagccaattaattgttaacaagaattgaccatatagagaggttcaatcttgttaacagcaaattttgacgttcacccttggcagacggttttgcgaattcgagaagagaaggcgcgtgcacacacaaaaaaggaatttcaggtgaaagggcatgagcacaaagatgaagaagggaatcctaagaccattccgctacatctctaacatgatggatggtaaggaggcggcacaagacatgcagattggattccccacggatgtgaaacacgtggcgcacatcggatgggatgggcctagtgtccccaacaacc

SEQ ID NO: 7688 - DNA, 368 bp, Oryza sativa
  Clone ID: uC-osflcyp019a04b1
tttttaaattagctagcaccctagttctctggctggttcctttcaaaaaaatctttggctactggctgattcttaatctgtgtgattagatagggcactccatgacggttcaatcaacgtgcatgcagctagctagataggcctaaaaattagcataaatagtcactaggatgtagataatggtaagaggtggagacagaaccagaattgcagtgctggctagttatccttactgctcttctgaccatgtgagacaatgtctgctgtagccccgttgcactagagttatagatatacatcctaaggggcgcaaggaagatgatgggacgctgcaggctttgagggcggggtctggggatgaggcttgc

SEQ ID NO: 7689 - DNA, 238 bp, Oryza sativa
  Clone ID: uC-osflcyp019a05b1
tcatttacccagatctcatcttacgcaggcagagatggctgtcactagaattggtcttgctggccttgcggtcatggggcagaaccttgccctcaacattggagagaaagggttctcctatctctgtctacaacaggacgacttctaaggctgatgagaccgatcagctgcgccattgttagtaggagacccatctgtgtacgggatgcatggccctgcatcctttgggacctccatt

SEQ ID NO: 7690 - DNA, 334 bp, Oryza sativa
  Clone ID: uC-osflcyp019a06b1
tcttgatctgaaactagaaagtgataaaactggatggtatattgataccagtggggaacaagaggatcagtgctcggacgtgagagctcgtatatgagtggtgacatcagactattgacattatgcagattgcgttgagcatgtcactctgacattagtaaatggacgagctgatgacaaaagatgtttatgccgggctcttaggaagggtattgatacggacctttgattggtgtctgatgagaacgaggaattctggcgtggaacagagccacttcaactgggtcgcttgccgtgccttccagattcagtaactgttgtgggatattctctt

SEQ ID NO: 7691 - DNA, 415 bp, Oryza sativa
  Clone ID: uC-osflcyp019a08b1
tctgttgggttcagccttccgggctcaggtcagtctgatgtgaatggaagtttcatcactattccaaggttgctattttgattaactatagcttgtggcagtatttggccatcttgcctgataaataaccagtcatggcgacaacggcttcaaagataattcctcaaaccctcccagaaatcccaaccaccccagaaccacagcagtatactaagactgctccagacatccccaaatcaaacaattctcgttcttcagtacctaaattgctacaagaatcagaccgcggcaagttgaatcataaattggagccaaaggaacaaaagccaaaccaccacctgaaagagtctgttgatgtttcatcggccaagtgtcccacagaagtgagcgaagaaatggtttcagaaggtattgc

SEQ ID NO: 7692 - DNA, 421 bp, Oryza sativa
  Clone ID: uC-osflcyp019a10b1
tttgaaagaggccaagaaaggccaagaaagaactgataaatggattagaaaaaatggcaggagttcgatccattataggtgtgaagagaatgggtgagcttgatcagaaggccttttataatgcatgcaaaaataaaatgccaaataataagatgaaattggcacttgtttgttcaaaatgggaagatgagataacaaaaccagaatggcatcctttcaaagttatcgagactgctggacagacaaaggaaaatcattcaagcaggatttttgaggaacaaaagagaaggttaaaataccggaaataatcaaggaagatgatgggaagctgcaggctttgagggcgcaatatggggatgaggcttgcaacgttgtcgttaaggcccttggtgaaatgaatgaatacaatcccagtggcatg

SEQ ID NO: 7693 - DNA, 359 bp, Oryza sativa
  unsure (1)..(359): unsure at all n locations
  Clone ID: uC-osflcyp019a12b1
tgttaaggtctattgcactcatattgcacgtgattatgggcttccttggcagaagcaaaggcaacatgcaagcacagggagtgcctttatgattggggatggcaaactattgacaaatgcacattgcgttgagcatgacacccatgtcaaagtaaagagaaggggagatgacaaaaaatatattgccaaggttctagcaaggggtattgagtgtgaccttgcattgctgtctgttgagaatgaggaattctggcgaggaacagagccacttcaactgggtcgcttgccgtgccttcaggattcagtaactgttgtgggatatcctcttggtggagacacnatncctgtaacaaaaggcc

SEQ ID NO: 7694 - DNA, 421 bp, Oryza sativa
  Clone ID: uC-osflcyp019b12b1
ttttcgacgccggccagcggcgctgccttgggggggtcttcttcgagatcgatctcgccgcggacgagtggaagtcgcggccccccgtcgtggaccacggtgatggctcctactccttgcgcctccaggtcgcgccgcgcttcgccgagggggatttccgcctcaccatcatcctcctgttccgcagcttcgagggcctcaagttctcctccctgaggttcaagtaccacgccgagatgcgccggattcccctcctgttcgggccgagcaactccacgcgcttcctcccggcattggagacctgccgcgccgcggacttcgcgcgcgacgtgtggtccggccgctggacgcgcctcgccaagaacgacagctgcgaggaggtggacgacgccggcaggtaccggtgcctggagccgcaaca

SEQ ID NO: 7695 - DNA, 401 bp, Oryza sativa
  Clone ID: uC-osflcyp019c05b1
cggacgcgtgggctcgccgcgcttaaaccctcgccgccttcccgctccgaacgcccctcccttcgccgccgcccccgaccatggcgcacgccctcggctgcggcgccgccaccgcccccgccggggtgggtctcctccaccaccacgagaaggctggggcgttgttcagtgccgcaggctccatcgttcgggttcagcagctcagcgggaaggggagcaaaagccaagctataagatgtgcaatgccaagtgcaagtgagcatggtggaatttcaaccgcaacagctagtagtagtgatcaaaagaaaggtggactgcgtggcaaactgaataaagttgttctagcttacagtggtggtttggatacatcagctattgttccatggctccgggagaacatg

SEQ ID NO: 7696 - DNA, 391 bp, Oryza sativa
  Clone ID: uC-osflcyp019c07b1
tctaaatggatgtttaacaaaggtcaaggaaagacaatgggaagttattacactttgttgaatgctttgattgaggatggacgagtggaggaagcagaagagctgtatggaaaaatattctcacgatatttggagggtttgcctcatacctttttcatgagaatgatatctttatattacagactagaatcatatcagaagatgtttgagatctttgctgatatggaggagctgggtgttagacctgacggttcgattatcagaatgcttggtgaggtattccagaagttagggatgttggacaaatatgtaaaattaaagaagatatatccaccaccaaaatgggactatcgactcatccaaggccaacgccttcagagtaaaagtttac

SEQ ID NO: 7697 - DNA, 387 bp, Oryza sativa
  Clone ID: uC-osflcyp019d02b1
gaagaggaattggacggatgtattcacagtaagggaaaaaaactattgcctaagaggtcagcttcgttcgcaagaaaatattgagacgtcagtttgacaactgtgacacaaagaagtacgtaaaactgtgacatcatgagctcaaaaacctcctttgcagctttggttcctcctaattaatgaagccaaaacatggatgtcactacaaattactgcatcctcaatcaccaagccatcaacctatggaagcaaaacctcacatatcacctgactattcattgcttgtcattgcttttggtatttcaataccaagaaatcaaatttgatgattgaagaccagtctctctcaatgtagcagttaccttatccaccgagcagtggttgtca

SEQ ID NO: 7698 - DNA, 396 bp, Oryza sativa
  Clone ID: uC-osflcyp019d05b1
tgtgaacttcaccgccgtgctcgtcatactgctgggctcagccgtcgtgatgtatgttactgctccgatgcacaatgaacattctcatgggtattcagcagtgcgcaagccatgagccagatgagccattgatcgatccagcttcttcatcggctgtgtctgttgtataattgttttgctgaattattcccatagctgctgcctgctgcaaatgtggttcagatctatgggcatgtgatgtaactttgtaagtaactgacgatattaattacgagatgcgaaaattttgaactgtttgtttactgatgatatagagaggactgatataagatgagattgagacacatgaagttgcgccgtagtagcatttgcattcctgtggctcaaactacctac

SEQ ID NO: 7699 - DNA, 264 bp, Oryza sativa
  Clone ID: uC-osflcyp019d06b1
tacggcatcccagcggggtggttggtgtcgtggaccaatgggatgggttggtacatggggatgccgcggcagttacaggacggacacaaccagctgcgcgcgcgctacggtctgcatcctcactaggcgggataacaagctggcgatgcacgccccgctgagaaccaaagccatgtacgtaccatgccacatccgccactacaccggcaaaaggtaccacgtgagcctctacatgaacaggaactgctggaacaccagggattt

SEQ ID NO: 7700 - DNA, 323 bp, Oryza sativa
  Clone ID: uC-osflcyp019d08b1
tggagcgagctgggagggtatggagagaggagaggtcatccttttgttgattactacttaaattaggaaagctgggttggtggttaatggcgacttgcatggtggtgatttgtaatataagaacacccaagatgatgaattaatgcatccacttgtacatcgatcgatcgatcttggtatttgactaagtgagtgtgactgtgaatgcacatatgcacactgcatagactttacctgaaaaaaaaaaataaaaaaaaaaaaaaaaaaaataaaaaaaaaaaatatctaaaataaaatgtctattcaattaaaaataataattg

SEQ ID NO: 7701 - DNA, 267 bp, Oryza sativa
  Clone ID: uC-osflcyp019e05b1
ttggaaccccgacgccatcacgtttttggtggacgacgtgccgatcaggaggtacgagaggaagagcgagctgacgttcccggaccggccgatgtgggtgtacggctccatctgggacgcgtcggactgggccaccgacgacggccggcaccgcgccgactaccgctaccagccgttcgtcgcgcgcttcgaccgcttcaccgtcgccgggtgcgccccgtcggcccccgccttgtgccgccccgttccgggcttcctgggcggcgg

SEQ ID NO: 7702 - DNA, 415 bp, Oryza sativa
  Clone ID: uC-osflcyp019e06b1
gacacgacgcaccaatggcgctcgtctccgcctcctcctccaccaccgccgtcgcggcgctccccggcgccgccagggcctcctccttcctcggcggcgccggcaggagcggcaggctgctgctgaggcaggccgagtcgtcgtccgcgcgggcgtcgttcgccgtgcgcgccgcggcgcccgacaggccaatctggttccccggcagcaccccgccgccgtggctcgacggcagcctccccggcgacttcggcttcgaccccctgggtctcggatcggacccggagagtttgcggtggaacgtgcaggcggagctggtgcactgccggtgggcgatgctgggcgcggcgggcatcttcatcccggagttcctgaccaagatcggcatcctcaacacgccgtcgaggtacaccgc

SEQ ID NO: 7703 - DNA, 418 bp, Oryza sativa
  Clone ID: uC-osflcyp019f02b1
ttttacagcaaggctgtgaaagggaagagggtctgaaagctgaaatacttgttttacaagagaagctatcttgctcaagagagtcctaccagacttcacaaaatgaaattgtgagcttgactgagaaaaatgagaccttgtgtaaagaataccagtctttgattgagaactacaatgctttggaggatgagaatggaacccttctttcagaatgcatgaggctcgagcacttgtctttgttccttaggggccataacaatgaggtagcaactgcattgggatctcttactgatgagatggctttgttgagtgtaggtaaggatgaacttgattgcgaagtccaagagcttagcagaagaggtatgatgcttgaatcggaaaacaataacctaaggagtttttatttacctgatagaga

SEQ ID NO: 7704 - DNA, 417 bp, Oryza sativa
  Clone ID: uC-osflcyp019f06b1
tttaaaaaaaggaaaaaaaaacaaaacacacgaagccaaataaaagcgacaatgggatcgctcaccaccaacatcgtcctcgccgtcgccgtggtggcagcgctggtcggcggcgggtcgtgcggcccgcccaaggtgccacccggcccgaacatcacgaccaactacaacgccccgtggctccccgccagggccacctggtacggccagccctacggctccggctccaccgacaatggtggcgcgtgcgggatcaagaacgtcaacctgcctccctacaacggcatgatctcctgcggcaacgtcccaatcttcaaggacggcaggggatgcggctcatgctacgaggtgaagtgtgagcagccggcggcgtgctcgaagcagccgggacggtgttcatcacggacatgaactacg

SEQ ID NO: 7705 - DNA, 345 bp, Oryza sativa
  Clone ID: uC-osflcyp019f08b1
cttctcttctctggtggtgtgggtgggtgcctgtttaccctctcctgcctactatccttcaccctcctctgttcccccttctcacaagagagagagcgccagactctccccaggattcagccatgaagggggccaaatgcaagggcgccgacaagcccgacgccaagttggctgcgaagagtaaggacgcggagacgcccgccgccaagggcaggaaggggaaggcctccaaggaccccaacaagcccaagaggaatccctccgctttcttcggttttatggaggagttccgaaaggagtccaaggagaggaaccccaagaataaatcagtcgctgctgcaagaa

SEQ ID NO: 7706 - DNA, 418 bp, Oryza sativa
  Clone ID: uC-osflcyp019f10b1
tgatccacaaattgcaactgttggggcatgctgccttgttggtgctgtgcaacaaaaaacactattcatagccaaccttggaaactctcgggctgttcttggaaaggtcagttgcattgggcagattgttgctgaacagctctctagtgagcacattgccaatgatgcatggaaagcaaagggcctcgtgcaggtgttgagagcgataggtgatgcatacttgaaatacccacagtatagcagggaaccactcaacaaaccaatactaagtgccaatccatctattgtttcacgcgttcttcgaccaagtgaccgcttcatcatatttggctcagctgttctatgggaatatctgtccaatcaggaagctgttgagattgttaaaaaccatcaagcttctggaagtgccaaaatgcta

SEQ ID NO: 7707 - DNA, 392 bp, Oryza sativa
  Clone ID: uC-osflcyp019g06b1
tgtgtgcagtttcacaatgaccaaacacatattttggtggttcatgagagccagctggcgatctatgatgcaaagctagagtgcttgcgctcgtggtccccaagagaagcactccctgctccaatttcaagtgcaatatactcatgtgatggtctcctcatctactccggattttgtgatggtgcaattggagtcttcgaagcagagtctcttaggctgccatgcaggatagcaccttctgcatacataccaccttacatgtctagtggcggaagaggttaccccatgcgtctgctcattcgcttgccttggaggctcaccagttcgggaaaataactagcgatgttgctgatcatgcaaagtcttccaattaggtcacaactaatatcatc

SEQ ID NO: 7708 - DNA, 408 bp, Oryza sativa
  unsure (1)..(408): unsure at all n locations
  Clone ID: uC-osflcyp019g08b1
tattttatttacctaccaattgacttcaagaacaagtgcaatgtaggctatgctttcatcaatatgaccaatcctcagcatatcattccattttatcagacgttcaatggcaagaagtgggaaaagtttaacagtgagaaagcggcatcacttgcttatgctagaatccaagggaaatcagctcttattgctcacttccagaactccagtttgatgaatgaggacaagcgctgccgccccatactattccattcggatggtcctaatgcaggagatcaggaaccattccctatgggtacaaacatccgagccaggtcagggagatcgcgagcttcctctgccgaagaaagccaccaggacatctcaataccctnggttaattgtgacacttttaccaatggagttgat

SEQ ID NO: 7709 - DNA, 227 bp, Oryza sativa
  Clone ID: uC-osflcyp019h03b1
gtttcttaactaccttcggccgacctcgcgggggagaataattggtattccaggcggagcacgctacttctccattttcttgatatcctcgtggttgtatggcctccttctggttcccacccctgcacttgctattgccgcctctgcctgccgtgaacgctgtctctttctctccacggcatgctccgactggccgtctgtttggcctgctgtggctgttacttggc

SEQ ID NO: 7710 - DNA, 439 bp, Oryza sativa
  Clone ID: uC-osflcyp019h04b1
ccccccataattgccgggtccaaccacgcttgtttttaccgatctatataccttgtgttttttaagcacctaggttaacaaatacaccctttcataactcttgtactagtattatgtgatcgaggagccaagaaaatccacagctatatggccagatagcaccagcctcgtaggatacacatatggttcgcttggtattcttatacctttgtaagagatcatctcggatccaagactacatctgtattctaggacttcagcattcaaatgatattgcacacttcggatatcccatggcctgtattatggaagttctagtttacaattgaattctcatgagtcatggtcgtcattcaatcaataggctaaattgcttcatatcaaggagagttacttatttccagcatactcatccatgctattgccaaccacatctgat

SEQ ID NO: 7711 - DNA, 413 bp, Oryza sativa
  Clone ID: uC-osflcyp019h06b1
cgtttttgaccctatggaccaaactgaagataactgcatgccctcagctcaagaacaggaattagcaatcaagaagaaatttggaggactaatgccaaaaaaaccaccactcatctcgaaggatcatgaacgggcctattttgattctgctgactgggctctgggaaagtctggacagcaaggcgctgcgaaacccaaaggacctcttgaggcacttaggccaaagttgcagccaacacgacaacagcagcagcgttccaggcgcttgattaacacctcatcagaaaacgaggatggagacggtgctggtgctgaggatatgaacatcaactgacctgctagggagtgttctgttgggaacctcatgattcaaagcagctcattgttcgtggatcgcagggaaggatatgatg

SEQ ID NO: 7712 - DNA, 370 bp, Oryza sativa
  Clone ID: uC-osflcyp019h12b1
tctctccactcctcctagggtggcggtggcgggagctggcagcggcagcggcacggctcggccgccttgggctccggcctggagctggcagtggcgggggcggcccggcctggagctagcggcggcgggggcggcccggcctggagctagcggcggcgggggcggcgacctcggtcgaagagtgggcggcgacctcgtgtggcggcaccaccgccatctcctcctcaccgccgctgccgacgacgacgaggaggcgacgggccagatccggcggcgacggttctcgtcccgcccggatccggcggcggcgggtctcgtcccgctcgaatccaacggcggcctcgggcgaagagtagcggcgacctcgggc

SEQ ID NO: 7713 - DNA, 507 bp, Oryza sativa
  Clone ID: uC-osflcyp023a03b1
cttaatggcagagaaaaaaaaatcttccctcgaagcgatgcgttgaatcgccttctcaagatgcatatctttgtgaagaccctcaccggcaagaccatcaccctcgaggttgagtcctgggacaccattgacaatgtcaaggccaagatccaggacaaggagggcattcccccggaccagcagcgtctcatctttgctggcaagcagcttgaggatggccgcaccctgggcgactacaacatccaggaggagtccaccctccaccttgtgctcaggctcaggggaggcatgcagatcttcgtcaagaccttgactggcgagaccatgacccttgaggccgagtcgtctgacaccattgacaatgtcaaggccaagatccaggacacggagggcatgcccccggaccagcagcgtctgatattggatggcaagcagcttgaggatggatcgaccctggccgactacaacatacagaaggagtctacccttcaccttgagctcaggctc

SEQ ID NO: 7714 - DNA, 501 bp, Oryza sativa
  Clone ID: uC-osflcyp023a04b1
ttactagccagtaagctagctaactaactacgtggctatggcccccaccgtgatggcctcctcggccacctccgtggctccattccaagggctcaagtccaccgccggcctccccgtcagccgccgctccaccaactcgggcttcggcaacgtcagcaatggcggaaggatcaagtgcatgcaggtgtggccaattgagggcatcaagaagttcgagaccctatcgtacctgccaccactcaccgtggaggatcttttgaagcagatcgagtacctgcttcgatccaagtgggtgccttgtctcgagttcagcaaggttgggttcgtctaccgtgagaaccacaggtctcccggatactactatggcaggtattggaccatgtggaagctgcccatgttcggctgcaccgatgccacccaggtgctcaaggagctcgaggaggccaagaaggcctaccccgatgcctttgtccgtatcatcggcttcgacaacgtcaggca

SEQ ID NO: 7715 - DNA, 468 bp, Oryza sativa
  Clone ID: uC-osflcyp023a07b1
gttcgccccccaagccaaatccacgcatcgacgcggcaggagcgggcggctgctgcgagatcggcggcgccgcagatctcgcgcccaccagcggagatgaagatcacggcgctcctcgtgctgaagccgtcgtcctccggcgggggagcatcctcgtccggcggcggcggcgggtcgggcggccccgaggcggtggtgctggcgaacgcgacggacgtgagccacttcgggttcttccagcggggcgccgcgcgggagttcatcgtcttcgtcgcgcgcaccgtcgcccagcgcacccagccaggccagcgccagtccgtccagcacgaagaatacaaggtccactcacacaacaggaatggtctttgcgcagttgcatttatggatgatcactatcctgtacgaagtgcattttctctttctgataaggtacttgacgaataccagaaggctttcggggactcttgg

SEQ ID NO: 7716 - DNA, 390 bp, Oryza sativa
  Clone ID: uC-osflcyp023a10b1
tcgttcgcgagagcagagcaggggagggggaggggaagggcgccgacgtcctgttgttcactcctgacctgcatcacatctggagatgtctttccgcagcatagttcgtgatttcagggacagtttcgggactctatccaagcggagttttcgaggtgaaaatttcaggcttttcgggccgtcacagagggaaatccattggaccatcaagcgagctggatgacacgcccgtggtagctcagcaaagcaagtgggctggtcttcctcctgaattacttcgcgacgtgatgaaaaggctggaggaagatgatagcaattggctcctcccgcatggatgttgttgcctgcgcttcagatatggccactcgtagagacatgtgcaaagatatt

SEQ ID NO: 7717 - DNA, 323 bp, Oryza sativa
  Clone ID: uC-osflcyp023a11b1
tcggtcaccgtctttgtagcgctcaccttgctcggcgccggcagcgtcgtcgtcgtcgtcgtcgtcgacgcctgcgacggcgtgccgaggatgtcggccgtggaggcgtgcaagcaggcgagcgtgggcccggccatgtcgcggacgtgcgccgagacgctgggaacctcggcggacgagcagggggcgacggacttcatggtggccgccgcgaacgccgcgacggagtcgtacaaggctggcaaggaggccgtcggcaaggtgctctccaacccgctggcgcccgacggggagcgggtgccgtgcctcgtgtgcgcgaacaa

SEQ ID NO: 7718 - DNA, 516 bp, Oryza sativa
  Clone ID: uC-osflcyp023b02b1
ttcagtttgtctcatatttcaagataccacgggatcaagttcttgtgatgtgtgatgatctatacttgccctttgcaaaattgcgtctactgccgaaaggtggacatggcggtcataatggggtgagaagcattatcaaccatttgaagcagaaccgtgatttcccacgtctaagaattggcattggacgaccacctgggaagatggatcctgccaattttgttctccgaccatttaacagaaaagaacaggaagagcttgatttcgctttccataggggcttggaggcagttagaataatggcacttgagggattcaacaagagcgcaacttatgtgaacaccgcacagtcctctgaaatgttgaatagatgataaagtgttcaatctattcttataacataaagattcttatgtcagatctgaatgtttcctatccagtagacacttgcacacatggtggtcattttactctcaagaaattctgagctcccaggacggaagagatatttgagct

SEQ ID NO: 7719 - DNA, 539 bp, Oryza sativa
  Clone ID: uC-osflcyp023b03b1
gttaattcccctacattcctccctcttctttggcgcggtgcctacatcgatccatccctaacaaataacacgatgtcgcgcgccacggtcgccatcctcttctacatcctcacagccgccgccgccatcagcgcggcggcgcaggccccagcggagtcgccatcgaagagcacggcagctgccacccctgcaaaggcacccaccgtcgcatcggcaccgaggaaggccggaccagctgccgcgccgacgaccaccgtggctacctccgcgcctgctggtggcgacgaggtgtccatcccccctacgccgttcgccaccgtggtgtctcccgtcgccgatggacctgccgatgcggctgacgccgatttctccggtgccggtgctctcaagaggtgcgctgccgttgccggtgtcgcggctgccattgccaccgtcaccttctactaagatgccggatgcagagatgtggagtgtcatggtgagctgttagggtggacagcaagaggaaggcgttattgtcgttgggaggggccacatat

SEQ ID NO: 7720 - DNA, 387 bp, Oryza sativa
  Clone ID: uC-osflcyp023b04b1
gttcgctcgaggaggcagctcccccccaaaaaccctagctcaggcttcggcaccgcctctcctcccctcgccttcctccccccaccaggcgcctccaagatgaagctcgtcaggttcttgatgaagctgaacaacgagacggtgacgatcgagctcaagaacggcaccaccgtccatggcaccatcactggtgttgatatcagcatgaacacgcacctgaaaactgtgaaactcacattgaaagggaaaaatcctgttacccttgatcacctcagtgtgaggggaaacaacatgcgctattacattgttcctgacagcttaaacctggagactctgctggttgaggatacaccgagggtcaaggctaagaagccaactgcagggaag

SEQ ID NO: 7721 - DNA, 512 bp, Oryza sativa
  Clone ID: uC-osflcyp023b07b1
tcgtttgaaattctgtggtccaaaatgctgcatgaggcgaagatcgtaaatttaatgatgaaatgtctcataggaactcaagtgcagaacttaaacaagagctacgtgttcatgacacacatagtagggaatttccttcagatgccaaaatatcaagtcagccgaaggatgtggctcctaccctggatgagaaggcacatggatattcccaaaatggaaaagttccaccttcaggcaataatgttgaaaattttagcaatatggagagcagtcaagggcatttagggaagagcagcaatgaggaagattttgtaaaggagccaaaggctgttcgaagaaaagaatccgaatcttcttccaaaagatataatgatgatgataaatctagcatgtatggaaatattgataaaaagggtagcttcaaggaggaaaaaggatctgacaggagtgtgagacatggagctgatacaagggaaccccgtttcagaaggaactttaagcaggatgaatgc

SEQ ID NO: 7722 - DNA, 207 bp, Oryza sativa
  Clone ID: uC-osflcyp023b08b1
tcgttaaccctccccagctccactatatggggggggttcattgacctcaggaggcgtttcacccacgggatggagaagcccaaggtcctcacgcgggaggagcggtagaagctggagctcgagcgccggcagggcggcgcaaccgaccagggacgctccgtcctcgacctgctccagtcgctccctcgacaaggtacgccaccgtcg

SEQ ID NO: 7723 - DNA, 543 bp, Oryza sativa
  unsure (1)..(543): unsure at all n locations
  Clone ID: uC-osflcyp023b10b1
tcgtgcaactccaccgctcccaatctcgatcgaaacgcgagggtttcgcatctccgccgacgcctagaggaagaagggatccgccgccggtagccaagccatgccgaagaacaagggtaagggagggaagaaccgcaagaggggtaagaacgaggccgacgacgacaagcgcgagctggtgttcaaggaggacgggcaggagtacgcccaggtgacgcggatgctcggcaacggccgctgcgaggccatctgcgtcgacggcaccaagcgcctctgccacatccgcggcaagatgcacaagaaggtngtggatcgccgtcggggacatcatcctcgtcggcctccgcgactaccaggacgacaaggccgacgtcatcctcaagtacatgaacgacgaggcccgcctcctcaaggcctacggcgagctccccgacaccctcaggctcaacgagggcgtcgacgtcgacgggcccgaggacggcggcgaccacgacgactacantccagtcgaggacgaggacatcgacaggatctaagctcttt

SEQ ID NO: 7724 - DNA, 519 bp, Oryza sativa
  Clone ID: uC-osflcyp023b11b1
tcgtgacgcgtgcgacagcgcgctcaccgagtacttcgccgtgtaccgcctcatcgacatgtacagcctctacacccccgtctgcaccgaggtctcgtcgtcggcggcgttcggccagcgccaggtcgccgtccacggcgccgccccaaaaatcttctccaaataccatgggtggtacatgaggccggcggggtacgatccgtgcacgtcggatcacgccgaggtgtacttcaaccgggctgacgtgcaggaggcgctgcacgccaacgtgaccaatatcggctacaactggacgcactgcagcgacgtgatcggcaagtggagagatgctcccttctcgactctccccatcatccgtaagctcgtcgccggcggcatcagggtctgggttttcagcggtgacaccgatggaaggatccccgtgacgtcgacgaggctcaccctgaacaagcttgggctgaagacggtgcaggagtggacgccgtggtacgaccatcagcaggttggaggatggacgat

SEQ ID NO: 7725 - DNA, 415 bp, Oryza sativa
  Clone ID: uC-osflcyp023b12b1
tcggtgctgtgtccaccttcggccgccgccatggacaggaatggtgttagccactaaaaaaaactaaataaataaaagggcctccgctgggaacacacaaaggccaaggtggaggtggggaggtgcctgtagagcgattggattcgtatataaagaaaagcatcgttggccttgcccaaatcctgccgcacatgccaaggttcataacaacatagatcctgcaagtcttgagacgctagtgcaggagaagaaagacgagctgatacgtctgctactttagatggatcttcacaatggctcgtgtgaaaaaagtgccgaggagaacaaagccatactgaggctgcttcggcaattccgtgctgagacgcgagataatggtaccttgtccggtgctgatacgaaaaacttggccaat

SEQ ID NO: 7726 - DNA, 325 bp, Oryza sativa
  Clone ID: uC-osflcyp023c01b1
ccttcctccgcggttggtggtggctgcgccgctgcccgcatcatcaccacctcacctcacctcagctcgcgagctccgctctcaccaaccgcagcgcgcgacgaaggggattggattgggttgggttggattggagagagagaatggcggcgccgtcctccctcgcgttcttccacctcttccgcctcgccgacctccgccgagcaggcgtcggtcccgccgccccagagcatccccaacacgttccgcctcgggtgctcccgccgccgcgcccagcgcgtcctcttcatggacggatccggctagctcttcattggaggcaact

SEQ ID NO: 7727 - DNA, 516 bp, Oryza sativa
  Clone ID: uC-osflcyp023c02b1
tactcactcactctcctctactagctcgtcgggatctcttctactcgtccaggcctccaagaatctctctgttcttgctgcttgcttggcggtggtggtagctttcatgatggaggcgatggtggtggtggcgctggtgcttctcatgtcgtccagtctcgtcgcttcagattggtgcgtgtgcaggtcggatcagccacaggcggcgctgcagaagaccatcgactacgcgtgcggcgcgggcgcggactgcaactccatccacgagcaggggcagtgcttcaaccccaacaccgtggtggcgcactgatcctgggccgccaacagctacttccagaggaacagggccatgggcgccacctgcgacttcaccgggaccgtcaccctcaccaccagcgacccaagtgtttctggctgctccttccctgctagtgcaagtggtgctggaacatcaaccactccgaccatgggaggcacaactggaacaatgaccccaggaccttcacacctggactg

SEQ ID NO: 7728 - DNA, 494 bp, Oryza sativa
  Clone ID: uC-osflcyp023c08b1
ttccggacccagatgaaggcgcagcacgagcgggcggacaactgcttcctccgtgccgagaacgacaagatccggtgcgagaacatcgccatccgcgaggccctcaagaacgtcatctgccccacctgcggcggccctcccgtcggcgaggactacttcgacgagcagaagcttcgcatggagaacgcccgcctcaaggaagagctggaccgcgtgtcgaacctgacgtcgaagtatctcggccggccgttcacgcagctgccgccggcgacgccgccgatgacggtgtcgtcgctggacctgtccgtgggcgggatgggcgggccgtcgctggacctggacctcctcagcggtggctcgtcggggatcccgttccagctgccggcgcccgtgtccgacatggagcggcccatgatggccgagatggccacgcgcgccatggacgagctgatccgtctcgcgcaggccggggaccacatctggttcaagagccc

SEQ ID NO: 7729 - DNA, 565 bp, Oryza sativa
  Clone ID: uC-osflcyp023c10b1
catgcaagaagagacgagacgagggagagaaggagaagagggggccggccgcgggcgtcgtcgtgttcctccccccctctctctcctctcctctcctctcgatctccatccttccttccatccattcctccccgcacccttcgcattgctctcgtcgtctcgattcggtcgaggatctccaggaaaagaggaggaagcgatatgggttgcttttcatgctgcggagcggatgatgtcggcaagaagaagaagcgcgacgatccttacgtcccgatccctgatccaggtggtaactatggacgtagcaagcccgggcccccagccccttcgcgttctccccccaccagcagaaatctgccaattgcagtaccggcaattccccttgatgaaataaagggaataaccaagaactcaacagtgatgctctcatcggagaaggcttgtacgccagagtttttttggtgtgctgagagatgcaggagatctgcggtgaagaagctcgatccagcaacagcctgatcaagaattcctgtgcaggtttagccgtttcacgactgagcatgag

SEQ ID NO: 7730 - DNA, 505 bp, Oryza sativa
  Clone ID: uC-osflcyp023d04b1
ttttgtggcccctgatccggccaacttggagaaggggcttggaactattccaatgatgttcaatgttgttatcctgtctccgcatggatactttgcccaatccaatgtgttgggataccctgatactggtggtcaggttgtgtacattttggaccaagtccgcgctttggagaatgagatgcttttgaggatcaagcagcaaggccttgatatcacacctaagatcctcattgtaaccaggctgttgcctgatgctgttggtactacatgcggccagcgtgtggagaaggttattggaactgagcacactgacattcttcgtgttccattcaggagtgagaatggtatcctccgcaagtggatctcccgttttgatgtctggccattcctggaaacatacactgaggatgttgcatacgaaattatgagggaaatgcaagccaaacctgatctgatcattggcaattacagtgatggaaaccttgtcgccactctgctggctcac

SEQ ID NO: 7731 - DNA, 509 bp, Oryza sativa
  Clone ID: uC-osflcyp023d06b1
ttctgacttcaccccaggtggctcatctgcggggtgttgtccagaaatctggcggtttcaccactgaatgtggtccacctggggtctcaaaaagggtgccacagacgagattgaccatgtgtgtgacggcattatgactggtagcgaaaaatatggaccaccacaccttaagtgagcatgggctatctcagacatgagttcgctgcttgagaatcagaggtggtgatacatgaaaggctgatgaattcagccacaggaccaagcttggtcctatagagggtctgaagagctatcccaagcaaactgcagcaaaacttccagtacaaaacatgcacgaggcccagcaactaatggcagttgctggccttactaatgaccagactaacctcaaagccatgggtgtcaaaacagaaatgaacactcatgcgatgagacgcacggattggaccaattggaatggtccgcaaatgctgctgcacttacaattaccagaatcccattggaaatgg

SEQ ID NO: 7732 - DNA, 484 bp, Oryza sativa
  Clone ID: uC-osflcyp023d08b1
gtcgagttcccgtgaatggattagtgctctatactgggaccattgtcaccgatgacggcaaagagaagaaggtcaccttcgactttgagccgttcaggccgattaacgcttcgctgtatctgtgtgacaacaagttccacacagaggcactgaatgagcttctggagtctgatgacaagtttggtttcataatcatggatggcaacggaacactgtatggtacacttagtggcaacagcagggaggttctttacaagttcagcgtcgatctcccgaagaagcacgggcgaggagggcagtctgctgtccgctttgcccgcctgcgcatggagaggcgtcacaactacctgcgcaaggcggctgagcttgctacccagttcttcatcaattcagccaccaaccagccaaacatcgctgggcttattcttgctggctctgccgatttcaagaccgagctgggaaaatctgagatgtttgatccacg

SEQ ID NO: 7733 - DNA, 523 bp, Oryza sativa
  Clone ID: uC-osflcyp023d11b1
tcgtctgactacaccatttttgtcggggattggggtgtagatgatacagactacctactacaagagacattcagggtccattacccttcggttaagggtgcaaaagttgtaactgacataatgacaatgcgttcaaagggttatgggtttgtgaaatttggtgatcctacagagcaagctcgtgcaatgactgaaatgaatggaatgctttgctctttcagaccgatgcgtattggtccagcggtaaataagaaaacaacaggggttcaggagagagtaccaaatgctcaaggagctcagtctgagaatgatcctaacaataccaccatattcgttggtggtcttgaccccaacgtcactgaagatgtcttgaaacaagttttcgccccttatggagaagtcgtccatgttaagattcctgttgggaaaagatgtggttttggtcactatgttaacaggccttatgttgagcaagcactgggagtgctacaagggaccttgattggtggcagaatgttagact

SEQ ID NO: 7734 - DNA, 468 bp, Oryza sativa
  Clone ID: uC-osflcyp023e04b1
tttgagagcctccacaccttcttcttcctctgggacgaggtcagcatccccaccgattaccgccacatggacggcttcggcgtcaacacctacaccttcgtcacccgcgacgccaaggccaggtacgtcaagttccactggaagcccacctgcggcgtcagctgcttgatggacgacgaggccacgctcgtcggcggcaagaaccacagccacgccacccaggacctctacgactccatcgccgccggcaacttccccgagtggaagctgttcgtccaggtgatcgacccggaggaggaggagaggttcgacttcgacccgctggatgacaccaagacatggccggaggacgaggtgccgctccggcccgtggggcgcctcgttctcaaccgcaacgtcgacaacttcttcaacgagaacgagcagctggcgttcgggccggggctggtggtgccggggatctactac

SEQ ID NO: 7735 - DNA, 507 bp, Oryza sativa
  unsure (1)..(507): unsure at all n locations
  Clone ID: uC-osflcyp023e11b1
gttcagccatcagacctgcagaggcaatccagccatggcatctatcgttcctgtactcctgcgcctgctgctcctgctgctcccgcttcccctgatccgagaccacctctggccgagccaccgccggccaacgccgcaggacgatgcgggtgagctccacccgatcttcctggtgcccggggcgagctgcagcgacctggaggcgcggctcaccgaggcgtaccggccgtcgacggcgcactgcggcgcgatgaaggggaagggatggtttgggctgtgggagaacaacacggagctgctggtccacgactacgcggactgctcactggagcagatgaccctggtctacgaccccgccgccaacgagtaccggaacctgcccggcgtcgagacccgggtgcccaacttcggctccgcatggtcgttcggctacaagaaccctgttaaccgtctacagagagcacaatgcctnggaaagctcacagactggctggaagaattgggata

SEQ ID NO: 7736 - DNA, 502 bp, Oryza sativa
  Clone ID: uC-osflcyp023f03b1
cacggtaaaaaacgatgtgtacagcttcggtgtcgttctctttgaactcatcagcaggaagaaacctgtatatcattgtcatgacaagaatcgtcgactcatccctgaattcatcagagcttacgagacagccaagagtgggaaggcaatgtttgatgaagggatcatggctgaagaagatatcgctgtccttgaagagattgggaggctggcaatggagtgcgtcagcttggaaatcgatggaaggccgacgatgaaggaagtggctgaacgccttaagatgatcaggagaatgaaggagagctcagccatgggagcagcgagatgctaactgaagcagaagctatagaaggctgttggcatcgctgaaaccgaagatgaagccaactgatgggccacaactgattgttccctttcagtctttcacctgagagatcgtttacagagtatcatcagaaacatagtgtgtactggttggctgttaactgtgttatataacata

SEQ ID NO: 7737 - DNA, 529 bp, Oryza sativa
  Clone ID: uC-osflcyp023f04b1
gtactactgcacggtcatcgatgcccctggtcaccgtgacttcatcaagaacatgatcacgggtacctcccaggctgactgtgccgtgctcatcattgactccaccactggtggttttgaggctggtatctccaaggatggccagacccgtgagcacgctcttcttgctttcactcttggtgcgaagcagatgatctgctgctgcaacaagatggatgccaccactcccaagtactccaaggcccgttacgatgaaatcgtgaaggaagtctcatcctacctgaagaaggtcggctacaaccctgacaagattcccttcgttcccatctctgggtttgagggtgacaacatgattgagaggtccaccaaccttgactggtacaagggccccaccttgcttgaggctcttgaccagatcaacgagcccaagaggccatcagacaagcccctgcgtcttccccttcaggacgtgtacaagatcggtggtattggcaccgtgcctgtgggtcgtgctgagactggagtcctc

SEQ ID NO: 7738 - DNA, 511 bp, Oryza sativa
  Clone ID: uC-osflcyp023f06b1
ttgtaatcaatctcttccagtcattaggaaacacatttgccaacactatctgggaagatatgttaccttcatcaagcagtgttgatcatggtgataattcaagggctgatggactagaaaacacatcacataacttaattttcagcaagcctaaacactcggatcatattgctgtgaaggagaaatttattcatgcaaagtatgccgagcgagattatgtgcgaaagcttaatatggatgatagcctggtagctcaacagatgtgggaaaatgttagttcaaacaacaagaagggggtttacagtctgattgtggggtcaaatgccgatgtaaatttaacttatgggcagacatcatttaattcggccctaacccttggaaaagctctacttttacaagagcagccaacttcaccatcagatggaagttccagatgttctgatcgtagttcacttgaaaggatttctcccagggactctctttctcttgccagcacaagtgcacgtataga

SEQ ID NO: 7739 - DNA, 479 bp, Oryza sativa
  unsure (1)..(479): unsure at all n locations
  Clone ID: uC-osflcyp023f07b1
ttgaggttcaagtatctgcagtaaaaaacgaaatggcatgaagcagatgcagcaaagatgctgttcggcattcaaaaaacacaggtaataagaaggcccatcagcaaagaaacggaacggtacctgtgattaaatcctcagtagactagctcatttagtggtagattgttggtgtagcggctccatctgtgaagagttgttcttttcaaatgaaaaaactggttctcggaatgatcttggattggacaatctgattacagggtcattttggtccgttaactcttgagacattgctactaacaacttttttactccatctctgatgatggaaattacctgtacatatcccggctgcaaagtcctttctgccccccttgttataaatgacatgatgaacattttcaatatagcttttgatcatttcgaaacctacnaatctatcttccctctacatcactctattcattcattatactttc

SEQ ID NO: 7740 - DNA, 524 bp, Oryza sativa
  unsure (1)..(524): unsure at all n locations
  Clone ID: uC-osflcyp023g04b1
ctctctctctctcactcttctccctcttctcaccaccagacgccatcaaacccctacctcccgcggcggcggcggcggcggcggccggcggcgagctccggacagacagaggagggcgcgagcggagagggcgaggagggaaggagggagggaggcgacaggcatggggaccctcgggcgcgcgatctacacggtggngacagtggatccgcggcacggggcaggccatggaccgcctcggatccaccatccagggcggcctccgcgtcgaggagcagctttcaaggcatcgcacgatcatgaacatatttgagaaagagcccagagtccacacggatgtttttgttgctcccagcgcagctgcgattggcgaagttgagatcggacatggatcctcactctggtacggctcattttgagaggcgaagcaacagcaatcaatatggacctggatacatatacaagacaatccccttgcacatgttgcaaaagccaacactcagaggaagggttctccaaccata

SEQ ID NO: 7741 - DNA, 478 bp, Oryza sativa
  Clone ID: uC-osflcyp023g06b1
ttttactagaagaaggccagacttctgatgggagggccagggagagggtgcagtctgttgtccttgacatgtcaaatgtggtaaacattgacacattagggatttcggccttggaagagatacacatggagctggcatttcttagtatacagatggccattgccggcccaggatggggagcgatccataagatgaaattggcaggtgtggctgaccaggtaggaggagactggatatttttgacagtaggtgaagcggttgaagcctgtgtaactatgcaaaagggcactgctctggaatgctgaggtgtgtgtgttagtagtacttagtaggattaacaccatattaagacataagtgatgctgcttagtgctttgcatccagccattcaatattccagagtgaacaatgtctatagaagttagaaaaatgctctgcaggcagtaagcatcgaagacatgttactgcgataacaact

SEQ ID NO: 7742 - DNA, 479 bp, Oryza sativa
  Clone ID: uC-osflcyp023g07b1
ttcggcggggggctcaaccggtcgtcgtcgggggggcagctgccgccgcaggagcttctcgacgatctctgcagccgcttcgtgctcaacgtgcccaaggaggatttggagtcgttcgagcggatcctgttcttgctggagcaggcgcactggttctacgaggacaactccgtcgagcacaacccctccctcaagtcgctctccttcaaggacttcactacgctcatgttcaatagctgtgctgcgctcaggccataccgcgcgcaccttgatgacatttacaaggatttcactcactataagttccgtgtccctgtctgcggcgccatcatcctcgatgacacctacgagaagtgcttgcttgtgaagggatggaagtctagcgccagctggagttctcctcgtggaaagaggagtaaagatgaagaagatcatacatgtgctgttagagaagttctagaggaaactgggtgtgatgt

SEQ ID NO: 7743 - DNA, 520 bp, Oryza sativa
  unsure (1)..(520): unsure at all n locations
  Clone ID: uC-osflcyp023g09b1
gtgacgcggacggcgacacctgggacgagtgcataagtaaatgtacggaaatatgctacaaagatcctgttttggaagatcaccagtggagtgcatatatcgatcggtctccaggacaggatagctactccttggagtgcttcaatgcttgtgtttctggatgtggatataggtttgacataccagcggagaaagtggagcaaatcaaaccaaacaggccatccaagccaccaccaccaccacctcctgcagtagagcgggccacgaattcagaacctgctgtgaagggtgaagacgtgccttgcacatcagcataatagtaatctatgcagccccaaattttgtgtaacttttggtgcttctttccctcatactgcctccttttttttctcttttctgggctggttctttgcaccatgtgcttgaaattcgcagtccaccttaggctgggctagatgctaacaagatcttaacgataaatcccaaaatcttatttatattttcatatgctggntcatcc

SEQ ID NO: 7744 - DNA, 499 bp, Oryza sativa
  Clone ID: uC-osflcyp023h05b1
gatagtgtttgtgtacaggcttgttgctgctgattgggcataggtgaagttgcatgaaactgcgttcaagaaagaagttataccaaagctatggtttgaatggagtgagctctgcactactgaagacttcaaactgaatcaagttgatattgatgactctgaagatgaactattggaggctaatgctattcgccaggatatcaaggctttgtatagaaggtaacaagctgtatgtggctgctgtataccatgtacataatgcaatgctgatctttctggatgatcattgctgtgaaggtgtggcagtagccccttctagtgccggcgttcccttcatgctaggatttttcgttaacctccgtcatttccctacctgttttgaaccactgtccgatttgaacatgtgccagcttggtgcacggttagcgtgctgatcctagtctcatttcttactgaaaatctccaggattaataactatggtttctgccgttcctgctt

SEQ ID NO: 7745 - DNA, 471 bp, Oryza sativa
  unsure (1)..(471): unsure at all n locations
  Clone ID: uC-osflcyp023h08b1
gttcccaaccagcagctgcggcggcgcgagcgcaccaagaggaggcggagcagccggagccacctccgccgccgccgccaccatgggtatctcgcgtgactccatgcacaagcgccgggccaccggtgggaagcagaaagcgtggaggaagaagcgaaagtatgagcttggtcgccagccggcaaacaccaagttgtcgagcaacaagacagtgaggagggtccgtgttcgtggaggaaatctgaagtggagggctcttcgcctggatactggtaactattcttgcggaagtgaggctgtcactcgcaagacccgtatccttgatgtggtctacaatgcgtcaaacaatgagcttgtgaggacccagacccttgtgaagagtgccattgtgcaagttgatgctgccccattcaagcagtggtatctcactcactatnggngtcgatatcggtaggaagaagaaagctcctg

SEQ ID NO: 7746 - DNA, 460 bp, Oryza sativa
  Clone ID: uC-osflcyp034a06b1
ttatgattgatcagggtgagaaagatgacaagagcatacatgtttgtgctgatgaccctgaataccggcacttcagggacatcaaggaaatcccccctcaccgacttcaagagatccgtcgcttctttgaagactacaagaagaatgagaacaaagaaggtgctgtcaatgagtttctcccagcagaagatgccatcaacgcaatcaagtactcaatggacctctacggcgcctacatcattgagagcttgaggaagtgatctccagctgatcaactgtagaggctacatgattcactgaacagttgctcatgaatagtacgacatatgtgaacatacatggtctaaaaccagtacttcggggatatataccttctactattcatgttaagacaagaagcagcaccttttctttccatgtatgccatgtcagatacttgggtcccaagcacctgacccct

SEQ ID NO: 7747 - DNA, 530 bp, Oryza sativa
  Clone ID: uC-osflcyp034a08b1
tgagaaggtaggctccagccatggcttcccagctctccgccgccacatccgtgccgcagttccatggcctccggacctactcctctcctaggtccatggtgacgctgccatcgttgaggatgagcaagaagaggtcccagggcatccggtgcgactacatcggctcagccaccaacgttatcatggtgacgacgacgacgctgatgctgttcgcggggaggttcgggctggcgccgtcggcgaacaggaagtcgacggcggggctgaagctggaggcgcgcgactccggcctgcagaccggcgaccccgccgggttcacgctcgccgacacgctggcctgcggcgccgtcggccacatcatgggcgtcggcgtcgtcctcggcctcaagaacatcggcgtcctggaccagatcatcggctaatcaaattcattaagctagtcacacgaatcaatactcctatgtgtaatcgatgcatgagtgcctgtgtgatggacgatgtaatgatcatgtaaattgtgcgtgggatca

SEQ ID NO: 7748 - DNA, 573 bp, Oryza sativa
  Clone ID: uC-osflcyp034a09b1
ttcgagctcgctccgtgccctggtcgcccccatcctcccctccgtctcctcctcgccctctgctcgcccagggctccgcggagtggcggcaccggtacagcacgcgcgggcgcggcggcggaggggggcggcggtcgtggcgcgggcggcggcgctgccgtcggacgccgagtggctggagcggctgccggagaagaagaagccgctgtacacgcacagcctgccgtgcatcgaggcgtggctgcgcagcatcgggttctcccagacccgcgaggaccgcgccgactgggtcgccgagatgcccctctggcacgcccgcctcagactcgacgtcactgacctccacatcaggtacttgaagagcggccctgggaatcttgacacggacgtagagaggagattcagctatgcccttagcagagaagacatcgagaacgcaatacttggaggaccttaatctcatcaggccatcagaggctcaagaataggagttcttgcaggatcttagaatttgggcagcgcagtaggtgcatgctctttcatgagagactaagaaaagctttgccctgctgc

SEQ ID NO: 7749 - DNA, 529 bp, Oryza sativa
  unsure (1)..(529): unsure at all n locations
  Clone ID: uC-osflcyp034a11b1
tactgttgagatggataaagtaactaaagagctacataagttctctggtgacagtaagaaacttcctgaattactgactgagctagatgggctccgaaaagagcatcagagtctaagatctgcttttgaatatgagaaaaacacaaacatcaagcaagttgagcagatgcggacgatggagatgaatttaatgactatgaccaaagaggctgacaagttgcgtgctgatgtggcaaatgctgaaaaacgagctcaagtggcagcggctcaagcagtagcagcacaggcgggggtggcacatgtgactgcttcacaaccaggggcagcacaagctgtggcagtgccagctgcctcaaacccatattcaagtgcatttaccggtcatccctctgcatatcaccaaggagccacccaagctgnggtttatcagcaagggaccacccaagctggggcatatcagcaaggatctacccaagctggggcatatgcttacccaactatgatgccgtactgttaccagatgcatgct

SEQ ID NO: 7750 - DNA, 541 bp, Oryza sativa
  Clone ID: uC-osflcyp034b01b1
gtgtgtgcaactaggaggcttgttccatactagtttgctaggtcatggaaaagagcgagattttcgtaggagcacactcatatgcagctatatgtgcttttacactcatcataggatggttagctcactgggtatacagatggataaatcctccatgcaatgggaggcttcctccgggctcaatgggcttccctattgttggtgagaccttccaatttttcagaacaagtccatcaatagacatgccaatttactacaagcgaagactggagaggtatggacctatattcaaaactaacataggaggccagcacgtggtcatatcccttgatcccgaggtgaaccagttcatatttcaacaagaggggaagttgttccaatcctggtttccagaaaccacactaaacatctttggaaagaagacactcaccacgtataatagaactgctcacaagttgatccggagcttcgtatgcaagctctatggccctgaaaacgtgaaaaaatcactcctgccagaactagagaactccatgaggga

SEQ ID NO: 7751 - DNA, 542 bp, Oryza sativa
  Clone ID: uC-osflcyp034b02b1
ttaacaacgaattattctagctgctgctgcagcagcagctaattcaactgctggggaatcgtcacctgttgctggtcctcaagaaaatgagaaagttgacaagatttacgagcctcttggaatcaacatccaacagcttccaagagacaattcagccacctccacaggacccgatgagttccatgtcgacacggtggaaggcgtcaccaacgtcgaggagcgccaattcctcattggcatgtctccagcacgcgaaggccaagaagccaatggcgacctgaacaaccttgcggagctagagaattcacctgaagacatttgcttctccctgcatctgggcgagagggagcccaagcgactccgctccgattcgtcgctggacatagacttgcagaaatgaaatgaagctgtgtgctgctgttccatcaccacccagctctgtataacctagtgaaggcagttccattctatgaacccaatagaaataaatatgggctaggtatttgtttcccgaaactatctagataggtatccggataatt

SEQ ID NO: 7752 - DNA, 502 bp, Oryza sativa
  Clone ID: uC-osflcyp034b04b1
tagatacaaacccctctcactcccactaccatggatccttgcaagttccggccgtcgagctcgttcgacacgaagacgacgacgacgaacgcgggagctccggtgtggaacgacaacgaggcgctgacagtggggcccagggggccgatcctcctcgaggactaccacctgatcgagaaggtggcgcacttcgcccgggagcgcatcccggagcgcgtggtccacgcccgcggcgcctccgccaagggcttcttcgagtgcacccacgacgtcaccgacatcacctgcgccgacttcctccggtccccgggcgcccagacccccgtcatcgtccgcttctccaccgtcatccacgagcgcggcagcccggagacgatccgcgacccgcgcgggttcgccgtcaagttctacacccgcgagggcaactgggaccttctcggcaacaacttccccgtcttcttcatccgcgacggcatcaagttccccgacgttatccacgcct

SEQ ID NO: 7753 - DNA, 501 bp, Oryza sativa
  unsure (1)..(501): unsure at all n locations
  Clone ID: uC-osflcyp034b05b1
ggaaatccatgacttgcaatgtggtgggtcttttttctgaaagcttatcgtatttgttgtggaaattctgaaaactcttcatgtgaaattcctcacttggatggggtatgagatcaagtgtccctggcatgtaggtccaagccaagtatgcagaagaggtcactgtcggatggggtgaggagtggggaatgtttaatttatgngttttatctttctttttcggnggttgtttgtcgtctcctatggcctgctcttgtttggctttgtttcctctgccacaaatgctgtatactgtaaaaacatttccatccttttctctgtgaacttgaatatggcctaccggtccacggtagggatacacaactctcttttatttccacatgtgccttccccggagtgatgggaaccctgagtcctttgcggaagagcatgatcgcaaggccagggctggaattgattatgattctttccatgggaaggcacaccccatgacaccattct

SEQ ID NO: 7754 - DNA, 442 bp, Oryza sativa
  Clone ID: uC-osflcyp034b11b1
tggttcgccgcgatctccagcgaggcggcgacccaccggcgaccactcgccggcaccccccgcccacctccggcgagcaggtaggacggagcagcttcccctcgccgcccgcttcgctcgccttctctcctcctccgcctccgccgccgcggagccctggccacgccgcatccgctcgtcttgcccaccaagccacttcgccggagccgcatcccttccccagccgggagaaccgctggtggctcccgctcccgctgctctccatcggcatatctacttgtggaagctcacgcggaggcggaggtccagctctgtggcagtttttgatgggatcctgccccgcgcggcgagggtagacaggatctgtgccgctccaagattagtctcccggtctccagacctgaaccaagttgctgccatggcgtcgtcagctaaggaggag

SEQ ID NO: 7755 - DNA, 84 bp, Oryza sativa
  Clone ID: uC-osflcyp034c04b1
accttggttttcataccaaagctggactccaccggacggtgatgttagaagagagagacgctaccctccccgacgacggtgagc

SEQ ID NO: 7756 - DNA, 230 bp, Oryza sativa
  Clone ID: uC-osflcyp034c05b1
ttcgttagaaaaagaaagaaattaaaaagaaaatcacggcgcgtgagcttgcagagacagcaatggtgagagttgctgccgccgcggcggtgctcgtgctggcggcggcggcggcggcggcggcggccatggccgtcgagccgcccaccgatgacggcgcggtccgggtggcggcggggctgacgaagtgcgtgtccgggtgcggtagcaaggtgacctcctgcttgctc

SEQ ID NO: 7757 - DNA, 462 bp, Oryza sativa
  Clone ID: uC-osflcyp034c07b1
tttcagaatctaattctctattttgctagtgtcgaccaccaccaccgtagcaatggccgcctacggctcgatcaacaaggaggacccggtcaactggggcgtggtggtggtcgagatggccggcaggcacatccacgaggtgaagctcatggtggaacaactccgcaagccggtgatcaagatccagggcgccaccctccgagtggggcaggtgggcgccgtcatccaggccaaggacgccgtcggcgtagtggccgagctcgaccaggaggtccgcccccgggtgaaggtcagcagcgagtggatcctcaactgcatcatccacggcggggacatgtacggcgtcaccaccggcttgggcgggacctcataccggcgcaccaaggacggccccgccctgcaagtggagctcctcaggcatgtcaacgccggaatcttcggcactggatgcgatggacacac

SEQ ID NO: 7758 - DNA, 531 bp, Oryza sativa
  Clone ID: uC-osflcyp034c08b1
tacctcaccaccatcacctcctcctcctcctcctcttcctccgcgcgcgcgagatccagggagagggagagggagagatcatggcggggacggtgacggtgccgtcggcgtcggtgccgtcgacgccgctgctcaaggacgagctggacatcgtgatcccgacgatccgcaacctggacttcctggagatgtggcggcccttcttccagccctaccacctcatcatcgtgcaggacggcgacccgaccaagaccatccgcgtccccgagggcttcgactacgagctctacaaccgcaacgacatcaaccggatcctcggccccaaggcctcctgcatctccttcaaggactccgcatgccgctgcttcggctacatggtctccaagaagaagtacgtcttcaccatcgacgacgactgcttcgttgccaaggacccatctggcaaggacatcaatgctcttgagcagcacatcaagaaccttctcagcccgtccaccccgttcttcttcaacaccttgtatgatccctacc

SEQ ID NO: 7759 - DNA, 465 bp, Oryza sativa
  Clone ID: uC-osflcyp034c09b1
attcgatagtgacaagaggaaaagcgcggctctctccgtctccggcggcggtgacgcgaggaggaggaggaggaggagcccgcgccgccgggccaagccatcatggacgaggagcagctgcgcgcgctgctccgcgacctggaggcgctcaagcagcgccccgaccccgccgccatcgatcggatgcgagagcgcgtggcgggaatggtgaccccggccgccgctgcacggtccaagatcaaggatatgagctcggaggtggtggacagcaatccctacagcaggctcatggcgctgcagcgtatggggaatcgtggacaactacgagcgcatccgtgattactccatcgccatcgttggtataggtggcgttggtagtgttgctgctgagatgctcactagatgtggcattggtcgccttttgttgtatgactatgatacaagtgaactggccaacatgaatag

SEQ ID NO: 7760 - DNA, 387 bp, Oryza sativa
  Clone ID: uC-osflcyp034d02b1
aaggacgcccgcaggacctggccggaatttccggcctgcccacgcacccttgcttttcgtcgccatattcccgtggctggggggtgtcacttactgagtggcccgagctcgacggtcgactgatcatcgcgtggcctacgtgcgatctccgtttccaccccgcgcaacaaaactcggctccgacgtccgtgcccgacctaagagattgctgagcagtcgctcccgcgcgtcgacggtcttccccacagttgccgtggccaccaccgacgatccctatcacatgccaatccgctctctggaaggccttcgatgggcctcaccgtgcccttttactgtttctctagacgccgtcgacgacgaggggaacaaggtcgactggtatatact

SEQ ID NO: 7761 - DNA, 473 bp, Oryza sativa
  Clone ID: uC-osflcyp034d03b1
ttcatcccttcaccacagcgggcgccggcgagcggcgaggctgggccggcgagcggcgaggccgggccggatctcgccgccgcccaccgcttgacctccctccgtggcgctgcctccagccaaatctctaaaagctcgggaagaaattaacaaaagcagcaatggacgtcgatttttggggagtggtaattgagccgtgcaataagaaggagatcttttgtcctgaggataccctgtatcatctaacatcggtagcccttgatgaggcttacgggctaaaagactccaatgtgaaagtatttgtcgaagttaatgatgagaagtttgcgattgggacggtttcctccaaaaggcacacgcatatcaaggttgacttctgtgtcaagaagaacttttaactattccacacctcactaatcagcaaagttgccttttgtggctatcaagtaaagaatttgggaaaattcactgat

SEQ ID NO: 7762 - DNA, 518 bp, Oryza sativa
  Clone ID: uC-osflcyp034d05b1
tgaatacttacagaggagaatagagaagtgatgccttgtactagaattgtcaaacaataatagccggcaacgatttaagtgtaaacttcttaatagtcatggcatttcagctacagtagggaatatttagacacaggcattggctatttaattatcttttggccttgatttggcatattgatgagaattctttattttgttttatggtggcactcttgaatcattatgtatagatattgagcttgcatatacagggactaggaggattctacattatagggaaccatctttgccaggtgttcaacaagtttagtgataggaccctatatggcttacatatattcaaagacattatagtgaaccatctttggatagggcttcgcgtgaagtttgtgtcatatggtgtactgatgcacaagagtgtcttgcatttgcaattctataccataatcgtgctccacgacatagccgttcattctgattactttcaatggataatgtacgaagccctacaatgc

SEQ ID NO: 7763 - DNA, 520 bp, Oryza sativa
  Clone ID: uC-osflcyp034d07b1
ttttaagcagcaggcgggggcggcagagcacggcgacctagcccgacctcgcaaccatggcaaggggtttgaagaagcatttgaagaggctcaatgcgcccaagcattgcatgctcgacaagcttggtggagcttttgtccccaagccatcttctggtcctcacaggttcagggagtgcctgcctctgatcctcattatcaggaacaggctcaagtatgctctgacataccgagaggttatttctatcctcatgcagcgccatgtattggttgatggcaaggtcaggactgacacgacctacccagatggttcagtggatgtcatttgcatccacaagactggtgagaactacaggcttctgtacgacacgcagggacgtattcggctcagtctgtaaggatgaggatgctaagttcaagctttgcaaggttcggactgtgcagttaagctcagagggaattccctacctgaacacctatgatggtcggaccatcacgttaccctgacccgatcatcaag

SEQ ID NO: 7764 - DNA, 522 bp, Oryza sativa
  unsure (1)..(522): unsure at all n locations
  Clone ID: uC-osflcyp034d10b1
gaatcaaccagcaaactaaaaaagcgaagggaaaaaaggagagaaaaaaaaaaaccaactccctcctccccgttctccagatccgcaccgccaccgccgccgccgcgcgatcctccgccgcgcctaccggtcggggattggtggaggaggcgcgccgggtgggctgtggagtagggggagggaggaggaggannggtgtgaagcgggcgacgagatggntgngccgncggagagggctcgggcggactacgactacctcatcaagctcctcctcatcggggacagcggtgttggcaagagttgccttctcctgcggctttctgatggttccttcactacaagctttattaccacaattggtattgacttcaaaattagaacaatagagctggacgggaagcgtattaagctacaaatttgggacacagtatgccaaggacgtttgcggacaattaccactgcgttctaccgtggagccatggtttttctgcttgttatgatgtcaccgacgagtcaattttt

SEQ ID NO: 7765 - DNA, 320 bp, Oryza sativa
  Clone ID: uC-osflcyp034d11b1
tttctttcgcactttcacagctttatcgacgacggaatcccttctcaccttcgctattcttttccaagcaccttatgccatagccaactacgtctaggattagtccattgcacagtcgatgcacgcgctctaccctgtaggacaaagatggacacggccctatcaccagctaggcggtaggaaccgtgaggcgaattttcccgctcagcccactttatgcaagaaatgtacgacattatcagggctggcatctcctaacagcagccggatcgaaagagtgaattgcgtttccgcttctgaggggccgccagctgttggac

SEQ ID NO: 7766 - DNA, 559 bp, Oryza sativa
  Clone ID: uC-osflcyp034e01b1
tgccttgccgccgccgccgccgccgccaccgccaagagggggggaagcaacccgcagccgccgcgcggcgagatgaacaccgacatcaccgcgtcggtgaagccggagtacccggtggtggaccggaacccgcccttcaccaaggtcgtcggcaacttctccgcgctcgactacctccgcctctccaccatctccgccgtctccgtcaccgtcggctacctctccgggatcaagccggggatccgcgggccatcgatggtgacgggagggctcatcggggtcatgggagggttcatgtacgcctaccagaactccgccggccgcctcatgggcttcttccccaacgactccgaggtcgcccgctacaagtacaagctgtagtgagaaactttatcgattcgctgcggtctctctctctctctctctgctgctggaagcgtttacatcttttttttctttttcctgatgatctcgttttagcgtcacttggtgatgtgcgagatgtgtggccttggctgaataaatgttgtccgttgcacgcttgtgaggaatcgtgctc

SEQ ID NO: 7767 - DNA, 527 bp, Oryza sativa
  Clone ID: uC-osflcyp034e03b1
ttaggctgtgtgatagtgtgctggtcaagtcggacgcatactaaatgtttgtgatcttttgatgattaatttaccttgttttataggtgtagaaattggtggaagcatagttggtttgtttctgctctcatttcaggtctacttgtcccgtactgtttgctgccggcgtggacgctgctgagtccccacacatcagccacgactagaatcctggaatagccgctaccatatatatggcgtttgcttcctagaatccttttgctttacataaaactgcaatccagactatgaacaaacacttatggttcaaatcctataacctttaattattattactctaaatgtctactgctttgatatgatccttatcttcagcttaaacatatgccatgaaaaaaaaatgcatgaggtaactctcagccaactatggtttgctatcctctagatggaaaggtatagctggggtacatatttgtagctaatctgggatgagctacattttttttccagcctgattcatgtctagc

SEQ ID NO: 7768 - DNA, 514 bp, Oryza sativa
  Clone ID: uC-osflcyp034e06b1
ttccttctaaaatcccaacaattttttgatccttcgccgccggcaagcgccgcggagggttccccccagggagtggagaggagaggagcgggcgggttggtgttgggaagggagggattgttttttttgatttacttcctgtggttctactattctgtgctactcctatcttgatttggatattaattattcttttctatagtttttttttttatgttttcttcgcccgctactagttttcttatttttctttatggacttctttttgttgtactctttacctcttctaattctatctggttcatctgtattctattcattgtctatttgtttgacatttatttattttctctttattgtataatttcatttttgttgaactggtatgccctttttctttattataggacctcttcattaagttttattttgattggctctgtttttttttcccccctcattgtatttatttgattgttttggctcacttttgttcctgtttttctttttaatt

SEQ ID NO: 7769 - DNA, 548 bp, Oryza sativa
  unsure (1)..(548): unsure at all n locations
  Clone ID: uC-osflcyp034e11b1
atcgcttcccccctccacccgtctcctccgtctccggcgccggcgccggcgagctcgccccccgcgattcgtgccctccgatcagaggcgaggcgggagaagagatggggctcacgttcaccaagctgttcagccggctcttcgccaagaaggagatgcggatcctgatggtgggtcttgacgcggccggaaagaccacaatcctctacaagctcaagctcggcgagatcgtcaccaccatccccaccatcggattcaatgttgaaaccgtggagtacaagaacatcagcttcaccgtctgggatgtggggggtcaggacaagatcaggcctctgtggaggcattatttccagaacacccagggtctcatctttgttgtggacagcaatgatagggaccgtgttgtcgaagccagggatgagctccacaggatgctgaacgaggatgagctacgtgatgctgngctgcttgtctttgctaacaagcaagatctgccaaacgctatgaatgctgctgagatcactgataagcttggactgcactccctt

SEQ ID NO: 7770 - DNA, 548 bp, Oryza sativa
  unsure (1)..(548): unsure at all n locations
  Clone ID: uC-osflcyp034e12b1
gcgacagcttcgcctcgtctctcccccccgagtccccaacccctcctcctcctcctcttccccttccccgcgccgcggcgagatcgctccccccgggggcagcagctagatcccgatggcttcgcgccgccgcaccctcctcaaggtcatcatcctcggcgacagcggggttgggaagacgtccctgatgaaccagtatccttcgattcggataggggatggcggatgatatagcccgcgtcgtttcacgaacacgggcgggttttttttttcttcttcgatttatttgggggnttttgttttcttgagctgtgatttaattcagatatgtgaacaagaagttcagcaaccagtacaaggctacgattggcgcggatttcctcaccaaggaggttcagttcgaggataggctcttcactttgcaaatatgggatactgctggccaggaaaggtttcagagtcttggtgttgcattctaccgtggagcagattgctgtgttctagtttatgatgtcaattctatgaagtcatttgataatcttaacaac

SEQ ID NO: 7771 - DNA, 520 bp, Oryza sativa
  unsure (1)..(520): unsure at all n locations
  Clone ID: uC-osflcyp034f02b1
ttggaattcaaagctgttctctttgttcccaagagggcaccattcgacctctttgatacgaggaagaagctcaacaacatcaagctctacgtccgccgagtcttcatcatggacaactgtgaggagctgatccctgagtggctgagctttgtcaagggcattgttgactccgaggatcttcccctcaacatctcccgtgagatgctgcagcagaacaagattctcaaggtcatcaggaagaaccttgtcaagaagtgcgttgagctcttcttcgagattgctgagaacaaggaagactacaacaagttctatgaagccttctccaagaacctcaagctcggtatccacgaggactccaccaacagaaacaagattgccgagctcctgaggtaccactccaccaagagcggcgatgagctgaccagcctcaaggattacgtgacgaggatgaaggaaggccagaacgacatatactacatcnaccgcgagagcaagaaaggccgggagaactccccctttt

SEQ ID NO: 7772 - DNA, 459 bp, Oryza sativa
  Clone ID: uC-osflcyp034f03b1
ttagttgatcagtactactttattcatgccatgaccatgcatacatatgggctttcacagatccatgaagaatttcctcgcccgaaaccgaaacatacatatatagcaaactcactcactctggctgcagagcgaccgtgcgaagtgcgtactcacacgcaattttattagatcgatcggggccggcacggcggcgcacacgtctacttcgccgcagacgccgacatgatgccgccgtcgaacggcgcctggccgaagcagtccaggttgggcccgtagccgacgccgagcacgtcgcagtagcgcttgtagaacgcgacccggtcggcgccgtcgttgtcgccggcgcactggagcccgccggtgaggatgttcgtggtgagcccgtatcctggcgcgcggacggccgcgctgtactggggagtcggagttcactgccccgtgacgacagcgtgcggc

SEQ ID NO: 7773 - DNA, 512 bp, Oryza sativa
  unsure (1)..(512): unsure at all n locations
  Clone ID: uC-osflcyp034f04b1
ttccgacctgtcccggccgaccccaccgctgcgagctgcggcgcgcgcaagcgggatttacagccacccacaccaccaaggcaccaacgcatccatccaaaccgccgcccgccgccgcccggcgtcgtcgtcgtctccacgctccctcgccaccgcgcgccctcccggcctagcccgccgggcccccgctgctaccagagagggcgatggcgacggcgagcggcgtctccactcccctgcagctcccctccacgcggcgnggtgggcggctgctgctcccgccccggcagcccggccccgggcaagaacgcgttcccgcggagagcagccggnggtgccccggcaggtacattttttttgaagagagattctgtatataaagaacagagttgtcatcaatttttaccattgaaacaaagcggaaggttgcaagcagcagttctgcctgttactccacctttgttagatgatgaaagaaaaacggcagcaaatgtgtgaagattatggattca

SEQ ID NO: 7774 - DNA, 557 bp, Oryza sativa
  Clone ID: uC-osflcyp034f12b1
tatgttatgtcaaaaaatgtctccatctacaaatcccaagcttctgctcttgaggctcatgcagcccctaactgcaaggttctggtagttgccaatccagcaaacaccaacgctctcatcttaaaagaattcgctccatccatccctgagaagaacattacttgcctcacccgtcttgaccacaacagggcacttggccagatctctgaaaaacttaatgtccaagttactgatgtgaagaatgcgatcatctggggcaaccactcatccacccagtaccctgatgttaaccacgccactgtgaagactcccagtggagagaagcctgtcagggaactcgttgctgatgatgagtggttaaatacggaattcatctctaccgtccagcagcgtggtgccgccatcatcaaggcgaggaagcaatccagtgccctatctgctgccagctctgcatgcgatcacattcgtgactgggttcttggcactcctgagggaacatttgtctccatggtgtgtactctgatggttcgtatgtgtgcctgctggctgatctactc

SEQ ID NO: 7775 - DNA, 257 bp, Oryza sativa
  Clone ID: uC-osflcyp034g01b1
tttggttggcaaattgaatgctcatacagcgggttgttattgcattggaatggatccccttgataggtattttgctgttggaagtgcagattcacttgtcagtctttgggatgtcaaagagctcctttgcattaaaacctttaccaaactcgagtggcctgtaagaacagttagcttcaatcatactggagagtttcttgcatatgctagcgaagatcccttcattgacattgccaatgttaaaactggacgatcga

SEQ ID NO: 7776 - DNA, 499 bp, Oryza sativa
  Clone ID: uC-osflcyp034g04b1
tggagagtatgttggtcttactggtgtaaggttggatgctgctgaaatgcttgcttgtggcctagcaactcattttgtaccttcagataggctgtctttgctagaagaatcacttaaaaaggttgatacatctgatccatttgctatatgtggaattatcgatcaatattcgcaacaaccatctctgaaagaaaaaagcgctctgaataggctagaaatcatcaacaaatgcttttccaaaaaaacagtagaagaaatcatagcctctcttgaacaagaggctccaaatgttgctgatgaatgggattgcttctgcaatccagtccatgaggaaggcttcttctactagtatgaaaatattcttgagatcgataagagaagggcgaacacaaactgttggtgaatgcttaccgtcagaatataaaagggtttgccatgtgatgcgtggtgacttcagtagagacttctttaaggaatgcagggtatattgttggtagag

SEQ ID NO: 7777 - DNA, 574 bp, Oryza sativa
  Clone ID: uC-osflcyp034g06b1
ttaaactcagctgcaaggagaaggagaaggtaggctccagccatggcttcccagctctccgccgccacatccgtgccgcagttccatggcctccggacctactcctctcctaggtccatggtgacgctgccatcgttgaggatgagcaagaagaggtcccagggcatccggtgcgactacatcggctcagccaccaacgttatcatggtgacgacgacgacgctgatgctgttcgcggggaggttcgggctggcgccgtcggcgaacaggaagtcgacggcggggctgaagctggaggcgcgcgactccggcctgcagaccggcgaccccgccgggttcacgctcgccgacacgctggcctgcggcgccgtcggccacatcatgggcgtcggcgtcgtcctcggcctcaagaacatcggcgtcctggaccagatcatcggctaatcaaattcattaagctagtcacacgaatcaatactcctatgtgtaatcgatgcatgagtgcctgtgtgatggacgatgtattgatccatgaaattgtgccgcggatcagtgcttatttagcttaattttg

SEQ ID NO: 7778 - DNA, 450 bp, Oryza sativa
  unsure (1)..(450): unsure at all n locations
  Clone ID: uC-osflcyp034g09b1
tgcagaaacaaacccctctcactcccactaccatggatccttgcaagttccggccgtcgagctcgttcgacacgaagacgacgacgacgaacgcgggagctccggtgtggaacgacaacgaggcgctgacagtggggcccagggggccgatcctcctcgaggactaccacctgatcgagaaggtggcgcacttcgcccgggagcgcatcccggagcgcgtggtccacgcccgcggcgcctccgccaagggcttcttcgagtgcacccacgacgtcaccgacatcacctgcgccgacttcctccggtccccgggcgcccagacccccgtcatcgtccgcttctccaccgtcatccacgagcgcggcagcccggagacgatccgcgacccgcgcgggttcgccgtcaagttctacacccgcgagggcaactgggacctnctcggcaacaact

SEQ ID NO: 7779 - DNA, 348 bp, Oryza sativa
  Clone ID: uC-osflcyp034g12b1
tcttgaagaccaaggatgaaaagaaggcgaagaaggctgaggtaaccaagtcccagaagtcgcagtcgaagggtgccgccccgaggggttccaagggcccgaagattggtggtggtggtggaaagcgctgaagatttcttgatccccaggaaagggtcgcctggttctcgccggctgtctaaatcgtatctcatcaaaagctaccctgtagaacctctgttaaattagcactactgccaaaatgttttaacatcgccactggagataatgtcatgaagtttgaaatgctatgtgggaaaaatgtttttctttggttgtgttactattacgagatttgacttggcttaa

SEQ ID NO: 7780 - DNA, 424 bp, Oryza sativa
  Clone ID: uC-osflcyp034h01b1
taaagacagcaggtctggtccctgttctgtatgcgaattcgtgatagctatgagtcctgcgacataatgctctcgaaagctgattcggagtaaacgggcatacatatggcgtctggggaggttccttctgtgatcttagtagtgcacataaccttttttgagctccctagcatttgacaggcacatgtccttgttggaggccaaattcaatcatcgtgatgtctgtaagacgcagcaatcttcttgctgggtgggtttctttgctttatacacaccacgagtccattcaattcattgtttatgtgtagagatgtacacgtgcttcggggttttacctttcgtgtgctattctggcccgtctgttatgattgaaagacgcagtttactcctctaggtctccatcagataggcattattttgccaa

SEQ ID NO: 7781 - DNA, 552 bp, Oryza sativa
  Clone ID: uC-osflcyp034h04b1
ttaatctcccccaaattcgcgattctctcatctaatcctcctcctcctcccccgaaatcagcacaccgaggcttcctcgccggcggcgatggcgggggcggcggtggagcaggcgcacgagctctaccggggagggcgacaccgggacgcgctcgagctgtacacggcggcgctggcggcggcgcggggacccgcgcagcgcatcgcgctgcacagcaaccgcgccgcgtgctacctcaagctccacgacttccacaaggctgcagaagagtgcacatctgtccttgagttggatagggagcatgctggagctctcatgttacgtgcacagacacttgacactctgaaggattaccagtcagctctatttgatgtgaacaggctgattgagataagtcccgcatctgacgtatatcggaaccttcatgcacgactgaagacacaagattgcactaactcccattccagaatctgaagaggaatcgttatatttgaagagatagcaagagttgccttcagagagaatgtaatatcgagatttgtttaccaagt

SEQ ID NO: 7782 - DNA, 492 bp, Oryza sativa
  Clone ID: uC-osflcyp034h05b1
ttgacccccttctctgtcgaggagtacctcgtcgacacctgcggcctcaccggcgcccaggcgctcaaagcatccaagaagctctcccacctcaggtcgcccgccaagcccgacgccgtgctcgccgtcctctccggcgtcggcctctcccgcgccgacctcgccgccgtggtcgccgccgagccgcagctgctctgcgccagggccgacaacatcgcccgccgcatcgcctccctgcgcgaccgcgtgggcttgtcggacccccagatcggcagcttcctcctcgtcgcgggcggcgccaagggcatccacgcgtgtgacgtcgccccgaggctggagttctggatccccttcttgggatccttcgagacgctcctcaggatcttgaaggggaacaacgtgctggtgctctctgaccttgagaaggtgatcaagcccaacatcgtgctgttccaggagtgcgggctaactgtttgtgatattgccaagatg

SEQ ID NO: 7783 - DNA, 498 bp, Oryza sativa
  unsure (1)..(498): unsure at all n locations
  Clone ID: uC-osflcyp034h08b1
tgaaagagtcgaagccattgaaggactcgaaagaagacaagaaggcagtgaaagaagataagaaggcggctgcgaaagattcgaaagaacagaagaaggcactgaaggactcgaaagaactaaaaaaggcgttgaaggactcgaaagaacaggggttgcagaaggattcagatgaacttaaaccaaagagcaacaagcgcgtgacgttcgctgaggtggagcccgagaaggaactcaaggcctccaacagcgactggcatccgacctccgagtatcacagcgtgtacccggagcacaactcatggagcagcagcttcatgatctttgaggatgagaacagttactggaactagagatctctagacctgccaaaaaaaaaaaagcagcccggtgaagagtcttcagttagttagttagaagtagctaggaggccatttaaacgctcttgttctagctgtcctctatcgattggtctgactggngtcaccatgtaacata

SEQ ID NO: 7784 - DNA, 484 bp, Oryza sativa
  Clone ID: uC-osflcyp034h10b1
taaagttatcgatggatgaggccactttccgtgagattcaggagaagaaattggagatttataatgcgatagttaaactgcagaaaggggatggaaatgatgaaaagcttcaggagcgagctaaccagatacaatctgatcttgaggagcttgttaaatctttgaatgaacagtgcaagagatatgggttgagagctaagccaactactcttgtggagcttccttttggttggcaacctggaatacaagagacagcagctgtatgggatgaagaatgggacaaatttggtgatgatggcttctccacaataaaggaactcacagttgaaatggagccacctgttgtacaaaaggatcagcctaccgttgaagacagtaaagtgtctaccaatgggccatcagcacctacatcaacagagaaagaagatagcaggggtgataaatctgccgctgcctctgagcaaactgtagaacctgatgcaac

SEQ ID NO: 7785 - DNA, 85 bp, Oryza sativa
  Clone ID: uC-osflcyp035a01b1
gcccatctgtgtttttgatcgcaagaagaaagctcgtcgggtttgatttgatcaaatgaatgaatgaatgaatcttagtgtgctc

SEQ ID NO: 7786 - DNA, 119 bp, Oryza sativa
  unsure (1)..(119): unsure at all n locations
  Clone ID: uC-osflcyp035a05b1
ttatcttatttatttttgttttnttatactttattttttttttttttttaattttattatattaatatttttacataaatataaatttttttcctcacccccccccccccccccccttt

SEQ ID NO: 7787 - DNA, 499 bp, Oryza sativa
  Clone ID: uC-osflcyp035a07b1
cctttccgtcgaaccctctcagtctccactcggtgaatcctcccacctcgggtggagggaatggcaagcggtagtgaagctgagaagtcacctgaggttgtgctggagtggcctaagaaggacaagaagaggcttctacatgctgtttaccgtgttggagatttggatcgcaccattaaatgttacacagaatgctttggaatgaaattactgaggaaaagagatgtgcctgaagagaaatatacgaatgcatttcttgggtttggacctgaggacaccaactttgcacttgaattgacatacaattatggtgttgataagtacgacattggagcaggatttgggcatttcgctattgcaactgaggacgtgtacaaattggctgagaaaattaaatccagttgttgctgcaagatcactcgtgaacctggtcctgtcaagggaggatccactgtgattgcctttgcacaggatcctgacggttacatgtttgagctta

SEQ ID NO: 7788 - DNA, 518 bp, Oryza sativa
  unsure (1)..(518): unsure at all n locations
  Clone ID: uC-osflcyp035a08b1
cggtcctcagcgggcggtgtgtgtgtgtgcgccggggcgagaccagacaccaacctgtctctctctctctctcccatccttcccctcctcctcctccgcctcgccgccgccgccacacgccgcacggtctctctccccgagattcgtgggcggcaggaagtgcatggggagaaaggatgccagagttgcgtagtggagtccggcaagctcggttgaaggcaaagaaggttgaggaccttgcagcacaggacccagctgagaacttggtagcggtggcaccgacggtggcaggaagacgtggtagaggaaggggtgggaggggggnnnaggtagagcaacaggaagaggaagggcaggaggaagagggcgaggtgttccggtgattgatttggacccggaccaaccttgtgaggttcttccaggagctgctattggcggagtcgctgctgggggcccccatcatatcgaggaacttgcttataagggttgtgaagatggatggtgggagtgctgagaag

SEQ ID NO: 7789 - DNA, 381 bp, Oryza sativa
  unsure (1)..(381): unsure at all n locations
  Clone ID: uC-osflcyp035a11b1
cttctgaagcctgcattagtgcacttagcttatgcggaagtgataaagaagctcaacttctgcagctaggaaatcaggacagacatgatggagtttggcatgcgagacagattgacgagtactgagtgccaactactgcattcctcacactgatttgaaatgttatttttttcccaattgttgtttgatgcattctcatctggttttgttttctgcacaatctggctgataaagcccacccgtcttgtgctatgtacaatattcagcataatagtgggataactgctgctggtgaagaaaaaaaaaaaaaaaacataaaaaaaaaacaaaaaaaaaaaaaaaaaaaaaaaaaaaaaanaaaaaaaaaaaaaacaataaaaa

SEQ ID NO: 7790 - DNA, 453 bp, Oryza sativa
  Clone ID: uC-osflcyp035a12b1
agctattcttgagctcaatcagcaacaacatcgatggccttcttgcttagttaagtccttcgccctcccaagaagaagaagatgtcttgctgcggcggcaactgcggctgcggcagcggctgccagtgcggcggcggctgcggcggatgcaagatgttccctgatgtggaggccacagccaccaccaagaccttcgtactcgctgctccatccaacacggcgagctctggaggaatggagatggcggtggagagcggcgagaacggcggctgcggctgcaacacctgcaagtgtggcaccagctgcagcggctgctcctgctgctcctgcaactgaatctatcgtcgtcgtcgcccggctgcatgaggatttatcgtatggatgctgctactgtcgatcagagctttgatcgaggccttaatttgcttgcattagtacccagcttatatgtag

SEQ ID NO: 7791 - DNA, 399 bp, Oryza sativa
  Clone ID: uC-osflcyp035b03b1
tctatttttcaagaaacaaggaagattacaccaacagatagaactagctagccaatgggttcgttgtcctctttccggcttgccgtggcggtggcagcactgttggttgttggctcatgtgccactgagctcaccttcaaggtcgctgagggctctagcgccagtagtctagagcttgtcaccaacgtcgccatctgtgaggtggagatcaaggagaagggtggcaaggactgggtggcgctcaaggagtcatcatctaacacctggacgatcaaaagtgaggcgccgctcaagggcctcttctatgcccggttccttgggaagaatggcgggtaccgtggttgataagaggtcattcccgaaagcttgactgctgggtttgatatacaagaggatcca

SEQ ID NO: 7792 - DNA, 567 bp, Oryza sativa
  unsure (1)..(567): unsure at all n locations
  Clone ID: uC-osflcyp035b09b1
cggtcgcgtggggccatttctcccccccatctgctctctgcttgcgagcttgtcaaccgcgcaaaggttcatatatacaccgatcggtgtagagccacactcttggagtcgatcgttcgctggttagctaactaagctaagctgagctgccttgctctcttcgacgatcaggttgcttggtttgacgagctgacgatcgaggagaagaggacggcgaacgtttttttgcaggatcagtactagggttcatcttggagaaccaatttgattcgatagaacgagcgagtcgaagaagatggtgctcgcgagcacgccgaaggtggtgctgggatgcgtggcgttcacgatcttctgggtgctggccgtgttcccgtcggtgccgttcatgccggtgggtcgcacggcggggtccctcctgggcgccatgctgatggtgctcttccgcgtgatgacacccgaggaggcgtacgccgncatcgacctccccatcctcggncttctcttcggcaccatggtcgtctccatcttcctggagcgcgccgacatgttcaagtacctcggcaacat

SEQ ID NO: 7793 - DNA, 562 bp, Oryza sativa
  Clone ID: uC-osflcyp035b10b1
cattttaaacaaaagaagagcttgatgccataggagagcacatgagctcaaccacacacacacacacacagagattttgactattaattttcatcgtctttggttttaagttggtgtgtgttcttccatggccggcctgagtgtccttcttgagacacacaagaacgatcaccaccccaacatgaggcctgcccaaatcatcagcaaggccaccctccatagccacccagagacgatgtcctcctcctctccggcgactgcgacgacggcgacgatgagctccttcttgcagcgctgcttcctctgccgcagggagctcgccgacggcaaggacatctacatgtacagaggggacagagcgttctgcagcgtggattgccggtgcaagcagatcttcatggacgaggacgccgccgtcggcggcggcaacttgcccgcggtgcgcgccggccggaggcgggcggacgtaccgcgcgagcaaacccgcgccggtggctttctgtactgatcgatcgaatcattgattcagccagccgtacgcgcgcgcgcacgttgttaattt

SEQ ID NO: 7794 - DNA, 473 bp, Oryza sativa
  Clone ID: uC-osflcyp035b11b1
ttgtcgcgtgggtgaagtacttggaaagaagagagggtgagtatgaccagaagatctctgtggatttctacaaggaaggagattctttgaagccagctgtgacaggtgtactagtctttgtatccactcctgatccagtaggcaacaaatactatcttgggcctgctcctttggaggacatggcaaggcaaattgctacagccaatggccccaatgggaataacagggattacctgttctcaatggagaaggcattggccaacatatgccatgaagatgattcaatcatcgagctagctaactaggtcaggaaggtgttgagccgctcggacgagaagatcaccggctcctatagcccacagaaatcttacgctctcgtgcacctgattgcgcttactgaggagactgtcgtggacttaagatagcatgttctggtgttgtagagatgaaatacttctctgagctcgctcact

SEQ ID NO: 7795 - DNA, 307 bp, Oryza sativa
  Clone ID: uC-osflcyp035b12b1
gtattcccctccttcgtttcgccgcggcggggggagccacatttgtgatccccggcgccgccagcaactgctccgaccgccgtccccgggcgcgccgccggcgatgtggaagagatttttggagacgacaaataagggcggcgacgccgttaccgctaccgacgcaactggcccgcagctcgacacgcggaaaaacccttcctccaggcgtcggacggccgatacgccggccaccgctggttccttagcaggcatgctgcgactgatgaaggggagcttcactaagaggaccaactctgtgctccac

SEQ ID NO: 7796 - DNA, 307 bp, Oryza sativa
  Clone ID: uC-osflcyp035d04b1
gcctatattttctgcacacttcgttcttctcctcgtggtgagcttgagcaacgacgtggtggtggcctcggccgccggcggcgatggccagttcacgtaccaggggttcgcggcggcgaaccttaccgtggacggcctcgccaccgtcacggcgagcgggctcctcgtgctcaccaacttcacgtaccaggcgaaagcgcacgcgtttcacccggcgcctctccgcttcctcggcgagtcctccacggcggcggcgggggcgaacgccagcggtggcgccggagcctacgttgcgcggtccttcttc

SEQ ID NO: 7797 - DNA, 489 bp, Oryza sativa
  Clone ID: uC-osflcyp035d05b1
attcttttcgatcgagagctcacgatgtcggccatggggaccgacatcaacgcgccggcgtcccccgcccccgcccccgccggcgccggcgagggatcctcctctgccgccggcccctcctcccgcaagcccaacaagcgcttcgagatcaagaagtggaacgccgtcgcgctctgggcatgggatatcgtcgtcgacaactgcgccatctgccgcaaccacatcatggatctatgcatcgagtgccaggcgaaccaggccagcgccaccagtgaggagtgcactgtcgcttggggtgtctgtaatcatgcttttcacttccattgcatcagcaggtggctcaagactcgccaagtgtgcccgttagataacagtgaatgggaatttcagaaatatgggcactagacaccacctgctgtctgcgcttgtttgttgccacggctgtgcttcatacacaagccgtattatttgccgaacagctccatcgtt

SEQ ID NO: 7798 - DNA, 556 bp, Oryza sativa
  Clone ID: uC-osflcyp035d08b1
tacattcactctttgtggagtcctgtgcttcagtgggccttgcgtacagattactatttgtagtattaactgtttgcgtcagtcatcaagctttgcctgggggaagtaaaaggccaactggtagtgataatcattcctctgaggaggtcacaaatgattcgagattaaccaatggaagaaacagatgtaagaagagacaaggaccagttgctacattcgactcatacgttctagcagccgtttgtgccttatcttgtgagctccagctgttcccttttatttccaagaatgggaaccattcaaatctgaaggactccataaagatagtcatacctggaaaaaccactggtatcagtaacgagctacacaatagcattagctcagcgattcttcatactcgtagaatacttggcatcttggaagctctgttctccttgaagccatcatctgttggtacttcatggagttatagttcaaatgagattgttgcagcagctatgggtgctgctcatgtttctgagttatttcgtcgattcaggccatgcttaaatgcact

SEQ ID NO: 7799 - DNA, 547 bp, Oryza sativa
  Clone ID: uC-osflcyp035d11b1
ttcctgtccttagtcctgctcaagaaacaagagggggagaagttgaccttctatgatgggccattcaaagcatctgcaattgccgattttgtatctgcaaacaagcttccgttggtcaacaccctcacacaggaaactgctccttccatttttgacaatccaatcaagaagcagattttactatttgttgttgcaaacgaatcgtcgaaatttctgcccatctttaaggaagcatcaaaatcattcaaggggaagcttttgtttgtctttgtggagcgtgacaatgaggaagtaggtgaaccagttgccaactactttggtattactggacaagagaccacagttcttgcttacactgggaatgaagatgctaggaattttttccttgatggtgaaatatcggtagagaatattaagagatttgctgaggatttcttagaggaaaagctcacaccgttctacaagtctgaacctgtacctgaatctaatgaaggagatgtcaaaattgttgttggaaaaaacctagatcagattgttttggatgaat

SEQ ID NO: 7800 - DNA, 335 bp, Oryza sativa
  Clone ID: uC-osflcyp035e01b1
gaattattagcggcggtgcaagagaagaggagagggggggactttgtctgcgatgacgcgcggtctacccgccgtcgacaccgtcatcgccggcgcaggcgcagccgtagccaccgtccggagcgaggagggagagcgccacacggcgccgagcgccgtcaccgtgcccgcctacgccgtctgggagaaggagcggtaaggagagaggagtagccgtccgggacgacgtagacatggaggtggaggcagccaggtgcgagtgctgcgggttcacggaggagtgcacgccgtggtacatcggggcggagcgggaggagtacatggggcggtgggtg

SEQ ID NO: 7801 - DNA, 544 bp, Oryza sativa
  Clone ID: uC-osflcyp035e06b1
cttggttgcaaaaaccaagacatacacacagaatcgaagagataacaaaggtttcctagcctcaaaggatacatatatatagtttccctacaatacaatggagcctgtcaatgatttccaggaaggcatttcaacagagcatgcctttgaggcagagcctgtgccatcattgtcggaaacaataacgccacgatcaatggtggtgagcttcatccttagtgtaactctcagcatcgtcgccatgaaggtcaccttgagctctggcttcattccgtcgttcagcatcccagccggcctcctcggtttttgtgtatcccgtgcgtcgatccgcattcttgactacttcgcagtggcacaactaccattcacacgccaagagaacaccatcatccagacctgtgtcgtcgcatgcacctcgatcacattcaccggtggctttgggacatatattcttgcaatgggaaagaaagcagcttgaagggatgtcaatgcccaaaataacgttgggaggcaagctttgccaggatgatcacctttctcttcc

SEQ ID NO: 7802 - DNA, 538 bp, Oryza sativa
  Clone ID: uC-osflcyp035e08b1
ctttttcctcccgagttcccccaaactccttccttgttccgatctaccaccgtcgcctgggcgcctggcggtttgctccactccataggcggccatcgtcttctcaaccagaaagcttctggctgtacagcttggcgggatacaagacgacggtctgccgtcggcgatccgcagtcgccggagctgaaggtggaagcggccaacacggcagtccgtgcagccgcttgagaattttttgtcatggcagtgaaaagatgcgcagaagtgccgatatctgctaggccgggaaagatgatgcggattgctattaagtcttggtcaaggttcttgcccccttacatccctgacgatgtgatcttcgacattctgttacggctgccatccaaatcttttatccgatttaagtccgtgtgtaaggcttggcacgccataatatccaacccctgtttcatcagtgctcacctcgagtgctctaagcagaagccatcgatatttatggtgcctggtggttacgaagagcagaataatggcgagaata

SEQ ID NO: 7803 - DNA, 495 bp, Oryza sativa
  Clone ID: uC-osflcyp035f05b1
gcgcctttcggtgcgctggagaagtggaaatcgatgtcctcgccggccggcggcggcggcggcttttcttcgccggatgtatccggtgacggttatttgattcttgtctctgttttctcttttttttccttgtatgtataaacgatttattttctcaagatagagaggaaaagctctgtatgctgttcttccgatggatagcgaccgtgcgcttgttggagcggccaaaggcgccggcttttccgccggtatggtcttgtcgcatatgacatccgcctgcgattggtgatgcctcatgaggtcaactcttttttttttgtcgagagtatttgatttgaaggggactattttttcgagaggatttggacttgaagagaatgaggacgtgcgatgattgaagtttcgggacctgaatctcagtcgggatggtcattaggcgagagaattacaaagtgattataatcattatatggtgtgatttggaggtccagagat

SEQ ID NO: 7804 - DNA, 508 bp, Oryza sativa
  Clone ID: uC-osflcyp035f08b1
gggttaatttacattggcattgaggtaaatttggggcttatttattattttctactggggattgaactatttagagctatatacccgtatcgttttacagattttatatcgaatcatgatgtattgcatttagatttttttcgctaggcctaccctaggttcaaatcctgggtccggcactgcctaaattacccaaggacgcggtaaggaaattattgggctcagctattgggctttttcatgagcctgtaaaacattagtacatgctgtcacaaaaatattctattgttagggagttcggagaagaaaacaccgaaccccagactatcacagagcagactgcatgtcatgctttcttctgctcagacatcacattgatcagtatttctctcttccctaatcactcaatgacgacatgctatgtctgaattcctttttgtggagttcccttctgaggtctgaatgtattccctcggtgattgaatcgagtcagatcttagtttttttt

SEQ ID NO: 7805 - DNA, 455 bp, Oryza sativa
  Clone ID: uC-osflcyp035g02b1
atttttgtcatccaaatcgatgaggctgctttgagagagggtctgccactccgcaaggcggagcatgctttctacttggactgggctgttcactccttcagaatcaccaactgcggtgttcaggacaccacccagatccacacccacatgtgctactctaacttcaacgacatcatccactccatcatcaacatggacgctgatgtgatcaccatcgagaactcccggtccgacgagaagctgctctccgtcttccgcgagggtgtgaagtatggtgctggcattggccctggtgtctatgacatccactccccaaggatcccgtccacagaggagattgcggaccgcgttaacaagatgctcgcggtgctcgacactaacattctctgggtgaaccctgactgcggtctcaagacccgcaagtacaacgaggtcaagcccgcccttaccaacat

SEQ ID NO: 7806 - DNA, 459 bp, Oryza sativa
  Clone ID: uC-osflcyp035g09b1
tgtttgggccaagccggagcggagggatggcggcggcggctaatccggaggcgggggagggggaggcgacgaattgccacaggagatcggcggcggggcaggaggaggaggaggaggagtcgaagaggccacgcgatggcaacgatgaggaggaagagctgctcaccgagctctcccgctaccgccgctactggacggatctttggtccgacgattccggcgacattgacagaagaactgagattggtcccatgcggtacacggaggaatcgccccggttcgcaatgctcctggatttacttgaggttttttcttttgaggtgaccgagctgaaaggtattctacgctggccaatagatgtgtttggtctcatctccgttcgtgactctctggaccggaaccgcaactatatctttgagcgcaccaggaacaactgccagactcttactgcaaaggatt

SEQ ID NO: 7807 - DNA, 254 bp, Oryza sativa
  Clone ID: uC-osflcyp035g10b1
gcagttcctggagcttgacatggaggagctccaggtcgaggaggtcgacgacgccggctcatcctcctcctccgaagtcgacacctttctcagaaacactcatggggatggaggatctagaacttctgaagcacttgcattcaatacgtctgtggtttcgctgcccacctgtgatggtgaggttcatgatgccccaggcagatttgctttcttggatggtggtgtggtcctctgattaccaattggttatcttc

SEQ ID NO: 7808 - DNA, 498 bp, Oryza sativa
  Clone ID: uC-osflcyp035h05b1
ctcgtctttctcgcatctccactcgccatgggcagaagtaagatcggaatcaacgggtgcggaaggatcgggaggctcgtggccagggtggccctccagagcgaggatgtcgagctcgtcgccgtcaacgaccccttcatcaccaccgactacatgacctacatgttcaagtacgataccgtgcacgggcaatggaagcacagcgacatcaagatcaaggactccaagactctgctcttgggcgagaagccggtcaccgttttcggcatcaggaaccctgacgagattccgtgggctgaggctggtgctgagtatgtcgtggagtccaccggtgtcttcactgacaaggagaaggctgctgctcacttgaagggtggtgccaagaaggttgtcatctctgccccgagcaaagatgctcccatgtttgtctgcggtgtcaacgaggacaagtacacttcagatattgatattgctaaatgctagctgaccacaaactgc

SEQ ID NO: 7809 - DNA, 551 bp, Oryza sativa
  unsure (1)..(551): unsure at all n locations
  Clone ID: uC-osflcyp035h10b1
gccttggccatggagaagagccgggtcctcgtggggggcggcaccggcttcgtcggtcggcgggtcgtggcggcgagcttggcggcgggccacccgacctacgtcctgctccggccggagatcggcctcgacatcgacaagctccagatgctgctggccttcaaggcgcggtgcgcgcggctcctcgaggcgtcgctcgacgaccacgacggcctcgtcgccgccgtccggcaggcggacgtcgtcgtctccgccatgtccggcgtccacttccgcagccacaacctcatgctccagctcaagctcgtcgaggccatcaaagatgctggaaatgtcaagcgattcctgccatctgaattcggcatggatccatcaaggatgggggacgctctagaacctgagagggtttcatttgatgagaagatggtgataaggagagcaattgaggatgcaaacatnccccacacatatgtgtctgccaattgctttgcagctacttctgtgctaaccttgtcagatgaaactctcctccctccaaagagaagtgtgtt

SEQ ID NO: 7810 - DNA, 260 bp, Oryza sativa
  Clone ID: uC-osflcyp082a01b1
ggctttagttgcttgatggacgacgaggccacgctgggggggggttaagaaccacaggcgcgccacccaagacctttacgacttcatcgccgacggcaacttccccgagtggaagctgttcgtccaggtgatcgacccggaggaggaggagaggttcgacttcgaccccgtggatgacaccaagacatggccggaggacgaggtgccgcttcctgtccgtggggcgcctcgttcttaaccccatcgtttaccactttttt

SEQ ID NO: 7811 - DNA, 114 bp, Oryza sativa
  Clone ID: uC-osflcyp082a04b1
agctttttctagaggagccaaagccattggctttatcgtagaggtttcatggatttcaacatccgaaagagggtagttgagagtaaaactgatggtgttgctttcaagccacct

SEQ ID NO: 7812 - DNA, 414 bp, Oryza sativa
  Clone ID: uC-osflcyp082a05b1
agatttcgtactcatggcgaagccgcagcttcttgtgggcgtttccgtcgccgcactggtactcgtcgttgcagcctccgccaagaaatccggcgacgtgacggagctccagatcggcgtcaagcacaagccagaatcctgcagcattcaagctcacaaaggtgacagagttaaagttcactaccgtggaaaacttactgatggaacagattttgattctagctatgaaagaggtgacccaatcgaatttgagttgggcactggccaagtgatcaaagggggggatcaggggcattctgggcatgtgcgttggcgagaagaggaagctgaagatcccttaaagctcggttatggggctcaaggggcaccggcgaccatcctgggggagcgactctcattttcgataccgagctt

SEQ ID NO: 7813 - DNA, 203 bp, Oryza sativa
  Clone ID: uC-osflcyp082a06b1
gaatgagatgaaggagaggagcagccatggcgtcggcgggggttgtatttggagagcacgttcctggggacaaggctggcggaccctgtgccgcatagcgggaggatcgttgtcagcgctcttgttctcctgtcttatgatactgttgtgtctatttttctgttatgttcattctttttttctctcacttgtctctttttctt

SEQ ID NO: 7814 - DNA, 312 bp, Oryza sativa
  Clone ID: uC-osflcyp082a08b1
tctactatgtgatgtgactgggaagattcttatgaagtgcttcctttatggaatgcctgatctgaaattgggattaaatgacaagatcgggcttgaaaaagaagctcaactcaagtccaggcctgcaaagagcggaaagaccattgagcttgatgatgtcacattccaccagtgtgtcaacttgacaagatttaacttacaaaagacagtcagctttgtgccgccagacggcgaatttgaattgatgaaatatcgaataactgagggtgtaaattctcccattcccgggttctaccaaccatttaaggaatt

SEQ ID NO: 7815 - DNA, 210 bp, Oryza sativa
  Clone ID: uC-osflcyp082a09b1
ttcctcttgctttttgtactcttccatctcacagtgcgtctctctctaatctcccttacgcggcaaaacacaccgtcgtccatggacagctctaataacaacaacaacaagagggcgcgcgacgcccaggatgaggcccacgaggccaagaggctgcgggcggaggacctgctcgacatgctcgacgatgatacctacgccgggggcgcc

SEQ ID NO: 7816 - DNA, 284 bp, Oryza sativa
  Clone ID: uC-osflcyp082a10b1
ttatttactgcagcagcagcagctgagcttgaggcagggtaaaaaggaacacatggcgcgcctacaccatggccctctcgtacccaagcgctggccggcaaggccgccccgaaggtgttcggcgaggggcgcataaccatgcgcaagtcggcggcaaagaccaagcccggcgagacgtgaagaccgtggtactgttactaacggatcatatacctattctagctatgaaagaagcgacccaatcaaacttgagttgtgctctggccaagctaccaaagggtggg

SEQ ID NO: 7817 - DNA, 393 bp, Oryza sativa
  Clone ID: uC-osflcyp082a12b1
tctgtgttctcctctctcctccccttccctcccctcccccgttcgcggtggtggttcgccggagcgcatcagcatgcagcagcaaaaggccgtgagggccgccgtctggatccccgccgtcgccaagatgaacgacgccgatgtcgccaagcagatccagcagatggtgcggttcatccgccaggaggccgaggagaaggccagcgagatctccgtcttcgccgaggaggagttcaatattgagaagcttcaacttgttgaagctgagaaaaagaagatcaggcatgaatatgaacggaaagagaagcaagtcgaagtttgaaagaaaattgagttctttatgccagttaatgctttttgcattaaagtgcttcaagctcaagatgatttggt

SEQ ID NO: 7818 - DNA, 245 bp, Oryza sativa
  Clone ID: uC-osflcyp082b04b1
ggcttgctttagccgccggcggccggcacggaggggcgggggtggtaagcgccggccggcgcggaggcaggtgatggaggcgctggcggccggcagcggcggctgcctcgcgcggagggcccggcggcggctgccccacgcggagggcccggcggcggcggctgcccgtccggagggcaggcggcggaagcgcggagggccgcttcgctgcgggtggcagctgagtcatggaagggccgtcccgc

SEQ ID NO: 7819 - DNA, 497 bp, Oryza sativa
  Clone ID: uC-osflcyp082b05b1
cagtttacttgcgctgatgttactttccgtaacatgtgggcagaatttgagtgggaaaacaaggtggcactgaatactgtcattcagaatgagaaggagtttttggatcatatcatcaagtcaacaaacatgaagtgtctaacaccaccgtctgcgcttgacggagaatgcggttttctcgccgctaacctttatgcaaagagtgtgttcggtgaagatgctttggtaaatatcactatcccgaagcagtttgatggcaagctcagtggttacatcacaataaggagcatgacctctgggagtccactaaaattacgagactagattaccctcaggcgcgactgcggccactaactgccatgactctgtcacggtatgattattattttttagtaaattccactctttattgggagtgatctgctcgccaaccctcttcttgctcttagtcccaacttacgttctccccccttctatttttctttgcccgccctatc

SEQ ID NO: 7820 - DNA, 170 bp, Oryza sativa
  Clone ID: uC-osflcyp082b06b1
ggttgttttgggtaccatggactgacgaggagcgcagcgggtttttaaaaaggctggggcacctagacaacggggactggagaggcatctccaaaaactttgtgaccagcaggacggcgactctggaggccagtcaccccctgaagacctttcttcggcagaccaaccct

SEQ ID NO: 7821 - DNA, 284 bp, Oryza sativa
  Clone ID: uC-osflcyp082b08b1
attgatcaccaggaacagaacagaggaagggacggttataactaaggaagctgtgacatatataccagaaatcacaggacatcgacagtctatgtacccaatgccaactagacagcatcacgcatctacctattcaaactctctgagaaaagacagtgtgtcccatctgctttccaacagattcatcacggaggagatacagaaggataaaaaccagcaatcctgagactagccacagggaggcatttaagtgcatgctgcaaagatcttgggctcatatttcc

SEQ ID NO: 7822 - DNA, 470 bp, Oryza sativa
  Clone ID: uC-osflcyp082c08b1
tgcatcaaaccaaacccccgcgacccacacccaaacgcgccacctattccgagcgcgccgcggcgagcgagcgggagagaggggggtcgcaagcgcagcttcctccccggccatggatctcctgcacggggagagcgtccagaccacggtggccatcgccgtcgccgtcgtcgcggtcgtcttgtgctgtcccttccttcctcctccggtccaggaagcccaagggctgtttggatcctgagatctttaagaagtttaaccttgtggaaaagaagtatatttgtcttttcgtgtccagattcaaacttgctctttcaacttccaacctctgtattggtcctttcaattggtcagtattttattttgcattaggactatgtgtttcatgttattacttttttaatcttttttccctttctacattggttcttgattctatgtatttttgtgtttgtttttaaatgttctct

SEQ ID NO: 7823 - DNA, 363 bp, Oryza sativa
  Clone ID: uC-osflcyp082c09b1
gggctggatcgcccgcgcgaccgacccggacttaccggctcgacccacccacgcgtgctttgtttggcatgtcgcagctgaggtcaggtctgctgccatccatggcggccgggtgccacatcaatacatcatgttcatgtcagccgtcactggcagctcgtcagccacaggacgccagattacttcaagtatgctcgtcaaccggtcgatagatgtgttcggagatgtggagaaaatgcttcaagtctcaagcattacatgcatgcaaccgtaaaagcagtgtgctcctgagagagtatactttctgtacatataccctcattagcgttactagcccaggtacattaagcttgaccagtgaaa

SEQ ID NO: 7824 - DNA, 443 bp, Oryza sativa
  Clone ID: uC-osflcyp082c10b1
gcgtggggtttttaaaattatttttgggggtcttttaatttttttttttttgtctttaaatgtttattcttcgcttttttcttcagcggggaccccgccaaaaagggcacgagaaacaaaaccgggttagggggggcctgaaaaaaaaacaaaaactcccccctttcaaaggggaaaacaccccaaaaaaattgtccctaaaagagcgcaaacaaaaaattttaaaaaacccgggccccaagggaaacggggtgaaatcccctaaaaatacaaaaaagacaaaaaaagggtgccacaaaaggccccaaggggggatgtaaaaaacccacgggaaaaaagaaggccccggggtccttttatttcagggggggggggcccaaaattcccctcaacacaatatggggggggggggggttaagaacataatcctaccaaaacaaaaa

SEQ ID NO: 7825 - DNA, 455 bp, Oryza sativa
  Clone ID: uC-osflcyp082c12b1
tgtttgtgtggcctacactgaagaagaaacaaaggctgtggctgctgagattgaggtggttgatggtcctaatgatgagggtgaaatgttcacacgtcctggtaagttaagtgaccggttcccacaaccatatccaaatgagcaagcagcccgttttgcaaatggtggggcatacccaccagatctcagtcttatcacgaaggcaaggcacaatggccagaactatgtgtttgctcttcttactggttaccgtgatccacctgccggtgttcagatccgtgagggtttgcattacaatccctacttccctggtggtgccatagctatgcccaagatgcttatagatggagctgttgaatatgaagatggtactcctgccactgaagcccaaatgggcaaggatgtctgttcgttcttgtcatgggcagctgaacctgatatggaagagaagaaac

SEQ ID NO: 7826 - DNA, 426 bp, Oryza sativa
  Clone ID: uC-osflcyp082d01b1
aaggtaggaaaaggagagagagcaaagaagacttggggaggagagggaacttgagagacagagagaaagagagagggctgctaggcaagctgtggaaagggctacaaaggaagcacgggaaagagcagctgcagaagcacgtgcaaaagcagagagggaggcacgccagcgtgcagagcgggctgctgttcaaagagctcaaaaggaagcacgtgagagggctgctgtagacgctagggaacgagctgagagggcagctgctgaagcgaaggagagggctgctgctgaagccaaggagaaggttgcaactcaagccagggatagggctgcagcagaaagagctgcagtggagagagctcaacaagaagcaaggaggagagctgaaagagcagcagtagagagggctgcttttgaggctcgggaacg

SEQ ID NO: 7827 - DNA, 507 bp, Oryza sativa
  Clone ID: uC-osflcyp082d05b1
gggtatttatctccggtcggcggcgggatgtcgatgtcggggtcggacttcggcgccccgtgcgacgaccccaagatcttccgcaacatctgccgggatcgtatactcaaggacttgctgcagtcggacaaagataaggagaccaaaagctcatggaaggttcttatcatggacaaatttacggtgaggatcatggcttatgcctgcaagatggcagaaattaccgatgcaggaatctcgttggttgaagatcttttcaagcgaagggagcccatgccttccatggatgcaatctactttctccagccactgaaagaaaatgtcataatgcttctatctgacatgtctggtagatgtacactgtacaggaaggcatacatattttttatgttaccgattcctaagagctggtctcttacactaagaacgacagcagtgtgataccacgtattgggtgcactaatagagatgatatttgggttttttgtatttgaatgtaggattcac

SEQ ID NO: 7828 - DNA, 499 bp, Oryza sativa
  Clone ID: uC-osflcyp082d09b1
tttatacacagtgatacaatggcctgcatcaacacatgccagatctgctccgtcctcaagggagcaaagatcaatggtaccaagatcggaggagggaggggatcactatccttcctttgtccttcttttatctcttatcgacctctatttatcttcttttatttccttattctttctcttgcttttttttttacttttgttctcttcctttcttttttttctttttactactcctttcctcctatcctccacatttttattcttattcttttttttcttcttttttatcttttctttactttattttctttcttattactttctcatttttctttccttactttttttatttctcttgcatttcttattttctttatcttcctttctatctttctcttctatatcttttctttatttctccttttcctttttcttcctatactcctctttctcctgttcttcctcttcttctttttctcttcctttttctcatcctttt

SEQ ID NO: 7829 - DNA, 438 bp, Oryza sativa
  Clone ID: uC-osflcyp082d10b1
tattatatcccctgaagaaactaccaacggttctgcttgcaaccctgtcgctgcaggtggttgctgccagggcaatggaggctttacctgctgccagagtgatctgccaaaggaggataagagcatcacagctgagcagaaccagaagagctccgagaagggggctgacaaagagtgtgctgctggcagcaagaagaggcacatgaagatgtgttccatgccaacctggtttgagacatgggaaacggctgacacctatgctgctcttggtattgttgcagctgctgcatcggtgttcgtcgctttcaggatctacaagaacctcaattgagaattctcagaacagggctaggttttgggcactaaggacagtttacctgctgtaaacagtctgttgtgagaataatatcctacgtgtgcataagtcatgcagattag

SEQ ID NO: 7830 - DNA, 87 bp, Oryza sativa
  Clone ID: uC-osflcyp082d11b1
tttgtatgggtaatcaatgaggacctccaccgaagcagaagatagtcccgtagtctgcacggcctctccatgttatggacacttata

SEQ ID NO: 7831 - DNA, 366 bp, Oryza sativa
  Clone ID: uC-osflcyp082d12b1
tttattataaggcgctgcatgaaggtgagtgggggtcggtttatagatcaactggtgaagcgatcattggcaagcatccactctgcccaccagcccttagtggtgatttggaaacttttcatgatttgggtggatgaagttaggaaactcaaggttatggcaaatgctgatacccccgaggatgcaacaacagccagacagaatggggcagaaggaattgggctatgccggactgaacatatgttcttcgcttcagacgagaggattaaggctgtcatgcagatgattatggcttcaagtcttgaactgaggcataaagcactagatcgccttttgccttatcagaggtctgactttgaaggcctt

SEQ ID NO: 7832 - DNA, 477 bp, Oryza sativa
  Clone ID: uC-osflcyp082e04b1
gatctgtataacatcacgcatgatcctcatagagggcccatctgcggtggaatgggcagggaacttcttatatccttcaaaagatcaactggtcaaaagcctcaacggataatattctatagggatggtgttagtgaagggcaattttaccagggtctattgcatgagcttgatgcaatccgaaaggcttgtgcatcactcgaagcaaattaccaaccgcaggtgactttcattgtggttcagaagcgccaccacacgagattatttgcacacaaccacaatgatcagaattcagtcgacaggagtgggaacatattgcctggtactgttgttgactccaagatttgccatcctaccgagtttgacttcttcttgtgcagccatgctggaatcaagggcacaagccgtcccgctcattaccacgtcctgtgggatgaaaacaacttcacagctgatgcgttgcagacccctaccaac

SEQ ID NO: 7833 - DNA, 521 bp, Oryza sativa
  Clone ID: uC-osflcyp082e05b1
tgcttatttgagctgttggaagagagagaagcagggaaaacttttgacgtctgttttaagcagatgaaggcttttgcagacagtattacaaactgggcggatgtagtaattgcatatgagcctgtttgggctattggaaccgggaaagttgctactcctgagcaagctcaggaagttcatgctgctgttcgtgattggttgaaaaccaacgtgtcacctgaggttgcttccggcattcgaattatatatggaggttctgtaaatgcagccaattgtgccgagctagcaaagaaagaagatattgacggcttccttgttggtggtgcctctttgaagggtccggattttgccactattatcaactcggtgacttccaagaaagttgcagcctgatgtaacccttctgtagaaataaatgacccagaggcagcgagacggctaccacaccatattgcttgatagagatacttcgtgttcaacacccggctttgtttggcacaccagggaataatgcaagatgc

SEQ ID NO: 7834 - DNA, 219 bp, Oryza sativa
  Clone ID: uC-osflcyp082e06b1
ctctatttataaccctagatcgagatttggggtgacggtggttgcgagcttggtgcggcggatgggttggtcgaggcggccgagtgctcttccgggggcgagctggcgggctcagtggagcccgtggagggcgcagtggctggccccgtggagggcggtgctgtggctggccccttggaggccagtgcggtggctagctctgcggagccctataagctt

SEQ ID NO: 7835 - DNA, 329 bp, Oryza sativa
  Clone ID: uC-osflcyp082e08b1
ttatttatttgatggccaggtcatccactccatggggtactccatgatgggcaccaagaattctaaggaaatgatcaagggcaagcgtgtcacgatcgttggctatctcaaatcagcacttgacattgctgcagaatgtgcagaagtaaatggtactgagattccatgtacaatggtggtccgaacaaagcattggatcataccagactattttgcatggggcgtccacatctcaaagctgtatttgaatcggttttctgagcttcttattcacaagcctggtgaaggcttactccttagcatcttgggcaccctcttgactccattcg

SEQ ID NO: 7836 - DNA, 86 bp, Oryza sativa
  Clone ID: uC-osflcyp082e10b1
ttaatgtggtcttctaggaagcataccaccatgggggctgtatgttaacaatgtggagaggttcacaaccacactaggaactgttt

SEQ ID NO: 7837 - DNA, 336 bp, Oryza sativa
  Clone ID: uC-osflcyp082f02b1
gagttagtagatcgaaatggagtccactccgaggcctccgaaagcttacgccggctcgatcctcgccgggtgacaactgacaaggaggagggactgaaagtgaggaaactcctccgggattgtgctgctcgttttccggcaagccaagaccagatgatcctcacaccttaccaccagaaaactatcacttacaaagttacatatgggtttgtgtttttgtttaaaccccctttgctcttttggtggtgtttgatagcgccttccttaatatcggtgatcgatgatgtttagagaccgtaggaaaggatgaccattcgcttgttatcattaggagct

SEQ ID NO: 7838 - DNA, 221 bp, Oryza sativa
  Clone ID: uC-osflcyp082f03b1
gttttgtattagcaatggccgccctcgccgccgcatgcaccgccttcgccgccaagccgcgcctggcgcgcgcgccgtcgtccccggccgtgcggatctccgtgtcgtgctccgcgtcgggcaacaacggcggtgccggtgagatggcgcagtcgctggcggcgtcggacaagacgttctccgcggcgctggcgctgtcctcggcgctgctctcctcggcg

SEQ ID NO: 7839 - DNA, 165 bp, Oryza sativa
  Clone ID: uC-osflcyp082f04b1
tcgattttttttttagcaagaggagattcaccaaaccactatggggtgactaataaggttgtaggccccgaagagcaacttatatgaacaggacctgtgatagatatagaacgccaataatggactcctactacggttgttatatagaacgaaacatgagcttgg

SEQ ID NO: 7840 - DNA, 468 bp, Oryza sativa
  Clone ID: uC-osflcyp082f08b1
ggctcctccctctctctcgctcaccgcctccttctcctcgcgatctatccaaacaaggggctcgctaagatcggcatgtcggactctgaggagcaccatttcgagtcgaaggccgacgctggggcgtccaagacctatccccagcaggccggaaccatccgcaagaatgggtatattgttatcaagaaccgcccctgcaaggtggtggaggtttctacctcgaagactggtaagcacggtcatgccaagtgtcactttgttgccatagatatattcaatggtaaaaagcttgaggatattgatccttcgtcccacaactgtgatgttccacatgtgaacccgacagagtaccagctgattgacatatcagaggatggattcgtgagccttcttactgagagtggtaacactaaggatgatcttagactcccaactgatgacagcctcctgggtcagatcaagactgga

SEQ ID NO: 7841 - DNA, 470 bp, Oryza sativa
  Clone ID: uC-osflcyp082g01b1
gccttccttttcagaagaagctttaaggaggctttgagaatcttctggaaaaatggagctgcttgacaagatgatggtgaaactgaaagagcagggtcacagggttcttatttattcacagtttcagcacatgttggacttacttgaggattatttaagctaccggaaatggagttatgagcgtattgatggaaaaataggtggtgctgagaggcagatacgaattgatcgcttcaatgctaaaaattctactaggttttgctttcttctttcaaccagagctggtggtcttggtataaatctggcaactgccgatactgtaattatttatgacagtgattgaaatccttatgctgatttacaagctatggcgagagcccatcgctaagggcagacaagcaaggctatgatttataggctggttagtcgcggtccattgaggagcggatgactgcacttacatacgaaaa

SEQ ID NO: 7842 - DNA, 499 bp, Oryza sativa
  unsure (1)..(499): unsure at all n locations
  Clone ID: uC-osflcyp082g02b1
gtcttagtcggcactgtcggctcgtctgaggccatcatgctcgccggtttggccttcaagaggaggtggcagaacaagatgaaggcagccggcaagccatgcgacaagcctaacattgtcaccggcgccaatgtccaagtttgctgngagaagttcgcgcgatacttcgaggttgagctcaaggaagtgaagctgagtgacggctactacgtcatggacccagctaaggccgtggatatggtcgacgagaacaccatctgcgtcgcggcgatcctcgggtcgacgctgaacggggagttcgaggacgtgaagctgctcaacgatctgctcaccaagaagaacgctgaaacaggctgggacacgccgatccacgtggccctgcgagcggtcggttcatcgcgccgttcctgtacccggagctggagtgggacttctggcttgcgctggtgaagagcatcaacgtgagcgggcacaagtcctgccttctttaccccggatc

SEQ ID NO: 7843 - DNA, 397 bp, Oryza sativa
  Clone ID: uC-osflcyp082g04b1
agatatttttgatgaaaccgatcgcattactgggagaacgggtttgtatatcaaatgtgggcgtccatttgagtatatattctgcacatgttggaaacctgacacttattgatcttcctggattgacgaacgttgctgtacaggggcaacaagaatctattgtgcaagatattgaaaacatggttcgggcttatgttgataagccaaattctatcatactgggcatatctccagctcatcaagatatagcaacatcagatgctatcaaccttgctagggatggttgatccttcaggtgacagaacctttggagtgtggaccaagcctgattcgatgggtatgggtaccaatgcttgtgatgcacttgaagggaggcagtatcggttgcaacacccct

SEQ ID NO: 7844 - DNA, 194 bp, Oryza sativa
  Clone ID: uC-osflcyp082g05b1
ctcctctcttccgatctgcatctgcttctcctttccacacttgtgcttcgtgttcgtcgtggtctcttgtttcttcttcttcttctagatttgattttctttttttttcttcccttttcgcggcggctaggggccgaggggggaggcactctctctccttttcccccataacttcactacttcaccctcaccct

SEQ ID NO: 7845 - DNA, 486 bp, Oryza sativa
  Clone ID: uC-osflcyp082g08b1
tgatgctcaggcacctcaggaagaaaactgacaaggtgcgcaagcgtgatgtggtgctcaagctggggcggcgaacgggcggcacggcgatccgcgtggtgcaggtggagaacagctttcccatcggcgcgtgcatcaacaagacggtgatccagaacccggcgttcgtggactttttcaccaagcactttgactgtgcggtgctcgagaacgagctcaagtggtactacaccgaggtggttcaagggcaggttagttactccgactccttctaggctatcgtcttttgcaccttctctttacgctctttctcttcctctgtttattctggttcctcattagtctctttttcatttcctttcttacctctttatgtccttcagtttctaatccttatctctctttttctttttttcccctattttttcttattattctcctacctcactttcacttccttctttctatctcttttcttttattctc

SEQ ID NO: 7846 - DNA, 88 bp, Oryza sativa
  Clone ID: uC-osflcyp082h02b1
gttactaccccttccaacctattcctcctatatctgggacggggattggtgatcatgtccccaatcacccatcgtccaatccttcatt

SEQ ID NO: 7847 - DNA, 295 bp, Oryza sativa
  Clone ID: uC-osflcyp082h09b1
tttatgcgtccttcaagaggtacttacactggggggggagctcattacatcgctcgactataaggctaatcaaacgcatagggttgcgaaatgaggagcggtcgtatgatcgatcatatcggttctcagttgctgtcttataatctgttccattagctgttccatgggtgatccctagataggatctcacttaagagggagactaatggggactcattcctagacttattactcgcaatcttatgcttattcgtgaagatgtacgttatgtttgggtatattgattggataatgt

SEQ ID NO: 7848 - DNA, 507 bp, Oryza sativa
  Clone ID: uC-osflcyp082h11b1
ttgatcctcccctccgccgccggccttgcttcgggcggattcctgctcttcgaggcgttgtttaacttcacaatgaagctgatcgctgcctacctgctcgctgttctgggtggaaacacctctccatctgctgatgacattaagaacattctggaatcagttggcgttgaagctaatgacgagaggctggagttcctgctctcagaactggagggcaaggacataacagaagtgattgctgctggaagggagaagtttgcttctgtgccctcaggggtggttggtggcatagctgtggcagctcctacagttgcaggtggcggtgcaacacctgctgaagaggcaaagaaagaggagaaggtcgaagagaacgaagagcctgatgatgacctggcgtttcagcttgtctgactataccccttcagctgcattttatcccctcgttcaccccagcatacttcttgcattggttggtttaccactttgtgtgcaaaaatgaacattgtg

SEQ ID NO: 7849 - DNA, 512 bp, Oryza sativa
  Clone ID: uC-osflcyp083a03a1
tttgtttctttgaagaaagagagtagtaaacagtgaccataaatctcctaaaagcttccactgacaaactgccacatgagcttctaattagtacttcatcttctagagttgcttaatagtatagttataacgacaaattcatgtcagaacaccccacagtttcaacagaagctatccccctattcccctgaatgattaggtgaaactatcctagtgcgcaaaaggtaatggtcaaaactcaaaagtaataaaaggcaggaaactataaaacctagcgttggctacatatttatagcttcaaaatgggaggtgaacagaggcatcttggaagcaatcaactgttttactcagcattcagaagttgcctttgacgatcccactgtttctgtgatctcctgaagaagttctttagaaatagcagctgggtcgagctcatagctatctttagggacatttggagcttcttcccctgcatgctataatagggcacctgatgtgaaaacctaaacatc

SEQ ID NO: 7850 - DNA, 223 bp, Oryza sativa
  Clone ID: uC-osflcyp083a04a1
tttgttttctgattttttgtgttccaaaaaaaataaacttgattgttaaacctcttacatatggcccattgcaagcagatgttcactgcacataaaacgagagccattcccgtgggcttaccttaacaaattctaaaactaggtctgtcaaccgcaaacttgcaaaccaccctttggacgaggttcactaaatattgggacacaccttggtaaccgtggaacc

SEQ ID NO: 7851 - DNA, 290 bp, Oryza sativa
  Clone ID: uC-osflcyp083a05a1
ttgtttctgatccctgtgttaaaaaccccatcccccaaactatcgagcccttaatactctaacatacaaaatctaaattccaataacacaaaaccctgtggcaacatcctctaataaaacgaaaaatctaacaactgtgtatatagacagagacatgtcaccttttttttttccccagcaccatcatggaaactggaacgggctctacatcaaagaaaaggccgacgaaactctgcatatggtgggttacagagaatcccttgaaactttaagaacgcatcttcctacag

SEQ ID NO: 7852 - DNA, 342 bp, Oryza sativa
  Clone ID: uC-osflcyp083a06a1
tgttttgttagggttaaggggtatactctattttttctagatttctgtaacgtaatgggtctaactaatctgatctctttttctagatttgtctactaattgctgatacaacagcatgtactgatacacatactgtaagatggtcaacatgaatcaatagaccgttcactgacagttcttctgagcacatcaacgtagggcaaaatcctctctacatcaggcccataatacagcgagaatattggattctgcccgggcgaatgcatcagccgcgcttgcgccatctcccatggaaagcttcgatggagacgagcttgatcaactcgtgcgcgatgatgatgt

SEQ ID NO: 7853 - DNA, 416 bp, Oryza sativa
  Clone ID: uC-osflcyp083a07a1
ggttcttgacccttgtgttttcaaccctccttttttttttaaccaaaccacagcatcgtgaattttttgacttattaaacggggcatttcagtttactacatgtaagaccttcacattttttcccaaaagggggctacttttacaaggttacaatttcaacttcttaggtgccaagattcacacaacctcaactttacagcttggattaaacagggtttccccctccccaggaaggcctttttatagcattcttcagggcattatagaacacctttccacaggtgaacaaactaacaaagcaacaccctgttggggatctttcgcgcattgattgggagcatttttgggcccctgtgctaagggtaagctcttcacatatttgcctaactgcaataatagatttatcgcccttgcc

SEQ ID NO: 7854 - DNA, 511 bp, Oryza sativa
  Clone ID: uC-osflcyp083a09a1
ttgttttttgatgagtccagctgtgaataatagttgataataggttatattacttggcatgttggcctaatagaatacagctaattcagttaatattattctctagcaaataatattcgtcaaatgcagacatgcatcatagtggctccatatagaagttaaatttggcaaaatcttataccataaagttcatttttggtttttggttcttaacaaaaataaaatctgtttgcagtgacatggaatgtgacctgcacatactcccaatttcttgctcagaagactccttcctgctgtgtatctctctcatcattttataatgacacaattgtgaactgcccaacatgctcttgtggctgccaaaacaatgggacaagtcctggaagctgtgtaaagtgagttaataaaaccaaaactcttacttcgcttcttgttgaggcccaacttttctgcaaaattgctaacaagttccatgcatttccacagtgagaattcaccttatttacaatct

SEQ ID NO: 7855 - DNA, 388 bp, Oryza sativa
  Clone ID: uC-osflcyp083a11a1
catctcttatttatcttttattcatttatttatgcatcatcacaaagacaagatgcatgttggcataccaacacagagacatgttcaagctatgcatacataccaacacgtatatgaacacaaagagacatgttcaagctatgcgtataccaacacgtacatgaacacagagacatgttcaagctagcaatgaatacgtacgatgagcctgtatggttgttatacagagaagtagtgctcttcttaggtgtgcatttcaggtgtgcacccggggcctgggtccccggtgaaggagtcacggcagaccaagagagggcgccacgaccacaagtccacaattttgcacttgccggacgcgggggggcacgactccacctcttgggagcct

SEQ ID NO: 7856 - DNA, 357 bp, Oryza sativa
  unsure (1)..(357): unsure at all n locations
  Clone ID: uC-osflcyp083a12a1
ttttgtttngtgacgagaagagatgtatatatacatccatttctaaaactactacaagaggtcgagaggaacacataaccaggagggattgcgacaatttacagcaacaggagtctggagatcgaggcaagaacaagacaggcagcagcagagctaccctcttcatttccactgaatttttacacatttggaatccatggaaaccgagccttccctcccgtcgtcgtggtgtcaccggagtccgatgagaaaaatggtcatggcgtgctcataatccggatcgctcgccggcgtcagtgaaggaggcggggcgattgttcgggcggctgttgaggagtgggtttagagccttgacca

SEQ ID NO: 7857 - DNA, 424 bp, Oryza sativa
  Clone ID: uC-osflcyp083b01a1
ttgttttttgattttttgtttttttttttttttttttttttttttttttttttttttttttttttttttttttttttttttttttttctttcttttgctccgggtcgggtggcggttttaaggccacccaaaaaaaccccggggcccccaccggggaggaagaccctagacgcaggcccagaaaaacaacaggagggggggggcgggggccagcaaaaacaaggacgccgcccccaagcccggccccaccccgggagtgggcccggggagggggccggcccgcgggggggggggcgggcggcggcccgaagactccgccggggggccccggcccggctacccccgtagaatgggcggcgggggggggggccgcccctctgggggggggggggggacaggcccggtctccgcccccggcaacccc

SEQ ID NO: 7858 - DNA, 481 bp, Oryza sativa
  Clone ID: uC-osflcyp083b02a1
ttgtttttttgaattaattggggttattttgcataatccagcatgcatgcacacttacataatactccagattcaagtccagtgcatgtgcatgcagttaattaaacaactccttggttcggatacaaattaaaacactagaacacagtacgtacgtacgtagtagaactcatcacgcacatttttttttgttggctacgtacatagcacagcacgtacgtataatagtacgtataatacgagactaattaatcaagatacgtaggtaattaattaacacggatcgatagcataacacagtaggtcgtacgtaattaattaactgattaattaattacgcggcgaagagagaggggcacacgcgataataatatatcgtcgtcgtccctcctgcgcgcgcattctcgaccggccgccgccgcgcgccggcgtgcacgccggcgatcggtggccggccggcaggccgcgccgccgcgattag

SEQ ID NO: 7859 - DNA, 505 bp, Oryza sativa
  Clone ID: uC-osflcyp083b03a1
gtgtttttttgttttttttgtttttttttttttttttacccatccaagaaaggattctaccccaatatcaatttaaaccgggaaccagagtctgaaatacaagggaatatccttctagctctagatttgaatgaaatattacaattgggttggagcacatcaaatatcatcgactggatcttcttgccccttccatttttcctaccagaggggggaggctgccaatcagtctttcgaagaactggtgcctgggctctttttcccgccatatttttggttcccaacgctgaagggaacatatttggattttatcatgggcacaatctggcgcttcatcggggggacaaaaagaacaacccagtagcagagaagtttcggcccgaagacaggaacctcaaatacagagaagaaaggcatcacaaaagctataagaaaagcttttgtgattgcataccaaaacttgaactcggggaggcgcctgatgaagggcttgaacctcgcggag

SEQ ID NO: 7860 - DNA, 269 bp, Oryza sativa
  Clone ID: uC-osflcyp083b04a1
ggaacacctttttaaggttttttttagcccccccgcaaaaaccggaaccaaacaaaaaggttttcgaggcccgggggcccctaatgggctagtttccccaacagggcccggggaccagagaaatttttaaaccaagtcttagaaacccccgggcggggtgcccagggctaatttgggttccccggcaaaatccggctgaaaaaggaaacccccggggctttaatttagggcatccggtgggccaccccctgggggggcaactttcccct

SEQ ID NO: 7861 - DNA, 368 bp, Oryza sativa
  Clone ID: uC-osflcyp083b05a1
tttgttttttttaaccttagtgaccctctgtgtttcgtaatgtttacggattaattaactgttcacaatacaaatacagttggcacaaaatgtgtcctgcccaaaagcgggaaggcaggaagggaaaaatttgcaggaactaacgtgtggaatcaaagaatcgttgctgcatcctaccgatgataggctgtgttaagaaccaccccggcttctctccatgcatgtgcgcgttcgtgcgtgcgtacgtacgtgttgcctgatttcagaggatcagaagccgtagactatcttgcggaacttctccatgtgctcggccttgaacgagatggccaccgacaggctgccgtcgccgctggcgctggggagca

SEQ ID NO: 7862 - DNA, 515 bp, Oryza sativa
  Clone ID: uC-osflcyp083b07a1
ttttgtttttttatttttttgggacaataatgatgacacaacttttattgaatgcaccaacctagatgctctaccaagagtaatctagtattggcgtataacaacacgcctcgagtccaatatcctgaacaatgtatacatagcactagccaatgctattccctcgcctcaatcctctacttgtgtatagaagcataattccagtccccgcatagataaataatgatacatagaacgaaagtggcaaggaaaaatttcatgcgcaacatgcaaagctaattttcttgggtacttagaacacctgcaaaaacctgaagcttgtcaatttacagcctaccgagctcagatgtgcgcctttaaggggggtaagcttttctctgacgctccatgtttgcacaaaaatgctaatactgaatatactccaacaagagaagatatatgcaacggaaggaggccaatcagaactcagggcatgagtggggtatgtgtttgctgaaaagccaccaagggcacca

SEQ ID NO: 7863 - DNA, 425 bp, Oryza sativa
  Clone ID: uC-osflcyp083b08a1
ttttgtttttttattttttggggtttttttttttttcttttttttttcgaaaaggtgattcagacgctctgggcaaatagcacgtgccaggatgttaaacaaatcccagcttttggcaaaaccaaaattcaatgggcgccggattcaaaactgctctaggcctaatattacatgaggcctttggttttgccggagattttgaatccacgggcccgggctaaccgtaacggaacaatagaccgatggttgaaggggtcctctcgcaacaaccgaaggtcggctcccgagagatcaattccgggcgggttaccacgggccccctattgaaaaaagtaaacggttgaacttgcccttaggaacgaaggtgtttcgttgccgctggactcctgaccacccgggggcttttccccgaggaagctgattaa

SEQ ID NO: 7864 - DNA, 108 bp, Oryza sativa
  Clone ID: uC-osflcyp083b09a1
cccttctagcttttgatatcaatgaaatattgcaattggtctggggcacatcaaaacagctcaagtggatttctttccccctcccatttttgctccaccccagggtcc

SEQ ID NO: 7865 - DNA, 260 bp, Oryza sativa
  Clone ID: uC-osflcyp083b10a1
ttgtttttttattttttttgtttttttttttttttttttttttttttttttttttttttttttttctttctttttttttgggaacttttttcatttttaccaaaggaaaaaaagagggccacccaaaatccccaacaccccacaacatcagcccaagcgtcccccaagcccgaaacaaaaacaaggggggggggggggcaccccttcgccaacaccagcacgcgccccgccgggggctccaaacccacagggagaaaaac

SEQ ID NO: 7866 - DNA, 265 bp, Oryza sativa
  Clone ID: uC-osflcyp083b11a1
ttgtttttttaatttttttgggttcacaacaggatgttgtctagtataggatttttattccatgatcaggaaaaaaaggtttagtgcaactaaagggtaattagcatttcacgggcgttttacagaagtgattttacatgtatatgagcccggcgaaaattttacatgtatatgagcactatatataggacactctttacatgtatgcataactttgtcccttcatacacctcacttgttcatgaaatcgatgcccttctgaatg

SEQ ID NO: 7867 - DNA, 308 bp, Oryza sativa
  Clone ID: uC-osflcyp083b12a1
ttgtttctggagattaaacgttctcaaacgaaattatgcgtttccaaaagaagcccaaaataggctaggttagttactgctacatttttttgctgcagaagactagtaaaatctatctaaatccgtgatgccatggtgcaacaggctggggagcttctgcattatgcggaccaagaactccatgaagcagacggtgcgcagcgcggcgtgctgccccattcgcctgtccagctccttcgcgggcttcagggcggcgagcacataggccgccaggtcacggcgctgctgctcgtgctggctgagctcgc

SEQ ID NO: 7868 - DNA, 523 bp, Oryza sativa
  Clone ID: uC-osflcyp083c01a1
ttgtttttgaaaggaaacacagctcattttttattgatatatgttggatgaatccaataaaaccgatacaagtcacgaaaaatcagactagatgaatccttcgagatcacatgagcaaaagctttcgacgaaagctgtcctatagtcgtggaagcaataacacttgataaagataggaattcagacacgagaggttgcagactataagatgtcatcaaatctccttgaacgccgcgaagagatcaccgttgatgtagtcgttgtccacaagactaaccaagaagtagctcttctggaccttgtctagtatctccctagatgagtcgccctcagggaacaggcaagcccaaccctttgaccaaatttcgaaagcttcgtctttccaaaccataaagctggctgagtcaacgacagttggctggactatttccttgccagggaaaacaccccatgtgaccgcattcacagcgtttgtgggaatgtttgagaatgactctccgtccttgttcacggcaatgtatgt

SEQ ID NO: 7869 - DNA, 479 bp, Oryza sativa
  Clone ID: uC-osflcyp083c03a1
ttgtttttcatcgggaaagaggtaatcacattttgcaaacattgtgtttcatattttgaacagcaaaattcgctgggcatcagcttaggaaatacagagacggatgaacagaacatagaggtgtacagaagaacagcgaccgacatcactgctggttagacgttcttgagcttcttcatcttggatggtggccatctacctttcttcctcagccgcctcttctggacaagcctcctgcgccgctgcctcagcttcttggccagcttcatcttcgccctctgctccatgatcatcttctgcttagtttcgagcggcattgtctcaatcgaaaccgtgggttttggctcctctggttgatctgtgccagcttcttctgcgccagcctctgccgaggcatggacagaaactagcctcttcttggtgaaagaagcattcagagggctctgcgaggagagattcttgcactggagccttggggc

SEQ ID NO: 7870 - DNA, 320 bp, Oryza sativa
  Clone ID: uC-osflcyp083c04a1
ttttgtttttttattttttgtgtttttttttttgtcttttttttgggatgatactggtttgggcacattctgctagggccaaaggtggttatggtaaacggcaagtggggagaactgcgaacagaaagtcatggaagggaaacataaggaaagggccccagccagggatttcccggaaaaggcctttgcatctacaatcacaggcttcaacagtagggatctttcccaccaagcattttcttcggccgaatatatccaggacattttctatacctgaaatgctcacttaatgaaccaagtgatggaacttccgcttgaag

SEQ ID NO: 7871 - DNA, 502 bp, Oryza sativa
  Clone ID: uC-osflcyp083c05a1
ttttgttttttaattctttttgttttaaatttttcctttttttttttttttttttttttttttttttttttttttttttttttttttttttttttttttttttttttctaaaaaaaaaaaaaaaaccaattttttttaaaaaaacccctttttttaaaaaataaccccccccccaaaaaaaaacatttggcccctttttttttggctttttttttttgaggggttttaaaaactaaacctcccccccaaaggggggggggggtttggaccccccctcccccccccaaaaaaaaattttagggcggggttctttttaaaaaagccctttttaaccccaaggggccccccccttttttttttcccaaccccccttatttagtgtggggggcccaaaaaacctcccccattttttcccccccccccctccacacatttttttgccccccctttttaaaaaacctctttttttttgagattctttgaatttttttttcccccccca

SEQ ID NO: 7872 - DNA, 406 bp, Oryza sativa
  Clone ID: uC-osflcyp083c06a1
tttggttttttttttttttggggggggaaacataattttccattgaagtgaaataagaaggaaaagaataaactgagtgcgattacatcatgtctacttatgaaacagggataacaagaattttttttctcaaacacaggaaataccatctaggaaagttacctaattgccacgacttgtcagtcacacgagataatcacaaggcagaaaggagaaaatgaaacaaacggatcgctcattgcctcgacaaagaggccttgctgcagctgccagtaaactaggatccccggaccatgaatgctgtttcgctgaagcaagacgcaacaataataaagcctggcaacttcatcgttcttcttcttcgtcgcctactgatgattagatcacaaaatggagcacgcccccc

SEQ ID NO: 7873 - DNA, 509 bp, Oryza sativa
  Clone ID: uC-osflcyp083c07a1
gcccttttcttttggttctttaaggaaagggggcacaacccacactgacacccactcgataaactccaataactcgacccagccaccgaaaaatcagactagacgaatccttcaagatcacatgagcaaaagctctcgacgaaagctgtcctatacttctggaagcaataacacctcgacaaagataggaatccagacacgagaggttgcagactataagatgtcatcaaatttccttgaacgccgcgaagagatcaccgctgatgtagttgttgcccacacgactaaccaagaagtagctcttttggaccttgtctagtatctccctagatgagtcgccctcagggaacaggcaagcccaaccctttgaccaaatttcgaaagcttcgtctttccaaaccataaagctggctgagtcaacgacaagttggctggactatttccttgccagggaaaacaccccatgtgaccgcattcacagcgtttgtgggaatgtttgagaatgactc

SEQ ID NO: 7874 - DNA, 202 bp, Oryza sativa
  Clone ID: uC-osflcyp083c08a1
ttttgtttttttttttttttgttttttctattttgcaaacattgtgtctcatatcccgacagcaaactccgctgggcatcacctcaggaaataccgcgcctgctgtcccagaacatagaggtgcacagaagaacagcgaccgacatcactgctggttagacgttcttgagcttcttcactttggatggtggccatttacctt

SEQ ID NO: 7875 - DNA, 423 bp, Oryza sativa
  Clone ID: uC-osflcyp083c09a1
ttttgttgtttacagagaacggacgcatataatctgaataacatgtaaccagcagcgcctcatcttcgccggcaagcagctcgaggatggccgcaccctcgccgactacaacatccagaaggagtccaccctccacctcgtgctccggctccgcggcggcgccaagaagcgcaagaagaagacgtacaccaagcccaagaagatcaagcacaagcacaagaaggtgaagctcgccgtgctccagttctacaaggtggacgacgccaccggcaaggccaccaggctcaggaaggagtgccccaacaacgactgcggcgcgggcaccttcatggccaaccacttcgatcgccactactgcggcaagtgcgggctcacctacgtctacaaccagaaggcctaggttgatgcgagcagcatcaagca

SEQ ID NO: 7876 - DNA, 414 bp, Oryza sativa
  Clone ID: uC-osflcyp083c11a1
ttgttttttgattttttttgtttttttttttttttttttttttttttttttttttttttttttttttttttttttttttttttttttttttttttccatagaaaaaagggtaaaggggggcccttttgggcccccctttttgtcccgggtttccaaaggaccccccccccccaaaaaaaaaatttttgggggctttgcatggcccctttttgttggggggggggtttttccaggcccttacccccccggggggttttaccctttggaggctaaattttttttttggggggaaaaaaaaccccctgtttggggggaaacaggggggggttaaaatttaggaaccccccccggggaattcccccacggccccccttggggggggggccccaaaaaaacccccggcccttttttttt

SEQ ID NO: 7877 - DNA, 398 bp, Oryza sativa
  Clone ID: uC-osflcyp083c12a1
ttgttttttaattctttttgttttaaaaactttttttttttcccaagggaagacaagacatgataaacttttaaagaaatttacaactgcacttaacactgatgatgtggtgaaaggtaaatctttacagtacaacccctttacaaaggaagtagagttgaaaggaacagggaagactgcaaatccatctccatgtagtcgtttttttaagatggaactacaaccagccttttttacaccaaaggaaaaacagagcctaaaatctagctgactgaagtaacaagacctataccccttttggcaacatcacaagtcgcaacggaagcttttaactggccagcttatggatcaactgaagagctcagatggtttccctcaggaccaggttgtttcctaaa

SEQ ID NO: 7878 - DNA, 481 bp, Oryza sativa
  Clone ID: uC-osflcyp083d01a1
ttgtttttttttttttttgtgttttttttttttttttttttttttttttttttttttttttttttttttttttttttctttggttcaaagggcctaacatccaaacaaaatttagctgccccgggcccttgggtaatacccccccaagaactttgaaacccaaacaagggctttgtcccccttttagggcacccccccaaatggggggggataccttaacccttgaagccttggggggtcccccttcctttgggcttttaaaacttccttccctttgggccccccaaagggttggggttcttggggggccccccaggggcaggaccaaaggggttcactgttccccgggggttcttaggacccctaaggaaaaccgtgttctggcccaaagggggccggagccccaccttaccaaaggtaagggcctcccccccagttttcacattgggggcccttcggggtttggggaaccggggggggg

SEQ ID NO: 7879 - DNA, 482 bp, Oryza sativa
  Clone ID: uC-osflcyp083d02a1
ttgttttttatttaggttgagatccaacttattcataaagcatactgctgtcccacaggaaactgtttcataaaactaacatatcatacggactcgatggtccattaaaccagacacaagtagacatcagcaccacaaatacttgacgaacagaggctcgggatgaccaggcacatcggcagctccaccaaactggctgattactgaccaccacggaggcggagcaccaggtggagggtggactccttctggatgttgtagtcggcgagggtgcgtccatcctccagctgcttgccagcgaagatcagacgctgctggtctgggggaatcccctccttgtcctggatcttggccttcacattatcaatggtgtcggagctctcaacctccaaagtgatggtcttcccagtcaaggtcttcacgaagatctgcataccaccacggagacgaagcaccaggtggagggtagactccttctggat

SEQ ID NO: 7880 - DNA, 499 bp, Oryza sativa
  Clone ID: uC-osflcyp083d04a1
ttttgtttttttatttttttgggttttaaatgaagagccacccaatccacatattacattataatcataattatgaatactttccttgaagagcatcattacacaaaatcctttgcctcccctcttgcatgctcaagaaaaacctaccaattttctcctccctacccttaacaaccaaaaccagccccacctaacacattggcaaaggaccattttgccatttggtaatccctttaccaccaacagctacaagaaagagcaaatatccctgtcccctacagcaggcaattaagattgaattgcatacattaacagtgacaacaatggccctacatgattgaaacattacttgatggcttctggtcctacccacactaccacaacaacccttttgttatttctagatcagaagcactggtactggtacaagtctatgggtggctggttccatgagctggcaccaaaaatatcacaagcacttgtagtggtggctggaatt

SEQ ID NO: 7881 - DNA, 347 bp, Oryza sativa
  Clone ID: uC-osflcyp083d05a1
ttttgttttttgatttttttgtttttttatttttttttttttttttttttttttttttttttttttttttttttttttaggccaaggggtttgcccttaaaatttgggcgttttcgaattatttttaccccccttttaaaaacccggaccctggtgggcttatgttttaccccaaaattggggggttgggccccacattgggcccaccgggggaaggaaaccccgacaggaggggtattagcaaaggggggatggcccaagaacacttgtgggaatggttaaagggggaaacctaatctttttccagagaaacccggggaacctaattcccggggtttggggaaaga

SEQ ID NO: 7882 - DNA, 504 bp, Oryza sativa
  Clone ID: uC-osflcyp083d07a1
tttggtttttatatacgaatggggtactgataccacctcacttctcaatttcagtccaatcacgacattcacagatcggcgaagatcaaacgcacacagttacaccaatcgaaattaaaccatgtttcactttcttagcacctcatttttcctgtttcctaaactcatctgtacattcacctctaaacaaacctgtatacaaacacaacatcaatcatctggtaagagaaggcgaaattcgcgggcctgacaggagagctttttcacttgttacactaggacagctttgttaatctttgtactggttccatgccgtttctccagacagccagagattagtttagtcattacacttttgccttggttgatggaagaaaataagctattatctcaggtttttgggatggtacgcgaagaaactccatgcaattgtttcatgaacccaaggaagctgagttttcatcaggatgtctgatccaatcttggagaacacatgtaggggaa

SEQ ID NO: 7883 - DNA, 527 bp, Oryza sativa
  Clone ID: uC-osflcyp083d08a1
tttgttttttttttttttttgtttttttttttttttttgatagggccaacatttaactgatgacaaatggacaaattacatgagaagatctgaattttttgattatgccaccacaaagtaagttccaattttggtaccaataacaaatggaatgccagacctatgtcagaatagatgtacaattacgatggcattcttgggtaaatgggagcaaagaataattagcatttctcacatgaaaaactgaggcaaatttttgcaattttgccactagccccgaaggagcacagttcgcaatccagtaccctggggcaattttaaatacgatccctcagtctgatcattggtgaaataattcacttctattgacccttattttggctgattgcccctctggttcaacatcgttaacaactccacgggattttgggaatccacaataacaaggaaggcgctgatcactcgaaacaaacctataatcataagtcaactcttcccatggatttatatcccgctttgcaaaaatg

SEQ ID NO: 7884 - DNA, 258 bp, Oryza sativa
  Clone ID: uC-osflcyp083d09a1
ttgttttttttaatggtttgtgttttttttttttttatcctatatatttttaatcattcttttttttttcacataaaaaacccttatttggggggattccacaccaaaactaccagcaagcgatgctgaccaccgcttttcttcccaagggagggtttctgcatgctgttttccttggaattccggcacacatatgttgcccattgtaccactcgctcataaattctttccacagacaacacgagatcagcctgattg

SEQ ID NO: 7885 - DNA, 466 bp, Oryza sativa
  Clone ID: uC-osflcyp083d10a1
ttgttttgtaataaatatgggcagtagctcaattcaggcaatcaagacaacatgtaaggagccgaacacatcggcaacctgaataacaagtggcaacctgaataataacaagttaagtttatgcagtataagaactgaaccttggatctaataacaacaacaacatggccatgggacacgaaaaggtttcacctttgcggccacagctcacaccgcggagggctcctcgacatctctgccccttccgccgacgccagcggcgctgtggtgcggcaggtcaacgccagtggcgccctcgggtatcagggacgcggggcggttctcaattaccttggcgatgagcccccaatcgcgcgcctcctcggggtccatgaagaggtcgcgctccatgcactgctcgatcttgtcgatctcctggccggtgtgcttctggtagatctttgtgaggcggtcgcgcaacttgaga

SEQ ID NO: 7886 - DNA, 358 bp, Oryza sativa
  Clone ID: uC-osflcyp083d11a1
ttgtttttagcatgagaatggaaggcaaaccatgccagtaattggaattggaaagttgtatgaggaacatccatcatacatccatacaggtaaaggtaaagcaaccactgtatataagtatatattccttcaactaacaacccaacccaagccatcccaaaagcacaccgcggcagttccagttcaccccttgtggatcaaaagagctagagcaacagcacaaggcaaacggcctaaattactaaatagatagaatatacgaatacgaccccaaaatggctccagtctccgtcttcttcccctctacagccaggcaaccagccattcatccatcttcattcaggcttcagcgcgggta

SEQ ID NO: 7887 - DNA, 284 bp, Oryza sativa
  Clone ID: uC-osflcyp083d12a1
ttgttttttgattttttttgttttttaatctttttttttttaaaatttttttttttttttttttttttttttttttttttttttttttctctcttttaatctaaccacttcttcaaaaaatttctacccacaaaacaccaaccacaaacaccaaaaaaaaaaaagaacgggaaaaaaccacaccaccccccgtaattccacaaaccaaagacccaacaaaaggccaaactcgcaaaacaaaccaaaaaaatggagccccaaaatcccaccccccccaaggcccc

SEQ ID NO: 7888 - DNA, 524 bp, Oryza sativa
  unsure (1)..(524): unsure at all n locations
  Clone ID: uC-osflcyp083e01a1
ttgttttatcattcgaatcaggctttctccaattgacaagggctacgacactggcattgacaagaaatcttcaagtggtttgcacaagacaaacatacaggaactgggattctgtggggtgctgcaatgaagcagctgctttgccttttattactactactaaatactaatatttggaaccaggtttgatgaattattctactgtacctagtgagtttgaactatgaccagtacgctgtcaaagcagcagcatttgccgtttctcctttcagtttcttatcaagaggagctgaatagtaacggcaactggaagcttaatgcaggttactgaagaagcaaatgccctttgtcaaatttacagatcaatgtagacgcgcaatccatcacgggctaactgcacatntatnccctcccttctggaccactcttccaacgtttcattgtccttgtgatggcccttttatgagtcatnccatgagcaatgccttttgggcaatcctcttacagcatcagtgctgatccac

SEQ ID NO: 7889 - DNA, 431 bp, Oryza sativa
  Clone ID: uC-osflcyp083e03a1
tggttttttttttttttttgtttttttttttttttttttttttttttggcaaataagggggaaattttccaagcacagttggacaccacgcatacataatacaacattattagtaactggtccaaaatgtcaagagacaacacacggtttaaccgctggatcattgcacacatcaaggggtttggtaaatgaaatgaagttcttgggttgatcgatagtaatgcatgcccatgccggtaagtaacacgagcactggaatttattcgccggcttgttatctaaatcgagcgatgatccggtgtccgggggccggccggccggaaacaagcaggccgccggcggcgggggcggcggtcgcaattatatattaacccaggcgcaggtcgtggttgcccccctaggccatgccctgcaggttgggctggctgggc

SEQ ID NO: 7890 - DNA, 384 bp, Oryza sativa
  Clone ID: uC-osflcyp083e04a1
ttttgttttttgaatgtttttgttttctaccaaacaccttccttcagtaatttgacagccgttccaggtccaccacaaatctcgctatagtgaccctgtttatcccacttcccatgggaacaaatgaaatcgagttgaaacttctcaaatctaacgaaagttgacattgaggggtacggcccaataattgccgggcagtgacctgcccggagaacaaggaactgcaacttactcatcattacccgtagccggagttgtccatcgggttgcttacgggcgcaggctcaggctcctttatgtttacgaccaccacctccgatgtgaggaatgttttggacaccgtcgcagactgctcaagacaacatcttaccaccttagtggggc

SEQ ID NO: 7891 - DNA, 472 bp, Oryza sativa
  unsure (1)..(472): unsure at all n locations
  Clone ID: uC-osflcyp083e05a1
gagcaactagataaatgatatgactggcttttggttgaacaatggatggcacaaagcctgtcactgtgttctaacatatatctcctgaaatgctaggcacctagacaaatctaattaccctgctggcctgctacattgagtcactcactcaactaacctaggatatgcagctaaaattaaatatgcctcatctgaaataaaagaacatgaggcggtatttaatggcagtggtaaccacaactgccaaactccagctaaaactatgaaatgtagacaattacatttgacaaaatccagatgtttgaacaaaaccttctctactaaggccatacctaccatatacgcttngcggatttgctgaagcaggaggttcagctgaagaagaacaggccctgtctggatatcttcctctatgtacattgccgggcaggtgagccggcatggaagaatctgagacaaagcctgtgttctc

SEQ ID NO: 7892 - DNA, 402 bp, Oryza sativa
  Clone ID: uC-osflcyp083e06a1
ttgttctttgataccttttgttttttacctttttttttaaacctgaccgtgataactgttaaaccaataagaaaaccatgaaaaacatttcaattcctgcaggggctgaggagccggatggcggaggagtccaaggagacggtggcgcggctattctacccggtgacgggggagaaagcccaggagagcccgggggaagccctcatctcgtcgggggagagcgagaccttccttcaaaaggggatccaggaacaagggggcggccaggtgctcaacaccatttccgagatccatgagcggtacgaccccccgaaggaaaacgagcgcggcctgttcaaccttccaccaggggtcccctcacatggggggcctcgtcgaggcccagggcccccctcttaacca

SEQ ID NO: 7893 - DNA, 419 bp, Oryza sativa
  Clone ID: uC-osflcyp083e07a1
ttgttttatgaagcgaatggggctttatccaattgacaaggtctacgacactggcgttgacaagaaatcttcaagtggtttgcacaagacaaacatacaggaactgggattctgaggggtgctgcaatgaagcagctgctacggcttttattactactactaaatactaatatttggaaccaggattgaagaattattctactgcacctagagagtttgaactatgaccagttcgctgccaaagcaggagaacccgccgttactcctttgagttccatatcaagcggttgctaataatcacggcacctggcgattaaccgattggcccggtccaatgaaatgccaagggtgccaaaacccccttaagggtgaatacaccaagcccttaaaacttgctggacatcaatctgagatttgag

SEQ ID NO: 7894 - DNA, 455 bp, Oryza sativa
  Clone ID: uC-osflcyp083e08a1
tttgttttgtgtatatagccggagctttgttttcacatatcctcacccaacgataattgtagtactcttacaataaaaccggtcggagagggagggaagagattattacatatgtgttaagagcagaggccattgagatggtacataaccaaattgtaaaataaaaatatatagcatattatatattgatatatcatcaacatagcccaaaacaaagctgcatactattattataggcagcaatccaccagcgcgatgcttgatcttagcttagttgccaccagactcctcgcaacctgggggcttgtaggcgatgaagctaattaactgcacctgcctgacgttgtcgaagccgatgatacggacaaaggcatcggggtaggccttcttggcctcctcgagctccttgagcacctgggtggcatcggtgcagcccaacatgggcagctttcaca

SEQ ID NO: 7895 - DNA, 449 bp, Oryza sativa
  Clone ID: uC-osflcyp083e09a1
tttgtttttggacaagcaaggggtatatatattcatccatttctcaaactactacaagaggtcgagaggaacacataatcaggagggattgcgacaatttacagcaacaggagtctggagatcgaggcaagaacaagacaggcagcagcagagctaccctcttcatttccactgaatttttacacatttggaatccatggaaaccgagccttccctcccgtcgtcgtggtgtcaccggagtccgatgagaaaaatggtcatggcgtgctcataatccggatcgctcgccggcgtcggtgaaggaggcggggcgattgttcgggcggctgttgaggagtgggttcagagccttgacgacgatgctcatgttgggcctgaagtccgcctcgtactgcacgcacagcgcagctacggcagccatcttggcaacagccttgggaggataatcc

SEQ ID NO: 7896 - DNA, 433 bp, Oryza sativa
  Clone ID: uC-osflcyp083e11a1
ttgttttttgattttttttgttttttatttttttttttaaacccgaccgggataactggtaaaccaataagaaaacgatgaaaaacaatgcaatacctgcaggggctgaggagtcggatggcggaggagtacaaggagaccggggcgcggccatacttcacggggaccggggagaaagcccaggagagcaccggggaagccctcatctcgtcgggggagagcgagaccttcctgcaaaaggggatccaggaacaagggggcggccaggggctcgacaccatttccgagatccaggagcggcaccaccccctgaaggagatcgagggcgggctggtcgacctccaccaggggttcctccacatgggggcgctcgtcgagggccaggggcaccagcttaacgacattgagaggcacgtcgggcgcgccaacttct

SEQ ID NO: 7897 - DNA, 528 bp, Oryza sativa
  unsure (1)..(528): unsure at all n locations
  Clone ID: uC-osflcyp083e12a1
ttggtttttgaatttttttgtttttaacacaangggcgatcataaattagccatcactcaggaagcacaagccatgagcacttgttgcctcacttgtactagagtgtctactacagtagtatatagtatacaaaagaggaacttggaatttaaatagtagaaatacaggaggagcatcatctatctggcagtagaaatccccagaacaaatcaccagcatggcctactcttcgcctaaagactctcacttgtactaacaacgatgcacacacgcttggcctggccaggggtactctggattctagtccttactacttattatcctgcctagtgtatcatcgttactggagttgccttgccagggtgctgcgccatgacacaactccattggcttttctcaaactcctagctcttctgtactcgatctctgcatccgagcatgactgtccacccccaactttctttctcacttttatgggttttagagatatttcatccctcccctttctgaatggatggcaatctttc

SEQ ID NO: 7898 - DNA, 390 bp, Oryza sativa
  unsure (1)..(390): unsure at all n locations
  Clone ID: uC-osflcyp083f01a1
ttgtttttttttttttttttgttttttttttttttttttttttttttttttttttttttttttttttttttttttttttttggttttaaaaaaagagagctggcccaatcttggggtggaaatcgtccttgccccccctcccatggtgtttatttatccaacgggggataaggcccacctaaaaattggtgggggaaacgggggttttaatttttttattggtgnnncaccttttggtgaatgggggggtcactccgggccacaatttgaggtgatttttggaaacgaaaaatgaataaccccggccccccaagggctggggtaattttttgatctcaagggggggctttaaggaggaaccggggggggttccgccccccccccgccccc

SEQ ID NO: 7899 - DNA, 383 bp, Oryza sativa
  Clone ID: uC-osflcyp083f02a1
ttgtttttttttttttttgggggccaaagggggccaggtaattatttttattaaatctgggggtggattccattttattaggcaagacaaattttggccccaagggttccaggtccaacccctccaaaagggatgggttcattagaagccattgggggccctttttttgggattgtgacccccacttgttcccaattaattattattgcccagacaagggttgggacctggacctggaagcaacatggttattgtttggccttccaaaaggtaaccaaattcctccaaaccaaaagcttttagtggttcctccattgcctttgaaaaatggccattggaggggcttgcccctaaaaggacctttgggctgtttgcaagtcttg

SEQ ID NO: 7900 - DNA, 442 bp, Oryza sativa
  Clone ID: uC-osflcyp083f03a1
ttgtttttttattttttttggtggcacaagaccatcaaaatttcaattttcaggtacaatgctaataagattttgcacaacagacgatgtccttgaggacggcagtacaacaagaatatggtcatgctgttgcaaaaaagaacagaaaaactcccctgttattcacctttagggagggagtcaggacggtaaatctacttacgacatgcacgccaatgtgctggtgacaatttacatgtctccaggaattaacacctgctggaaaagcctacagctgggcttcagggatcagtcatgcttgcacatctacatttggtcccagtcaatagaactggtgttttcaaaattataacttggttgctgtagacggttgcgacccaatcggctcatcatggcaagtccttccatgactttgtatagcgatgaccaccacctatcagat

SEQ ID NO: 7901 - DNA, 441 bp, Oryza sativa
  Clone ID: uC-osflcyp083f04a1
tttggggttttgatttttttgtgttttttatgggccaatatacatcttggtttatgcttggcatgataagagggttgaattgaatacagtactgaggccccgacaagggaacgatacaatgcagtcttccatatgtaccataccttgatgcatcctggggaatttgaaccctcctcacccacaggatggggctatgtatttacaagggtgggtaaactaactcccccattattatcctaacttcctgaccaagacatttgtccgttcagttctccatataattgggtccttcacttcaccctctcgttctgatgatggttatggggccctttcctgccgtcctgatccttgtgaggctaacaactgctttgccggacaggcctagtccatgagcgtacacagcagggctgcacgcgaactggccgactgggtgccggaccg

SEQ ID NO: 7902 - DNA, 384 bp, Oryza sativa
  Clone ID: uC-osflcyp083f05a1
ttttgttttttgaatcttttggggtataactctttttttttttttttttagggaaaaaacacccagtttatccccttttggggaggagaaataaagaaccgacttcatggaattaccctacaaggtacttacattttaccgggtaatttttacttttttatccaagcaacaatgagcttaaattgccctcttggttgggaccccaattaacccaacccaggtttgcccttcttggttggtcgatgctttggaggtttgagctcctaccagaagcacacgggccaccacccggggggccccggggccgggggggccccccccgagagggggccctagaggcccaagggggccccccggcggtgggttttccggcggggggagacc

SEQ ID NO: 7903 - DNA, 507 bp, Oryza sativa
  unsure (1)..(507): unsure at all n locations
  Clone ID: uC-osflcyp083f07a1
ttttgtttgtgacaactgaacgaaatttatatctgaatagtatatttgcaagttngaggtatataaacaatgtattcatcccctcgccgaaaccaatgaacactttctacttctgtaacaccgactacagaaaagtatgccatgacgaacacaaaattaataactaatcaattatttctagaatgtgatacaaatgattcggtatatttgtatgatgttatgctcttactattgaatgtctaacttgcctatggaaaatttctaccaggtgccactacttaagaagattcagaagactgtcttgggagatattatctcaaaatcaaccgcgaacaagatcttgagggagcacccagaaattatctcaaaactgtagcagctctgcatgcgtctctctgcttggtagctgcttgtcttggtgttggtggactattcatcatcagagatctctgcacttnctgccacccactttcaaacacccccagatttttgtctttgagcagttgt

SEQ ID NO: 7904 - DNA, 465 bp, Oryza sativa
  unsure (1)..(465): unsure at all n locations
  Clone ID: uC-osflcyp083f08a1
tttggtttctttacaagaggggatcatattgcaatcccaatattttaagaaaacacaaataggaactgaaatccagatccacacaatgctgaagtaactgaactgccgtttaacaaagataaagacagacttccccacaggttcaagttccaaaacacaccaagtacatactacatcacttgcagtctcagatataagatgccaaccaagttaagaaacgacgccgtcgctcagggtgagagcagctagctgatcagttggggtatttgcctgctgctgctgagcattacggagaacttccatagcctcagcgaccttggccttaagagcatcaggtgactcaatgagatggagaacttcagtctggtccatctccaagagcatgccagtgaccttcgctgcctgatcatgctccagctgatcacaagcgggataaacttnaccaagatcagtctttgtgatctg

SEQ ID NO: 7905 - DNA, 381 bp, Oryza sativa
  Clone ID: uC-osflcyp083f09a1
tttgggttttgataaaagtggggggcagacatcaaaaaaaaaggaatggcaaaccccttacaagaataaacaacacctttggaagaatggaaaacaagacctcaatcctgcatggtttgtacgtacggcattatccattgacaaattatgtgtagcacaccaaacggaataaacgaatcacagccttggtcaaataatgtcaacgattgatcgatctcttgcacatgggaagatcggacggcggaggcatcagcttttggtcaggcaacgggccgtttttgaccacacatgccatcttcaacccccaggttgtgtgaacctccaggcggtaatgcatgaaccagtcacctgggttatacgcgaagaacctgatggcgaccc

SEQ ID NO: 7906 - DNA, 413 bp, Oryza sativa
  Clone ID: uC-osflcyp083f10a1
ttgttttttgaatttttttttttttttttttttctttttttttttcttttaaatttttttttttttttttccccttcacccacaaaaaacaaacaaaaaaacaaaaaaaaaaaaaaccccacgccaaacgaacaaccagcccccgaagaaaggcagaaaaaacggacaaaccaggggaaggaatccccgaaggaggggaggcatcaaggcccgggcgagatcggcccaaccacaccccggggggggccccgaaggaaccccccgggaccccaacgccagctgccccatgccgggcaaagaagggggcccgcggggggggggccccgggggccccccacgggagctccgggcgggggccaggacacccccccggaaacgggaggcccccggcggaggcccgagcgacccccccc

SEQ ID NO: 7907 - DNA, 285 bp, Oryza sativa
  Clone ID: uC-osflcyp083f11a1
tatcagctcatggctgcatgcagattcatttcaatgcagtacaggcatggcacagcgagagccatgagttcttacatttcctcttttcataatccactaatcgcattcgcatggcagtctttaattagtcaagcgagtccacatgtggcatacgcaggtgcgatttattattaattagcgcggataattacttcattagtacttaatcagagcgagggggagcacccggaggcgcaagacaagacgtcactggtgcaggcgatgacccataacgggatcgccctc

SEQ ID NO: 7908 - DNA, 431 bp, Oryza sativa
  Clone ID: uC-osflcyp083g01a1
ttgttttttgattttttttgttttttaccttttttttttttttttttttttttttttttttttttttttttttttttttttttttttttttttttttttttgggggggaaaaaaaaagccccccatttttttatctttccccttccaccggatgattggcccccgctaaaccccgggggtcccttttttttttccccccccaaaaaaaacttcccccccaacccaaaatgcccccccccagggttaatgacccccctaccccccccccccccccctaaaaaaatcctccctaatccccccccaaaaccccgccttttttttcaccggtccccccccctaacaaggtattaatcccccttatccccccccagggccacctacccctactcctttacccaatccccccccttttggtccccaccccccccccc

SEQ ID NO: 7909 - DNA, 321 bp, Oryza sativa
  Clone ID: uC-osflcyp083g03a1
ttgtttttttttttttttttgttttttttttttttttttttttttttttttttttttttttttttttttttttttttgggcccaaaaaaagttttttttggaacggggaaacattaattcccccccttttggaaaggtcagggaagcatccctttttaggttttttcccctccctaagccctaaaaaatagagggaactgggtggaacccttgcccaattggatggttttttcaaagatttttggccccctggggggatgaaagggggctttcccctttttggggggccctgggaggggcgggaaaaccctcccagggggg

SEQ ID NO: 7910 - DNA, 519 bp, Oryza sativa
  Clone ID: uC-osflcyp083g04a1
ttttgttgttttaaggattcagctgccaacacagtttgtttcacatataagaaagtagtgcataaaaaagggacctagaatacaaatgtggaccaaaactgcacaaaaacagtaacgaaaaggtgatcattacaatcttaaaatctggaaacaattgtgaacgatatctgaaagatggcaagttccacattataagctgaatcaaaaacatcaccggcatcccacatccatatttacattctttgaatcgaacacatcatcagatgaatccctcggcattctctggcttctttggagttttggtactgttcacatcagtagtggccgtgcagacaggaatcgttgcagggcttcctgggatatgggttttcgacaattcgctgtacgggttcctgtgcttttcacttttcgcggccatcgtgaaacttccaggtatatcggccttaggtaaatcagcctcctgatgcttatgctccttcccggttatttgggcattttcttgcgcatgggctgttggga

SEQ ID NO: 7911 - DNA, 452 bp, Oryza sativa
  Clone ID: uC-osflcyp083g05a1
tttgtttgttgagaatgttagcgggcattgcagacacttttcttcatgtgctactcattaagttatcccgaatacaccgggagcttaatcgccatagcatcccaaagagcaagaaccttggcccattacgagtccggtcagtcctgatacacccagattgattgttgcttgaagagaaccacaagcacggatcttacatccggtttgccttactactgccctggcgaagccccagaatgctgagcacagggcataacagcacacttatgtggtccagatgctttgatttggcctggcctggtcacgtgtggcagactactgcttcaggtccaagcctggtggctactgactgcacactggtgcccgatgggcgctgaccttctcccagatatgccgttccgaaccctttggatcttgctagtaggatgtccaaagaaggtacagcctcagtt

SEQ ID NO: 7912 - DNA, 416 bp, Oryza sativa
  Clone ID: uC-osflcyp083g06a1
tttggttttttgatttttttgtttttcaaaccttttttttttttttttttttttttttttttttttttttttttatttaattcttttttttcaacccaaacaaaaaaaacaaccaccacacacccccaaaacaaaacacccaaccaaaaaaaaaaaaacccaaacacacccccaaaaaaaaaacccccccacaccacacccaccaacaaacaccccccccaaccaaccacccccaacaaaacccacccccccccccccccccccccccccacccccagccccccccccccccccccacccgaccacaaaaaaaaccccacaccccccccgcaccgccctcccccacccacccaccccccccccccccccccaccccaaacccccaaacacccaccaaccacccccccccccccccc

SEQ ID NO: 7913 - DNA, 304 bp, Oryza sativa
  Clone ID: uC-osflcyp083g07a1
gaaattattctttttttttttttttttttttttttttttttttttcctcctcagtttttttttcctttaacggtcaaaaggacaacaccccctttttcaaacattccccccgcgcccccgacaccccccccccacccccaggcggagaccccaaccccgaccccccccgggaaccccggcatcccagcccaaaaccggccaaccttcagagttgttcccacagggtgcccccactaccccccgggtaaatcatggtcctacctcccccccccaacataaaatacttccccacccatcacccccc

SEQ ID NO: 7914 - DNA, 411 bp, Oryza sativa
  Clone ID: uC-osflcyp083g08a1
tttggttttttttttttttttgtttttttttttttttttttttttttttttttttttttttttttttttttttttttttttttttttttttttcccaaatccattccctttaacttttgggtataccccaagccatgccaggggaaaaaaaatctcctttccgcttgaggccccgacctttctttgaaaccagggggggggattgcccatttttgttttttccaaaagggccccaaaaaagggttggccccaaaggggctttaaaattaacccctccccttttacccgcccttgaaaagggttccctcccaggggggtttaaggccccttttttctaaattttccccccaggtttttcctttgttgtggggggggcttgacaaaaaaatccccataaaatgggggggcttt

SEQ ID NO: 7915 - DNA, 145 bp, Oryza sativa
  Clone ID: uC-osflcyp083g09a1
tttttatacaaaaccaggaggattaaacgttctcctcatctctttgttagaagtgaaaaaaagaatattatgatccaggaaaactttgtcacatgccttcatgtaaaacaccaggaagctgctgccgtcataagcgccccactct

SEQ ID NO: 7916 - DNA, 428 bp, Oryza sativa
  Clone ID: uC-osflcyp083g11a1
aataaccaacatatatcatgggggaaccaataatacaataacagaccttactccaaattacaaccaggtgcccaaagcgtagaacagcatcatatcatgcgtccggcaatgagaagttccagggagaagccacatagcatcgagaaacaccacaaaagaagagaccaagctattgactgtatgtcggcatggtttggagctgtatgaaatgcctcacgatgttgggcgtagggacacccacacgcccaattgaatttgcccaatggagacctcaagcggaccccttgagcttattcgtgatgcctgcgaagtacttcccctggtggaaggcgtgctccagctccatttccgtcggtcacctcaagccgtcggctggaaaggtgccggcgccgtacgggctagcccccctgaacttatgccatgttaaa

SEQ ID NO: 7917 - DNA, 236 bp, Oryza sativa
  Clone ID: uC-osflcyp083h01a1
agagagagaatcaacgtggcagaaaatttttcatccattatttctccatcttgcattccgcaagaagaccgctagttagggggaaaagagtaaaaaaaagaccaaaaacgatcacaacacgtcgtcgtacttcaacacgtacgtacggtactccactagaacgtaaaacctctctagaagagggaaaccggaccatatatttggtagcactttacaactagggctgttcagatcag

SEQ ID NO: 7918 - DNA, 342 bp, Oryza sativa
  Clone ID: uC-osflcyp083h03a1
ttgttttttgtagatgatttggccagcaaccctatgcaatggacactaattcagaacaaacccagtactgaagccacaaacgggcttttccttcagtaaaggtcaaaaaccccatacactgctaatctgcgaactattattgtacagaagggaaaaaaacaatttctacattctagacagaagggaaggaatgggggttgctggtgttgtttaagcctatagaatcaggagcaacagcaaaaagaagacaatattttacatgtaatttggccactctacgtctcaacctcatttggataacaaaaatgcctcaaaaataagccgcacaaggagctggtagtt

SEQ ID NO: 7919 - DNA, 346 bp, Oryza sativa
  Clone ID: uC-osflcyp083h04a1
atcaaataacaagtgggctaagcccatataggcccaccaatcgaacacagcaaccacccatatagcacaaaggttacaacccaattagcatctaacacgacccgacaaacatccaatacaacacaaattttacaacacagttaacagccaaatccagccacattccaaatacaatcacagcaaccaaaatttcaccggatgtcgcgcgaccaagatcttcaaagtgagcttagcagcacgatgtcattgtagtggcagtattcaggatcatcagcacaaactgctattatcttgtcatccttctcaccctaatccatccattatcctcagttaaaaagaaagtgtt

SEQ ID NO: 7920 - DNA, 457 bp, Oryza sativa
  Clone ID: uC-osflcyp083h05a1
agtttccataggaggtttactggctggacggacatacatgtataaaccagttccaagttccagccattttgcaactaatgcaaaacctatatgagaaagacctatagaattaccgggttcacaggagacgcttccaccatggaagcagagggatgaccatggtgaactttaaaagcttaaggtgctctttctttaaacgctacaagtttattcttcagtactctcagtagtaccaattcgagccgtcattcttctgctggccctgcattgcgccggggtattcgacggcacctgacatgttgaaaccagagccgaacctgaactccgatgcaccattgatgtcgcccatctggttaccgaatggagtatcgtcgcggatgaagaactgctgctgcgccggggtggtctgctgcggttgctgcatcatgccattgacatcttcgaacacaccttcgtt

SEQ ID NO: 7921 - DNA, 276 bp, Oryza sativa
  unsure (1)..(276): unsure at all n locations
  Clone ID: uC-osflcyp083h07a1
agagagagaccccncacatggaaaggtacagcataggtagcaccgtatcaccatcacaacacacaactttagataagctgacatttcatccagacttttcgtttcatatgtgtgcagcgaacttgtcaagtacagcggcaaatcaagagcgtcttcctctcattttcacgggaagggcgcgtggcgcttcatctcggtggcggtgaccgtcgatggcgaacccccttgccgtgtaggcccccagtagtcggcgttcgggttgatccactccggttt

SEQ ID NO: 7922 - DNA, 165 bp, Oryza sativa
  unsure (1)..(165): unsure at all n locations
  Clone ID: uC-osflcyp083h08a1
cccccttttttttttttttttttttttttttttttttttttttttttttttttttttttttttcttttttttttatatatccacacactctttttctttaaactttttctataaaaataaaaaatacccaccccaaatacactcttcccttaacatnataacaac

SEQ ID NO: 7923 - DNA, 175 bp, Oryza sativa
  Clone ID: uC-osflcyp083h09a1
ccccccactttttctctattaggacaaaccctttttttttttcccaaacctacctcttccctcagtaaaggtcaaaacccccatacactgctaatctgcgaactattattgctcataatggaaaaaaacaatttctacattctagacagaagggaaggaatgggggttgttggtc

SEQ ID NO: 7924 - DNA, 456 bp, Oryza sativa
  Clone ID: uC-osflcyp083h11a1
tcaagcccacaacaagtttaaaccgaacagaaaatagagagttttaaacgacacagtgcacacagcgggcatatgataataacggtcaatgcaacgagtgccatggccgtgcacaaaacttaacgaattagtaaaagctagatatcttaaatgcagacacgcaaaccaccacttgaacgaggatcatttcttcttggcggcagccttggtcaccttggcaccggttgggtccttcttctccacgttcttgatgacgccaacagccaccgtttgcctcatgtcacgcaccgcaaaacgaccaagaggagggtactcagagaaggtctccacaaccatgggcttggtgggaatcatcttaaccataccagcatcaccgttcttgaggaacttgggctccttctccagctccttaccagatcgtctgtcaatcttggtcaccagctcagcaaacttgac

SEQ ID NO: 7925 - DNA, 434 bp, Oryza sativa
  unsure (1)..(434): unsure at all n locations
  Clone ID: uC-osflcyp083h12a1
ccccagcccccaacccaantcttcaattcaaaaagactgcccaaacagaccaagggtttcatcataacaacaaatttttttaacacgcaacatcaaagagacacttatgcaataagataacttgaagcgcggatcacttgcaaatttcgcgcttaggcgacctcctcgatcttggggccagcaccgctgccccctgccgggggagcattgtcctcgtccatgccgccggccatttccgcgccagcgccctggtacattttggcgatgatggggttgcagatgccctccagctccttcatcttgtcatcgaactcatcagcctcggggagctggttgccgtccaaccactggatggcccgatcgatggcattccctatcctttttttgtccgcttgctggagcctccaggcgatcttttcatccttgatggggtt

SEQ ID NO: 7926 - DNA, 394 bp, Oryza sativa
  Clone ID: uC-osflcyp129a02a1
ggtatatacaccaattctgaaaagtcactaaggcacaatgtatgcagacagaaggtctgcttgacagaatctatctttctgaagaaagaaaaaaaaagatcatgagaaaagggcaaagactgactgcaaaagcgcatttgtatgccactacatccacagcattccaggtagacaagatcttgtatgatgttacccgtttaagccctggataaaatgtgacaaaaggtactacaagaacaaacaaacacgacccagctaaagaataaagcactgccaaatgctaccgtcaagttagtcctggagaactagtctttgggccgagcctcatccaacgaaagagccatggccagcattatctgttcttcgaaactataaggaatactgccagcaccag

SEQ ID NO: 7927 - DNA, 481 bp, Oryza sativa
  Clone ID: uC-osflcyp129a03a1
aaatacttaatagtaatagactctttgatggagtattacaacatgcagcagtggcattaatacgccagtacattaattaagttacacatatgcaggctccattttggtttcttttaatttatcgtattacagaatttctgtagccttgcagatgatcacttggatatcatgtactagtaattaacaataggatgcatacaaaagatggcccaacgacaacagaagatgcgtgcatctgacattgtctggccttatttgttggtagtactccaattaattaacaagagatgatgcattcttgtgccttagtttcttgacatgcttggcttcacgttgagcctattcgcaatcttcacccccaacgactcatcacactgggagaggtagttgacccagatggcgcggagctcaggggagaccttggggtgcgcgagctcgccggcgaagcggcggatgaacctctcctgtctatccggcgccc

SEQ ID NO: 7928 - DNA, 452 bp, Oryza sativa
  Clone ID: uC-osflcyp129a04a1
gatactagactcgagcataaattgatgaaaaaatatataactacatacaggcccaactgcaatctggacataccaaggacaagaattactggttcacataaaacacaagagatctgaaaacacacttcagaggaacatagcaggaaaatcctttttagcgactacagctagtaggatgcttcactggaaattgataaaacaagtgttgcatcttaactaggactatgcaacacacaatctcctctgccttagagtatggttccatggctcacttggccatcatgaccttcacaaactcctcatagtttatctgaccatcaccatcaacatcagcctcacggatcatctcatccacctcctcgtcagttagcttcttgccaagatttgtcatcacatggcggagctcagcagcggagatgaagccattttggtccttgtcaaacacccggaag

SEQ ID NO: 7929 - DNA, 319 bp, Oryza sativa
  Clone ID: uC-osflcyp129a06a1
aacatacgcaacatagatcttattaatccatcaagttccagtcacagcagtagatacgaggcatagagcagctaagcccatagtaattagcacccagtttacctggcaaggtaaccgctttttaagaggcgcgcacgcgcacttaacacatatctccgcgacaaatataccagtcgcacaacaccacacacagttcataagcatgcccgccctgagactggagaggcagccccgggggccggctgctagccttacaccccgtcacattatttacgcatatacacacatagttaggttttagatagggatggcttaagag

SEQ ID NO: 7930 - DNA, 534 bp, Oryza sativa
  Clone ID: uC-osflcyp129a08a1
gcgggcggcggcgtgctccaagggagggggagggggaggcgcggcggccgggagcggcgtgcacgagctgctcgagtgccccgtctgcaccaactccatgtacccgccgatccaccagtgccaaaatggacacactctgtgttccacctgcaaagctagggtgcacaaccgttgccctacatgcagacaagagcttggtgatatcaggtgtttggccctggagaaagtagctgaatcgcttgagcttccctgtaagtactgctctttggggtgcccatagatcttcccatactacagcaagataaaacatgaagcgcagtgcatgtttagaccatacaattgcccttatgctggttctgagtgtgctgtggtgggtgatatcccttatcttgttgcccatctgagggaggatcacaaagctgatatgcatggtggttgcacattcaaccatagatatgtcaagtccaacccacgagaagtccgaaatgccacctggatgctgacggtctttcactgttttcggccatacttttg

SEQ ID NO: 7931 - DNA, 506 bp, Oryza sativa
  Clone ID: uC-osflcyp129a09a1
ggtaaaataaaaatatatagcatattatatattgatatatcatcaacatagcccaaaacaaagctgcatactattattataggcagcaatccaccagcgcgatgcttgatcttagcttagttgccaccagactcctcgcaacctgggggcttgtaggcgataaagctaatcaactgcacctgcctgacgttgtcgaagccgatgatacggacaaaggcatcggggtaggccttcttggcctcctcgagctccttgagcacctgggtggcatcggtgcagccgaacatgggcagcttccacatggtccaatacctgccatcgtagtatccgggagacctgtggttctcacggtagacgaacccaaccttgctgaactcgagacaaggcacccacttggatcgaagcaggtactcgatctgcttcaaaagatcctccacggtgagtggtggcaggtacgatagggtctcgaacttcttgatgccctcaattggccacacctgcatgca

SEQ ID NO: 7932 - DNA, 290 bp, Oryza sativa
  Clone ID: uC-osflcyp129a10a1
aaaacatgggaatgcgaatccaattgtttatggacagggaaaatggattaccgtctatacaagattgtacagtctaaaaccatgaacagaaccaaggtagccaaacacttatatggagcctgctggaaggtcaacaaaagtacacccagctgggtgaaccaaactcctaacgaggatcggggaaccaccaaccataacgctgaaaggtgaaaaaccggaccaatggtaggttgaccatactttgcactagctatgattgaggagactaccattttaatttcaccggggag

SEQ ID NO: 7933 - DNA, 294 bp, Oryza sativa
  Clone ID: uC-osflcyp129a11a1
aaaaacaaggcaatgcgcaactcatcatttatgtacagtaataatggtataccatctttactcgactgaacagtcagcagccatgaaatgaaccaatgtaaccaaacatgtaaatggggcaagggagatatacatgaaatgtacaccaaactgagtgatcagaattcctaacgttcaccacggcaccaccaaccaattagagaaacctacttttttccaccaatcgtaggttgaccaccatttgcactacccatgctagggggtacgcccatcttattttcaccactgagaccc

SEQ ID NO: 7934 - DNA, 287 bp, Oryza sativa
  Clone ID: uC-osflcyp129a12a1
gaggaaatagctgcgagttcagttattctcgtccaagcaaaaatagtacagcttaagttcaggacacaggatatgcgcaaaccaaaagtactatttcaagagacatactgatcgaacattcatgaaaagtatgtaacgcttgcagggagtaacaaaattaatttggccttggtgttgcccactcaacacgaaggataaggttatcataaccataaccattgagcttgctgatagccttctcagcgtcctctctgtgaacaaagttgacgaagccgaaccccctgctt

SEQ ID NO: 7935 - DNA, 341 bp, Oryza sativa
  Clone ID: uC-osflcyp129b01a1
aaggcaaaaccagactatgccttgggtcaagggccaagggcccgacaaagacttgcccgccacccaaaagctaaaaaacgggccaagcaaaagccaaacatccccctggttgcgggcctattatttgtcaggccgcatatgccagagaaccctgggcgacaacaaatcaaatcgaggaaggacactcatgttctattcaaacggggaacaaacttggggcaaaagcaaaaccacctggatggggagggcccgcttattttattatgggactgggatgcacaaaatttggcaaacacttcgggggggccacaattttcaggagaccggaattatggtttgga

SEQ ID NO: 7936 - DNA, 341 bp, Oryza sativa
  Clone ID: uC-osflcyp129b02a1
aaaacagagcaaaggcatttgggaagcaaccctttgatttaaattaagcgcaagaaaattagacccaaaatttgggccagggccgggcccaaccaacccccaggatacaaccaagttttgttttggggttcggcgggcataaaaccctccataatttaaaatttattctgggaggggggttaatctactttttttggggggaaaaaacaactcccctggttttgcgggcccccatggggggggcccgtctaggtggggctgggcatgggacggaccagggcgaccacacgggggggggatccccattggggggcggcccaggacacaaggttaacgaacgg

SEQ ID NO: 7937 - DNA, 540 bp, Oryza sativa
  Clone ID: uC-osflcyp129b05a1
aaaaaaaaataaaataaaaaaaaaaaaaaaaaaagaaaaagaaaaaaaaaaaaaaaaaaaaaggaaaaaaaaaaaaaaaaaaaaaaaaaaaaaaaaaaataaaaaaaaaaaagaaaaaaagtaaaaaaaaaaacaaaaaaaaaaaaaaaaaaaaagaaaagaggaaaaaaaaaaaaaagtaactggtccacagaacaaaactttaggtataactaaaaaaaaccttgcaaggataaaaaaaattagattaaaggtgaaatcaaatagaacaagaattaaaaaaaaaaccaaaaaaaaagagaacaaatagaaaaaaacaattccattaagggaaagggggagcctaaaatcaaaatcccaacagaaaaaaagaaaaaacttaatccactaaaaaaaaaaagatgggaaaaaaaacttaaagttaaaaaaaaaaagaagggaggataaaagacaaggaaaaaaaagtgaaaaagaactttacaagaaaaaaaaaactcaaattattttaaaaaaaaaagaagggggaaaaatatgggaaaa

SEQ ID NO: 7938 - DNA, 413 bp, Oryza sativa
  Clone ID: uC-osflcyp129b06a1
ggtggtgaggaatatattacacatgaattgttgcatggacacgatcagttacacacgaacagggcgtgcagtggcttactacgaaacagagaacaaaaaagaattttacccaccacagctacattacactttttttttaccacccccagggccaatttttatttatttttacagacgccagccagtcacctttctcattttcggccattttgctccaccggcgatcggcgacgacgacgacgacaacgatgggatattcttactatcacatggagcactcggcggggacgccctgggggaagcgcttgggatcggtgcagtagttgtagatcatgtacttgctctgcacccaccgtattcgttgttgccgcgtgaggtcgagctcctggttgtaccatccaccggcggcggcg

SEQ ID NO: 7939 - DNA, 362 bp, Oryza sativa
  Clone ID: uC-osflcyp129b07a1
ttttttttttttttttttttttttttattattttttattttttattttttatattttttatacaaaaaataaaaaaattgtatattaaattaatcatggaagaataatgtttttaaaaaaaaaaaaaaaaggggtaaaaataaaaaggaaaaccaaggggggggggggggattaaaccaaaaaaaaaaaaggctgggaaaaacaaaaaaaaaaccaaaaaaggggagaacctcagggggagccaaaaaaaacaaaaaaaggaggggtataaaaaagaagggggaccggaaaaaaaaagggggagggtttaaaaaaaaaggggaaaacagaagaaaaagggggcaaaaaaaggagccacacat

SEQ ID NO: 7940 - DNA, 404 bp, Oryza sativa
  Clone ID: uC-osflcyp129b08a1
aaaaaagaccaaaaatacccaactaaagggaacaacacaggggaacacagggcctttgcccatccaagaaaaaataaactttaaactccgtttaaaaatcaaaggggaggtaaatttttttaagaggggggggggccttaataaacaaacagggggggggcccgttatttaaaggcgcgggggaacaaaaatggggggggggggggcaacggtataacttaacgacgggaggggggctcgccggggtggacaaaaccctaaggccgggggggaaccacggacggtcacggggggggggggttttccggaaggggggcgaaaaaccccggggggccgcgggggaatccgggcccggggccggaatcaatggggggaaaaaaggggggaacgggggggggtgtaag

SEQ ID NO: 7941 - DNA, 336 bp, Oryza sativa
  Clone ID: uC-osflcyp129b09a1
ggggcacaaaccaagagaaaaaaaaatgggaaccccaaatttttaaaaaaacacaaaagggaacggaaatccaaaccccccaaagggtgaaaaaaccgaaccggcgtttaaaaaaaaaaaaaaccgcctcccccacagggtaaaggtccaaaaaaccccagggcccaaccacaaaacttggaggctcaaaaataaaaggcccacccaggaaaaaaaccccccccccttttagggggggagcacctagccgacccggggggggatttgcccggggggggtgagcaaaacgggaaaattccatagcctaagggaccttggcctaaaaagcataagggg

SEQ ID NO: 7942 - DNA, 539 bp, Oryza sativa
  Clone ID: uC-osflcyp129b10a1
aaaaaaataaaaaatttaattttaataaaaaaaaaaaaaaaagggaaagaaaaaaaaaaaaaaaaaaaggtaaaaaaaaaaaaaaaggtggaaaaaaaaaaaaaaaaaaaaatgggaaaaaaaaaaaggggaaaaatacgaggaaataataagaaggaaaaaaaaaaggttgttaaaagggaagaacacaagaaaccagtggaaaaaccaaaaaattttctataaaagtggcggctgtttttgggggggggggtcggaaacagttgactaaaaaaaaaaattttataaaacagagggaagggaaaaaccatgaaaaagaaggggagggaaaaccctgataagaaaatcaaatttgtttaatgtaaaaaaaatggccaaataaaaagaaaaaaaaactcgggaaatttaaaaaaataataaagaaaccccggggtcaaaaaaaaacggaagaaaagagtcaaaaaaaaaaaaaactgtttaaaataatggtgggggattgaaaaaaaaatttaaattatttattcccccccctttttttt

SEQ ID NO: 7943 - DNA, 330 bp, Oryza sativa
  Clone ID: uC-osflcyp129b12a1
gggaaagaaaggaccttgacattagggttccaccaggcccaaatgggggccccctgttcaaaacacacaggcaggaacaacaacaatactttggacacgaattcaaatttggaagtacaaggctacaaaaagaatgggggcgaccatttgggggggccgattaaccgaagccgtttgggagacactcccaaaagggccgtttgcaggaaaaactttggagctcccagggaagcccggaatattgccgccagccttcccaacttctggggcaggttatggaccaaggaataaaccttggtttaccggaattgggggccccccgaggggggg

SEQ ID NO: 7944 - DNA, 431 bp, Oryza sativa
  Clone ID: uC-osflcyp129c01a1
aaatgacgttccatcatattttaaatctgaatattacactgcaatcaaggttttcaaattaaaaagtatggaccataacaaccatgaaacacagtttctagcccaataggatacaaccgtctgatggctcaaagtttcattgatctttccgagaccgccaaagattttctgtagtcaagtgcgcttaaacaccttccgggacattgaagcaacagtataaagcatccttctggactcacttgacaatgggggccagcccatcgaaccaagatttcccattgatttgattgggttacacgggtggtcaatactcttggtccccttcgtgctcgcttcagcacttagcaagtcctttctgcttagttgacaggatggaactatctttagctgcaaccgtcgagacaacaccgttttccagtatgggaagaaca

SEQ ID NO: 7945 - DNA, 412 bp, Oryza sativa
  Clone ID: uC-osflcyp129c02a1
ggtcttcttgcattcttaaattcggtgctgtttttaaaaagagcttcttagctatgtaggaactgagaatggagcaggggattttgcagggagagtaacaccaccccctcgaagagaaactgaaggttggttccagttagcagtggttatggcattcgaatcaaagaacaccacatcaactgttatatcatcatggaagtgccggcttaccccacgatcaattttcttcagatctgaatacctcatctccctcttttttgctgcctgctgcattgcagcctttactagtcttctagcaatcccattgcggggattatgttggacaagatcaactgcttcctgattactaatatgctcccatagtccatcagatgcaaaaatgatgaactgatcagttgtctgtaattggtgc

SEQ ID NO: 7946 - DNA, 483 bp, Oryza sativa
  Clone ID: uC-osflcyp129c03a1
aggatcaaaacatttctattaccacaactttttaaggatggaattgagtagcaatactttcaccccaaaatacagtttagcgacaatatcttagaaaagccgcttgctttgccgccatggctggcaagctgagcagagcagctaacacaaagaacacgagatcactataaaccaaacggcaacgaacgaagaaaatacagggtcttttttgtctgaagatacacgaagcggttcgttttcttttatttttagtctcctctcctcctcgatgatgggtgtatggcaatggcaatggcgatgggatcttggcttagttgatgggaaggggctcgccgttccactccttgaggcagtcgagcatggggtcgatgagcttgccctggctgatgccgaggaacaccttgttgcactcctcgccgggggacttgagcttttcgccggtgaggaatacgcagccgagctccttgcggacgaagcggtaga

SEQ ID NO: 7947 - DNA, 496 bp, Oryza sativa
  Clone ID: uC-osflcyp129c04a1
aacaattgcaactcacgattggattaatagatcgttctttgcaatatatcccaatccaccaatcctgttattacattacaagcacgcttacacaaggtaatactgaatcaggacgaacgaacatcagtacacaaaaaacatagcattagcaatgtcaaatgtccttttttatgtctgatatctggaacagtaagctctatgccagtaaaatagtgttgcaagtagcctgattcctcgatcgtccatgtaaagaactcgttatccacgctccgttccgtccctgtattcttctcagtatggaataatcgattcgatgagctcctggagtggagccagctccttcttgtcaatcaggccaaattcagttgtaaacaggatgaagtgcttgaagcacgtgttaagatgggcctcctccttgaggctgacaatcttctgaaaatgggagtgatatatgtgggcataaacacgaaacaagcgcttgaaaattgtctttaca

SEQ ID NO: 7948 - DNA, 373 bp, Oryza sativa
  Clone ID: uC-osflcyp129c05a1
tttttgggacaattgaaactcacgagtggatcaatagcacgatgtttgaaatatatccgaatgcaccaatcctgtttttacattacaagcacgcttacccaaggaaaaactgaggcaggacgaacgaacatgagtacacagaaaacacagcattagccctggcagatggtctatttcatgcctgatagatggaacattgacctttatgccagtaaagtagcggggggcgatgccggacactgaaaacgcgcactaaaagaaggcgaaccgcacactttgttccgtgccgggaatacttcctattttggaagaatcgtagtgacgagctctcagagtggtgccagaattctttttgacaatcagggcaaattca

SEQ ID NO: 7949 - DNA, 331 bp, Oryza sativa
  Clone ID: uC-osflcyp129c06a1
ggacggcggcggtggggcgctcctcgtctcctcgcgcttggacagcctggggagccgctcggagatgggctggtggcggggtcggcggtggggtcggcggcggcagcggcggggtcgatgacggcggcggggacgggcgacggtggcggctgaggtgagtgcgccgggtggtgatgtgggtggcgacggctttgggacggcggtggtggaggccgcggatccggcggcggtgcggcgcccggcggtggcgtgagcacgcaggctccccgcggcggtcactggcgtcctccggcgcccctttaggcgttggcccggcgttggtggtgagggg

SEQ ID NO: 7950 - DNA, 387 bp, Oryza sativa
  Clone ID: uC-osflcyp129c08a1
ggggacgagacgaacgtacggaggactttcattacaaaaaaaaaagggactggaaaaaaaataacaaatttggggggacaaatgccccgggggggagaaaaccaacgacaaaaagcttaaaaggaggtgcatgggcgaacaaaaatcccaaaaggttaatgggaaacagaaatcatggggaaaagggggaccccctccggttaaaaaaaaaaggcattttagcattggccgtattaaaatgggtggtaaaaaatctggatatataaaaatgcccaagggtaaaagggtttacattatgagaggggggaagaacatgtgggaagggcttacaggggatcgatcacaagggactggtgtttttccgggctgaaaggcccgcggaagctg

SEQ ID NO: 7951 - DNA, 460 bp, Oryza sativa
  Clone ID: uC-osflcyp129c09a1
agggtcaaatccaacttattcataaagcatactgctgtcccacaggaaactgtttcataaaactaacatatcatacggactcgatggtccattaaaccagacacaagtagacatcagcaccacaaatacttgacgaacagaggctcgggatgaccaggcacatcggcagctccaccaaactggctgattactgaccaccacggaggcggagcaccaggtggagggtggactccttctggatgttgtagtcggcgagggtgcgtccatcctccagctgcttgccagcgaagatcagacgctgctggtctgggggaatcccctccttgtcctggatcttggccttcacattatcaatggtgtcggagctctcaacctccaaagtgatggtcttcccagtcaaggtcttcacgaagatctgcataccaccacggagacgaagcaccaggtggagggtagactc

SEQ ID NO: 7952 - DNA, 354 bp, Oryza sativa
  Clone ID: uC-osflcyp129c10a1
aaaaaccaacggaagggcctttatggggaccgaggcccccaaaaaagcaggcaaaaatttttatcccgggacgggggaaaaggcctttctgggccccaacaagcccagggattgcaaagggggctggtccataacaaaaacagccaggaagggaagcatcagtttaaaaatcccccgggcggccggtttggcaggcctgggccacccccaccaaaacttaagaaaaggggggggctaatcttcaacgggggggggaaagaccctgttggcaggggccccctgggggggggggcccccaacccccagggaaaaaaatgtaaaacccgggaaaaacccaactttgcccccaaaggg

SEQ ID NO: 7953 - DNA, 345 bp, Oryza sativa
  Clone ID: uC-osflcyp129c11a1
gggggacaacccaaaggggaagaaaaaaaggaaattggattggaaaaaaaaaaaaataggcgggggggttttttcctttggggaaaaaaaaaaaaggggaggccaaatttttgggacaaacaaaaggggggcccgggaaaccttgaaaaattgcaatttgaatggggaaaccgaaaaaattggggggtgccggggttgcgcttttttttttgaagctggtgcgggtgcggactagcgcgccggggggcctggaccaaaaccctggggaagtgaacccttgggggagaatgtgaaaccccccgggggcggttcccgggaaaaaaaaggaaaaacctctgggcctaa

SEQ ID NO: 7954 - DNA, 536 bp, Oryza sativa
  Clone ID: uC-osflcyp129c12a1
aaaaaaatgattattacactgaaatgcacattaaatcacaacgaagctgcacagaagtgataattttacagacacatcaccacaacaattcaagaataaaaaaaattaacacacattccagcattcagtaagcagcgactgtggcagcagagaaatggggatgtggcgaccggcagtgttcggtgagcgacggtgtccatatggtctctgatagtatcagaatcaccatcagctattccgttcagataacagccctgaaaaattgaagaacaattcacaatctatcacatagataacaccagaaatttactaatgaaaatgaggaatgaaacacaatgtactattaagtgtcgtgcaaaaaaggatgcttaccgtgatattaccacctaacgacactcttcacaagtgccatgaacagctgtaaatttgattggggtatgtatagtcagagagcaaaggccactcaggaataccttgttgttaagcaacaacaatacgtttagcgcaaaggaacatttaggcacaattgttagaga

SEQ ID NO: 7955 - DNA, 401 bp, Oryza sativa
  Clone ID: uC-osflcyp129d01a1
cccacgcacaatttacatgatcattacatcgtccatcacacaggcactcatgcattgattacacataggagttttgattcgggggactagcttaatgaatttgattagccgatgatctggtccaggacgccgatgtttttggggccgaggacgacgccgacgcccatgatggggccgacggcgccgcaggccagcgtgtcggcgagcgtgaacccggcggggtcgccggtctgcaggccggagtcgcgcgcctccagtttcagccccgccgttgacttcctgttcgccgacggcgccagcccgaacctccccgggaacagaataagcgtcgtcgtcgtcaccatgataacgttggtggctgagccgatgtagtcgcaccggatgccctgggaccttttttt

SEQ ID NO: 7956 - DNA, 466 bp, Oryza sativa
  Clone ID: uC-osflcyp129d02a1
gatcatgaaaatcatcatgttagtttgcccagaagagctaaaatacattatacacacaaatttcaacatccttgtttctaaactctgatggacacgaatatatcgagtccccgaaatctgggtctaagatatggccgccagtaacaccaaaagatgtatcgcttgatgcgtacaaaatatgtttctcaagaaacaaactataaacgaagtatccaagatttccttgaacgcagcaagtaacggattggagtccacactggacgaggactcctatctagtagaccgaagcataagacttctaagtagcagtagcatcagcgtcctctgtagatttcttgtattcaggcttaagttcatgcgtcccttgatttggaccccttttgttgtagaaacacagatcattcaatttcttcttcaagaattgctctggttgatcagtttcttgcatgagattcttaagagacca

SEQ ID NO: 7957 - DNA, 429 bp, Oryza sativa
  Clone ID: uC-osflcyp129d04a1
gggacaagggcatgcaggccgaagggaactctcacaatggcacaaggaatgtttcgaaccaactgtgtacaaacattcacaccaaataaaaataaatgagatcacatgaatcaaaatccaagaaaaagagcgtacgtggattgaaccacatacacttttgaatcagaatagtgcatcaacctgcctactcaaaataactccaggtacaggttttattttatattttttttaatcgaacaaaacaatcaggcagacaatgtacatcgcgagagcgggctggttacgatcgctttgctttgatcacaaagcgaggccttccttccgaaatgagattctgctacacctgtgcaccgagccgcttttcacaggcccatcgaccgttttcacgggcttttcggcgttaattatcgcggtggtattttgtttgga

SEQ ID NO: 7958 - DNA, 375 bp, Oryza sativa
  Clone ID: uC-osflcyp129d06a1
caattcaaatcatacaatttttttgcagaatttttcatataaacatgttcactttttcacatgaatcttgtgagaattttcggtggtttaaaaggaggcctaataggcgccgtgacacgtcatgcatgcgtcatcacatcccggcaggtctcccgtctttcctcgggtcgctgacggcggtgagcatcccgtggaagacattctcgtcgccggcggcggcgaccggcgtcagcaagtcctgcacgatgaactggcagacggcgccggagtccgtgctcgtcagccggtggcccctccgccgcaggaactccctcgcctcgccgttgagctcgaacacctcgccgtcgaccaccgtcacgttctcgtcggacgcgt

SEQ ID NO: 7959 - DNA, 496 bp, Oryza sativa
  Clone ID: uC-osflcyp129d07a1
gaaaacaaaattatctctctctttctcctgcgctcgaacgcagccttagaaaacaccagagatcaaaaaagaaagggaagaacacttatcccaaactaattgcattttacagttactacaccgccattttacagttacccctctcgcccggttgattccaactaagatattcagacaactctggcgctccgtccatggccatacccatggccaatggcgcggttcagcgccactctggtcgtctcgtacaccggcagctcgtcccggtacgcggccccggcgggagcaatggcggcgaagttctcgagctcgaacaggtcggagctcgcgtcgctgctctcgtcgtcgtcctcgtcgctctccatctccatccgctggagcagcatctgctgcaccgcctccacgggcaccctgcggcggtcgaccaccgtcgacgacgccagggactccgtgtcgctgtccaagaaccgcacggtccgcttcgcctgcccgcgcg

SEQ ID NO: 7960 - DNA, 442 bp, Oryza sativa
  Clone ID: uC-osflcyp129d08a1
gtatgaggcctacagttgtgtattcttttcaccaaatgcagcacacatcattccctaataccattctatcacacatctgtgctttcttgtacatcataccgtgtcgcttctttctttttacattgaacaacagtggccactaattacagcttctccttgctaataaaactcgctgagactgtagttcagttcattcctcggaatcggaatccattgggcatgatccgtcatccacggtggcgagtggatcaaacatgtgcgagtttggatccatgcaccctgacacaatgtccagcttgcagcgatctcccccctcttcgtagtagctgcccatctcgcagcttgtgatgacaacgttttcgtttgggaagatggctctgccgcatgccccttctctgttcagttcgtctgttagacccttgttgaagaagctcaagggctt

SEQ ID NO: 7961 - DNA, 574 bp, Oryza sativa
  unsure (1)..(574): unsure at all n locations
  Clone ID: uC-osflcyp129d09a1
aattagaaacgcttcttgcatatatataccaagattgggctatctcaatctataaggaaagataaaaagtacttgatcattactgatgatcataaaataaagtacacttcaggaagaaggaatgacctaaaatggctccttcaacagaggaagaatagggctagacaaggtacacaaaggtaggcaaggccattgccgtcatcgttaacgttggcctcgatcagctgtctccgttctgctgcccgaagctgcatgatcctgagggcaagaaggagaagggattctcagagatgtcaaatccaggtcgagtgaagtcatcaagcccaccgaagcaaggatcaaagctcaatggcgagaaatagcgtggatcatcggccatcttcatgtcaagatttgggatgtcgtccgatgagctaccggggaagttatacccagcgctccccaccatggtgttcatcgcctcgctgccttgaggttgctctgatgctcctgttactttgatatcatccaataggagtgcangcgtgtgcccttggaaaagagcaacatgcccaaataacttgtcttttttttg

SEQ ID NO: 7962 - DNA, 444 bp, Oryza sativa
  Clone ID: uC-osflcyp129d10a1
agagggaaaaccacattgccattataaacaagaaaagaattcaagaatttgacatagatccaccaaaactgaaagttaacctataacattattatcttaaaaatacataactggttaaacatatgtcccaaccttagggggctaaaataatgagtgccacaaatgaaaaacggcagacaggcaccagtagtctgatgaactgacaattctattgtacaacacatgccttttagaacctttgatgctctaacagcttgaccatcacgagactatgcaaattgctctatatatatctctaagctgaggttctctgatgtactaggctgaggctctctatggtagtacgcaggttgtctaacaacaaaaccacaggtacaacaaacagaggttgggcttagtgttgtccatgacctggcggcgggctactgttagaattgctatcta

SEQ ID NO: 7963 - DNA, 507 bp, Oryza sativa
  Clone ID: uC-osflcyp129d12a1
gatgaacagccttctgtcgaaatttaaagcatatgtctgcagtacatccaattgccttggttaaaagaagaagaagaagaacagcttaacgttaagggagtcctttggtcatcaaagatgaaaacaaaaggaattcaattctataaatattccagacacaaattgtagcatggctggtcatgaatgtttgccaaaccaaaaaatgaaccgaagcctaatagttcaaaatgttttgactccaacagggcttcagatcacatcccagtattatcttgtggatagatggtgatcaagtcttgttatatggtgaatccagggcactggggagaaccaatgagtagataatcctatcccaatacgccttagagttagcagctgttcgaaagcatagtcgtaaatagcctgtgcgactccatgttcatcattagtggcaccaattatatttgccactgctttggttttctaagacccatttgcagcgcaacacccatgatgctagctgcagca

SEQ ID NO: 7964 - DNA, 378 bp, Oryza sativa
  Clone ID: uC-osflcyp129e01a1
gaaagcagaggtagattatattaagaagcctggcacgcatgaggagatggagcaggagtacatgatgagatcaccatgatgatagatgatccatccaagctagctagggatccatccaacattgatcgacacacgcacacactgacaacgacgacgacggttttatttaggcgtcagagcaaaaggcaaggcctgcctacatataagctgggtactaatgcaagcaaattaaggcctcgatcaaagctctgatcgacagtagcagcatccatacgataaatcctcatgcagccgggcgacgacgacgatagattcagttgcaggagcagcaggagcagccgctgcagctggtgccacacttgcaggtgttgcagccgc

SEQ ID NO: 7965 - DNA, 354 bp, Oryza sativa
  Clone ID: uC-osflcyp129e02a1
aaaatatggaggggatgattttggaacattacaagctttggggacattaaccaccacaaacttcccaaaagggaaggttactttttgaatcacaaaagaaggcaacagaaacagccatacatagtttaaggtggttttagcctaagttaacaatttaacattactaaacctaataaaaacttaaggcttactaccaaaactgggggcctcctcatacttacagaaggggttaatatatttttggcccccattcattaagagattcagaacaacatcagactgacagggataacaaggccaagaagaggcccaatttttgccttaaacccaggagtttcattaaagccccaaacg

SEQ ID NO: 7966 - DNA, 309 bp, Oryza sativa
  Clone ID: uC-osflcyp129e03a1
ggcagcaaagcagagcatggaacaagctgcgattaaaatggacaggttcagtagttatcctaacaggttcagaagggggggatccagcctaataacatccaccccccaggtgggacttaaacaaacacgacataaacaagactaccaaaacatccacaagttcaggccataacatagcagccaagcggttgctcagcaaaagaacatggggctcctgactttgttatgcaggcgaggcaatttgggcaccggagcgcttcccgccgaggtatggccaccatgggttgacaacgtttccgacattttgtt

SEQ ID NO: 7967 - DNA, 391 bp, Oryza sativa
  Clone ID: uC-osflcyp129e04a1
aagcagtaacgtacagttcaaaattgattggtccagtatgtatacatagcatagtacattacaatctttcgatagcagaacgagcttacatggtagcttaaaaacatggtatagttttcacctgatgacattgaagttttctggatagacatgcgtgctttcaacatctcctgaagttcaaaccttgtaaattgcattgccatgaacttgtccacaaaaccaggacattctcgagaaacctctctcattacatttccaaaactttaatcccagtacttaattacgccatcccatccacatgttgcaaccttgctagtctccaagggatgccactcacatccaatgcaaactccattgtggcacttcaacgtcttaaattttctgcagcttt

SEQ ID NO: 7968 - DNA, 475 bp, Oryza sativa
  unsure (1)..(475): unsure at all n locations
  Clone ID: uC-osflcyp129e05a1
ggtataagaaacaatattatcgaaacgagataggcaaatcggcaggtataaacgagtgtattacataaggtgttacataagatcacatggactaatacatcatagttcagtactctgtaacttttaacttattccaaaaacaccactgatgacacacaacctaggtaaaaacagcagtacaactgatggacaatcgcatagaggtgcaataggttcaaatccacaacccagtcttacttgctatctgcagaggcctcgactatcttgacagcagaccaaactcgcctttccctcacgcagacttggatgcgatcattccggtcttccgggcataggcaaagatcccgcctgcctcaataaccggcccggcatcgccgataggcttcagcttgtactgcttgccggatgtgtggttgatcatgacgcanttatcaagtttcaccgtgaccacatccccggtcttgcactccttcca

SEQ ID NO: 7969 - DNA, 379 bp, Oryza sativa
  Clone ID: uC-osflcyp129e06a1
gagtgagaataccagcccttgttgcttaacattcaaatatggccatctgtccattccctcttcaaaagtttaaaccatttctgggtcccaaaatattacagaagaacatagcacgaactcaacacgagcaatacaaaacttttacaaatcgatcttcttgctgcccccctatgcacaaatcttcagaaatcgctgacgccctctctcagcagttgatgccgcactgcctgacgtcagggcccctggccttgatggtgaagggatcaatcctgacccagagcaaggaaaagatggaggcgagcagcacggaccagatgacaacaatggtgggcgtccggttctgcctccccatgagccccttgaggaagggcgtgaggtg

SEQ ID NO: 7970 - DNA, 591 bp, Oryza sativa
  Clone ID: uC-osflcyp129e08a1
agcagaaggcaaaggaaatttcccgcaaatacttattcatatgttttgacaacatttctcccgacgcatgctcattgtggcagacgcagctgaccacctagagcttttagttcaccattattatttagaccaagcatacgtcccaagatcagaacacatgcttacaagcgaaaatactaatagcctggctggctgcttcacagaataaccaaacgacaacctcaacagataaaaatgccacggaatgaaaacaaagcagcgaatcgtcaccagaagtcccatcttactcatcaaacactccatcattctcctccaacgcatcctctccccaggggagaagattgcccagtttaccttccttaacaggagcagggttcaccatattctcagcctcgaagcagtgcagaacagatttgggcgacccaacagcaacaggtacgttttcagtagcgtcgaagctctggtagatgaggaggccaccacagggcagctcctgctctaccatgttgttgcatttgtaagcatcagcattgagctccctttgccatgttccagcatgaccatgcccaccaaagagggtacagaacagag

SEQ ID NO: 7971 - DNA, 566 bp, Oryza sativa
  Clone ID: uC-osflcyp129e09a1
ctcgaccgttcccttctcaggatcatggagatgaagaagattgcctgcgccgtccttgtcgctgcctcggccaccgtggccctcgccgtcgaggcgcccgcccctgcccccaccagcgccgccgccacctcggccgccttcccggcggtcggcgcggtgatcggcgcctccatgctgcccttcttcgcctactacctacagtaaggaagggaggaatgatgaaggtgttgcgtgagtgcgggtgtggaggagataaaaaaaaacacttttttggggccacccgagggaccacccctggcggcccctccatagatcaaaggcgcctcttattattccaaaaaccccccctaatcataagtcgaggtagaccgattgatttgtttggatcaccagggaacatttttcccggggtggatggcaccccttggcccatccctgatcatgagggtggttcctaggggaatggcccaatttttttttgtttttatggggggagtttttttttaggtgggagggtttaataatgggggggccctgaaacccaaacaaattttttgtttttttcc

SEQ ID NO: 7972 - DNA, 308 bp, Oryza sativa
  Clone ID: uC-osflcyp129e10a1
aaaaaaaacaaattttaaaaaaaaataaaaaaaccttatttaattgaaaagggtaaaaacccggaaaaaaaaacacaattccggaacagattaaaccttttttcaaaacatcggaaaaccaaccccggggggcaaaaaaaaacgaaaatttaaaaggaaaaactacctgcattaatggaaccgggaaaaaaaactgaaaattttatgaaaaaaccccaattttacaaaacctaagtgggttaaatgaaggggattcctcacccggacccgggggtcaacccgtaaaaaaccggccgggccctggcggg

SEQ ID NO: 7973 - DNA, 501 bp, Oryza sativa
  Clone ID: uC-osflcyp129e11a1
ggcgaagatgcagatcttcgtgaagaccctgacggggaagacgatcacgctggaggtggagtcctcggacaccatcgacaacgtgaaggcgaagatccaggacaaggaggggatcccgcccgaccagcagcggctcatcttcgccggcaagcagctggaggacgggcgcaccctcgccgactacaacatccagaaggagtcgaccctccacctggtgctccgcctccgcggcggcgccaagaagcgcaagaagaagacgtacaccaagcccaagaagcagaagcacaagcacaagaaggtgaagctcgccgtgctccagttctacaaggtggacgacgccaccggcaaggtcacccgcctccgcaaggagtgccccaacgccgagtgcggcgccggcaccttcatggccaaccacttcgaccgccactactgcggtaagtgcggcctcacctacgtctacaaccagcaggcttaggcgtaggctcctgttctttggggggc

SEQ ID NO: 7974 - DNA, 231 bp, Oryza sativa
  Clone ID: uC-osflcyp129e12a1
tcgcgatctagaagcttctctcctctctctcaactccggcgagaggaggaggcggcggtggggcgttcgtcgggagagagaccagggccggggggctagggttcggccgttcagagaggcggcggctgaggaggaggaggaggaggaggagggggtgaggaacgatagcacctctcctcgagtacaacattgagggggagtttaccgttgccctggcgctccccctccgca

SEQ ID NO: 7975 - DNA, 406 bp, Oryza sativa
  Clone ID: uC-osflcyp129f04a1
attacatgatcagggataaaaggcttagtgcaactaatgggaagttagcattgcacgggcgcacaacagatgtgattttacatgtctatgagcccgtacaaacttttacatgtatatgaacactatatataggacactctttacaagtatgcataactttgaccgttaatacacctcacttgctcatgaaaaagatgccctcatgaatgcactccatcagctatatatttgccattgacaagccagctgtatcaaaagcattcagcgggcccagagggagaacctcttcggcttcaggaggacctaacctcagttgtgttgcaaagaacggaaactcggtcacggaagatgcaacatgtgaacattccacaacgccagcatcatcacgcattgttcgcaagcatgc

SEQ ID NO: 7976 - DNA, 329 bp, Oryza sativa
  Clone ID: uC-osflcyp129f05a1
atctcaaaaaccccttttatatttatgattcatagcaacaatatcttatttggatttgatttataaccgggggattagcattttattgcctgaattattgggggtattatttatcaaggctttgaacctaaatcatcaatgggtcctacaatatggaaacctttgggcacccaatacaactaaatatgcccatcaactgggtagtctgcagggggcttcttgattggttccctcaacaatcgcttttgctcttttagggtggagggaacttcatcataaacatcagggaaaagttcagcgggggggggttttggaattttttttgctac

SEQ ID NO: 7977 - DNA, 408 bp, Oryza sativa
  Clone ID: uC-osflcyp129f09a1
acggccggaacacaattaaccaacaggaggttggatgcaagggccggagatgcatcacagggaacaggttcacacccccccaggcggggcagggtcatattcggcccgggaccaaatttttggggtcaacaacaaacattccaaacaaggggggggggggattattacaggggggggccaaacaaaacaaaacccttagttggggccaggcgggggaccacacctggcggccccttcattgaacaggggggccttttattattccaaaaacccccctcacttaaatggagggatagacagatagatttgatttgaccaccagggaacaattttccagggggggggggaaacttgggaacatttccagagcaccagggggggtccgtcgggcacgccggggggggcctt

SEQ ID NO: 7978 - DNA, 304 bp, Oryza sativa
  Clone ID: uC-osflcyp129f11a1
aggacaaaaaaaaaaaacaaatggttccgcaaacccaaaaaaaggaaagtaagtatgggccaaacatttaggggggccaagcaaccaaaagctgggggggttttttaaaaggattaagctcaaactcccaaacagggaaacgaagggtgggcccaacccccacatgaagcccaaaagggggaacggccacccaaagggaggaaccaaaaacccggggacggcaaaaaaaaaaaaaaaggacccaaggaagggaccccctaaagactggacccccttaaccccctgggagaacccaagggggggt

SEQ ID NO: 7979 - DNA, 520 bp, Oryza sativa
  Clone ID: uC-osflcyp129f12a1
gatagaggagatcaaactgtgtttatagactgaactgaaacttgattatacagtttgccacgactcctaactcaagcccctatgacgtggatacatatgtacaaaagttttgacacctgagaaaatgatctagtttccctacatggatagctagctagtagctatctcatgtcatggagtgttgccaaaaaggcgtccaacttgacattgtcacctcgagacaagaacttgatgcagatgggcgccctggcacccatgagtgtcagcatggacagcaagatcgagccgacgccgtcgccgcagatgagccccgacgccagcgccggcgagagcatccgcccgcggccggcgtccatcttctcccacaggtacgccaccaggctgccgatgcacatgccgacgggcacgcgcggcggcatgaagaaggtgatggccatgccgatggtgcttcggatgtagcgccggatgcgccactccttccggcttgtcaccttccggaacacgctgagcgccagggcga

SEQ ID NO: 7980 - DNA, 402 bp, Oryza sativa
  Clone ID: uC-osflcyp129g01a1
ggggaattaaacctcgacattttattatatttgacacactggatatttaggcaataaactttaccgcaaattatgaaatgtacaggcactgcactggaccatacgtagtttttgggcagcatataaccatagggtggcacgtacgggcttttataccacatactagtccttgaacgcttaataataattaaaagggcgggcatcacattagaaaagtttcaacacgcttgcacacaaacacggaattactagtctcactcttggcggggaagattaatttaatggggcgacttgatctgggttgttaaatacggttttattgggggggggattggccttcaggagttcagggtagccatgtcggcatgaaggcagggacgcatgagttggtcatttgttttg

SEQ ID NO: 7981 - DNA, 381 bp, Oryza sativa
  Clone ID: uC-osflcyp129g02a1
agagtacgtaataaacagtttacccaaagctggtaagattattttcaaacaagatccaaatcaaaacataaaaaggtagcacggaaacacaaccacggacgcagaaggtgcaaacagctagcagtagcttacacacaaaaacatacagattaaagggccacgcaagaccattaggtggctcgcagagagatccgagatacatgtagcccactccacatcccttttattattagctccaacttctgacagctgatcgatggctgcttagctcaaagaacccatcccagcatgaagttgttctctgcacctgcaggggcagtgctcctctgaatagtgtttgcttcagcaggcacaaattgatgaggatacccaatttgcaag

SEQ ID NO: 7982 - DNA, 352 bp, Oryza sativa
  Clone ID: uC-osflcyp129g03a1
gggaaagaagcactttttcccccttggaaaagggggggggggaaaaaaaaggccagaatttggctttccattcaccaaaaaagggggtcctgggtcctaggtaaaccaagaaggggagggtacggggccacactaaccccccaaacaccccggcgggtttcggtaattacacgggcctttaaggagaaacgcattaacccgcagacaaacccccaccccacctggatactgggggggtaaaccccggccatgggggggggggctcatactagggcaaaatccgggggggggcggccgtcgtcaaaattgggggggtatctgagcgcgtcgtaagggaagctgaaccgggggg

SEQ ID NO: 7983 - DNA, 472 bp, Oryza sativa
  Clone ID: uC-osflcyp129g07a1
cgaaacaaaacagactttcatcatatataatatagttccaggcttaacggccacagaaggtagaaatctaagttgcacgatcagaatgtcatacaaagcaaatctggagtttcattgatgttcagataaaacatttcacaaggcctctcagcaacagagcctgtttcttcatcctggttcatggcctgacattcagcctctgcagcataaataaatctaccatgatcctacagcaccctgggccggattttcaaaggcagcgaagccccagtaagtcttcaatgagtatggcgggtagatggtcgctccctcagttgtgatcttggcaatctggaacttgttaatagatgatcggtcacggtacagcaggacaagcaagcacttctcaacaagcttgacagcttcctcaaatgtcatgtcctcgcgccattcagtacgaagtattgggattgccatatggttcccaaaccca

SEQ ID NO: 7984 - DNA, 443 bp, Oryza sativa
  Clone ID: uC-osflcyp129g08a1
aattaactagcatatttaaatttaaaacgtaactgtttgagcaaataccacgaaatgttcaggcgctaagatacggcaataccgatacatccagcatagcaaaaatggcgaagagcacagagtcagataaagctatagagaactagggctccaggagatgggggccgaatgacaaccatggcgcttagtcgacctcctccatcttgctctcgccggcgtcgtcctccagcggcggcatgtcggcgtcagcctcagcagactcgtcctcgtcgatgctcaggccgagcttgagcatccggtggatcctggtgccgaaggtgttggggtcctcaaggctgaagccggaggtcaggagggcagtctcgaagagcagcatcaccaggtcctttacagacttgtcgttcttgtcagcatcggcacgcttgcggagctcgtccatgatg

SEQ ID NO: 7985 - DNA, 408 bp, Oryza sativa
  Clone ID: uC-osflcyp129g10a1
agggcggcaataaaacattgcattgaattttgaacgataaacaccaggaaccggggtttatttgggggaagcactgcccaaaattttgcaaaaggactgaaaccttagacataggacacatccatggcaaacatgggtgccaaatgacaactacagaaaattatcaaattcgaatgcagctgacggtttttcctggtgaagatgcatattttcccctccattacttggatgggctttttccattgacagccaatgggacggcgctggccaggctggggtttttcagagcatagaacatctcaatggaacggggagtctcgcgcctttcaagggtgcttacgtacttccagaatccatatcccccagtcaagggcatcagcctctcaaagtacagcttccaggggtact

SEQ ID NO: 7986 - DNA, 459 bp, Oryza sativa
  Clone ID: uC-osflcyp129g11a1
attataagtgacgaagcggtctcacataaaacagggcacacaggttacaacaacgagggttgtaagcccattaagccccaaacatcagatcaccacaagcaaatgtctcgaagacacacgcacacggcaacaggataactccacactggcagatcatgggatagcagcagttatcaatcaggccttgacacacagaacatcaagcccccagacgacgacgactcctctagtactcgtcaccatcatcgccatcctcattctcgtcggactcagcgccaacctcctcgtagtccttctccaacgcggcgagatcctcacgggcgtcatagaactgacccttgtgcatgccctcacccacgtaccagtggacgaaggcgcgcttggagtacatgaggtcgaacttgtggtcgatgcgggagaacaccttcacgacgctggtggagttggagatcatgcaca

SEQ ID NO: 7987 - DNA, 495 bp, Oryza sativa
  Clone ID: uC-osflcyp129h01a1
aaacatgcagaataagtatgaatgaaatatagttcaagacatttctcatccacccttcatttttcccctcctgtttgctgattcagattagctaggaatccattcaagctgagtagccggagcttagtgtgatcaaagggatagcttattgacaatgatattaattagcgttaccgctaggttcgataatgtgacaaccttaaactactcttacagcgtcataaacaacagggtcacacgaagtgtgattagcaaatgccagaatgcagtatatacactctgttagctttctgaaattcaggtaccacacctcacgtaatcatcctgtgttctattctctggtataagtgtgcatcattgcttcacatttctgccacgagcttgctgtactgatctagagcgaggtcaaatgaagtgaatgaataaggagagagcgctgcttccatctcttctgaagcatctggcagctcgctttttaccggtacgactttgttt

SEQ ID NO: 7988 - DNA, 397 bp, Oryza sativa
  Clone ID: uC-osflcyp129h02a1
aaaacataaccaggaatgagatgcaaaggagcaaattgagcacatatttaggttcaaatccaacttattcataaagcatactggtgccccacaggacactggtttataaaactaacatatcatacggactcgatggtccattgaaccagacacaagtagacatcagcaccacaaatacttgacgaacagaggctcgggatgaccaggcacatcggcagctccaccaaactggctgattactgaccaccacggaggcggagcaccaggtggcgggtggactccttctggatgctgcacccggcgagggtgcgttcatactgcaactgcttgcctgtgaagaccaaaccctggtggtctgggggaatactatggttgtactggatcttggcctttacat

SEQ ID NO: 7989 - DNA, 465 bp, Oryza sativa
  Clone ID: uC-osflcyp129h04a1
acattaaaacaaatcacatagtactttcattatttcaaacgaacataatgatacataaacacatgaaagaaattaagggagatgttgcaaacatatccgcaagaaacacgacacaatgtgcgtttgcactactggacatgaacacagtttgcctcttaatcacttcttaattaatccttctgcagttcttcctgatctccccgtttgatcccgtcaacggtgtgatgtcccccatcttgatcatgcccgtcacaaaatccgcaaagaatgtgctctggctacttatgtaagactgaacaagagcatcagtggctccgccattgaagagctcctgatcagaatgcaggagccccttcttgacgactaggttcttgtagtagttgttctcgaacacggttggcgtctgaagatccagaggtgccaggttattgtcacctgatcctgagttacgagggcaacctgatt

SEQ ID NO: 7990 - DNA, 145 bp, Oryza sativa
  Clone ID: uC-osflcyp129h07a1
gcaaattgaaagccttattaattaaagactctactgtgtgatattacaccatggagcaggggtacaaatacgccagatcgttaaaagagggacagatctagcaggctccatacaggggaccgattaatttatcgaattacagaat

SEQ ID NO: 7991 - DNA, 457 bp, Oryza sativa
  Clone ID: uC-osflcyp129h08a1
aaaccaatacacaaattttattgccagttcctccgactgactaaactgacatgagaaggtgttcaggacaattgccacggacatgaatgtacaaatgactggactaaagcaaccacggaccatttatctagacaaaggaaaaaaagccaaagaagttcaaatcggcaaaataaattgccttgtttatgtacacaaccaaactaacagaattcggcagccggagaagcaaattcagagcttatccatgtcggcgttcctgaagctgccaccgaggagtgacaagaggccgccaccgtgcacccttccctccggaacggcacagcctccctctttgcccccatgcacggtaggtttggacgacgatgagggcatcatagagcgaggcaccagcacctggggaggtatcatcatcgtctggctcctcaccgtgccgtcgcagtccgacgcggtgctgatg

SEQ ID NO: 7992 - DNA, 518 bp, Oryza sativa
  Clone ID: uC-osflcyp129h09a1
aaaattaaacacgatatatgaacttggtcgtaatacaaaaagtacagcagcctggtgtctcctagatcctcaagcacaaggaacaaaagcacaaaccaaatgacacctcacagctgcgttgatctatgaatgacctagaacggggtaaaatcagctatatatgccccaagataggggaggatcaccaactgggagtaaaggagaaatatgagtatgataagtagatgatcaggactatttggaccatgcaaccgcatcaatttctgcttgagcactccgatatagctccagcctcttcgcaagattagtcctccgttccatgacggccgggtcttcatcaagaagcttagaaagttgtttaatctctcttgctcccaattcagtaaagaagtgatcgagcagtgagcgctttgccttccgcacttgacagtagacaatagatttcggaatagagttcctcagggtgaacataccatgttaatatatgccagaacagtgtccattcgtctaagatagat

SEQ ID NO: 7993 - DNA, 429 bp, Oryza sativa
  Clone ID: uC-osflcyp130a01a1
ggggtctcaaaataatgggttgaaatgcatagatatccatgttcagttaatcgatttgatgactgtagtacatggaacaagcgaagataccaatttaagaaacagctacaatcgagatgaaattgaacattactaactatgcctacatgcttgggcaaccaaaaagtcgtgataacccctctgacgattagcaaataagccagctgactaggagaccctgagactgcataaaaaagtatattaatgatgacagttgtacatgtataatagcactaacaaaaacatagtgaccctgtgaccctgagcaactgggctttacatcaaagcactttcatgtgtccgccaaatacatattgatgactagtttcataatatcacttgtaaaaacatagtttgaatgatcaatacaagttggaaacaaggtaatca

SEQ ID NO: 7994 - DNA, 457 bp, Oryza sativa
  Clone ID: uC-osflcyp130a02a1
ccacattgaagccttctcctttttccgggttctcttcaagcgagcgcatcatgtcagtaagattactcttcttttctcctgatcctttcgatggctccacatcagtttcaaccgctcctttggatggctcgtgtgtcctaagagttttcttgcgcgagaatgtgcgggacagcgatgactgcagcccaacggcgtgcttcttggcaacatctttagctgatttccacctttcacgagccatggcagtctcttttgcgtgtcttgctgcagcctccctagattttgcttgctttttctctcggttggtcagaagttgccctgagaagttgtaaatgatcaacagtactaaactcaaggcacccacaagcaatgcaccaaatattgtaatgtcctgatttacagagtttggtttacagctgcccttgtggaagcatttggtttgggaagttgatccctt

SEQ ID NO: 7995 - DNA, 345 bp, Oryza sativa
  Clone ID: uC-osflcyp130a03a1
ggggcccaataaccccttcccaagtccggtttaggggaggaaaactggaccagttaaaaacccatgggaaaaaactttcccccaaccagtttattttttttgcaattcccccaaaaaatccctttccaaaaaagatccccccgtccatttttttaccaagtttttttccggtaaccccaaaagacgatttgtccaccacccacctttttggccctccaattgggtttttttaccaatttggcttcctcaacaatcactggtgggggggaaacgtttacaagttcttctttggcggggtaaaaagagactcccctgggcgggctgccaacccacccccctgccaaa

SEQ ID NO: 7996 - DNA, 407 bp, Oryza sativa
  unsure (1)..(407): unsure at all n locations
  Clone ID: uC-osflcyp130a04a1
cgataactgaatcatttcttcatctcatcacaggcaaatagagaacagcaacattgcttctagaagatagctcactgttttgagaacacacgtaccaaaattttaaaagtgcaaaaagatattatcaaagtccgcaagggttggattccacagtaacgtaacatcaaagcacataggcttaacgataacggcgaaaagagacagtctggttgcgcttccaggtagccctgcgggacggcctggccttgtggtgagtgcgacccttgccgggcagaccacggtactttttgccagtagaggtgagaccacggagctcacggtgcttgtgcacaggctttgcgatcccgccgatccttgggtcattgcggatagcactgtgagcaacatncacaaggatgatctcaaag

SEQ ID NO: 7997 - DNA, 330 bp, Oryza sativa
  Clone ID: uC-osflcyp130a06a1
attgatactgacattttacacgtgccgggccgtggactccaatgaaccacccgtgcagcacaggcgggggacccaaagtgaggggggcgagccacccgcaccgaaaactagaccccaacaaaagggacagccggagggagcgccaacattttctccgaccaaagggaaacgcaaggggggggagaatacactttaactgagacgacatgggtaaaacgcggggaacatacgccccagagtaactaccctggccggaacgaacataggagaaatgggcatgcaagtgacccgcccagcaaacaccaggcagggagcttccaggagccggcc

SEQ ID NO: 7998 - DNA, 358 bp, Oryza sativa
  Clone ID: uC-osflcyp130a07a1
aacccaaaattttgttttaaaccccaaaaaaaaaaaagaaaaaaaatttaaaaaaaaaaaaaaaaaacccccagcggggggaacgaaaaaatacaaacacccccgggggggggaaacaacccccggggggaaaaaaaaaacccacggaggaaaaaacccgggcccccgctccccccccgggggacaggggggacccccccaaaaaaaaggcccccgccccgggggggccccaattcttctctaggggaatagcaacaaaaaagggggaaaggaaggaaaaaaggttcccccggggaaaaataaagtaccccacaagacaacacaaaaagagaacccgcaaggacaaaaaagaaaacgg

SEQ ID NO: 7999 - DNA, 470 bp, Oryza sativa
  Clone ID: uC-osflcyp130a08a1
gagcaactaaaggttgtcgtctcatagaattgtagaatttaagaatcacataactctttgaacagcagcacagttttaacctaccacagtgtccagtagtgaccaaatccataactaacagtcaatagaatccataactaatatttcctatctccagttcccttccatcagaccacgggcagaaaactgaattaatggataaactctaccattttctacattcccaatgagtatactcacttaagggcaatgatgatgagtacatgagatagctcaacttaaattggagaccatcttgttcagaagtttcagtctttcacccacactggtaacttgacaaacaagagccacacatagtggactgtttctctccatactcctaactccttagtgacatgcaggagtactgcatgtttctaatatgtgatcatcattttccttttttcatcaacctattgtccttatcagct

SEQ ID NO: 8000 - DNA, 315 bp, Oryza sativa
  Clone ID: uC-osflcyp130a10a1
aacagcccccttaatagttttaatttcaacacaagcaaatctgattccaaagtccgggggcgggtgtactcgttcatttgttactgcccccatttccaatataatacaacagtgaaccgaatgtacacgtacaacaatgttgactatagttgattgtaactacacaaatgatcgttacttgctgtaagctctgccttttgtgtgtaggcaggtaaggggggaaaataatcggtcatccaaaattactggatcgttgcatatgtttcttgtttcattttcattaagttgctctctatgcctcttaacacaggtcta

SEQ ID NO: 8001 - DNA, 421 bp, Oryza sativa
  Clone ID: uC-osflcyp130a11a1
acgaaagatgctcattaatttcccagattctggcaatgttgaactgccagggcaacatttgcatgcaattcatgtccggatgtccctatcaaatactccatgcaaattgcaattgcatctatcaaactgacataacctggagaaactggtccatagatgcaagtatcagggacatgcaacaggtcgtctaacccaccaagttcttattactaacttgttgctggagagtacgcatcttacacgctaagacaacggcgcaggaaaagatcggtcgtctcagtggtcttgagaaatttccttgaggacattgcccaggttagcctcggccctggtgctctccacccatttggcattgatcctcactctctcgatgctctgcttcaccgtcctcgcgatgttggccttcgtcctgctcttgaag

SEQ ID NO: 8002 - DNA, 421 bp, Oryza sativa
  Clone ID: uC-osflcyp130a12a1
tgcacgcgcgcgtgcgcgaggaccctcgttcgcgggcgcccttttttttttttgggtcgattgatgctcatgggtttcccagattctggcaatgttgaactgccagggcaacatttgcatgcaattcatgcccggctgcccctatcaaatactccatgcacacagcattcgaactcttccatcatacataacctggagataccggtccatagatgctaggatcagggacatgcaacaggtcgtctaacccaccaagttcttactactaacttgttgctggagagtacgcatcttacacgctaagacaacggcgcaggaaaagaccggtcgcctcagcggtcttgacaacattccttgaggacattgaccaggttagccccggccctggcgctctcacccatttggcattgaccctcactct

SEQ ID NO: 8003 - DNA, 374 bp, Oryza sativa
  Clone ID: uC-osflcyp130b01a1
ggggggaaatttggctaaaaaaacaaccccgggataggggccccatggaaaccccccacccttcctgaaccggaaaagcctgaaaaagggaaaaagggaagggcataaacccccaaagggcccaaaaccttggtgaaaaaaaaaaacgggcaaaaaaaggcccggaacccaattggaaaaaaaaaaaccggggggggagtttaaaaccccccaaaaaacattgggaaaaagagctccgggcccgccccgggttgaaatccaccgaagggccccttggatggttctcggccccccttgagctttaaaagggaacccggggcccgggggatttcccaatggattaaaacactttccggttgccccaaggggggggg

SEQ ID NO: 8004 - DNA, 389 bp, Oryza sativa
  Clone ID: uC-osflcyp130b02a1
tttttttttttttttttttttttttttttttttttttttttttttttttttttttttttttttttttttttttttttttttttttttttttgggggggaaacaaaccgggtttaaagcccgaaccgaaacctggttaacccgggggccccaaccccaaaccaaagcccctaaggcggggaacccaagggccaaaagttttgccccccgaaaaaaagaaccagttcccccccagggaaagccagctaggacccatcccaaggcagggggggggcccaaaaaggggcccaacttggcattggccccccgggacaaaaacctggggcaaatgggccccccgccccccatgagggtcacactggcaccgaagaaacggccccccccccccccc

SEQ ID NO: 8005 - DNA, 411 bp, Oryza sativa
  Clone ID: uC-osflcyp130b03a1
aaaacaaacaaccccaaactgtttttttcacaatgtttgccgttgacaatggaaagagtaatttaggtccaaggggatcattggcggggggaacaaaaaattggttgccccacaacccccaccagggggcccaacagggggcgctttccgtttttgggcgggggaaaaagtaaaacctcccggtgggaagggaaactgaattatttttgcaaaccatgatgatgagggatgggctccttaggaccccccccccccttagggttttggtgttcccattttggccactggaggggtcactctgaatggctttaatccttttgggtgccctggggggaatcctaataattgaccctggacttggacttggaaaattcctcctggggggcctccttttccttcttggggggggct

SEQ ID NO: 8006 - DNA, 432 bp, Oryza sativa
  Clone ID: uC-osflcyp130b04a1
gcattaatgcaatgagaccatcgaataatggaatcgatacaccgatttatcagtacacccattctcacacaataatttagagacaattccggagttctggaaacatggtaatttcgcttccaccagacaaaacgcaggacacgataagagctatacacaacgggctctcagattataggcctccaaagaggctataagggtcatccgtgctgtgcaccgcagcaaggactgcagcaaagcacatcttgatgcaaaatatgttgacggcatccgcttctgccacctccaccagaccaccagccggatgacatcctcatcagcttattagctgtccatccaccttcctccctgcttcttctcgcgcccctaactctggccatgatgtaaggtttacctagccaatgttacctacacatacagagtaacagagag

SEQ ID NO: 8007 - DNA, 492 bp, Oryza sativa
  Clone ID: uC-osflcyp130b05a1
ggtacaagcaaatatgtgtgtccggtgcttattagggttcaagaatgaaaaaaaagaggggtacagtgtcatgcttgctcactttgtgctgggtgaacagcacacagtgactagacgcagacaagtagaaatgtaaacagtggaagaagaaaaaaaggaaaaactaaaaacaggacacagtacggtagcacatgatctacacgacctcattttacaggtacatgctgattgatcaaaatacaagtaacccagaaaaaatgatacgcacacaaactcatattcttttttttttgttctgtttttataaagcacgaattgggctcgccatcgacagcactacttatatatgctcggcgaaaatatcgataggactctgatttctatctgtgatatataggtagcgatcgatctcgtgatctcttctcaccggatatatttaatttcgacctccaatttgattcgagatgtaccacacaccaggcgtctgacaat

SEQ ID NO: 8008 - DNA, 435 bp, Oryza sativa
  Clone ID: uC-osflcyp130b06a1
agaataaccaaaacataggaggtttcatttcttcgcctcaaagaagtgtagcatctttccttctttcaccattacataagcttaagcaataacagataacaaatcctcctcctgctctaggtaaaatattcaaacacaatacccttataagtacttattattaggaaagtagcgtgcatgggcataaatggcagcggggggcaggttaagaatcacaatgctgagcagcgaggaaacaaaacaccataatgggacagagcaaaagccttcgaaagggagcttttaggcagaaggcttctcccacttgaggggcttcaccacctcccaggagaagtctgggtcgccccttccgaagtgaccgtaagccgccgtctagcggtaacgtccgttgccgcctttcttgaggccaaggttgatgatgatcatgccaggcct

SEQ ID NO: 8009 - DNA, 430 bp, Oryza sativa
  Clone ID: uC-osflcyp130b08a1
aaatatatatagccggagcttccatatatttcattcacatatgcctcacccaacaacatatagtcgtagcagataccactcttacatcaagtcagagagagatcaggtgaaacaaaaacaaaagcagagcacggccggtaaaatcaaaagacgatgaacaaactgggaacacacgaaacaaggtgggagacatcatcgaatcagagatgaacaattaaacaaggctatatatgacgatgacggcttagttgccaccagactcctcgcagcccgggggcttgtaggcgatgaagctgatgagctgcacctgcctgacgttgtcgaagccgatgatacggacgaatgcatcagggtacgccttcttggcctcctcgagctccttgagcacctgggtggcgtcagtgcacccgaacatgggcagcttccacat

SEQ ID NO: 8010 - DNA, 430 bp, Oryza sativa
  Clone ID: uC-osflcyp130b09a1
aaaaattaaaattaataaaaaaaaaaaaaaaaaaacaaagcaacaatgaatagtactacaatactaaaactatacaccgcaggtaagcaaatcacctggcggctaactaatcatgcaaaaaggaaacctgggtacacataatgaaatatgggccagcgagccccacatgggcaactagggacaaccaatcgggccgggtaattctgtctatgtggtcggcgactaaatttttgggttggaccactaccataatttccctggatcctgaagttcacctttaaaccagccaagcatcacaacaacccccaatggacacagaaccaggtaccgcagcggaagatggccacgcccgcccatgaggaccagcccctgaccggcaagggaaaggccaacaggttatgccaccggcagcggactcgtgggccgaccc

SEQ ID NO: 8011 - DNA, 396 bp, Oryza sativa
  Clone ID: uC-osflcyp130b10a1
cccaaaccccccacagaggccacaggggcccgggccacaccacccgggcccccgggttttttaagacccccccacccccggggccccccccccccccctttttttgggttaccccggaaatccttccccccctgggccaaaaaaccccccggatcccaccgggggcgggggggggggcagggtacccccccccccaaaaaggcccccggggaaacaacccccttttttcccggcccccgaattggggggcccccccccaaaagggggggggggtgggcacccccaaaacccccccccggggggggggccccctagggccccccaccccctctggggggggcccagggggccccggggggggagcaggccaacccggggcccaccccccggggaacc

SEQ ID NO: 8012 - DNA, 366 bp, Oryza sativa
  Clone ID: uC-osflcyp130b11a1
ttttggttttttttttttttttttttttttttttttttttttttttttttttttttttttttttttttgttatgttggtgttcaagggcaaaacctagggaaaaacagggaaaaaaaaagccccccgcggaaaaaacaggggcccaacaccaaacccggggggccccaaaaaagggggggaaaaaaaagggggggcggaaacccccgagggagggggacacggacacggggcctagaagggggggaaacaaaacacaaagggggctccgagcaaaagaacccggacgggggaaacaacacacttggctcctcccacaggagggccggcacaaccccccaggggaagccgggggcgcccctaccccc

SEQ ID NO: 8013 - DNA, 414 bp, Oryza sativa
  Clone ID: uC-osflcyp130b12a1
aggaaacaactaatatattgccttgtacttgaggttctagcaggaaacagctctcaagtactcgtgagttgagaaaatttaaatgtacaagagtagcctcaaaaccaggacatcttctggccgacaataaaattatactcaaactttggattaatctaacctacttggggtccgaattcctactaacgtaatcttgccgtgtttttaccagtacatctcggctctctgaatccagtacatcggcacacatatggacattgcttcaatatatgtatatatagaaggtaacatactttttttctgtaaagaaatgtgggattacactacacagggagagggggtaggtaagctatgaccacccaggtgaagcgctgcgctgaccgaagatgtctggaatcccattccagttcccct

SEQ ID NO: 8014 - DNA, 393 bp, Oryza sativa
  Clone ID: uC-osflcyp130c01a1
ggcccaaaaagagctttttgtttgggtaatattccaaaacaagcccgtagtacaaggggttgcagtacatgcatggaaaatctttagctagctttttttgggacacgtcccccttgggaaggggcaaaacgttcgagatgaacccccaagaagaagaaaggttgcttgcctgaccggccgggccgatcaaccatgggtgcccacacatgcatgcatggggattgaaccaccttagctagctcatttttttattccaaaatacgtccagatactactaattttggatacagaattggatcgggttcacacattgacccaccggggggcttttgtatgcatataaatgaaccatccgatcgatagctcagctcaccctggagcaatccatggaag

SEQ ID NO: 8015 - DNA, 399 bp, Oryza sativa
  Clone ID: uC-osflcyp130c03a1
attataaaatgtttaaatgacggggccgaaacttcaaaacgaacacaaaaaccgggatttgggcccgacagaacggggcctccttgtcccttgggcatcaaacaaactttctagaccaacaagagctaaaaaaaagagcctggggggggacaaaagcagactaggttaaccaacaaaccctagcaattaagcccaaaagaagcaaaaatacccaagaacctgggatgtaactctaccagcccattgggactccaaaggggggccgcttgaggctgcccccaaaacaatgaaacagggaagggacaaggccaccaaacaggattgggagcaggacattttccttccccggaacaaggacatgatagaggatccgtggcgggaatactttttctttttttc

SEQ ID NO: 8016 - DNA, 427 bp, Oryza sativa
  Clone ID: uC-osflcyp130c04a1
gggaggaaaaaaaaaaagaaagaaaaaaaaaaaaaaaaaaaaaaaaaaaaaaaaaaaagggaaaaaaaaaaaaaagaaaaaaaaaaaaagggaggggaaaaaaaaagaaggggggggggccgacccccccggggggaaaaaaacaaggggaaaggaaaaggtggggggggggggggggaaaaacgggggggggggggggttttccccggggggcctccctgtccccaggaaaaaaaaaaaaaagaaaaaaaaaaggaggggcgctgggccgcccgttgggcgggcgaaattttaataccaaaacgggggccaccaaaccgaaacaaaaaaaaattaaaaaccccgcaaaagggggcgggggggggggggaaaaaatggcccccccgcgcccccccccaagtaaggaaaaaccaggggttactaaaaa

SEQ ID NO: 8017 - DNA, 384 bp, Oryza sativa
  Clone ID: uC-osflcyp130c05a1
aaaaggggaccgaaaaaagggccccgggtttttttttttccccaaacacccagggcccaaaaaaaaaaaagggggggggtaacgggccaaaaaaaaacaccccccaaaagggaaaaaaattgggggggaaaaaaaacccggaaaggggccccccagaggggggccccccccgggggtcccccaaaaaaaagggggggggccctttggggggaaaaaagggggggggggaaaccccgaggggggccaaaaaaaaaagggaaaaaggggggaaagagccccccccccccaaaaaaaaaaaaaaaaccggggtcccgggcccaacgggggcccccccccttttggggaaaaacttgggaaaaaaaaaaaaaacccggggcccccaaa

SEQ ID NO: 8018 - DNA, 359 bp, Oryza sativa
  Clone ID: uC-osflcyp130c06a1
cagaaccgcaacccaccagacagtatccaaccacaaaaggagcctaacgttattggactggtagaacgctcagcggtgtgtgatcaacaagttggttaatgcgtacacctctcaacgttagcactggggagtaaagacagtcgaaactctttcgccatccaagatatattcaacgaaacccccatacgtgttctctcgacttactccgatccgctacgggaaggtagggggggtcggattcaagtgaagaattcacacttgaccggcgtgccggtgggatcgatccatggcttagcgtgcaggaagttgccgactgagaacttggacgaggccgtcttgctgatcaccttcttgtaccc

SEQ ID NO: 8019 - DNA, 446 bp, Oryza sativa
  Clone ID: uC-osflcyp130c07a1
cagcattgaaagagtggggaaatatattcaattattattagtgaagcatcttattgcctgcttttacaccccaatagcttatacatcccaacaaaaaatcgtaaattcaacaccggcaacaacaaaaccccaaaactcactttgttttgacactgacgccatctgttccagcgatgatcaccgaagtcgccatgtccaggaacagcccatgctcaacgacgccttccaaagctgagatctccttccctgctgccaacgcatccttgatcggcgtcttgaagtataaatcaacgatgtagtttgagttgtcggtaacgtagggtttgaccgcttcatccaatctcagcttcgcctcgcatccttcatcgttaaacagatcctgcaatctcacttggttgtacttccagcagaactgcacaaccttcacacacatgggtagaccactt

SEQ ID NO: 8020 - DNA, 437 bp, Oryza sativa
  Clone ID: uC-osflcyp130c08a1
ggccgaaaagatagttctcaggttgacaacagcacaagactagccaaaacccagttcaacattttgggcatattacaatgttactggctgccacagggcagtaagcccctagtaaaaacagagtaactggggtcaattacaaccggatcaactgactggattgatcgcaagaaccggggacgctgcagcgaacattatccggaccaggacctaagtttattttttaagggggaggggggcactaagctgcaacatgacaacagaagcaactaattaacatcacataaaaacatgggtatctacatgcatgcttggttatcttatggcttcaacaacttgggctaccaattctccctcatagcctgcattgcatgaattggtttgaatcaaaagaagaaccaacccattggaatcacaagtgcactccaaattctaga

SEQ ID NO: 8021 - DNA, 328 bp, Oryza sativa
  Clone ID: uC-osflcyp130c09a1
atgttattatgggggtaaaatagttggggggacaaaaggaaaaagggacaacccaccaccccacagggagggaaaaagaaaggggggggaaataatacgagagggaaaacacacaacccctaaacgaccgagaaagaaaacaaaagagagggaacaaagggggggaaacaaaacaaaccgcccacaagaaaaaccgcgaaacggagggggcgaaaaaagagggggaaataaaaaacccggaaacaaaaaaaaaaccgaagaggggggggcaacctctaaaggaaatatgaggcctggggaggaagaaaaacgcggacgggaagggccc

SEQ ID NO: 8022 - DNA, 388 bp, Oryza sativa
  Clone ID: uC-osflcyp130c10a1
aataaaaaaaaaaaaaaaaaaaaaaaaaaaaaaaaaaacaaaaaggaaaaaaaaaaaaaaaaaaaaaaaaaaaaaggggggggaaaaaaaaaaaaaaaagggcggggggaaaacccggaaaaacccgggcggggccccgagggggcccaaattttccaaaaaaggaggggaaaaaaaggggggggaaaaaaaggcaaaaagggtacccgggggaaaaaggtatcccggcaaaaaaaccaaaaaaaaacccggggggaaaaaaaaagggaaaaaacgggggggccaaaagggggggcaaaaaaaaaaaaaaggggggggccaaacgcccctataaaagagggaaaaccgggggggaaaaaaaataaaaaaaaacccccaaagggggggg

SEQ ID NO: 8023 - DNA, 307 bp, Oryza sativa
  Clone ID: uC-osflcyp130c11a1
atacgcaaaaaaaaaactgcagaaaaaccactgcagaaccccacttagaaaacacccaatacaaagacgccgaaaaaccccaaaagaacaaaaaaaaagcggaaaaagggaaacggccccccgggaccgcccaaaccgaaccaaaaaaacctggacccacagaaccggaaccaccgaaaaccaaagggccaaaaccagatggaactgacagccaagggctcccaaccaaaaggagaatgcggacatggacctccacacctggggccggaaaaccccgaccgccaaaaccaggcgggccaaaccatga

SEQ ID NO: 8024 - DNA, 466 bp, Oryza sativa
  Clone ID: uC-osflcyp130d01a1
ggaagaagtgaattttattttgttatcactccatacagtggaaagtatattgacatttcagctcatttaatccacgagtcttgccatccctctcctgtggcttatgcataactatttttatttcgattcgtcatagccggtgaaaggtacacagatcactcagcagcttttcctttcctgcgattgctaccacctgcagaggctccggtgcctcccatctccacaaggtagtagatcattgagtcgacgtcctcgccaaatatgctataggcttccatgacctggatgtagttgaagcccattgccaggaggagctgcatgctgcgggttagcacggtgtccgggagaacgaagcactcctcgccaactctatcggcagtcccagctgaccgagaagacccactaatcgcagcagaagaagatggctctgcccctgatgttgatgactctctgaagttaagttgtt

SEQ ID NO: 8025 - DNA, 477 bp, Oryza sativa
  Clone ID: uC-osflcyp130d02a1
gaaccgaactccaataggaggaggatagcttaatttgcacatagtaaaagagggatacacaactgagtactgaaattacaagtctgtgttcagataaaaacagtagtacaacaaacttgaagaggaacgtcgactccacaataattactaacaaagcaggcagcgggaaacagccgcgcccatcagaaacagcttgctctggattggcatcttgacagtgataatagctgatgcaggttacgacctgctcttgaatggaattgccctgatgaccacctggtggtagatggcagcaagggcagcgccaatgaaggggccaacccagaagatccaatggtcatcccaggcatggcccctgttgtagatgatggcagcgccaaggctcctcgctgggttgatgccggtgccggtgatggggatggtggccaggtgaaccaagaacaccgcaaacccgattggcagtggggcaaggatcgg

SEQ ID NO: 8026 - DNA, 464 bp, Oryza sativa
  Clone ID: uC-osflcyp130d03a1
ggcaataataagtcttaacatccaaatttaaaccgaacagaaaatagagttttaaacgactgacatagtgcacaaagcgagcagatattaacggtcaatgcaacaactgaaatgaccgtcgacaaaacttaacgagtactaaaagagctagatatctcaaatgcagatatggaaagcaccacttgaacgaggctcatttcttcttggcggcagccttggtcaccttggcaccggttgggtccttcttctccacgttcttgatgacgccaacagccaccgtttgcctcatgtcccgcacggcaaaacgaccaagaggagggtactcagagaaggtctccacaaccatgggcttggtgggaatcatcttaaccataccagcatcaccgttcttgaggaacttgggctccttctccagctccttaccagatcgtctgtcgatcttggtcaccagctcagcaaacttt

SEQ ID NO: 8027 - DNA, 291 bp, Oryza sativa
  Clone ID: uC-osflcyp130d05a1
ggggaaaaacgggcccaaataggggaatttaaacaaagggccaaacccccggagggcgggaacccccccgagaaaaagagaaaaacccgggccaaggttcccaacacccccaaaaaaaaattgccggaaaaggggaacccggaaaaaaatccccgggggccccgcgaaacggccccggggaaagtcctcccaaagggggggcagggccccttggacacgctggcggggcccagcgcggggaccatgccattgttggactggaggagctgcagcgagaaggagtccgggacg

SEQ ID NO: 8028 - DNA, 424 bp, Oryza sativa
  Clone ID: uC-osflcyp130d06a1
aataattaagctttgttacttccaatttaactcaaattgatcttttacaagtactttttttttcgccgggccttttacaacacgtacacaaatttgtcggtacgtcgtgtcatcctcctccagacgagtgagtgctagctcaggcttcttcttcacagagagtgacgcatttgcttcgcagtgatatgtacacaagaaggcgttcatgcagcttagcccacacgtgtcatttccaaatctttagcgagtccttccaggtcccttgcttcatgcactgggcgtatatcttggctagcctgatgattatctctgaaaatggcggccttgctataccctgagtatcccagcattcttcgatcagcgctttgaaatctggaggatatcccctgagcttgttcttcagaggtggacgcatgccatcata

SEQ ID NO: 8029 - DNA, 421 bp, Oryza sativa
  Clone ID: uC-osflcyp130d07a1
aaggaaacctagggtggtgataaaaaaacagcagcacaggggggttgtttggttggtggtgcttttgctgacaggacaggccttgtttcaaaaccaagatccagccccaaaatttgcccaatcagtcacaccgccccgggaaggaaaaacatactggtggggcatacggattcatggcgaaacccccatacagaacaggattttcagataatttaagcaccccagttttcaagcttcaagggccccccctcctggtttcattttaaaatcgaccacgcccacgggcgggaccacggaagggccccgggccttcgccccttttttccctggcacgtccacgggctggagggggggagccctttgggttttcaaaggattcgccctgatcttcataatagtcccccctggcgccataaccgga

SEQ ID NO: 8030 - DNA, 173 bp, Oryza sativa
  Clone ID: uC-osflcyp130d08a1
tttttttttttttttttttttttttttttttttttttttttttttttttttttatattgaaaggaaccaaggaagttaaagaaaaaagagaagaagaagggggacgaaccagacgcgacccaaaacaggagaaaaaaagaaaggaaggcgccaaaaaggcagaacacaggccc

SEQ ID NO: 8031 - DNA, 372 bp, Oryza sativa
  Clone ID: uC-osflcyp130d09a1
gggggaaaaccaaaaattcatggggggggggaaaaaaaaggccctggggaaaaaaaaacagggggcccggggaaaagccgggaaatttggattcccgggcccgggttccccgccaccaaaaaaaaaacccgagggggggggaaccccctggaaaaaacgggggggcggggggggggaaaaaaaaaacggggggtttaacccggcccccccaaaaaaaaaaaaggaaaaggggggccccccccccaggggacaaagggcctaaattggccggggaccccccaaacccgggggggttaaccccgaagaaggggaaaaaccgcccccgcccaacgggtgaaaagcccatggggcaaccaagggccccgggggggc

SEQ ID NO: 8032 - DNA, 378 bp, Oryza sativa
  Clone ID: uC-osflcyp130d10a1
aaaaatgggccaaactcgggaagcaacagtaagctttacattacacaggctacatgaaaagacagcattggtaatcactttaactggcgcacatttacaattccaagatatgatgcattacagtaactggtgtctgatggacactccacaattgggaaggagaattgcaataccagggtccccccattgcagaaaacaagaatcacccttggctgttcaggccttcgtagttttggagcaaaagataattgcgttacgtagttagttccccaagccaagttccctgggctgttagttggcattctattggcattgacaacagcgtgggaagaaatgactgtcattcctggagcctccagccaagttccttggattggt

SEQ ID NO: 8033 - DNA, 451 bp, Oryza sativa
  Clone ID: uC-osflcyp130d11a1
ggcggcggtcacccaccgggcgagcggcgccggagcggcggcgcccttgtgggctttgacgtcgccggaatcgtccgacgagtcgtcgctgctgtcgtcggccgccgacttgtgcttcttggacggctcgggcgcgggcgcgggggcctcgacgaccttgtagagctccttgggcttgaggaacttggtgacggcgtagacggcgagcggctcggcgtcgccgacggtggcggtgacggcggagttgacgaccctggtgtcgagcgtgacggtctcgcccttattctggacgtcgtagctgtagtccttcttggactcgctggcggtggcgagcgtggtgaccatgccattgttggacttgaggagctgcagcgagaagtagtccgggacggcgtggtagaggaggatggcggtcttggccttgcggtgaggctctcgtaggagggcatga

SEQ ID NO: 8034 - DNA, 392 bp, Oryza sativa
  Clone ID: uC-osflcyp130e02a1
ggttctgtaaacttttcttctttctgtatgacaatgcattggattggacaaaaaggtcgctcttgattccagtgacgctgtctccagcccacaattctgtgggaagtaacaaaaaacggaatatacagaatctggccctgaaagtgctccaaagctacataaccgctagagctcccgaccgagatacagactgatgggggaagatcgatgcatatgtgatccacgcagacacatcttaaattttacaacacttacttgggtggttttaaaatgccacccctattaataatatcggctactcccgaccttttttacgaatacttttccaaaccggtttcgttcccgccccacatggtgggcccatttccccatttttttctccatccggggcg

SEQ ID NO: 8035 - DNA, 443 bp, Oryza sativa
  Clone ID: uC-osflcyp130e03a1
aggagaactaaactttctccctccattattggaataacataggagaactaaactttctccctccattattggaatcataaccagagatctaaataaaataccttggtagctggatgaaaactattccataggagaactaaactttctccctccattattggaatcataaccagagatctaaataaaataccttggtagctggatgaaaactattccatgtcaatatgaagcgtacttcgaggcaaactcagcaatattcttattcgagctccctcctttcttcatgggttccttagctttcttcatcccctattagcatttttcctgtactctggcttcctctcactctctagaacctctctgatgcatctctccacctcttcttttctcaccatgccttccttgtcccgatgtacgtgtacaccatttccccatgcactttc

SEQ ID NO: 8036 - DNA, 474 bp, Oryza sativa
  Clone ID: uC-osflcyp130e04a1
attggcaaacgaaaaataattcgtgaatacaactttaattgttttatatacgtgttcttagctatctaaaaacaagggctgaaaaataaactttgattaaaaaaccccaaaatcaactccaaatttaaggttgaaaatttaaattttagctgataaacataagcataagcaaaaaaagatgaggccctttatttctttcttctagcaaggcacatgcacacatttggttcttgtctcagacagaatgcatccattcatgtcacgagtggcatttgagtttttgacaaggggagttttgaaatccaagctgggtttaaagtgtgtacactgattaaaaagcttgaaaacagaacagcggccgaacacaaaatgagatctgaaaacgttcatggtggaatagtgttcagacattgcttgatgtgctgagtgcagactgaacttggggagaaacagaacaggtttatgagcttgagt

SEQ ID NO: 8037 - DNA, 463 bp, Oryza sativa
  Clone ID: uC-osflcyp130e05a1
agcggcgtcaaaggaattttctcatgttaattacatttgttgttacatttccaaactccaatggaaatcgaaatgaccacgtcagaaagaaatacaaaaagttattagccaaaaacggcatgaagaaatgggatcaaacaaaatatggcagaacgtacaagaggtgatccagaacatgcttgcggaggtggacaaggaaagaggagaggaaaattaaaccacaatccccatgcatgcatgcacggtggctagaaaaatgcatagcatagagatctactatgtgctgtgtgtgtctctcattcgtctccgtttaatttgttgctgacgaattgaactgtggcaacgacgacgatgatggcgacggtgatctacaggccctgctctacgaggtagtcgccgagcctctcgaccaccatgttgcactgccctggggtcatcggctcatcgtagatgccgaccacca

SEQ ID NO: 8038 - DNA, 467 bp, Oryza sativa
  Clone ID: uC-osflcyp130e06a1
agaaaaaaaaatcatgtacagttacataaacacatacgtacagccagtatacaaacgcaaatgaaaactaaggcacacagcacgcgttcaactctgatcaatatctgatcaacaagcgagttcatgcgtacacctcgcaacatttccactcgtgtatagtgacagccgaaactctttcgccatccaagatatatccaacgaaacccccctacctgtcctctcgacttcctccgatccgctacgggtagctagggtcgttcggattcaagtgaagaagtcgtacttgaccggcgtgccggtgggatcgatccatggctttgcgtgcaggaagttgtcgacggtgaacttggtcgcgtccgccttgctgatcaccttcttgtaccccggccacgcgacgcgccccgccgtgacggcgccgggccccttgttggcgtactcggcgtaacagagcgtcttgagcgcgaact

SEQ ID NO: 8039 - DNA, 387 bp, Oryza sativa
  Clone ID: uC-osflcyp130e07a1
actcacttggaaggggtatttagattccttttttttaagggtaattggatccatgccactggaactttgggagaacaaaaaagggaaaattagaactttgccattataattttacaaaatttaagatatgccatcctgacccacatggaattgactcatggggattctacatgtcattgagataccgatgacatattttaaattttacaaaattataatggtttatttaaaaaggccactcctattaaaaatatggggtactcccgtcccctttttcgactactttcccacaccgttttcgttcccgtcccacatgtgggtcccatttccccattttttccttcatccggggcgaccgcaaaaggacaacggcagcagcggctcccg

SEQ ID NO: 8040 - DNA, 99 bp, Oryza sativa
  Clone ID: uC-osflcyp130e08a1
aagggctcattttatttaaaaaataaaaaagaaaagaggtcccaccaaccaacgcttttcaaatcagaaaaaaaggcaaaggtgggccccaccccaaaa

SEQ ID NO: 8041 - DNA, 364 bp, Oryza sativa
  Clone ID: uC-osflcyp130e10a1
aattacaagggctgaaaaataaactttggttaaaaaaccccaaaatcaacgccaaaattaaggatgaaaatccaaaacctagctgataaacataagcataagcaaaaaaagatgagggcctttatttctttcttctaagaagggacaagcacacaattggctcttgtctcaaaccgaatggatccattcatgtcacgagtggcatttgagtttttgacaaggggagttttgaaatccaagctgggctcaaagggtgaacactgatcaaaaagcttgaaaacagaacagcggccgaacacaaagtgagacctgaaaacgtgcatgtcggaaagtgccagacattgcttgatgtgctgagcgcaga

SEQ ID NO: 8042 - DNA, 376 bp, Oryza sativa
  Clone ID: uC-osflcyp130e11a1
caatatcatttattttggttgggagctgatgcgacaaacaaatgttgaaaaactaggcccttttgctccattaaagatttctacataggccttccaacacagagaaaaagtatgatgaagaatagactaagaagctggcctaaagcatatgccaagctagtgtaaaacaccatccgttctggtgttttgtatggaactagactgctatggttaaaaaatgaagttacagacatgacaattcacagtgggcaccgatggtacggctcagcatgagtgtacagctgcgaaagtgatttaccagttcatgctcactaaggcactgcaatttgcgagaaaatagcatactggacaagcattttgtccaatgaagcctcat

SEQ ID NO: 8043 - DNA, 473 bp, Oryza sativa
  Clone ID: uC-osflcyp130e12a1
gcttggtaaatttcagcactttccaccccaaaatcgagtttaaagacagtcaaccacttgtttccgacgacaaagggcagcatcggattactatataactaatccagaccacgagaataaacatattccaaaagtaaactggttgggcatacacacggcaaaaagagtagaaaaagtaaactaagagcttaaggtagtcgcagctgaggaatccaggattgtcattattcggcagcaaaaatgtactactgttcatcaaccgacacaaagctaagctgagcgttgctgatacttagtatccatagcttgggtaggtggtgccaccgtagctgcctccattgtgaggtgcaggccctgctcctgaagcagccgatccgtaggatgcgccatatggtggtgggtatgaaccgtagctcagatcaactgctggagccggagggttagaagctggcggaggagggccctgaggagct

SEQ ID NO: 8044 - DNA, 407 bp, Oryza sativa
  Clone ID: uC-osflcyp130f01a1
ggggacgaggaaactcgattggcataaaaactgaattaggtgattttacatcacaacaacgggggcggccaataaggctttcctagggaatcaacatcccgggggcaggcaggtgagctacaagaacccagtttaagcaaaaaaaaacaacttgcctttgaaaccaggtgatctcaattttaaagctttaagcatggggcccaaatggcccaaagctaacaaagtttttaagggggaagtttaacaaaaaccttggggttatttttggaaaaaaaacaccaaagggggcctgccaaatggcatgggattggttaatttcactttttttttgaggctacctttggtgcccatgcttttccaacgtttgtttgaaatttccctggtgttgactggaaaaactcttttag

SEQ ID NO: 8045 - DNA, 418 bp, Oryza sativa
  Clone ID: uC-osflcyp130f02a1
acaatcagaagttcatttatccgaatgggcatttgataacccttacacatacatacacacaccttaaagttttaagagatgcccaatttagcaccgcagtagagtctgggcatttttacaagggcttatggataggatgtatttagcaaaattaaaggattgtaattttgcaacccatggaactcgttttcatcaaaattgggtaggactggatgtcacgcaacaaaaccatttttttgagtttgtcttgggggcatatgattccaccctttcagtcctaggttttttggagggggaatcagttttttgcccattcccaccctttttctcatctctggctttgttgaatatccctgggaatccatcagcggacgctgggtcgttgacatcccattcaccaaacttgggcaagggacga

SEQ ID NO: 8046 - DNA, 442 bp, Oryza sativa
  Clone ID: uC-osflcyp130f03a1
gtatcaacacatggttttgttgcattgatcttacaagtcaaggtcaccaaactaacaaaaccagcaacatacagcatccaagagaagctagcaaaaattggcttaagcatcatcagcactctgaatgtcgtgcagacaagtgcccttgccctgcctgatcacactagcttctacaggattatatgtcaaaagaaaaatgaccatcacgtcgacatttgaaccaccccaaaagaaaaggaactggatattgtacatagctcacactgagaacattgagcgatgaactgttagcgtaatggcattgagctgatgcatcaggtcaggcaacattctctacctgcactcaacttgcattggagtacagaacaaactaatttttcacacagcccaaaacggtttctgcccagaaatggaagttgggttccctccaagcacgctattc

SEQ ID NO: 8047 - DNA, 402 bp, Oryza sativa
  Clone ID: uC-osflcyp130f04a1
ggggaaaaggcaagggtcaaaaaaaattggttcacttggcccaaggcccaaaaaaaaacccttggaccctgacccggggggggccctgccccccccttttttggaccccccaagggcaagggtgcaaaaaaaaacaagccccccaaggggaacccccggccccccctggaaacccttaactggggggggccgggaacccttgggaaaaacaggaccccccccccgggggaaaaagacaaatttttcccccccccaattgcccccccgggggccggggacccccggggggggcctccccccccccggggaccttgggaagggggccccccccccaaaagggggggcctcttcccgccgggggaccccccggggcccttggggccctcccccttcccggggggc

SEQ ID NO: 8048 - DNA, 460 bp, Oryza sativa
  Clone ID: uC-osflcyp130f06a1
ccaagatgctgcaccctgcaaacatgttttttgtcaacagtgggctggagccgaaaaatcgggggagctgtccaggaaaaaaaaaattgctcaagattccaatagcccagcaacacacctgtggctccgataacaggaggccggacatgtcaccctaaaacttatgcttttcctagcttaaaactatagcttttggtctctgccgataaaaatccatgtccccaatgaaggctccgatcctttctgtgcaatgtcgccttgagtgcaggctctcattcagatcgcatcctttgttgaagagcaccaaaatggagaagaattttagccgcctcagttcacagccagggctcattctttactctcttggggtacagcagaatgcatcggttggtgtcagctggaaacgcatgggcccaagaacttctgtactgcctggaagagctgcttctcctcaaagggc

SEQ ID NO: 8049 - DNA, 380 bp, Oryza sativa
  Clone ID: uC-osflcyp130f07a1
gagtaaaagacactgaaagggctcattttattcagagcattttggtcagcagcactcctaccaaccaacgcttttcaaatcagagatgaatagctggtgggtctcacaatcagatcaagccattctcatacagttcagccaactccaacatcttaaaactatagctgcctctgcaccaaaatcttaacatttatacaggaacaggcccaacaacgaaatggcagggaaatttctcctcaatttgccatcgaaggcatcagtttttcagtaccctctgtggttagcccacttaaaaaaagcatggctggctttgatttattttggtttgggctacacgatgatgctatcatggggacaaaaaaaaagaaggcctggggaaa

SEQ ID NO: 8050 - DNA, 375 bp, Oryza sativa
  Clone ID: uC-osflcyp130f08a1
cagtaagataaaacactggtgagaccctgggaaagtttaacccccggggggtctggccaaaaaaaatttaccacttaaattaccccctcacccatggattcagaaccatggaggggggaaacaatttcccaaaaaaacacagggagggtgaattttataccaccccaaaatgtttttttttccgcccccccaattaattaacatactgagaacggtttccccccaaaaaaaaaagggagaaacatggaggggacctttttcatgggccaaaaattgggttaaccaggctgaacgcataaaggtccttgagaagcccggggcctggtgaaaaggaacacaccctcaacctgacaaggtttggaagatggggttggg

SEQ ID NO: 8051 - DNA, 201 bp, Oryza sativa
  Clone ID: uC-osflcyp130f09a1
gggggaaatcttaaaaacggaaaaaagggaatggaaaaaaaaacgggaaagggaaattttaaaaaaaaaaaaaacaagggccataaaaaaaaaatgtttttttttaacccccaaaaataaggggggggaaggcacctaaaaaaaaagggagaaaaaaattttggggctaaaaggggaaaaaaacccccgggggccgggaaa

SEQ ID NO: 8052 - DNA, 378 bp, Oryza sativa
  Clone ID: uC-osflcyp130f10a1
aaaaaccccaaaaaactggggttgggggggaaaaaaaaaagaggaggcagtcccgggaccagaaaaatggatctaagggggaaaaaaaaatttttaacgggacccaaacaaagggtggggggccccccccggggccagggtaaggggatttttggcccttttttaaaaccccaaccagggggggccagggtttaaaaaaggaaatagggggaaaaccactcaaaattggggggggggacccccaagggggggggccaagattcaccccggggggcacagggggggcacagggcccccaaaggtggtttgggggccccccccccaacccaggggggaaagaaccgggggatttcccccgcggcccaacggggggggggg

SEQ ID NO: 8053 - DNA, 481 bp, Oryza sativa
  Clone ID: uC-osflcyp130f11a1
aagagcacatgaaaacctgctgccaaaactttgatgttacagcttacaataacaatcagaatggtctggtgcttctgcgacaaacaaatgtttcaaaactcgtcccttttgcaccattaaatatttctccctaggcctttcaaaattgtgaaaaagtattatgaaaaatagactaataagctcgcctaaagcatatgacaagctactgtaaaacaccatccgttttggtgttttggatggaactagatttctatggcttaaaaatgaagttacagacatgagaattcacagttcccaccgatggtacggcgcagcatgagtgtacagtttgtgaagtgatttaccagttcatgctcacttagtcactgcaatttgcgttaaaattgcatattgcaaaagcattttgtccaatgaagcctcatggaattatctcctgctgtttgctgtttgagccttgcttaggtttgcaagttcttcaatc

SEQ ID NO: 8054 - DNA, 441 bp, Oryza sativa
  Clone ID: uC-osflcyp130f12a1
aaattaaataagcaagcaaggttttcataaaaccataataagtagaaattggttgattgcataccaaaatctaaaataaataatacttccatgcaaagacttttatcacggaataagtagcccatgttaaaatgcctcaggggcttttgaacttctcctaaatgagacatgacaatatcaggaacatttgacaacgttaggaagcatttatccaagtactttcctagatgatacctatatgacacatgacaatttttaaatgcaagtgctttcctagagggtacctagatgacacaggacaatatcaggaatatatgccaacgctaggaaggatctatccacgtacttttccttaactgaagaacacaaggcatagggctccactttacaaatgtagccaccattggcgtgcccaggatagcaatcggttcatcaatatca

SEQ ID NO: 8055 - DNA, 396 bp, Oryza sativa
  Clone ID: uC-osflcyp130g02a1
aagccaaattaactttattaaaagttcaaaactgattgcaagtttggagcaatgaggtaatccggcatgcgtacttgagtcactagctcattcgctagtgctagctttgttgctatcaacttcattcaaacagagaccagctggcaacagggatacagtacatatatacatgcattctgctgttcatttgccttattaccatgcaccaatataatgcatcctcctctctagcttatcataagtactaattaactaattatcccagagcatggcaccaatataattgatccacttgagaccaagcatagtgtacacttgaacacatgcatgcattggcatgcacatagtacggcttgatcacaaacttaatcatcatactagcttccttggattaat

SEQ ID NO: 8056 - DNA, 320 bp, Oryza sativa
  Clone ID: uC-osflcyp130g03a1
ataacattatgttcaattgttttctaaacttttgaaaaaaaaaaaaagaaattgtggtgggccctaaaaagaaaccccctggggggaaaccgtttaaccccacccacaatgtacccccgggggaaaaaaaaaaaaatgggcccctccaaaaagccccacaaccccaaaaattttcccagggggccggaaccttaaaattttaaggggggaaaacgggggaagaaaaaaccacaccctgggtccgggggggacacccgggggggcaaccacaaccccaaaggtgcaatgaattggcatccataaagccaccacgccggagg

SEQ ID NO: 8057 - DNA, 428 bp, Oryza sativa
  unsure (1)..(428): unsure at all n locations
  Clone ID: uC-osflcyp130g04a1
aacttccaatcactggaactaaactttgacccacactgggctcaggtgggaaaaaacaaccttgctttttaaattaccctggaaaccaattccattttttagggaaatcccatgggcccctaaagcatcattcactagctggataacccacactactacaggtctatatattcttgcccctaaagcatgccacatgcatttggaggtgggcccgcccccaattcgaattccatttttttttacggggccgggaaacacaagaaccagaggctggcctagctttatatatatatatatatatatatatatatatatatatagggnaagggaaaacatttttcatcatagaagggggggtagccccagcagtagctgttgcagtagcaggcaaacattgctcaaaagcctggttgcttggccccagcctt

SEQ ID NO: 8058 - DNA, 425 bp, Oryza sativa
  Clone ID: uC-osflcyp130g05a1
ctctcggttggtcagaagttgccctgagaagttgtaaatgatcaacagtactaaactcaaggcacccacaagcaatgcaccaaatattgtaatgtcctgatttacagagtttggtttacagctgcccttgtggaagcatttggtttgggaagttgatcccttcctgcaatagaaatactacaagagagtttctttatagtgcttggacagtataagccggttgggcagaaaacatcatcggtgctaacaacatgtggccatctatcagcaccaccacaagtatgatttggcttcccaggaggtggctgatagccgtatgggttactgatcccacctttctctctaactgcatgcaggccacctatggagacgtaccgcaacgtgtgtgcaccgtcgcttggatgaagttcctactctgaaagctt

SEQ ID NO: 8059 - DNA, 472 bp, Oryza sativa
  unsure (1)..(472): unsure at all n locations
  Clone ID: uC-osflcyp130g06a1
actacgtactaatcgtgttgctacttgctagcatgtctgcagcttaaagctgagacgacacatcaacaaggaatttacaaactaatctagccaggctaattaggagtatctttgcaagttccaaattaagatccgcgctgccgctaattatttctgtacacacgcgtggaatccatcttctttcgatcgttttacccggcccgtgtccatccatgattcttcggtgatcaaaagctcaaacccataatgtcgtccagatcgaagacaacctcgtcgttcttgaagaactccatgccggcgacggcgtcgtagctccagtgcagggaggacgtgacatcgccctggtccggcccgaagggacccgcgactccgccgccgcgcgccgnggagctgccgggcgtgaggctgctcagcacctcctcctggtcggacgagccgatgccgccctccaccttgagcggctgcagcagcg

SEQ ID NO: 8060 - DNA, 188 bp, Oryza sativa
  Clone ID: uC-osflcyp130g07a1
tttttggttgttttttttttttttttttttttttataacttgtttgtttttttttacacgacgggggaccacgcaggaaaaggcgggggccagcaacacaacgccggggagaggccacgaggccccagggccagggccgaccggcagcccccggcagcccgggcccaggcgcaaagggcaagcggccc

SEQ ID NO: 8061 - DNA, 479 bp, Oryza sativa
  Clone ID: uC-osflcyp130g08a1
cataaaactaatagtaattaaagagaattttttgtattacatggaaaatcatcctcataagtcatgacattaaattttgttcagaacatcatgcacaaatgtaatctaaactatagaaaaaaaaaacatgcatctgaagttgccactatcattgccaccatcttccacattacagtcatcatcatattcacaagggatctttagatgacagttgtccaccttgtagtaaccatattgccccagatcatgatccatttatcttgtcaacctgcaactttgcgtgttggatcacagcttacaattgaagcaacaaccacattcttatttcgatttttccagcttttcaagaatacattagttccaatctccaatgaattggcatccataatgtccactatgttgcactgttgtttcttataagcattagaattattcttcccttgttgcatgtgatcattctggttcatgtttcctttatt

SEQ ID NO: 8062 - DNA, 101 bp, Oryza sativa
  Clone ID: uC-osflcyp130g10a1
ataaaggaaaggaagcctgcccaagggaatttcaagaaaggcaagttccaaacccaaaaggggggccagaaaagaagtaaacaaacggccgggggggccac

SEQ ID NO: 8063 - DNA, 257 bp, Oryza sativa
  Clone ID: uC-osflcyp130g11a1
aaaattgataaaaaaaaaaaacaacgaaaatagaaacaaaaaaaaacaggcaaacaaaaaaaaaaaaagaagaaaaaaaaaaaaaaaagggcacacacaaaaaaaaaaagggcagaagcaagaaagccaaataagctcgcccaatgcacctgcccggcggccgggcaccagggtccggcgagcaaacgctcaagcccatagagccaaacggaacggaaaacacccgacaggcaagagaagaacaccacgcccgcgac

SEQ ID NO: 8064 - DNA, 383 bp, Oryza sativa
  Clone ID: uC-osflcyp130g12a1
ggggggaacagggacttttatgggaatatttgggggtaaaacaccttgaaataattcttacttaggactaatccacattgaaataggccatagggaaaatttttaagagctatatatccaagccaatttatggggggggatccttatatccaagccatattataagggggttaattaacatggccaatagctttatccagaccattttattccccattttcttgataacttggtacacataggatccgggaggggccttaggcatttgcactgggatggacaggcttgaactcctggagctccttgaaggccatccatggttcctcccagaccttagcttaatagaggttcttggggtccccttccttcacctcaatggggaa

SEQ ID NO: 8065 - DNA, 382 bp, Oryza sativa
  Clone ID: uC-osflcyp130h01a1
attgcaaaaacatcatcttcttcttcatcttcttagtgtacacaacaccaactcggtcatcatctcgtcgcactaaacccatcttgcccaacccaaagacaacgaactcgctggccacaaatccatccaaccacaattaaccactgctaagctacggccccccacttcacttgccggggacgaagttggtggcgtacgcccaggcgttgttgctgacggtgtcggcgaggtggtcggcgaggttctcgagggggccctttgcggtgacgatggcctggacgaagaagccgtacatggagaacaaggccaggcggaccctcttggtcttccttaacctgagctccgggaacgccttggggtcattggggagggccagcgggtt

SEQ ID NO: 8066 - DNA, 329 bp, Oryza sativa
  unsure (1)..(329): unsure at all n locations
  Clone ID: uC-osflcyp130h02a1
tttttgttattggaaaaacattgggtttttttttaccgccccagtgttcgacttactttttatggacatcacttaggtaaaggcacccaatttggtccaaccggaaggagggcgaacgagactgtcacaaaannaaacagccaccacgaaccactgctaggcaaaggaaccccacttcccccgccggggccgaaaaaaacagaaaaagaccaggcggtgaaagcacaggagacggcgaggaggccccagaggccccggggggaggaccaacaacattccgaagggccggcccacaatcccaaacagaggagcatacagggcgggggccg

SEQ ID NO: 8067 - DNA, 338 bp, Oryza sativa
  Clone ID: uC-osflcyp130h03a1
ggccgccctttttttttttttttttttttttttttttttttttttttttttttttttttttttttttttttttttaaaccaaaggtataatatccttttataaacaattaaacggggcttggaagggttaacaacgcttaaacacaaaatgttcctttgattaacccacgctaaattttgctttataccccccacttcaacgttacagtaattaccggcttttatgcacaccttgccgtttccggagccggagaagacgagacagtttgccctcgacgcggcagtaggggggggtttggaacttggggcccttggccccgggttagcctttgcccccg

SEQ ID NO: 8068 - DNA, 453 bp, Oryza sativa
  unsure (1)..(453): unsure at all n locations
  Clone ID: uC-osflcyp130h04a1
gcatggaacaagctgcgattaagatggacaggttcagtagttatcctaacaggttcagaagtgcggcatccagcctaataacatccaccccccagctggtacttaaacaaacacgacataaacaagactaccaaaacatccacaagttcaggccataacatagcagccaagcggttgctcagcagaagaacatggagctcctgactttgttatgcaggcgaggcagctcgggcaccggagcgctgcccgccgaggtatggccaccatggctcgacgacgtctccgacatctngtcgaacttgatgaactggctgacctgagcagcagcgagatgcgcgtagcaaatgggtgcaacgactgatatggctgtagtgctcctctggtagacataggaaagggagtggaccaactcctgaagatcgtcagcagagaagcctatctcatcatgaagga

SEQ ID NO: 8069 - DNA, 474 bp, Oryza sativa
  Clone ID: uC-osflcyp130h06a1
aaaccagaacttgcacaccaccttttttttctttcaaggttggcaacaatccacggtttcaggacgaacaggtgaaaagacaaaaattaaaccggtatatattccatgcctatttccctttgatttgttcatacaagggaattcctcaacctgaacggtaataatttttccattcctgtatcatcattacactgatattacatgttctacaactgtaccagcaaagaaaagaaaggttatgtgactgcttctggagctgagttgcagtagggagtgtgcaagcaaatgaatctggtcgacatcaggcatacagaggcaaaggcgaaacctatcaaaagcccacagatgctcttccgcatgtccaaccttagcgagcgtttgaagactcggccaaagcttggaatcaaagcaccacaggcaatgaccatccagtagtctagtccactgtagtcaatcttcgcgaggattgcactg

SEQ ID NO: 8070 - DNA, 457 bp, Oryza sativa
  Clone ID: uC-osflcyp130h08a1
ggagatgaatgtacaagataaatgataacatgactcgcacaagtacgattacaatagacgatcctaggtagggggtacatctcccattttttttttggtcctaccactaaccacaaacttagcatgacaaaagttggaccatgcatgccatgtataatacagcagccaccggacaaatgcataccaagagttcagaaggggcataatattcagccatgaaacaaatccaacaacattctgataggacaccaacaatcccaaacagagtagcttacatgacaagggcttgtgaaaactgaaaagaaactgccttgtagataagcgattaaaaagccagagcttagaagcacttccggtgaacaattggtggacccgactcatcatactgtccctttgagaaccacatctgttggaaggtgctaagggaggcaaggatggacccttctatccagacact

SEQ ID NO: 8071 - DNA, 351 bp, Oryza sativa
  Clone ID: uC-osflcyp130h09a1
acaaaccccaaaatcaaggagaaaggggagtttatgaacatcaggcaaggcccggggttcatttattaatcacaacgccgtttgaataaactgggggcaacaaaacattgaaatgggaggaggggtttttttcatttcgacaggatttgccgacccccgggttggggtaaccaacatagactggatttgggggaaacctataccggcgggggcgctggatttttaaacaaggagggcgcctcccccgaggcgcccggaaagggtaactgcccaaaaaaaaaccccgggggtgcccccaaccttggggtccccggtgggagaccattcctccggacagcataaagggcttta

SEQ ID NO: 8072 - DNA, 414 bp, Oryza sativa
  Clone ID: uC-osflcyp130h10a1
acagagcaacattgatttcatattcccattaagggcagcaaaatgttgtcaggcatttttaagcaaaggagttctactaacttaattatcaacagatgaacagcaggggaccacttactactccttaatacataacaagcattccggcagctaagatcttacaggagactatataggggcatccactaataacttacacaacagaatggatggcaaactggggattttttgcctactatttggctcactcctagcaggggataccacatttttgggtatcagggcctgggacacgggtggtgaatggatcgatcccaacccacagcaaggagaagatcgatgcaagggggatggcccaaacaacaacaatggtcggtgtacggttctgccgacccatgaaacccttaaggaagg

SEQ ID NO: 8073 - DNA, 416 bp, Oryza sativa
  Clone ID: uC-osflcyp130h11a1
gattacttcttttaaaaaaaagaaaaattaaaggaaaaaaaatcttcttcctgcattgatgttcctttgccaagagctaaagcataataacatcacacgttcgcgaacagattatagctattggcgtccagaatgatctgccggaccgcggcgactgacgcgacgacagcgagcgcggagaacacgacggcgatggtggagttgagccagaacacggcgcccttcttggacggcttgaacgtcacgccgtagaacaccgccggcacagcgaagtccagcgggaggaagccgaatgcgccgacgagcgcgcacatgtcgccgaagaagggcaccatggccgcgatggtggcgcccagcgcgacggcggcggtgcggcagagcacccccggcacgacggccctcgcggcgtactgccc

SEQ ID NO: 8074 - DNA, 354 bp, Oryza sativa
  Clone ID: uC-osflcyp130h12a1
cgaattcctgtatcaaaaccaagaaccacccgggggccaatttgcgaaaaaccagcactggctttcttaagtcccacggcaaacccattccatctttacaaggaaagcccactggtccctaaaacagcagtccctagcgtgcaaccccaccctagccccggactttatatctgtgggccctaagaaggccaaatggatggggaggtggggccaccaccaattcaaattccatttttttttacagggaccggaaaaacaaaacccaggggctggcctaacccttgataggaagccatatgcccctacccatactaaaaaaggtaagggaaaacctacttcctcctagaagggggg

SEQ ID NO: 8075 - DNA, 358 bp, Oryza sativa
  Clone ID: uC-osflcyp131a01a1
tttgttttgacacaaatatattttattcagcgctgatgcggctgctaccccaaaattacaaaatttattacacaaaagacattgcggaaagctttgtacagtttcactacatgctctcgatcatctggatagggtaagacttttgctaccaagacgtctaagcttaagtaattaaagcgataccttttcttccaaaatatggcgatctcccaaaaagagaatctaccgggaacctttagcttgacagaaagtgcaaatttgactgcctgggatattagagacccattgtatgggtatgcacaaaagtgcttgattgctttcttctaacgtttttgaaaaactacttgtaaaactcttc

SEQ ID NO: 8076 - DNA, 524 bp, Oryza sativa
  unsure (1)..(524): unsure at all n locations
  Clone ID: uC-osflcyp154a04b1
cctccnccacctccncggccggccttttatcggatcggcccggctcctcctcctccgccgncgncaccgncgccgcagataggagaagatggccgcacttgataccttcctctttacctcggagtctgtgaacgagggccaccctgacaagctctgcgaccaagtctcagatgctgtgcttgatgcctgcctcgccgaggaccctgacagcaaggtcgcttgtgagacctgcaccaagacaaacatggtcatggtctttggtgagatcaccaccaaggctaacgttgactatgagaagattgtcagggagacatgccgtaacatcggttttgtgtcagctgatgtcggtctcgatgctgaccactgcaaggtgcttgtgaacatcgagcagcagtcccctgacattgcacagggtgtgcacggccacttcaccaagcgccctgaggagattggtgcttgtgaccagggacacatgtttggatatgcaactgatgagacccctgagttgatgcccctcagccatg

SEQ ID NO: 8077 - DNA, 472 bp, Oryza sativa
  unsure (1)..(472): unsure at all n locations
  Clone ID: uC-osflcyp154a08b1
ccctggctacatgcacctcaagggntcctatagctcctagcgagctagtaaaggctccctcgctgatgttctccgcggccacctccgaggctcccttgcaggggctcaagtccactgcgggcctaccggtgaaccgccgttccagcagctcgagctttggcaacgtcagcaatggcggaaggagcagatgcatgcaggcgtggccgattgagggcataaagaagttcgagactctgtcggacttgccgccattgacagtggaggaccttctgaagcagatcgagcacctgctccgatctaagtgggtgccttgcttggacgtcagcaaggacggaatcgtctaccgtgagaataacagatcacccggacactatgacggtaggtactggaccatgtggaaactgcccatggttggatgcaccgatgccacccaagtgcttaaggagctcgaggaggcacaagaagcgtaccc

SEQ ID NO: 8078 - DNA, 63 bp, Oryza sativa
  Clone ID: uC-osflcyp154a12b1
aaaaacccggagaagaaaagaagaacgggccggcgaggaagaagcccggcgcggaggaacggc

SEQ ID NO: 8079 - DNA, 481 bp, Oryza sativa
  Clone ID: uC-osflcyp154b01b1
ccccgtcaacgtccgcttctgcaccgtcatccacgagcgcggctgcttggagacgatcctcgacccgtgcgggttcgccgtcaagttctacacccgcgagggcaactgggacctcctcggcaacaacttccccgtcttcttcatccgcgacggcatcaagttccccgacgtcatccacgccttcaagcccaacccgcgctcccatgtccaggagtactggagggtcttcgacttcttgtcccaccaccccgagagcctccacaccttcttcttcctcttcgacgacgtcggcatccccaccgattaccgccacatggacggcttcggcgtcaacacctacaccttcgtcacccgcgacgccaaggccaggtacgtcaagttccactggaagcccacctgcggcgtcagctgcttgatggacgacgaggccacgctcgtcggcggcaagaaccacagccacgccacccaggacctttacgac

SEQ ID NO: 8080 - DNA, 276 bp, Oryza sativa
  Clone ID: uC-osflcyp154b03b1
ccaatctacctacttggaagttggaacgacgctgatgatatggacctgaggctactctgatgctagcgaagaagacaagccgtccagtgcagccgcaaggctggaatgcgggacgaacaagatgggcaacgcgactggagaccgctgcacaggcacgcaggggccgaggggcgcgcaaaggggcagcaacgaacacgtgcacgatcaaaagagagggggcgcggaagggcccggagacggggcgcccaagcggcaagaagggggggcaccctacaa

SEQ ID NO: 8081 - DNA, 438 bp, Oryza sativa
  Clone ID: uC-osflcyp154b06b1
agcgattggacacccaacaccaggcagacatgcgagcaggcgtgcttgaagacacaccaggtctggctaccaccgcacaagagacgcatcaacagatggtcagagcgacctaaagaaaggatggaaggactccgcagcaaaaaacattggcatacacctacacgcaacgagcatgtctcttttctacaaagcaacccacgttgcactgacagttgatgttcggcgaaaaacagctgttcaccttgtcccacagatatcattctgctatcgctgcactataggcgtgcgatattatccatgtgaaactccggcctaacctgccactatatccatactgatagccactctatcattgacacttaatgcggctcgaatgagtcatgtaaatggaagctagcgtctatatgcatgtctgctgctaaaaaaaaactaaacaga

SEQ ID NO: 8082 - DNA, 506 bp, Oryza sativa
  unsure (1)..(506): unsure at all n locations
  Clone ID: uC-osflcyp154b12b1
ataggatgccaacctttacagagatgtgctagtgaccagtttggcagaatttccaggtctggttttggcggctctattggttgacagaattggtcggaaagtgtcactggggatcatgcttttgttgtcctgtgctttccttgcaccacttgctgtacatttgggacaaggttcagtaactactcttctattctgtgcccggacttgcatcatgggaggctttgctgttctatacgtgtatacccctgagatctatcctgcatcatctcgcaacacgggggtaggaatcacatcttcctttggccggattggcagtatagtttcacctgtggtgactgttagtttgtcagagaactgccgccagaaagaagcagtgtttttcatggacctgatgctctttctagcagcagtggcatgcgccctcatccctctagagaccaagggccggcaaatccagtgaggcagtgatgctttcttcagttngatgtacagaatcacattacatt

SEQ ID NO: 8083 - DNA, 357 bp, Oryza sativa
  Clone ID: uC-osflcyp154c09b1
atagaaccaacagaaacaaaaaaaaaaaaaaaaagagggaaaaataaaaaaaaaaccccagcgaatcccccccaaaaaaaaaaagagatggaagcccgcgcgagcggaccaccgctaccgccgggggggccgctcagggggacccaggataggggcccacgcacccgcaaagaaacaggccctccagggcacccgccaaaccaaaaaaacgggcgggggaacccaaccaagcgggcgggaaaaacccccccgatcgcccaaccaggcggcctagcgaaaaagcccccttggcccggcgggccaaaaaccaaacagccccgcgcggtaggcgggcccgcccaagggggggcccaaaag

SEQ ID NO: 8084 - DNA, 470 bp, Oryza sativa
  Clone ID: uC-osflcyp154d01b1
cacacgctaggtgcatgccatggcaccattcatggcgtgcgcctcgccaccggtactcacgctggccctgctcgcgtcgtgcggtgcccttctcgccacctccatgctcccggcgcgtgcgacggcgggcagctgcttggacgtcggcgacatggtgatgatggacaggttccgcgcttggcagggagctcacaaccgatcgtacccgagcgcagaagaggcgctgcagcggttcgatgtgtaccgccgcaacgcggagttcatcgacgccgtcaacctgcgcggcgacctcacttaccagctcgccgagaacgagttcgcagacctcaccgaggaggagttcctggccacgtacaccgggtactacgccggcgatggccccgtggacgactccgttatcacgacgggtgcccgagacgtcgacgccagcttctcctaccgcgtggacgtttccgccagtgtcgactgga

SEQ ID NO: 8085 - DNA, 373 bp, Oryza sativa
  Clone ID: uC-osflcyp156a03b1
ccgggggccgccccaccattactgcctcgacccacccctcccgccagatttttaacaccgggaacccggcatcacaacccgggggggcaccttaacacccctgggggggtaaaaaaaaaaggcgctccatccttagctcccaagcaaaaaacacacggagctcctaccaccaccacggatccatggaaccaccccccgcagtacccaaaaccatgccaatcctgagacgtacctatttcatgtgctctccaaggctggggcgctggtgaactacatcttgttttcgctcttcgtgaagagcttcgacatcatattcgtcatcaccgtgttcctggcggcgctcgacttctgggtggtgaacaatgtgagtggc

SEQ ID NO: 8086 - DNA, 379 bp, Oryza sativa
  Clone ID: uC-osflcyp156a06b1
aactttatttttataaccaacaacaacaaaaaaaaaaagggagggttttctaaaaggagggaggggtaaaacaaggggtgtccctctgcggggcccggctttccgcacccgtgcccgtggaagcgctcctcctttttcgggagacctgatttccccttaggggcgcgtgttttccatccgatcctctcggttactttctgaggctgccattttgatgatgtgccacaccgtctgccttcactctcagaggctgtctgcaaggagcgccctcattgacatcagtaacgcttgttccctctaccatttacagcgttgagaacagtcttgtgctgtgcactttcaagattcctgcagaggttgtcacttctattgagacagc

SEQ ID NO: 8087 - DNA, 539 bp, Oryza sativa
  Clone ID: uC-osflcyp156a09b1
gtattttcaaaacagagacggaaagggagaaactattggacggttcaagcgatgttgggggaccaagaatgaaaagcacccaagagatcctcaccaaatacaaatttggcggggatgctgctgcagctgcagctcatgcaaaagataagctcaaggaacggggcgagaaacttgctagaataagccaagaatccgccgaacttcagaacgagtcagagaattttgcctcccttgctcatcagatcgcaaaatccatggagaacaagaaatggtggaagccatgatccctggttgggctttctgccatcttttcatacgatcgccttccctatgctccttaccattttggcctacatggtttctgtggccataacttgtattacgttgagaccttgatggcctaaaccaccttgattaccaaccaaccgatgacagtaatgtgtagtaccacctttgagcttatcattttctttgaactactttgtactaccagctaacgcatagttaatgaaagcaaagcagagcaacgtgctttcact

SEQ ID NO: 8088 - DNA, 420 bp, Oryza sativa
  Clone ID: uC-osflcyp156a12b1
gcgtgtgatggcgacagacaacaagcttcttggtgaggttgatcttgttggcattccaccagcgccaagaggtatgccacagatcgaggtcacatttgacatcgatgccaatggaattgtgacggtctctgcaaaagacaagtctaccgggaaggagcagcaaatcaccatccgatcctccggtggcctctcagaagctgagattcagaagatggtccaggaggctgagcttcactctcagaaggatcaggagcggaaagccctcattgacatcagaaacaacgctgacactaccatttacagcgttgagaaaagtctgggagagtacagggacatgattcctgcagaggttgccactgagattgagacagcaatcgtcgatcttcgctctgtgatgacctcagatgacatcgagaagat

SEQ ID NO: 8089 - DNA, 544 bp, Oryza sativa
  unsure (1)..(544): unsure at all n locations
  Clone ID: uC-osflcyp156b01b1
ctccttttatgaagaagatatgatgagggagggagatgcatgtgttgcacttctaagaagcaagctccatggccttgtccagaggaaccgcagtctggaagaggagaacaagcaattgagacatcaagtcagtcgtctaaaaggccaagtatcctcccttgaaggccaggatactgatagaaagatgctctggaagaagctggataattcttccactggcaacagctacctcaaggaaaagcagtttgttcccaacaatgatgcaaaggaagccatggatctcaacagcacgtcgtgttacagcaggcagcaattctccagggcacctctggtgagatcaagagcaccaagggttccaaatccaccgccaagtccaacctacacccaaccaatagtaaatgcaagaaaggaaggaggcatggctcctcctccaccgncacctcccctaccttncagattgctgaagagcactaaagcagtgcaaagggtgcctgatgtagtcgagttataccggttattgggtagacgagaaggcaaaaatgat

SEQ ID NO: 8090 - DNA, 456 bp, Oryza sativa
  Clone ID: uC-osflcyp156b04b1
ggttatcgttatcctcctccccacttcgacggcgcgccggcggcgatggcgtcgcggaagctggtcctcggcctcacggcggcaaggcggttgaggtctcgcgctcccgtgctcgtctcgacctctcccttcctggaagcctccacatcgacttctgacgccaccgccgccaccgcgacgcggggttcggggttggggccgtgggggctgttcctatcttcgagggccctctcgtcgactcgtccggtgtctctgtccgccggtgatgcgcctggctcgtccgctgcggaccacaggtcgatactaccagaggatgagtatcacaaattagcagatgagacaatacatgacctgcttgaaaaacttgaggaatatggtgactctcttcagatggatgggggtgacatagactatgggaatcaagttctaacactaaggttaggagagttggggaca

SEQ ID NO: 8091 - DNA, 442 bp, Oryza sativa
  Clone ID: uC-osflcyp156b05b1
aatggatcgttttcctttcctatcgatggcttgattgatacaaagccggttttttcactgctcgggcgtgcgtttcttgacaccggccggattgatctatcatccatccatcgagtcgagtcgagatcgatcttgatcttcgatctcgatcgatggaggaagccaagatgggagacgttgccaccatccgagccgttctggcgatcctccaatggtggggcttcaacgtcaccgtgatcatcatgaacaaatggatcttccagaaattggagttcaagttccctcttactgtctcgtgtgtccactttatatgctcttcgattggagcttacatcgcaatcaaaattctcaagatgaaaccactgattgaagttgccccagaggatccgtggagaagagggggcccaatgcatttgtgttctgcataaacaatggactggga

SEQ ID NO: 8092 - DNA, 463 bp, Oryza sativa
  Clone ID: uC-osflcyp156b09b1
gttattattagctatctagcttagctactcgatcgtgagatcatcgatcatccgacggtcaaatcagtaatcttgaatatggcggctttgaacggtaaggtggtggtggcggtgatggtggtggcgatggtggcggtgatattcaactctttcgtcttttgccagggtttcaatgaaataaattgtagggagatggaaacgatcaatgtcctccaagggatctttagaaactggatctttgttggtatattgacagctactgtcatattccaagtgatcatagtagaatttcttggcacttttgcaaacactgtaccattgagcggggagctgtggctgctcagcgtcgtcattggcttaattagcatgaacatctttggtttcctaaggggattccagttgatttaatagaccaatctaaccccatggtatgagtgattctgaggccagagatttatgcagt

SEQ ID NO: 8093 - DNA, 416 bp, Oryza sativa
  Clone ID: uC-osflcyp156c09b1
tttttgcgtgggctagtgttatgcttggtgctgggcttgtggtaaacaaagcctgtgaactggttcttgaggtgaaaccatgggccaagacaagccttgcccctggatctggggttgacactaaatacttgttacagagtggccttcaagaatacttgaacaagcaaggtttccatgttgatggatatggttgtaccacttgcattggcaactctggtgatctatatgaatgtgcatcaggtgccatttcagaaaatgatgatgttgctgctgttgttttgacagtcaactcgaacttcgagggtcgtgtgcacccattgacccgggctgatgaccttgcttaaccacgtcttgtggttgcatatgcagttgctggcactggtgacattgattttgagaaagaaccgattggagtt

SEQ ID NO: 8094 - DNA, 524 bp, Oryza sativa
  Clone ID: uC-osflcyp156d05b1
gaaaattttgctttccttttgaatgtgaggaatcgtgtggcttcacaaactcctgagtctaaccctgatagtggatcggctttaccggatgatcaagctgctaatgcgggtacgggcagcacagaaccagctggggatgttcagatgagagatgacacagctacaccaaatggtagttctcacacagtagatccaaatgaggtagcacgtgctgataggcttgcgaaaataaaaggaatactgtcaggggagacatctatccagttgacactgcaatttttgtatagccacaatagggcggatcttttaattttgaaaacaataaagcaggctgtggaaatgaggaacagtgtttgccacagtgcaacaatatgtgccaatgcaatcatgcatgctggaacaactgtagacaccttcctaagagagaatctggagtggttaagcagggcaaccaattgggctaaattcagtgcaaccgctggactaagtgtcattcacagaggccatcttgaacaagggcgagc

SEQ ID NO: 8095 - DNA, 397 bp, Oryza sativa
  Clone ID: uC-osflcyp156d07b1
tattggaaagctggtcgcctgcggcgccgccgcggactaaccgccgggacccaccccgccggctgtgtttttgactggcggtcttatcgctcaccaggggcggaaggtcaaactgggtacagaaggaactcctgcacacgatttggggactgacccacctggggaagagatcatgcagaagcctttacctctggcagtggactggcaaagcaatcactggatcctcatgacggatatggaccttggggctgcacggtactgatttggcacacgtggcaaatgacttataagtaggacacacaatgggtctttgctgggaatcgacctgggtggtgatggtcactctcttgtctacgactcccagccttgaaactggggccggggacccttatgggga

SEQ ID NO: 8096 - DNA, 416 bp, Oryza sativa
  Clone ID: uC-osflcyp156d12b1
gaggtgacggccaaccaaaaccctcctcctctcatcatcgcccaaaaccccccaagaaaccagaaagaaacctctcctgctcctctctctctcttttcaccggcagagggagaggaagtggagagacagagaggaagaagcagagggaagaaaagaaaaggaaggagtttgctgcagctgtgaggagtagaggaggggggaagggtatcaacaggtttttgattggaatgcagcaccaacacctgatgcagatgaaccagggcatgatggggggatatgcttcccctaccaccgtcaccactgatctcattcagcagtatctggatgagaacaagcagctgatcctggccatccttgacaaccagaacaatgggaaggcgtcagagagccgctggaacccaactaagctccagcac

SEQ ID NO: 8097 - DNA, 371 bp, Oryza sativa
  Clone ID: uC-osflcyp156e04b1
ttactgtgggtgatgctgcgcctgctggggccgccgcggcgttactggcgggacccacgcgtccgcacattgttttaccagctgcatatgattaacgggacgggggatacacacacactatttctggggacattgatccgatccgaatctcaggcatgagagcctttacggccgttactcctatggtgcttttgctcgatccacttgctgtcaatagggctgctgtcacggagacgccgcaagatcggcaggaggcggccgcggatgcagaggtgcattggtcaggatctgcaacgaacgcttagcgaccgtgcgccgatagcgtcggggctcgcaactcgcggctggtggatttgcggggggcagggggg

SEQ ID NO: 8098 - DNA, 493 bp, Oryza sativa
  Clone ID: uC-osflcyp156e09b1
actcctattgggagtgctgctgcgcctgccggcacgcgctcgcggacggtattggccgggacccacccacgccggccgttttttggaaccatgaccctgtgcattcatctcgcctcgaggaaatgactggggggtaggaggtcaacttgagcgccgaaggctatgatcacaactgctcaagatgttgtgtctttgtttgatcgcaggatacattatacgcaggcctctacagcaaacatatgtgatggttgcgttattaaaatgacggacctcaagcctttagtgtcgaagacacttagattgaacaaaatagagacgcagctgcgtatttaacatggtttatgtgagtcatatctgtattctcataccttcggacagaacactgaggccagctacactaatgggcactaaggacattgtgcagttggaccatgggcagccatgcatttctgatcctgctggaacgaagcgcagataccaaggcaggctatag

SEQ ID NO: 8099 - DNA, 387 bp, Oryza sativa
  Clone ID: uC-osflcyp156f03b1
caactgttctatggtcagccccctccagcgtttatcaacacacagcctggtttcggcttccagcagcctcttatgcctgggatgaggccaggtgcaggtccaatgccgaactttatcatgcctatggttcagcaaggacaacagccgcagcgtccggctggtaggcgtgctggtgctggtggaatgcagcaacccatgccaatgggtcagcaacagatgatggctaggggcggccgtggctatcggtatcctacaggacgtggcatgcctgatcctgcaatgcatggtgttgggggtggtgtgatgccatcttcatatgagatgggaggcatgcccatgagagatgctgctgcgtcacagcctgtacctattggagcattggctact

SEQ ID NO: 8100 - DNA, 518 bp, Oryza sativa
  Clone ID: uC-osflcyp156f10b1
ggttttcctttttttttttttttgcagttaaaatatgtgttacgcgtttcggtgattccaaaaggaaggaatataataactaactgccctttgttcatgaggctgtgttggttggccagccaccagattagaatgcacaaacgtgtgatctccgaacggaattgtttcacttttggtcctttcttacagcgacatattaatgaagtatacatacatcagctcaagtacaattttccatacagaagaacctaaaacatggttcaaggtgcagaaggtccatcaggcagttttgtcttccttttcctaccaagaatggacgctttctgcagcctcacaccgccagcgcgccactttcttgaaagcggtcatcgagtccctagcagattcgaacacttgagcttcttcttttgtaaggcgcggaacaaactcgggcactgtcatcatggaagagctgtgtgacttgcttagtatctccttgtacctactagtgaatgcatagcgcaggaacagcccaatgc

SEQ ID NO: 8101 - DNA, 519 bp, Oryza sativa
  unsure (1)..(519): unsure at all n locations
  Clone ID: uC-osflcyp156f12b1
gtgtgatcagccaatctctaggtcggatgaatgggcatatgaactatagttttcagggcatgagtgctcttcatcctcattctctgcctgaagtccacaatggagtgaacaatggtgtcccttacaacttaaacagcatggcacaagttgtcaatggaaccaactcgaggacagctgaagctgtggacaacagacatctccataaagtgggttccggcaacctcaatggacattcatttgatcgtgcggaaggagctcttggattttcaagaagtggaagttcttctgtccgtggtcaccagttaatgtggaataattcaagtaacttccatcatcacccaaattctcctgttctatggccaagccctggatcatttgtaaacaatgttccatctcgctcccctgcacaaatgcatggagttccaagagcaccatcgtcgcacatgattgacaatgtgcttcccatgcaccatctccatgtaggatcggcaccagcgatcaacccatcactttgngata

SEQ ID NO: 8102 - DNA, 353 bp, Oryza sativa
  Clone ID: uC-osflcyp156g01b1
gcattttatatatgaatgggagagtaaagcgggtggggggggctgtggaaccactatgggggggaacccatcctcttttcttgaaaagctatcctggctgaacatgaggtagccgataacgggatcaattacttactgggcgagagagggtgatgccaactggttggaacatgctgtagcgtttatggcttacggttgatggtgtacttatgcaactgaggacacaccacatgtattgctctattggtagtgactaagcaaaacccatggtactgcgtgactggtagcaaatataggggacctttgctagtgtgcctgcaaagggatacatgttcgactctgcagcatatcag

SEQ ID NO: 8103 - DNA, 457 bp, Oryza sativa
  Clone ID: uC-osflcyp156g05b1
gcaaggaatgcggggtcttaacaaaatgggaaaagctagcctacaaaattagaggctaattctgacaagcaactccggggtacaaaggggaccaacacacgatggaaaaaaggcacaggcaacaccattatttgttccgattaaccgagacaatttgattcaactgcgggcaaaatttaaaggcgacaccagtaaaaacaatgctgggatgctcttagaccgtttacgcacgcggcttcccaccaagggttgggaactgagcctgatcttcaatggatggggcagatgtagaatatgggccacgttggtaaccaccaccatatccacgaccggcacgatctgcacgcccccttgcacgaccacgggcgccataggacctttcttcttccgcaggcttcaggaactgattgatgctcacagacttgttggcacgctgattgcgctcagcattttcctt

SEQ ID NO: 8104 - DNA, 437 bp, Oryza sativa
  unsure (1)..(437): unsure at all n locations
  Clone ID: uC-osflcyp156g07b1
gtgctttcaatggactttgggcgataccattcacttttggagttgcggtcttctgcttcgaaggattcagtatgactttggcactagaatcatcaatggcagaacggagaaaattccgctgggtactttctcaagcagttgtcggtatcataattgtctatgcatgttttggagtttgtggttacttagcctatggggaggccactaaagacatcataacacttaatcttcccaatagttggtcttctgctgccgttaaggctggtctttgcatagcactggtattcacatttccagtcatgatgcacccaatccacgagattgtcgaggaaagattccaatcaagtggatgtttcccgaagctctcgcacaaggttcgcggngctgaatgggtgggcctgcactcaagccgcatcgtcatgggaactatcctgtct

SEQ ID NO: 8105 - DNA, 533 bp, Oryza sativa
  Clone ID: uC-osflcyp156g11b1
aattctcagcttatagtcaggtgaggtctgagctgaggttgagagatggcacaggcaatggcgtccatgaccgggctgtcgcagggcgtgcagctgccggccgggcccaggcgcgccggcggcaggtccaggctcgccgtcgtcagggccgacgccgccgccgccgacgtccagaccggccgccgcgccgtgctcggcctcgtcgccaccgggatcgccggcggcgccctcgcgcaggcggcgctcgccgaggccgccaagcccatcaagctcggccccccgccaccgccctccggtggactccctgggacgctgaactcggaccaggcgagggacacggacctgccgctgaggcagaggttctacctgcagccgctgcacgcggcggaggcggtggcgagggcgaaggagtgggcccaggacatcatcaacctcaagccgctcatcgagaagaagcagtggccgatcgtaagggacgaccttcgtctcaaggccttctacctgcgctacgaccttaaaacccgtcataactc

SEQ ID NO: 8106 - DNA, 334 bp, Oryza sativa
  Clone ID: uC-osflcyp156h02b1
ccgtttatattcaggaggtgaagggttatgcaacagagggatcataataacaagagacgggggaaaatctacaacatgatcagaccaataaccctgtactgccatcttttgttgctgtgcaacatgatcagaccaataacccagatttgtcatcttctagtgctgtgcaacatgaccacaccaatttgccagacctgccatttcttgtcgttgttcaacatgatcagaccaatacgtcacaattgccatcttctgatgctgtgcaacatgatcagaccactaagccataattgccatcttctgttgctgcacatgatgacctaaccagtgagcc

SEQ ID NO: 8107 - DNA, 434 bp, Oryza sativa
  Clone ID: uC-osflcyp156h07b1
ttctttcagcgtgaggcgagatgggtggcgcgcgggggccgactggagaggagcggcgtggcggccggcggaggccgcgtccccgtggccccctccgccgctccccccgttgtcctcgcttcttccccccgggccgacgccgctgccgccctcaccaccgtcgcgtccgccatcgccgattccttccgtgacctgttcctcctgtcccgccactgggcatggcggagcgggacgtgttcgcgtacacggccatgatctcggggctgtcggaccacagccgatgcgtgaaggccatcgaactgttcgagcggatgcaggaggaacggggagggcagggctcatcggccaggcaagggagatcttcgggagcatggcggcgaagtacggcatggagcccggcgtggagaactatggcagcctggtggatgtgctgg

SEQ ID NO: 8108 - DNA, 444 bp, Oryza sativa
  Clone ID: uC-osflcyp156h11b1
cgttgtctccctcaccgtgctcgtcatgcaggcgccgacggagatagaggcgttggtggtcgaggcccacgtgcgccgggaggcggcttccgggctcgacgtcaccttccggcggctccccgccgtcgagcaccccaccggctgcgaggcgaccgaggagttcatgtcccggtacgtcgagcgccacgcgcaccacgtcaaggcggccatcgccggcttggcgtcccccgtggccgcggtcgtcgtggacctcttcttcacgcccctgctcgacgcggcgcacgagctctcgctcccggcgtacgtgtacttcgcctccaccaccgcgttcctcgcgctcatgctgcggctgccggagctccgggacgacctgaccgtcgggttcgacggcatggagggaaccgtggacgtgcccgggctgtccgccgtgcccgcgtcgtacat

SEQ ID NO: 8109 - DNA, 358 bp, Oryza sativa
  Clone ID: uC-osflcyp157a06b1
gattgtttgcgtctcacattgttgggtacccccgcatgggccccaagagggagctcaagtttgccctggagtctttctgggatgggaagagcagcgctgaggatttggagaaggttgcgaccgacctcagggccagcatctggaagcaaatggctgacgctgggatcaagtacatccccagcaacaccttctcgtactatgatcaggttcttgacacggctgccatgcttggtgctgttccagagcgctactcatggactggtggagagattgggttcagcacctacttctcgatggctaggggcaatgccactgtccctgccatggagatgaccaagtggtttgacaccaactacca

SEQ ID NO: 8110 - DNA, 433 bp, Oryza sativa
  unsure (1)..(433): unsure at all n locations
  Clone ID: uC-osflcyp157b05b1
tttaactggatcaggacttggttctcttctgttggagcgtctctctgttgattatggaaagaagtccaagcttggcttcacaatttacccttccccccaggtctcaacagctgttgtagaaccatacaacagtgtcctctccacccactccttgcttgagcacactgatgtggcagttctcctagacaatgaggctatctatgacatatgccggagatcccttgacatcgagaggccaacctacaccaacttgaacaggctcatctcacagatcatatcttcactcaccacctctctgaggtttgatggcgctatcaatgtggatgtcactgagttccagaccaaccttgtcccataccctcgcatccatttgatgctttcatcctatgcccctgntatctctgctgagaaggcttaccatgagcagctttct

SEQ ID NO: 8111 - DNA, 529 bp, Oryza sativa
  Clone ID: uC-osflcyp157b09b1
ttcagcgtcgtcccccgtgccggccgtcctcacggccccggctaccgctgccactgccgccatcgccgtaaagccaacgccgcctcaacgcgcgcttcaagccagcaggcgcgagttggtggtggcggcgggaggggtggcggcggcggcggtggcgctgtggccgtgcgggggagcggcgcgggcggcgtcggacgacgagtacgtgagcgagacgaaggacgtgatcgggaaggtgcggtcgacgatcaacatggacagggcggaccccggggtggcggacgcggtggcggagctccgcgagctgtccaactcgtgggtggccaagtaccgcagggagaagtcgctgctgggccgcccgtccttcagggagatgtactccgcgctcaacgccgtgtcgggccactacatcagcttcggccccacggcccccatccccaacaagcgtcgcgcccgcatccttcgaggagatggacaccgccgagaaggccctgctccgcggtccgtgaggtgagtgatgatgattgag

SEQ ID NO: 8112 - DNA, 508 bp, Oryza sativa
  unsure (1)..(508): unsure at all n locations
  Clone ID: uC-osflcyp157b12b1
tgtttgcggtagtgaagctgagaagtcacctgaggttgtgctggagtggcctaagaaggacaagaagaggcttctacatgctgtttaccgtgttggagatttggatcgcaccattaaatgttacacagaatgctttggaatgaaattactgaggaaaagagatgtgcctgaagagaaatatacgaatgcatttcttgggtttggacctgaggacaccaactttgcacttgaattgacatacaattatggtgttgataagtacgacattggagcaggatttgggcatttcgctattgcaactgaggacgtgtacaaattggctgagaaaattaaatccagttgttgctgcaagatcactcgtgaacctggtcctgtcaagggaggatccactgtgattgcctttgcacaggatcctgacggttacatgtttgagcttatccagaggggtccaacacctgagcctctntgccaagttatgcttcgtgtgggtgaccttgatcgctccatc

SEQ ID NO: 8113 - DNA, 373 bp, Oryza sativa
  Clone ID: uC-osflcyp157c02b1
cataatagcagcgtcgcctctcctcctcctccctaacccctacgcttccagaaccttctcgaagctcccgctcccccccccttccgctccaatggcgaaggaaccgatgcgcgtgctcgtcaccggcgccgcaggacaaattggatatgctcttgtccccatgattgctaggggtgtgatgttgggtgctgaccagcctgttattctacacatgctcgacattccaccagctactgaatctctgaatggccttaagatggagctggttgatgctgcattttctcttttgaagggaattgtcgcaccaactgatgttgtggaggcctgcactggtgtgaatgctgcggctatggatggtgggttccccaggaag

SEQ ID NO: 8114 - DNA, 512 bp, Oryza sativa
  Clone ID: uC-osflcyp157c10b1
gataaaactcccgtctcgtcgtctccgctccttgcgagttcgcccaccgccgccggcgcgccgatttccatctcccgagcaaagcggggggagggccaccgccgccgccgccgccgccgccgtcgtcctgctgctcccgccacatcccgagatggagtcagtgccactaactgctgaagctattgcttttaccgagaaaaagatggacatgactttagatgatattattaagatgtcaaagaaaaagaatcctggaggcaagaaacctgctagacaacctatcaagaaacgtccattccagaatgacaacactaatcaagggaatgcaaaggttcagcgatttatggaaactagatcgtccttaagacaaggggttcttgcacaaaggaggacaaatctgggtggaaatcagttcgcagctacaaagcaggctgcaaagaaggctgctacaatgcccatacgtagcaggggtgtcagatggaacaagccaagtgccccaactaactcaatac

SEQ ID NO: 8115 - DNA, 507 bp, Oryza sativa
  Clone ID: uC-osflcyp157d03b1
ctcttttccaggctccagccgagtacccgcctcctcctcctcgctcgccgcggaatcttctggaagcttctagatccggccgttacgatcggcgaagaagggatggggcaggccttccgcaagctcttcgacgccttcttcggcaacaaggagatgcgggtggtgatgctcgggctagatgccgcggggaagaccaccatactctataagctgcacatcggcgaagtatctctccaccgtccccactataggcttcaacgcggagaaagttcaatacaagaatgtggtgttcactgtgtgggatgttggtggccaggaaaaattgaggcccttatggaggcactactttaacaacaccgatgctctgatctacgtaggtgattccctggatagagagaggattgggagagccagagctgaattgcaggccattattaaggaccctcttacgcttaatagcgctctattgcagtttgctaacaagcaagacatgacgggcgcaatgac

SEQ ID NO: 8116 - DNA, 464 bp, Oryza sativa
  Clone ID: uC-osflcyp157d08b1
gatgttttgcaggacatcctatgtgcgagttctgcagaagttcattttatggagataacgagctttacacacatatgtcccgagaacactattcatgtcacatatgtcaaaggcaacatcctgggcagtatgattatttccggaattatgatgacttggagttgcatttccgtaaagatcatttcctctgtgaagatgaagcatgtttggcgaagaagtttgtagtcttccagagcgaagcagagctcaagagacataatgctatggagcatggtgggcggatgtctcgtgctcagaggaatgccgcacttcagataccaaccagctttatatatcgaagaaacgagcaagatgaaaggcgtggtagaggtaggggacggaattctcaccgtgatggatctgaccgggataccccctttatgcaaaatggcagtgcaattataggcaacggtttttcaagtcga

SEQ ID NO: 8117 - DNA, 489 bp, Oryza sativa
  Clone ID: uC-osflcyp157d11b1
gtaaactgaggcatttcaggttctgaaaggagtaccggatagaccagaagttgtcctagtaaaattaagagaaataaaaagcaagattgatcgccgaacatccgcaaaagatcggtccaacaatatgatttcatctaaggatgttgtccgagtagttgagggagcatgcaagggaaaacaaggaccagtggaacacatacataaggggatattatttatctatgatagacaccacctcgagcatgcaggctttatttgtgcaaaagcacagtcctgtcttcttgttggtggatcagctggtggacgtcgtggaaatggtatggatacgtcagatccaaggcttggtgctttgagatctccagcaagcattttgcaatcaccgggaaggctgcccccaagaggacctcatatgaactttggtggaaggtttggaggaggtggtcgtggtggcagagggcatgatgcattggtgggcaaatgtattaaaat

SEQ ID NO: 8118 - DNA, 387 bp, Oryza sativa
  Clone ID: uC-osflcyp157e06b1
cgcccatgtctatggcgggggagaacgcggtggaaagatccaacgcttagcaggaaccaatccgaggtgctggcgatagtgccagacctagcgggggactacaaccggccgggggacttactgccaagaatgtacgtcgactcaagctgattacagcaagcactgcctcctcagctggcgtgtaagggggatagccagtccaagatccgccagtgggctgaggcctgccccagcggaggtcaagataaccccattgtttttataatagagaccaatggattcagaggctctggagggctaggctgcgagatgggcttactaaaggtccaggaaattctcaattactgtcatgagccttgctagactagcgatatgcataaatgtctc

SEQ ID NO: 8119 - DNA, 463 bp, Oryza sativa
  Clone ID: uC-osflcyp157e08b1
ttttaatttgattgggaaattattattcatgcaacaaagctgtacaactgatcccatgtttctatcgcaggtttgacaactgaagaaatacaacattgcttttggagaggatttgtgtgcgtgagaggctttgataggacatcaagagcacccagaccactgtatgcaagactccactttccagcaagcaaaattaccaggaataaaaaatctgcaggttctgctccaggaagagatgatgaataggccatctggaaaaccagaaaggaaataaagaggaggtacatatgatctgccagaagatcactgacctgaaatggatcgctgaccaataagttgccgtaggcaattcaattatttctggccatatacatctgcttgaagttatgaacttcagccactgacgaattcgtggtgctggtattcttcggcaacatgatccatcatacagattctatgcttg

SEQ ID NO: 8120 - DNA, 410 bp, Oryza sativa
  unsure (1)..(410): unsure at all n locations
  Clone ID: uC-osflcyp157f01b1
cagggttcggattttgccactattatcaactcggtgacttccaagaaagttgcagcctgatgtaacccttctgtagaaataaatgacccagaggcagcgagacggctaccacaccatattgcttgatagagatacttcgtgttcaatcaccgtgcttgttttggcacacgagggaataatgcaagatgccactgtgttgttttttctcatagacctggctggcgttacgagagcctattatttgttagtgagtgagtgaccaataacacgtgaaaaattgctgctatatgtggtgttacccgacatctgtggaaggcaaggaatgttgtggtgttgagcataataatcgatgttgccgtaggatcgttgatcctccacaannnaaaaaaattatattaacaaaattaaaa

SEQ ID NO: 8121 - DNA, 331 bp, Oryza sativa
  Clone ID: uC-osflcyp157f03b1
catttttactggtactactccacatgagttgattagctgcagctgtctgcaggaactaggagcaacacataatggggggcatggaaaaaggagtctgtgaggtgtaagctagaggcatcaaccaccgcatatccatacccattcatattcgcaagcgcgcttaccctatcatgatgatgaagagatggagcagggaggaagactaagacaagtcggggacaggcaccaacaccatcaccacgccacgtttttcgaacgtctactgtcgcgcccgccccggctagctccttgacatcgtgggccccaaaggagccagcgagtacaccctcct

SEQ ID NO: 8122 - DNA, 316 bp, Oryza sativa
  Clone ID: uC-osflcyp157f08b1
ttttaatcgcgatcccttgtgctcacatcccaagcttcccaagcacacactgttttagtgttcacaaacacagccttccttctcgcccaaatccgtcaaccatgtcgctgatccgccgcggcaacgcgttcgaccccttctccctcgacctctgggatcccgtcgacggcttccccttcggctccggggggagcagcagcagcagcgggaggctctttccttgggccaactccgacgcggcggccttcgccggcgcgcgcatcgactggaaggagacccccgaggggcacgtggtcaaggcggacgtgccggggct

SEQ ID NO: 8123 - DNA, 424 bp, Oryza sativa
  Clone ID: uC-osflcyp157g04b1
ctttttcacaccatatcctataatggcgaactcaccgacgccgacaatgctggcgttcctggctcttgggctagcgctcctcctctccgccaccggccaggcgagcgcgcagaactgcggctgccagtcgaacatgtgctgcagcaaatgggggtactgcggcacgggcaaggactactgcggagatgggtgccgctctggcccgtgctacggcggcggcggcggtggaggaggaggaggcggaggtggtggaggcttgaggctgaggcagcgtccagtatgtagagagcgaggtccccggtgcgttcttcaatgggatcaagaaccaggccccgaacggttgtgccggcaagaacttttacacacgacagcctatttcttaacgctgaccacttctactcgggctttgccaggggtccgacca

SEQ ID NO: 8124 - DNA, 318 bp, Oryza sativa
  unsure (1)..(318): unsure at all n locations
  Clone ID: uC-osflcyp157g07b1
cttcgagctctcttggaagctatagcccccccgatccgcgggggagagggcccgatcggatccttgggaatggcgacgtcggcggcggaggaggaggcggtgcctgtggcggaggcgcgggcgcaggccgagaagcgcgctgcggcggaagatggcgagggggcggaggcggaggaagaggggaacgagatgcccgagccgaagcggcggcgcgcgtgcgtggcggcgctcgagggcgtgcgacgcgccgcggcggacgcggccgaagagaacggcgacgcgtgcggcnttttcattttctattctccttattcacct

SEQ ID NO: 8125 - DNA, 203 bp, Oryza sativa
  Clone ID: uC-osflcyp157g08b1
catgattcttgctgcttcttgcttcttgttgctgttgttcttggttggatctttgatgaaggtggggaggggatcgaggggggcaggtgttttaattattatcatttcctctttccccaaatttcaactcataaacctctctactaatttattacactaactattctccatttcctctcaactttctccattcatatctcttc

SEQ ID NO: 8126 - DNA, 448 bp, Oryza sativa
  Clone ID: uC-osflcyp157g09b1
tatgtcaccctcacacagacgggacagcagctggtggtgttcctcaccaaatggctgggcgatcacccagagttcgcctcgaaccctctctacatcggcggcgactcctactccggctacaccgtcccagtgacggcgctccagatcgccaacgacgacgacgcccgggcgcggctgaacctcaagggctacctggtgggcaacgctgccacggacgtcaagtacgacagtgggggcaaggtgcccttcatgcacggcatggggctcatctccgacgagatgtacgaggccgcgcggagcagctgctcgggagactaccggatcaccccgaccaaagccgactgcgccaacgcgcttgaggccattagtatggcaaccttcgccattaacccggtgcacatcctggagcccatatgcggattcgcgctgcgcgggcgcccgatgcctg

SEQ ID NO: 8127 - DNA, 536 bp, Oryza sativa
  Clone ID: uC-osflcyp157g12b1
tatatgcgttttggtcctctccgttactttgtagccggttttctgaaattcttgtgcttgccaaagtatagctttgaattggagtatcttccaatatcagatggtggtggtggtgagcataaaattgtggaagggcaagataaagttgatgcatcagacctctatgatgatgtagttcggaggtcgcgagtagaatgtctacctcgtgcctcaagtttatctagcattgattcaatcatgtctacaggaataatgtcaggtggagatctagaggtttcgagtccacatgctaataatgaaccctctgaacttgttcgtgcacttgacccaaaatcaaagcgcctatcattagggagaacaagtactttcaaagaaccagaagaagtgatccatccttaggctcatgtttcatcgactcccaactggcgtagatccaaatcgaaatcaaggacagaaaaggcatggccaggcgcgggtgctacaaatgatgcaaattcctctcgggtaccacaacacatgacaaagaagacgccctc

SEQ ID NO: 8128 - DNA, 290 bp, Oryza sativa
  Clone ID: uC-osflcyp157h02b1
ccatatttataactagtcttgtccaccggagcatagcagcggcagcttcaatggacgctctcctcatggcgaaggactttcaggccctgcaagtgcgtgccgtgctctccctagagctggccaagctcaccgggaagagggtacacctgccggccggaccctgaggtgaacccatcgcttgccactgggtcccgcgcggtgacgacctcaaccacacgaaactgatggccctgcctcggcctgtcggcgacaagctagttcttcgaataggactgcggaagctgctggta

SEQ ID NO: 8129 - DNA, 495 bp, Oryza sativa
  Clone ID: uC-osflcyp157h04b1
taaacaggtgcttctgaaagaagctctgcaggagcgtgcggcggctgcagggcagcggatgaagcagcggctgggcacttcctgcaagttttgagtaggaccatagagcagcagagaagaaaaataatgtaatgcttgctacttgtgttgcttattatggagtgagtacaggaagggatatatgctcatgtgagaaatgcctacagctttgtgcaatgttgccatgtaaacttgttatgttcaggtagacaagatcaggatggtgatgggtgtggagaagggctattatgcatgttgaataactatgttaaacaggtgcttcttaataaaatgcttgcagcttgtgtatattgcgctcaaaaaaaacaaaccccatactctccttttcctatttcacatctccttttcccccctcccctactcacccactctccccctcccgcccttttcctcccttgttcctctaaattcccctctccaccccctattcttatc

SEQ ID NO: 8130 - DNA, 251 bp, Oryza sativa
  Clone ID: uC-osflcyp157h10b1
tgtatataattcgcgaaagctcagctgcttctgcttgttcttcttctttcggattcgagaggaggatgtccatctcgctgcgcctcgcggacccgacggcggagccgcccgtgctgccgccgctgcggcagtcggcggtgcgggcggagggcttccccgccgtcgccgatttgcggacgggcgcgcttaggggaagcgcctcgctgctcgtgaagccgtagccgctgctgggggcgggacacgcggctagc

SEQ ID NO: 8131 - DNA, 459 bp, Oryza sativa
  unsure (1)..(459): unsure at all n locations
  Clone ID: uC-osflcyp158a10b1
tcgctcctcctcccctctcctcccctccagcggggcggcgggatggaggccggccacggcggccccggacagggcgacgggatggaggcctccgcggcggcccgacgcgaggcgacgagatggaggcggcggcgggctgcatcgagggcggcggcgaccggcgccggtcgagaggggcggtggccggctgcatcgggcgcggggcggcgagatgggggcgactggcgccggtcgaggtggcggtggccggcgccggtcgagaggggcggcagccggctgcgtcggggacagccgttgccggtcgggagggcggcggcggcaggcggagaactttttttttcttttctctatgctatctgatgaatgctgaagatgtgaaanatgtgaactttcttttttctttctctattctctgcgatgaatgctctctttggtctctgggaagaatgctcatttgtc

SEQ ID NO: 8132 - DNA, 395 bp, Oryza sativa
  unsure (1)..(395): unsure at all n locations
  Clone ID: uC-osflcyp158a12b1
gctctctctctgatctcgtcgttctccatggcctccaaacccgcggacgttacggctacaggtggcggcggcgtcgccgtcgtccgtgacaacaacaacaacgccggcggcggcgaggcggaggtgtaccgctccgagctgacgccgctgcagaagcacgtcgccttcttcgaccgcaacaaggacggcatcatctacccctccgagacctaccaagggttccgcgcaatcggggcaggagtcgtgctgtccgccgtcggcgccgtgttcatcaatggcggacttgggcccaagacgataccggagaacaccaagactggtctcaagttacccatatacgtcaagaacatccacaaaggcaagcatggaagcgattaggncgtgtatgatgcgat

SEQ ID NO: 8133 - DNA, 479 bp, Oryza sativa
  Clone ID: uC-osflcyp158b01b1
ggtataccaatatgttccgcattatttgttgtgctatgcttgccatggccagtacttagctaagcactcttgcgttttacaacttctctagaatgattagtgctgaatgttatcgtaagatgataaaacgtttatcctaagtcctactatgcattttcctttctaaacttgaatctaaattgtttttgccacttttttgcagaccgtgttggttgtagagagtgtaagttcaatgataaagcatgacaggaagctaagattacttgttacagcttgatttcattctctctaagttcaacaactctgacgctttagtgtttttgcttgtcctcccggatacaagcgtgtttttttgggcagagtttggagtatatgtagtttattatttttgtagtatatgtattggtacgattgttatttgtaccgccccgtgttgtaaaatatggaccacaaatcatgtaacccagtagactactaga

SEQ ID NO: 8134 - DNA, 476 bp, Oryza sativa
  Clone ID: uC-osflcyp158b02b1
atctcgcggcgcatggcggcggcggcggtggcggcgaacggcggcggcgacggcgcgcaggcgtccaacgcgcccgcccccaccaggctcgcgtcggtctacagcgaggtgcagaccagccgcctcaagcacgcgctccccctcccctccgtcctccgctcccccttcgccctcgccgacggccccgccagctccgccgccggcaaccccggtgagatcgcgaagctgttccccaacctgttcggccagccgtccgtgtcgctggtgccgtcgccggagccggcgtccaccaggccgctcaaggtcggcgtcgtgctctccggcggtcaggcgcccggcggccacaatgtcatctgcggcatcttcgattacctgcaggaatatgcaaaaggatccgtcatgtatggattaagggaggtccagctggagtcatgaagtgcaagtacgttgagctcactgcggattatgtgtacccc

SEQ ID NO: 8135 - DNA, 436 bp, Oryza sativa
  Clone ID: uC-osflcyp158b04b1
tttactttccttgtctttttcatttttcaacgaagatagctttattaaaccataaagagaagaaagaggatgccctggcctccagaagagaagcagtagcagcagcattaatgaagccaccaccaaccacaccaccaatgttttaaaatgcatggccattcagataaaaatttagagcccctcctattactaccatatcatatcaccttagctaatcttagttactattaccacccaccgacccaccaccattgatgaattaccccccaaagctcttgataagctaccaccaaaatagccactagttttatagcattcggggcgatgtttagccacacgactagtactaggaccaaccacaggatacatgtaacactactactgcctgaatgcaaatgtgtgcaaggcagtgagtacagcagatatgtaatggacc

SEQ ID NO: 8136 - DNA, 473 bp, Oryza sativa
  Clone ID: uC-osflcyp158b05b1
aaaggcttccagaagtgcatgacgtttccgccctctagcggcgaggcacaacagcagcagggttcatgctgtgatgcagataagaatcccaaggatgtgccaacctatgagcgctccgtgtcactgcccccaactttgaagatcatatctgctatgaaaggaagccgccaaaagaatgggatggcttcatcaactgaaagtcgccacgtcaaatgggcccctgacgtgtatgaccccccagtgacatctgtatgtcattcagtgaataacagctaccagcgtcggtccaaatcccggaagaaggacaagaataagcagaagcagaaacaaaagcaaaagggtaggtccaagaaaaaccaccagaatgctatccagagttcagcagtgctccaagctcctggcgaatttgataggctcaaggatgctgaaaccacaagtagtaatttagcaccagacgatctcacaaacatgag

SEQ ID NO: 8137 - DNA, 444 bp, Oryza sativa
  Clone ID: uC-osflcyp158b06b1
accacgcacacggaaagagaggagaggtcacatcgcggcggcggcggcgaggatgttggcggtgtttgatccgacggtggccaagtgcccggagggcctccggagcccgccggtggccggcggcgccgaggcggccggaggtgcgggcgcgctgatgaagggcttcgccggagcgcacgccgacgcggtcaccgtcagcctgggccccgccggcgccctcgcctactcggtggacaaccagagccccctcgtccccaggttgtttggtgctgtgaatgacatattctgcctgttccaaggacacattgagaacattgccagtctgaagcaacactatggtctgagcaagacagcaactgaggttaccatcctgattgaggcctacaggaccctcagggacaggggccctctccagctagtagggtcggagagatcttacgggaa

SEQ ID NO: 8138 - DNA, 351 bp, Oryza sativa
  Clone ID: uC-osflcyp158b11b1
gtattgtcttcagacggagttaagatcttgggaaacttggttttgccaccttgtaagaaggaacctcgccaaagggcttacggtaggggcagccaaggaaggtgtattagccattttcttgttacttggaggttcagagggaggttcagatttctttgcgaaaactgatgtcgccgtctcttgaagactttgcagcgaggactccttcgagctccctagccgatggagcattctgccaatcagcacctcacaagatccaggtagctctttttcgagatgcatcaaggaatcaaggaatgtatgaacaactggtccgttaaacttgtcaccagtagcctcttttagagaagg

SEQ ID NO: 8139 - DNA, 224 bp, Oryza sativa
  Clone ID: uC-osflcyp158c01b1
aacccgttctgcttatatcaacgcaaaccaccctctacgccgcgcgcgcgaggcagattctcgacggggagcgcaatcgtcgccgccagatcccgccccgatcgaccgcgactcgttcccacggtcccgcgtataccggtctatctctctctctatctctctctctctgggatcggagcgattgcctttctttttgcgcggaggagatcggcgagaatgggagc

SEQ ID NO: 8140 - DNA, 386 bp, Oryza sativa
  Clone ID: uC-osflcyp158c04b1
acggattatgtttgtctggcctggactaaaaagggatgtcacggcttatgttcagtcttgtgcaatctgtcaacaatgatacggagaacattgtaagagcccaggattgttgcaaccccttccagttccactttaggcttggactgtcattagtcttgacttcattgaagggcttcctaagtctgggggctttgatacaattatggtggtggttgataagttcaccaaattcgctacgttcattcccttatctcatccctttactgccttaaaagtggctcagttgttcatccagcacatctatgatgtttttgtcatgccgcaggccatcatctctgacagggacaggatctttacaagtgctttatggcaggaactcttttgac

SEQ ID NO: 8141 - DNA, 459 bp, Oryza sativa
  Clone ID: uC-osflcyp158c05b1
cgctcatcttattgacatctccgaggaaagctttggtatatattgttgcgaagctagggccgccatggcagcgtcgacgcgcgtgtgggtgctcgccgcggtgctcgtggcgtgcgcgatcgccgtccgctctgcccgcgccggccacgccagcggccacgccgccgccgccgacgaggaggacgccgccgccgcggcgccggcgccgtcgaaggggcacgggtgcaacccgctcaaggacaagacgtgccggcacgacgaccgccacgatccggagaaccaggaggagggggtggggttttgggcgttcggctgacgttcttcccgtcccttaccggagacgacggggacaacgacgagctgccgtcgttcgacacccacatgaccattctcggccactgaaaacaagggtgtcatggctgcaccattttaatcgtcatcatcattatcttcttaact

SEQ ID NO: 8142 - DNA, 395 bp, Oryza sativa
  Clone ID: uC-osflcyp158c08b1
gcggcccttccgtgttcccactgtcgatgtctcagatgttgctcttacagaaagaatagaaacctatgcctgatatgatgctatccacagtgctatcaagtctgaataccagggaaagctcaagggaatcataggatatgtatgaggactacctggattgtactgactttgtacgggacagaacgtccagcctctttgaccccaagggtggaactgctgttaacgataactgtctcaagattgcagggtgagcccacaacacctggtgatacaggaaccgatgtatcgacctgatcactcacatggccaagaccgaacagaatgcggttgcttgccatggtataacatggccgacgagccggacataccgaaatgctactgctatgctgagaata

SEQ ID NO: 8143 - DNA, 412 bp, Oryza sativa
  Clone ID: uC-osflcyp158d04b1
ctcgactttaccagtgactcctccgtctccacacattacagctaccacgccgccgccgccgccgccgacgacgaggaggagatgtggcggagttctgtagctcgtgctcttcttcttctgcgctccgttatacacaggcctctcccgccgtcgtcatctacacttcgagccttaacccgagcgccaccggctacccgccccctctcccgcttcctctcctcctccccggagcccctcccggatgccggtgggggcgctgcttacgagtcctctgattccaccgatgccggtgaggatggtcttgtctctgatcccaccgaagccttttaggacatcctgttctttttttgggaggaggaactctgggactctgattatgtctttttcgttgtctttttccccgaccctttgt

SEQ ID NO: 8144 - DNA, 66 bp, Oryza sativa
  Clone ID: uC-osflcyp158d10b1
aaaaaaaaaaaaaaaaaaaaaaaaaaaaaaaaaaaaaaaaaaaaaaaaaaaaaaaaaaaaaaaaaa

SEQ ID NO: 8145 - DNA, 391 bp, Oryza sativa
  unsure (1)..(391): unsure at all n locations
  Clone ID: uC-osflcyp158d11b1
ttcgaccccaccttggcaaaaagaaaagaaaaataatatcatcgcactttttgctgcccttttcatcccctcggatattcacgaagcaaatctctctgcaattcttttcttttttttttttgatcttgcggatcttctccattgaggaaaggcgagagctttgggatcgattccgggccatggcgaaggaggtggatccgtgcgaccaccgcgaggtcgtcgacgccgggtgcgtccgcgccgtgctggccgagctcgtcctcaccttcgtcttcgtcttaccgncgtcgccgccaccatggccgcaagggtgcccgaggtggcgggggcggcgatgccgatggcggcgctgcggaggtgggcgatcgcgacggcgctggcgcgggggtgc

SEQ ID NO: 8146 - DNA, 473 bp, Oryza sativa
  Clone ID: uC-osflcyp158e06b1
cctttcatgaaacaagaaagacaacaccaacaaactagctagctcgccaatggcctcgttgtactccttccggctcgccgtggcagaggcggcattgttggtcgttggctcatgcgccactgaggtcgccttcaaggtcggtgagggctctagcggaaaaagtctagagctcgtcaccaacgtcgccatctctgaggtggagatcaaggagaagggcggcaaggactgggtggcgctcaaggagtcgtcgactaacacctggtcgctcaagagtgaggcggcactcaagggccccttctccgtccgcttccttgtcaagaacggcggctaccgtgtcgtcgatgacgtcatccccgaaagctttacggctggctctgaatataagagtggcatcaacatctaagtgatagacatgtgtgcttttttttttgaaataattcttaacctctctataatccttttttttttaaaga

SEQ ID NO: 8147 - DNA, 304 bp, Oryza sativa
  Clone ID: uC-osflcyp158e07b1
actgctcccccctcccatactgttccactctctgctctcctcttcgcggcggccgcggacgcggcggcggagtgacgaggaggagcaatggcgatggtcttctgcgcctactccccatctgtcggcgttgtcacccactccgcgccgggcaggatcaggccgcctcgcggactcggattcctcaccaccaccaccaagtttaggcccctcgtgctcaccaagcgttggggatggcagggaaacatttccgcggctcggctgaggacgcgctgctgtctcatgtttcgcggcggcgaggcctatg

SEQ ID NO: 8148 - DNA, 353 bp, Oryza sativa
  Clone ID: uC-osflcyp158e10b1
gtattctagcatatacagatacagagccaggggaggtatggaggagggccttgcacgagcacgacgatgccaatagaagctgcggcggccgcttctttaccgatggcgtcgcgcaacgccgccctgtgcttctcctccgccgccgctgcccggagccggagcacgagccggcacggcaggatggccgtcagctgctacgccggggcctcagatctgctctattcctctgtggctgccaagctgcttgggcctgccaccagcttcgatgccggcaagctgacggtagagttcgcccacagccacgggaacagcaggtacggttccccatagcttacaccctcaaccactgcgac

SEQ ID NO: 8149 - DNA, 441 bp, Oryza sativa
  Clone ID: uC-osflcyp158f02b1
cggacgcgtgggcgaccaatccctcttccagtcaagaaaaaaggaagattacaccaacaaacaaactagctagccaatggcctctttgtcctctttccggctcgccgtggcggtggcggcactgttggttgttggctcctgtgccactgagctcaccttcaaggtcgctgagggctctagcgccaaaagtctagagcttgtcactaatgttgccatctctgaggtggaggtcaaggagaagggcggcaaggactgggtggcgctcaaggagtcgtcgtctaacacctggacgctcaaaagtgagtcgccgctcaagggccccttctctgtccgcttccttgtcaagaatggcggctaccgtgtcgtcgacgatgtcatccctgaaagctttacagctggctctgagtacaagagtggaatccaactctaagtaacagacat

SEQ ID NO: 8150 - DNA, 456 bp, Oryza sativa
  unsure (1)..(456): unsure at all n locations
  Clone ID: uC-osflcyp158f03b1
cttcttcttgctgatcatcatatatctcttgtgagcttcagcaatgggggctctgccaagggctctagtcctcggcgtttgcgccgccgtcttgctggtgaacgtgctcgccgttgtcgtcgacggcgacgccgcggcggcggcgtccatggtcgtcggattggccaagtgcgccgactgcaccaggaagaacatgaaagctgaggctcgttttcaagggtgttcgcgtggcgatcaagtgcaagaacagcaatggcgagtacgagacgaaggccaccggagaggtcggcaagtgtggcgcgttcgccgtgcccctcgcggcagacctcctcggcgacgacagccagctgaggcagcaatgcttcgcgcagctgcacagcgcggcgtttaaccagccatgccccgggcaggagccgtcgtggatcgtcaacgccggcgncgacaagaagaagacct

SEQ ID NO: 8151 - DNA, 530 bp, Oryza sativa
  Clone ID: uC-osflcyp158f06b1
ttgggcgcctgccgtgccggaccggaatcgccgggtcgcccaggcgacccgttgctattgccaggagaaagaagatggatgaagcaagggtgatctgctggaacatgacagacgagaacctggtacctgaggcacggacctctgctgaagtaagacagcaggatctcacgtgatgacgggttcacactagacgcggtgaacatctggtgaggtactgagaatacatacctgatatcttcgcatgaataacctatcagggactaatcgcctggtcttttaccgcacccgctttgaaggaacagggcgtggcacgagtttctagaattgtttccggaaaggcatatgtatgatcgaccagaagagcaccatggtctgcgctgaggttgaggattgaacgacttcatgcaccttctgcgtttgggcttcagtcggagtacccgcatctacagaagggctccagaattcgatgattgtagtggaaatcagggaggtgaccgactaagtaatcgatgatctgcttagaaaggtgg

SEQ ID NO: 8152 - DNA, 433 bp, Oryza sativa
  Clone ID: uC-osflcyp158f08b1
tcgggaaaaggttcctcagtagtgtgtgttgtctgtgcgtgagctcccacctccttcccttccccctccccaccaaacccctctccgatccaagccttccttcccccctctctctctctctccctcgcatgccggcgcgctcgccgaggcggcggcgctgatgaccatgggcggcgtcacgtccaccatcgccgcgcgcttcgccttcttcccgcccacgccgccgtcctacaccgacgtcgccgacgccgccacgggccgcctcgacatccccgagatctcccgcccgcccgcgcgccgacggcggagggacggaggcggggacgcctcggcgtcgggcgccgcacccggcgaggacgaggactgcacggaggtggtgcgcctacgcacgcggcgcgggaacgagatcgatggggtgcacgtgcgccacgag

SEQ ID NO: 8153 - DNA, 291 bp, Oryza sativa
  Clone ID: uC-osflcyp158g12b1
tcgcccacgcgtccgatcctagctaggtagctatatcgtcgtcattaattggagctagctagggaggcagcaggcagagcgcaggggggcggccgggcggcgagggaaccatgagcaaaggtgctatcatcggcgcttccaccgtgctggtggtggcggtggaggcagccgtgtgcgtggtgtcgttcaagaacggcggcggcggcaaggaggatggcgagctgtccacgtcggtgaagtcggtgaaggccttctgccagccgacggactaccagcagacgtgcgaagagg

SEQ ID NO: 8154 - DNA, 452 bp, Oryza sativa
  Clone ID: uC-osflcyp158h06b1
gctcctgccctgccgtaccgaatcgcatttcgggccgacccaccctttttttctcgtggaggacgctactatccggttgttgtgtgccatgggagccactattctgaatcgggacgcccgataccaccgattgaacagagagacacgcccgctgcaatgaggatgacccgtatccacgacaatcccttgtaccccagatggacgatgacacgaaggcgaggctctacagattgttgacccatgtggacaggcaacacatgggtgccatggtgaccacattaatggacgccatcagagccctcgaaaacgaagcaagggaccattactcttaccgcgccgagagcatgagcagttcggagttcgtgcagatgcctggaatcgacgggtgctacatgcttggcaagatcgtgctgcctcactcctgctgccccagcacttcagacgaccgtgcg

SEQ ID NO: 8155 - DNA, 233 bp, Oryza sativa
  Clone ID: uC-osflcyp158h10b1
tcgctctccaccatcggaggagacgctcaaactaccgagctgcccaatccatggcggcggcggaggcggaggcggccggtcctctccggcgggctctcttcgtcctcgccgtgctcgccttgctgctggtagcggccccggcggccgaggcgtggacgggggagatccctggccaccttgtctgcgacgtctgcggggacgccgccatcggccccgaggaccacgtcctcgaa

SEQ ID NO: 8156 - DNA, 279 bp, Oryza sativa
  Clone ID: uC-osflcyp159a01b1
ggtttgcggagtaaagagagtctttgctagctcggactggtctgatgcactttgttgtacaatagttaagaaccggctgtcatccttggattgtgctgcgtgtggatgtttctattttctgtcaagatttggatcatggcactgggatactgcttttatcaatgaatgctgcataattattatgttaaaaaaatgaaaatagaggccggactggattataggtcaagcccaacttatgggggcactattcgtctactttgcgtgctttagctcaagctg

SEQ ID NO: 8157 - DNA, 336 bp, Oryza sativa
  Clone ID: uC-osflcyp159a04b1
cgttatttcctcctccaccctctctctctctctctctctctctctctctcctcccctttgttccgccgcttcccctctctctctacctctcgcggcgaattcgccgagagggcgcagggaattttattaggagaaatcccctttttgtatccgtttctccggatccgcacacctcctgttaatccgccgattcttctttgatttgttcatattcgatttttttatttttttccctttgtttgcctttttattcgctcgattgtggggggagggaaagagtttggtcgaccggatttcttgggggatttgcctggatctggcgtactagaggcccct

SEQ ID NO: 8158 - DNA, 201 bp, Oryza sativa
  Clone ID: uC-osflcyp159a06b1
acgcgcgcgtttttaggttatcgccaacattcagactggagggagctgctcgtggagccgccatggactggtggagggccgggccaccgtgaggatgcttgattcacacattgattctacctttcttgcgcttgacggcgacgctcatggccaatgggtcactgtccccaagaagaacattggcctttgtgacgcccacat

SEQ ID NO: 8159 - DNA, 230 bp, Oryza sativa
  Clone ID: uC-osflcyp159a09b1
gccactcacttcatgtggggtgggacttcatttacagtatggtgaattaataccctttgcgttatgcccagaaaaagaatagttcggctaaactttctttctttgatcgaatattttggaaactggctctaatgaggcagccattttgttgggcccgcctctgaaatgaatgattatcttcgaatatcctgttcggaaaggattatggctcaaaccaacttcttcaccac

SEQ ID NO: 8160 - DNA, 488 bp, Oryza sativa
  Clone ID: uC-osflcyp159b03b1
cattatccaaccaaaccccaaagcatatcacaatcagtggggagggaagggccccttatttattcgcattcctctcctcatcatcactcatctcccttccctgtcgattaccttctctccttcctctgttcctgctctcctccacacatccaggcaggcaacacaagaatcatccgggagagcgacatggccccggttgccgtgggcgacaccctccccgacggccagctggggtggttcgacggggaggacaagctgcagcaggtctccgtccacggcctcgccgccggcaagaaggtcgtcctcttcggcgtccccggtgcctttcaccccgacctgcaggaatcagcatgtgccaggattcataaatcaggctgagcagctcaaagccaagggtgtagacgacatcttgcttgtcagtgttaacgacccctttgtcatgaaggcgtgggcaaagtcataccctgagaataagcatgtgaaatttc

SEQ ID NO: 8161 - DNA, 81 bp, Oryza sativa
  Clone ID: uC-osflcyp159b04b1
gcagttcaaaaaaaagctgaagagaaaaaacaaatggggggagaatattaaaaaaaaaaatgggggggaaaaacaaaatat

SEQ ID NO: 8162 - DNA, 468 bp, Oryza sativa
  Clone ID: uC-osflcyp159b05b1
ctttttattgccgtagcgtggtgccgccgcccatccgggagtatccaccgtcaccgactacccttctctgagcgggtgcaaatcctgccaattgaccccatctcaggagaacgtagagccatgcggttccgtgtagtattcctgtagtccactcctgcaatccacccgccctctgttttgtcaaacttctcatctccccttcccttccgccgccatgctgccggccggtagcctcaccgacaagcagctccacttcttcgacgccaatgggtaccttgtgctggggtcgttctcgagcgcggaggatgtgaaggcaatgagggaccgcatggcggtgctcatcgacggctttgacggcgctggcgacgtcttcttcacaaaggatcatcggcaggtgaagaatgacttttctttcagagtgcggagaatatcttttcttctttgaggaaaagcatttgagatgatgat

SEQ ID NO: 8163 - DNA, 488 bp, Oryza sativa
  Clone ID: uC-osflcyp159b09b1
tttgtttttgccatttcagctttggttgactgatgataaagctaataagagagagcatattgatgcagattctaacggtgttcctgggtcgaccatgaggttattaatggactggtctgatagagaacatgaagtatatgacattaagtacatggatgaactttctgtggtcttcaagcctggatttatgtcaaagaaaaatcggcaagaagcagtcaatttattttcatgcttagatgcttttctgaaggatgaacctctgggccctgatgacatgtggtactgcccgagatgcacggagcacaagcaagccagcaaaaagcttgacttatggaggttgcctgagatattggtagttcacttaaaaaggttctcatacagccggtttatgaagaacaagcttgatacctttgtcaactttccaatccatgatcttgatatgagtagatatgcaaatcactcaagaggtgattcagcccccatttatg

SEQ ID NO: 8164 - DNA, 458 bp, Oryza sativa
  Clone ID: uC-osflcyp159b10b1
tgttgacggaggtgctggggagcgacgtcgtcgaggaggtcgaccagcccatcatcgactacatcgccaacgtcctcgccgacgaggacttcgacttcggcgcccccgacggccacggcatcttcgacgcgctcggcgacctcctcatcgacgctcggtgcgtcgccgacgaggagcactgcctcgaggtctgcagtaagatttgtgaaaaatttggaaagcatggcctggtaaaacctaaacaagctatgcgaagccttgtcactcctttacgtatgaacgagggaatggacgataaggttgcccccaaaaagcaagctgatgtatttgatggacccttgctttcatcacgtgacaaagccaagattgaacgggagaagagaaaggatgagagacaaagagaggctcaataccaaacgcatgttgctgaaatgaggcacttagggctggaatgcctc

SEQ ID NO: 8165 - DNA, 393 bp, Oryza sativa
  unsure (1)..(393): unsure at all n locations
  Clone ID: uC-osflcyp159b12b1
tttctcaacactagtaggataaagccacagagagagcagtagtagtagcgagctcgccggagaacggacgatcaccggagaagggggagagagatgagcggcggtcaggacctgcagctgccgccggggttccggttccacccgacggacgaggagctggtgatgcactacctctgccgccgctgcgccggcctccccatcgccgtccccatcatcgccgagatcgacctctacaagttcgatccatggcagcttccccggatggcgctgtacggagagaaggagtggtacttcttctccccgcgagaccgcaagtacccgaacgggtcgcggtcgaaccgcgccgncgggtcggngtactggaaggcgaccggcgccgacaagccggtgggc

SEQ ID NO: 8166 - DNA, 208 bp, Oryza sativa
  Clone ID: uC-osflcyp159c08b1
gttgagcggtcaaggctgcgtcgtcgtcgtcgtcgtcgtcacctgcagcggaggaggaggaggaggagagaaggttcataggaggaggaggttgcgatgcactatatagctgcatcttatctcatctctccctgcctgtctgggggcccattctattgataggtactttctggtctctatcgttatcgtcttctatcaccacgtttct

SEQ ID NO: 8167 - DNA, 472 bp, Oryza sativa
  Clone ID: uC-osflcyp159c11b1
ttttccaacgcgaagctctcgtcgcgcacaaccaactcgacaccgcggcgaggcgaaccaacgcgcggcgtgggcatggggaggtcgccatgctgcgagaaggcgcacacgaacaagggggcgtggacgaaggaggaggaccagcggctgatcgcctacatcaaggcgcacggcgagggttgctggcggtcgctgcccaaggcggcggggctcctccgctgcggcaagagctgccgcctccgctggatgaactacctccgccccgacctcaagcgcggcaacttcaccgacgacgacgacgagctcatcatcaagctccacgcccttctcggcaacaagtggtcgttgattgcggggcagctgccggggaggacggacaacgagatcaagaactactggaacacgcacatcaagcgcaagctcctgagccggggcatctacccgcagacgcaccgggccgtcagcgccggga

SEQ ID NO: 8168 - DNA, 451 bp, Oryza sativa
  Clone ID: uC-osflcyp159d07b1
tttttgctttacaaagatgcttgctgaaaaacaattcagagagactgaggagatgaaggccaaggcgcagatctctcatgcccagcctgatgatctcattgatttctaccacctgaagagccggaggggaatgagccaacttgagttggaagatgcagtccaagatgatttgaaggctgctactggtgaatttacaaaagatgcagatgacgcaaacagactgaatcgcattcttcaactaacagggttcagtgatcctgtgtatgctgaagcatatgtaactgttcaccactatgatattgggcttgatgttacagtcataaaccgaacaaaggaaacacttcagaacttgtgcttggagttagcaacaatgggtgatctcaaacttgttgaccggccccagaattacacgctggctcctgagtcaagcaagcaaattcgggccaacatc

SEQ ID NO: 8169 - DNA, 407 bp, Oryza sativa
  Clone ID: uC-osflcyp159d10b1
tttttctccctacacatcttacacgagccccgacgaggccatcctgtgcgtggactcctaccagagcatgtacgcgcagctgctctgcggcctcgtccaccgcgccgacgtgctgcgcgtgggcgccgtgttcgcctccggcttcctccgcgccatccatttcctcgagaagcactgggcgcgcctctgccacgacatccgcaccggcgagctcgacccggagatcaccgaccgcgtggtgcgcgacgccgtcgggcgggtgctccgcgccgacccggcgctcgccgacgcgatcgaggacgagtgcgctagggcgtcgtgggagggcatcatccggcgcctgtggccacgcaccaagtacattgacgtgatcgtgaccggcaccatgttgcagtacatcccgacgc

SEQ ID NO: 8170 - DNA, 446 bp, Oryza sativa
  unsure (1)..(446): unsure at all n locations
  Clone ID: uC-osflcyp159e08b1
tagcaaagttcacttgtgtgatcagcttgtagctataagtccgctgtatctgagaaacgctgctgtaaatccatcttcactttgtttttccaaattatatgtacacacactgtcacactgtatgaaagagcataaaacccttttcactgcataagtaaccctttttgaggattatgaatctgtgagatggatactcttttatagcagatcaaaccttagatgtcttcctgaatatgggcatttctgcatctgcactacactctgaaactgaaagactgaagaattcagggcataagatagcatatatagagaattgtttcagagcanannanannanaaaaaaaaaaaaaaaaaaaaaaaaaaaaaaaaaaaaaaaaaaaaaaaaaaaaaaaaaaaaaaaaaaaaaaaaaaaaaaaaaaaaaaaaaaaaaaaaaaaaaaagggggg

SEQ ID NO: 8171 - DNA, 493 bp, Oryza sativa
  Clone ID: uC-osflcyp159e09b1
gatctcatcaaatttctcttgagaccgtagagagagagagaggcgccaaccatggccggcatcatccacaagatcgaggagaagctccacatgggcggaggcgagcacaagaaggaagacgagcacaagaaggagggggagcaccacaagaaggacggggagcacaaggaaggcgtggtggagaagatcaaggacaagatcaccggcgaccacggcgacggcggcgagcacaaggagaagaaggacaagaagaagaagaaggagaagaagcacggcgaggagggccaccaccacgacggccacagcagcagcagcagcgacagcgactgagccgtcgggcccccacaccggcgccgtgcgtgcgtgcatgcaggtgatgctgcagatgattggaggagttccgagcaggattaattagtatctgtgcaatacgtgatgcagtgatctgtctcatgcatgtatctgtgcttgattgcaagaaaaaaaaaggcat

SEQ ID NO: 8172 - DNA, 462 bp, Oryza sativa
  Clone ID: uC-osflcyp159e11b1
ctccgcgcccccccgccgcttctcccgaccgccgccgcgagaatgccgttcaagaggttcgtggagatcgggcgggtggccctggtgaactacggcaaggactacggccgcctcgtcgtcatcgtcgatgtcgtcgaccagaaccgggcacttgtggatgctcctgacatggtcaggtgccagatcaacttcaagaggctttccctgaccgacatcaagattgacatcaaacgtgtcccgaagaagacaactttgattaaggctatggaggaggctgatgttaagaacaagtgggagaatagctcatggggcaagaagctaattgtccagaagaggagagcgtcactcaatgactttgacaggttcaaggttatgttggccaagatcaagaggggaggtgctatcaagcaagagcttgcgaagcttaagaagactgccgccgcttaatagtgccatgttgag

SEQ ID NO: 8173 - DNA, 396 bp, Oryza sativa
  Clone ID: uC-osflcyp159e12b1
ttcagctcaagtttagagtgagaggtgagagctcagcggcgcgccatggcggcggcggcggggaggatggaggagtacggcgtcgggcggatcctggacatcacccacgcgtaccgggcggacctgccggcgttcgcgccgggggcggtgacggggccggtggtgcggctcagggactccatggcgaacgggacgctctacaacctgtcggagctcaagatggagtgccacatgggcacccacgtcgacgcgccgggccacatgaaccagggccacttcgccgccggcctcgacgtcgacaagctcgacctcgaccttctcaacggtcctacattattggttgattctccaagaaacacaaattatacagctaaagcaatggagtcgttaaatata

SEQ ID NO: 8174 - DNA, 359 bp, Oryza sativa
  unsure (1)..(359): unsure at all n locations
  Clone ID: uC-osflcyp159f01b1
gtttatcgccaacaagcccaaacccggagagagccggaggagatccgtcgtctcccgcatcctcaccggccgccggcgatggagaagggcaagggcctcgcccgccgctgggcggtggagctccacgacgcctnctcctcctcctcctcccactcctccatccccgacccgcccggcttcaccagatccgcccccgacgcggacgacgccgccggcgcgcggcagcggaagaattccgagaccgcgtggaaagcgcaaaaagcgtgggaggtggcgcaagcgccgtttaagaacctgatgatgatgggtttcatgatgtggatggccgggagcaccgtccacctgtttagcataagtat

SEQ ID NO: 8175 - DNA, 486 bp, Oryza sativa
  Clone ID: uC-osflcyp159f05b1
cccttataagagaagcaattggtgtgaccatatgtattgcatgctcaaatatgcgattatctaggttatttgggcatggtgattctctagatgtttctggggatgtaagcatgactgaacaaacagggagtgagaactggtcaaaacagttgacagatggagctactgaattatctatcagtatacaaaataatatttctaagcaactggagtcaacaccagattcagtaactgaaaatggcttggacaagaaagaggaggctgatgtgaaaagaatggaaacgatttttcacttcataattgcatcgctgaagtctgggagatcatctgttctactggatgttattatcggactcatctaccctgttctctcattacaggaaacatcaaacaaagatttgtcattgcttgcgaagtcagcttttgagttgctgaagtggcgtattttacaacggccttttcttgaaactgctattatgactattc

SEQ ID NO: 8176 - DNA, 198 bp, Oryza sativa
  Clone ID: uC-osflcyp159f07b1
tgttatgtccgacagcctgatgctcgcatagtaagggagctatatcgatcttttgcgcattctaaccggcctgcggccatggataagggcatgctataccaaattccatgcattggaaggattcacgaatacccattctacttcttctgccactttcaggggtaaacgcgcgtgagaatttaccagatccgccccccc

SEQ ID NO: 8177 - DNA, 490 bp, Oryza sativa
  Clone ID: uC-osflcyp159g05b1
acgaaacttaatggacgctgaagatttgcctccacttatcgatgcaattaacagggaagccaacggcttcagcatcttagcggagctccaatcgatggtcacaaagctgtcaatgaagagtaaggtgactatagtgaacagactgaacacattgaagcttatcactgagatattcatactaatcgttaggcatggaagccgctacaccgtagaagaagcagagaacttgatgaaatcactgtggaaggctgcgaggaacatgtcggaaattgaggacatcatggttatctctggatgtagtagcagcctaaagactcttggttcccttgtgaaagaagccgaggaactcctgcctagagagagggcatccgaaatggaagtgataattgagcatcctagctgtgtcaatcgaaatcagattaatgaaatcgtatataatctgtattattttaatccgtaccctcattgaagactgtgttgccgggaaatc

SEQ ID NO: 8178 - DNA, 476 bp, Oryza sativa
  Clone ID: uC-osflcyp159g06b1
aattaggtcagaactgttgatggaaatagtgaacttagaatacctccaggtacccaacctggtgatgtagtggttctagcaaagcaaggtgttccatcattgaataagccatctgttcgtggtgatcatctattcactattaaggtcactatacccaaacgtataagcggacgagaaaaggagctacttgaggaactggcttctttgagcaatggtggttttgctggtgcacctgtgaagccaaaatccatacgccaagagaatgaaactactgttgcccaagaaaattcggatcaacctgatgaaggggagggtgactggttgaagaaacttcaagattttgcaggatccattgctaatggtgctgccaagtggctaaaagacaacctttagcctgtaaatagttaccgcggaatgcatttatattaatcgctgttatggtgtagtccaatctgctattcttcaattcattggat

SEQ ID NO: 8179 - DNA, 236 bp, Oryza sativa
  Clone ID: uC-osflcyp159g09b1
gtctattttcaacaagcccaaacccggagagagcgggaggagatccgtacgatgcggcatgctcaccgagcgccggcgatggagaatagcaagggccttgcccgccgctgggcggtggagcttcacgacgccttctactgcttcttctcccactcctgcatccccgacccggccggcttcaccagatccgaccccgacgcggacgacgcccccggcgcgcggtaatggaagaattt

SEQ ID NO: 8180 - DNA, 318 bp, Oryza sativa
  Clone ID: uC-osflcyp159h08b1
tctgttctaagccagcggttcagcgatcttgaagacagagctaaatcaagacgtgaatcccaagattaatggctaacagttttttttgttttgatttttttggccacgaatgctgaatgcatttgtaccttgtgtctggagcaaagtatattcatcgcatactggttttgtatcggtatttgagttagaggtgggtatcatttttgagtctatgataccactgccacccggagtgaataaaccagagtaaccatggtatgtaagaccgatttatctactcttctattggaaggcaatggtggactaattctgttgttt

SEQ ID NO: 8181 - DNA, 482 bp, Oryza sativa
  Clone ID: uC-osflcyp159h12b1
attttacctcctccacctcctcctcctccccccgagcggatcggcccggctcctcctcctccgccgccgccaccgccgccgcagataggagaagatggccgcacttgataccttcctctttacctcggagtctgtgaacgagggccaccctgacaagctctgcgaccaagtctcagatgctgtgcttgatgcctgcctcgccgaggaccctgacagcaaggtcgcttgtgagacctgcaccaagacaaacatggtcatggtctttggtgagatcaccaccaaggctaacgttgactatgagaagattgtcagggagacatgccgtaacatcggttttgtgtcagctgatgtcggtctcgatgctgaccactgcaaggtgcttgtgaacatcgagcagcagtcccctgacattgcacagggtgtgcacggtcacttcaccaagcgccctgaggagaatggtgcttgtgaccagggacacatgt

SEQ ID NO: 8182 - DNA, 324 bp, Oryza sativa
  Clone ID: uC-osflcyp160a02a1
gggactcataaattgtgttgttactattttttttttttttttttttttttttttttttttttttttttttttttttttttttactttatcacaaaaaaaaaaacaaaaaccccccataaccccacaaaaacacccccccacaaaaaaaaaaacccccacaaaaaaaaaccccaaaaaccaccccccccaccgaaaacaaacccctaaaccaccgaaaaaaacccacccccaaaggaggaaacctacctccaaaaaaccccaaacacccaaagaacaactcccaaaaacaaacaaaaaaaatggccaaaggcctcaaaaaccccc

SEQ ID NO: 8183 - DNA, 531 bp, Oryza sativa
  unsure (1)..(531): unsure at all n locations
  Clone ID: uC-osflcyp160a03a1
tacgtagtttgatcctttgtgcggccgcctttttttttgtgttggaaatgaacgggtgttctattctggatgaaagcctgaaactttatttttacattaggcttgtgcagctcaggtttaaggccacatcatcactgcttattctttctttaaggcgaactatacataaagttcatatcatagataggtacatagcaactgctaaagaaccacaaccaagtccaaggcaagccaggatctccagattacaagggcaccaacagttgctcctgatcaagaaatctgatgcttcatttgcagtcttcgtcagaagaccgaaacacaaacttcatccctttcttgccacaatcgtccttctcggagcccttccagccaccagagatagtctccccacttgttgcttcaacatcgatatactctgtaacaatctttccagaagcaactgctccacccctcctgagctcttcacgatcttcatcaacgcgatagtaagccacacaggtacggngcggngaaaggactttgtatgag

SEQ ID NO: 8184 - DNA, 427 bp, Oryza sativa
  unsure (1)..(427): unsure at all n locations
  Clone ID: uC-osflcyp160a05a1
acctgtccccgnngggggtgagcacagcggggggtgaacaccaacacggcctgcgccgccgggccgccggcgaagatccagtcgtggacgtcccagagcacctgcaccggcgactggtcgacgatcaccggctcgctgcccctgaacttccactgcaggctcctgacgtgcaccagcacgacgccgttcaccgtgatccgcatctacggctccctcggcccggcgatggcgctggccacgacgatctcggggtcctttctgccggcggcgagcggcgcgcgggcggcgaaggtgcgcctgccggagacgctctcgcggcgcgacacgagcacagcgtcttcgagcgacgggcgggacctggtccgcttgaacgcgtacttcttgccgtcggcgaggaggaggacgacctcctcgcggctcaccagcg

SEQ ID NO: 8185 - DNA, 486 bp, Oryza sativa
  Clone ID: uC-osflcyp160a08a1
tgttttttttatttttgggtggtttttttttttttttttttttttttttttttttttttttttttttttttttttttttttttttttttttttttttttttttgggccccgggaaccaaaaaaaaaaattttttttccccagggggccgtttggggaccggggaaaagggggaaaaaggtttttttttaccccccccccacggggttatgggcaaggaaggggccgccccccgggggggtctaaaaaaggccccccaaaggggggactcccccccaggatttttccctttttttaaaaacgaccccctttttttttaaggggggaaaaaaaagaacaaggggggacagggcggggcctttgggcgcccctttgtttttttcccccaagggagggtaggcggaaaaagcctatttgggggccccccaggggcccaggggaccgggggcaaatttcccccggggagaggcccccccggggtaaaaacc

SEQ ID NO: 8186 - DNA, 443 bp, Oryza sativa
  unsure (1)..(443): unsure at all n locations
  Clone ID: uC-osflcyp160a09a1
ngggtttttataacatggggggggaccaaatcgcattatgggggcctatacgctcacatatactccgtctcgtgcatagacggatctgaccacacacaaagaagctgcctgaatgcacgggcgactcgagacggcgccaaacaaaagacaagctgcttcgtctgcatgcacgatccatatgcatgcaacacatcgatgctagccggcaacagtaccatgcacgcacgcggggcgagcgcaaacccaagcatgcctccgtagggatactcgcatgtgtgacgtgcacatatgcggcatggtttgggtcacctaaaatcattgaggacgtttgcatggcaagatatatggcatatagttttacacaggggtggagtcgccggccttgagcaattggagggcgctcttgattgtgggcagccacccggcggagtaccagaagtaga

SEQ ID NO: 8187 - DNA, 498 bp, Oryza sativa
  unsure (1)..(498): unsure at all n locations
  Clone ID: uC-osflcyp160a10a1
nnggggttttttaaactgggcggaccacaccaatacacgattgattaatttcactgagaatagcacgggtacatcacatcacacaaattcatacgttgatacacgcatagtcgccgaagcgaccagctgcttaattaatcgataacacacgggtttaattcagcaataatcagcacacacacaaaccacactcatatgggtggtttttattgtggactaattaaggtaggtgactcgccggcggcgagtgttcggttgcttcgtgacttcacttgccgcacttgcagtcggtgcaggagcagctggtgccgtacttgcagccgccgttctcctcgccggcggcgacctcctcgaagtggctcttctcggcttcaactatgacgacgccatagctggtacctttcttcacgcactggctcttgtcagcacagtcgcagttgccgcacttgtccgacatggtcgaagatttaattagctaagtgagtgatgagtaatccc

SEQ ID NO: 8188 - DNA, 410 bp, Oryza sativa
  unsure (1)..(410): unsure at all n locations
  Clone ID: uC-osflcyp160a11a1
ccgccctttttccnggggctcatgaatttggggggtnacaaccactcctcctcatattaccaatacaantatttctcacatacatattaatattaatgaatctagatatatataaatctctccatttattaatatcaatattaatgtgaaaaatgatagaatgatttacattgtaaaacggagggagcggattttttttccaccatgtgattaccatgcaaagcctaactctctgttggctgatccgggtcttgggccagttagcatcaagttcttcggcccatcaatgtgcatcggccaggatttgtgcctcccgaaaacaagccctgaaatatcaacaagccttccttgatttgttggacctcttggcacaacacgtaaacgccagaagatcgaggcaaccgaggccg

SEQ ID NO: 8189 - DNA, 413 bp, Oryza sativa
  unsure (1)..(413): unsure at all n locations
  Clone ID: uC-osflcyp160a12a1
ngggttttattaatgtggggggttaatatttttttttttgatatgaaaaacatctttatccaacatgggaaaaagaaaaaaaaagaggaaaaggttagggggccttcctttcccttttggcccctcaccctaaaaatacaattggggcctaaaatatgctcaaattacaagccactggactacccccttcaagggggcaacgaagggcacattttcttacacacacacaggcagatacaagctgatttgcctaaagcgaatagagagttgaaaagcttttgacacctccggggggggttcctgagcaagcaggaacaggagcagcagggcaccaatgcaactttttaggcatcggcggcaaccttggattgccctgtgctcttggngcccaaactagcttgaactgccacttt

SEQ ID NO: 8190 - DNA, 477 bp, Oryza sativa
  Clone ID: uC-osflcyp160b01a1
ttgtggtttttttttgacgagggcaaataagttcttattgtaactggagaacattaattacatcccttctgtaaagctcagggaagcataccttattagtatttttaccatcactaagcactaaaatatagatgtaactagctagatacattgcctcattgcatgctttcttcagagattattgacacactgatgagatgaaagcaggctatcctctatatgttggatcatggaagtgcaggcagaaccttcccagtgcaggttccgaatccgacattgtagccttcacccttgcaacaagctgtcaagatgacctcatccccatcttctaggaacttgcgggtcgagtttccaactgatatctccttctgcccattccatgttagctccagcaaacatcccaaagattctgtctcaggtccgcttagtgtgccagttgcaaacatatcccctggtctcagattgcatccattaaca

SEQ ID NO: 8191 - DNA, 471 bp, Oryza sativa
  unsure (1)..(471): unsure at all n locations
  Clone ID: uC-osflcyp160b03a1
ttngggatttttaatttttggtggttatttttttttttttttttttttttttttttttttttttttttttttttttttttttttttttaagcaacaacaacaaacccttttttatattcacccccgggttaattttaccggggaggggggacccccttacaaaatccaaaagggcttggaccaaaacttctgaggctacggggaaaactggtgattcagttttaaaacaaggaagaaaaaaccggccttcttaactggggggttaaatgcaaaagggggggggggattaaacacccaaacccgaaaaacttcaattgggctgagggggtttagcccaaaaacaaaaaactatagctggggccttcactcaaggggggcccctccggttttatttatttaggtaaacaccatggagaagggggggggggttttttttatatgggaaaaaaaaagggaagccttttcccccct

SEQ ID NO: 8192 - DNA, 432 bp, Oryza sativa
  Clone ID: uC-osflcyp160b04a1
ttttggttttataattttttggtttttttttttttttttttttttttttttttttttttttttttttttttttttttttttttttttttttttttttttttttttttttttttttttattttattttattatgaggggggaaaaaagtaaaaaaaatgggggaaaaaaaaaaagggaacaaaagggggcccaaaacaaaaaaaaagggggcccctaaaaaaaaaccaccccgggcagaaagggaaaaaaacggggggggaaaaaaacaaagggggaaaaaaaaaaggggggcccccaccacccgggggggggtttggggaacacaaaggggggcccctcttaaaaaaaaaaaaaaagggggggaaaaaacggcctttttgtggggccccccaactaaccagggggggaaaaaacccacctttcggagggggg

SEQ ID NO: 8193 - DNA, 409 bp, Oryza sativa
  unsure (1)..(409): unsure at all n locations
  Clone ID: uC-osflcyp160b05a1
cccnngggcctctataaggtcnggacaccaccccattgacttatttttttttctcggcatagctcccaaagaatttgcatacaagaaaattcagctgatcttactttctcctgtgattctctctaaactgtctgaaacagtgcagaaacatacgaaatcgagctatgactttcctatcccatcaaaaagttggggatctaccaattcttgtctataaacccatctaaagaaagatttggatcttgcagctcacaccaacagcatttatccacgaattgttttagagcagcaacctccaaggatcgaggaggaggacgattatagaacgcacctcgcagccccaggctgggctccggcagcggcagcgccaacgtcagatcgcggtggtcgtggcagtcgaagcccgcat

SEQ ID NO: 8194 - DNA, 404 bp, Oryza sativa
  unsure (1)..(404): unsure at all n locations
  Clone ID: uC-osflcyp160b06a1
ggccgcctttttttttnngggatttttgatttttgggggtttttcttttttttgggaatggaaaccacaattcgatacagacatacagtacatttcactcaagtacaaaggggcaggtagcaactacaaatgacacaaaaacagaatgacagaaatgcatgccagaactcctagacacactgaattacttttaaccaatctttttaatttccaaggacaagaaatacatttgatgggaatcggtcttaaccaggcctttttcaaggacgggtaatacatttgggggacaattaacacatggttactcatcgcagatcacctaagcaattttcagcaaagcatttttttttcttgggaactaaacttgaattctcctggatctcaacaaggcaacatttggaaaa

SEQ ID NO: 8195 - DNA, 56 bp, Oryza sativa
  Clone ID: uC-osflcyp160b07a1
gggtttttatttttttttgggtttattttttttttttttttttttttttttttttt

SEQ ID NO: 8196 - DNA, 480 bp, Oryza sativa
  Clone ID: uC-osflcyp160b09a1
aacggtgtgaaaacatgagcatttagctttatttgtattcttcatcaatgctctgaagatatgcccacagcgcgaaacttccgcgaaagtgtggttctgttggcagcatgacattcacgcattaaaagtatcaaagtcgctgtacctttgctttcatcatcaatttggtgtgaggaccacatcaccgtttctccgtccggcacgcgagatgccacatgcatcacggcggtgacttgattgaagcaaaggcatcctatgccactggtttcttcttctacgggcgatgatgataatgagctttgtggacgaccatgaacatcgacggcgggggcccggtcctccactgactaaaaaggattatggagtagctgcacaaggtccacgagcgtgacaaactgtaaccatatacgacgcatacacgacgtttattatgtatcacagacgacgcaaaaaattaacagatacggtacaccatgactt

SEQ ID NO: 8197 - DNA, 433 bp, Oryza sativa
  unsure (1)..(433): unsure at all n locations
  Clone ID: uC-osflcyp160b11a1
cggccgcccttttttnngggattttatatttacggggggtacacccattttttttttttttcattcatcctttattaacatctttttttttaatttttttttacatatagtttctcaacaacacaacggaagaacacaagcaagccttattttaccacaagaaatattaccacacattaaacaccccaaaacaaatgccggcttgctaacgcccaacccaaacgcttacaagacaaaataaaaaaaaagacacaatggtttcacaaaaaaaagggccccaaaaaccccttattttaaataaacccccccaccacacttgaactcaaaccccctcaaagagcaaaaaaaaaaaacgacttaaactacacggaaaacccccgttttcaaaagggatatgactccaaaaaaaccccctgaccaacggcttagtggg

SEQ ID NO: 8198 - DNA, 401 bp, Oryza sativa
  unsure (1)..(401): unsure at all n locations
  Clone ID: uC-osflcyp160b12a1
ntggtttttttatttttgggtgttttttttttttttttttttttttttttttttttagaaaggaaacacaactcattttttattgatatatgggggatgaatccaaaaaaaccgatacaaggcacgaaaaatcagactagatgaatccttcgagatcacatgagcaaaagctttcgacgaaaggtgtcctatagtcggggaagcaataacacttgataaagataggaattcagacaccagagggtgcagactataagatgtcatcaaaacttcttgaacgccgcgaaaagaacaccgttgatggagtcggtggccacaagactaaccaagaaggagctcttttggaccttggttagtatttccctagaaggggcgccctcagggaacaggcaagcccaacc

SEQ ID NO: 8199 - DNA, 515 bp, Oryza sativa
  Clone ID: uC-osflcyp160c01a1
gccgccctttttttttgggggtttttttgaccacaggagatgctcagccactgcacacggtgcagtgtcagttgtagcattcacaacataccgagtttctttttaggaggtaaaactctacgagtctcacagcatagtaaaacgtagccagctattactagatacgagtagcattttttaagtcgcaaacaaaagggatacagtcccggcttaaggggtgtaaaatcagcttcactatcttcatgttcgccgcaacgggaaacagagcacaatcatctttgggtccaaaaatttacggcaaacctttgcgacgacattgatttgtgaaccaatgacgagtttcctagatgacatactctgcttactgttgcgcgcactgaactctctgggcacctccaggcatctcatcgtcctcatcatacgcctcctgagcagcttgggctttcctgcgcatctcttcctcatgttgttgacatcgtgcatcgtgggctcctcgcattcatctatgtccattt

SEQ ID NO: 8200 - DNA, 497 bp, Oryza sativa
  Clone ID: uC-osflcyp160c02a1
ggggggttaacagatatggggccaaatatgttcatatgatattttgccgggacatgacttgtttgcccactcacaaggagaaaatagaacaagaagcaaagtcaagtaggtaaaagacatgtactaattttgttattccttatgccgaagcaatattggatcaaaaatattctccacaatgtcgtggagcttgattgattatatggaatggtgatatgatctctctttgtgaactctgcatcctttcgctcaaaggtcctcggggccattgatatccttgttctcgatcactgctccatctgggatttccagtttgacaccaggttgggctgtgatggtcaccttgcccttcaatgtgatgctagagccaaaccaaacatcaccggaaaccttcaaggtgtcaagctcaacaatgctggggattgacttgaagcgaccaaggaaacacccgaccttcttgaactctggacccagttcaattgagggattcgatgggt

SEQ ID NO: 8201 - DNA, 178 bp, Oryza sativa
  Clone ID: uC-osflcyp160c03a1
cgtagtcctttctccagacgcggcggggtcctacgcgggcctacggagaactccccctactccatgccctcgccgacgtaccagtggacgaaggcacgcttggagtacatgaggtcgaacttgatgtcgatgcgggagaacacctgcacgacgctggtggagttggagatcatgcaca

SEQ ID NO: 8202 - DNA, 343 bp, Oryza sativa
  Clone ID: uC-osflcyp160c04a1
gggggtctaaaactttaattgggctttaattctcaaaacacgagagacagaccttaacccctacggggtgtcagaagaatccataagaatcagacttaaatcctatgacgaaaaaagatagcaatgctatgaatgtttgcctaagagttttacggactcctgaaagtaaaacctatcgcgtaggccaaggagaggttcttgggtacttcaacataacccatacagggcaaattccacaaccggaaatgccttaatggtaaaagggagaccagctcaaaggtacctttgcctcagaaatggttggaccagcttgtggtgctcaccacccacagggatcccggag

SEQ ID NO: 8203 - DNA, 63 bp, Oryza sativa
  unsure (1)..(63): unsure at all n locations
  Clone ID: uC-osflcyp160c05a1
ccgccctttttttttnngggttttttatattttggggtttaaactttttaattttttcttttt

SEQ ID NO: 8204 - DNA, 69 bp, Oryza sativa
  unsure (1)..(69): unsure at all n locations
  Clone ID: uC-osflcyp160c07a1
ccgccctttttttngggaattataaattttcgttgttaccccatctttttttttttttttttttttttt

SEQ ID NO: 8205 - DNA, 224 bp, Oryza sativa
  Clone ID: uC-osflcyp160c08a1
cccactcccaaaaaacccacctttaaccactttaaaacaaatgggcaaaaccgacaggagaggaatttcggggaactgataaactcctaacccacattttttttccacgggctggcctaatgccatcacacccaattcggagtactaagaagaaaacacccccttcatgatgggaaattttttaccacccctgccaaaaggtacctaccccgtagcccaatttt

SEQ ID NO: 8206 - DNA, 506 bp, Oryza sativa
  Clone ID: uC-osflcyp160c09a1
gggggttttgtctggaaatttgttatttcattcatatgaatagtagcacactcatatcataggaataccctgtgtttacaaagtaacactaaaaaattgcaatggggctcctcacaacatgcttctcagatacccacttgaagcttccctcggcatggttagttttgctaatatcccaacttaagcttaatgaaaatgttttcttctccttcatcttggtgaattctagctttgttggtgacacacttgtcatcacctccctgggcatatcaatttccacggtgtagcttgaatttgcttctcccacattagtaacagtccggttcaccacaagcttgccagcacttgcccttactgctactgatggatagttaagttcagcttcagttattttgcttcctttgcaggcatctttctgatttgcaattatctcaacttgaacatatgtgtaacccaggccacagagatatgaaatgtattgtgcatcatcaatgtcatagatcaga

SEQ ID NO: 8207 - DNA, 477 bp, Oryza sativa
  Clone ID: uC-osflcyp160c10a1
ggtgtttttttattttttgttgttttttttttttttttttttttttttttttttttttttttgggtttttttttttttttttttttttttttttttttttttttttttttttaacccaggcaacgggcccaaaaaaacgtggggggaaaaaggcccgcccacggcccaaaaaaaaagggcgggccgaatttgataacagcctaaaaaaaacagaaaaaccgtgaacgggtaaaaaaaaaaaaactacccctttaaagggggctaaactttgaagggccctaaaaggggggaaaagcatcataaccatactgtccggggggaccccaaaaaaaccggaaaaaaaccccccctattgcagacgggggggggcaaactttatcaaaggggggtggaaactcaaaaactgtacaacccgtgcaaggccgcacttaaggggggccccatacaaccttgcgggggcccaaagaaaaagcacta

SEQ ID NO: 8208 - DNA, 475 bp, Oryza sativa
  Clone ID: uC-osflcyp160c11a1
gtggttttttgaattagagggggatttaatctaacatacgcaaactgatattatcacaatgttagccgatgacaatggaaagagtaatctaggtacaagcggatcattgacggtggagacaagacattggctgcaccacaacacccaccagtggcgccaacaaggagcgctatccgttataggacgagagaaaaagtaaaacatcacgatgtgaagtgaaactgaataattctagtagacgatgatgatgatggataggctccttaggacgcccgccgcccttagcgtcttgctgctcccatcttgtccactggaaggctcactcgtcatcgtcttcatcctcttcgctgccctcgtggtcatcctcatcattgacctcggacttggacttgtcagattcctcctcgtcgtcctcctcttcctccttggcgggtgccttcttggcagtgctctcgcccttgttgtaggcagcaat

SEQ ID NO: 8209 - DNA, 462 bp, Oryza sativa
  Clone ID: uC-osflcyp160c12a1
gtggtttttttaatgtttggggtttttacttttttttttttttttttttttttttttttttttttttttttttttttttttttttttttttttttttttttttttttttgggggcccccaaaaaaaagggcattccaaaaaaacctttattttgggaaaagccccccccccaatttaagggaaacccccccggaaatttttaacaaaaaaaaacctttaatttttaaaccctggggattttcccccggggggggcccccaaagggtccccattccgggggaaaaacccaaaaaaagggggtttcaggacctttttaaaaggggttttttgggccggggctaaaaaagaaaaaagggggcccctcatttgggtccgccaccgggggggcccccccctttgggcacaaaaacccaggaaaatttcttcgggggggcaaagaaagaatatacaaaaaccgggggg

SEQ ID NO: 8210 - DNA, 422 bp, Oryza sativa
  Clone ID: uC-osflcyp160d01a1
ttgttttttttttttttttggtttttttttttttttggcagcaaatccacacaagattaatatcgttgcacaagaggttgatagagcattacatatttagatgaggcacacaaccaaagaagcagcagcagctgaccaaagtttagacccatacatagggcaaccagtcattgcatacaagatgatactaggggattatggcagcttctctttttctcttctgattgagcagagagatgccaccgccattattttttgaggggagggaagcacgcggggaggtcgctcttcggatgcttcgcctcagcatgctctttgcacttggtctcagaggtggtgcagatgaaagtctgcatgcatatcttgcactggatgttcatggccttcttgttggcctcaagctggctccccttggcgccctt

SEQ ID NO: 8211 - DNA, 335 bp, Oryza sativa
  Clone ID: uC-osflcyp160d04a1
ttgtggttttttgaattttggggttttctactttttttttttttttttttttttttttttttattttttttactctttttttttttttaccacaaaaaataaaaaaaaacacttctcgacccagggttcaacaaagcgccataaaaaaaagcctccaacacccggaacggggcgccccccccaggcccacaaatgatgaggctagacctatccaaacggttagcaggaagggcttccccgaggcaccagcagagaggggacccgtgctccctttaattacacatgcaaccccaatgtgtgagtcaacctggctataagaaaacatattcattttt

SEQ ID NO: 8212 - DNA, 376 bp, Oryza sativa
  Clone ID: uC-osflcyp160d05a1
ttgtggttttttaggcacaggggtctacactttttttttttttttttttttttttttatttttttttttttacaacatttagtaactgacggagccatctcaatgacagacaaaccgaacaccacacggggggggcacggacaccaaccatgacaacacccaaaccgaacaaaggcggagggaaaaaaacgaaggaaaccacacgacaaggaccaaggcccccacaccggagcggagcaaccgacacagacacccactacggacccacagaaaaaaaaaacgcccgagccgcctaccatgcccgggacggaaccccaaccaacggcaaaacaaaagccgacctttgagcccaaaagccctgggcaaccaaaagaga

SEQ ID NO: 8213 - DNA, 485 bp, Oryza sativa
  unsure (1)..(485): unsure at all n locations
  Clone ID: uC-osflcyp160d06a1
ttgaccctttttaaccgccgcctttttttttnngggatattaaacatgggggttatattaattaactgaaggggaagaaacccaatcatttctgctaatacagtgaaagcaagatgcttggcactacagatgactaaataagctaaagcataaacatagtacaaatatattacatgtcgatcacatgatgcacacgataaatagatagctatgacagatacctccattgtgctggacggtctcttgagacaagaagaacccttgatgacgagtaatcgaatgtagggcagtacaaatcatcaaagccaatagcctctcttactccaagagtggctccacggtcaaagctgtaagtttgttgaccgtcctccttaaaggcgtcaaatgcaaatagtcccataccacatgcagccaagacaaggctggagttgccccatacttgggttattgaagagtgatggaagtgggcattgaaatcaggtagt

SEQ ID NO: 8214 - DNA, 353 bp, Oryza sativa
  unsure (1)..(353): unsure at all n locations
  Clone ID: uC-osflcyp160d07a1
cggccgccctttttttnggtttttttttttttttggggtttcttcttttttttttttgttttttttttttttttaactatttttcaaaataaaaacttccttacaaaaaaaacttttccattcaaaatcccatttttggggtttcacctcctttttaggggccccaccgcagtgggggggacccaaaaaagaaagggggcccaggaaaaaaaaaggaaacaggcaaccacaaaatttatccacccacagcttacaccaaccccccttcccgaccccatatcccccgcacaaacaaatttactttcaaacgaccggaaccggggctttcaaacaaaacctgggctttcaaacca

SEQ ID NO: 8215 - DNA, 412 bp, Oryza sativa
  Clone ID: uC-osflcyp160d08a1
ttgttttcatgaagtaacttatatatatgttgaactccgttaattaaaaattaaaggagtatataaaccggttccgtaaatatcttaaggcgagatatacagatgccaaataggtgtacagtactcgaaattacaaagattataccagtataattaatcgttgggattaagagcatgaacgacccagttacgaggggtgcacggagtacgtgtgttgcttgcgcgcgtgtggatcgacgagattcttttgcaaaaattacctaattaattaatcggcgtgctctctggcgtcgtcgatattgtttattgtttggctagagttcgccggcggcggcggctgcgaggtcctcacaactctgggaaggggcgggcgaggcggtcggcgtcggtgtagatgtgggcgcgggtgatg

SEQ ID NO: 8216 - DNA, 465 bp, Oryza sativa
  unsure (1)..(465): unsure at all n locations
  Clone ID: uC-osflcyp160d09a1
ggtgttttttttttttttgttttttttggtacagtaagatgctaactttctgaagcctcacacagtgacaaaagtatcacagatttcacagcctcatcagcaaaggggggaaaaaacttggtactggaagaagagcatgtgagcagtgacaaagttaagggcttaaagagaggttctacagagctgggtttagtttcatcctcaaattctcatccttctgctgttaggagcacgctggccctgcagtaggggcagtcgctgcgagagcgcagccatcgctcgaggcaggccgagtggaagatgtgcttgcaccgcagctcgaggagcccatctgcatccccacatctctccaggcatatagagcactccgttgaaggtcccgcgagttcgtcatcatctgttactctgcagctggctacttcttgngtaggagccggttcagaacaatgcgcgatgaacgtatgc

SEQ ID NO: 8217 - DNA, 401 bp, Oryza sativa
  Clone ID: uC-osflcyp160d11a1
aaaaaaaaaacaaacaaccaaacccaggggacaaaaaatttgggggggggcaatagttatggaaaaaaaaggggtcccaaatcattccccctaaaggggcatgggccccaaaaaaaaatcctcccccaaccggaatggcccctttggggagccccagaaacccttttagggccctttttggggcggccgggtttaaaaaaccaaggaccaggtaccttttgttttgcggggggcccacccggttgtttacccgaaactggaggggcgaacccaaatagggggcctaaaaaacttcagagaaaaaaaactggcacctggggggggaaaaaccgcccgtttttaaggcattgggatttttttttttggccgctttttttccttcccagaaaaaactatttttt

SEQ ID NO: 8218 - DNA, 286 bp, Oryza sativa
  Clone ID: uC-osflcyp160d12a1
accgccggaggactttcattacataaaaaaaagggcctggaaaaaaatttacatattttgggggacacatgccccgggggagggaaaaccaaccccataaagcttaataggaggtgcaagggcgtacaaaaatccccaaaggttagttggatacagcaatcattgggaaattgggtaccccctccgtttcaaaaaaaaaggcaatctaggattggccggattcatttgggggttaaaaaacctagatttataaatatgcccaatgcttaaaagatttacattttgg

SEQ ID NO: 8219 - DNA, 497 bp, Oryza sativa
  Clone ID: uC-osflcyp160e01a1
ttggggtattatgaatatcggagattctatattaactctcctgtgtatatcaatgacatcagagttgagtcagtaatccatcctatgcaacaaatatcccatgtaactacaaagtaatgggcactttattatcaatgcaaagcatcccctactaaaacctcagtttgttagacttttaattcaaacatgaacacaatgctttcattatataaaaaatataagtaattccgcgtacaaattgctttggtgcatacaccaagagaatgcattggtgtcataaataattgatgacaaattgaaaggtcataatctttgcaaatagggcaattgaagaacaaagggctcgactttccaatattagattcagcatcgcatcacatcccttgaagtgatgccattctatcttctcacagctgcagttttgtagtcatatacaggtagtgtaagtagagcccaaagtgtagcatatctattgtgtcatttgtggattttctata

SEQ ID NO: 8220 - DNA, 499 bp, Oryza sativa
  Clone ID: uC-osflcyp160e02a1
ttgttgtacgcaatatgagcgcagctatataacttaataagcacattacagcacacacatggccaaggcagttatttgaatcagtctccaacatacttcaaatcatagaccacaccatacagcaaacatagtataaacattgtcatagagagtacagctgatagcagcttgtaatattctagcattactttggtagcatccctctacaaaacatagcagacatcaccagctcttcatcttggccatacacattcaacatggtttgctagtgacagaccacactgaccagaacatttcgtctcctcagtaggcaccagctgccatgagcagctcatcaaggctccagatgccctcgttgcttgccccgtcttgtgtagcatcattttgcagaaggttgtccattgattcatctgagctgctctcaacataaggtaatggcaaatacttcatctcgggatcgaaggtgggcatgttttgtgcgagattaggcatgccattt

SEQ ID NO: 8221 - DNA, 442 bp, Oryza sativa
  Clone ID: uC-osflcyp160e03a1
ttggggtttttgaaatttcgggggttgatgaaatggagtttgaaaggcagaattgccaaaatttacaacattgctggctgacaggggtcagaggtttttagcagaccataagctagccggtgcgcctatgatacaactacatctttctgaaagtgagaacatgaacttaagaagaattggaaggattacagatacaaggctacaaggaagggccagcctgacctatggggctgggatacaactgtaaggtttgtaacctcggcaccagattggatggggctgtttgctgaacccgttcgtaccggaggagaaggatgtagaaggtggcctattctctcaaccaggctgccaccctggcaaaggttgacacgaaccttccgatgttgaacttgtaaaactgaaccggggctgcgattgaatgagcagcgcttcaatgacacgg

SEQ ID NO: 8222 - DNA, 424 bp, Oryza sativa
  Clone ID: uC-osflcyp160e04a1
ttgttgttttttttttttttgggtttttttttttttttttttttctcaaacaatttatattaattggggttttgcagcaagcaagcaaacaagggtttgcaaaagttagccggggacacaaacaattaagcatgcatgtttgcatccatgggtagggggtgatcgccccagtaacaaaatagagtccttacctcctaccggaatgcatggaaagccaagccggcggatcaaagggagttgttgttacttgctagagacttttgctggagctggacagccaacccaattaaataagggtccccaatccaagggctgcccgttaccttgcctatgcttaattaaataaaggcttaagctgctgcgttctgatcaaggggatgagctttttcggggggaactctgcttgttggtaggcttgtggatc

SEQ ID NO: 8223 - DNA, 417 bp, Oryza sativa
  Clone ID: uC-osflcyp160e05a1
ttgtggtttttttattttttgtgtttttctttttttttttttttttttttttttttttattttttttttaattctcaataccaccacaaaccacccccccccaaaaaacccaatttaatcaacaaaacccacacacttaccaccccccctaaaaaaaaaaaactcacaaaaattaaacatctccctctttttaaacacacccaatggtaaatttacaccaaaaaggggaggcgggcataccccacgcgggaaactaaaaaaaaccaaacacctggggaggggggggggttaaaaaatacccaaaaacgttgaatggggcggtaaaggggcttaatttaaaacgccgaaacccccccaactttcacaaaaaggagctctgcaccgggcgagaaaaaaaacccgggggggcacatgggg

SEQ ID NO: 8224 - DNA, 402 bp, Oryza sativa
  Clone ID: uC-osflcyp160e07a1
gtgttttttttttttatgagatacagttatcgtctaaaatgaatattatcagagtacaaagctggtttcttattgttcttcagaagtacacaagggaaaggctttccaagtacagggaattgaatgatacagagtacagaataacaagctacacaaattcacacatgacacatttgacaattggtttgatccaattccagttgcagtgcacttaaattggagggtagaaaaagctccattctgacgatgagacggcctcacctcaactagcttcatctgaagaaatgtcaagttgtcaagtagccttacaagctgactaaacttcagctatcttgttcctcaatcctggtggctgcaatggttaggctactccatcgtttagctcaggtgaacggtgcactg

SEQ ID NO: 8225 - DNA, 498 bp, Oryza sativa
  unsure (1)..(498): unsure at all n locations
  Clone ID: uC-osflcyp160e08a1
gtgttttattttactcttattgaatcgcggtaaagtattctaattcaataaaaatttcgcgggcgaatatttactctttcctgtcttatttgttaattcataaccttatcaaataagacaatttttttggtttgttccgccatcccacccaatgaagtattgggattcttttcaagaaaatcctatccagtcataggttctgtcgttcccactgcttctcctttaatggttaggtttgaatctcgcaatggagcttccaaaaaatttctttccgagtcaatttctcagttttattaactcgggacgctctttgttattccttgaaatttgtatttcttgtttcaatcaaattacgatttcgaattctctgttatttttattatattgatgctttatcacattgctttttatgatgtaattcatagaccatacatattggaatcctatatctttcttatttctcttccttctttctatcatccttccttntatctacat

SEQ ID NO: 8226 - DNA, 498 bp, Oryza sativa
  Clone ID: uC-osflcyp160e09a1
gtgtttttaatgcaactccctctcggagggacctcatttgatatccatttctgtcgttcgcttgtacaatgattcaggcagcccaccaaaaatacacagatttagcatagaactcagcagtatccttcctatgtagtacagtactcctatgtgccaacaaattcagcatagaattcagagaaccatatggatgtagtaatcacactaagcggttcatgtggtatgatgttctccaaatgtcaaaatgccaaggacatctgcatcgctctctcttgagtgttttaccagtatcataatatgtcgtaccaatgatggaacaatgtaggcatctgcaatctagtcaaagagaaacctggcaaatctcaccaacgtaaagggctcccccttgctgcaatatttcttaccgtgactttggggaacactgtaatatggaacagatatcttcaacgataacccctgcatgtagaatacaaagccctttgcaggtttggatttact

SEQ ID NO: 8227 - DNA, 150 bp, Oryza sativa
  Clone ID: uC-osflcyp160e10a1
gttgtttttttaatttttttgtgtttttcttttttttttttttttttttttttttttttttatattaaaagaggggttaaaaaattatataaaaccacaaacggaaaagcccacaacacaactaccacccccccaacagagacaaaacag

SEQ ID NO: 8228 - DNA, 433 bp, Oryza sativa
  Clone ID: uC-osflcyp160e11a1
gcggccgtcctttttttgggggtttttgaagttggggggtttatacacaatcgttagataaatttggttattgtttttcatgcatcattacacaggtatgaatcatctgtgcaaaaacaataacgcatgcgtgacatttggccatagaagactatgcacatgttaatcaacagacaacacaatcttgaagtatttttcaagcattgcatcctttgagaagtcagtgaagtaccccttttcaacctcaagtccttgctctgctgctatctgttccacctgctgctgaacctgatcggcactgacatgatctggatccaggaagcatgcaatctctgtgcagtcatcaccatgggaaagggcaagcgcttgcactgtcgggagtcctccaccacgaccagtcacccttcgggtgatcctttttatggttgggata

SEQ ID NO: 8229 - DNA, 499 bp, Oryza sativa
  unsure (1)..(499): unsure at all n locations
  Clone ID: uC-osflcyp160e12a1
gttgttttgttagaagacagggtcagtaacaatagtgcaagcacttaggagagatcgatcacctagacgataactagtactataataatggtgttgctaaactattacagacagaaaggtacttaggagatcgatcacataaaagacaactacaataatagtggtgcaagtatttaggagatcgatcacctagaagacaactataataattgtgctgctaagctattacagacttatcagaagccaaacatacgagtgaagcttgagcatccacaaaaatcaacatgcagttccaatctgctgctccaacttttacttgtagaaacttatggatctgaatctctagctgcattagagtcctccaaatcagtcctcactggcttcagtgtcttgaggctcttttttctcttgaacctgaacatagccttctcgtactttgttaatcatatccnggaagcanatnggtttgcaaataatcaaaccccaaactatgaatagc

SEQ ID NO: 8230 - DNA, 440 bp, Oryza sativa
  Clone ID: uC-osflcyp160f01a1
ttgtttttttttttttttggatagagaaagagagattagaatcgacaaacacgggtcacatccacttatctatctccattagattaagccttctgcatccttcttcttcttctgctgctgctgttgctgcgatggtgtggtggttggttgctgctgctagacgcttaggccatccacgccacattgcttgtatgtcagtgactgcctcctcggactgatggcgatcgcgcaatccaccgacacctggacttttggggaggagaagccgagcacgaggatcttggcgccgacgtcgccggtgatgcggaggtcgacgcggtcgctgatcgcggcgtcgcggacgaggtcctgggcgtcggcctggagcacgttgaagcggtcgacgatgacgcgggtctggagcaggcgggtgctgtgcgccggctgctcgaacccgggca

SEQ ID NO: 8231 - DNA, 443 bp, Oryza sativa
  Clone ID: uC-osflcyp160f03a1
ttgtttttttttttttttttttttttttaagggcagcaaagcagagcatggaacaagctgcgattaagatggacaggttcagtagttatcctaacaggttcagaagtgcggcatccagcctaataacatccaccccccagctggtacttaaacaaacacgacataaacaagactaccaaaacatccacaagttcaggccataacatagcagccaagcggctgctcagcagaagaacatggagctcctgactttgttatgcaggcgaggcagctcgggcaccggagcgctgcccgccgaggtatggccaccatggctcgacgacgtctccgacatctggttgaacttgatgaactggctgacctgagcagcagcgagatgcgcgtagcaaatgggtgcaacgactgatatggctgtagtgctcctctggtagacataggaaagg

SEQ ID NO: 8232 - DNA, 396 bp, Oryza sativa
  Clone ID: uC-osflcyp160f04a1
ttgggtaaataaagtatgtggtttttactatattattttttatttcttttatctggttttccaaccactttaatttcttcttccaaactgcaacgcatcgacatataattacgactcaccagaagtaatgctcacagacacaccacaataccagaagataagaacatgctgctggcggaatacacgcagtaggaccggcaggaactgatatatacagacatatatatacacaaaccaacaccatgacaacactaatattagcaccacaggagcactgtacaaatctaatcttatgaggaaggcaccggtagcggtctcaacaatgggctgaaatcacctgaagcaagaaaactcccatgagagttatgttcatccagcagggaagccaaaactatg

SEQ ID NO: 8233 - DNA, 419 bp, Oryza sativa
  Clone ID: uC-osflcyp160f05a1
ttgttgttttttttttttttgtgtttttttttttttttttttttttccaactaaaattgtttttttttacaatgaataaaaagtaaaaaaggccagattgctataccacccaaggcaacaagggtacaaaaggaaaaaatttaaagaaccataaagtctggacaaccttatacccttaaaaaccatgaaaattattccacccataacaccgctgatgcatataccacttgcaaattttctaatttgccaataggcccaaacttatcaatggcttgcccatttagaaaattggaaaaattggaaaattatggggacttggaaacgatgaaaaaaagggcaagcatctctcccgtgggaagtattggaaggcgttcatccctttgctttcttttgtactgaaggcccacatgccccaaccc

SEQ ID NO: 8234 - DNA, 401 bp, Oryza sativa
  unsure (1)..(401): unsure at all n locations
  Clone ID: uC-osflcyp160f07a1
cggcgcctttttnnggatttttaagattggggtttacatttttttttttttttttttttttttttttttttttttcgccaccgcggcgtaggacttggccccacaaataaagcccttgaaaaaaaggaacgccaaaaatggtggataaaaaaggttaaagagggccccaacctttatcaccatgcgactcattgctccgaaaataaaataaaaaaatgttttttccgggggagacccttttattctttattttaccggggggcggaagggttaaataaataaacaatcggggccagcttgaatactataaaatagccggcgaaggacaacttgtacatcaccatggacaggggtgaagagctctccctccccataaacgtggagataaatttttaactcta

SEQ ID NO: 8235 - DNA, 332 bp, Oryza sativa
  Clone ID: uC-osflcyp160f09a1
tgtttttttttttttttggtgtttttctttgaagaaatggcatgaacgccagtaatcttaatgcagatctaagcattttcacatgctacagtttgttacaaaaattacttgtccatatttaagtacaaaccctgtcaaataactcgtttagctatagagagaaccgcaataatctggtgagacgagcctcaacatattggtaccaacaagtttaaaaatatcaaagcacataattatttcaagcaagtagccctgggttcaaccaatctttgctaatatcatcgagggggtcatcgaaatcaacaccttgctgccatcttttcgctgtaaca

SEQ ID NO: 8236 - DNA, 492 bp, Oryza sativa
  Clone ID: uC-osflcyp160f11a1
ggtgttttttttttttttgtggtttagccaagcaaaaacatcttcaaaacacttaatttatgattcggacggatactgatcaacttgtaaatacaggtcttctatacacaaatgcttgctgaggttacaaacagaaatacagacttaacgatttgcgaatagacatttcaagcttagacaatacaagttaggtgtcagatgaaaatcgacacacgattttcgtcatcttcttcgctcagactgctccctcaagaatggatgcctaagcgcctcttgtgctgttagacggcaagctggatcataccttaacagaccttgcaaaaggtcaatgaactcgcccccagaatgatccacattttgcatcaccagattctgaagacgtggcagcttcataacagctttcatgctatcccgtgacgcacaaccttcaggccagtttaaacggccttttctgacatatttctcagaatgacggtctgcccttttgagcat

SEQ ID NO: 8237 - DNA, 418 bp, Oryza sativa
  Clone ID: uC-osflcyp160f12a1
gtggtttttttttttggggggggtaaattctatatacaaacaattaaaattgatgcataagcataactaggtacagctgctggcacaaaccaaacaaagtgagcaacaccagacgcattatctacctgtactattaaaagcttactgcaaactcagcaggacatgaacatccatccagtgggtctttctcgcaaccaaaaagggaaaaagaaaacactgaacctgattgatcctgaggtcaactatgcctacccatatattctaccggttccatctctgctactcacacccgggctaaattacaggcagaccaaacaaaaacaaccagtcaccacttcgacgacaaaattcacagggaggacacaccgattaagactgaacttcccgcgcgttgtcgactgtttttttaacttttctt

SEQ ID NO: 8238 - DNA, 492 bp, Oryza sativa
  Clone ID: uC-osflcyp160g01a1
ttgttgttgcagagtggattgttcctccatcctgtattagacagggaaaaatatacacatcatctgtacaaaggtgagcttggagccaaaagcatccaggaacatcagtctacaagccagtccaggttataacactcttctgctacctgaacccggaggtctgggatgacctgctcagcttccctccacagcaacgccgtctcctcgtcgcacacgacgtgcccgagggacttgagcgatgaggacgacctcgggaggctcctcagtcgcgagcattctcgcatgtcgatcttctccaggcttgtcaggtgaccgagctcctcagggaggtccgtcaggttgacacactgcgaaatgtcgaggtatttcagcctcttcaggctgcataccgaaggcgggagccgccacagagccgggcaggcgtatacccttaggatgctcaggcaatgcagcttgcccagctcatatggaagctctgtgaggtcatggcag

SEQ ID NO: 8239 - DNA, 442 bp, Oryza sativa
  Clone ID: uC-osflcyp160g02a1
ttgtggtgttttgttttttggtgtttttttttttttttttttttttttggagaaaaaaaacatatttcattcctcaaaagcagaacacagtggccaaaaaaacaggaggcaaaaatggaggagagcccatgaatcgatcgcctagctccaatgttctaaccttgggaaatgagaaaaaaaaaacaaaccaagactcgcccgaggaagctagggcccaactgggcccaagaccctcaggcgcgtgtacgcacgtagtactagtagcaccagtccccctacaaacagaaacagggtcgcgtacgttttattggtgggaaaatgtatttgtctccgtcgacctgcccgtggcgcaccagaagtcccgaaaataaaaaagacgtggccttcccgcgcgccctacacgcggatgcggctcgatcgggctcacacacgcaacgcgggg

SEQ ID NO: 8240 - DNA, 366 bp, Oryza sativa
  Clone ID: uC-osflcyp160g03a1
gtgtttttatattttttgggttttcttttttttttttttttttttttttttttttttttttttctatttaggaaataaaaaggaaaagaaaaaaacaaagaaaaccagacaaacaggggaagaagcggagggggggaaagagccccccagaacccaccaaaaaaaccaccaaacaaacaaaagggcaaaggggggaacggcgaaggggggggggagcgcaggggcggagagggaacacgggggagaggagcagcagaaaaagggacgaagcaggatgacgaggtgcggcactcgtcgaccaacggggggtccatggagcaggcccagagcgggggggaggctaacgggagcttggcgcccgcgggg

SEQ ID NO: 8241 - DNA, 505 bp, Oryza sativa
  Clone ID: uC-osflcyp160g04a1
ttcttcgcgtggggaccttgtcggcggggtcccccttcccggccgccgccgctggcgtggcccccttgtggttccggtagatcgcgtagaggatcagctgcatcaagcccagaaagctcccgcatccattggggatcgcgatgaaagggtcgcggccgagcaggccgtagatgaaccaggaggtgccgcacaggaacacggacagggagagcaggaacggcatgaactccacgctcttcgtcttgatcaccagcctcatgatggagagaggcgaggcgtacatgcagatggagaagatggtggcggcgaggccgcagaagagcttgcggccctggccgtgcagggccaggagggagacgagcaccaccatggtgaagatggaggtgacgaggcccaggagacccatcatcttcagcctggccttcctctccgcgaagatgaggaagatcaccacgtagatggcctcgatcaccgaccccgtcccgttgatcgtcgtcaccaggat

SEQ ID NO: 8242 - DNA, 466 bp, Oryza sativa
  Clone ID: uC-osflcyp160g05a1
gctgcagcaggaggaggaaaacgcaaggaggcggcgggaaacgggcgtgggagaaggcagcgtgacattgacgatggaagagtacgacgagctgagccggtgagcacgggagacggaggagatcgccgggaagcgggtgacggaggcggtgaagctgatcaaggaagccaaggacgcggaggtgcggagcctggagaagatggcgcagctggcgaagcaggtcgagcagaggaggcaggcgctcgaggcggcgaccatggaggtcgaggaagcggagttcagtaagctggcggcggagcgggagctcaggcaatggcgcgccgagcacgagcaccagcggcggttgaccggcgagggcatggcgtcgccgcgcacggggctcgcggagatctccgtgttcgacggcggcgaggggcgcgggaacccgcacatactgagcccgagaggagggtatatgccgaggact

SEQ ID NO: 8243 - DNA, 469 bp, Oryza sativa
  Clone ID: uC-osflcyp160g07a1
gttgttttaagtcaatttggtgtcaataatataggggatggatatcttcacccctaaaaaagtgtagtttcttctctaagatacagaaacttgccatggatttcctagaagcatataacagcacgtttgaaaagaaggcaaaatttaaaactctttgatgcttttcccccactgcagtggatcgatcatctcgtatgtttctccatctagtagacactgttcaagtagaagaacaagccggccaatgcaagtatcccgacggcgataccgataggcaacgcttgcccgacggcttcgtcctttttcagctgctccttcctagccttgcgggcatcggtggcgttggcgttcttggccaccttaggctcgtacggcttgaaccttctctttggtgctccacaaacggggcagaagtacttgtcgggaagcttgtcgaagggggtcctgtcgctgtagatgtacccgcagt

SEQ ID NO: 8244 - DNA, 180 bp, Oryza sativa
  Clone ID: uC-osflcyp160g08a1
ggccgccctttttttttggtttttttattttttggggtttttctttttttttttttttttttttttttttttttttttttttttttttgatttttttattttttttttttttccctgaaagggcacgaaccggggccacaaaaaaacaggggcccccacggtaccaacccaccggggggg

SEQ ID NO: 8245 - DNA, 384 bp, Oryza sativa
  Clone ID: uC-osflcyp160g09a1
gggaaaaaaaaaagcagaaacccccggaaaccttggccacccaacccaattaaaatggacaattccagaacaggtaagaaaaattccgtttttttaaccccagaaacccgaaactttggttcccccaaaacgggaaaaagggggggaaaaagggaacaaatccttggttttatggggggggtttacaaaaaaaaaaaaccctcccgggggggccggaatttggcaccctatcgggaagcaggaacgggggtttaagggggggactttgggtccgggcccagggacccccaccccacccccttgggggttcggaacctttgggcgggatttacaaaaccgggtgggggggggacccctccacaggggcccgccggacccgggggt

SEQ ID NO: 8246 - DNA, 499 bp, Oryza sativa
  Clone ID: uC-osflcyp160g10a1
gtgttttttacaaggaaaaaccaatgatatctccaagcaaaatatatcatctgatttacaaggaaattgggaaataagaaatataaattaagcaaagaactttactgtcccctcacggacccaatataaattaagcatttgattttaataaatataatctgaaacggagggagtaatagctgattaaagcacccaataatatatttcgctgataagcttgtacatctccgacttgtgcttcacgaggcggagcactccagtgtcgtcgcagcgctccacctcgacggcggtgaacacagcgaacagctccgggttgtgttgttcgtcggcgtcgaagaagccggtctcgaagaacctggcgatgcagaagttggcagagcccaggtgcacgaggtgggaagacacctgcgtcaacgccttgggcggcgtgtactccagaggaaggaggctgtgctgctccggctttctcccgccgctaatgagatcagacgcagatagg

SEQ ID NO: 8247 - DNA, 489 bp, Oryza sativa
  Clone ID: uC-osflcyp160g12a1
gtgtttttttattttttggtgtttttttttttttttttttagcatagcaggcaataagatgataagcctaatggcatcaaacatttcggggccaagcctccaaggacaaacaaactggcaattttataagagaataaaaggcacatatccattgcactaaattcttggaagaccatccaagggctaatgcctccattgaatctatcgctgctttttgacaaggacagactcgcgactccattatttggtgaatatccccacaacccaacacacttatatgtaaatcagataaccccacttattccaaagcttaatttctcttgacaattgcaatataacaagaatgataggagtgacatgtgtagcaaacacctaccgggtgtcaggatttgtccttgacatgaccaggtttttggcagcatgtcatggggcttatcctgaaatagggtgttggttccctctgttagctgataaacaggagccttgggc

SEQ ID NO: 8248 - DNA, 70 bp, Oryza sativa
  Clone ID: uC-osflcyp160h01a1
caaatgctttcgcagttgttcgtctttcataaatccaagaatctcacctctgactatgaaatacgaatgc

SEQ ID NO: 8249 - DNA, 507 bp, Oryza sativa
  Clone ID: uC-osflcyp160h03a1
attacgaaggtcggatatagagtttaattttattacaagccacgacagaattaacaaattgagctaagcaacaccagctttattcaaggcacttatactgcttaccacctcctaacataggatggtgaggagtgctgctgataaacgctccacccggagtagatggacaccaagacgatcttatttgcgagctgtatagctttctggaacatatatctcccctccagcttcaccatgttgctccccactgactgttttccttgcagctgaaaactcagcactcatagcattcattccttgtatcaccgcttcctccactgtcccgtaaccatgttcatcagcatattttctaatatcctctgtgattttcatcgaacaaaactttgggccacacattgagcagaaatgtgccactttggcaccctccgatggtaatgtttcatcatggaaagacatagcggtcacaggatccagagatagagcatattgatccaaccatctaaactc

SEQ ID NO: 8250 - DNA, 501 bp, Oryza sativa
  Clone ID: uC-osflcyp160h04a1
ttgttgttttttaattacggggaaccacttgataaaactgattgatatattccagataggagaggagggcatcgatacttatcgtcgctaaattaaatgggagtacaggctaaacacatgagacatccctcgatttaaaacagattacaaacacatggatgttcacttcacacacacgagaagcaggaggaggagcagctgctgaaacaaaacgaccagcggcgaacttaattttttttgaaaagggagaatcttaacacggtagaactcatcatcgatcatcatggccattgcttcatcaacgccttccagccattatcccccaacaatggcttctcgaaccccttgatatcacgcgttgctcctgaaggagccgagggccttgatggcgccggcccggaggatgtactggtggtagaacgccgcgatggcggcgccgacgaacgggccgacccagatgatccaatggttgtgccacgccttctcgttgttgaagatgac

SEQ ID NO: 8251 - DNA, 464 bp, Oryza sativa
  Clone ID: uC-osflcyp160h05a1
ttggtttttttttttttttgggttttttttttttttttttttttttttggaagaggggccttgtattcatctaatagttgaggatttacattccaaacattgttatcaaacatggattgcgaaaatggagaaaaacggggcagagaacttatcagcagtctgctttgacctcaggactttaatttgcagttgccaacaccaatggcacctaaacaattccttttgcttttgcctttttgggttcacgctgcatgcggaagtcctttttttttcttgctctgtaactgttggggttctcaggttgtttctggtatgggtaaacacttaccttttttttgcttggtccatatttctggaactttacggggccatcgatcaaagaaaagagggggggatccttgcccattccaacattatttccaggatagacctaaaatgaccaatgaaaatgtataagaaaaagc

SEQ ID NO: 8252 - DNA, 450 bp, Oryza sativa
  Clone ID: uC-osflcyp160h06a1
ttgttgttttttttttttttttttttttttttttttttttttttggccaagggatttgggctttataaatatactcaatataaccatataatcactaagaagggttcttgctgataagaaataggacgataacacacaacaatctggattgatttcaaaccatagctgatggcaacttttaaaagaaaatttatactaaattcatcaactgtttaccatcacatggattaaacaccaaccgaattgcgagaacaagaagcaaaccatttcagtagatcaagcctcaggcgccggctgcgagaggccggccttggcgagcagtttccccatcgccttaggcgagcacacctggtactgcacctccccggggccgggctgcaagaacaccttggcgagctccagcttctcggcggtcaagctggtcgaatccatggtcttgctaagcacctt

SEQ ID NO: 8253 - DNA, 203 bp, Oryza sativa
  unsure (1)..(203): unsure at all n locations
  Clone ID: uC-osflcyp160h08a1
nnggggtttatcaaaaatctgtggaaaccactcgatatctaagatattcgattattctgatattcaaaccacttgatatactgctctgttagcaattggacatcttttctccacactcatagttctaacttacgtcatcattcagtcttctatccagccacttcccggagcagccaatcattacacaaacagcaacattctga

SEQ ID NO: 8254 - DNA, 265 bp, Oryza sativa
  Clone ID: uC-osflcyp160h09a1
aacagggaaaaatatacacatattgtacaaaggaggccggagcccatattccccaactatactcttacctcctccacataaaaactccactgatccgtaaccagaggtcccggaaaaccctgctaacctcaactactataattaattgcgagctgaatagctttacgcaacatatatctcccctccagcttcaccatgttgctccccactgactgttttccttgcagctgaaaactcagcactcatagcatacattccttgtatc

SEQ ID NO: 8255 - DNA, 318 bp, Oryza sativa
  Clone ID: uC-osflcyp161a01b1
ggtgttgattgccaggcttagggagctccatacgctcaaggggcatgtagaatcggttgtgaagctcaaaggcctctacattgagaccatccagcagtcttacaccgttgtgatccagcctgtccataaagaaagaaaaatgaggattatctttttttccagatttttccctgtttgctttaactttgctgcaattctgcaatcacctacgtgtacttgacccgaattgctgtaaactttgtccctcctgctccagcttctactacatggcagtgttatacaattttttggtcacctgaaaaatttataagtgtttgg

SEQ ID NO: 8256 - DNA, 107 bp, Oryza sativa
  Clone ID: uC-osflcyp161b08b1
tatctaagccaaacagggtcaggagccggagcggctcgggagaggaaacactagagcgatactaccgaacaaccgcccgaaagtatacgcgcgccaaggcatgaagc

SEQ ID NO: 8257 - DNA, 366 bp, Oryza sativa
  Clone ID: uC-osflcyp161b09b1
tatacagcccctgaaacccaacctccggcgcccggcggcgtcgcgcaaccgctcggcatgccgccgcccgcccccgcccccgccacgctcgtctccctcagcgcgctcgttacctcgctcgcgcgcttgggccgacccgtggacgcgctgcgcgccttccgcgacatgctcgcgcggggtgagcccgccgaccacttaaccctcccacctgtactccgctactgcgcgctcaccggttcggcggtgctcggcgactacgcccacgcgctggccctaaagatcggggcccaaggtaaccctcttgtggcgttcgggctggtgctctgctactcgggcctgcccaaactttcccgactcccggaggct

SEQ ID NO: 8258 - DNA, 419 bp, Oryza sativa
  Clone ID: uC-osflcyp161d03b1
cagtatttagaggcgaggcagaaaagcttaaagaatctaatgagaagctacgagaaacaatcaaggaccttaaggtggagaagaatgaactccgtgatgagataggtacttttgaatgcagttaatgagaggcttgtaacagtaagttaaagtattgagtgttgctcctacaggatttgtttctcatctccctcattcagctgcattccattccgctgtattcccttcatttataccaccttatcaagctctgggcaacaaaaatgctcctactcccgcagtattccaagggatggcaatgtggcagtgtgtgccttcaactgctgtggacacaacttaagatccaaagcttttgccaccaaaatcctaattaggtgcaaactgcttttgctgctattcattcattggcagatcaaaat

SEQ ID NO: 8259 - DNA, 242 bp, Oryza sativa
  Clone ID: uC-osflcyp161d07b1
tgtttctcagaggtgggttggcttctcctccccctcccggttcggttcggttcggttcgggtccggttcgatttcggtttttccttcggttcgggggttggtgggaaaagcatggcggtgcccgaagtttagaaccgctgcttcgacggatgcctctcctgggccaccgatcaccgatcctctcaagtcgccttctccacttacagcgagatccttgagtccaagatcattaaccatcggta

SEQ ID NO: 8260 - DNA, 271 bp, Oryza sativa
  Clone ID: uC-osflcyp161e03b1
gttcttttcgtcaccgctccggcctgcctcccgcttcgcctgccagtgcagcaacgtcgtcgactaagtggtggtggcggacgagaagaactgggacagtttggtgctggggagcgaggtaccggtgctggtggagttctgggcgccgaggtgcggtccgtgcaggatgatcgttccggtgatcgacgagctggctcaggagtacgtctgtaagattctagtgctgtaaggtgaacacggacgatcttacctaacattgtcactaacttcg

SEQ ID NO: 8261 - DNA, 455 bp, Oryza sativa
  Clone ID: uC-osflcyp161f08b1
attttgaaactaatggatgcagttgacgagtatatccctgatcctgtgaggcagcttgataagtctttcttgatgccgatagaagatgttttctctatccagggccgtggaactgttgtgacagggcgtgttgagcatgggacaattaaaactggtgaagatgttgagatcctaggtttgactccagtgagtaaaatatctgatttgccttttattacttaagtccagtaatgtggtttataccgccttctagacgtaccaaatttattcttgagagtatgacctgcttggttctgaagattcgagaatccacaatctttgtaggtatatcttacccacgatttttttacaccatatgcacatttgacttcacgcaaatattcgaatggaatatgtatattgtataatgggttaagctaaaatatttttttaccactattggttttgaaagaaaa

SEQ ID NO: 8262 - DNA, 334 bp, Oryza sativa
  unsure (1)..(334): unsure at all n locations
  Clone ID: uC-osflcyp161g07b1
tatttttctcttcctcgtcgttgcgatttgagaattcaccttcttcttcctcctctcctctcgcctcctacctcttgctgcagcgcacggcgccgcgccatcatcgagcttgaatncttgttcttcatcttctgacaccttcccttgagaagatttgttactagtttaatatttccaagaaagagaagaggagaggagagggtggtaacccagcgttaggtgggggggcgtgctagtcaagaagagaagagaaggaagggaggtccaactgctccatcctccctttcccaaatccactcctttctaccttggttcaatcattgatttgattttt

SEQ ID NO: 8263 - DNA, 441 bp, Oryza sativa
  Clone ID: uC-osflcyp161g08b1
ctcctcctcctcttctccccattctgatctctgacaccgcggcggccatctcccccatctcgatggcggcgccgccgcagccgcagtcggagccggagcccgccgcgggcggcgcggggctggaggcgctggaggggctcgcgctggacaccgtcatcgccaaggccggggcgcgccaggccgcggcgctggcctgcgccagcacgcgcctccgcgacgccgcgggcgacgacgcgctgtggcgccgcttttgggccgacgaccttgcccttcacgcgccgttcgcccccgacggacgtgcgcttccttccttcaaggatgccttataaagtattggttggagtcttttggcatggattctttacctttggtaaggagagggaaaatttttggaggttcggtgaaaagcggctggttgaaactttcctgaggcctcaagaa

SEQ ID NO: 8264 - DNA, 248 bp, Oryza sativa
  Clone ID: uC-osflcyp161h01b1
ggttcagttgctggggatgctgctgaagatggccggggcgaaaaggacaatagaggtgggtgtcttcaccggctactcgcttgttggcgacggtgctggcgctgccggaggacgagaaggtggtggcgatcgacccagacagggagagctaccagaacggacggccgttcatggagaaggccggtgtggctgcacaaggtggactttctcgaggggaaggggttgtagaatttggacgagctgttttt

SEQ ID NO: 8265 - DNA, 366 bp, Oryza sativa
  Clone ID: uC-osflcyp161h02b1
cacggagccgggacggaatggccggacccacgcatgcgtgttcatttgtggccttccctcccgaaacttatggaaccgagagcagcacacgttagctcttctcctccgatggcggacaaggagcccgacgtggaccgccccgaggacgaagaggaggtcttcgttgtcgtcgccgacgcgggcggctaggaggaggacacgggcgcccaggtcgcccccatcgagcggctcgaggaggtcgccgtcaccaccggagaggagggacaggacgtgctccttgacatgaaggcgaaactttaccggtctgacaaggaggggaaccatttgaaggagcgggggatggacacctgtaagctttcttaaagc

SEQ ID NO: 8266 - DNA, 416 bp, Oryza sativa
  Clone ID: uC-osflcyp161h05b1
ctttctttctcccgcaaacagcacaaaaaggcagcagctttgctctgctcgggtgttccgccgccaccgccgccgccgacgaatcactccggcgggctcttccctcctcctcgtcgtcgtccaccggcgaccggcgcttcgtacgaagatgttgaacctctttaagataaagggacagaagaaggaagaggcggcaaatacaaatgggagacctcctgctaagaagcaaagtccaggagaattacctttccataaagacattgctgagcttaatcttccaaagaaaaccaacattactttttctaatgggaaggatgatctgaagaacattgagattacttctccggcctgaccaaggatactatggtgggtggagctttttgtttttactttaccaagttccttctactttaccc

SEQ ID NO: 8267 - DNA, 243 bp, Oryza sativa
  Clone ID: uC-osflcyp161h07b1
gtttatgtgtcgccttctctcgcgaaccctagccttggcgccgcgcggactccgccgcggtgcccttctacggccgcctacatgtccgtggtgtctcatcgaaggtggagtacaattgagatcgacctgtcgtcggaggacgccctcttctcgaagtcctcgtccggcgtcgaggggggcggctttgggccgtgggagatggggatgcggcgactggaggacgccattcacggtgtactcgtg

SEQ ID NO: 8268 - DNA, 278 bp, Oryza sativa
  Clone ID: uC-osflcyp161h08b1
tttgtttccaccaccagcacctactacttcatcgtggtggtctatttctacctacaagctttccccaccatggcgtcattgtacgccttcgctggccttgctcatgcaccctaaggacctcattcttcgcgtgatcgacgatgtacaacaaggattctcagtccacgtaaaggttaatatattgtgaatgtgcctacctggaccgaggatgggaagcacactgttgcttaaatgtggttattgtctctctgagcataaacttgattaaaaattctgtt

SEQ ID NO: 8269 - DNA, 402 bp, Oryza sativa
  Clone ID: uC-osflcyp162a04b1
ttcggtttactttcaagtcttccgccttggttggtccgaccagtcagtgacccaggcaatcttcggcgatgggggccagattgagctctggtgggacgacgactttctacagaagccgcggatgtggcggtgtcacttcgggcgagagggatgctgcccctgctggtgctgcaggtgctgctcgagtacggacgtgcgatctgctggcgaactgccgtgaggggggcactgttggaaatcaactcgctgctgtacctacggccaggctccctcgacgcactcctacgtttggtgaagcgcgtagccttcaaccctcacctgatcattcactactgtgacctgacacgcttcttcctgtcggctttctaccacttgagcgaaactcacttgttcttgaacatg

SEQ ID NO: 8270 - DNA, 473 bp, Oryza sativa
  unsure (1)..(473): unsure at all n locations
  Clone ID: uC-osflcyp162a05b1
tcgcagctaggcctcctgctacactggacatcttcccatcctggcctatgaggaggagctctcttccaacaccgaaggatggatgttcaaatgtaacggcagacacaacggactccgagagcagcagcaagaacaacggcgatcagggtgcagcagcagccgacatggcgagccagtttgatcagatcccacagcagcagcagaagcagcacaagaagatggcagcaagttccactcacagtgaccacaggatgacaaagacacttgatccaaagataatgagaaggttagcccagaaccgagaggcagcacgcatgagccggctgcgaaagaaggcttacatccagcagcttgagagcagcaagttgaggctggctcagatggagcaggatctcgagagagctcgttccagggcctcttgctgggaggatcaccaggtggaaacaccagcgcangagcggcgatgttcgacg

SEQ ID NO: 8271 - DNA, 371 bp, Oryza sativa
  Clone ID: uC-osflcyp162a06b1
tcggctatactgaccagagaagctcacatggatccgtgcactagcagggctccggcgagtggtggtgtcgccgccggcgacgacgacgaggaggcggcgtgcctgcaggcgtttgagctaatgtgcatcttcaccgtccccatgacactgaaggcggcgatcgagctcggcctcctcgacgcactaaccgacgtcggcgacggtcgcgcactgaccgtggtcgagctggtcgtcgagcggatcccggacgccgcgccggacaaggccgatgcggagtactcggtggaccggatgctgcggctgctcgcgtcgagcgacgtcgacaagtgctcgatggactaccggaacccgagcgacgacatgcttctgac

SEQ ID NO: 8272 - DNA, 325 bp, Oryza sativa
  Clone ID: uC-osflcyp162b05b1
gtcggggctacttctccatcgccatcggacttaaccaaaccggctcctcctcctcctcctccccgtgcgaactccgggctcgtgccgagggggtggacgcgcccgtggtgagagcggacgcggtgcggtgggccatggcggtggggtggcggccggcgatgctggtggtggtggtggcggtggcggcgtggcgcggggaggcgctgtcggtgacggggaccgacacggagtgcatccacgagttcgtgccctacgagggggacaccgggtcggggaaactttgtcgccgtcgaccacgacatcttttggagctccgaccaccccg

SEQ ID NO: 8273 - DNA, 558 bp, Oryza sativa
  Clone ID: uC-osflcyp162b09b1
ttggtttaacccaagctccagcaatcggcggcggcggcgacgcgggagaggcggtccggcgacgatggttcacgtcagcttctaccgcaactatggtaagacattcaagaagccacgtcgcccttacgagaaggagcgtcttgatgcagagctgaagctagtgggtgagtacggactgaggtgcaagcgtgagctgtggcgtgttcagtatgctttgagccgtatccgtaacaatgcaaggcacctgctcacacttgatgagaagaatccacgccgcatcttcgagggtgaggcactgcttcgccgcatgaaccgttatgggctccttgctgatgggcagaacaagcttgattatgtccttgccctcactgttgagaactttctcgcaaggcgtcttcagactcttgtcttaaggctggcatggccaagtccatccaccatgcttcgtgtcctgatcaggcaacgccacatcagggtcggaaggcaaattgtcaacatcccatcattcatggtgagggctgagtctgagagcacattgacttttactgaccagcccat

SEQ ID NO: 8274 - DNA, 295 bp, Oryza sativa
  unsure (1)..(295): unsure at all n locations
  Clone ID: uC-osflcyp162b10b1
ccggtccggaaggcccgggccagaccgacccgaggtgatgaactccgaggaggagaagccaaatcataggcgataaacgaccatgtaaatctgctccatgattatatatgctcatccttatgcgtgtnaaaaaaaaaaaggtggtgagagccgacccaaatgcggtggcacatgaaaaaggaatgggggccggataatatggagccgaggttacttacgcctgcatggcacgccaaagctcttttaaactggtaggtaatgtacttcccatgaacaaaatataaagaatggacat

SEQ ID NO: 8275 - DNA, 485 bp, Oryza sativa
  Clone ID: uC-osflcyp162c06b1
ttctgacctatactggaagaagtttgaggatcactaccacttctcatgccagttcacaactgacttgattgcgatgaaccacgctgacttcatcatcaccagtaccttccaagagattgccggaaacaaggacactgttggtcagtatgagtctcacatggcattcaccatgcctggtctgtaccgtgttgtccacggtattgatgtttttgacccgaagtttaacattgtctcgcctggtgcggacatgtccatctacttcccttactctgagtctcgtaagaggctcacctccctccacccagagattgaggagttgctctacagcgaagttgacaacaacgagcacaagtttatgctgaaggacaggaacaagccaatcatcttctccatggctcgtcttgaccgtgtcaagaacttgactggtctggttgagctgtatggtcgcaaccctcgcctgcaagagctggttaacccttgggttg

SEQ ID NO: 8276 - DNA, 449 bp, Oryza sativa
  unsure (1)..(449): unsure at all n locations
  Clone ID: uC-osflcyp162c07b1
ttcgcgccctcctaaaccctacgaccatgccgaccctcgccgccgccgccgtcgccgcccgccgcgccggcggggcactgcgatacgccgtgctgggcggggttcggtcgctctcatccctccagccgtcatcctcctcctccgccgcagccgccgccagcgaggaggtgctggtggaaggcaaggccagcgcgcgcgccgccgtgctcaaccgccccggccatctcaacgcgctcacgaccaccatgggagctaggctcaataagttttatatgtcatgggaggacaaccctgatattggctttgtcatgatgaagggcagcggccgagcattctgtgctggtggggatgttgttaggttgcaccagcttataagtgaaggaaagttggacgagtgtaaggatttcttcacgactntgtacagttttatttatgttctgggcacatac

SEQ ID NO: 8277 - DNA, 458 bp, Oryza sativa
  Clone ID: uC-osflcyp162c12b1
tactataggggatgctggtccgcctggagccgccggggcggaactggcgggacccacgccgccggttgaatgccaaaccctggtactacttccatggcgatttgacccccaaaccctagcaatgccctagactaggactagtaggtagcggaaggaagctggaatcggaaggaaggaaggaaggtgggagggatgggtacctaatcgaacacggagagggcaaggagggctctgcgaggccatgaagcacctgggtttctccaagaaggaggccactcatcgcctcaagaaacttctcaggctcttgggcaacaactgggagcccatcgaggaccagtgctaccgtgccctggccgacgtcattctagaccgagaccaggagaccgtaattgaccgaggttgcaacgcaacaaggccaacgcctgacgatgaaaatcaccccttacccttgtggtgct

SEQ ID NO: 8278 - DNA, 458 bp, Oryza sativa
  Clone ID: uC-osflcyp162d01b1
gatctcacctgcaaattaagccaggtaataaaacttgccgtgaaaattaagctgaaaattagctgatcgatcgatcgccatggacgagctcttctaccagtcgctgctgctgtcggtggcggccgtgacggtgctgcagctgctgaagctgctcctggtgcggcatcgccgtccccggacgccgccggggccgtggcggctgccggtgatcggcagcatgcaccacctggtgaacgtgctcccgcaccgcaagctgcgggagctcgcggcggtgcacggcccgctgatgatgctgcagctcggggagacgccgctggtggtggccacctccaaggagacggcgcgcgcggtgctcaagacccacgacaccaacttcgcgacgcggccccggctgctcgccggcgagatcgtcggctacgagtgggtcgacatactctttttcccctccggcgactact

SEQ ID NO: 8279 - DNA, 267 bp, Oryza sativa
  Clone ID: uC-osflcyp162d02b1
ttgagattcaaaaggcgttgtcatagcatctctaatttctctactgatgtacttcgtctggatcaagatttgaattgcccagatggaccggatcggacggctgggattgcgccgagattcgtgaggccgccgcgttaaaccatcctcgtctccctccccacgtcgcgccacgcgccacgccgagctcgctctcgccgcgccacgccgcgccgcgcgttcgaccggatcggatcggcggcgagggagaggagaggggtagggatggag

SEQ ID NO: 8280 - DNA, 247 bp, Oryza sativa
  Clone ID: uC-osflcyp162d04b1
ctccgtatcctcctccagatagcggcggctgcctcgccttctccgacgagctccaccgtcgagtcgccgccccttgccaggacaggatggtggtggccacggaggaaatgggggtctactgcttcgacgccctcgtctcccactacagcggcgaccagccgccgtcgcccgccttcgaggagggcatccacccattgtttgtcacctggaagaaggctaccaatggttcagaaccacgccttcgagg

SEQ ID NO: 8281 - DNA, 469 bp, Oryza sativa
  Clone ID: uC-osflcyp162d12b1
cccacctgggcgtcctgccgtctgaaccaaaacaaggagcaaagcggggatttagaacgggaaggagaaggttcggttcgttcgttctcgagctcaagtgtcagttgaagtgttttgaaagtcatggcggagcatttggcttcaatattggggactgagaaggatagggctaactgccccttttacttcaagattggggcttgccgtcatggggatcgttgctaccgtgtgtacaacaggccaactgtgtcgccgacaattgtgcttgctaacatgtatgagcgccctgatatgatcacaccaggagttgatgcttaaggccaacctattgatcctgaaaagatgcaggagcaccttgaggatttctatgaggatatctatgaggagctgagcaagtttggtgggggtgagacccttaatgtcttggataccttgctgaccacatgaacgcaatgtgtatggcagttta

SEQ ID NO: 8282 - DNA, 405 bp, Oryza sativa
  Clone ID: uC-osflcyp162e12b1
gccgcggcggaattgccgggaccaaccccgccggtgcttatgtagagcaggggatctctttcgctcggaccatctctgcatttgcatttgcagctgctcggcacggcaatggcatccaccaacagctggacccacgagatcgagtcgccgggggccgctccgcgcctgatgcgtgccgccgtgatggactggcacacccttgtcgacaagagcgccttcgacatcgtcgccagcgcccaccccgtcgacggcgactgcagcgtcggcagcgtcaggcagttcaacttcacctcagccatgccattcagccacatgaaggagaggctggagttcctggacgtggacaagtgcgagtgcaagtcgacgctggtggagggcggcggtatcggcaaggcgatcgagacg

SEQ ID NO: 8283 - DNA, 439 bp, Oryza sativa
  Clone ID: uC-osflcyp162f02b1
gacccacgacgttttaataaaaaaaggaaaaaaaaacaaaacacaggaagccaaataaaagcgacaatgggatcgctcaccaccaacatcgtcctcgccgtcgccgtggtggcagggctggtcggaggagggtcgtgcggtccgcccaaggggccacccggcccgaacatcacgaccaactacaacgccccgtggctccccgccagggccacctggtacggccagccctacggctccggctccaccgacaatggtggcgcgtgcgggatcaagaacgtcaacctgcctccctacaacggcatgatctcctgcggcaacgtcccaatcttcaaggacggcaggggatgcggatcatgctacgaggtgaagtgtgagcagccggcggcgtgctcgaagcagccggtgacggtggttattacggacatgaactacgagccca

SEQ ID NO: 8284 - DNA, 339 bp, Oryza sativa
  Clone ID: uC-osflcyp162f03b1
gacccacgcgtttgatttgagcagcgacgcctctcctcctccggcctaacccctacgctttcagaaccttctcgaagctcccgctcccccccccttccgctccaatggcgaaggaaccgatgcgcgtgctcgtcaccggcgccgcaggacaaattggatatgctcttgtccccatgattgctaggggtgtgatgttgggtgctgaccagcctgttattctacacatgcttgacattccaccagctactgaatctcttaatggccttaagatggagctggttgatgctgcatttcctcttttgaagggaattgtcgcaacaaccgatgttgtggaggcct

SEQ ID NO: 8285 - DNA, 555 bp, Oryza sativa
  unsure (1)..(555): unsure at all n locations
  Clone ID: uC-osflcyp162f06b1
aaccccgccggttctttacaattttgcaaagatgagagagatcctggacattcaaggtgggcattgtggtaaacaggatcggggccaaattctgggaggtggtggtggataagcatggctattgactctaccgggcggtacacaggcaactcagatctgcagttggagcgtgtcaatgtgtactacaatgaggcctcctgcggtcgctttgtgcctcgtgctgttctcatggaccttgagcctggtactatggacagtgtccgcactggaccctatggccagatcttccgccctgacaactttgtgttcgggcaatctggtgctggtaacaactgggccaagggacactacactgagggtgccgagctaattgattctgttttagatgttgtgaggaaggaggctgagaactgtgactgcctgcaaggattccaagtatgccactctcttggtggtggtactggatctggtatgggtacacttttgatttaaagattanggaggagtactcttgaccgcagatgcttgacattttaggttttccctcaccaaagt

SEQ ID NO: 8286 - DNA, 253 bp, Oryza sativa
  Clone ID: uC-osflcyp162f09b1
cttgttctagatcgcagcggccctttatttttatggagggtttttttatatatatctttctttatttctaccatgtccctttgataattactaactacagcagctccaccctaaataccacacacaccccaaccactgcacggacaaaacaagaatcaacgctaacaccaaaaaaaacagagaccaaaaaaaagacaaaaccgccaataacccattacccgtcgacaaaggataaatccgccacagctacact

SEQ ID NO: 8287 - DNA, 479 bp, Oryza sativa
  unsure (1)..(479): unsure at all n locations
  Clone ID: uC-osflcyp162f10b1
ctttgagcttagctatggcaatggccgcgccgctgacgttggtggtggtggcggcggcggtggccgtcgtcttcgtcggcggcggcgtggaggggtgggtgctcaaggaggggttctacgagcagagctgcccgcgcgcggaggcgctggtgaagcactacgtggagcagcacgtccccctcgccccctccgtcgccgccaccctcatccgcacccacttccacgactgcttcgtcagggggtgcgacgcgtcggtgttgctgaacgggacggacggggcggaggcggagaaggacgcggcgccgaacctgacgctgcgggggttcgccttcatcgaccgcatcaagagcgtggtcgagagcgagtgccccggcgtcgtctcctgcgccgacatcctcgcgctcgccacccgcgacgccatctacgtcatcggcgggcccgtctggcgggtggcgacggngcggcgcgacgggagggtg

SEQ ID NO: 8288 - DNA, 283 bp, Oryza sativa
  Clone ID: uC-osflcyp162f12b1
ttctatttctcgacttcgtcggcgaccgaccggggtccagaaccctaaccctaaccctagcgaggaagaaggcggcggcggcggacggaggggggagatggtgtactacgcgctgtactggtgggcggacctggacaaccttaccaacctggaggcccggtacgggtgggaagacccgacctacccctactacttcaaggtgcggtgcgagaactggcgggagggtaggggcaagggaacctggggtttccttggggagggtggtgaactggccaacgggcgc

SEQ ID NO: 8289 - DNA, 361 bp, Oryza sativa
  Clone ID: uC-osflcyp162g07b1
cccgattcggcaacgattctcgagtcagttggttgcgaaatcgacaatgcaaagatggaactcctgttgtctcaagtgagtggcaaggacatcactgagctcatcgcttgtggcagggagaagtttgcttcagttccatctggtggtggtggtgtagctgatgctgctgctgctcctgctgccggtggtgctggtggtgctcctgcagctgaggcgaagaaagaagataaggtcgaagagaaggaagaaagtgatgatgacatgggcttcagtttgtttgactgactgatgcggccacctcttctatcatcaataccagactttgcgcaggaaactagagtgatgatgtttggcaatttag

SEQ ID NO: 8290 - DNA, 566 bp, Oryza sativa
  unsure (1)..(566): unsure at all n locations
  Clone ID: uC-osflcyp162g12b1
attccgggggggacccacccgtccggttatgtttgttaaagcaaaacgcttgcaacaggacgattttgagattgtgccagcagaaccagtccgaactgaagatgactcatcttcatcttctgatgagtctgatgaactagatgaggacctcgacgatgacacaaaagctgaagtactagcctatgcaaggaagatgttgaggaagaaacagagagagcagatacttgacgacgcttacaacaagtacatgtttgacgacgagggtttacctaaatggtttgctgaggatgaaaagaggcataaccagcctatgaagcctgtaacaaaagaggaggtagctgccatgagggctcagttcaaggagatcgatgctcggccagccaagaaggtcgctgaggctaaggctcggaagaagcgcgtcgccatgaagaagctggataaggcgcgccagaaggcagatgccatcgcagatcaaaacgacataaacgagcagtcaaagaggaagatgatcgacaggatttacangtaggcgattccaaagaagcctcagaaggagtcgttgtcgc

SEQ ID NO: 8291 - DNA, 438 bp, Oryza sativa
  Clone ID: uC-osflcyp162h01b1
gttttgtgttgttgcccaactgcacccataatatgtgccttagatgctaccaggactggaattcaagatcacagtcttgtccattctgccgtgacaacttgaagaagactgaccctggtgacttatggatctatgttgaggaccaagatgtggttgacttggagacagtgtcaagagagaacctcagaaggctgttcatgtacataaacaagctgcctctgattgttccggatgtcatcttcagtatttatgattcccacataaaatgactcgcaacgctgctttgtcgacggcctttagccaatgctttgttctgattaagctatgcccccaagttctccatttccatgcttagactcaagctcttggaaatgcctgaaccgttgtggagacacaaaccttctggtcgtgttgagaacttatttagtggttacatgc

SEQ ID NO: 8292 - DNA, 357 bp, Oryza sativa
  Clone ID: uC-osflcyp162h05b1
cggctgtttctcagtctatagaagccactcctgttggttgatctgaaagttcatttggcacatattgttcacccccaagaccacttccatatgatgatcctacaatgttctctcctcagcgtgcacggttagtgtcaagggatggaccttcatgccattccccagaggaatcagaaccactgagggcaaatgatgacgaggaaatggaaacaccaagttcaacacataagtcaagtaaaacaaactatgacacaaaaatgaaaagaagcagctctactcatggagagaagctgccaacaaaggaacctggaaattatttcacatactattacgcatgcgctcaagatgaagatgtac

SEQ ID NO: 8293 - DNA, 438 bp, Oryza sativa
  Clone ID: uC-osflcyp162h09b1
tcgtattacacgacgcaccaatggcgctcgtgtccgcctcctcctccaccaccgccgtcgcggcgctccccggcgccgccagggcctcctccttcctcggcggcgccggcaggagcggcaggctgctgctgaggcaggccgagtcgtcgtccgcgcgggcgtcgttcgccgtgcgcgccgcggcgcccgacaggccaatctggttccccggcagcaccccgccgccgtggctcgacggcagcctccccggcgacttcggcttcgaccccctgggtctcggatcggacccggagagtttgcggtggaacgtgcaggcggagctggtgcactgccggggggcgatgctgggcgcggggggcatcttcatcccggagttcctgaccaagatcggcattcttaacacgccgtcgtggtacaccgtcggggaggcagaatact

SEQ ID NO: 8294 - DNA, 410 bp, Oryza sativa
  unsure (1)..(410): unsure at all n locations
  Clone ID: uC-osflcyp162h12b1
tcggttcaccgagacccacccctgcgacgccgccgcacaactcgagcggagcagtgcaggcgaaaccctactcgaagcccgcggcgagccaccgccacctccagatccgaccacaccgcgccgtcgcagcgatggtgtacttcgattcgtgggacgagttcgtcagcaagtccgtcgagctcttccgcaaccaccccgacaccacccgctacgttgtcaagtaccggcactgcgaagggaagctcgtgctcaaggtcaccgacaaccacgagtgcttgaagtttaagacagatcaagctcaggatgcaaagaagatggaaaaactgaacaccattttttttactctcatgacccatggacctgatgctgatataagtgatgtttcggngaaggaacaggcagaacaacag

SEQ ID NO: 8295 - DNA, 424 bp, Oryza sativa
  Clone ID: uC-osflcyp173a05b1
aaatcgcaattccccaatccatattcccttcccttcctttcctcctcctccatctccaccctcccgccgccgccgccgccgccgtcgccgcggcacactccccgggaccagcagaggccgccgccaacgccgcgggggcaggtaaaaaggcgcgcgagacgcccgcctctgcccgctgacctagatcggtagggtttactcgggcgcccgggtcgttcgtgtatgggggcgtgggcggtgggggattaggctttcggggtcggggggtcgggaaggtgtctgatcggatgatgggtggctctgttctccttctggggtgcggggttagagctagggctgtcgcggcgattttattttattttattttagttgaatttgaccggaatttccacgatttggatgggtttgtattggttggattgtg

SEQ ID NO: 8296 - DNA, 378 bp, Oryza sativa
  Clone ID: uC-osflcyp173a10b1
attgctctttatttctttgctaaagatgttgaaagttatgaaagagcatatgggaaactgttggaaaacatgcttgctggagatttgtccctcacagcaaatatttgtggcattgaacttctcatttttacgtctgataagctgcctgagaggactcaacggtggaatggcttacttttcttttggggtgtcctttatgccagaaaggcaagtagttcaactgagctgcttgtcaaagggatgaatcatagtccattagaacaaattaatggacctgttaatcaacttgtctgttcccctaagatgcctcagtctttgggcatagatttgaatgagtgccctgttgatgaattgtatgatccagctgtatcagttcaa

SEQ ID NO: 8297 - DNA, 552 bp, Oryza sativa
  unsure (1)..(552): unsure at all n locations
  Clone ID: uC-osflcyp174a02b1
cggacgcgtgggtggagattcaggaagggagccttacactgcatgccatcatcaactacttgcccacgcggaaactgttcggttgtacaaagcgaaatatcaggccttacaaaaagggaagattggaataactctggtctcgcactggtttgttcccttctcccgctccaaatccaacgatgatgctgcaaagcgtgctatagacttcatgtttggatggtttatggatcccctcattagaggcgactaccccctaagcatgagaggattggttgggaatcgcttgccacagttcactaaagaacagtctaagttggtcaagggtgcatttgactttattggacttaactactacactgcgaactatgctgataaccttcctccatcaaatggccttaacaacagctataccaccgattctcgagctaatcttaccggtgtacgaaatggcatccccataggaccgcaggctgcttcaccttggctttacgtctaccctcaaggcttncgtgactngctactttatgttaaggagaactatggcaatcctac

SEQ ID NO: 8298 - DNA, 553 bp, Oryza sativa
  Clone ID: uC-osflcyp174a06b1
agcctcaggacttcctgccagacccttcttccgatgggttttatgatgaagtaaaagagctgcgggagagggctaaggagatccctgatgactactttgtttgcttagttggagacatggttactgaggaagctcttcctacctatcaaacaatgcttaacacccttgatggtgtccgagatgaaactggcgcaagcccaaccacctgtgctgtttggacaagagcatggactgctgaagagaacaggcatggtgatcttcttaataagtacatgtaccttactggacgtgttgacatgaaacaaattgagaagacaatacaatacctgattgggtctgggatggatccaggaactgagaataatccctacttgggtttcctttacacatcatttcaagaaagagctacatttatatcccatggcaatactgcaaggcacgccaaggagtacggtgaccttaagctggctcagatatgtgggacaatagcagctgatgagaagcgccatgagacagcttacaccaagatagtggagaagctcttcgagatgat

SEQ ID NO: 8299 - DNA, 576 bp, Oryza sativa
  unsure (1)..(576): unsure at all n locations
  Clone ID: uC-osflcyp174a09b1
tagcaattcttgagctcaatcagcaacaacatctatctccttcttgcttagttaagtccttcgccctcccaagaagaagaagatgtcttgctgcggcggcaactgcggctgcggcagcggctgccagtgcggcggcggctgcggcggatgcaagatgttccctgatgtggaggccacagccaccaccaagaccttcgtcctcgctgctccatccaacaaggcgagctctggaggaatggagatggcggtggagagcggcgagaacggcggctgcggctgcaacacctgcaagtgtggcaccagctgcagcggctgctcctgctgctcctgcaactgaatctatcgtcgtcgtcgcccggctgcatgaggatttatcgtatggatgctgctactgtcgatcagagctttgatcgaggccttaatttgcttgcattagtacccagcttatatgtaggcaggccttgccttttgctctgacgcctaaataaaaccgtcgtcgtcgttgtcagtgtgtgcgtgtgtcgatcaatgttggatggatccctagctagctnggatggatcatctatcatcatg

SEQ ID NO: 8300 - DNA, 571 bp, Oryza sativa
  Clone ID: uC-osflcyp174b03b1
gcggcatggaccatggtctgctccctgggttggggaagctggtggtgcatataacagtggcagccgaaaagtgtctaatactttcctgaatagcttctggtatcttgatcagcttggtcagtcagcaaagtatgacacaaaggtttactgcagacagactttgattggaggcaactatggccttcttgataccgaaacttttgttccaaaccctgattactacagtgccttgctgtggcatcggctcatggggaagggagttatttccttagacaccagcggttcttcgtacttgcgtgcctatgcgcattgcggaaagcaaaagggcggcgtcgcgctcctcatgctcaacctgaacaagaacatgggattcatggtctcagtcagaaatgacctcaacattaatttcagagaaatggcagggataaagagggacaactcctttgtccatggcctgaagaggacagtctcctgggttgggagcaaagcctcggatgggctggagaagagggaggagtaccatctgactccacaggatggcaaccctttgcccagacagtgctgctcaatg

SEQ ID NO: 8301 - DNA, 543 bp, Oryza sativa
  Clone ID: uC-osflcyp174b07b1
gcctagatcaagagatcgatcatatcgtattttgtagtaatttagcagctagctagtgcagctgcaagctattagcgactgcatgctttgatcgatccatctagctaattgttgaatccatctaagcttaatggctctgcagcagagcatggcgatgccgatgatggtagtgtctgaccttggcaccgctcctcggtcatcgccgatggttcagctgcagaggatgaagaagcatctggtggtggtggcggcgttcaagagcagaaccaaggcttcccccaaggtggacaagtcgaacaagaacaagtcgatcgtggaggacggcatcttcggcacctccggcggcatcgggttcaccaaggagaacgagctgttcgtggggagggtggccatgctggggttcgcggcgtccctcctcggcgaggcggtcaccggcaagggcatcctggcgcagctcaacctggagacgggcattcccatctacgaggccgagccgctgctcctcttttcatcctctcacgctgctgggcgccatcgcgcgct

SEQ ID NO: 8302 - DNA, 493 bp, Oryza sativa
  Clone ID: uC-osflcyp174b10b1
ggtatcctctaatctcaccgatcaaatgttgtgcactttcaagctcaggagcctcctcttcctctgcacatttctcacgggagcgttgctctggttcatctcccatttcctctggtgatccatcaatccattttatccgccattgatccgatccgattcgatcaaacccatgtgtatctagaaatctagagagagagagagagaggcatcgatcgatcgatcgatcgaaggatggttggttcttgtcatgcatcttcaccattgccggatctgccggggaggaagaagaagaagtgctgttgctgcccaggattatgagatcgatggactactacgagatcctccatgtcgaccggagcgccaccgacgacgacatccgccgcgcctaccgtcgtctcgccatgcggtggcaccccgacatgaaccacaccggcatgatggacgccgtggccaagttcaaagacatcaccgaagcctcaacgtgctcagcgac

SEQ ID NO: 8303 - DNA, 561 bp, Oryza sativa
  Clone ID: uC-osflcyp174c01b1
catggcgcaggacgacgccccggactccaccacctcctcctcatccgcctcatccgcctccgcccccgccccctccgccgcccgcctcaacgccgccgccccggagttcacccctcgatccgccgtccaccaccaccaccaccacgccaaccctcgccgccagcaccgcgggggcgggggtggggcctaccaccaccaccagcagcactaccagccgcaccaccaccaccagcaccaccagcactggcaacactacggggaggatgagggggacgccgcggcggccggggcggtgggagaaggagggatcccggaggatgtggctcgtcgggtcgtcaagcaggtggaattttacttcagtgatgtcaatctggctacaacagaacatttgatgaaattcatgattagagatccagagggatttgtgccaatgtctgtagttgcatcttttaggaagatccgggagttagttagtgagagatccgcattggctgcagtattgcggacgtcagcagagctggttgttcagatgatggaaaagggtagacgcgagtgctctta

SEQ ID NO: 8304 - DNA, 517 bp, Oryza sativa
  unsure (1)..(517): unsure at all n locations
  Clone ID: uC-osflcyp174c03b1
cgacaatgaggccatctatgacatctgccgccgctccctcgacattgagcgcccaacctacaccaacctcaacaggcttgtgtcccaggtcatctcctcactgactgcctccctgaggttcgatggtgctctgaatgtggatgtcaacgagttccagaccaacctggtgccctacccgaggatccacttcatgctttcctcctacgccccggtgatctcggccgagaaggcctaccacgagcagctctccgtggcggagatcaccaacagcgccttcgagccgtcctccatgatggccaagtgcgacccgcgccacggcaagtacatggcgtgctgcctgatgtaccgcggcgacgtggtccccaaggacgtgaacgccgcggtggccaccatcaagacgaagcgcaccatccagttcgtggactggtgccccacggngttcaagtgcggcatcaactaccagccgcccagcgtcgttccgggggagacctggccaggtgcagagggcgtgtgcatg

SEQ ID NO: 8305 - DNA, 495 bp, Oryza sativa
  unsure (1)..(495): unsure at all n locations
  Clone ID: uC-osflcyp174c09b1
ttcaaagatgctattgctaaagttggattagcaaagttggtttctaatctccttgtggtgggcttgttctatcacctttataaccaggttgctacaaacacattagaaagggtgacccctctaacacatgctgttggcaatgtgttaaaacgtgtcttcgtcattggcttctcaatcattgcattcggcaacaagatcaccacacaaacaggaattggcacttgcattgccatagctggtgttgcactctattcttatatcaaggctaagattgaagaagagaaaacgcaaatgaagagcgcataaggagttgaatctgtggatatagttgggtagctgctttgatcgatctgtattgcctccgagaaataaaatgagctgtaagatttataacaatctaggtgcctgctgtatctcatcttgtttgttattggcgatttcgctttgaacagncaaagctaccgatgcatttttttttttttttgaaattataac

SEQ ID NO: 8306 - DNA, 481 bp, Oryza sativa
  Clone ID: uC-osflcyp174c11b1
ctcggatctgtagcaaagagcgaagagcgaagctgcagcctgcagctacgcttgttcgcttgagacctagggtacgagcaacaataatagagagtgactgagtgagcgagcactgagtagcaagggcccggcacaaacaggacgcagccggcaacgtgtacgtcgaaccaaacagagaacagctagctaatcgatcggtcgccatgaccaaggacgacgccgtcccggtggccgtggcgccggcgaagcgcccgcccatcaacaagtacgccttcggctgcgctctcctcgcctccatgaactccgtcctcctcggctatgatatctcggtgatgagcggcgcgcagatattcatgaaggaggatttgaagatcaccgacacgcagatcgagatcctcgccggcgtcatcaacatctactcgctgttcggctcgctggcggcgggcatgacgtccgactggctgggccggcggtacaccat

SEQ ID NO: 8307 - DNA, 544 bp, Oryza sativa
  Clone ID: uC-osflcyp174d01b1
gatgctttccgctgctggacggggtgggcctggacttgttcctagttctttgctgccctttgatgtttctgttgtgctccgtgggccatactggatacgcattatatatcggaagaaattttctgttgacatgcgctgtttcgctggggatcaggtttggctacaaccagcaactcctcctaaaggaggacctctggttggtggatcgttgccgtgcccacaatttcgaccattcataatggaacatgttgctcagggtctaaatgctcttgaacccagtttcatgaatgctacacaggccggtgcgcatttaaatagcagtgctggaactctgcaacctgcacccaatgcaaatcgtgtaaacgcgactcaaggtattggtatgtccaggcctgcttctggagttgctaaccatgtagcagccaatctgagtcgagcaggtaatgccatgttggcctcttcaggacttgcttcagggattggtggggcctctgtgcgactaacatctggagctaacctccctgtcatgtgaaagagagctgat

SEQ ID NO: 8308 - DNA, 547 bp, Oryza sativa
  unsure (1)..(547): unsure at all n locations
  Clone ID: uC-osflcyp174d03b1
gagatcgtcgccgtcaagcagctggacaaggacgggttccaggggaaccgcgagttcctggtggaggtgctgatgctcagtctcctgcaccaccccaacctcgtcaagctgctcggctactgcaccgacatggaccagagaatcctcgtctacgagtgcatgcggaacggctcgctggaggatcatctcctagatctccctccaaaggcaaagcctctcccgtggcaaacgcggatgaagatcgcggtgggcgcggcgaagggcatcgagtacctgcacgaggtggccaacccgccggtgatctaccgcgacctcaagacgtccaacatcctcctggacgaggacttcaactccaagctgtccgacttcggcctcgccaagctcggccccgtcggcgacaagagccacgtcagcacgcgggtcatgggcacgtacggctactgcgcccccgagtacgccatgaccggcaagctcaccaagacgtcggacatctacagcttcggcgtcgtgctgctgagatcatcaccgcaggcnggcgatcgatacc

SEQ ID NO: 8309 - DNA, 524 bp, Oryza sativa
  unsure (1)..(524): unsure at all n locations
  Clone ID: uC-osflcyp174d09b1
taagaacaacgcatgggaggccttgttccatgtcgatgacccggggccaagggttccaattgcaaaaggcaagttcttggatgtcaaccaagctcttgaggtggtccggttcgatatccagtattgcgattggagggcgcggcaggacctcctcaccatcatggttcttcacaacaaggtggtagaggttcttaatcctttagcaagggagttcaagtcaattggaaccttgaggaaagagcttgcagaattacaggaagaattggcaaaagctcacaatcaggttcatctgtcggaaactagagtatcatctgcccttgataagttggcacaaatggagacccttgtcaacgacagactgttgcaagatggaggctctagcgcatctacagccgagtgcacttcccttgctccaagcacgtcatcagcgtnccgtgttgtaaacatgaaaccttctcgccggagtctgaacgtgtctggtccagtgcagccatacaantccagtctgaagaacttttgtaccc

SEQ ID NO: 8310 - DNA, 464 bp, Oryza sativa
  Clone ID: uC-osflcyp174d11b1
aattctgaagaaaatagatatatacagcctgtacatgtaatatgtttgataaagcacgtgcagcacaacagtggggtacacagttcagtccagtaagcaagaaaaagtttgttttttttccttttgctatacacatataaggccccttttgaaacacaagaagtatgtaacatgaatttcacagaaatcccggaggaaacaactcaactcaactcccgcagaaatagcaaaattttttccgcatttcaaacggggtcagatacagcgacgacgacgcacacaaaacaacacacgagacgcacgaccgagctccatcaccgcttcttgctttaaacccgtccatcaccagcggaatggattctgcatccccctcttcttcttcttcttctcgatgtaggccagcaccttctcctgctgccccgacgaagtctccaaaagcttcttggtggattcgagctcggtct

SEQ ID NO: 8311 - DNA, 481 bp, Oryza sativa
  Clone ID: uC-osflcyp174e02b1
ctccctctccgcccatttctcctctccacctgcgatccatccgcgcccgcgaggaggagggagccggacgccgccgcggggagagcaggggagagaaggagaggaggagatcgccgtcgccgtaaccgtcgccgtcatcgatctcgagcgggagcggagatggggctcacgttcacgaagctgttcagccgcctcttcgccaagaaggagatgaggatcctcatggtcggtctcgatgctggcggtataaccaccatcctgtacaagctgaagctcggcgagatcgttaccactatccccaccatcggttttaatgtcgaaactgttgagtacaagaacattagcttcaccgtttgagatgttggtggtcaggacatgatcaagcccctgttgtggcactatttacagaacacccaggggctgatttttgttgtggacagcaatgacagagagcgtgttgttgaagccagggatgagctcc

SEQ ID NO: 8312 - DNA, 511 bp, Oryza sativa
  Clone ID: uC-osflcyp174e05b1
ggatcattcaggtatcgagaaccattggtgatgtttacttgaagaaacaagagtatagcatggatcccgtgtttcgtaacgttggtccccctattcctttgaagcggccagctcttagcgcagaaccatcgattcaagttcgcaagctcaaaccaaatgatctgttcctgatatttgcttcagatggtctctgggagcatctcagtgacgacgctgcggtgcagattgtcttcaagaatccaaggacgggtatagcaaacagattggtgaaggccgctttaaaggaagccacgaggaagagggaggtcagcttccgtgatctgaagacgatagagaagggagtgaggcgccatttccacgacgacatcagcgtcatcgtcgtctaccttgaccgccaccgcggtcgccgtcacacaagggtcgtcgactcgagcagcaactgcaccaacgcccccgtcgacatctactcctccaactccggccaatccgtggagactcttcaagcccatcg

SEQ ID NO: 8313 - DNA, 499 bp, Oryza sativa
  Clone ID: uC-osflcyp174f01b1
gcggaatacaataatgtaaggagccagcttagtgcgatcaacagaaagcaaactggaagcttagcagttcgtgatctttccaatctggtaaaaccagaggatatggtcacatcagaacatctagtgacactccttgcagttgttcctaagtactctcaaaaggattggttgtcaagctatgagtcccttgacacatttgtggtaccgagatcgtctaaaaaactttatgaggacaatgagtatgctctctacacggtaacattgtttgctaaggttgttgacaactttaaggtccgtgcacgtgaaaaaggtttccaggttcgcgattttgagtatagttctgaagcacaggaaagtaggaaggaagagctggaaaagctaatgcaagaccaggaagcaatgagggcatcacttctgcaatggtgctatgccagctacagtgaggtattcagttcctggatgcacttctgtgctgtgcgtgtctttgtagagagcattc

SEQ ID NO: 8314 - DNA, 454 bp, Oryza sativa
  Clone ID: uC-osflcyp174g01b1
agcgcacagatctcctaccaccaccaccaccgtcgcagccatggcgaccgggtactaccgcggcggcggcggcgccagggaccacgccgacgagcccgacgacttcgacgagtacgaccccacgccgtacggcggcggctacgacctcttcatcaccttcggccgcccgctcccgccctccgacgagacctgctacccttgctccgctccctccacctcctacgacgccccgcactactccgccgacgagcccttcccctacgcccaccactccaagccgcagcccgcctacggcttccgcccccagcacgagcagcagcagcagccgtcctacgccttctccggctaccgtccccagcacgagcagcagcaatcctacggctcctctggctacggatctaagccccagcccgtctatggcttccgcccccaggccgaggaggagaacacctac

SEQ ID NO: 8315 - DNA, 434 bp, Oryza sativa
  Clone ID: uC-osflcyp174g07b1
taggggaaggagaagtcccagaagctgctcaagctgttccgggagcaaaggcagcgagatggggcacagcctgtgccgcagcaagctcagcagcagcagcagcagcagcagcagcaggcgggagagaccggtaacggcaccatggtgtgccgccgcgactcaaaacagctgtgcaagtctaaatcgaggaagctaggaaggactctgagctcactgtggaagaacaggagcttctccctgtaccaatgctagcagatttttgagctgagtttgatcagtggatatgtacatcttttcttgttccatgtttctcttgatctttcttttttttttttttgccttcttctttgttgtttccttgtgtaaaggaaaactatcttcccccccttctcggtcgggtgatgtaagccatttcctctttggttttctttgcc

SEQ ID NO: 8316 - DNA, 518 bp, Oryza sativa
  Clone ID: uC-osflcyp174g11b1
taaaaaaggaaaaaaaaacaaaacacaccaagccaaataaaagcgacaatgggatcgctcaccaccaacatcgtcctcgccgtcgccgtggtggcagcgctggtcggcggcgggtcgtgcggcccgcccaaggtgccacccggcccgaacatcacgaccaactacaacgccccgtggctccccgccagggccacctggtacggccagccctacggctccggctccaccgacaatggtggcgcgtgcgggatcaagaacgtcaacctgcctccctacaacggcatgatctcctgcggcaacgtcccaatcttcaaggacggcaggggatgcggctcatgctacgaggtgaagtgtgagcagccggcggcgtgctcgaagcagccggtgacggtgttcatcacggacatgaactacgagcccatctcggcgtaccacttcgacttctccggcaggcgttcggcgccatggcttggcccgtgaaggagaccgagctccgcatggccgcatcatcgacatgc

SEQ ID NO: 8317 - DNA, 543 bp, Oryza sativa
  Clone ID: uC-osflcyp174h01b1
gcttttctgggattggagctggcaagagttagctgaatatgaccttttagcaatgctaggctatgtgtatacagtcacacagtccaaaattctatatgtggggcattcacagggaactataatgggtttggcggctttgacgatgcccgaaatagtaaaaatgattagctctgcagcacttctttgtcctatttcttatcttgatcatgttagtgctagttttgttctcagagcagtcgccatgcatcttgatcagatgcttgttactatgggaattcaccagctgaacttccgtagcgacatgggggttcaaatagtagattctttgtgcgatggtgaacacgtggattgcaacaatttgctatctgcgattacaggtgatggttgcaaaaataaattacttggttgcttttttcctgtattggtcctaaagaaaggtattgttgttctgcatagttcacatttgggtgtgaaacattatatgcatctttcattgattgagggtacagaccaaacatgcactagtattactggactatgaaa

SEQ ID NO: 8318 - DNA, 490 bp, Oryza sativa
  unsure (1)..(490): unsure at all n locations
  Clone ID: uC-osflcyp174h11b1
ctctctggatgcagcaaactttcaagcctaaaaattggcatatgcttgaggataactgatgagggccttagacacgttagcaagtcctgtccagatctccgagatatcgatttgtacaggtctggggcgatcagtgatgaaggggttactcatatagctcaaggatgcccaatgttagagtctatcaatatgtcctactgcacaaaattaacagactgttcactgagatcactttcaaaatgcataaagctgaacacattggagattcgtggctgccccatggtttcatctgctggtctctcggaaattgcaacaggatgcaggctactttctaagcttgatatcaagaaatgctttgagatcaatgacatgggaatgattttcctttcccaattctctcacaacctccggcagataaacttgtcatattgttcggtcaccgacattgggcttatatccttntcatgcatatgtggcttgcagaacatga

SEQ ID NO: 8319 - DNA, 376 bp, Oryza sativa
  Clone ID: uC-osflcyp177a02b1
cggatttcgtttctcccatcctctcgcgcatactcctgggacgggctctcatttgaattttgggggcggctggagatgtcggactccgaggagcaccacttcgagttgaaggccgacgccggcgcgtccaagacctacccgcagcaggctggtactattcgcaagaacggtcatattgtcatcaagaaccgcccatgcaaggttgttgaggtctccacctccaagactgggaagcatggacatgcaaaatgccactttgtggccattgacatcttcaatgggaagaagcttgaagatattgtgcccttctcccacaactgtgacgtcccccacgtgaaccctactgataatcagctgattggacatttctgaagat

SEQ ID NO: 8320 - DNA, 433 bp, Oryza sativa
  Clone ID: uC-osflcyp177a03b1
cccggttccattttctggaaaacgtgttctcagatccgggggggtttggaattggccctgacgggaagtaccggtgtgaggatcccttgttcacgcaaggcacggcccaagtctgagaggctcaacgagcacgcttatcagttattatgtcatgctttttcttgtctctctctagctctaccctatcctagtttttgtcgaacccatcgtcgtgttaagcgtaatgtaagcacaacctacttcttcatttgtttcattcttagacctcccatatcaatatgctcaactgctgccccagtttttgctcagtgtgttcgatttgctcttcagtagttctattggtttcagaacagctgggcctgtaatcactcactcctatgtctggacatgcaaagatacttctggtttagagtttcagctgagttacagtgat

SEQ ID NO: 8321 - DNA, 239 bp, Oryza sativa
  Clone ID: uC-osflcyp177a05b1
caatattattatattgcagcaatggcatcctcctcccggggacgggtcagtgtagaggtggcggctatagtatacgccgtctcctgcgggccacccaaggtgccaccgggccccaacatcacgacaagctaccgcgacatgtggctggaagccaaggccacctggtatggtgcgcccaagggtgctggccccaaggacaacggcggcgcctgcggctacaaggattgtcacaagggtcc

SEQ ID NO: 8322 - DNA, 147 bp, Oryza sativa
  Clone ID: uC-osflcyp177a10b1
accttgtgattccgaatcaacagcctcctaacccaggggagggggtaatttaaaggtagcgtggcggcaagcaccacggttacggccgccactcaaggcgccacggtgcacgaacatcaccaaacgctacagccactagtgtctgaa

SEQ ID NO: 8323 - DNA, 226 bp, Oryza sativa
  Clone ID: uC-osflcyp177a12b1
ggcggttgcgagcgggtcatcggccaggcgcagcgccgtagcccctcccaccggcgagtaggaggctgcccgataggcggcgacggggatagttctaggctatggggagagggctcggcggatcatgagatggcgccgtagcaccgcccggcaaccttgtgggggtgacttgccgccgacgaccgtccagtgccctgcccgcccatcggccgtcgcgccgtgccgc

SEQ ID NO: 8324 - DNA, 231 bp, Oryza sativa
  Clone ID: uC-osflcyp177b06b1
cacttttaggtttgcgatcagcggcgaggcaccatccgggccgggctgtaatggaaaacacctgctgcttcctacaccagttcacggcccgcgtcgtcgcgcgcgtcgccttcccgtgcccggggacgcgggccaacctcctcgtgtgccgcgcccagaatcatgacgacgccgccgtcctcaggcgggcggtgctggcccacctcgccggagcgaccggggtgggggggg

SEQ ID NO: 8325 - DNA, 506 bp, Oryza sativa
  Clone ID: uC-osflcyp177b07b1
tgcggtatgagcgagcgagggaggaagaggaggggaggagacgaagatggccggggtggcggcgttgcagggcgcgatggcgtccctctccatctctgcgccgggggcggcgagcaccagcagcttctggggccacccgctctccaccttcgccgccgcgccggctggggttaaatttatgatcaagacatgcccaattcaaatgaggcttaagcgatgggagaggaagaagtgtaaaccaaacagtcttcctgtcctgcacaagatgcatgttaggattggcgatacagtacaagtcattgcaggccgtgagaaaggtaaagttggagaagttacgcggctttttaagcacaacagcactgtaatagtgaaggacttgaacttgaagtccaagcacaagaaaggaacagaagatgaaccgggtgaaatcgtcatgattgaaggccattcacagcttatatgtgatgctctactcaaaggaaaagaatgtggcgagtagggttgga

SEQ ID NO: 8326 - DNA, 331 bp, Oryza sativa
  Clone ID: uC-osflcyp177b10b1
ttcaccctacattgaataattatttttaataatgggagtgttttttttggctttagctatatttccaatccccaaccttccaataatccgatctctcccagttctgttcggatcaaggctgtgtcgatcgcaaaaaagaaaaaaaaacaatttccttttggggtggttcatctgttgatcacttctttgtttcccgcgttatgttggggattcgattgtcgggttaagattttctacacgatggccttgaactcggctcagagcgccgcgggggcaccgtgcttcgcgacccccggtgatgcgcggcgagctgcttcggtggacgccatgc

SEQ ID NO: 8327 - DNA, 470 bp, Oryza sativa
  Clone ID: uC-osflcyp177c02b1
agcaaaccttatgtttcgcttctaactggaattgtcagggggggaggtgctgatgtttctatacagtggaaggatccgagttgtcacagatagcacggtttttgctatgccagaaacagcgttgggtctctttccagatattggggcttcatattttctatctcgacttcttgggttctatggagagtatgttggtcttactggtgtaagggtggatgctgctgaaatgcttgcttgtggcctagcaactcattttgtaccttcagataggctgtctttgctagaagaatcacttaaaaaggttgatacatctgatccatttgctatatgtggaatatatcatcaatattcgtaacaaccatctttgaaagaaaaaagccgctctgaaaaggctagaaatcatcaacaaatgctcttccaaaaaaacaattggaggaatattagtctttcttgaacaagaggcttccaat

SEQ ID NO: 8328 - DNA, 496 bp, Oryza sativa
  Clone ID: uC-osflcyp177c09b1
gtagatggaggccggccggtacgtcgacgacaggtggcaggtggcgaggacgaacaacaagatcaccaacctgcaggtgtcgttcgtcggccacggacatgatactccagcagatggagaagggcaattcgctgatgctgcatacccggcgaagtggaaaccagatcaggatccgtccacgccatcgctggtcgttgctcatcatctaccgaatggcaatgctcccttcattgatgctgcttacccagtcaagtggagtccacgtgctgatgggcctcctaaacaaccagccaccttccctgcttctccaaatggtgagaaggccgaattcactgattctgcttactcggtaaaatggagtccacgtagtgttgcacctcctaaagcaccgggcatctttgctcaacattctaatggtaacaaggcccaattcactgatgctgcttacccagtcgactggaatccacgtagtgttgcgcctcctactccaccggct

SEQ ID NO: 8329 - DNA, 210 bp, Oryza sativa
  Clone ID: uC-osflcyp177c11b1
ttcggtctcaccaccggcgactgggacgcgaagaccggggttgcatctcaccgcggcgtcggactggatcacccccgtccctgcctcgtacaactcccagctggtcacgctcacgcaggagtccggcgggaagaccatgctcctctccaccgtgaacgacacctccctggcgatgctggagcggcccgagggcgccggcggtactgactc

SEQ ID NO: 8330 - DNA, 389 bp, Oryza sativa
  Clone ID: uC-osflcyp177d03b1
acccgcatctttgttctactcctccttgcctctcctcccccagggggaacttcttgaaaagctcccggggctgaccccaccaccgccgaggcagactacccgacggctgcggatactctggcgaagttccgcctctacgagacgcgcgcgaggtcctaccctctccgcaccgccccgagagaagcgccggtctccaggtgctcaagaacgaccgctcccagcgctccgagctcaaccacaacgaggaccccgtctggtacttcccagcaggaggtcaagaacctcctccagcgcatctccgagggcaaccgctccactggcggccctacctctcccaccaaggcctctggcatcgccggttccacaagccctcggagccataaatatct

SEQ ID NO: 8331 - DNA, 463 bp, Oryza sativa
  Clone ID: uC-osflcyp177d08b1
tataactataacggaggcgagctcgcctccgttcaccggggctttctttgacatggacggggggtcgctgctcccgttcgcgctggcgctggtggcgatcccgatctcgctggcgctgctggaccggctgcggctggggcggatcccgccggggccgcggccgtggccgatggtggggaacctgtggcagatcaagccggtgcggtgccgcggcttcctggagtgggcggagaggtaccgcccgatcgtgtcggtgtggttcggctcgtcgctgaacgtggtggtgtcgacgtcggagctcgccaaggaggggctcaaggagaacgaccagctgctcggcgaccggccgcgcaaccgctccacgcagcgcttcagccgcaacgggatggacctgatctgggcggactacgggccgcactacatcaaggtgcgcaggctctgcaacctcgagctcttcaccccc

SEQ ID NO: 8332 - DNA, 389 bp, Oryza sativa
  Clone ID: uC-osflcyp177d09b1
ttcccttcactccgctaggggtttaccccgcgagggggggctttcgttcgacgccgccgggcggaggctcctctcccgccgcgccacctccttctcggcctccgctctcctccgccgcggcggccccggtgcgccggagtcgctgctgcgccccaccgtcgccgcggtctcgcgcgtcggcttccttcgcgggttcgcgcggcggccgggcggcgatgggtactccccgatgcggaccggtggcggcggaggaggaggcggaaacccagcgccgacggagatggccccgctgatccccgggtgcgactacgagcactggctcatcgtgatggacaagccaggcggggagggcgccaccaagcaccagaagaatgactgctacatcaaac

SEQ ID NO: 8333 - DNA, 465 bp, Oryza sativa
  unsure (1)..(465): unsure at all n locations
  Clone ID: uC-osflcyp177d10b1
taaactcacacattgccaattccctttcttggggggagtctggctgctgcaatggcttcgtcgctggccctggtagctctgctcctcgtgagctgcgccgtggtggcggcggcggcgaccaagtacaccgtcggcgacacgtccggctgggcgatgggggcggattacaccacctgggccagcgacaagaaattcaaaatgggcgataccctcgtgttcaactacgccggtggggcacactcggtggatgaggtgagcgcancggactacgctgcgtgcaccgtcagcaacgcgctccagagcgacagcagcggcacgaccaccggcaccctcaagaccgtcggcaagcactacttcatttgcgggatcgccggccactgcagcaactgaatgaagctcgtcttggatgatgccgcggcctattcagtcccagtcccaaaagctccgtgcaccacaccggcgact

SEQ ID NO: 8334 - DNA, 135 bp, Oryza sativa
  Clone ID: uC-osflcyp177d11b1
actcccggcccgacccacgccacccaaaagtgatttcactccacaggcagccaccaacgccggggggggggtgtattaaaaccagggggacctaaccccccaggaagaggggcagcaccggaggacatgggggag

SEQ ID NO: 8335 - DNA, 283 bp, Oryza sativa
  Clone ID: uC-osflcyp177e02b1
ggaaattacccttacattcctccctcttctttgccggggggcggactatttgtaccatccctagcgcgttacacgacgtcgcgcgccacggtcgccatcctcttctacatcctgacagccgccggcgccatcagcgcgggggcacaggccccagcggagtcgccatcgaagagcacgggagctgccacccctgcagaggcacccaccgccgcatcggcaccgaggaaggccggacctagtgccgcgccgacgaccaccgtggctaccttcccgcctgctggcg

SEQ ID NO: 8336 - DNA, 283 bp, Oryza sativa
  Clone ID: uC-osflcyp177e05b1
cggattcgttttgacaaaaaggggcgccccacgaaagggcgggggttgatataaaagggggggcgaaaactcacacaaggatgacgaggaaacacaagaaatgtggcagaagaagcgggagcaccaagaaaaagagggaagagaccagagaccaaccaggctctagctggagggatcctatgacgacaggaaacaaggcgaggaaaggggagaccaaacccccaaagctgaagacccgggagccgaacaaaacatatactcaaagggcgatgaagcctgccga

SEQ ID NO: 8337 - DNA, 164 bp, Oryza sativa
  Clone ID: uC-osflcyp177e06b1
cccacccgcactgttttttgtacatatggagaacacacggtctcgggggggtttataataaaaaagggcgccaattacaccacaattgttccaaattctgcctagaaggtcaatagctatgagcaagcatcaagtgaaaatatatggctttatcgggaacaaac

SEQ ID NO: 8338 - DNA, 508 bp, Oryza sativa
  Clone ID: uC-osflcyp177e07b1
ggaagttcaagagatgggctccgcttcgctggcgacggggtcttctttcagaggcgtgcctgccgtccctgcccgccggcggccgtctccgcctccgcctggctccaccaccccgcgctccgccgcgcctctgcaagcgcgccgggatctcattaccccttccagtttccctcttttttttcgtgtttggtctttgatttttttaaaaaaaattattgtttcaaatttgaagttgcttgcaattcgggcacttgttaccctcatatgcgtacgataagttgttgtagtgcaatttttttttcgttttctttccatatgggagcaaccttggaagtgaaatcatggttgataagggctttgaatttacatgggacaacattttgtatcatgacttcatgttcatgatcatctccttgaaatctctgaatggcagcagagcattcctaggaatttctcatcagcagtagtggttgtgacatggactataggcatttttaatttatttata

SEQ ID NO: 8339 - DNA, 428 bp, Oryza sativa
  Clone ID: uC-osflcyp177f09b1
gcgtttgatctcatctgagcgagcaggaacgcaagaggcgggggtagatttaagaggagtgggcgggatgggtcgccaagtggaagcagctgcacgaggaacagagaccatacaggatggagctcagagacggggaggccagtgacgatgaggaagagtacgacaccaaggaagttgagattgaagaggaggtacacgttcaacaagaagaaggctcattctagctggatcaggagtgagaagcttatgctagcatctgctgagatcttcttctgatgttgactgacttaagataactaatgacccctatgcatactcagctgtagagagcaagaacacaatagcttgagctctctgggcactactggcaggttgtacattctggcctaggacattacggaccaatgtcttcctagatggaaatttgc

SEQ ID NO: 8340 - DNA, 417 bp, Oryza sativa
  Clone ID: uC-osflcyp177f11b1
ataaaaaaagggaaggaatttttttctttttttggggggggtttacgcttattcctcacgcagctctcgcctcgcctcgccgcccgccactagagaggagagggagaaggaggaggaggcaaatcccagcaaaagaagatgcagatcttcgtgaagaccctgacggggaagaccatcaccctcgaggtggagagcagcgacaccatcgacaacggcaaggccaaaatccaggacaaggaagggatccctccagatcaacagcgtttgatattcgccggcaagcagctggaagatgggcgcacactggccgactacaacattcagaaggagtcaactcttcacttgggcctcaggctcaggggtggcactatgatcaagggtaagaccctcactggaaaagagattgaaattgacatt

SEQ ID NO: 8341 - DNA, 461 bp, Oryza sativa
  Clone ID: uC-osflcyp177g03b1
atggatactctgtaccagcggtggagctggctggaggggtggggtgggtattaaacgccgttcgagaaggacatccccgtcgcgcaccaatctccaagcagggacgccgccggcgccgccatgaacgacgacgaacgcccgccgccgtcggcggtgctccggtccaggtccagggccgacaggctcgcctgcgtcggcgacgacgacgacgacgccgacaggcagctcgggtactcggcgaggcggtcattcacccgcgccgggaggcgcacgccggcgagggacgactacggcggcggcgcggcggcgttcccggggtacatggcgtcgacggcgtcggccaaggccaagttccggtccatgagcacgcccaaggagcgctccggcgccggcgcgggggacgcctactcggagcagtgcttcccgttcgccgaccgccttctggtcgcgatcccctccat

SEQ ID NO: 8342 - DNA, 55 bp, Oryza sativa
  Clone ID: uC-osflcyp177g04b1
ccggacctcaattaccgacccaccccacccgcccttttattttgcccaaccacac

SEQ ID NO: 8343 - DNA, 299 bp, Oryza sativa
  Clone ID: uC-osflcyp177g06b1
cgcgtgtcctagccgccagccgactcgaccagcgcccggaggcggtgcactccgccgtcggcgtcctcgacatcgtcggcttcacccctcatcggcaacctagtgcaggttgttttctgaagatggctgacgatttgggccctcccactgtgctccagaagatacatgggcagtccatgatgttcagcaagatcttaccttattctttgatgaagaatcccgtactctacaatgcccacaatttttacagtgtgcctctgaagtcatacaatgggatggatgggaacattgggttctta

SEQ ID NO: 8344 - DNA, 517 bp, Oryza sativa
  Clone ID: uC-osflcyp177g09b1
tattctaggccttcatctactgccactatcggggaaggggcaccttgaaatcctggacccgccagatcctcctgccaccgccatgtatctatgacagagcatacttgggcaggtacctggagatcagttcctatgctttgcttggggacgggtcgaacatctgcatctctgtaaaaggggtcggcacctattgtatggacatgcggagcttcacatggagccacctcggcaaatggatgctacccttcaccggcaaggttgagtatgtacctgagctcaagctctgggttggcatttctgccgacacccaagacttggctgctgctgatctctcatcgatgaattcccagccacagctactagctacttgtaaggagtttgaccagccagaggaatggaagcgatgcaaggattctcaacttgtcaaccttggctcgggcaagttctgcattgcaaggttctttcacaataagactccccaaggggacttccatgaattaattgggaagaacatact

SEQ ID NO: 8345 - DNA, 348 bp, Oryza sativa
  Clone ID: uC-osflcyp177g10b1
ttaaattggaaaaaaaaacaaaacacaccaagcgggatggttgcgacaatgggatcgctcaccaccaacatcgtcctcgccgtcgccgtggtggcagcgctggtcggcggcgggtcgtgcggcccgcccaaggtgccacccggcccgaacattacgaccaactacaacggcccgggggtccccgtcagggccacctggtacggccagccctacggatcctgctccaccgacaatggtggcgcgtgcgggatcaagaacgttaacctggcggcctacagcagggtgatctcctgcgggctcgtcccaatttttaaggtctgtaggaggtgcggttcttgcttcgaggtg

SEQ ID NO: 8346 - DNA, 311 bp, Oryza sativa
  Clone ID: uC-osflcyp177g11b1
ttttctattgaggaaaagaacattaactcatcaggggggggttcattggaaaaaaaggatgcttcaagatcacacaggaaaaatggttttgcaagaccactcttgaaatgtgcagaagatgttatactaaatggtgatgtcgcaagtacttctgggaaagccattgcaagtttacaggtggaagcttctgatttggcaaactttctcaccatggaccgaaatgggggttacagaggttctcaaactctcctaagatctgtactgtcagagaagcaggagctatgcttctctgttggctcattgctctggca

SEQ ID NO: 8347 - DNA, 346 bp, Oryza sativa
  Clone ID: uC-osflcyp177g12b1
ccgccttttatttttgtctctcgctcctaccaccccagggggggggttataattaaaagggggggtccgacacctccctggctccctcccaggggctcacgtacactgggggcctcccggtgaaccgccgctccagcagctcgagcttcggcaacctcagcaatggcggaaggatcacatgcatgcaggtggggcccatcgagggccattaagaacctcgagactctgtcgcacctgccgccattgaccgaggaggaccttttgaaccacatcgagtccctgctcccatctacgcgggcgcctcgcttggagctcaccaaggccggaatcctcctaccgtgagaat

SEQ ID NO: 8348 - DNA, 423 bp, Oryza sativa
  Clone ID: uC-osflcyp177h01b1
acgggcgcttttctgtgactacggcttcgacccgttcggggggggggggttggttgagtacccgcagttctagctggactcgctggaccagaacctggccaagaacaacgccggcgagatcatcggcacccggttcgagaccggcgaggtgaagtccaccccgttccagccctacaccgaggtgttcggtctccagcgcttccgcgagtgcgagctcatccacggccgctgggccatgctcgccaccctcggggccctctacgtcgagtggctcaccggtgtcaccctggcaagacgccggcaaggtggagctggtggatgggtcgttctacctggggcagccgctgccgttctcgatctcgacgctgatctggatcgaggtgctcgtcattggctacatcgagttccagcgcaacgcggagc

SEQ ID NO: 8349 - DNA, 288 bp, Oryza sativa
  Clone ID: uC-osflcyp177h08b1
cgccgttactcccccctcgccgagagagctctagggtggccgctgttgaatttttttttaattcggggggagagatttgaagaggcggcaccatgttggtctaccaggatctgcttaccggtgacgagctcctgtcggattcgttcccctacagagagatcgagaacggcatcctctgggaagtcgatggcaagtgggtcgttcaaggagctattgatgtggacattggtgccaacccatctgctgagggtggtggagatgaccagagtacatggtctgtgccggcct

SEQ ID NO: 8350 - DNA, 432 bp, Oryza sativa
  Clone ID: uC-osflcyp178a01b1
ccccatgtttccgccccccttcctctctccctccggcgggggtgttcacgcagggaacaagcgacatgggcgtctacaccttcgtgtgccgcaacaacggcggcgagtggaccgccaagcagcactccggcgagatcgaggcttccgccgctaccccatacgagctgcagcgccgcctcgtcgccgccgcctccgtggccgactctgcctacggcgttcagtcgtccttctccatggtcacccccagctccgtcgtgttccaggtgattgtcggtgctgtcggtggtggtgcaatgatggtgagcggaggtggcggcggtggtgctgctgcatctggtggtgctgctgccgaggctcccaaggaggagaagacggaagaggagaaggcagagagcgacgacgacatgggattcttcctgttcgactagaagt

SEQ ID NO: 8351 - DNA, 375 bp, Oryza sativa
  Clone ID: uC-osflcyp178a05b1
gctaggtggactttcaaaaaagaagaaaaagacacagggcaaaatggggaagaagtataagaaaggaagccacagaagttctgtgcttggtcttgcatggaacaaggaagtgaggaatgttctagctagtgcaagtgcagacacaactgttaaaatctgggatatagctgttggtaaatgtgcagtcactctagaacaccatgatgacaaggttcaagcagttgcttggagcccacagtcacctgaagttctgcttagcggatcctttgataaaacagttgccatgaatgatatgaaagatggtgggcagaattgtcataaatggtctgttgaagcagacgttcaaagtttagcttgggaatcacacaatgaaca

SEQ ID NO: 8352 - DNA, 210 bp, Oryza sativa
  unsure (1)..(210): unsure at all n locations
  Clone ID: uC-osflcyp178a06b1
ttcccggggggacccacgcggccggctaatatttgtccatcccggcaacaactggccacagggcggtgtggactactccagggccgcagatataccttggacccttaggcgnggagagcaccaccagatggcgagcacggggcgaccgatgctgctggcactgatcctattcacagtgacggtgtctatgctggagatgtactgggccaa

SEQ ID NO: 8353 - DNA, 525 bp, Oryza sativa
  Clone ID: uC-osflcyp178a07b1
ctttgttatggctttaagataattgatatcctaactagctcagctattgcacggcatactgcatctcttgctacttatgcgagaaacaaaatgctggaattgaagcatagcaatgagaaaaatgtttgcataatctatggacaagattttaaggcaaattatctgaaaatgggtccttcaatcacattcaatttgaaaagagaagatggcacatggtttggatatcgcgaggtggagaagcttgcctcattgtcaggaattcatttgcgtacgggctgcttctgtaaccctggtgcatgtgctaagtatgttggtttgtcacactcagatctagtttccaattttgaggctgggcatgttctgtgggatgataatgacgtaataaatggaaaaccaactggtgctgtgaggatatcatttggctatatgtccacaaacgaagatgcagaggaatttcttaagttcctgcagtcatcttttggtgccacacctgcagaattgaacaatggctacatggtgaatatg

SEQ ID NO: 8354 - DNA, 513 bp, Oryza sativa
  Clone ID: uC-osflcyp178a09b1
ctgaatgtgagagcaaggccgagctggacaggttctgggacgctcttatctccatcagggaagagattgcagagatagaaaacggcaaagcagatgtgcttaacaatgtcctgaagggcgctcctcacccaccgcaactcttgatgggtgacacatggagcaagccgtattccagggagtacgctgcgttccccgcggcatggctccggggcgccaagttctggccaacaactggtcgtgtggacaacgtctacggggaccgcaacctcatctgcacgctgcagcaggcgacccaggtggccgaggaagccgcggtcgcaactgcaaccgcgtaatctcgtccgagaaccacgataattgatcgcggcgtgcgaaacatccttaagaaaatataatgcatgcttcctgtaggagggaagcatcgtcatcttcctcgtcatcctttttgcagtgtatatactagctcatggcagcgcctgatcccccaccaccaccagtccaccacacacacac

SEQ ID NO: 8355 - DNA, 54 bp, Oryza sativa
  Clone ID: uC-osflcyp178a11b1
attcccgcctcgacccacccctccggctattatttgtccatcccggcaacaatc

SEQ ID NO: 8356 - DNA, 480 bp, Oryza sativa
  Clone ID: uC-osflcyp178b01b1
ctgttgggatggttttttggcgaggggagggggaatggggatacattggttcatatgtgctccgctctgcgccttattgagaatgtctttcaaaggtgaattagtttgattagacggaacggcaggaatcgcttagttcttacgcgcttaagaaaggttgtctacaggaggtttaagtcatatctgtccatcatggaatgcaatgttcaatttgaggagcagcctgtaccgataaatggaccctgctttctaattgccccacatagtgatgaatttgtttcatgcaccaagttgagttgatagagaatagagaccatgttttagattcttgaagaaacatatatagcgtgcttgaatatattatatatatcctatttgggtgagctgcaagtctgcaactaccaatgtatgttgttgatctgttgctgccttgctattctgaataaatgaacctttatgaactcagccaatccctgattg

SEQ ID NO: 8357 - DNA, 464 bp, Oryza sativa
  Clone ID: uC-osflcyp178b03b1
cccggcctcgacccaccgcagtccgagcactttgtctacctgagggccgcgacaaaagattggggggggattcttaaaatgacggggctcctggacccccacctgtccatggatagctgcaccatcgatggctacacggtccccgtcggggtgcaggccctgatcaactcctgggccatcggcagggacacgcgctactggggcgacgacgctgaggagttcgtccctgagaggctcatggatggcggcagcgcccttcatgtcagctctcaaggggagtgacttccagttcctgccattcggctctggtcgaaagatgggcgccggggtgaatctcccgatggtcaccggagaactaatgctggcgaacctcgggcatccgtttgactgggatctaccaccggggcaagaggggcgcgacactgaagggtcgcaggtgttccggctaggattccccccgaaaa

SEQ ID NO: 8358 - DNA, 474 bp, Oryza sativa
  Clone ID: uC-osflcyp178b04b1
tcttactcattcactgaaggagatcccaccaagatcagtccggggttggtcaagagtcgttgtagggatggtgttgaatggaagaagttctagtgatggctacaaagtaatgtggttagatattgatgggacttgcgaagtctatgactctacaaagaacgtgtggtcttgccctggaacttttcctccaagcatcaaacttccacttgctctaaatttgaggtcacaaccagtggcggttggcagcatgatatacttcatgtgcgcagaaccagatggtgttttgtcatatgatgtaagcaccgggatttggaggcaatttgccatcccactgccactgcatctgactgatcacacacttgccgagttccagggaagggttatgctggtgggtctgctgtgcaaaaatgcagcgacctgcatctgcatatgggagttgcagaagatgactctcctctggaaggaggtggacag

SEQ ID NO: 8359 - DNA, 463 bp, Oryza sativa
  Clone ID: uC-osflcyp178b07b1
cttcttcaagtcccagattgccaaatcggatcgggggggtaccttgtgattttctgtattctgtgtacatgctggagcatgaaaacgttccaggccagagagcttgttacagaggagtagttggtacgacacgcagatagcgtgcgtagcgatctctcgttttgggcagttacgcataccaattaactgcgacggtgctggtcctggctcatcagtttgcaggaaatggagggcgttgacctcggatgatgaactgtggcgcaagctgttcaacgacaggtggggagcggacgccgcagcgttctacgcgccggagggatccaagtcttggaaggacgtcttagccgtgcaagaccggtgcgaccgatacggactgggtgtcaggatcatcagggaagggaaggactactacctgatctaccagggcgagatccagaggtacttgggcttccgccaggacaca

SEQ ID NO: 8360 - DNA, 451 bp, Oryza sativa
  Clone ID: uC-osflcyp178b09b1
gttattctatgtcctgcatatagtagagactgtgagctgatattatgttttcagctaatcattaaggatgggaaatcttcatacaaattccatctctactgaccattcacttgctgcagcttttgtgatccttaagacggaacagataattgcttatttaaccacgttggcttctaacgtgtccattaggctttaagtttaacctgatgacatgccatatatttgggactttttagttgcccctatggcttatatgctgtgcctgtgggatgaacacgtcccaacattcacctcatttttttcactttgtcagctaatagccatacatgtttagctgattgttaagattgggaaatgtacgcttttcatactgtgttgtatatgctctgtttgcctgcttgaacatatcttgttttgagagtaaatacgttgccccgatggtggcaatggt

SEQ ID NO: 8361 - DNA, 187 bp, Oryza sativa
  Clone ID: uC-osflcyp178b11b1
aggcaggccccaggagaagacaccggggggggttagattatgataggacgaaactcatacagacccgctggcttaccccataactgaaacaacagtggaaaacaattgcctacacaggaactgacaagacccactcaggcacaactgaaacatggtactgacaggaagggccgaggaaacactgacg

SEQ ID NO: 8362 - DNA, 204 bp, Oryza sativa
  Clone ID: uC-osflcyp178b12b1
attgttttttgtagttctgaacatggaaacacaaagggggggcatttctgacggcccataacttttacagatacttcgtgatcccacactaactggatgagcaccgactaacattgctagccgtgatcctgcgagtacacactggacaggtacgcgtaaagttcctcaggtgaaagccagtgacactgatggtggatccactac

SEQ ID NO: 8363 - DNA, 353 bp, Oryza sativa
  Clone ID: uC-osflcyp178c03b1
ggctatttgtataactgcacaggatatcatgaagccaagggggggcttttaacactgcaaaggcggttacagaccctgatgagtatgaatcacttactttgggtagcttaccacccacctttcaagggatgaaagtctatgtcacagaggagcaagagctgattatggaaccatcttttaaatgggctgcaaacccaaatattactgttgctgtaaaagcctatggcttgaaagctactatccacattgtggatctacaagtatttgcatcacctcgcattactctgaagccattggtgcctacatttccctgctttgcaaaaatccttgtctcactcatggagaagccacat

SEQ ID NO: 8364 - DNA, 406 bp, Oryza sativa
  Clone ID: uC-osflcyp178c04b1
tggaatttctttaacatcactgatggatgttgagaggggggggggttttttcaagccagtgggcgggaaagctatggtggaacttgatgctgcacctttcaagaaatatgcatcgatgcgtgatgagtgggccctcaagaacagatacatcagccctggccccatccagttcagcggccctggaagtgatgactcgaaccatactttgatgctggaactcggtgctgcgctatagagatgcgtcctttactttgctcttacagtttttgggagtggagactggcactggagcagcctgcaggtctccatattgtgtgtgaaattgcctaaccagaagcttgatgggagccttctgcgtagccgactggatgcggactgtggtagcaaattagaaccgggttttagt

SEQ ID NO: 8365 - DNA, 486 bp, Oryza sativa
  unsure (1)..(486): unsure at all n locations
  Clone ID: uC-osflcyp178c09b1
ctactgcagaggctgcagaggaaaaaatatccatacttgaggaaaatgaaacattactcaaggacaatgaacgactcaatgctgaaaatgattccttgatgaagagcagggaaggagctaatagtcaggttgccgctttaaggaagtctttggaagctgcacacaaggatataaaagacaaggaaaaaatgattcaagacttgaggcagtcactggatgtccagaggaaggagctgaatgactgcagagctgaaatcacagccctgaagatgtacatcgaagggactcaatcaatcaaacaattgtttgttggaactagtgatggtgtaaagtcgcattcctttgctaattctgtgggagcatcatcattgaataatgaagatgaagattcaaaaggatctgaagccataacatataagctagcatcagcagtaaatattactgatgatacgcagaaagatcgccangttctagaaagtagcgctg

SEQ ID NO: 8366 - DNA, 548 bp, Oryza sativa
  Clone ID: uC-osflcyp178d07b1
gtgattctgctgttgctgatcaaacacttggtgaaagcagtctggttgatgaaactgaagatatcaatatgagctctgatgcctcagagcacaccagcataaacaacaattctgtcgaggatgaaacagggactgaagatgtgatgcaatttttcctgactaatgagagaatcccagaccaacgcatgaagatagaaatggatctatccattacggtgaatgatccgcataagcgtctgcatgtggctgtgtgttgggaggacagtggactggaccaatacaactttagttctttgaattctcttccagaagtttacaaagcggtgctgttttctaggaggccacaggacacatgttctctatatgcatgtctggaagcttttattaaggaagaaccattaggcccagaagacatgtggtactgcccaggttgtaaagagcatcggcaagctagtaagaagttagacctctggagattacctgaaatccttattatacaccctgaaagattttcatacagtcggtataccataaacaagctggagaca

SEQ ID NO: 8367 - DNA, 352 bp, Oryza sativa
  Clone ID: uC-osflcyp178d09b1
caccagctagttactagcgtcaaatgggggggcattttaccatcgtcaggtgcttgaaaataccatgttatgtggtggcaccgaatcaatgactggttagttgccttttgtttttgatgtgcacctttgctctattcaaccttgtgaggtataggtcaaatagcgaaagggcctctaacgtaatggctaaggcttccgagtagcattttcaggtcttggttcgatcccctaatttcgggcttgggtaaaaaaatcccctcgctgagtcccatccggtcttgggtatgtccttgccgtgacccctttggctgggcccttactgattgggcagaatggattttttcggttaaag

SEQ ID NO: 8368 - DNA, 327 bp, Oryza sativa
  Clone ID: uC-osflcyp178d12b1
tatattcctgccggagcagcttaaggacaggctggggggttttaaaaaaaagcaagcgggcttatccacaccaagaactatgtctatggcaagctcgcggggcacacaggccattctgtcgagaagatccatgaggacctgtctagggagcagcgcttcgacgccgatggggctatcgagaacgggagcatcgacacgtgcggcaggcacgctcggagcaagacagagggctccactgctcaaaggagggacatgcggaacctgggacttggctaatgacagacgaacgaaatcctgtggtatgagaagttcatgagcatggggatg

SEQ ID NO: 8369 - DNA, 486 bp, Oryza sativa
  Clone ID: uC-osflcyp178e01b1
acaagcactctagcaatggcttctgaggttgtccgcgggagggacgcctagctactaaaggcacaagccgacatatggcggctcagcctctcctacctcacgcccctgtcactgaggtgcgccgtggagcttggcatccctacggcgatctaccgccatggcggggctgcctcagccgctgagctggtcacggcgctgtctctcccctccactaagctgccgttcctccgccgcctgctgcggctcctcgccgcgtcgggcgtgttcaccgtcgacaagcagagcacggaggaggagcggtaccgcatcagccccgtgtcctacctcctggtggacggcatccctcacgaggaccacatgaaccacaccgctctggtgctcacctgcacctcgacgcgctacatcgaggcggggatagggctggccgaatggttaagagggacctggtcacgtcaccgttcgaggagctgcacgggcgactctgtt

SEQ ID NO: 8370 - DNA, 359 bp, Oryza sativa
  Clone ID: uC-osflcyp178e04b1
gctgatttttcaagacaaaaacaagtacaacacacgggggggctatttgtagtgcgatgtaccatcaaggacatcactggccaaatcatatctgctagtatagcgggtgatatggatcttgcttctgcctactcgcatgagttgccacgatatggtcttgaagctggcttgaccaactatgcagctgcctactgcactggccttctgttggctcgccgtgtgctcaagatccggggttcggatcaggagtacaagggcaatgttgaggccactggtgaggacttctttgttgagccagcctatgagaggaggcctttccgtgctctcttggatgttggccttatcaggactacaacagg

SEQ ID NO: 8371 - DNA, 519 bp, Oryza sativa
  Clone ID: uC-osflcyp178e05b1
attaatttttatattaattaaaaaagtaaatttaaccgggaggggtttatttaaaattttatttaattagaaactcattggatttttttaaaaaaaaattaatttttttgtaccttttgtatcagggttagtttaaaaaaaatgaaataattttcgaattttcgaattaaaaagatctaaaaatttaataaattttattattttataaatataaaaaattaatttttagaaataaaatgtttttcgttttttaatatatctaatttttttagaaataaatttaatttagttttaatttatataattttttttatttaatcattatataattattaaaaaaataaaattagggattagcttaattttaaatataaaaattttacttataaaaattttaaatatagatttttaaataattaatatttttaataatattataatttataatttttattttattttaaaaatttaatattattattttataaaaattttttaaaaatattttataattattta

SEQ ID NO: 8372 - DNA, 305 bp, Oryza sativa
  Clone ID: uC-osflcyp178e11b1
gagggccatgaccaaaaacagcaccgggggggcttatttataagttggggagggttatcactcaagcttccccacacacaatacattatgggccagatgcactcgcatcacatacctgggattgagaggaatcctaccactttcgacgcggtaggactactacgcatgctcccaagccaccctggggtcacagcgataatgagaaacaatcaattgcaagtgagattgctcactgggaacacctctagtgtgaccgtaggcatccatccaaagtgaattatagggaacaaaatgatcatgggaca

SEQ ID NO: 8373 - DNA, 339 bp, Oryza sativa
  Clone ID: uC-osflcyp178f02b1
gcggttagttggagaagccgacggagctcctccacggggggggcgttttgagcagctggatggctgttatcaaagcattctgcagggactatgccaggaagaaaggaagaacaactgtgagggaagatgaccccatccatgaccccgccccccaaggaagagcatcagcgcctgactcggcgaagacagaactcctgccacgtatccggtcctccatggataccaccactccggaagtcattaatcgagacggccggagctacatgtaccatcgcacaaacactgggaggccgatcttgccggggaccaagggcgccggcactatgagcatgatcaggc

SEQ ID NO: 8374 - DNA, 465 bp, Oryza sativa
  Clone ID: uC-osflcyp178f03b1
cagaatcgttagtatgtgatcgtcggggcagggaacggggggggttacttccacaggacgtccgtctagcatggcatggctgacggccgcctttgcatcgtctccaaggagccagctccaccatacgagcggtcagccttgaccaaaggctatctttttcctccggacaagaaaccggctcgcctacctgggttccatacatgcgctggatctggtggacagcgacagactgctgaatggtacaaggagaatggcatagaggtgcctgatgaggatccagctgtagcatttgatggcaaaacgcaaaccttaaagacttcatcggggaaagttctgaaatacggctcacttattatttctactggatgcgaagcatcgagaatacctgagaaaattggaggggaattacctggagttcactacctaccggatgctgctgatgcctgagctctagcatcctcattg

SEQ ID NO: 8375 - DNA, 453 bp, Oryza sativa
  Clone ID: uC-osflcyp178f05b1
ctttgttctatctgaatgctggaataagatatgtacaaggggggaatgatgtaatggcacccctcttctttgcatttcggagtgatccggatgataaaaatgctgaattcgcggaagcggattcattcttttgcttcgttgagctgcttagtgggttcagagacaacttctaccagaaactggacaacagtgctgttggcattcgaggtacactagccaagttatcacagcttgtagcaaagtatgatggagaactccagcaacatctggaaataactacggaagttaatccccagttctacgcattcagatggataaccttactgctgacccaggaattcaacttcgccgacaccattcacatctgggacacactattaagtgatcctggtgggccccaggaaaccttgctcagaatatgctgcgcaatgctgatccttgtccggaagcgcc

SEQ ID NO: 8376 - DNA, 303 bp, Oryza sativa
  Clone ID: uC-osflcyp178f08b1
gtcgtttgaagatttggttggtggactcaaagggggggggtgttgtctatacgaaaaactgtgttcagacattcaaaaaaccttgggcacatgagcatgagcccttgacaaccttgtacgatgctggtcagtccatcaaacctacagttttgattgggacgtctggagttggaagaacattcacaaaagaagttgttgagggcatggcttccttcaatgagaggcctatcatctttgcactggcaaattcaacctttcattctgaatgtactgctgaagaagcatataactggactcaggggc

SEQ ID NO: 8377 - DNA, 315 bp, Oryza sativa
  Clone ID: uC-osflcyp178f12b1
atttttatgcagcatggattgagtgatgccattggggggggttgtttgacaaagttgggcggtgacctacacctgggtggactgttctaccatctgtataaccagattgctacaaacaccttggagcgagtggcttctctgacacaagctgtccgcaaagagttgaaacgtgttttcgtcatcggattctcaatcattgtttttggtaacaaaattagcacacaaactggaattggcacgtcacattgacctagctggatctgctatggaccttcacattaaggctaacattgcagaggtcaaaaggaaaaagat

SEQ ID NO: 8378 - DNA, 246 bp, Oryza sativa
  Clone ID: uC-osflcyp178g01b1
gcgatttctttgcgcccatgcacgagatggtggccggggagggtctttttaactgggcggcgcctgttgagacgccgctctggaacctccgcatcaacggcaagcacaaccacgcgctcatcgacggcgccttccgcgacctcctcgacggccttgccacgagcagcgcaggcccttccttcgccaccaccgtaaccacgacgaccacaaccacgacgggatgctgctgcagcagcaccttcagca

SEQ ID NO: 8379 - DNA, 455 bp, Oryza sativa
  Clone ID: uC-osflcyp178g04b1
ccttgttgttcctattgacctatccaaggttctatttgggggcactgcaaacgtagtagagatgataccaaatccattactggataggatggagatcattgctatagctgggtatataactgatgagaagatgcatattgctcgggactatctagagaagaatacaagacaggcttgtggcattaagcctgagcaggttgaagttacagatactgctcttcttgctctcattgaaaactactgtcgagaagctggagtgaggaaccttcaaaagcagattgagaaaatttaccgtaagatagctctgcagcttgttcgccaaggagtatcgaatgagccagaccatgagtctgtcagtgcctctgtaactgaggaatctggtaatggtgattacaccacatcaaaagatgagattttgaaggatcctgctgtagatgatgctttaattcgccaac

SEQ ID NO: 8380 - DNA, 555 bp, Oryza sativa
  Clone ID: uC-osflcyp178g05b1
cccacttttccgggagaccttcggcgcccctccggcgaggcgagcttgtcgaaatggtcgcccacaggttccatcagtaccaggtggtgggtcgcgcgctgccgaccccaaccgatgagcaccccaagatctaccgcatgaagctctgggccaccaacgaggttcgcgccaagtccaagttctggtacttcctgagaaagctcaagaaggtgaagaagagcaatggccagatgcttgccatcaacgagatctttgagcgcaacccgaccaccatcaagaactatggcatctggctgcgctaccagagcaggactggttaccacaacatgtacaaggagtaccgcgacaccaccctgaatggtgcagtggagcagatgtacaacgagatggcctcccgccaccgcgggagggccccctgcatacagatcatcaaaacggcgacggtccacttcaagctgtgcaagaggggcaacaccaagcagttccacaacttcgagatcagttcccgctcgtgtaccgcaaggtcaggtccgctaccaggaagcttcggaccac

SEQ ID NO: 8381 - DNA, 435 bp, Oryza sativa
  Clone ID: uC-osflcyp178g06b1
cgcagtttcaaccaatcagcctgcaccattatccaatgggcttctactctatgttgactcgcaacctgatgagcttcttatctcatcccctgatgggcctgctcaattcaacagggcttgacatgaactggtttgagacacttaacagaattaaaaacatcccggtcaagcaaacatccgaagataacttggagactgctgttacgttaatgaagagcacttataacttttatcgggagagcccttgtggaacatttccttcaggtatcaatctctacacggttacaccatcacaagctcctattgaagggctaccgccaaccgctgctgtagttgagacgctcgacttaagtattccaagaaaactccttctgtgggtatacactctggctgattggtcggcactcaaatatatccttccgtagcaaaggattg

SEQ ID NO: 8382 - DNA, 473 bp, Oryza sativa
  Clone ID: uC-osflcyp178g12b1
gttctttgacctctacggcgccaacggcaaccccgtgggcaggtggtatttacctgacttcgaacatggctcaatcaaggatgattattgtgggggaagctcaggatacaactcggaattactgaagatcatggaaactaaccaatctcccccttgcaagcgaccgcggagagatcgaaaccgtgaaaaggcaccctcctcaaacaaaattgaagtcatggaacaagagatatggagagatttccctgaagatcttttcgaaactgtcatagcaaggcttcctgttgctgcaattattcgattccgcactgtctgccgaaggtggtcttcccttttgggctcagacagtttctctcgtcagtactctgaagctccacatggactgccatggttctatacaatcactcatgagaattcaaacaacaatgttgggatgaatgatcctttgctgaagaaatggcatcaccaatctg

SEQ ID NO: 8383 - DNA, 210 bp, Oryza sativa
  Clone ID: uC-osflcyp178h07b1
tttattagtggttcaaggacgcgggcgccaccgggagggtcttttttgaggcgcacggcatgttcccatggagcttgacaaataacgacgcctccgaacaacaagaccttgaacaaccggtgcacggaagacagaaacctcgccatggacacgcttctgagagagcccccgggccgagggtatatcccgcgggcttggttcgcttgggga

SEQ ID NO: 8384 - DNA, 361 bp, Oryza sativa
  Clone ID: uC-osflcyp178h09b1
cggcgagtacggttggaccgccaacaggggggggttttttaaagcccaggcgctgttggactccagcatgtgtgggtacatgtcctccaagaagaacatggagattaatcccgagaacgccataatggaggagctttccaagcgtgctgaggctgacaagaacgacaagcctgctaaggaccatgtcatgctgctgctcgagacggcgctgctcacatccggctttagccttgacgatcccaacacctttggcagccgcatccaccgcatgctcaagctggcccccgagcattgacgaggacgaggaggctcccgaggctgacactgacatgccccccctggaggatgaccctggcgagag

SEQ ID NO: 8385 - DNA, 425 bp, Oryza sativa
  Clone ID: uC-osflcyp178h11b1
cttgtgttccatgatggcctcatatttgcctggcggggggttattgaaataaaaaacttgtggaataccacaaaaaggagaaaacagagatgtgggtcgcctctgcatccagaatatatgctttctcagcttagtcataaagacatggactgtgaaactcctggagaatcacatggcaagaaacggtcaaatgagtgctcaaaagaaaaggttgttgatgtgcaagaacttgtggatgagctaattgtatttgagcaccttgactatggtaaggatacagtgtttccaaccagacctttgaaatgccatgcatctactagtagtgtgcaaattcctggtgccatcgagaaaaccttttgtcccactgatttgaaactatgtaatgacaaagaatcagtcggtgcatgttggtagtgccattggca

SEQ ID NO: 8386 - DNA, 377 bp, Oryza sativa
  Clone ID: uC-osflcyp179a05b1
gtgttatttatgccgtactaaagaagcctctggcggcgggtattggttacaacaaccggaaggctcaaaaggaggccatcaccattaagacggctaagaatgacaagacgacgaacaagaggcacgaggaagatggcagtgtatgcaattggggtgtgtcggttgatacagacaaagaacctggtgctgtgatcctagaggactcacatgagcatcaggggattttgggggacagagagagggcaccggatgttggaatagctcctgaaagccatgacaacctaaccggcgactgacacagagctgcatataggtagctatgactagatagggattggctgcttgttgagaaaccaaaaatttgtgcaataccctgc

SEQ ID NO: 8387 - DNA, 464 bp, Oryza sativa
  Clone ID: uC-osflcyp179a11b1
tcgcctttccgtcgccgccgccgccgccgccgagcgccggcgcgaccacctctcgcaaggggattttgtaggggtttctgatccgaggagcgggcgatgtcggactccgaggagcaccacttcgagtcgaaggccgacgccggcgcctccaagacctacccgcagcaggctgggaccatccgcaaaaatggctacatagtcatcaagaaccgcccctgcaaggttgttgaggtttcaacctctaaaactgggaagcacggtcacgccaagtgccactttgttgcaattgacatctttactgccaagaagctcgaagatattgtgccatcttctcacaactgtgatgtcccgcatgtgaaccgtacggagtaccagctcattgatatatctgaggatggatttgcgagtttggtaactgaaaatggccacccccaggatgaccttaggctccctactgatgatac

SEQ ID NO: 8388 - DNA, 133 bp, Oryza sativa
  Clone ID: uC-osflcyp179a12b1
ctctagccatggcgagagcggcagtggctcggcagggcttctttacgccggcgttggaggaggcgccaccgccttcctcacccaggccgtggcggtgatctagtccgacgaccaatccgtggtcgtggaagct

SEQ ID NO: 8389 - DNA, 434 bp, Oryza sativa
  Clone ID: uC-osflcyp179b02b1
cgattacttgagcctcgacggcgacgaccccacgcgggcggttgagatgaacgcgtggcggctagccggggacatgacccacctcctcagcgtggtggtgctcctcctcaagatccacaccatcaagtcctgcgcaggcatatctctaaagacccaggagctatatgcacttgtgtttgctgctcgttacttggacctgttcattcattttatatctctgtataacactgtcatgaaggtggtctttctggcaagttctttctcaatagtttggtacatgaggcggcataagattgtccgaagaacctatgacaaggatcatgacacctttcgtcatcacttcttagcggtgccatgtttggctctggccctccttattaatgagagggttacttttagagagggtatgtgggcattctccatatatttagaag

SEQ ID NO: 8390 - DNA, 519 bp, Oryza sativa
  Clone ID: uC-osflcyp179b05b1
ctagggttttgttggcccccattcctcccccaccggggggttctcccctccgccggtcgcgtcgccgcctttttcccctatggcgctgccgaatcaggggaccgtggattaccccagcttcaagctggtcatcgtcggcgatggcgggactggtaaaactacatttgtgaagaggcatctcactggagagtttgaaaagaaatatgagccaaccattggtgtcgaagttcaccctctagattttaccaccaactgtggtaagatccgcttctactgctgggacactgctggacaagagaagtttggtggacttagggatggatactatatccatggtcaatgtgcgataattatgtttgatgtcacttcaaggctgacttacaagaatgttccaacatggcatagggacttgtgcagggtgtgtgaaaacatcaccattgtcctgtgtggaacaaggttgatgtgaagaacaggcaggttaaagccaagcaggtcacattccacaggaagaagaatctg

SEQ ID NO: 8391 - DNA, 497 bp, Oryza sativa
  Clone ID: uC-osflcyp179b09b1
tcgactccaagtccaccatcggcgtcgagttggccgccaaatccctgcagatggagggcaaaacaataaaggctcagatctgggacacagcaggacaggagagatatcgtgccatcacaagtgcttactaccgtggcgctgttggggctctccttgtttacgacatcacaaagaggcagagcttcgacaatgtccacaggtggcttcgtgagctccgcgaccatgccgactcgagcattgttatcatgatggtcggtaataagtctgatttgattcatctaagggctgtctccgaggatgaaggtaaggcattggctgaaaaggaggggctgttttttcttgagacatcagctatggaggccgtgaatgtggaggaagcctttcagactatcatcacagaggtctatggcattgttaacaggaaagcactggccgccaagaagcagctgctgcttttgctccgttgccttccagggttaaactatcagcattgacag

SEQ ID NO: 8392 - DNA, 505 bp, Oryza sativa
  Clone ID: uC-osflcyp179c01b1
gtttgattaacccagaccgcattgagtgctatgcgggaggggttttgtttaaaggcaatgttctggaaccgcaagggttaattgagatcaagttcaggtcagaggaactccaggattgcatgagtcggcttgacccaacattaattgatctgaaagcaaaactcgaagtagcaaataaaaatggaagtgctgacacaaaatcgcttcaagaaaatatagaagctcgaacaaaacagttgatgcctctatatactcagattgcgatacggtttgctgaattgcatgatacatccctcagaatggctgcgaaaggtgtgattaagaaagttgtggactgggaagaatcacgatctttctttctataagagattaccgaggaggatctctgaggatgttcttgcaaaagaaattagagctgtagcaggtgagcagatttcccaccaaccagcaatcgagctgatcaagaaagggattcagcttcacatgcagcttaatgggatgatga

SEQ ID NO: 8393 - DNA, 403 bp, Oryza sativa
  Clone ID: uC-osflcyp179c02b1
gaaacatatctagcgcgaatagcaaagatcgagcccgcgggttcattgaaactgcttgggcgcggaacccgtccaagaacacccccaggaatatcataaggacgagggtccagacccgcaagggccagcccaccccgttccagccctacaccgaggtgttcggcctccagcgcttccgcgagtgcgagctcatccacggccgctgggccatgctcgccaccctcggcgccctctccgtcgagtggctcaccggcgtcacctggcaagacgccggcaaggtggagctggtggatgggtcgtcgaacctggggcagccgttgccgctctcgaactcgacgctgatctggatcgaggtgctcgtcatcggctacatcgagtttcagcgcaacgcggaagctggacc

SEQ ID NO: 8394 - DNA, 407 bp, Oryza sativa
  Clone ID: uC-osflcyp179c05b1
gtccaattttattgtattatttaaggcctaccgcgggtgggtctatacactttgaggggcagcggccggccatcatcagtgatcctctacaatcatcgactttcagcaaattaagatggctgctgccttctcctccaccggtggagctccggcgtccactccgaccaacttcctggggaagaagctgaagaagcaggtgacatcggcggtgaactaccatggcaagagctccaacatcaacaggttcaaggtgatggccaaggagctggacgagggcaagcagaccgaccaggacaggtggaagggtctcgcctacgacatctccgatgaccagcaggacattaccagggggaagggtttcgtcgacttccttttccaggctcccacgggtgatggcaccccacgag

SEQ ID NO: 8395 - DNA, 510 bp, Oryza sativa
  Clone ID: uC-osflcyp179c10b1
gaccacccttggctgcatcatcgcccctctgacgtgttggctctactggactgttttcgatatcggcaatcctgatggcatgttcaaggctccatatgccggcatctaccgtgagatgtcaatcctgggtgtcgaaggattctcagcgctgccccaacattgcctggcgatctgctcggtcttctttgtcgcagctattttgatcaacctcctgcgggacgtcactccgaagagcatctccaagttcatcccgctcccgatggctatggctgtcccattctacattggggcgtaccttgcgatcgacatgttcgttgggacggttatcctgtttgtctgggagagggtgaaccgcaaggaatctgaggactttgcaggcgccgatgcatctggtttgatctgcggtgatgggatctggagtgttccatctgcgatattgcccatcatgaggaatgaccaccaatgtgcatgtacttcaagccatccctaccagctgaaaatagcgcaaat

SEQ ID NO: 8396 - DNA, 449 bp, Oryza sativa
  Clone ID: uC-osflcyp179d09b1
taggtagctatatcgtcgtcattaattggagctagctagggaggcagcaggcagagcgcaggggggcggccgggcggcgagggaaccatgagcaaaggtgctatcatcggcgcttccaccgtgctggtggtggcggtggtggcagccgtgtgcgtggtgtcgttcaagaacggcggcggcggcaaggaggatggcgagctgtccacgtcggtgaagtcggtgaaggccttctgccagccgacggactaccagcagacgtgcgaggaggagctggggaaggccgccggcaatggcgccagctcgccgacggacctggccaaggccatgttcgccgtgacgtcggagaagatctccaaggccatcagcgagtcgtcgacgctggaggagctcaagaacgacaagcgcacgtcgggcgccctgcagaactgcaaggagctgctggagtatgc

SEQ ID NO: 8397 - DNA, 486 bp, Oryza sativa
  Clone ID: uC-osflcyp179e02b1
acactcctcatccccaaccaaatctcatcaccatcgctggcatcaatcgacacccatgggcgtcgccgactccgactccgactcccccgccgccgccgccgctcgccaccacgacgaccccaccctccccgcattcgcctccttctcgctctccctctccctccgcacccccgcctccccctccccggcggcgctcgcctccgtcccttccaccatccacctccccacccaaatctccacgctcgccgtctgcctccacccctccgcctccgcctccgcgtcaccctcctcccgccgacgcctcaacgccgccgccgccgcgtcgtcgctcctcgccccgctcccggcctccacgccgggcctctcccgctccttcccttcgggcgcgcccgcggcggccgggcggcgccgcacgctcgtgtggttccgcgccgacctccgcctccacgaccacgagcccctccacgccgccgtcggggcgtcgcc

SEQ ID NO: 8398 - DNA, 301 bp, Oryza sativa
  Clone ID: uC-osflcyp179e06b1
gattaacttgaggtccttcaagtactcctgggttgtcgggtttgataaggccttgcgttagagaggcctcaccatcgatattgccctgtggaagttcgagaccaccaagtactactgcacggtcattgatgcccctggtcactgtgacttcatcaagaacatgatcacgggtacttcccaggctgactgtgtcgtgctcatctattgactccaccattggtggttttgaggcttgtttcttacacttttgtcttgacttcttgatcccattaaggaccatatttatttcatatattttcat

SEQ ID NO: 8399 - DNA, 238 bp, Oryza sativa
  Clone ID: uC-osflcyp179e11b1
cggaatccgaaccctagcctggtagggtgggggcactatggggtgggcggcgcggttcctcacggcagtgtccttcctcgccgccggcgtgctcttcgcgccggacgctctccttggtggctccggccgctccggcgccggggtctctgcggttaggctggctcacgtcctctgcttcgccaccgtctggggcgcctctctctgggtcactcttcttcgttctgtattgtcctgttca

SEQ ID NO: 8400 - DNA, 247 bp, Oryza sativa
  Clone ID: uC-osflcyp179f02b1
ccataactataaccgaagcttccccatctcgcgtgaactggtgagcattggaagaacaaggcgccgtgccggatttagccccgcccccctctccggggtatcccccctcctctcctctgggtttgattggagtgaggtgaatcggtgaggttgtggctcggttggcgtccggatcacacggctgcacatgcctcttctcttcttaactcctctttttctgatcttcctcgtgggggaatctacttac

SEQ ID NO: 8401 - DNA, 336 bp, Oryza sativa
  Clone ID: uC-osflcyp179f08b1
tcgaggctgtcgaaaatctctcctggcagagtgaaggtggcctatcatgagtccatgggtgacagcttcagtcactacactgcacctgagctgtacagaaacgaaatattcgacgcaagcgtcgacgccttctcatttggtttcatcctctatgagatggttgaaggaacacacactgtacatgggaagtcatcagaggaatctggccacacaattcgatatgatgggatgcgtccatcgctgaagaacaagctcaggggatatcctccagatttcaaagcgctgatcgaagaatgctgggatacttagggtatagcaaggccaacattttcagag

SEQ ID NO: 8402 - DNA, 325 bp, Oryza sativa
  Clone ID: uC-osflcyp179g01b1
atatcccaccagatataccgacagggaggggtttgaatatattgagccgtgtttaggagatggtccgtacgatgatgaccggcaccaggtctatactggttatgggcctgcagaaatacctcgtcaggaaggtggagaggaagatatctacgatcaccggcgagcatgaagaagccctacctttacaggcctgggacggtggcgctcctcgagaaccgaaggtaccaaaagagtactgagctcctgattcgaaagctcccctttccagcgccttgttcgttagatcccgcaggatttttaagatcggcttccgctttcagagtca

SEQ ID NO: 8403 - DNA, 499 bp, Oryza sativa
  Clone ID: uC-osflcyp179g11b1
tgggaagtcctaccgtgacgccgacgagcacgcgtgccggctctccgtgttcaaggccaacctccgccgcgcgcgccgccaccagctgctcgacccctccgcggagcacggcgtcaccaagttctccgacctcaccccggccgagttccgccgggcctacctcggcctccgcacgtcgcgccgcgccttcctgcgggggctcggcgggtccgcccacgaggcgcccgtcctccccaccgacggcctccccgacgacttcgactggagagaccacggcgccgtcggccccgtcaagaaccagggatcgtgcgggtcgtgctggtcgttcagcgcgtcgggggcgctagagggagcgaactacctggcgacgggcaagatggacgtgctctccgagcagcagatggttgattgcgaccatgagtgtgattcatcagaacctgatttatgggatgtggatgcaatggtggattggtgactaacgccttcagctatcttttga

SEQ ID NO: 8404 - DNA, 416 bp, Oryza sativa
  unsure (1)..(416): unsure at all n locations
  Clone ID: uC-osflcyp179h03b1
ccatgggctcagcgcataaacaagaatcggnatcgggagcaattgctacgggggagaagacgactcgagcggggagcgagtcctcaggccaccattgggcgggttacagctgcagcgcaggagaggccagcagcccccgcctcccgctccggcatcgccctcccccgagagacttccgccgctacatcatcttcgggtgcccttatcgccaccccaagaagccgaaagcacccgcaaaagacaaagtccaagagaaagtaccacagcagaccatgattgctagctggggcatggccaattatgttgaatataatcaagtgaagaacatttttcaggagattggtgagattgttggtatttatttcagtagcacgaggcatctcgcagttgttgattttttctacagaacaagctgc

SEQ ID NO: 8405 - DNA, 484 bp, Oryza sativa
  Clone ID: uC-osflcyp179h07b1
aagtcttaggtaggtcactgttggtggcacgtttttgagaagtttatgatctgcatgtccacctaagatatccagtcaagtgctaaaaaggtcacaaaaatgggaggcagaaaggacaatcatgactcctcaaatgccgacaaagggttccatggagcgtatccaagcggttaccctggtgcatatcccctaatgcaaggataccctaattcacctggacaatatccgactcccggtggataccctagtgcaccaccgggacaatacccaccagccggtgggtaccctggtgcacaatatccaccaagcggttaccctccatcacaaggtgggtacccttcaggagcgtatccaccatcaggatatccacaacaaccaggctacccgccagctggttacccaggtcatggccatggtccacccatgcagggaggtggctatggttcaggctccctctgcttttgagctcttatttgcccgaggc

SEQ ID NO: 8406 - DNA, 384 bp, Oryza sativa
  Clone ID: uC-osflcyp179h09b1
ttgttttgcgagaggcatacctggatctcagggacccggtacaaggagaagcgcatgactaatatgggaaagacgacattgcaacggaagcgggaagggatgcaagagcaactatggcagactgggttggtagagaaccatctgaggattacattgctcaattggtgacagcatccatacatggactcgatatataaggagacgaagaagacactgatctaagggaggtggaagccaaaaatcctgtggtacaagaagatccggaggacaaacttgcttagacattgtatagcacattgcacggtaatggacaaggggacatagaggaacttgcgcacaatgcaaaagctgaactgtccagactatctaatgcacagcttgggg

SEQ ID NO: 8407 - DNA, 352 bp, Oryza sativa
  Clone ID: uC-osflcyp021a04b1
ctcaatgaaagttacagcaccatcaattcgtgaggctgtttcaaaaatcctgaagcccaatcctgaacttgctgactcaatatacaagaagtgtattggtttgagcaattggtatggagtgatcccagcactgtggccaaatgcaaagtatgtgtatggtatcatgacaggatccatggagccatatctgaaaaaattaaggcattacgcagggaacttgccacttataagtgctgactatggcgcatcggaaggatgggttggctctaacatagaccctactgtgccaccagagcaggtgacatatgctgttctcccacaagttggttattttgagttcattcctttggag

SEQ ID NO: 8408 - DNA, 525 bp, Oryza sativa
  Clone ID: uC-osflcyp021a06b1
ctgatgctattgttgccacccacgagcctcctgctgccactgaagctgctgagcctgctgagattgtccccagaacaagtttagcttccaccatagctgagtccttcaaacaaatgatcttcccttcatgcgatccaaatctgctacaagaaattgatacccagaaagtaagttggaatccgcacaagcattgcttggcatttgtatctgggaagaaccaagttacagttcatgactttgaggagccagataataaagaatcctacattctaacaagtgaccatcaaaaggatgttaaagctgttgaatggaggccaaatagtggaaagatgattgcagttgggtgcaagggagggatatgcctctggtcagcatcatatcctggcaacgttgcatctgtgaaatctggtgtcacctcttcttcctttggtgcctttcctagaggttctggtggtcaatggatactcgtggacattctcgtggttcttctgctgagctagttagcgcactttgttggaaacccga

SEQ ID NO: 8409 - DNA, 184 bp, Oryza sativa
  Clone ID: uC-osflcyp021a07b1
ttcttttacacctattaggcttcctgccctgtgtgagccggtgtagctaagcctcgtctttcgacaccagccacacctcgttcgtagcccttacgcttatctatattggtcaagtctaccttcctagggcataccatcactccattggtccgcgcaccttctacgaggcgtattgttctggcag

SEQ ID NO: 8410 - DNA, 359 bp, Oryza sativa
  Clone ID: uC-osflcyp021a09b1
acctacccggactgaatggctggttcgacccacgcgttcgttttaactaaagagaaggccaatccacgggaggacctctaaagacaactccgccctccaccgccgaaccacggcggaacgcgccctactctacacggagctcgggtacctcctagtgcctcaatcacactaacaatctggagcacctgcgtcatcgtcgaaagactgcgcaaacaccaatacagtcttgacagacaaatgggaacccgactccccgaaaacaaaaccccacctaaaggactacaaagaggacctctacggctgcgggccgggggggctcatcctgctgctaaaaaccaataaacaacaggaccctttcc

SEQ ID NO: 8411 - DNA, 510 bp, Oryza sativa
  Clone ID: uC-osflcyp021c02b1
atccacgcgcctcctcctcctccgccgccgccgccgccaccgcagcatcagccatggccgaagtggagctcccgcagcaggaggtcaagctcttcagccgctggtccttcgaggacgtccaggtgaacgacatctcgctggcggactacctggcggtgaacccgacgaagcacgcgacgtacctgccgcacacggcggggaggtactcggcgaagaggttccggaaggcgcagtgccccatcgtggagcgcctgaccaactcgctcatgatgcacggccgcaacaacgggaagaagatcatggccgtgcgcatcgtcaagcacgccatggagatcatccaccttctcaccgacgccaaccccattcaggtcatcgtcgacgccatcatcaacagtggccctcgtgaggatgcgacccgtattgggtctgcgggtgctgtgaggaggcaggctgtggatatctctcccttgaggagggtcaaccaggcaatctacctcctcaccactggtg

SEQ ID NO: 8412 - DNA, 356 bp, Oryza sativa
  Clone ID: uC-osflcyp021c07b1
acaagggaacacctaatgaacttatcatcaaaacagtggtcatttgatacatggaatgcactcagctgagattactttgtagtcatattttcatacaggtgggtcctttgtatagaaaaaaaggggtagtcttacactaagactaaatgaaaacagagacatctaagctacctcaagactttctcagctgcgtacttctctactttcattggcctgttccttcttctaatgttttcgatgttatcgcgctcgacttcatcaacaagaataatttcaggttcatcatcatcttcataaccagcgttctccatttcacccttgtcattccaatccttctccggcttctgttcctcttt

SEQ ID NO: 8413 - DNA, 485 bp, Oryza sativa
  Clone ID: uC-osflcyp021c08b1
ctgacgcggaggcgctagggttttgctgctcccacaggtaaggaggcattgaaggtttggtgaggcagcgaagatggttctcaagacagagctgtgccgtttcagcggcgccaagatttacccagggaagggtatcagattcatccgtgcagactcccaggtgttcctgttttcaaactcgaagtgcaagcgctacttccacaaccgtctgaagccagccaagcttacatggacagccatgtacagaaagcagcacaagaaggatattcacgccgaggcagtcaagaagaggcgccgcaccaccaagaaaccgtactcccggtctatagttggtgctacccttgaagtcatccagaagaagagagctgagaagccagaggttcgtgatgcagcaagggaatccgctcttcgtgagatcaaggagcgcatcaagaagacaaaggacgagaagaaagcgaaaaatgcagaggtggcaaaatcgcaaa

SEQ ID NO: 8414 - DNA, 383 bp, Oryza sativa
  Clone ID: uC-osflcyp021c10b1
gttcctttcttcagacaaaggctttgcctttccttcctcttccaccatcctgccacaagaagcaagaacctctcttaatttgagcaagaaaccattcgtcacatcaacggaggaagcagctatagtttgattgattggttgatcgatcgatgctgggcggcggcaagatgaagggtggggagacgatgggcggcggcggcggcagcggcagcagcagcattagcccgctggtgtcgttcgtgctgggcgccgccatggccaccgtctgcatcctcttcgtcatgtccgccagcccgggacgccgcctcgctgacatctccgcctggagcaacgccgacgacgcgccgccgttgccgctcccgttgcaagacgccgccgtcgac

SEQ ID NO: 8415 - DNA, 137 bp, Oryza sativa
  Clone ID: uC-osflcyp021c12b1
ctcgttttacgcctagggagcagtcaatgatgggccgggccaactaagactaccgcgccgttctttgacccaaggacccttgcatatccggtttcatccgtggagccgacacgaatccatcgaggaggagccttctc

SEQ ID NO: 8416 - DNA, 444 bp, Oryza sativa
  Clone ID: uC-osflcyp021d02b1
gtcacttccatctcattctcctaattgtcatcactagcttctagctagcttaattaattaattagccatggcggaggagaagcaccaccaccacctgttccaccacaagaaggacgacgagccggccaccggagtagactcctacggcgagggcgtctacacgtcggagacggtgaccaccgaggtggtcgccggcggccaggacgagtacgagaggtacaagaaggaggagaagcagcacaagcacaagcagcacctcggcgaggccggcgccctcgccgccggcgccttcgccctgtatgagaagcacgaggcgaagaatgacccggagaacgcgcacaggcacaagatcacggaggagatcgcggccacggcggcggtcggcgccggcggctacgcctttcacgagcaccacgagaggaagaaggaccacaagagcgccga

SEQ ID NO: 8417 - DNA, 469 bp, Oryza sativa
  Clone ID: uC-osflcyp021d09b1
gtagagaaacatctagagtgaataagaaagatggggttcgtccgtgccctgttcctgctggcgatggtgtgcgtggcggcgcacgcgaaggactaccccaaggaggagggcgcgaaggcggaggggccggccgccgcctcggggggcggcggcggcggcagcacccacgacgtggtgaagctgggcggcaagggcgactgcaagacggacagcaccaaggcggtcaacgaggcgtggacggcggcgtgcgctggcaccggcaagcagacgatcgtcgtccccaagggcgacttcttgacgggtcccctcaacttcaccgggccatgcaagggcgacatcgtcatccagctcgacggaaacctgcttagctccaccgacctcgccttattcaagtcgaactggatcgagatcatgcgcgtcgaaagccttgaaattagcggcaagggcaagctcgacggccagggcgccg

SEQ ID NO: 8418 - DNA, 472 bp, Oryza sativa
  Clone ID: uC-osflcyp021e08b1
atcggcgcttgcgagaggagagagatggcccgtaccaagcagaccgctcgtaagtccacaggaggaaaggctcccaggaagcagcttgcaaccaaggctgctcgtaagtctgctcccaccactggaggagttaagaagccccaccgttaccgccctggaactgttgccctccgtgagattcgcaagtaccagaagagtactgagcttttgatcaggaagctgcccttccagaggcttgttagggaaattgcacaggacttcaagaccgatctgcgtttccagagccatgctgtccttgccctccaggaggctgcggaggcataccttgttggtctcttcgaggacaccaacctgtgcgctattcatgccaagcgtgtgaccatcatgcctaaggacattcagctggctaggaggattcgtggtgagagggcttaaattcccctcggcgactcctttgacaatgaagcatgcg

SEQ ID NO: 8419 - DNA, 438 bp, Oryza sativa
  Clone ID: uC-osflcyp021e09b1
ttcgttgaggtcaaggtcgacgccaccatgttcgacggcgccgccgccccgcccccagacgcgcccctcttccgccgcgtcgagtcgctcgagcgcggcccgcgcctccacctcagcctcatcgtcgaggtctcccgggcggaccgcgtcctcggcttcatctgctccgcctggcacgacgaactcgtcgtccgccacgtcctcactctccgggacgccgatggctccagcaccagcagcggaggccgcgacttcgtcaagctggaggctagggagagggagtcggcgaggaaattcttgcaggagagggaggtggatgacgagcttgccgagttcttgcacgactacatggcgaacaaggaaaagatggagcttctccggtggttgaagactgtcgaatcattcggcgggaagttggcacaggagaagcagataaat

SEQ ID NO: 8420 - DNA, 458 bp, Oryza sativa
  unsure (1)..(458): unsure at all n locations
  Clone ID: uC-osflcyp021f02b1
tcacacaccactccatttctgagctcttctagtttgagtgagagagcagcagaagggagtagtgcaagatgccgatccgcaatatcgccgtggggagccaccaggaggtgtaccacccgggtgcactcaaggcggcgttggccgagttcatctccaccctcatcttcgtcttcgccggccagggctccggcatggccttcagcaagctgaccggcggcggagcgacgacccccgccgggctgatcgcggcggcggtggcccacgccttcgccctgttcgtggcggtgtccgtcggcgccaacatctcctgcggccacgtgaacccggccgtgaccttcggcgcctttgtcggcggcaacatcaccctgttccgcggcctcctctactggatcgcccagctcctgtgctccaccgtggcgtgctttcttctccgctttccaccggngggctcgccaccg

SEQ ID NO: 8421 - DNA, 458 bp, Oryza sativa
  Clone ID: uC-osflcyp021f03b1
ccgagttcggctcccccgaggagtttctcgcccaggtcgacttcttgcttggcaagcaggcctactccggcaagacagattccgagggtgggtttgagtcggacgcggtggcgacggcgaacatcctggagagctcggcgccggtggtgggagggaagcagtactacagcgtaacggtgctgacgaggacggcggacggcgactagggcggcaagcaccagctgatcacggccaccgtcaacgacggcaagctgtacatctgcaaggcgcaggccggcgacaagaggtggttcaagggcgccaggaagttcgtcgagagcgcagccagctccttcagcgtcgcatgatcgtcgaaatctctatctcagcttctctttaatccctagcgaatcaaaatcaaatcaatcgagttcgttgctcagagagatgcagtgcacgcatgtgtgtgtgcgtgtgtg

SEQ ID NO: 8422 - DNA, 422 bp, Oryza sativa
  unsure (1)..(422): unsure at all n locations
  Clone ID: uC-osflcyp021f05b1
gtagggtggtcgatcagtaggtggaaaggaggaatcgaggagatggacggcgagattggggaggacatgctcacggagattctggtgaggctgccgtacaagtcgctggcgaggttccagtgcgtggccacgtcgtggcggcgcctcatctccggcgactacctccgccggaggctgccgctcatcacctccggtgtgctgtaccaggaaggccggggcggcggcggcggcggcggcggcgaagggaggaggaggcaggcgtacacgtacgcgtgcgcgtcgggngtgtggtgaccacggctgctgcgtggcggaagccgacatggtattcttccccggtcacgagacgtccaccatcatcgacgggtgcaacggcatgctgttgtacctacgcatcgcatccggcggcggggtttcacgtt

SEQ ID NO: 8423 - DNA, 408 bp, Oryza sativa
  Clone ID: uC-osflcyp021f08b1
ttgttttagggcaacacgaggccggagactaaacggcattctgattattcacaacgacttctctcctatccatgatggcttcggtccaccggcccctctctgccatggcagctgccgcctttgccgccgtctcctcccttgagctgcctgacaggctgtctcaccacaagttgcctgacacaaccgtggatgccgaatctgtcgtctcgattccagccagcaggcccgatgtatcagcagcaccttctgcttctgccatgtctcgcctgcacttcctgccacgcaatctgcagacttcgcacccggctaaagcgcctcctgcatctttgggtgtcatccacacggtttaccactatgcaaagtttgccaaatactactcggaagaagagggcaggaccactgcgatgc

SEQ ID NO: 8424 - DNA, 414 bp, Oryza sativa
  Clone ID: uC-osflcyp021f09b1
gccgaacgcccgctgctccaacggccgcctcgtgatcgacttcctcgctgaggcgtacgggctgccgctgctgccgccgtcggcgaacaagggcaccaacttcagccagggcgccaacttcaccgtcatgggcgccaccgccctcgacctcaaatacttcaaggacaacaatggctggagcatccctcctttcaacacctccatgaacgtccagctccagtggttcgacgaggtcaagcaaaccatctgctactgccctcaagagtgcagggagttcttctccaaggcgctgctcgtgttcggcgagttcggaggcaacgactacagcttctcgtggaaggcggagtggagcctggagaaggtgaagaccatagtgcccagcgtggtggcctacatggcggggggcatcgagcg

SEQ ID NO: 8425 - DNA, 191 bp, Oryza sativa
  Clone ID: uC-osflcyp021g08b1
tcttgacgcgtggggaaagaaagaaaaaaaaaagggaaaggaaaatcgtgtctcgtctcgtctcgtcttcgtctcccccgattcccgagcagcttctcgaaaccctcgcggcctcgattccggcgatggcggagcccaacccgcaagtggagagggaggtggaggtggaggaggttaattatcaccttctt

SEQ ID NO: 8426 - DNA, 496 bp, Oryza sativa
  Clone ID: uC-osflcyp021h03b1
gatggatcatgcatgattgatcgtggaatgggaattcatgggcatccacttgaaattcaggcactgttctattcagctctcctgtgcgcgcgtgaaatgttaaccccagaagatggatcagctgatttaatacgtgctctaaacaataggcttatcgcactgtcctttcatattagagagtactattgggttgacatgcagaagctgaatgagatttatcgatataaaacagaagaatattcctatgatgctgtgaacaagttcaacatatatcctgatcaggtttctccgcggcttgttgagtggatacctcctaaaggaggttacttcattgggaacctgcagccagctcacatggacttccggttcttttctctggggaatttatgggccatagtaagcagcttggcaacaactcatcaatcccatgccattttggatccgattgaatccaaatggtctgatttagtggcagagatgccattggagatatgct

SEQ ID NO: 8427 - DNA, 491 bp, Oryza sativa
  Clone ID: uC-osflcyp021h09b1
tcgtttaaactaaatgttgagccagataagagaccagaggtgatgggtttggttgacatcttcagagcaaaggtggttgacctttctgaccacacactaactattgaggtaactggagatcctggaaaaattgttgctgtacagaggaacctaagcaaatttggaatcaaagaaattgccagaactggcaagatagctttgcgacgtgagaaaatgggagaaagtgctcctttttggcggttctctgcagcttcctatcctgatcttgaagtggcaatgccatcaaaatctcatgtcaacactgggatgaaaacagctaaccagaattctgaagaatcttcacaaggtgatgtctatccagtggagtcatatgaaagcttcacaacaaatcaaattcttgatgctcattggggtgtcatggctgacggtgatccaacagggctttgttcacatactttgtccattttggtgaatgatttccctggagttct

SEQ ID NO: 8428 - DNA, 424 bp, Oryza sativa
  Clone ID: uC-osflcyp022a01b1
ctggacttctggctggtggtggagcccaagttcctcgacaggttccccaacatcaccaagcgcctcaagcgccccgccgtcgcgctcgtctccaccgacggcaactggatcacttttatgaagttgaggctagacagggtcttagcagaacaatttgaagcagaaacgcttgaggaggcattggcttctaacccggtcgacttgaaatttgacaagcctgagaaatggacagctccataccccaagtatgagtatggatggtgggagccctttctacctccaaagtctagcaatggaacagcatagagatgatcggcaatccatatgagcaatgtaagatttcttccatgcaagtgcccaaatgtaatctaaatttttaacaatgcctatgtaatacttggggtgctgtgagtacagttagcta

SEQ ID NO: 8429 - DNA, 318 bp, Oryza sativa
  Clone ID: uC-osflcyp022a08b1
atttctcctcggaaagtcaaaggcaagaaacaccatggatgccactgccatcggcaacggcgccctgcactccaatggcgccggcgccgacaccaaagggaagccgatcaaatgcaaagcggcagtggcgcacggccccggcgaggcgctggtgatggaggaggggaggtggcgccgccggcgaggatggaggtgcgcctcaaggtgctctttacctctatctgccataccgacctcagcgcctggaaaggagagaacgagcttcagcgaaagtttcctcgcatattgggtcatgaggcagcacgggtggtggagagc

SEQ ID NO: 8430 - DNA, 447 bp, Oryza sativa
  Clone ID: uC-osflcyp022a10b1
cccacgcgtccgatacgagcagcaactcatttggctcttcagactttggttgggaggatgacaccctgaccccagactacacttcagtcttcgttcctaatgctgccatgccagcatatggtgaacctgcttacctgacaggtggagcgccaaagagaatgaggaacaactatggtatcgccgtgccccagggaaatggcatgcctaatctcgcacaaaacatgcccaccttcgatcccgagatgaagtatttgccattaccttatgttgagagcagctcagatgaatcaatggacaaccttctgcaaaatgatgctacacaagacggggcaagcaacgagggcatctggagccttgatgagctgctcatggcagctggtgcctactgaggagacgaaatgttctgtcagtgtggtctgtcactagcaaaccatgtgaatgtgtatg

SEQ ID NO: 8431 - DNA, 428 bp, Oryza sativa
  Clone ID: uC-osflcyp022a12b1
ttctactttggatttgaagatgatgtcatgtatcctagctatatggttttgtttacaacctttctcggattggctctggtaaggagattatctgttgatcagagagttgggccaaaagctgcttggatcttgacttgtctttattcttcaaaattatcaatgttatttatcacatcaagatcggtgctatgggtttcagcggttttgctactcgctgtcactccccccttgcttctttacagagacaagtccaaaggggcttcaaggatgaaagtctggcaagcttatttccatgcatctgtagtagccttttctgcatggctctgccgggaaacaatcttcgaagctttacagtggcggaatggaaggcctccttcagatggcctacttttgcgttcctatattctgttgacaggtcttgcttgcat

SEQ ID NO: 8432 - DNA, 467 bp, Oryza sativa
  Clone ID: uC-osflcyp022b01b1
atttgatccgctcaatgccctttgaaccacatgcttatgcatatggaaccttattggctgcttgtagagtttataagaacttggagtttgctgagcttgcggctggaaaactgattgaaaaggatccacagagcgcaggtgcctatgtacaacttgcaaatatctatgctggcgcaaatcagtgggatgatgtctctagagtaaggaggtggatgaaggataatgcagatgtgaaaacacctgggtatagctggatagagattaagggtgtgatgcatgagtttagatcaaatgacagattgcaccctcagctctacttgatccatgaaaaactgggccagttagcgcagaggatgaaggcaatgggttatgttccagatcttgattttgtcctgcatgatgtggatgaaactctgaaggtgcacatgctaatgaggcacagtgagaagcttgctatttcttttggt

SEQ ID NO: 8433 - DNA, 460 bp, Oryza sativa
  Clone ID: uC-osflcyp022b06b1
ttacactctactcctctctctcacctccaccatctagctcactcacacagtctccactcacacgcattgcagaggagaggcgacaatggaggggaaggaggaggacgtgcggctgggggcgaacaggtactcggagaggcagccgatagggacggcggcgcagggcgccggggacgacaaggactacaaggagccgccgccggcgccgctgttcgagccaggggagctcaagtcgtggtctttctaccgggccgggatcgccgagttcgtcgccaccttcctcttcctctacatcaccatcctcaccgtcatgggggtctccaagtcctcctccaagtgcgccaccgtcggcatccagggcatcgcctggtccttcggaggcatgatcttcgcgctcgtctactgcaccgccggcattttcggaggacacatcaacccagcagttacttttgggctgttc

SEQ ID NO: 8434 - DNA, 474 bp, Oryza sativa
  Clone ID: uC-osflcyp022b08b1
taaaccctccccaactccacgaatcccgccgccgccgccgccgccatgaagcgcgccgccgacgggatggagaagcccaagttcctcacgcgggaggagcgggagaagctggcgctcgagcgccgccaggccgccgtcaccgaccagcgccgctccgccctcgacctgctccagtcgctcccccgcccccctccgccgccgccgcctcccctttccaacccccctcgcgactcctcctcctcccaccaccgcgactcctccgaccgtgaccgtgaccgtgaccgggaccgggatcgggacagggaccgggaccgtgaccgggagcgccgccgcgacgacgactcccgccgcgaccgagatcgggatcgggaccgcgaccgaggcgactcctcccgccgcgaccgcgacagggagcgcggtgaccgcgaccgcgaccgtgaccgggagcgcggtgacagggacagggagcgaggg

SEQ ID NO: 8435 - DNA, 438 bp, Oryza sativa
  Clone ID: uC-osflcyp022b11b1
tcgtctggcccgggacggcgacgcctccttcgtgggcgccgtcaccaccgcgccgcgcctcccgctcgtctgcggaccctaccgtgtacgcttcctcctcaacctccccggcgccggacaccgcgtctccggcgagctctacgccgtcacgccgcgcgggctcgaccgcctcgacgagctggagggcgtctcccgcgcgcactacgagcgcctccccatcttcgtcctcctcgccgagggcgcccaggtcgacgccgtcctctactacgcgcaccgcggttacgccgacaacctgtgggcgcgcagcggcaagaaggggtacccggagtacttgccggccgtcggcgacggctacatccgccgcaaggatcggccgcagcagctcaccttcgtggagccagattcgggtgttcgtctcatccgagtcatcggagaacc

SEQ ID NO: 8436 - DNA, 475 bp, Oryza sativa
  Clone ID: uC-osflcyp022c05b1
ttgaacttctcttttcgtctgccagttcttggattttggaaagaacaggtggtttgttattcagatttttaggttagaaaaaatccacaaaaaaaaaagatattcgatggcagctgctatagaaggaaatctgatgcgggcgctgggagaggctccgtcgccgcagatgcagaagatcgcgccgccgccgtttcatcccggcttgccgccggcgccggcgaacttctcctcggccggagtccacgggttccactacatgggcccggcccagctcagcccggcccagatccagcgcgtccaggcccaactccacatgcagcggcaggcccagtcggggctcggcccgcgggcccagcccatgaagcccgcttcggcggctgctccggcggcggcggcggcgcgggcgcagaagctgtaccgcggcgtgcggcagcggcactggggcaagtgggtggcggagatccggctgccgggc

SEQ ID NO: 8437 - DNA, 477 bp, Oryza sativa
  Clone ID: uC-osflcyp022c07b1
atagcttgtagatccagaggaacaacgcaggaagtttctcggagcatttcccaggacaaatataagaaaatagacaaggtggatcgcagatcaaatgaagatatcctgtttgagttttctataatacagatcaaatggttatctgctgaagaagtaagcagaatattcttgtttactatgcaaaatgcccttctaatggccactattggatagttggggtagggcttttataaagaataagtgcggagcacacaagatggaataaaaaagaggacacgattacagcagcggatacggcagcataggcgaatatacggcagtaagagcacttccaatccaataaatctaagctaattgcaagtttagatgacatgttggtgaaagcttctcaatgcttttttttcaagggaagagaaaaaacgcaagataaccatttacgtctaagttggcctagatttaactgatgtcgtcgctgta

SEQ ID NO: 8438 - DNA, 353 bp, Oryza sativa
  Clone ID: uC-osflcyp022c12b1
ttttcgttcacgcgtacggagaagaagcaagcaaaatgcggagaggctgctgcaaggtatgcgagagagactgcgcaagctcgagagaggtggaaatttagcatatgatgtcttcaagaaagccggaacgggtcttcagtcacaattgtctcgcaccttctcacggaagaaggctgcccaaacacccaaaggtggtggcggccgtggctgcatcctgccttcaagcggagaacatggtggcgggaggaagaagaacctgaccgacatgatgccatccctctaggacaacccggataacgaagaaggatttaacctcgagataggatacacgggcccgaggaagaacatgcctg

SEQ ID NO: 8439 - DNA, 468 bp, Oryza sativa
  Clone ID: uC-osflcyp022d03b1
gtgagtttctctcaggccatggctgatctgaaccttgtgttcttgttcttcctcctcttgtctcctcccatcttatccgatggggtgcttcaggtgatgggaacatcgatgaataggaggagcttgcttcaggccaagggtggctgccctgtgagctttgagaaccagaactacacgaccatcaccagcaagtgcaaatcgccatggcctgccgacctctgctgcccagctctgaacgagttcgcatgcaatttcagccaatatatcaacgacgaaagcaccaactgcgcagaatcgatgtgggtctacctcaacgcccatggaagctatccagctggcctgttttcaaacgagtgcgcagtgcttgactgcaacggtaacaatagcaccattagtactaaccaaactgctaatggaagcggcacccgaggggctaaaggaatatcagagatgtactcacttgtgacg

SEQ ID NO: 8440 - DNA, 473 bp, Oryza sativa
  Clone ID: uC-osflcyp022d08b1
caaggacagagtgaagaaggttgatttgtttgagaatggcacgattgccattgtagaggctatttctcctgagctcggcaaccgtgtgcagagagttcgtgtgcagcttcctggtctaagccaggagcttctccagaagttgagggaaaagaatatcgattttgctgcacacagcaaccaggaggactctggttctcttctgttcaacctgatcggaaacttggctttcccacttatccttattggtggtctatttttgctgtcaagaagagcacaaggtggccttggtggacctaacggtcctggctttccccttggttttggtcaatctagggccaagtttcagatggaacccaacactggtgttacatttgatgatgttgctggtgtcgatgaagcaaagcaagacttcatggaagtggttgagttcttgaagaaaccagaaaggttcaccgctgctggtgctcgcatcc

SEQ ID NO: 8441 - DNA, 459 bp, Oryza sativa
  Clone ID: uC-osflcyp022d11b1
tgttatctcaattgatgacaattgcctcccagcgaaggacaatggtgggttgactgttgatgcagttgcacagcatatgtccaatctgaagacacctgctacacctttctttttcaacacattgtatgatccattccgcaaaggggctgactttgtccgtggatacccatttagtctgcgcgagggggttgagtgcatgctctcttgtgggctgtggcttcacaatgcagactatgacccaatgactcatgttgtgaagagaaatcaacgcaacacaacgtatgtggatgctgtgatgacagttccacttggtgcgatgatgcctgtgagcgggataaatgttgcattcaaccgtgaggtgctgggacctgtaatgttccctgctctgcggctgcgcaaggaaggaaagcacagatgggatccacttgaagacgtttggaatggcttgggtgctaaagt

SEQ ID NO: 8442 - DNA, 436 bp, Oryza sativa
  Clone ID: uC-osflcyp022e01b1
ttagtttgagatgcacagcaaggcgtccatggcctggatcctggggcttggcccgagccttggccttgtcagggtccccggcattggcctggtctacaccgagcttgccagcggtgttcctcacatcttctcgcacttcatcaccaacctcccggcgatccactcgacgctggtgttcgtctgcgtcaagtacctcccggtgtacaccgtgccaccggatgagaggttcctggtgaagcggatcggccccaagaacttccacatgttccggttgcgtggcgcggtacggttaccaggacattcacaagaaggatgactacttccagaatgatgttgttcgatagcccgaatctgttcgtgaggctggagagcatgatggacgagtacagctactcccacgagtacatcaccctgttgatgagccctcccaaatacc

SEQ ID NO: 8443 - DNA, 334 bp, Oryza sativa
  Clone ID: uC-osflcyp022e04b1
ttttctttccatgacaatttgtttttgatgtctaagctgcttccgcctatacagattcatagaagatagtcttttgcctgtttcaggtctatttttggtcattttgcaaggcaaatccaattccgattgaaatcttctgaacaaccaggattttcccttcaactccttattaaaaagttaaatgccccacaaggacagaatttgaatactcttaatttcgatcatcagggatggggagggttcgagggtgtgttttggagcttcacgctatcatagaccctgggaggattgttcaaccctacatctttatatcattcaatgttcttcttgcatt

SEQ ID NO: 8444 - DNA, 418 bp, Oryza sativa
  Clone ID: uC-osflcyp022e05b1
taaggtctcccgccgcacctcctcccgtactccggcggccccgacctcctcacggaggcacttggggccgagagcttcgatccggacgacgacgacgacgccaccgccgcctcccccgccatggaggacgtcggcgccgccgtcgccgcggtcgacgttctggccccgccgtgcaagaggccgtaccacgtcctcctcagcagcagcagcgaaggcgtaggccacgacgacgacgacaaccagcacgccgtgatggtgctgaggaggaccaggagcgggagggcgtttcccgccgccgatatcggtgatcggcaagggcgggcggccgtggctgagcctcccggcgcaccgggaggccggccggctcgagctgctggagaagcggctgtcgtcacagagttgctgcagccgagcaagg

SEQ ID NO: 8445 - DNA, 477 bp, Oryza sativa
  Clone ID: uC-osflcyp022e06b1
ctgtctctcagggaagaccgtggtgcttaccgtcgtactaacggggagcagcacattgggatgcttaggcaaactcatgatagttatggatttgaaaggtcacacagaggttcagctgagaaattgctgtcagagagtaggttttctcagagagaacctatgcctttgactgcagacagctcatatttgcggcaaaggctattgaagcaaagaaggctcaataatcccagatcagggcaggtctctgatagacataatgtctatcctgaggatgaacgccatgaccgtcatcgtcagcgtggcgaagagcaagcttccaatgacggcgtcttaagctcttgattgcgtggtagaataagacttccagcggaaacaacgtttgacagacttggcttacagcctgagaaagagagagacagatggcctcgagctagactgtcacaccaagtcaacagaccttagagggaagcttcatga

SEQ ID NO: 8446 - DNA, 392 bp, Oryza sativa
  Clone ID: uC-osflcyp022e09b1
tcgttactttcagcaaattaagatggctgctgccttctcctccaccgttggagctccggcgtccactccgaccaacttcctggggaagaagctgaagaagcaggtgacatcggcggtgaactaccatggcaagagctccaacatcaacaggttcaaggtgatggccaaggagctggacgagggcaagcagaccgaccaggacaggtggaagggtctcgcctacgacatctccgatgaccagcaggacatcaccagggggaagggtttcgtcgactcccttttccaggctcccacgggtgatggcacccacgaggccgtcctcagctcctgcgaggacgtcagccagggtctcagaacgtacgacttcgacaacaccatgggaggcttttaca

SEQ ID NO: 8447 - DNA, 462 bp, Oryza sativa
  Clone ID: uC-osflcyp022f03b1
gtgattgtgaaggaggaggcggccatggcgagggagcaggcgctgctgtcgacggagatcgtgaaccgcggcgtggagccgtcggggccggacgccgggtcgccgacgttctcggtgcgggtgcggcggcggctgccggacttcctccagtcggtgaacctcaagtacgtgcggctcgggtaccactacctcatcagccacggcgtgtacctggccaccatcccggtcatcgtgctcgtctgcggcgccgaggtcggcagcctcagccgagacgagctgtggcgcaaggtctgtgggcgaggccacctacgacctcgccaccgtcctcgccttccttgccgtcctcgccttcaccatcttcgtctacatcatgtccaggcctaggcccgtttacctcatcgacttcgcctgctacaaaccagccgacgaactcaaggtgtcgaaggcggagttcatcgatct

SEQ ID NO: 8448 - DNA, 470 bp, Oryza sativa
  Clone ID: uC-osflcyp022f04b1
tctcgactggtttataattaaacactggctcatttctttgaagctttttttttaaggatctggttttccctctagtagttctgagctgatgaaaagtttctatagcgggttactgagagaattacagtcattgtgctaccatgagaataaatacaataacagagtaacaaccatgagaatatgttcaagaactaatggattctaaaatttgaaaggtgcttaaaatgttttcttgacactattcatgatgagaattaaacggttaatcaagtaagacatgggacgataacaactactacctaatcctgtaaatctacagaatctccatgcttttcagttgctttttatgcacccacaatatagttttcagttgcatgttatcattggaggatgtagaatactcatgcatgcacaattttttataatatggggccacatatattatcttttaatttcttgtatcacatcct

SEQ ID NO: 8449 - DNA, 318 bp, Oryza sativa
  Clone ID: uC-osflcyp022f06b1
ataaattcctctatccttgattgattctttcttttattgtttttttttctcttcttcctcttggagggggaggagatttggggaataatcaacgtacattacccagactcacactcccacgatcccgtcaagggccgccgcaatgcgcgtcctcgccgtggccctgctcgccgcggcggcgttggcggcggaagcgacacctcaactttcacccaaattcacctcccccaaaccaccatacaagtatgcctatgccatcaatccttggtcaacagccaaatgtgccgcctggttctaattcacgcagtaagcagcagt

SEQ ID NO: 8450 - DNA, 441 bp, Oryza sativa
  Clone ID: uC-osflcyp022f09b1
ttcggtctgaccactgaggtcaagtcggttgagatgcaccacgaggctctccaggaggctcttcctggtgacaacgttgggttcaacgtgaagaacgttgccgtgaaggatctgaagcgtgggtacgtggcctctaactccaaggatgaccctgccaaggaggctgccagcttcacctcccaggtgatcatcatgaaccaccctgggcagatcggcaacggctacgccccagtgctggactgccacacctcacacattgccgtcaagtttgctgagctggtgaccaagatcgacagacgatccggcaaggagctggagaaggagcccaagttcctcaagaacggtgatgctggtatggttaagatgattcccaccaagcccatggttggggagaccttctctgagtacccttctcttggtcggtttgccggcgggacatga

SEQ ID NO: 8451 - DNA, 479 bp, Oryza sativa
  Clone ID: uC-osflcyp022f10b1
tacttggacagcggccttcatatagggcattctttgatgggaagcttggcagttttttatacagtccaggtcgtttgagagatcagatgcatgaagatcgatttgctaatgagagtactgggtcaaggttttctgatttttcggcctcaagcactggtgacattagaaatgatgtgctttctcctagctctcaggatacagggtacagcagtccttctatccaccattcaaggaatgtgtcttctgaaaatcctccatcccatcggcatccgaatgcaacttctcaaattgattttaatggagtccgacgatcacagagaacaggttcttcaggaagttttggatcatttgatggtagctcagcatctaataagtcagttgattcaggtgccttacctgatgcacctacagaaaagccagtgaattctgctgtaaatcgtcagtctgttgcgccccccatggctcattcagcacaattg

SEQ ID NO: 8452 - DNA, 345 bp, Oryza sativa
  Clone ID: uC-osflcyp022g04b1
tgtccttagctatagctgctgcctgcagcacgcagcgcccgtaacctaacgtatcatttacttccattgcactgcacatcctgtgagttcgttgtctgagcgagagctggacgtgctgcaccgagctcctggccgagatgcttgccgtgtcgccggcgatgtgccccgacattgaggaccgcgccgcggtggccggcgatgctggcatggaggtcgtcgggatgtcgtcggacgacatggatcagttcgacttctccgtcgatgacatagacttcggggacttcttcctgaggctggaggacggtgatgtgctcccggaccccgaggccgacccggccgagatct

SEQ ID NO: 8453 - DNA, 477 bp, Oryza sativa
  Clone ID: uC-osflcyp022g10b1
tacattttccccaaataataatagaggaaggggaaaaacacatttgcagccacatcatccatggcctctctccgcaccattccggtgatcttcggcatcctcttctatgtccttgccagcactgccactgccaccgacgcaccggactacgtcgtccaaggccgtgtctactgtgacacgtgccgcgccgggttcgagaccaatgtcaccgagtatatcaagggtgccaaggtcaggctggagtgcaagcactttggcaccgacaaggtcgagcgtgcgattgacggtgtgactgatgagaccgggacatacaagattgagctcaaggacagccatgaggaggacatctgcgaggttgtcctcgtccacagcccccttgcaaactgctctgaaatcgaggccgaaagggatcgtgcccgtgttttgctcaccaggaatgtcggcatctgtgacaacctgcgcttagccaacccactc

SEQ ID NO: 8454 - DNA, 447 bp, Oryza sativa
  Clone ID: uC-osflcyp022g12b1
ttcaggtcatgctataacatagcaactgaattgcagccaatgcacgtactaccgaccggctaccgatggagctgatgctgccggcatgggcgtccttcgtcggcgtagtgctcgccaccgtgctgcttctgaaagcggagctcgaccgtagccgacgggtgtacaacctcccgccggggccgaagccgtggtcggacatctggaacctcaacctggtgggcacgctacgggaccgctccattcacaacctctccaagaagtacgggcccctgatgtacctgaggttcgggtcgttccccgcaggcgtctgctcgtgggtggagatggccaagttattgctcaagaccgacgacgtggtgttgaccgaccggacgaagaccgtcgccggcaagcacaccacctacaactacagggacattacgtggtcgacctacggcgcgtactggc

SEQ ID NO: 8455 - DNA, 266 bp, Oryza sativa
  Clone ID: uC-osflcyp022h01b1
tttagttacagtcttgctctaccgttagctcagaccacaaccggcggaaaatatacgcgcgccctggtgaaccaggcggaccacactggacagggacatgtgcgccaccaccgctacggcgagctcaggattcagatccgcctggcagagactctaggacccaagaattggggggagcagacaggctcgaggtacatggacaggagggctcctgccactagggggactgatcatgttgcccgaatggtgactctcaggaggtcatt

SEQ ID NO: 8456 - DNA, 408 bp, Oryza sativa
  Clone ID: uC-osflcyp022h02b1
ttttggtctcgcgccgaaagaccaactgtaggcgccgggctccaaatcttgagatcgcaggatggatggacatactaatgtagataagagttcctgctctaagccatgcgagccattaacagactactgcatccctgattacattctgaatcctgactctgaacaagtcctcgttgatcaggcaccatgtcgccctgtgagagtattcatcaactctagaagtggcggccaactctcaagcagtttgatcaaaacgtatcgtgagcttcttaataaagcccatgctttttgatttatcacaagaggctcctgaaaaggtgcttcacagattgtaaggcaactttgaaaagctcaagtctaatggcgaccctattgcttttcaaattcagagcaacctaagactaattg

SEQ ID NO: 8457 - DNA, 436 bp, Oryza sativa
  Clone ID: uC-osflcyp022h04b1
tttgtttcggacctcaagacgggctacctgacgctgacgtcgccgcgcgccgtgttcatcagcgaggcgatcggcacggcgctgggatgcgtcgtcaaccccaccgtgttctgggtgctctacagggtgtacaagatgggcagcggcgacatgggcgacatgccctacgccaagctctaccgcggtttcgccatgctcagcgtcggcgacggcgagcaaggcctgcccaggcacagcatgctcctcttcaaggtcttcttcgtgctcgccctggcgctcatcgtgttccgggaggtggcgagccggacggagtggcgcatccggcgctaccatcccgagcaccatcggcatggccatcaccttcttcatgccgccgcgcgtgcccgtcggcatgtgcattcggcggcctggtggcgtccctgtgggagaagatgga

SEQ ID NO: 8458 - DNA, 432 bp, Oryza sativa
  Clone ID: uC-osflcyp022h08b1
ttaccgaaggggagggggagcgaagctttgcgttctctaatcgcctcgtcaagatgcagatattcgttaagaccctcactggcaagaccatcaccttggaggttgagttctccgatacgattgacaatgtgaaggctaagattcaggacaaggagggcatccctccggaccagcaacgccttatcttcgctggcaagcagcttgaggatgggcgtactctcgcggattataacatccagaaggagtccaccttgcaccttgtcctccgccttcgtggaggcatgcaaatattcgtgaagaccctcaccggcaagaccattaccctggaggtcgagtcctccgacacgatcgataatgtgaaggccaagatccaggacaaggagggaatcccaccagaccagcagcggcttcatttttgctgggaagcagctc

SEQ ID NO: 8459 - DNA, 339 bp, Oryza sativa
  Clone ID: uC-osflcyp023a01b1
atccgtcatgtccaagtcgcgtcgcaccgaagcagagtagggaaggagaggagcggagtgccatcagacgtccgatcgagtgatccgatggctctcgctctctacacctatgctgctgctgccgctgccgccgcggcgcgggcgctcgcggcgagggtgaccaccacgaggggttacgccgcgtcggcggcgtcgtcggcgatgaggcgggcggcggccgctgtggaagggaagggcgctgcggggatgacgcatgcgaaggacgggtcgtcttcgtcggcggcgagggaggtgtcgtgggtgcccgaccccgtgacgggccactaccggccctccaac

SEQ ID NO: 8460 - DNA, 546 bp, Oryza sativa
  Clone ID: uC-osflcyp029a01b1
cgagcttgacgcggtggagaggcgcgcctccaccttccttggctggcgtcttctcttcatcctctccctctccaaagctccatcgctgtcccctctcccacccctttctctgcattcggccagatccagccaatagaagctatggccatggcatctggctcccctgagcttggtggagtggagaggccaaggaggggaggcctcccccagtatcttcctctcccaaatcaccattgctgccagctcttcctcccccttccggatccggccagatctaggcttcatcgagttggggacttccagatctggagctccagttcatggctacgtgctgcatccaccacaacagcaacgaagaggatgtgacggggctcgggagttcccgttgatggcggcaacatgctggagaatttcctggcataaaatgcactttttcttgtttctgaatttcctggccttcatgtgcaccttcaaccgaattttatttagttgctatatgcaggtcacgcagcaatcctgcaaatacttaatgggtggctggcgaat

SEQ ID NO: 8461 - DNA, 547 bp, Oryza sativa
  unsure (1)..(547): unsure at all n locations
  Clone ID: uC-osflcyp029a06b1
ttaaagcgcccatcagaaaccctagcaggagcgccgccgtcgccgccgccgcccgccgtcgtcatcctccctctcgccctttcaggtccccagcccgccgcgccgcggatcgagtcgccgtgtgaagaaggccagcgtcaccatggcggacgaggagcaggtggagaggaaggaggaggtctccgagcttactccttttgacccaaccaagaaaaagaagaagaagaaggttgtgatccaagatccatctgatgaggtggataagttggcagagaacactgagagcttgacagtcgctgagactggtgagccaagctttacaggcatgaaaaagaagaagaagaagcatgtggagcatgatacatctcttactgaagctggagatggtgaagatgctatagatgatcaaatcggagaggatgaagaaggagaagggattgtgctnggaggtgcaactcgatacccttgggaaggcactgacagagattatacatatgaagagctgcttggcagagtatttaatatcctgcgtgagaataatcctgat

SEQ ID NO: 8462 - DNA, 322 bp, Oryza sativa
  unsure (1)..(322): unsure at all n locations
  Clone ID: uC-osflcyp029b03b1
gttggtcgtggttggtgaggcgtcgagtcgtcggtgtccaagagattcgttggtgccttctctttgttttcgagtcttttagtttgttggaatcggattcccgtactgaacctgcttttactgcaagttaattgtttggttggttggttgccttcctgtcactccaccttgaccgcgaaggtattactgtactgcagcataaaggtccccaccttgaccaccatcttcaccatctatctatacattttattttcacanantaaaaacaaaaaaaaaaaaaaaaaaaactaaaaaaaaaaaataaaaatcaaaaactcaaaaa

SEQ ID NO: 8463 - DNA, 514 bp, Oryza sativa
  Clone ID: uC-osflcyp029b05b1
tttttgattcgatagatatggatttgtggcaagaagatcaattgctgaagctcctgttgacgtaaatgtcactacaaacagttcctttgtcttggcgcaagagcgaacatatagaaaagaccccttgaatggattcaggaaatatactggcggttggaatattagcgaagtgcactatatggcttcagttggatacacagcttttccactgttcatcattgccttggtgtggtttgtgctgttttttctggttatgcttggaatttgctgcaagcattgctgttgtccacatcgcaactacacatactctcgggtagcatatgccctatctctgatacttctaatattgatcacttgtgctgcaattgctggatgtgtcatgctgtatgatggtcaaggaaagttccataaaagcacaacgactaccttgaattttgttcgtagccaggccaattttactgtcgaaaaccttattaacttatccgatagtttatctgctgcaaaaaggttgaca

SEQ ID NO: 8464 - DNA, 512 bp, Oryza sativa
  unsure (1)..(512): unsure at all n locations
  Clone ID: uC-osflcyp029b08b1
atcataatcacagcgtcataccaggctacaattcaaggctttgaatccaagggattttcaaaagaacaaagtgaagacttgctcgcaaagagtgttgagattgcacgtgaagcgcgtgacatgtttctgaaggaacattcagatcgtcccatacaacatcctatcctggttgcagcttccattggaagttatggggcctatcttgctgacggctctgagtacagtggggattatggcgaagctggcacgttagaattcctgaaagattttcataagcgaaggctggaggttcttgcggaagcaggtcctgatttgatcgcctttgaaacaattcccaacaaattggaagctcaggcttacgttgaacttcttgacgaatgtaacatcagtatccctgcatggttctcatttaattcaaaagatggagttcacattgtgagtggagactcgttaattgatgtgctactattgctatgngtgttcgaggttggtgcagttggataaantgcaca

SEQ ID NO: 8465 - DNA, 384 bp, Oryza sativa
  Clone ID: uC-osflcyp029b11b1
tgtcctatgcattgaccaattgttgttgtagctagcgggtcgttcagttttgattagttctgaaagtgtccaagttataccgtgtaaccctttggagtttgccaggcaattcaatgtctggagtttgtatgtgccattgagcagacaattatgatccgaattaagctctgcaccttaatttttccaaaaaaaaaaaaaaaaaaaaaaaaaaaaaaaaaaaaaaaaaaaaaaaaaaaaaaaaaaaaaaaaaataaaaaaaaaaaaaaaaaaaaaaaaaaaaaaaatattgaaaaaaaaaaaaaaaaggggggggcctttttaggggaccaaagtttctttcccggggatggcaaattataattttctttatggggcccccaaaat

SEQ ID NO: 8466 - DNA, 368 bp, Oryza sativa
  Clone ID: uC-osflcyp029b12b1
tccttatcgaaaagaattacaaagcttagccgatgatgccaatggataggtcggtgtcgtgcgcctgagaggccaacagctttgatcggaggtcacctcctcgcggacctgcggtgctacagcgcaggtgccagaaggttgtacaagtccggcgctgacgcggaagaaggggctgtggcagggacgaacacgacggcgaaggtgtataagcgcgctacgagtgccaacgcgtggtcgtggccgggctgttctgggggtgtgcatcggagtgggagcaccaagacggtggtgtcctactccgccggatggagccgtcatgggcggtcgacgcccgggtataacctgcggagctacagcgcgtcttacgc

SEQ ID NO: 8467 - DNA, 504 bp, Oryza sativa
  Clone ID: uC-osflcyp029c06b1
tggaaggaagagctggaaagccaggtatcttctactgtcgaagagcatgaagaactgaagagcaagtacaatattacgctggaggaaaagcagttgttgaatgagaagtatgaatctgcaaagaaagagcttggggaagcaatagctaaattagaggagcaaatgaatgttgacaagtcagaaaaagaattgcacatctcaaaattggagaggcagatcacattgtctgaactaaaatacatggaggagatccaaaccatgcaagtggaaacaactgaaaaggatgaggcgcttacaaccaaaatgcaagagcatgcaaacttggtccatgaaaaagatgcgttggaacaacaattactggaagttaggaaggaactaaatgatgcttaccataccatagcaaatcaggaagagcaagtttcagtgagggagataaagtgggatgcatataagaagttctcagaggatcaacttgaagctgagcagcagcatgttgcagagctg

SEQ ID NO: 8468 - DNA, 494 bp, Oryza sativa
  Clone ID: uC-osflcyp029d04b1
gaaaaaacccctacattcctccctcttctttgccgcggcgccgacatcgatccatccctaacaaataacacgatgtcgcgcgccacggtcgccatcctcttctacatcctcacagccgccgccgccatcagcgcggcggcgcaggccccagcggagtcgccatcgaagagcacggcagctgccacccctgcaaaggcacccaccgtcgcatcggcaccgaggaaggccggaccagctgccgcgccgacgaccaccgtggctacctccgcgcctgctggtggcgacgaggtgtccatcccccctacgccgttcgccaccgtggtgtctcccgtcgccgatggacctgccgatgcggctgacgccgatttctccggtgccggtgctctcaagaggtgcgcttgccgtgccggtgtcgcggttgccattgccaccgtcaccttctactaagatgccggatgcagagatgtggagtgtcatggtgagctgctagggtg

SEQ ID NO: 8469 - DNA, 486 bp, Oryza sativa
  Clone ID: uC-osflcyp029d12b1
gtatggtcaggatgccaccaatgttggtgatgaaggtggttttgctcctaacattcaggaaaacaaggagggtcttgagctcttgaagactgcaattgaaaaggctggatacactggcaaggttgtcattggaatggatgttgctgcttcggaattctacaatgacaaggacaaaacctatgaccttaacttcaaggaggagaacaatgatggttcacaaaagatatctggtgatagcctgaagaatgtatacaagtcatttgtcagtgaataccccattgtctcgattgaggatccgtttgaccaggatgactgggaacactatgctaagatgaccgctgaaattggagagcaagtgcagattgtcggtgatgacctccttgtcaccaacccaaccagggtggcataggcaatccaagagaagtcatgcaatgctcttctgctgaaggttaaccaaaatggatctgtcactgagagtattgaggc

SEQ ID NO: 8470 - DNA, 443 bp, Oryza sativa
  Clone ID: uC-osflcyp029e03b1
gtccctccctgcagagatggcaagttgtttacaccgatgatgaggatgacatgatgcttgtcggggatgatccttgggatgaattttgtagcatggtgaaacggatttatatttactcctacgaggaggccaagctgctggcttcaaagtctaagctgtcagtcataggtgacaccatcaaattgagcagtatgaactcatcacatgaatccgtcgacctggacaatcatgcctcagttactaacagggactgctaaccattgactttgccctaattctgatatgatcatttgaggaaattccaatgtttcttcattactgcttactgtgctgaagacgcaacgcccttttgtcttgaattgtggcggtatttgaactgcaagtgccaggaagttcccaagactggcaagactcgctggaagaggcattctggcatatgcatg

SEQ ID NO: 8471 - DNA, 556 bp, Oryza sativa
  unsure (1)..(556): unsure at all n locations
  Clone ID: uC-osflcyp029e04b1
gtttttatgaagttattttgagtggcattttccctcaaatgtggtgtgtatgaaatttactaaacaatttaacatttgagcttaaatgcatacacatcacatgaaattaatagcaaaacaagttgatttcttctcttcctagcttggttcaactaaagtaattaagagatgataaaatattatttggataaaagatggtgtaaattaaagtatctatatctgaaactagagaatagattttgatttttcttgataaatttattagagaagaatttgcagtacacataaaaacaagccaagaaagtaaaagtaattaaggagggaattaatgtaatgtgcacaattgctagaggaacatttgaaaagtaatccatatttatttgatgtcttttgcatggttgcatttccgattaatgttcatatatatgtgaggccttcgaagtaatttaccaattaaaatgataattngcatgcacattctgtattgtatatagtgatgacataaaatgattctgattggcattgctacaaaatgattttggcattgctgtatatg

SEQ ID NO: 8472 - DNA, 376 bp, Oryza sativa
  Clone ID: uC-osflcyp029e09b1
tacgaacacttccccgtgcccgcgcctcgcgacgggcccaaatccaacacgacgacgaggaggaggagatcgagtgcgccaccgaatcgaataaccacaagccgcggaagatttcccctccccccggtggatccctcctcctcctcctcctcctcctcctcctccggggtcgcctcctcccctccgatggagtccgggagcgagagcggcagcgggagcgggagccgaggggagatcacgctggccatcggcggtggcggcgcgtcggcggcggcgtggactcggctggtcagctccggcgtggaggacgtgctggtggtggggggcgcggctggctggcgtggaggagaggaggagatggagcggcttggttttt

SEQ ID NO: 8473 - DNA, 392 bp, Oryza sativa
  Clone ID: uC-osflcyp029f01b1
acagttcgtcgctggcatccaccaccgctgccttgtgacagtggagtggagtcattgcaaaagccactgccaagagcaccttctgccataatgcaagaagcgccctgttcaccagatagggcaccgccagggtttgaaacctataagtcatcacaggtactgctaccatctccatctctggcacaaaccacaaatgtgcgacaagatcaatctgaaactgaacctgtgtgtgtgatagaggaagcccctcaactactgcactcagtggaggtaatgggtgtacatatggatgcattacctccattgctaccatcatctgaaagtggagcagatgggctatcttcgcagcaattcgcgcaacctccttctgcaaaaaaggatacaacaacctg

SEQ ID NO: 8474 - DNA, 428 bp, Oryza sativa
  Clone ID: uC-osflcyp029f02b1
atccgttcttaggaacagatgagatacagaaagtgctcttgcttgaaactcctgagggaatttcttctgcattgaggccattctgggaaaaggcaatagaaggaagggcccgtgtggttcaagcacagcctgatatgcttgaacttgtacctcctgcaacttcaaaaggcaatggggtgaagattcttttggaccacctttgcattagtccggatgaggtaatggctatcggggatggagaaaatgacatagaaatgctacagctagcatcattgggtgttgcgcttgcaaatgggtctgagaaaaccaaagcagtggcaaatataattggtgccactaatgatgaagatggagtcgcacaggctatttacgactatgctttctaacagctgctaactctaaggcgtattgggataggattatctact

SEQ ID NO: 8475 - DNA, 529 bp, Oryza sativa
  unsure (1)..(529): unsure at all n locations
  Clone ID: uC-osflcyp029f04b1
aaactgcctgaaccactcacagataaaatcttcaatgaggatagcattagaagggactccatatccaaaggcgggcatttctccatagacaactcttgcaattctgttaaattattgaagactaacaccttttctagactgtgcaagttattattgccagtaatagacaaagaggaagttttagagtatttcaattcctccattagatttgatcccacatctgttattctgacatagtccaaagtttgagtccaagggataggtggaaatgacgagatttctatacacaaagatatttcaaactcttctaatttcggaaaccaagtcatattcacatctttcttccgagggtcaccaatattatcaataaatggcagctccaagagattagggcaatttttaatttccaaggtttgcaaatctgggaagaaagtattacagtcctgagtaatccattctgtcaactcctctaagtcgatcagtgttagcctttntaaactacaacaccatngctccagaacgaacttac

SEQ ID NO: 8476 - DNA, 546 bp, Oryza sativa
  Clone ID: uC-osflcyp029f12b1
taacgcaaaagcctagtcgtctcatactcttcttgttcagttcttctcctcccaaatctttctgctataaaaggcattcgggtctctctttctccgaatcccagctgcacacttgcatcttctctcctctctctctctcttcttcttcttcttcttcttcttcttctccatatctcctactcctcctcgtgaagatcgatcgaccatcggcaatttcattcggtaatagttaagctaagatcaaatcaagatcggcgaaaccatggagatggtgctgcagaggagccaccacccggtgcccgggcaggagcagcaggaggcggcggcggagctgtcttcggctgagctccggcgagggccatggaccgtcgacgaggacctcaccctcatcaattacatctctgatcacggcgagggccgctggaacgcactcgcgcgtgccgcccgtctgaagaggactgggaagagctgcccgctccggtggctgaactatctcccggcggatgtgaagcgcggcaacttcactgcagaggagcagctgctcat

SEQ ID NO: 8477 - DNA, 528 bp, Oryza sativa
  Clone ID: uC-osflcyp029g05b1
gccgctgccaccaccacgccaccggagcacagcgacgcgccgccgcggcttcatcgtctccgctacagcgaaatggcgacggttccggagcctttgatctgggagattgtgaagaagaacaactgcttcctcgtgaagcagtttggaaacagcaatgccaaggtgcagttcaccaaggagcccaacaacctgtacaatgtccactcctacaagcactctggcttggcaaacaagaagaccgtgacgatccagccatcaggtggaaaggacgcggctgtggtcctctccacgaccaagaccaagaagcagaatgccccagctaagctctaccacaagtctgtgatgcgcatggagttccgcatgatggctaaggctgtcaagaaccaggttagtgacaactactacaggccagatctgaccaagccggctcttgcaaggcttagctcagtgtaccgcagcctccaggttgccaagtctggtgtgaagaagaagaacaggcagccagccaagctgtaaatcgcttgaagc

SEQ ID NO: 8478 - DNA, 488 bp, Oryza sativa
  unsure (1)..(488): unsure at all n locations
  Clone ID: uC-osflcyp029g08b1
atcgaccgaaggggagggggagcgaagctttgcgttctctaatcgcctcgtcaagatgcagatattcgttaagaccctcactggcaagaccatcaccttggaggttgagttctccgatacgattgacaatgtgaaggctaagattcaggacaaggagggcatccctccggaccagcaacgccttatcttcgctggcaagcagcttgaggatgggcgtactctcgcggattataacatccagaaggagtccaccttgcaccttgtcctccgccttcgtggaggcatgcaaatattcgtgaagaccctcaccggcaagaccattaccctggaggtcgagtcctccgacacgatcgataatgtgaaggccaagatccaggacaaggagggaatcccaccagaccagcagcgtctcatctttgctgggaagcagctcgaggatggccgcaccttngcagactacaacatccaaaaggaatccaccctgcacc

SEQ ID NO: 8479 - DNA, 513 bp, Oryza sativa
  Clone ID: uC-osflcyp029g12b1
cccgatccccccaacacccaaaccctaaccctcgaagcgacgcaacccaccggcggcgatggggcagggcactcccggcgggatggggaagcagggcggcctccccggcgatcgcaagccgggcgacggcggcgccggcgacaagaaggaccgcaagttcgagccccccgccgcgccgtcccgcgtcggccggaagcagcggaagcagaaggggcccgaggcggcggcgcgcctgcccgccgtggcgccgctctccaagtgccgcctccgcttgctcaagctggagcgggtcaaggactacctcctcatggaggaggagttcgtcgtcagccaggagcggctgcgacccagcgaggacaagacggaggaggaccgatccaaggtcgatgacctccggggcacccccatgagcgttggctcgcttgaggagatcatcgatgagagccacgccatcgtctcgtcgtacgtcgggccggaatactatgttggcatattatcattcgtcgacaagga

SEQ ID NO: 8480 - DNA, 155 bp, Oryza sativa
  unsure (1)..(155): unsure at all n locations
  Clone ID: uC-osflcyp029h01b1
tagatattcaccagtgggagacagaggaatagaaacaatatccactagactcaacgtggacggccaggacccggatggagctgcatgcgcatgtgtgtcngtttgactggatgaatgataccgaattgactgaccaattgggcatatggacttat

SEQ ID NO: 8481 - DNA, 233 bp, Oryza sativa
  Clone ID: uC-osflcyp029h03b1
gttcgtttgtgaagagcaggcaacatcagggatacaataccacatgtttctcgttctgactatggatctgccagcctggatttatctcaatgatactgtttataccatggatctacgagttattatcatagctctgtgccacagcagcgttcttacctgatgcaccggaccgagtgatcaacaacattgtctactatgctgctccagtcatcacaatagagtaaaccctatta

SEQ ID NO: 8482 - DNA, 410 bp, Oryza sativa
  Clone ID: uC-osflcyp029h07b1
gagatactcaccagtgggagacagaggatcgaaccaacaccaccgctcaacgtcgaccgcgcggaccggatgggcctggacgcgcatgtgtgccgcttgacggctgatgcataccacaccgactgaccacttgggcatacggacttatgtcagacaccggcagctcaccgtcgatgacacgatctagcggcacatgaacaattcagcgggctagcagagcgacaccgacttcgacatcgtcacggcttggcggtagacccaccactatactccggtgttggagactctctgtgctgaggggagatgaatctgacgatcgagttatggttattgttggcggctgttaaataccgcttctatgccatcaatacctgtatcatttatacagaaataatgaaacatttaacata

SEQ ID NO: 8483 - DNA, 234 bp, Oryza sativa
  Clone ID: uC-osflcyp029h09b1
gtggatcaggccaagcccttcatcggcacgcactacatctatggcgactcatggatcctcccgccaccagacgggaaatcagcggcatctacctcgacggcgagtaaatcaaccgcatcggcgatacccaggaactcaactgcaccggcgacggcaacggtaagtaactcaactgcaccagcgacacccagcaactcaactgcaccggtgacagcaagtaattcaactgcaccg

SEQ ID NO: 8484 - DNA, 76 bp, Oryza sativa
  Clone ID: uC-osflcyp029h10b1
tcgtttgcactactaaagcagttactcagggcaggatcagattaacactgacgttggtttactcaatgcattgatt

SEQ ID NO: 8485 - DNA, 492 bp, Oryza sativa
  Clone ID: uC-osflcyp029h12b1
gttcgccgccgcagcctcctcctctcgtcttctccttcgagttgttagctacctccttattcaaccatgggtaaggagaagacgcacatcaacattgtggtcattggccacgtcgactccggcaagtcgaccaccacgggccatctgatctacaagcttggaggtatcgacaagcgtgtgattgagaggttcgagaaggaagccgctgagatgaacaagaggtccttcaagtacgcgtgggtgctcgacaagctcaaggccgagcgtgagagaggtatcaccatcgatattgccctgtggaagttcgagaccaccaagtactactgcacggtcatcgatgcccctggtcaccgtgacttcatcaagaacatgatcacgggtacctcccaggctgactgtgccgtgctcatcattgactccaccactggcggttttgaggctggtatctccaaggatggccagacccgtgagcacgcttttcttggtttcact

SEQ ID NO: 8486 - DNA, 268 bp, Oryza sativa
  Clone ID: uC-osflcyp030a04b1
gtcgtaaatggctcctccgctgcaccgaggagcgttcagcaacggcttccagctctgcgtcggcatcggcgccgtcactgcccgcctcaccaacttcttcacgcagaagatcaggcaaggctggggatggcgcgtctcgctcgccgtcgccgccgtccccggcgggttgctcaccctcggcgcgctcttcctcccggagacgcccaacagcctactgcagcaaggcagagacaagcgcagagtcagggtgcttctcaccaggatccga

SEQ ID NO: 8487 - DNA, 390 bp, Oryza sativa
  Clone ID: uC-osflcyp030a06b1
ctttaccttcctcttcttctcttctccttcgttgggcgtgggcgtcgcgagaggcgagatggcggcggcgacgttggcggcggcgagcatgggggtggtgacggaggtgctggggagcgacgtcgtcgacgaggtcgaccagcccatcatcgactacatcgccaacgtcctcgccgacgaggacttcgacttcggcgcccccgacggccacggcatcttccacgcgctcggcgacctcctcatcgacgctcggtgcgtcgccgacgaggagcactgcctcgaggtctgcagtaagatttgtgaaaaatttggaaagcatggcctggtaaaacctaaacaagctatgcgaagccttgtcactcctttacgtatgaacgagggaatggacga

SEQ ID NO: 8488 - DNA, 475 bp, Oryza sativa
  Clone ID: uC-osflcyp030a07b1
ttaaacattaacattgtctatgtgctttagatactcaggtgccatctgcatcttttgcatcgaaatgaaatgaatgtttcccttttcaagtttgcactactacgtaagaattcctatttactgaattatttgtgtgcagcctgtgaatttgaatcaaaatggaagaacatctcccggaaaatggcacgcaaaaggagtgaacctagcatgacctcattgctgcagcatcgagatatggcattgagcagagtgaaaaacgatctggcctgtagccatctgaaaatcaaatggcactcaagttgaagttatttctctcatgttggtatgtatatgcatttaaaactatgcaaaaagtcacctgttactttgtaatttgtgagtgtgcttcagcataggcttttcaaattccatatttatgtttgaaaatcacttgtcttcaagctcaacactgttatctcgcaaaatgatgaagctg

SEQ ID NO: 8489 - DNA, 276 bp, Oryza sativa
  Clone ID: uC-osflcyp030a12b1
tgagtaattaatcgaaaatggtttgcaggtcgtgcgcgatgatccgctgagcggggggcggccaccagatcagcccgcgcatccaactccggcgagaggaggaggaggaagaagaagatgtcttgctgcggaggcgccgaggaggacagctacggcccgccggcgaaccaggccgctccgccgcccaacgtcaatgctcccgggaatagaggctggccgagagggtcgggggccgtcgcggccgggcgggccgccgaagccggtgaacattgacgt

SEQ ID NO: 8490 - DNA, 508 bp, Oryza sativa
  Clone ID: uC-osflcyp030b01b1
ggataagaaccccaagaataaatctgtcgctgctgtaggaaaagcagccggtgataggtggaaatccctgaccgaagcggacaaggctccctatgtagccaaggccaacaagctcaaggccgagtacaacaaggccattgctgcctacaacaagggcgagagcactgccaagaaggcacccgccaaggaggaagaggaggacgacgaggaggaatctgacaagtccaagtccgaggtcaatgatgaggatgacgacgagggcagcgaagaggatgaagacgatgacgagtgagccttccagtggacaagatgggagcagcaagacgctaagggcggcgggcgtcctaaggagcctatccatcatcatcatcgtctactagaattattcagtttcacttcacatcgtgatgttttactttttctctcgtcctataacggatagcgctccttgttggcgccacttgtgggtgtgtggtgcagccaatgtcttgtctccaccgtcaatgat

SEQ ID NO: 8491 - DNA, 384 bp, Oryza sativa
  Clone ID: uC-osflcyp030b06b1
tggatcggcgggcgaggcggcgtcgggcgggcgctgcgacgacgacgtgcgggcgagggctgaagcggcggcggcctcggcccgcacgcccgggcctacaatgcctccaagcataccatcgtgatgccgcctgcgagctcggcgcccatagcatccgcggccgtctcctccgccggtgaggcattcgatggggaaggagcggcttcgcgtgctgggccaccttgttcccggatgccggaaggtccccgggccgatgctggttgggccaactatgtgggcgggcttgagatgcagtcaagggcatggtcttattgacctcttgggcggcacgccggggacgcgtgcgacaggggacgccgcgttaacgggcagcgagcgggacat

SEQ ID NO: 8492 - DNA, 471 bp, Oryza sativa
  Clone ID: uC-osflcyp030c01b1
actctgcaacctgctatgctcatggaaaatacggaaatggcaatccatatcctgtgaacttaagtgtgtctgttggtctcagtggctggcttccttgtgccaggtctttgaagaacaaaattgaaagctcacaggaggctgcacaaaaggcttcatccatacctcttttgctttgtcatggaaaagctgatgatgtagttctctacaagcatggtgagaaatctgctgacgcactgaagacaactggattttcaaatgtggtgttcaagtcctacaacagacttggacactacactgttccggaggagatggatgaagtctgcaaatggctcaccgcgaacttgggggtcagcagctcatcgtcggcttgattgaagaattgagctgtccgaataatacctgtggttgttccaaacaaaattgagaggtaaatggttgaatgaatagcgaagaacttggggcttgggtata

SEQ ID NO: 8493 - DNA, 482 bp, Oryza sativa
  unsure (1)..(482): unsure at all n locations
  Clone ID: uC-osflcyp030c02b1
tagcaccagaaatatggcttcttccaagatgacgctgctccccgtcctcctcctcctcgccgcggcctcgccggcggcgctgggcgccttcgacgtgaaccagatgctcgccgacaagtcccagtacgggtcgttcctgaagttgctgacgcagacgaaggtcgcggaggagacgaaccggctcaagtcggcgtcgctgctggtcctccaagacaaggccatgaagccgatcacgtcgctccccgccgacaagcagcggatggccatggccaaccacgtncctctcaagtacttcgaccccatccagcttgggcgagatgaaggaccgcaccgncatgcttcccacgctgctgtccaacaccgacaagaagctcggcgtcgtcaactacaccaaggccagcgacgggcagatgtacctgggcgcccccggcgcggcctgcgtcgccaagctcgtaaggtcgtcgncgcgcgcccctacgcca

SEQ ID NO: 8494 - DNA, 411 bp, Oryza sativa
  unsure (1)..(411): unsure at all n locations
  Clone ID: uC-osflcyp030c03b1
atttgtcaaaacgccaggaagagaccctgaacttcactactctttcgtgggggtaacctgtgctccagcattccagattgaggacaacgaaatggcaacacgggagaccatgaagacacttgctcctaaagccgaagctttcatcaactaccttgttccttcagactgagtctgaaaccatcactccaagtagcttgctcttcgtgatgaactttatgtaccaagctactgattcagtactgatgtttactgcttgatctgagatctgttcaggactcgcaatgcagaaatcatgaggcctgaaccttgcatatatcatcactgtatcaaactggttgtttggttacatagttttgactctttttatgaaatattgtgattgctgaaaaaaaaaaaaaaatatcaccnctt

SEQ ID NO: 8495 - DNA, 241 bp, Oryza sativa
  Clone ID: uC-osflcyp030c05b1
attctgtgtgtgtgtcttggttgcaaaaaccaagacatacacacagaatcaaataataacaaaggtttcctagcctcaaaggatacatatatatagtttccctacaatacaatggagccttgtaatgatttccaggaaggcattttaacagagcatggctttgagggagaacctggggcatcattggcggaaacaataacgccacgatcaatggtggtgagctttattcttaggggaactt

SEQ ID NO: 8496 - DNA, 470 bp, Oryza sativa
  Clone ID: uC-osflcyp030c08b1
tcgtgaagaaaacccaacccgcgcgaagcacaagcacagaagcaaaagcgaacgacgaggagagacgcgaccaccgccgcgggtcactccccatcccaatctcatccagattggatttgagcggatagaggagggatggatgggaatttcgggagcgaggagcggattctgtggccggcgtcggttcttgccggcatcgccatgtgcgccgcggtatatgacataactcaaaaggttagctctcattgcttcaagggttatgacaatataagcccaatgaaaaaggttgaatggaataataggggtttctctacattccatgcattggttgcagctgttgtttctttttacctggttgtgatatctgacctcttccatagcaacataataattgatagaaactcatggctatctgatgccatgtttggggtctcgattggttactttttgacagatttggggatgattct

SEQ ID NO: 8497 - DNA, 440 bp, Oryza sativa
  Clone ID: uC-osflcyp030d03b1
tattatcagtgatcctctacaatcatcgactttcagcaaattaagatggctgctgccttctcctccaccgttggagctccggcgtccactccgaccaacttcctggggaagaagctgaagaagcaggtgacatcggcggtgaactaccatggcaagagctccaacatcaacaggttcaaggtgatggccaaggagctggacgagggcaagcagaccgaccaggacaggtggaagggtctcgcctacgacatctccgatgaccagcaggacatcaccagggggaagggtttcgtcgactcccttttccaggctcccacgggtgatggcacccacgaggccgtcctcagctcctacgagtacctcagccagggtctcagaacgtacgacttcgacaacaccatgggaggcttctacatcgcccctgcttttatggacaagct

SEQ ID NO: 8498 - DNA, 395 bp, Oryza sativa
  Clone ID: uC-osflcyp030d07b1
tcgtattaattatgctgccactgatgctgaaggtgatcatactttgattgctggtgatgacctcatccagtcagatgtgatactggggtcaaagaaaattgaggcccctgtattatttcggggaattggacatgcggttaatccatctaacagcttggtcctgaaagtcttatccgcctctccgtcagcatactcagcaaacccaaagtctaagttggcttcccctccatctctcacagggtcggctatatcactggtttctgttatgcaggcaagaaacaatgctcgggtcttgatatctggatcacttcatctgtttagcaacaggttcctaaaatcttggtgtcaaaaggccggtagcaagataaggcatgaaaaagctggaaatgaacaat

SEQ ID NO: 8499 - DNA, 513 bp, Oryza sativa
  Clone ID: uC-osflcyp030d09b1
tctgtcggcgacgctggagaggcggtcctgcgacgatggtccacgtcagcttctaccgcaactatggtaagacattcaagaagccacgtcgcccttacgagaaggagcgtgttgatgcagagctgaagctagtgggtgagtacggactgaggtgcaagcgtgagctgtggcgtgttcagtatgctttgagccgtatccgtaacaatgcaaggcacctgctcacacttgatgagaagaatccacgccgcatcttcgagggtgaggcactgcttcgccgcatgaaccgttatgggctccttgctgatgggcagaacaagcttgattatgtccttgccctcactgttgagaactttctcgcaaggcgtcttcagactcttgtcttaaggctggcatggccaagtccatccaccatgctcgggtcctgatcaggcaacgccacatcagggtcggtaggcaaattgtcaacatcccgtcgttcatggtgagggttgagtctgagaagcacatttgact

SEQ ID NO: 8500 - DNA, 495 bp, Oryza sativa
  Clone ID: uC-osflcyp030e04b1
tactttcgtgctcctcttcctcatggcgatctcgaaggcttggatctcgctgctgctcgcgctcgccgtcgtgctgtcggcgccggcggcgagggcggaggaggcgcccgcggctgaggaggaggcgccggcggcggaggccgtgctgacgcttgacgcggacggcttctatgaggcggtcgccaagcacccgttcatggtcgtcgagttctacgccccgtggtgtggacactgcaagaagctcgctccagagtatgagaaagctgcacaagagctaagcaagcacgatccaccgattgttcttgctaaggttgatgccaacgacgagaagaacaagccacttgctaccaagtatgagatccagggtttcccgaccctcaagatattcaggaaccagggcaagaacattcaggaatacaagggcccaagggaggctgagggtattgttgaatacttgaagaagcaggttggtcctgcttccaggagatcaagtca

SEQ ID NO: 8501 - DNA, 444 bp, Oryza sativa
  unsure (1)..(444): unsure at all n locations
  Clone ID: uC-osflcyp030e07b1
tcgattgtttttggcctgaaactttgggttgtaattgggatatctgttggagcatccctacttggtgttcttctcatccttattgtatgcctcaccatacaaacttggatcaaacggtcacgtaggacattcaaggaaattccaattacccaaataccttctgcatccaaagatatcaaggaagtgagggcagtggaggaatttttgcccaatgatttcgttgtacatgatggacttctactcgccattcagaatgaacctgttgaaccagtggataaagatgtgaatcagtttgctcaagaggacaagacgatacaaggagaagataacagttcttctgttcctcttcattatgtggacaactatgatggaattcaatctgtttccacatgtgaacagtcttnctcgcatgctcccgccgactctgttcccttgccaggctta

SEQ ID NO: 8502 - DNA, 511 bp, Oryza sativa
  Clone ID: uC-osflcyp030e08b1
ttctgtagcgctacgtctacaagcgccgctccgatggtatctacatcatcaacctcggcaagacatgggagaagctgcagctcgcggcgagggtgattgttgccattgagaacccccaggacatcattgtccagtcggcccgcccctacggccagcgcgccgtcctcaagttcgcgcagtacactggcgcgcacgccattgctggaaggcatacgcctggtacatttaccaatcagctccagacctccttcagcgagccccgtctgctcatcctcaccgacccaaggaccgatcaccagccaatcaaggagtctgctctgggaaacatcccgaccattgccttctgtgacaccgattccccaatgcggtatgtcgatatcggcatcccggccaacaacaaggggaggaacagcattgggtgcctgttctggctcttggctaggatggttctgcagatgaggggtactatcctcccttgccacaagtgggatgttatggatgatctgttttt

SEQ ID NO: 8503 - DNA, 505 bp, Oryza sativa
  Clone ID: uC-osflcyp030f01b1
atccactcacgcacacactcctcatcccagagcaagaagctcatctcctcctcctctcgcatggcagccatggccaccaccgcgtccagcctcctcaagacctccttcgctggcgcgcgcctccccgccgccgcccgcaaccccaccgtctccgtcgcgccgcgcaccggcggcgccatctgcaactccatctcgtcgtcgtcgtccactcccccctacgacctcaacgccatcaggttcagccccatcaaggagtccatcgtgtcccgcgagatgacccggcggtacatgaccgacatgatcacctacgccgacaccgacgtcgtcgtcgtcggcgccggctccgcggggctctcctgcgcgtacgagctctccaaggacccctccgtcagcgtcgccgtcatcgagcagtcggtgtcccccggcggcggcgcgtggctcggcgggcagctgttctccgccatggtggtgcgcaagccggcgcacctgttcctcgacgagctcg

SEQ ID NO: 8504 - DNA, 328 bp, Oryza sativa
  Clone ID: uC-osflcyp030f03b1
actaccccccccccccacccgccccgggcctgggaagtttttcgggcagggatggtaactgccggctccgcctccgcctccgtatttcccgccgtggagtttggcgccaaaacctcacgtctgggccccagtcccagacccagaccgagccccgtattctaattctcgaggacttccctcctcgtcttggacgccggtaggttccactcaagcctttacatttataatttcaagcgccacgggcagcaacattgttagcaacgccagcggtattaacctggaggaccccgtgctcgcgccgattgccgttccaaatatgaccggtact

SEQ ID NO: 8505 - DNA, 354 bp, Oryza sativa
  Clone ID: uC-osflcyp030f08b1
aggaaaagaatggctagcaatatataatataataatataaccattgtacatttatggatcatacaacagccatgaggcccccacagggaatgcagagcatagcggcacgggcaaacagagtacagtggagctaagccaggagaggactgaagaacgcaaaagatcatagtgctggtccctcgcatgtgtccgaaagttttatctgccttctccccaacattacaagatgcgaccatatgatgcccgctatttgctcccatcaagccccataatggcagcaaagattggtcatgcctggttgctgtccgatgtggaaactttcgcgctgcacatcgggcaaaccttatttatttg

SEQ ID NO: 8506 - DNA, 482 bp, Oryza sativa
  unsure (1)..(482): unsure at all n locations
  Clone ID: uC-osflcyp030f09b1
taaaaaccaacccaaccgccgccgcatcgccctcgttagaacgatggccgcgtcggcgctgcaccagaccaccagcttcctcggcaccgcccctcgccgggatgagctcgtccgccgcgtcggcgactccggtggccgcatcaccatgcgccgcaccgtcaagagcgcgccccagagcatctggtatggacctgaccgtcccaagtacctgggcccgttctcggagcagacgccatcgtacctgaccggagagttcccgggagactacgggtgggacacggcggggctatcggccgacccggagacgttcgcgaggaacagggagctggaggtgatccactcgcggtgggcgatgctgggggcgctgggctgcgtcttcccggagatcctgtccaagaacggngtgaagttcggggaggccgtgtggttcaaggccggcgcgcagatcttcttcagggggggctcgactacctggggaaccc

SEQ ID NO: 8507 - DNA, 417 bp, Oryza sativa
  unsure (1)..(417): unsure at all n locations
  Clone ID: uC-osflcyp030g01b1
tttctgagctctatgcgttgtgccggtacatgtcttctggaagagtacctggaaattcagaacctgctggactaattgaagacaaagagggtgaagacaataaagagagctcaaaaacagatgagtctgaactcagattggcacaacttcaacaccagctcccaactaatgaacctggagcgctgatgcatcttgtacaagaatctactgctgctgatgcanacgacgctgatgccaaagaatgcaggagtttattcaaaaacctgaagttttacctaagtcgtgaggtgcctagggaatctctcttatttatcattccagcatttggtggtaccgtttcatgggaaggagaaggagctccttttgatgagacagatgaagacatcactcatcagattgttgatagaccgacccaaa

SEQ ID NO: 8508 - DNA, 415 bp, Oryza sativa
  Clone ID: uC-osflcyp030g02b1
taccgccatggctgccacactctcctctgctcctgccccctccaagcactgctccattgtcagagcccagcactcccctcccccttccatcctctcatcatcaactaagacggccttccatgggctgtcactggtggacaggcggtgggcggcctctgtcggcggcggcagcgggcggcggcggagggtgcttcaggtgaacgcgaggacggccggcgcggcgaagaacatcgaggtggaggtcgacaagccgctcggcctcaccctcggccagaagaccggcggcggcgtcgtcatcaccgctgtggattctggagggaacgcggcaagagcaggcctgaaatcaggtgaccaggtgctctacacaagtagcttttttggagatgaactatggcctgcagataagctggggttc

SEQ ID NO: 8509 - DNA, 601 bp, Oryza sativa
  Clone ID: uC-osflcyp030g07b1
taagtcgcccggcctcccgccgcctctgctgtctcagtcccgagtcgcgagtcgtaacgccaccacgaggagccgaggaggaggaggaggaggaagaagaggtgtttgttggttgtgatgttgattggtggtttggtatgctttggttttcattttatttttttccttttttttctttttctttttttttttatttttttatagtggttcttttttctctttctttttattatttttttctttggtttttttttctatttattttttttttttttgttatttttttcttatttattttttctttacttgtttttatcttttctttttcttattcttattatttcttttttctttttttttatttttctttaattgtatattctcttcatttcttcttctttttactcatttttatttcttttccattctcttcttattgtattttctttgctcatacttattctcttttatttttttttcttattctttttatatcttttctttcatttttattcttattcttatttattattatttcttttgtcttttattttcattctatctctatttttcttttatttcttttttttcttctcaattt

SEQ ID NO: 8510 - DNA, 264 bp, Oryza sativa
  Clone ID: uC-osflcyp030g10b1
tcggatcgatcgagcttaacacgctagctcgatcggagttgatcagctagtaattaagcacgtatttgctacagcatatatgaacaaagtaattaaaataacacctgcggcagacatgcagcgctccattctctctctgtatcagctgtatactttatgttgcacgctccctgtgtgcatgttctatcttaattttcttcagtatgtacacgatctgtgtgtactacgtgtaatcctatacgttttatgaattgcatgttgtcc

SEQ ID NO: 8511 - DNA, 374 bp, Oryza sativa
  Clone ID: uC-osflcyp030h01b1
tacatagtgccatcgctcacacggccggcggcggcggcgatggcgaggggcgtctcctacgtttccgcggcgcagctcgtccccatgctccgggacccccggatcgccgtcgtcgatgtcagggacgaagagaggatctacgacgcgcacatcgccggctcgcatcattacgccagcgacagcttcggggagcggctgccggagctggcccaggccaccaaggtcaaggaaaccctcgtcttccactgtgccctcagcaaggtgcgtggcccatcttgtgcgcaaatgtatctggactatttggcagaggctgatgaagatcagatgtaaagaacaatcatggtccttgaccgggatttattggatgggaactt

SEQ ID NO: 8512 - DNA, 482 bp, Oryza sativa
  Clone ID: uC-osflcyp030h06b1
ttaatattccccatctgtgaaattcgcaaaaccctagcgcggcggcgatgtcgaacacgagggtgttcttcgacatgaccgtcggcggagctccggcggggcggatcgtgatggagctgtacgcgaaggacgtgccgcggacggcggagaacttccgcgcgctctgcaccggcgagaagggcgtgggcaagagcggcaagccgctgcactacaaggggagcaccttccaccgcgtgatcccggagttcatgtgccagggcggcgacttcacccgcggcaacggcacgggaggggagttcgatctacggcgagaagttcgccgacgaggtgttcaagttcaagcacgacagccccggcatcctgtccatggcgaacgccgggcccaacactaacgggtcccagttctttatctgcaccgtgccctgcagctggctggacgggaagcacgttgtgttcggccgcgtcgtcgagggcatggacgt

SEQ ID NO: 8513 - DNA, 400 bp, Oryza sativa
  unsure (1)..(400): unsure at all n locations
  Clone ID: uC-osflcyp030h07b1
tttttattgttcttgttccggactacaaccatcaggcaggtcactggttttggtttggtgtttccctttcaagagggcccggtgtaaatctcttcctgattagttaattagcaacttaacatgtccctatcattggttagttaattatcaactctgtccttttcctgcccctcttccccctctttctgggagagtttttcttttgtaaggtttccactttangtgtatgttatggtctttgtatttgtgatacaatcgttgctgctgttttgggaagaaaagtcttccaaaaacagaacaaagaaatgataagaaaacgtgtttcctttgttttcatcagacaggagactggcggaggctaagcagcatttgacacatgcatagataatgggatgaccct

SEQ ID NO: 8514 - DNA, 494 bp, Oryza sativa
  Clone ID: uC-osflcyp031a04b1
tgcgtgatgatgagcagcagcagcagcttggggggcgccatttctgcgtcaccgtctgccactgcaaaagctcgtcttcgttatgactatgcactaacagcaacaggagcagcagcagcagcagcagtagcagcgaggcagctaaagacggagcatggcggttgctggtgttgccggagcagaggccgggcggtggtggctagggcggagcccgggccactgacggagatcgagcccgacctgaacgaggaccccattgataagtggcgcaccaacggcgtcagcccggacgacttcgagtatggagtgcatgatggtcaccacacctataatgaaacccaagataagaagggcttttgggaggatgtctctgagtggtaccaagaagctgaacctcctgagggcttccaacgcgtgatctcctggttgtttcctcctgcaatcatccttggcatggccttcaatgttccgggggagtacctttacatcggcgc

SEQ ID NO: 8515 - DNA, 487 bp, Oryza sativa
  Clone ID: uC-osflcyp031a07b1
tctttggagctaaaggaaaagatagaggatgagggccgggtgaacatgattctggacaacctcccgctagttgtgcctattacaaggccagatagggatgatgctgtttttcagggtggatatcatgttggtgttaagggccaatatgctggtagcaaggatgagaagtactttatccataaccacctgatatttttagtgaagtatcacaaggatgaaaattcagatctctctagaattgttgggttcgaggtcaaaccatttagtgtaaaacaccaattcgaagagaaatggaatgatgcatatactcgtttgagcacatgtgatccccatgccaacaaaataataataaactcagatactcctcaagaggttgaagctggaaaggatatcatattcacatatgatgttggctttgaggaaagagatatcaagtgggcttcttgctgggacacctatgtgcttatgacagatgatcaaattcact

SEQ ID NO: 8516 - DNA, 475 bp, Oryza sativa
  Clone ID: uC-osflcyp031a09b1
tggacgcgtgggcggcgccggcgccggggggagcctggacctccccgtgggggacctagcgtcctccgacctcgccgccgccgccaaatccgtccgaaaggcttgcgtggagtacggattcttctacgtggtcaaccatggagccgagggattggcggagaaggtgttcggggagagcagcaagtttttcgagcagccgctgggggagaagatggcgctgctgaggaacagaaactacctggggtacaccccgcttggcgccgataagctcgacgcctcgtccaaattcaaaggagatatcaatgaaaattactgtatcggacctatcagaaaagaaggttatcagaatgatgctaaccaatggccttctgaagagaatttcccatgttggaaggagacaatgaagctataccatgaaactgcacttgctactggtaaaaggatactctctctaattgctctgagtttgaatctc

SEQ ID NO: 8517 - DNA, 465 bp, Oryza sativa
  Clone ID: uC-osflcyp031a11b1
tctctgagcttggtctcaccctgggggcgttcctgttgactccacgtctagaatgctctccccacacgtgttgggcgaggatcactacaacactgctggtggtgtccaaaaggttcttcataactaccagaatcttgaggatattattgcaattttgggtatggactagctcaatgaagatgacaaggtgaccgccactcgcgcaaggaagatccagcgtttcttgagccagcccttccatgtggctgaagttttcacgggtgctcctgggaagtacgtggaactgaaggagagcgtcaacagtttccagggtgttttggatgggaaatatgatgaccttcccgagcagtcattctacatggtgggaggcattgaggaagtcattgctaaagctgagaagatcgccaaggagtccgctttataagatctcttcattgttaagttcttgtacaagataaatttttg

SEQ ID NO: 8518 - DNA, 442 bp, Oryza sativa
  Clone ID: uC-osflcyp031b01b1
actactatgtggtaagctgtacgcctagagtaccgccccggcattcccgcctcgacccacccctccttcttatcccccgcgccaccctttttttctttaagtcttttttaattccagggcgtgtttttaaacacccggtgatggatcaccctgaactgaccaccgatcaggttctcaagagggatattccatgggaatcatacatggcaaataagctgatttccgggacatgccttcagcttttgcgaccatctgaccacaaaccacaaagccaacaagatcctttgcttgatcaggatgggccatcctatgttccagtgttcctgaatatcttccggaacatcttcaagtaagatactgattaatatgcgcttgccctgattgatgaaatccttgcagtcaatcctaaaccaacagcactcttctatgataactctctctc

SEQ ID NO: 8519 - DNA, 390 bp, Oryza sativa
  unsure (1)..(390): unsure at all n locations
  Clone ID: uC-osflcyp031b05b1
tttagccccaaccacagcatgatgaagaacataggagacaggaacaagcatgatcttcttcagagtgccatgaaccatgcagcaagcaagtacatgcagaggatctaccctctggggatccagaggagcagctccaacctcacactctcatcactctccctgtcacagaactccaatgattcttcactcagcagctcaaactctagctgggagcccaaggtgcccctgctgtatggtggcacatttagcccctggggtgatgtgcttgtgtccctggagaggaggagggaagaagatgatgacaaggttagtgatcatgatgttgagggganagaagagggttttggttggactggagtcatttggtcacgctacatgcagctggatcac

SEQ ID NO: 8520 - DNA, 411 bp, Oryza sativa
  Clone ID: uC-osflcyp031b09b1
tcttaagggccagcagcccaattccccgtgaccggtatggtggacgtggtagagatctcccgaccagtcttctagtcaggaatcttcgtcgggactgccggccagaggaccttcgtcggccattcggacaatttggtcgtctcaaagacatatatattccaagagattactatagcggtgaaccgcgtggatttggatttgtccagttctacgatcctgatgatgctgccgatgcaaaatactacatggacgggcaggttattctgggcagggaagtagctgttgtatttgcagaggagaacagaaagaagccttctgagatgagatctcgcgacagaataagtggcagcagaggtcgttcctatgaccagaggtactctaggtcaccgcgatactcttctccttcaaggg

SEQ ID NO: 8521 - DNA, 508 bp, Oryza sativa
  Clone ID: uC-osflcyp031c06b1
tatgccattcttgttatcacatccagttgagtgcatctcacgggcattcaatcttgggcgtgtcttcatccatttctggtctgtaaattttaaatttgtccctgagaagttctttgtatcaaaagagctagctgttgcattgttggttcttcacctcactactcttttggtctttgcacactacaagtggcttaagcatgagggtggcttgttccatttcttgcattccagattcaaagatgccacatcaattggacagttaatttttgccaagcccaaactgtcaactcttaacaaagaacatattgtaacggtcatgtttgttggaaatttcattggcatcgtgtgcgcacgatcattacactaccaattttattcctggtacttctattcactgcctttccttttgtggaaaactcgttttccaacatttgtgagggtcattttatttcttgctgtggagctctgctggaatatctatccttccactgcctattcgtcactgctg

SEQ ID NO: 8522 - DNA, 497 bp, Oryza sativa
  Clone ID: uC-osflcyp031c09b1
ttgcgcacctcccgatccctccctccgctcggtcgcccatcgcgccaggtgggctctttggacacccggtgatggatcacgcggagctgaccaccgagcaggttctcaagagggatattccatgggaatcatacatggcaaataagctgatttccgggacatgccttcagcttttgcgacgttatgaccacaaaccagaaagccaacgaggtcctttgcttgatgaggatgggccatcctatgttcgagtgttcctgaatatcttgcggaacatctccaaggaagatactgttgaatatgtgcttgccctgattgatgagatgcttgcagtaaatcctaaacgagcagcactgttctatgataactctctctctggtgaagacatctacgaccctttcctaagattgctcttgaaaggtaactggtttgtgcaagaaaaaagttgtaagatattgacccaaataataagtgcacgacccaagatgcagaatggcata

SEQ ID NO: 8523 - DNA, 508 bp, Oryza sativa
  Clone ID: uC-osflcyp031d01b1
tataaccaacccaaccgccgccgcatcgccctggttagaacgatggccgcgtgggcgctgcaccagaccaccagcttcctcggcaccgcccctcgccgggatgagctcgtccgccgcgtcggcgactccggtggccgcatcaccatgcgccgcaccgtcaagagcgcgccccagagcatctggtatggacctgaccgtcccaagtacctgggcccgttctcggagcagacgccatcgtacctgaccggagagttcccgggagactacgggtgggacacggcggggctatcggccgacccggagacgttcgcgaggaacagggagctggaggtgatccactcgcggtgggcgatgctgggggcgctgggctgcgtcttcccggagatcctgtccaagaacggggtgaagttcggggaggcgtggtggttcaaggccggcgcgcagaacttttccgagggggggctcgactaccctgggaaaccccacctggtgcacgcgcagagcatcc

SEQ ID NO: 8524 - DNA, 476 bp, Oryza sativa
  Clone ID: uC-osflcyp031d02b1
tgtctacgtcgcgccgtgctgcctctgctggcggcttgttccatgggtgtggggggttctgcccaggctgcccgccgtcggtacgttccgcccggacttcttcatgttcgggaccaactcgctctgcgccttcgcgctgaatctggcggtgttcttgctcgtcggcaagacctccgcgctcaccatgaacgtcgccggggtggtcaaggactggctgctgatcgccttatcgtggtccgcgatccgggacacggtcacgccgatcaacctgttcggctacgggatctccttcttgggggtggcatactacaaccacgtcaagctgcaggcgctcaaagctaatgaggcgcaaaagaagatcagccaggcttttgatgacgcttgccttcttttgcaagagcgcgatgggcacagtgatcgcaagagcgataaccaggcatagagccaccacccgatctgaggctggcacacacaaa

SEQ ID NO: 8525 - DNA, 334 bp, Oryza sativa
  Clone ID: uC-osflcyp031d03b1
tgctttatcaagctcacagggagtggggaaaacgcttcctgaaattgtatccacggtatactagttgggataacccaaaagtcgctgatcgtcctctggtcattggctatgtgtctcctgattactttactcactctgtgtcatacttcattgaagctccccttgcacaccatgactactcaaattacaaggtggttgtgtattctggtgttgtgaaggcagatgccaagacccttcgattcaaggataaggtattaaaaaagggtgggttgtggagagatatatatggtattgatgaaaagaaggttgctagcttggtaagggaggacaaagt

SEQ ID NO: 8526 - DNA, 428 bp, Oryza sativa
  unsure (1)..(428): unsure at all n locations
  Clone ID: uC-osflcyp031d04b1
ttgcgtctccccccaccaactagctctctgtgtgtctctctctctcgcgccggcgctacgctcgccgcgccgccgctacgctcgccgcgccgccgcgggtggggagatttgaccggcgttgactccgggatggacgggcggttcccgctgccgccggcgagcggaggggggcgggggcaccaccggcgggcgcactcggagacgttcctgcggctgcccgacgcggacctcctcctcgacccggagggggacttctccttctccgacctcgacttcccctccctctccgacgactccccggccatctccgacccgaccccgccgccgccgncgncgatggctgcgacccccgcgccggcgccgcggccaccgggtggggcgcacatgaggagcctctccctcgacaccgccttcttcgagggtttctc

SEQ ID NO: 8527 - DNA, 366 bp, Oryza sativa
  unsure (1)..(366): unsure at all n locations
  Clone ID: uC-osflcyp031d09b1
tccgaagctttggcgcacacaatagggagtagccatgccgtgggcggctgaactagcgcaggggatggagggatggcgctcanatccatacatccctccatccgctcgtgggccccttctaggcgataggcgttgggcggcggcggtcggcggcagcaggcaccggtggtccgccgccgcgggcggctatggtccgtagtgggcagcggtggaacggcgcgctccgagccgccccctgctgacacggagctgcagcccgttgcgcggctccacgccatagagctgcgggaccggcacctggctctcccacggggtgcagtgcttgaaacaggacaacgctggaatcacccactgatatcacttcaa

SEQ ID NO: 8528 - DNA, 476 bp, Oryza sativa
  Clone ID: uC-osflcyp031e01b1
gaaggatgttgatcgagattgtgagggagggtggtcttggcctgaggatggaacttaagaggaaggagttgagagatgatgtcaaccgccaacaagaattggctgcttatttcactaactgcaagcttcagagagttcatatgaggcttgtgcttggaagcgctatgggtctgtgctacaagcaaaagaacttcgctactgcagagcactttgcaaggatgcttctggagaacaaccctaatgaggcccaggcaaggagggctcgacaggtgcagcagcagtgcagtggcaagaaagatagctctgagctgaactatgactacagaaatccatttgttgtctgtggcgccacatatgttccaatctaccgtggccagaaggatgtttcctgcccgtactgtggatccccgcttgttccttcgatcgaagggcagctttgtaccatatgtgagcttgccgtggttggtgcagatgct

SEQ ID NO: 8529 - DNA, 450 bp, Oryza sativa
  Clone ID: uC-osflcyp031e03b1
tttttatttctaggcattgattgaatgcgatgagaacttttttagacttaaggggggatgtataatctgttgggaggataatagattcacacactcctaacattaataaggatttgttattggacctaaaaagaacaatatacaaattaacaattgttccatacattacattaagcgttgtcagcgtaagacaaacacaaccgaagattgaatctattatgaatgattttattcaattggaaccccaattcaatctatttgaagcatatactatggtggaaggtacccttgatggattcacatttgattctgactaggaaggtgacaagttttctgagccgcatgcttctcaaaacgatcaaaataatgaagatggagatcaaactatggcataaaccaaaagaaaagctgagaaaccggcggcgaagggacaaaagaaggcgaatgttg

SEQ ID NO: 8530 - DNA, 484 bp, Oryza sativa
  Clone ID: uC-osflcyp031f03b1
ttttcacttccatccgtcggcacaggaggaagggtgctaaggggggatcggctccattcctcattcttcattccatttgcgcgcgtgattcgggtttcttttccttcttgtcacctgtttcttggtcggtttcccgccttctcagaggtcggtctattggatttggagcccggggcccagccttgcctcaacgtctgtgttgtcgtgttcttattggattcttgaccggattggattttggcggttccaatttttgttggtttgctccgattcttggttgatttggtcggaagatgatcaagtggggcatcggtagcagcgggacgccggcggattcgtattatgaggtccgctcggattgcacggatgacgtgcccaagagcaagttcaagatcaaggcaggaaaaacattgagtgtccggaaatggcaggctgcatttagcactgatggttgtcttgatattgcctcagtcctaagccggat

SEQ ID NO: 8531 - DNA, 486 bp, Oryza sativa
  Clone ID: uC-osflcyp031f04b1
taagaacatcagcttcactgtttgggatgtcgggggccaggacaagatcaggcccctgtggaggcactatttccagaacacacagggactcatctttgttgtggacagcaatgatagggagcgtgttgttgaggccagagacgagcttcacaggatgctgaacgaggatgagctgcgtgatgctgtgctgcttgtatttgcaaacaaacaagatcttcctaatgccatgaatgcagctgaaatcactgacaagcttggtttgcattccctgcgccagaggcactggtacattcagagcacttgtgctacatctggtgaagggttgtatgagggtcttgactggctttccaacaacattgccagcaaggcttgagcgttttggcagctggatatctgaacaattcactagtgccggtttacatattatataacatatacaccctaccacacatagtgtgggggcctgtgaaggaaaaaactcctttg

SEQ ID NO: 8532 - DNA, 472 bp, Oryza sativa
  Clone ID: uC-osflcyp031f07b1
tttggtcagaatttatctggccaaaatggctttgcattgttgttgactggtccaaatatgggcgggaaatctacaataatgcgtgccacctgcctagctattgtgcttgcccagctcggctgttatgttccctgtcagtcatgcgagttgacacttgcagatgccatatttacacggattggtgcaatggatcggattatgtctggagaaagtacctttcttgtcgaatgcactgagactgcatctattcttgagaatgcaaccgaggattctctcgtcttgcttgatgagcttggcagaggaactagcacatttgatggatatgcaattgcatatgcagtattccgacaccttgtcgaagcggtccgatgccgtctgctctttgcaactgactaccatcctctcaccaaggagtttgcctctcacccccacgtcacccttcagcacatggcctgcatgctgaagccaagaa

SEQ ID NO: 8533 - DNA, 461 bp, Oryza sativa
  Clone ID: uC-osflcyp031f08b1
ttgatgtcaatgagttccagaccaaccttgggccctacccaaggatccacttgatgctttcgtcctacgctccagtgatctctgcggagaaggcctaccatgagcaactctctgttgccgagatcaccaacagtgccttcgagccatcctccatgatggccaagtgcgaccctcgccacggcaagtacatggcctgctgcctcatgtaccgcggcgatgtcgtgcccaaggacgtgaacgccgccgtcgccaccatcaagaccaagcgcaccatccagttcgtggactggtgcccgacggggttcaagtgcggcatcaactaccagccgcccagcgtcgtccccagcggcgacctcgccaaggtgcagagggccgtgtgcatgatctccaactccaccagcgtcgtggaggtgttctcccgcatcgaccacaagttcgacctcatgtactccaagcgcgcc

SEQ ID NO: 8534 - DNA, 445 bp, Oryza sativa
  Clone ID: uC-osflcyp031f10b1
taccaagctgtctgaggcctagccgtcgtggtcgccgacgagcgccaccagcggaaccatgggcgccgggctcacccgcccggctccaggcacggaccagtgcttccggcgcaagaagacggacgtggccgtctcctactgcaagccggggcgcgggctgatcaaggtgaacggggtcccgagcgagctgatcagggcggagatgctccggctgaaggcgttcgagcccatactgctcgcggggcgctcgcgcttcaagggcatcgacatgaggatccgcgtacgcgggggggggaagacgtctaagatatacccgatgcgccaggccatcggcaaggccctcgctggctactaccagaagtgcgtcgacgaggcgttcaagaaggaggtcaaggacatctgtgcccgctacgaccgcacacttctagtcgccgagcccaggcgc

SEQ ID NO: 8535 - DNA, 335 bp, Oryza sativa
  Clone ID: uC-osflcyp031f11b1
tctgtcacacgctcgagtcgctcaaccgggggggcgtttttcaataggaccggcgttaccaacaaacatatgaacgacccaccatcatgaggcccatagacaacagtcgaagatgacttctaaacaagctcaaagaatacaatggacacgactgcgaagtaatacatgaggctgactattttgctggagaaaaaactgaacatgaagatggtgacacaatacctactcactcaaatcacgtgaccaacactctcgctcttgatgatctgtttcctccaagttaacttgccaacttaaagagtatgcgcaaaggatctggttctggtaggactaac

SEQ ID NO: 8536 - DNA, 486 bp, Oryza sativa
  Clone ID: uC-osflcyp031f12b1
tctatatcaagcaagcaagaagagacgagacgagggagagaaggagaagagggggccggccgcgggcgtcgtcgtgttcctccccccctctctctcctctcctctcctctcgatctccatccttccttccatccattcctccccgcacccttcgcattgctctcgtcgtctcgattcggtcgaggatctccaggaaaagaggaggaagcgatatgggttgcttttcatgctgcggagcggatgatgtcggcaagaagaagaagcgcgacgatccttacgtcccgatccctgatccaggtggtaactatggacgtagcaagcccgggcccccagccccttcgcgttctccccccaccagcagaaatctgccaattgcagtaccggcaattccccttgatgaaataaagggaataaccaagaacttcagcagtgatgctttcatcggagaaggcttgtacccagagtttttttggtgtgctgagagat

SEQ ID NO: 8537 - DNA, 477 bp, Oryza sativa
  unsure (1)..(477): unsure at all n locations
  Clone ID: uC-osflcyp031g09b1
actggttttatgtgatctcataattctgggggaatcatcttctccgcgtcaatccgccattgttactagtagtagtagagctctcttgttgttgttcttcttcttcgtgttcttcttcggttgattaaataatcgtagcagcagaagaagcagctgtttgtagacaaggtgtttgtggaaatgtcgtcgtcgtcgctgtcgccggcggggtcgtcggacggggactcggcgggggtggtggtggcggcggaccaccggagggagaagcggcggctgtcgaacagggagtcggcgaggcggtcgcggctgcggaagcagcagcacctggacgagctggtgcatgaggtggcgaggctgcangcggacaacgcgcgcgtgctggcgcgcgccagcgaaatcgccgggcagtacgcgcgcgtggagcaggagaacacggtgctccgggcgcgcgccgncgagctcggcgacaggctgcgc

SEQ ID NO: 8538 - DNA, 493 bp, Oryza sativa
  Clone ID: uC-osflcyp031h06b1
ttccgcccaagacggaggaggggctcgacaacctgttcgagcggatggatcgcatggtggcgcacggccccaacttctgcgacatcacctggggcgccgggggatccaccgccgacctcaccctcgagatcgccaaccggatgcagaacatggtgtgtgtggaaacaatgatgcacctgacatgcaccaatatgccagttgagaagattgatgatgccttaacaacaataaagtctaatgggattcaaaatgttctggctcttaggggtgatcctccacatggtcaggacaaatttgttcaagttgctggtggattcgcttgtgctcttgatttggtacaacacattagagccaagtatggtgattattttggtattactgttgctggttatccagaggcccacccggatgcaatacaaagtacggaaggggctacaccagaagcatacagcaatgatcttgcttatttgaagcaaaaggttgatgctggtgc

SEQ ID NO: 8539 - DNA, 328 bp, Oryza sativa
  Clone ID: uC-osflcyp031h08b1
taaccatccatcgccggccgattcctctgcgccactgggtaccccaacatgcaggactatgtcgaccgtttcgctgtcaagtacccggagatcgcgataaagcttaaaggggtgattgggaaggatgtgagggtgaaagcggatacaaacaagcttggggatttggggttcaagtacaagtttacggtggaggagacgttggacagcagcgtggaatgtgccaagaggctgggattactttgagcgtgccaagcagtataatttcttgtcctaatgtctgtatttgttccggcccttttactccaaccgtatctaagaaatgtaccct

SEQ ID NO: 8540 - DNA, 481 bp, Oryza sativa
  Clone ID: uC-osflcyp031h12b1
tcttaaaagtactggtggcagcccaccggcttgtggaagtgcaaagggtgttccaccagctgtccaattgccgtcacctcaacaacaatcagccaagaatccagcatcgacgtctggagccaagtcagctcccacaaatcactatagtagtatgcctatgccatcgatccttggtcaacagccaaatgtgccgcctggttctaattcaggcagtaagcagcagtcgcacatgatgaaacagcagccatttccacaaggaggtcatttcttcatctccaatgcatacacaccacaagcccctggagctgctggaggtgttgctcttggcctttaccagaagcgctcagctgacaagacgcagcagcagcagcagccccatcagcagagcgccatgtcggctgcagccagcaataacatgaagactcatcatcctcccgctggcagttttatgcatcttgccgcagcatctcagtcttcgagc

SEQ ID NO: 8541 - DNA, 218 bp, Oryza sativa
  Clone ID: uC-osflcyp032a03b1
ttgaatgctctacctgcgtctccccaccaaaggggggttttaattctcctccgcagccgttactaccggcaccaacgccgacgaggagaggaggagatgggaaggcgagagggaggtaggtaggtaggcacatcagacattttctcagatgttccattgagtgaggacagcttgtacagggcgaggttttcggtgcaggccgcccgttactaggtgat

SEQ ID NO: 8542 - DNA, 314 bp, Oryza sativa
  Clone ID: uC-osflcyp032a08b1
tacattgctgcttctgtgcccgaccagacaagggaagctaagcaccatcaccagcagctactaggtggaggaggaggaggaggagaaaaaaaaatatagagttagtcacagctcaggcagggagagacagagagagagaaagagatttttgagagagagagacagacatggagaggaggaggtctcggaggcagcaagcctttcaccccgtctccgagataacgatgtactcctcatcttaggtagctgcggaggaggaagaagaagaggggttggttgttggtggccggaggagcaccgccgacgatgggaca

SEQ ID NO: 8543 - DNA, 195 bp, Oryza sativa
  Clone ID: uC-osflcyp032a11b1
tattataaaaaaaaaaaaaaaaaaaaaaaaagaaattaaaatgaaaaaaaagatacatggatccgacccaccttctaaaaggaacccttgtttacaaccgacttcttgggagggattaaattttgtgtggggtgtcctggggtgaataaattgcccggcgtttaacaccacggagacggggaaaacttgggggag

SEQ ID NO: 8544 - DNA, 394 bp, Oryza sativa
  Clone ID: uC-osflcyp032a12b1
ttcctcttaagaatggcgcgaatgctgggatggatgacgagatgctgcagctgtgggaagctgcccagaggagctgcaaaaaccaaacatccaaatcatgatcagctgcgcacgacatacaagcggttgaggaggacgaagacagaggacccaccctctgagctagcaaggggaggagaccttggaatcgataagcttgaggtgccgacatcatctcgagaggctcatgagcaacggagcaacactgtactggagaaggtctcttctgatgctcagaggatgcatagcatccaagcgagcatcaaggagctgcagcggaaaatggggagcccatcaaacgggaaatcgcccatgaactccgaatacaacaccgtcagcactcagctactcgata

SEQ ID NO: 8545 - DNA, 394 bp, Oryza sativa
  Clone ID: uC-osflcyp032b02b1
tcgttcagaagcaataccatctgagcttgaagcaagaaagcgaggtaaacatggtcggcgacaccatggtcatctatttccccttgctggccgtcaaggccgacctgaaggtgttcggcgaggtgcgcatcaccatgcgcaagtctgcgaacaacaccatgcccgccgagttggaagagcccgtgagacggagccgaccgcgtgctctacctctgaccgctatacggcgagccggccagctacctgaccggctagtaccacggtgactacggctgggacaccatagggctcttcatccacccgtagacgtttgccatgaaccgtgagctggaggtgatccactccactaggacgacgactaggacgctaagctgccatgtgcctgagctcctct

SEQ ID NO: 8546 - DNA, 309 bp, Oryza sativa
  Clone ID: uC-osflcyp032c05b1
tgttttggaaaagccaataacagcagaggagatgactttacgacaacagatagtactgcaagctcagcagatgggtacgcgaacgattgaggatgccaaaacctcaccatctttggccagatgatctctgtccttgaaggagtcatatagaaggcaggagcaaagaactgacactaccaactcaaacacctggtggatgtgttacactgaggggcaacagctgcaaaaggtggaagtagagctataagtgaaggatgtctagggcacgccacatgacacgttagcatccaagaagtggatttagaattc

SEQ ID NO: 8547 - DNA, 294 bp, Oryza sativa
  Clone ID: uC-osflcyp032c06b1
atgcgttcttttccaactgacacacaacccctacgcaaggattgaaccttctggaaccgacgtttccttgaaccgatcgacggcaccgccgacggcctgatcggaatcgcaagggtttccggattgccgctcccatgatttatatggtttacgaatgcgccgtgaacgaccaggagagcttggttaacccggacatagcatctgctgctctgccatacgcattagccggggagattgaggtaacatgacgtgtcgcgtacggccctgcagatgtggcgatagaagaaggggccg

SEQ ID NO: 8548 - DNA, 502 bp, Oryza sativa
  Clone ID: uC-osflcyp032d07b1
ttcttatcatatttggccaaccttgactgatgagcaatggctgaaggttgaatgtgcactcagggacctcatcctgtctgattatgcaaagaaaaacaatgttaatacgtctgcgctgacacaatctgaaattcgtgacattatacttggtgctgaaatagctccaccatcacagcagaggcaacagattgctgaaattgagaaacagtctagagagacgactcagctgaccgcagttactacaaggacgaccaatgtgcatggagatgagctcatcatcacaacgaccagtccatacgagcaacaagcatttgcatcaaagactgattggcgtgttagggctatctctgccacaaacttgtatcttcgtgtcaatcacatttatgttaactcagatgatataaaggagactggctacacttacattatgccaaagaatatattaaagaagttcatatgcatagcagatttaaggacacagattgagggtttctgtatgggc

SEQ ID NO: 8549 - DNA, 507 bp, Oryza sativa
  Clone ID: uC-osflcyp032d11b1
ttcctaaggcaccgtcttggcccaaactatttgaggcttcctgtgaatgcaccaaaatgtgcataccacaacaaccaccacgatggctccatgaatttcatgcacagggatgaagaggttaactacttcccttcaaggtttgatgctgcacgtcatgctgagaaggtccctattcctcctcgtgttctaacaggctgtcgggaaaagtgtgtcattgacaaggagaacaatttccaacaggctggtgagagataccggtcatttgaccctgccaggcaagatcgttttctccagcggtgggttgatgctctctcagatcctcgtattacacatgaactccgtggcatctggatctcctactggtcgcagtgtgatgcgtcccttgggcagaagctggcttcacgtatcaacctgaaaccaaacatgtagatcggccaggaggaatccagtggtggtgctatgttggacagtcaaacatgaactgtaatgtgtcgaccagccgtagtc

SEQ ID NO: 8550 - DNA, 504 bp, Oryza sativa
  unsure (1)..(504): unsure at all n locations
  Clone ID: uC-osflcyp032e01b1
ttacttgtatctgatagtgtgcgtacatatggagcaatcctggtgtcttgcggccccaaattcagatctgaggagggatcgaggaattggagtaaatataggagcttaggaaccgaccgcccagggatcttgcagcggaatcgtccatggcggcggcgcttcgatttgcggcgaggaaggtcagcggtcgcgcccttcaacaggcgacggctttcgtaccgccgtcgccggcggttagagaggaacaacggcggttgttgccgaggcttatccccggcgccggcggccggatgccgctcctccgctcattcagctccgccggagctgctccaaacaataaaaagcatgatcatttgcctcaatcaaaacatatcgtggatgtggagctggagctgtctcgtatccctgcgagcattaggccacaagtcaagacctggtatgaccggcattttcctcacgcagaacctactgtgaacggngagtctggtatcagcaacaaagaac

SEQ ID NO: 8551 - DNA, 487 bp, Oryza sativa
  Clone ID: uC-osflcyp032e04b1
tttcagccggaagaagcggcgatcagatggagccaatactgatggcaagagaaaaggtggtggcttcaccaaattatgtagcatttccccaacgcttcaagagtttgttggtgcctctgagttagctaggacagaggtagtcaagaagctttgggcatatatccgagaaaataacttgcaagacccaagcaataagaggaagattctgtgtgatgagagattgaagaagatcttcaatgtcaactccatcgatatgttccaaatgaataaagcattgacgaaacacatatggccattgaattctgatggtcctgtgacctctgcctcacctgagagatcaacacccaaagagaagcctcaaaagagagaaagaaatgaagggaagaagcaaaaaggtggttcttctgggtctggatctggttttcttgtgcccctttaacttttcgatgatttaagtgaattcattggcacttgtgagagtatgctt

SEQ ID NO: 8552 - DNA, 483 bp, Oryza sativa
  Clone ID: uC-osflcyp032e11b1
ttcatatccgcaacgcacgcacgacagccagagagagagagagagtcagaccgccgacacccgacgacatggccgtcgcctccgcgtgggccaaacccggctcgtgggccctcgccgccgaggagcaggacgacctgcccccgccgccgccgcccgttcccgccgccgacttcccctccctcgccaccgccgccaccaccaaggtccccaagaagaagaagccgcagcccgtcccgctcggcgagttcaacagcaccaagttcgtcgcccccgcctaccgcgggcccacccaagacgacctcctcagcctccccacaggcccccgcgagcgcaccgccgaggagctcgccaacgccacgcgcggcttcggggctcgctggggcggcgccggcgccggtggcccccgcggcgacgacgagccccgccgcggcggatctggcccccaggacttcggcccgtcgcgcgccgacgaggccgatgact

SEQ ID NO: 8553 - DNA, 245 bp, Oryza sativa
  Clone ID: uC-osflcyp032f03b1
tctgatccatatgcgactcacatcgaaatgtgaggaatcttatggaatcggctttagcggggtagctaactgtacatgtaaaatgactaggtgtgttgctgcaaggctcatctcagtgcttagctaccctttttatatgcaagcaaagcagatcctcgcacaaaaaaaaaaaaaacaaacaaaaaaaaaaataaaaaaacaaacaaataaaaaagaaaactataaaaaaaaaaataaaaaaacat

SEQ ID NO: 8554 - DNA, 489 bp, Oryza sativa
  Clone ID: uC-osflcyp032f11b1
tttcctctcctcctcgtctaccttacctagcagcagcagctagctagcttaattagctatagcagccatggcggcgacggcactgagcagccaggtccggttgccgatgtccctgcgggtggcgacggcgccggcgccggcgcgcgtgtcggtgctgccggcgagcaacaagctgggagacaggctgcggatgcaggcgacgtacaacgtgaagctgatcacaccggacggcgaggtggagctgcaggtgccggacgacgtgtacatcctggaccaggcggaggaggaagggatcgacctgccttactcctgccgcgcgggctcctgctcctcctgcgccggcaaggtggtctccggcgagatcgaccagtccgaccagagcttcctcgacgacgaccaggttgccgccggctgggtcctcacctgccacgcctaccccaagtccgacgtcgtcatcgagacccacaaggaggacgacctcatctaatc

SEQ ID NO: 8555 - DNA, 356 bp, Oryza sativa
  Clone ID: uC-osflcyp032g01b1
tcttatggcggcgccggatgttgagtaccggtgctttgtttgaggactcgtctgggccaccgacgaccgctccctcgaagccgacttctccacctacggcgagatcctcgagtccaagatcatcaacgatcgggagacggggaggtcgcgcggattcggcgttcgtgacgttctcgagcgagcaggccatgcgcgacgccatcgaggggatgaacggcaaggagctcgacggccgcaacatgaccggcaacgaggcccagtcgcgccgctccggaggcggaggctgcggtcgctactgccagcgcggtggatgcggaggctacggtggccgccgctacagcggtggtggcggcggt

SEQ ID NO: 8556 - DNA, 392 bp, Oryza sativa
  Clone ID: uC-osflcyp032g03b1
tctgcgggagggaacgaagaagcagcagccggcctgagcttcgccgcacggaggaggaggagatggtgagggagctccagaaggagcgcgaacgcagcgaccgcaaccgtgactaccgtgaccgcgatgttagacgtaggaaagatgacggtgcagagccagaagctgatccagaaagagatcaaaggactgtatttgccttccagctctctttgaaggcagatgaaagagacgtctatgagttcttctcaagagcagggaaggtacgtgatgttcgccttattatggacaggaactcgcggcgttccaaaggagttgggattgcacactgaaatatttataattcgggatacctgctgggattgtctacagttacaagtaagatggaatat

SEQ ID NO: 8557 - DNA, 496 bp, Oryza sativa
  Clone ID: uC-osflcyp032g04b1
ttcccgtctcctcgcattcgctcaccggtgagcatcctaatccatcccatccggcctcggcctcgaatttcgtctcctcgcccgccgcttgcgccgatccccatcctgcgagcagaggtggcgcccggcgtcctcctgcttccaccgcatcgtctatcgccggtgaccatccctccctccctatccacacctcatcaggtattctgcgttatccctcaaaaaagtttgggggttcaaccgaaaaccgacccctcaaccgaaacagggttagatctgcctctgcccagttccacctactttcaacttgttaattttgatttttgtttttagcagatgtaatttggttactgaatctcatccaaacacccttagaatagttgcattagaacggaaaatgtaagctcacataatttggactcatcctaactcacataaatttcttaagaagaatctataccacaaactactcatagtcactcaaaaaatctttttatta

SEQ ID NO: 8558 - DNA, 74 bp, Oryza sativa
  Clone ID: uC-osflcyp032g07b1
tcctttcgatgcatcagtcagtatttcaggtcagtgatggttacaagcctctcgcaagatgctaattgagcgtt

SEQ ID NO: 8559 - DNA, 472 bp, Oryza sativa
  Clone ID: uC-osflcyp032g08b1
tatgtctacaaagatgtgcagaaagatgacgagagctttgtgaaccacttggtgatgagcattgccaagttcatccaaatggaagccgaggaggcagcctcctctgggagctacgaatcttcggaagggaggatggctgtcatacacacagaggacacaaccgggaccggtctggtgatgagggactccaataacgaggcttcaggcacgttcctgacaaggagcagcaggtcggagacgctgcggagcctccagtccatctacgagcaggagtccggtagtctcagcctgcgtcgcagagtccgctttgagattgcagaggaggagccgttcgacccccaggtgctggacgagctggatgatcttctggactccaaggaggccggcgtgacttacatcatcggtcactcctacgtgaaggcaaggaagaacttcaactttctaaagacgtcgtcatcgactacgcttactc

SEQ ID NO: 8560 - DNA, 417 bp, Oryza sativa
  Clone ID: uC-osflcyp032h01b1
tcttgaccccccaaccacaccgaggccgccgcggaggaggaggaagaggaggagatcgaggatgtttttcagccgcttcgatccgtggccggtgttcttccggagggagtggaagcgctgctggcccttcctcaccggcttcgccgtcaccggcgccatcatcaccaagatgaccgccggcttcaccgaggaggacctcaagaactccaagttcgtccaggcgcacaagaagcactgatctgatccgtgcctccatggtgaaggaacagctggtattgcctaagtcttcagtttggcctatttttctgttccaaatgaacctacctgttttttgcttatccatttgggtggacaaccgctccagttgtatctaataagaggcgtttgaatctttggaccaaacaaattgagcttttg

SEQ ID NO: 8561 - DNA, 399 bp, Oryza sativa
  Clone ID: uC-osflcyp032h04b1
tttgcaacaaggaccgctcttgagaatcaggctgttaacgaagccaccttccgttgtccagatgagctagggtggaaacctcaaagggttcctattgtaccatcggatggagccatctcacggacaagagagactacgcttccggtaaatgagttgaccaagtcactccggaagacaggctacgatgtaatgccatcagacgatgctggtcggtttgtatgcaactatgtgtattatcattctcttcggttcgcagagcaacacggcatcaaatctctgtttgtacatgtgcccctgttcttgacgatcgatgaggaggtccagatgcattttgttgcttcccttcttgaagctcttgctgtcttgaactagggaaaaagaaataacaattcaagattg

SEQ ID NO: 8562 - DNA, 496 bp, Oryza sativa
  Clone ID: uC-osflcyp032h05b1
tttatcctcctcctcctccttcctcccctaaatctctagagaaatggaggacaatctaccagtcaatgtccgggagtatcaagaactcgccaaaaaagcgttgccaaagatggcttatgattacatcaatgggggagcagaggatgagcacacactgagggagaatatcgcagcatacacaagaattatattacgacctcgcgttcttgtggatgtgagcaagatagacatgtcaacaactttattaggatacaccatgcgttcacccataattgtggctccaactggggggcacaaattagcacatccagaaggggagaaggctacagcaagagctgcagcatcatgtaacgccataatggttctttccttttcttccagttgcaagattgaggatgttgccttcagttgcaatgccattcgcttttattagctatatgtgtataagaatggactgtttcagcacattagtacggcgggccgagagttgtggatt

SEQ ID NO: 8563 - DNA, 396 bp, Oryza sativa
  Clone ID: uC-osflcyp032h09b1
ccggcagcgggccgtgactgaattggcgtcgacccacgcctccttcgtgtggagggagcatagagacacgactggcgggcatggtgattactaggtgcgccagacactgactccttcattcagaccgagtcgacgacggcggtggagctcgccggagtgtactactgctcgaccaagagcgaggcgccgagtgagacagaggtgcgcctagacccgcgcccgcaattctcgagccttgagacgccaccaaggcacaacaagaaggacgtactcaggtcctgagaggacacgccggataagaaggaagcaagaaaccaggagcacttcttcaactacatagctgaaaagactgtgactacacagattgagagatacaaccatgaagcatatggtgag

SEQ ID NO: 8564 - DNA, 314 bp, Oryza sativa
  Clone ID: uC-osflcyp032h12b1
gccggcaccggccgggactgactggctggacccacccacgctttcgtatgggacagaggagagactctcatgggggggtatcctaaagcataccatgcgaccccgcaccccaaaatgaagtcctcgcccgctgcttgtgcatgtcagaatacagcgagcataggatgtatcaggcgatccgctgttcacactgaataggcattcgagcaggtccatcccttcctccatagacacactttatcaggaatcttacgagaccctttcaataaaaggtcgtaggttaaaccggaaaacgagccctggaccgaatcagg

SEQ ID NO: 8565 - DNA, 385 bp, Oryza sativa
  Clone ID: uC-osflcyp033a04b1
tgctcgggcctctgttgcaaagcactaccgtacttccacatgtctagtgggtaaggcttagtttgtggctcagtctggttataaacaaaagtacacggatggagatggatgaagtcgggggtcgatggacattctccagggcaaatgaaggctacacgagctgcggcccggtagtcgagatgtcatggcacagggccggtgtcctgctgctgggggctcagtcctgcctgcctgtcccgggggttccggccgtaggtgggattggagtcggtactcttgcctatggctaggatgggttggaaactatgtcacgtcttccgtctgtatacccgtggtggtatgtggcacgtggatgcacgtgaggaagatgtgtttcgcgggaaaa

SEQ ID NO: 8566 - DNA, 380 bp, Oryza sativa
  Clone ID: uC-osflcyp033a05b1
cactatgtgaaagctggtccccctgcaggatagccgcgccggaagtatactgccggcgaccacacgcgtcctctcggacccatatataccacccatcagagaggggcggtatgtccagacaggactgtttgcaaaggagccacatctggcatggacaagcccggctccccgctggcaagcaccgcgtcagcctccaagaagcacaaggcagacgccctccgacgacgccgggggctcctcccacccgccttatttccagatgatcaaggacgcgatcacggtgcttaacgagaggaccgggatccagcgctcactccatcaccaagtacatggtaggacaagcacggcaccggcgttggcggccaactacaagaagatgc

SEQ ID NO: 8567 - DNA, 491 bp, Oryza sativa
  Clone ID: uC-osflcyp033a12b1
tgagatatcaaggcaagcaatgtgctccttgacgcctagatgaatgggagacttggtgactttggccttgcaaggttgtacgatcgtggtgtcgatgcacaaacaacccgtgtggtaggcaccataggatacatggctcctgaattggcatcaagcagcaaggcaacccctctcaccgatgtattttccttcggtatatttgttcttgaagtcacatgtgggaaaaggcccatcaaggaagatgtcaacggtaaccaaatcatgctggtggattgggtgctagagcattggcagaagggatcacttactgatacagtagacacgaagctccaaggtaactatgatgttgacgaggcaagcatggcactaaagctgggattgctgtgctcccacccgtttgcagatgctagaccaaaaatgcagcaagtcatgcaataccttgaaggagaggttccaatacctgaggatatgccacctcatttgagctttga

SEQ ID NO: 8568 - DNA, 462 bp, Oryza sativa
  Clone ID: uC-osflcyp033b05b1
ttcaacacctgggacaaccagtcaccctcctgcctttgaagtgtgagcccccagcgtgctcacgctcgtttttgctcctaggccagcgtctactgcacacacaaggcagaggaggaggagagacatatcagagaccgaagcggatggaagtcgagtgttgtctacctatcttacctctactactgtgatataacgtagatgctactagtaattaagtacgcctgctgctgctcgccgtctactatgttgagtcgtgtatggtttgtgtagtaaggttgtcgtctgctgtgtcatatatgtacatatgtttgctctgggctgcgatggagcttgctgcagtctgcagccaagcccgcagttcatcgctgcgtcgtgttttcgcgtccttttaagccctctgcaactatgtcaaatggatgggcatgtggaggatggtggaatgagctttcaggctgtgatgct

SEQ ID NO: 8569 - DNA, 491 bp, Oryza sativa
  Clone ID: uC-osflcyp033b11b1
tctggccgcaaccccgcacataaccctaccagcctgtcgccggcgccgccgcccatggccgtcgggtgcgtcggagcggccggccgccgcagggcgtgtcgtgtgatcccgcgccccgtcctcgagacggtcctccacaaccacgcgctccgcccgcgcgtgccgcaggcgctcatactccacgggccccgcggcgtgggcaggttccacccttctcctccgccgactcctcccgcagtggtctgagcccccgcacgccgccgccttcgtagacttcctccgccccggccccgacgcgccgtggtcgctcctcctccccgccgtcgagggcgctgtgccgtcgttacccgacctccgtctccgtctagagtcctcgctcgagggcctcgcgcgcgacgccgtgctctcgggtgccgtctggtccaaggacgtgctcgccgtgctctgccgttctacggcctgcacaccgtgctgacacgcctggcgggacc

SEQ ID NO: 8570 - DNA, 489 bp, Oryza sativa
  Clone ID: uC-osflcyp033b12b1
tctgcccccgcctctccactccactccaacccacccatgggcacctcctggctggtccccctccacctccccacgaggccgtccgccgtcaaggcctccgccgccgcgacggcggcggcggccccgacgccgcagtcgctggaggagtcgttcggacggaagggcctccggttcgccgccgacccggccaccggcgcgcccaccgccgagctcagcgtgcggaacggcagctcgctgcagctccggctcgccgacgggctggtcacctcgtaccggcccaaggtgtactggaaggacgacgggtgcagggaggtgctccacaccgtcgccggcgccggcgccggcggcgaggtcaagggcggcgtcgggctcgcgctcagcgaggtgtcctcctccggcgccgccgagtcgctcctcgtcggctccgagtggtccgtcgtggacgccgactccgactcctacgatgcagtgcaggttgagctggggtgc

SEQ ID NO: 8571 - DNA, 441 bp, Oryza sativa
  Clone ID: uC-osflcyp033c01b1
tggtacaagaagctatcagaaatcataagggctagcttgcagtaggaacaaacaatgaggtcgtccccgatcatcttcctgctcctggccgccgccgccgccatcgccgctccgtggcaggttgcgcacgccgcgggcaagtgcggcaagacgccggcggagaaggtggggctgaagctggcgccgcgcgcgaaggcggcgcaggaccccggggcccggccgccggccgtgtgctgcgcggccgtgcgcgacatcggcacgcaccagagccacgcgtgcctgtgcgccgtgctgctgtccagcaccgcgaggcgctccgggcgtaagccggagggggacatgaccatccccaagcgctgtaaactcgccaaccggcccgtcgggtacaagtgcggcgcttacacgctgcccagcctggagggctgatgacgacgtacgacg

SEQ ID NO: 8572 - DNA, 272 bp, Oryza sativa
  Clone ID: uC-osflcyp033c09b1
tcctgccgccgtcttccgtctgccgtctgccgcgccatctcccccaaatcacccagcaaaatcaaaaatttccccccaatcttcctcggcacggcgcgctctcttccctccccttatccgctcctccttccctcgcaagccaccgccaaaatccattccaattcaaagtccccccccccctcaaattccccccacccccgcattacaaaggcccgcctcgtcccccgtcccatccggtccccaccgccgcgccccgccgagctctcccacaa

SEQ ID NO: 8573 - DNA, 478 bp, Oryza sativa
  Clone ID: uC-osflcyp033d04b1
tgtcccacggagcccgccggcttcggcgccggcaggggggacgccaccgtcgatgtcccgctcgacaccatgggcgactccaagagcaaggcaagggagctctcatcgtgggaaacagatctgaagcggcgggaggcggatatcaaaaggagggaggaagcgctgaggaatgctggagtgccaatggaggataagaactggccaccattcttcccgatcattcaccatgacattgccaatgagataccggctaatttgcagaaattgcagtatctcgcgttcgcaagctggcttggtatcgtgctttgcctctcatggaacttcatcgctgtcatagtctgttggatcaaggagggagattcgaagctgtttttccttgccactatctatgccttgcttggaattcccctctcgtacttgatatggtataggcctctctaccgtgctatgaggactaacagtgcgttcagttttggat

SEQ ID NO: 8574 - DNA, 455 bp, Oryza sativa
  Clone ID: uC-osflcyp033d09b1
gtacaagaagctatcagaaatcagaaacgctagctagcagtaggaacaaacaatgaggtcgtccccgatcatcttcctgctcctggccgccgccgccgccatcgccgctccgtggcaggttgcgcacgccgcgggcaagtgcggcaagacgccggcggagaaggtggcgctgaagctggcgccgtgcgcgaaggcggcgcaggaccccggggcccggccgccggccgcgtgctgcgcggccgtgcgcgacatcggcacgcaccagagccacgcgtgcctgtgcgccgtgctgctgtccagcaccgtgaggcgctccggcgtcaagccggaggtggccatcaccatccccaagcgctgcaaactcgccaaccgccccgtcggctacaagtgcggcgcttacacgctgcccagcctgcagggctgatgacgacgtacgacggcctttgttaggctct

SEQ ID NO: 8575 - DNA, 458 bp, Oryza sativa
  Clone ID: uC-osflcyp033e07b1
tcacttcgcacatcctccgccgccgccgccgacggtccccatcaatcccgcgagcgagcggggccccgtcgttcgtcctcctgccgcttccgccgcatccatcctgtaggatcgatggaggcgaagttatcgttttctcaggacagcccgccaatttccataatttctgctgctaaggttgccggtgtctccctgtccatagatcctagtcttgctgcgggctcagcacccgttctatgcttcagttctggagaatcactccgtggtatcaaccctattctcgagtacattgcccaatcctctccaagcctccatggccgagatgctattgagtctggacatgttgttgaatggcttgaatacgcccccaccttccttttaggatcagaatttgaggttgcctgctcatttgttgatggatacttgatgtctcggacctttctggttggtcatgtttt

SEQ ID NO: 8576 - DNA, 446 bp, Oryza sativa
  Clone ID: uC-osflcyp033e09b1
ttgaaagagaagccggggctcatctactgggcgctaacctacacccttgcggagccttgtcgaagctaccggttcaaggctgtgccgctccaatggtgaacgaaccgatgcgcgcgctcgacaccggtgccgcatgacaaagagtagatgatcttgtccccatgattgctaggggagcgaagggggatgctgaccaggctgaacatctacacatgctagacattccaccagctactgaatatatgaatgggctcaagagggagatgattgctgctgcattagatctttcgctgggaattgaaggaccaactgatgttgaggaggactgccctgccgttaaagtaccaggattggttggcgtcaatccagaaggcgaccttggagctagggtggaagccggagtacgacctggaggagggccttaccgactcgacaaccttcacttc

SEQ ID NO: 8577 - DNA, 461 bp, Oryza sativa
  Clone ID: uC-osflcyp033f01b1
tctgtttttttttttcgagaagatcagtactagtttattcatgccatgaccatgcatacatatgggctttcacagatccatgaagaattccctcggccgaagccgaaacagacatatatagcaaactcactcactgtggctggagagcgaccgtgctaagtgcgtactcacacgcaattttattagatcgatcggggccggcacggctgtgcacacgtatactgctccgcagacgccgacatgatgccgccgtcaaacggcgcctggccgaagcagtccaggttgggcccgttgcctgacgccgagcacgtcgcagtaagcgcttgtagaacgcgaccccggtcggcgccggcgtttgccgtcgggtcactggaagcccgccggtgaggatgttcgtggtgagcccgtagcctggcgcgcggacggacgcgcttgtcccgggaggtcggattccactggcc

SEQ ID NO: 8578 - DNA, 456 bp, Oryza sativa
  Clone ID: uC-osflcyp033f02b1
caaaaagaggagagaggggatcggaggagaatttctccacttcacccccaacaagcatgccgaccaccaccaccccccgctaccccaggagagattcacccgcaatgtccgacgaggccaccaggcgcttggccgggggcggcgggggcggcgcggcgctgagggcctcctccgacgtcgaccgcaagccggccgccgcgggctccccgcctcctggcgccgccgccgccgcggggcacaagatccagcttaagagcgcccacatgaaggaggagatgcgccaggaggccttcgacatttgccgcgttgcgttcgagaagcacaccttggagaaggacattgcggagttcatccagaaggagttcgacaagaaccacggccctacctggaacttgattgtccgccgtaactttcggtcctacgtaacacacgagacgaactactttgggattttta

SEQ ID NO: 8579 - DNA, 462 bp, Oryza sativa
  Clone ID: uC-osflcyp033f03b1
caccgagcgagcagctagctagctgcggcgatggcctccagagcggcggcggtcgccgtcctcctcctcgccgtggcggcggcgccgctcttcgccgcggcgagcgcgcatggccgaggctaccttggtgccaagtcctggcctcctgacggcagcctgagctcatcaagctccggcgaggctgcagcggcggacgtcgacgacggccacacggactggaagtgctactcctcctgcatgagcaagtgctgtcaccgccacgacgacgacaacgacgacaaggccaatgccaaggccaacgccaccgccggcgccgccgccgtcgggctcgacgatgactacaagtgcaagaagcagtgcctcggcaactgcttcaaggacgtgccggccgtttgctaccacaagtgcgtcgacgactggtgcgcgaagctgccaccatatagctccgcgaaggtgcagtgc

SEQ ID NO: 8580 - DNA, 372 bp, Oryza sativa
  Clone ID: uC-osflcyp033f07b1
tttgcttattactaccaccaccactgtactaccccgcacgacacggcgcgacacggtgcaacgcgacgcgaggaggtgagcgcggatgccggcggacgcggcggcgaaggggatgaagctggagaggtacgcgagcggcgcgggcgcgatgctgctgctgcggcgggcggcgagcgggaaggtcgtgtcggcgtcgtcgcacctgctgttccgcgccaccgtgctcgccacgatggcgctcgtgttcctcttcacgttccactacccgtcgctgctgtcgcgctccttcacgctctctcccggcgccggcgccggcgaggggggagccgaggcgcacgcttggcaccggagcttgcttatgtcgtcgtcgtc

SEQ ID NO: 8581 - DNA, 412 bp, Oryza sativa
  Clone ID: uC-osflcyp033f12b1
tgtcctcttgctgcggcggcaactgcggctgcgggagcggttgccagtgcggcggcggctgcggcggatgcaagatgttccctgatgtggaggccacagccaccaccaagaccttcgtcctcgctgctccatccaacaaggcgagctctggaggaatggagatggcggtggagagcggcgagaacggcggctgcggctgcaacacctgcaagtgtggcaccagctgcagcggctgctcctgctgctcctgcaactgaatctatcgtcgtcgtcgcccggctgcatgaggatttatcgtatggatgctgctactgtccatcagagctttgatcgaggccttaatttgcttgcattagtacccagcttatatgtaggcaggccttgccttttgctatgacgcctaaataaaacc

SEQ ID NO: 8582 - DNA, 360 bp, Oryza sativa
  Clone ID: uC-osflcyp033g09b1
ttgccgccgccaccatggccctctcgtccccggcgctggccggcaaggccgccgcgaaggtgttcggcgaggggcgcatcaccatgcgcaagtcggcggcgaagcccaagcccgccgcgtcggggagcccgtggtacggcgccgaccgcgtgctctacctcggcccgatctccggcgagccgccgagctacctgaccggcgagttccccggcgactaccggtgggacaccggggggctcttcgacgacccccagacgttcgacaagaaccgggagctggaggtgatccactccaggtgggccatgctcggcgcgctgggctgcatgttcccggagctccttgcccgcatcggcgtcaagt

SEQ ID NO: 8583 - DNA, 456 bp, Oryza sativa
  Clone ID: uC-osflcyp033g12b1
gttctacactactaaagcaacaagagcaggggcacttcccaattatccccaacttcgtttctagctctttttggtgtgatttgatggtgctttggagggtggaggcgtgcccgtggcacagcttgccactcccaccagcaaagtgtcatgcttgatctctacattcagatcccaactgccttcgatccctttgctgatgccaatgctggagactctggttcgtctgcaggatcaaaggcctacgttcatgtactcatccagcagcgttatggccgtaagagcctgaccacttgcccagtgattggagacggaattcaggtacaccacgatcctcaaagatcctaagaaagagttttgctgcactgtgactggtgtccaggacccctagcttggcccggttcattcaactttaggtcgatcagaggaagaacctatcttattctcttgctcatgccc

SEQ ID NO: 8584 - DNA, 460 bp, Oryza sativa
  Clone ID: uC-osflcyp033h04b1
ttgcaagctcgacggccagggcgccgccgtgtggagcaagaactcctgcgccaagaaatacgactgcaagatcctccccaacactttggtgctggacttcgtgaacaacggtctcatcagcggcatctctctggtgaaccccaagttcttccacatgaacgtgttcaagagcaagaacatcaccatcaaggacgtgaccatcaccgcgccgggggacagcccgaacacggatggcatccacatgggagactcctccaagatcagcatcattgacacggtcatcggcaccggcgatgattgcatctccatcggccccggcaccgagggcgtcaacatctccggcgtcacctgcggtcctggccacggcatcagcgtcggtagcctgggcaggtacaaggacgagaaggatgtgacggatgttaccgtcaagaactgcgtgctcaagaagtccaccaatggc

SEQ ID NO: 8585 - DNA, 399 bp, Oryza sativa
  Clone ID: uC-osflcyp033h08b1
cgccgcggcagaaccgccgggacccacgccgcttgtttcaacgcaggcctggacgatctgggggtggtcttataaaatgcacaggcgaagcttggagcatatgcggatctcgcaactgaacgtggatggctgcttgcacccttcgcctaggcggcaaaacttgatgaatgttgtcaatgtacatctgcacccctgctgtctttagcaccataccaaaagctatcctgttcctagtgcacttggtgggttaccggataccgatggatgataggctggatggccgtgttggtacttggcgaggtaatgctcatcacttggagtggtttgggagtatatgccctgggagagttatgaataaccatatcgttccaggttatgacatgctatgcaatgaacaat

SEQ ID NO: 8586 - DNA, 337 bp, Oryza sativa
  Clone ID: uC-osflcyp033h09b1
ttcttcgaacatggcgatgcgtgccaatccggccaagggctaccccggccggacctaccgcttctacaccggcccgaccatccaccccttcggccatggcctcagctacacctgcttcacccactgcatcggccacgcgccgtcgcagctcaccgtgcgcctctacggccaccacgccgccgcctgcggctccgcctggctcaacgccacggatcgcctcagccgcgccgccgccgtgcgcgtcgcgcacgcgcggtgcgaggagctgaggatgccggtgcacgtcgacgtcaggaacgtgggagaacgcgacggcgcgcacacggcgctcgtgtac

SEQ ID NO: 8587 - DNA, 391 bp, Oryza sativa
  Clone ID: uC-osflcyp033h11b1
tcactgaacgaagctacctagcttaattacctagctactcgatcgatcatcagtctagatatggcggctttgaacggtaaggtggtggtggcggtgatggtggtggcgatggtgcctatacatatgtcaaaacatatgcttcccctttttgctcatttatgtgtattctgacactgcgctgtgatgcaacttattcctgtcatgaccatgtgttcgaaatcaatgctccaatgactagaaaaaagattgggaactaaatgcttccatgtgaaactctttttgcttacatgctttgctgaagcttccctaatcggctactgtttaagcggtttttcttaaacgtggctgttccacggttaaggtattggaagaaccatcatgactgatgcca

SEQ ID NO: 8588 - DNA, 363 bp, Oryza sativa
  Clone ID: uC-osflcyp039a04b1
aggattttcatctcataatgggcctaatccccctgctggattttcttctcagggtgggtctaatcagatctatggttcggcatactcaggttctctctctctctgcttctcctaaaacaatttcagtttctaataagtttgcaatgttttgcagaaactcgcccatttgatgatcttttgggtataaatactagccattatcaaccacagttagctagacaaacaagtgatatagaatttgttgatcctgctatattggctgtgggtaaagggcggatgcctggaataagtgattcagggctggagatgaaaacctcccatacatttccctcgcagttgtctacatcaaacgttccaaggttt

SEQ ID NO: 8589 - DNA, 565 bp, Oryza sativa
  Clone ID: uC-osflcyp039a08b1
ttcgagcaaagaaggagagagcttggtgagcggcagagatggccccctccgtgatggcgtcgtcggccaccaccgtcgctcccttccaggggctcaagtccaccgccggcatgcccgtcgcccgccgctccggcaactccagcttcggcaacgtcagcaatggcggcaggatcaggtgcatgcaggtgtggccgattgagggcatcaagaagttcgagaccctctcctacctgccaccgctcaccgtggaggacctcctgaagcagatcgagtacctgctccgttccaagtgggtgccctgcctcgagttcagcaaggtcggattcgtctaccgtgagaaccacagatcccccggatactacgatggcaggtactggaccatgtggaagctgcccatgttcgggtgcactgacgccacccaggtgctcaaggagctcgaggaggccaagaaggcgtaccctgatgcattcgtccgtatcatcggcttcgacaacgtcaggcaggtgcagctcatcagctttatcgcctacaagcccccgggctgcgaggagtctggtggcaacta

SEQ ID NO: 8590 - DNA, 146 bp, Oryza sativa
  Clone ID: uC-osflcyp039a10b1
ttatgaagaaccggagaagaaacttcatcattgggtagattttgagcaggagaaactgtttcaggatcaagacgaagagaagaaaacaccaaagcaatatcttgatgaggatcagaagacattgtagcattgttcaagatgaggag

SEQ ID NO: 8591 - DNA, 498 bp, Oryza sativa
  Clone ID: uC-osflcyp039b01b1
gcattataactgcagcagattgagatgctcgaggctaaacaactggatggtcatcagcttgataatcagcagctagcaaagcttgagtcaagggctgcccttgagggtgaacttgcagaactcggcattcccacagatttaagaactccagtctgtgttacagaagaaaagacaaacaagaaatcgagtgtttctaagaaacagaagcggaaaaacaagcaggcagcacattctgatactcccttggtgaaaagggaggacagggaccaaatctatgtcaaggatcttcaggaagtcttaccagtccatatttctgcagaaaaggaagcaagcgttgctgattcaatcaaaccctcagagcatgtcactttcattaacacaaaggctatctcttgtccattggaaaacaaagcttcccagccaacttcgtcaaagaagaagaataggaaaggtggcttatcgttgttcctgagtggtgctcttgatgacaccccaaaa

SEQ ID NO: 8592 - DNA, 195 bp, Oryza sativa
  Clone ID: uC-osflcyp039b02b1
attatattctctttgtgtttgtgtgttatttttgtttctcattatcgagcggccgattaatgcgcggagtttcgaatttttctacgtgctcgttggtgcgcgagacgaggcgatataccgcacctagcatctggttccaggataattcgaccgatcgatcggcgcgaggcagtgtgagaatcatccgcctttttt

SEQ ID NO: 8593 - DNA, 392 bp, Oryza sativa
  Clone ID: uC-osflcyp039b07b1
gcttttatccagcaacccacggatacgccaccggggacaccacctgctaactacgagttgaagcgaccagaggccgcggataatggacgggatgtctgggctcaaggagacagtgctggacctggccatgttcagagacatgggcgctcaggtctggcttaccggcgagaggacagacacagggacttgggagggttatgaccagattctaaacttggtgcttgatgaagaggttgattctgaatgagagcaaggggaggcctgggacctatcatgggtaacgggtctgcttgatgttattgcatgtcggggtacagcggagatggtagcatgggctgctgatggaacggaacagtttgagcatgtcattctaattgacacgagggctatct

SEQ ID NO: 8594 - DNA, 412 bp, Oryza sativa
  Clone ID: uC-osflcyp039b08b1
gtgagatgcccgaccggcaaatgtgaatgtgaggatcccgtcatggacatccgtggatggagcaatagcaactctaaatggccaaaaactcaacttgacatctgcaggcggtttcctctcggtgacgaaactttggggcgatgacaccttatctctcaaattccccatcaccttaagaaccgagccgatcaaagatgatcggccggagtattcgtccatccaagcggtgctgttcgggcctcacctcctcgccggcctgacgcacggcaaccagaccgtaaaaaccagcaacgactccaacagcggcctcacccccggcgtctgggaggtgaacgccccagctccgccgtcgccgttgtcgttgtcggctgggtcaccccgggtcgcagtcgctcaattttgcagttgttac

SEQ ID NO: 8595 - DNA, 374 bp, Oryza sativa
  Clone ID: uC-osflcyp039b10b1
ttttaaaaccctcccaaaattcaaacgcgaccaagccgccggcgaggtgaacgaaacccaaccatggcaggcggcggaggtggcgaggggaaggtggcgtgcgcggcgtggatccggcgccgggaggagaaggagaaggcgacgcgcgtcttcgcggtgtacgggcgggcggggtcgccgccggccgtggaggtgctcgggttcgactccaaggagtgcttcctctccgatcccctggcgagggcggagctcggggtggagccgggcgcctcgccttcgtggcatctctgtgctccctagtggcttacttgcttgtctgcgcctcgtttcatgggtgcaggctatctcagctgttttttgtatagtttcttgtt

SEQ ID NO: 8596 - DNA, 155 bp, Oryza sativa
  Clone ID: uC-osflcyp039b11b1
cagcagttgagctctttttccactacgcactagtagtagcactctggtattctcccatggcgactgcgaccgaggaggttgccgctgcggctgctgccgccggcgaggcgccgccgccgccgccgccagcggtggtagaggaggtgaaggaggcg

SEQ ID NO: 8597 - DNA, 293 bp, Oryza sativa
  Clone ID: uC-osflcyp039c05b1
ctttttagcattgtggtggcaacacagatcatggctatatcttgttctatgagcgccttggtgggaagagctaggaacttcctttggcatttctccacctggttgcttccgttggtagcctttgccgtcaatgacagatgcagattctctggaggaaggcacatgtttttttttgcctgttaccttcatgaggaaaactggttcatgcagaggttcagtttgaccgacggttgttgttacagggacagtggtgctagctaggttcacaggttctactttgcacctaaaggatg

SEQ ID NO: 8598 - DNA, 482 bp, Oryza sativa
  Clone ID: uC-osflcyp039c07b1
tttacgagttcctcacttcctcctccgcccggggcgcccctcctctcctctccctcccggctcccggctaccgccgccgccgccccgaggaaatggctgccctgcaaccctcattctcttcagcaatggctatgaaagtctgaagttacccaaaactgcagttttacctggatttggtggtattgcacgtcctcaagatgtgcaggacaggagcgctaacttcacttgttcaaggcctagagcagcttcagtgactgaccagtcaacagcagagccagcaaaacccaggcaaaacaagcacactgttgatccttctgctccagaatttctgccactcccatcatttgaagaatgctttccaaggtgcacaaaagaatccagagaaattgtgcacgaggaatctggtcatgttcttaagatccattttaggagaatccatttgaccggagacgagaggattttggcacatactacaccagggg

SEQ ID NO: 8599 - DNA, 385 bp, Oryza sativa
  Clone ID: uC-osflcyp039c12b1
attggtctaccctcttgtcgtcgctgcacatgcgcaggagtcgaatcaatttgcggttgggctttcagatggatctgttaaagtgattgaacccttggagtccgaagggaagtggggaacgacccctcccacggaaaacggggtgcccaatggcaggacgtcaacatcatcagcaactagcaacccagctgcagaccaaatccaaagatagacgtgcatgccggttggatcttcactgtaaagcttttctaatcttttacattgacttgtttgtatgtcgatgtgactaggctattgttgcatcctgcgcacaagcaaacatattacatattggattgtcagatctggtgtgctctgtccttagttacacgttcgctcttacttt

SEQ ID NO: 8600 - DNA, 110 bp, Oryza sativa
  Clone ID: uC-osflcyp039d01b1
gatattgaaagaaattaaaaagaaaatcacggcgcgtgagcttgcagagacagcaatggtgagagttgctgccgccgcggcggtgctcgtgctggcggcggcggcggcgg

SEQ ID NO: 8601 - DNA, 225 bp, Oryza sativa
  Clone ID: uC-osflcyp039d07b1
tttctcttcgctgcatttacctgtggcatagagttgcacgctccttcaggtgtgctactcatgctggtacctgaacctgatgaacatatcctggaggtccttactagcagcatgatgttctctgctgcaaatgagatggctctgcacttacacttgcgaataactgtgcgtttcgtttgagttcttaaagttgcccaatctggaggtacaacctaccaagatgga

SEQ ID NO: 8602 - DNA, 521 bp, Oryza sativa
  Clone ID: uC-osflcyp039d08b1
tctatagcatcgcgcccgagccaaacctaaatccctcggagagagagagagatcgagaggaggaaaaaatcaaatctttttgaggaagaaatcatggcgtggcagcaacccatggacggatcccacgcgagcgggagcaaggcggcggcggcggcggcggatggcccgggaacccagaggacgcagtatccttatgtgactggctcatcaattattgcactgaaatacaaggatggtgtcatcatggcatccgacactggagccttatatggcttaactttgcgatacatgagcgtggagcgcattaaggctgttggtctgtcttattctattggagctcgtggtgagcttaattatttctcttctatcctgcttctttttaaattctcctacctctttcctacctttctccttctctttcttatccttcttacatattttcttctcttctatcctccttatccctctcctctattatcattttctttcctattctctctctctttttctctacctcttct

SEQ ID NO: 8603 - DNA, 375 bp, Oryza sativa
  Clone ID: uC-osflcyp039d09b1
tcttgctctccctcaccctcgactccgcgcgcctccgcatcgcccacctccacgacctctcccgcctccccgaccacctcctcatcgacctcttccgtagaactatagctgccggtaagctgacagaaaaagtcctgaagttgtttctggcaacggattgcgaggaaatcgccttgcttgttcagttgctcaacattaagcagccgcttgtaccggtccttcccacgaggtgctctgagaagttctagaagtgacactgattaggtcagtcttggttacctgagaaaagatgtctttggaaattcaggacagtgaggtcgacattgtgattgcagcacttcagcccaaccctgactactttttttgaggcatgga

SEQ ID NO: 8604 - DNA, 188 bp, Oryza sativa
  Clone ID: uC-osflcyp039d10b1
gtccgcgccgctactcccccctcgccgagagagctctagggtttccgctgccgaatttttttttaattcggggggagagatttgaagaggcggcaccatgttggtctaccaggatctgcttaccggtgacgagctccctgcggattcgcttccctacagagagatcgagaacggcattctctggtaag

SEQ ID NO: 8605 - DNA, 242 bp, Oryza sativa
  Clone ID: uC-osflcyp039e02b1
gttcgatggactgcgggcgctgatctagctgcagcgtttatttactgcttggttggttgagtcctgcgcgctgccaagaagaagaggatgtcctgctgcggcggcaactgcggctgcggcggttgctgtcagtgcggctggccttgtggcggctgcacgaagttctcagttgttgctccctcttctgtctctcccactccttattttttttcctcctctccctacctctttttccttttcct

SEQ ID NO: 8606 - DNA, 249 bp, Oryza sativa
  Clone ID: uC-osflcyp039e03b1
gcggttcatggttgcaatcaagcgcaagcgggagaaggtgcctgggcttgccgaagatggagattcttccccttctagcgctaatcgatccgtcgacatggaggtggaggagaaattagattacttttgtgctggagcctaagaagatgtgagcagcggctgcagaatagagatccaggatgaggctgcgtctttaagaactactccatcgttttctgctcgagacctgagtagagctcgaagaggatc

SEQ ID NO: 8607 - DNA, 470 bp, Oryza sativa
  Clone ID: uC-osflcyp039e05b1
ctttttccaccgtagcacgccgtctccccgcccagcgaccttggcaactccggcgaagatgggcgccttcaggttccaccagtaccaggtggtggggagggtttattacttcttttattttttttttatttttctttttttttctttttttttttatacttatttactttttttattcctaactctttatctattctcatcttcttttttctatatctttctaattttatattccctctttctttctttttctttcactttttacttttcctcttctctttttttttcttatattatatatcttatttttctgctttttactttttattctattttttttctttttatatctatttctttactttttcttttcatcttatcttctttttattttttttcatttacttttttttatatttttttctatttatttctactcattttcttttatattactttctctcttttct

SEQ ID NO: 8608 - DNA, 141 bp, Oryza sativa
  Clone ID: uC-osflcyp039e08b1
ttattcagtggaaccatcgactatggtgaattcagtggctgctactctccacatgaataagctagagagggaggaaaacttagtatcagcattctcatttttcgacaaagatggaagtggtttcatatctattgatgagct

SEQ ID NO: 8609 - DNA, 105 bp, Oryza sativa
  Clone ID: uC-osflcyp039e10b1
tttgtccggggtcggggtgatggcgaccaaggtggggatgatgacctactttgacccggccaccggcaagccggtgccggtgaccgttgtggggtttctggaggg

SEQ ID NO: 8610 - DNA, 391 bp, Oryza sativa
  Clone ID: uC-osflcyp039f03b1
tatttttctatggactgagaagaccactgagaaggaaatttctgatgatgaagatgaggaagagaagaaggatgctgaggagggcaaggttgaggatgttgatgaagagaaggaagaaaaggagaagaaaaagaagaagatcaaggaggtttctcatgagtggtccctggtcaacaaacagaagcctatctggatgaggaagcctgaggagatcactaaggaggagtatgctgctttctacaagtccctgacaaacgactgggaggagcatcttgctgacaagcacttttctgtggagggtcagctggatattaaagctgttctctttgttcctaagagggcaccattcgacctctttgatactaggaagaagtttaacaacttcaagctc

SEQ ID NO: 8611 - DNA, 443 bp, Oryza sativa
  Clone ID: uC-osflcyp039f06b1
atcctttggaggtccatctgcttgacttccctaacattgtgatcaagggcagtgagctgcagctgccattccaagcttgtttgaagattgagaagttcggtgatcttattctcaaggccacagaaccccagatggttctttacaacatatatgatgattggttgaaaagtatctcatcattcactgctttctctcggattgtgcttatattgcgtgcacttcatgtcaataatgagaaggcaaagatgctgctcaagcctgacaaaactattgttacggaaccacatcatatttggccaaccttgactgatgagcaatggctgaaggttgaattgtgcactcacggacctcatcctgtctgattatgcaaagaaaaacacagttaatacgtctgcgctgacacaatctgaaatctgtgacattatacttggtgctgaaatagc

SEQ ID NO: 8612 - DNA, 526 bp, Oryza sativa
  Clone ID: uC-osflcyp039f07b1
ccttcctctcacattttccccaaataataatagaggaaggggaaaaacacatttgcagccacatcatccatggcctctctccgcaccattccggtgatcttcggcatcctcttctatgtccttgccagcactgccactgccaccgacgcaccggactacgtcgtccaaggccgtgtctactgtgacacgtgccgcgccgggttcgagaccaatgtcaccgagtatatcaagggtgccaaggtcaggctggagtgcaagcactttggcaccgacaaggtcgagcgtgcgattgacggtgtgactgatgagaccgggacatacaagattgagctcaaggacagccatgaggaggacatctgcgaggttgtcctcgtccacagcccccttgtaaactgctctgaaatcgaggcctaaagggatcgtgcccgtgttttgctcaccaggaatggtggcttctgtgacaaccttgtgcttagccatccaatcgtttcttttagggcaatcctctggcctttttcggcgcgct

SEQ ID NO: 8613 - DNA, 491 bp, Oryza sativa
  Clone ID: uC-osflcyp039f10b1
atcaacttgtaagagactgtctttgcgggcagatgtacgactcgagtcctgtagattttgttagtgatttgggcacccgatttctccttcacccaagtgtcctgaagatgtctcaaccgcctcgtatcctatcatggatgactagaggcattgcctcgggactagacacgctgttcattggcaaatttgaagcgcaacgtgcagaatattgggacacactatactcatcagtgcatgttggtccaatactcatattctgttctgaagacgatgaacttgctccgtgttcaattgttcaaaaatttggtcgacgtctgctggagcttggtggtgatgtgaacctagttaaatggcaaaattctcctcatgtaggtcactacaagcatcatcctgaggaataccgagctgcagtaactgagctactcacaaaggcttcaatgctttacatgagcaggaggcaacctaacagctatgatctaggcccaagtgag

SEQ ID NO: 8614 - DNA, 216 bp, Oryza sativa
  Clone ID: uC-osflcyp039f11b1
gtctttttggtggtgcaggagtcggcaaaactgtccttattatggagttgatcaacaatgttgctaaggcccatggtggtttctctgtgtttgctggtgttggtgaacgtacctcgtgaaggtaatgatctttacagggaaatgattgaaagtggtgtcatcaagctaggtgtcaaacagagcgtaagcaagtgtgctcttgtatactggcaaatt

SEQ ID NO: 8615 - DNA, 325 bp, Oryza sativa
  Clone ID: uC-osflcyp039g02b1
ctacatgtgaatattttgatgtgacgtgaagagaaaaattaatcttggtttttggttgttgtcatgcacggctgaaacgcacaggcaagagctgccggctccagcggctgaactacctccgccccgacctacggcgaggcaacatcacgccgcaggagcagctgctcatcctggagctgcactcgcggtggggaaaccgatggtccaagaacgcgcagcacctcccggaacgcaccgacaaccagatcaagaactactggcgcacgcgggtgcagaagcacgccaagctgctcaagtgcgactccaacagccagcagttcaagga

SEQ ID NO: 8616 - DNA, 372 bp, Oryza sativa
  Clone ID: uC-osflcyp039g04b1
tgcaacagcagctttgcccttcggcactatctgtgggattgtgctcatctggaccttagttacatttccccttctagttttgggaggcattgctggtaaaaacagcaagactgaattccaagctccctgccgtaccaccaaatatcctagggagattcctccacttccgtggtaccggcaaacaatcccgcagatggctatggctgggtttttacctttcagtgccatttatattgagctctactacatctttgctagtgtttggggccacaggatttacacaatttacagcattctcttcatagtcttcatcatcctccttaattgacactgcctgcattactgttgcaccgtcgtacttttatgcttgat

SEQ ID NO: 8617 - DNA, 298 bp, Oryza sativa
  Clone ID: uC-osflcyp039g06b1
gttattgtacgcttcaagccaaagcccaactgcgtggcgtttgtccatatgataccggtatcaggctatcctattaggctttgaagctatcttctgcttgtagattctaggtaatcttttatatatattgtataatagaaatttataagtttgcactgtgttgtttatttttttttgttttctttatcattcatcttctttttttctttctccttctctttttttcctattctcgtattattttcctttctcatattttttaattcttattcccttcttccttctttaccctttttat

SEQ ID NO: 8618 - DNA, 263 bp, Oryza sativa
  Clone ID: uC-osflcyp039g08b1
gttagctaattaaatatgtgaagatcaagtggctgcagttgatgattttgaattatggatcattcaatcatgggaaagagacaaagaatggtacactggtaatgatcggactttgagccgatttatatatgaggatcatttaaacatgggaaagagccaaagaatggtaagctggtactaatcggattctgtgagtcaatttatatatgaaaatttctgcagtggacaaaacacttggttctgctgtaataggagttctagag

SEQ ID NO: 8619 - DNA, 217 bp, Oryza sativa
  Clone ID: uC-osflcyp039g11b1
ttggaactgcttgtacgggaaaatcaacaattggtactcaactagctggaaggctgaatttaccaaatgttttgcagacagacatggtgtatgagttgctacggacatcaacagatgcccctcttacttcggtgtccgtgtgggctcgggattttgattttcctgaagagcttatcactatagtttgaatagtatgtatagtcgctcgcatagtttt

SEQ ID NO: 8620 - DNA, 543 bp, Oryza sativa
  Clone ID: uC-osflcyp039g12b1
ccgccgcccgtccaaaccctagctccgccgcctccgccgcctccaggagaggagaggtaagtcgaagatggtgtccggctccggcgtgtgcgcgccgcgcgtggtggtggacgcgcgccaccacatgctcggccgcctggcctccatcatcgccaaggagctcctcaacgggcagcgcgtggtggtcgtccgctgcgaggagatctgcatgtccggcggcctcgtccgccagaagatgaagtacctccgcttcctccgcaagaggatgaacaccaagccctcccatggccccatccacttccgctcccccgccaagatcctctggcgcaccgtccgcggcatgatcccgcacaagaccaagaggggagaggcggcgctggcatggctgaaggcgtacgagggcgtgccgtcgtcgtacgacaggaccaagcgcatggtcatccccgacgcgctcaaggttctgaggctgcagcctgggcacaagtactgcctccttgggcagctttccaggaggttggctggaactccttgacacctcaggga

SEQ ID NO: 8621 - DNA, 264 bp, Oryza sativa
  Clone ID: uC-osflcyp039h01b1
gttatttttaggagaaagtcccacacaccttcggctattgttatcggcagtgggtttgcaggcattgctgcagccaacgctctcaggaatgcatcatttgaggttgttcttttagaatcttgtgacaggataggtgggagaatccacactgattacttttttggctttcctgttgatctgggagcatcctggcttcatggtgtttgtgaggaaaaatcccctggccccaattattggaaggtttggacttccattgtatcgcac

SEQ ID NO: 8622 - DNA, 190 bp, Oryza sativa
  Clone ID: uC-osflcyp039h08b1
tgatccttctctctctctctctctctctatagggggggttttataaataatcctcggttcacccttctactctccaaaccctagccgagctagatatccaccctcgtcggctgatgtcccgtctctggtgtggactctccgcctcagatccccacaccgacggtgtatatcccgtctcttaatcatcaca

SEQ ID NO: 8623 - DNA, 513 bp, Oryza sativa
  Clone ID: uC-osflcyp039h11b1
ctctatgttttgatggctggataccttccttttgaggaagatgatcttccaacactgtatgataagattactgcaggtcagttttcatgcccttattggttctctccaggtgctacatcgcttatccacagaatactcgacccaaatccaaaaactcgtatcactattgaacagataagggaagacacatggtttaagaagacttatgtagccattaaacgtggtgaagatgaaaatgttgatctggatgatgtacaggctgtttttgacaatattgaggacaagtacgtttctgagcaagtgactcataatgatggtggccctcttgtgatgaatgccttcgagatgattacattatctcaaggtttggatctttcagcattatttgatagacagcaggagtttgtcaaacgtcaaactcgttttgtctcaaggaaaccagcaaagactatagtagctacaattgaagttgttgctgagactatgggtcttaaggtccactctcaggattac

SEQ ID NO: 8624 - DNA, 477 bp, Oryza sativa
  Clone ID: uC-osflcyp039h12b1
gctaattactggaaaggaacgctgtctcgacagggtcaccgcactcttgaacagcaacgagtggctcagctcctctcgaaactatcaacagtgaaattcatggaacatcctgtggagatgatggactactgtctagtacactggaagattgtatgagggagagacagagagtacttctctttcattatagttcaccaatccacatcccagaagaagaaaatgatcactggctcactgcgtttcaaggcatcagcatcaagccaccatgcgatagtgacctatctccacgttgctacgagcctgactctatctagcattgtaggtcatgcctcgccggtgatatgatctgagccgtacatttatgcattcagacattcagtacactggctctagctgcacaggcatttgtgtgctcaatctccatagaacaacatgattatgttgcttattgatcggtggatggcataagtttataag

SEQ ID NO: 8625 - DNA, 345 bp, Oryza sativa
  Clone ID: uC-osflcyp049a04b1
gaaaagcagttctcctgtaaggaatttcattgatctgaatgatgatgctctaaatgaagacaattcagagtcatctgtggtgtcacatgaatgccatgtggtctccttacagaacaaccatggtaaacgcaaatttgtcattgatttagaagtgcctgcttgtgaagaaggtgtggcctgggattttaatcaggaatgttctccttctggcaaacttgatgtaactcaggaggcttgtgatgcacactttacatgcactaaaattgcagcagagagcattattgcttttgccatgcatgtgccaacaattgcagagacgcctgatgatatgctgcagtggttttg

SEQ ID NO: 8626 - DNA, 159 bp, Oryza sativa
  Clone ID: uC-osflcyp049b01b1
ccacctcctatgagctcgcttttgagaaagaaagctgaagaatcttggtcggttggcccggccagccagccagccgcctcgcggtcgcggagatgatgaaggagtcgtacatggaggtgctcccgccggcttctgtttcaccttttcgtccgccaccct

SEQ ID NO: 8627 - DNA, 522 bp, Oryza sativa
  Clone ID: uC-osflcyp049b03b1
gagcaccattgtcacgcgactagcagaagccgagcgaccgcctcctcgatccatatcttccggtcgagttcttggtcgatctcttccctcctccacctcctcctcacaggttcttggtgtagcttgccactttcaccagcaaagtttcatgtctgatctcgacattcagatcccaactgccttcgatccctttgctgaggccaatgctggagactctggtgcggctgcaggatcaaaggactacgttcatgtacgcatccagcagcgtaatggccgtaagagcctgaccactgtccagggattgaagaaggaattcagctacaacaagatcctcaaagatctcaagaaagagttttgctgcaatggtactgttgtccaggacccagagcttggccaggtcattcaacttcagggtgatcagaggaagaacgtatcaaattttcttgttcaggccggcattgtgaagaaggaacacatcaagattcatggtttctgagcaactgccaaaaccattgccaagac

SEQ ID NO: 8628 - DNA, 460 bp, Oryza sativa
  Clone ID: uC-osflcyp049b08b1
gcttatatccgcagcagctgctgcagcggcgtctgccaccaaaagcaatgctgccattgctgttaagccccctgtgatgcctgcagccaatgctacccaagcagcagtttttgctgtgcttacacgatcgctctcattgaagagcacttctgaagtaactagacaacctcaagctgccgttgacccttgtgcattttgcaagcttcagagattctcttgccattgccaggatcaactgacttcagtgatgtctacatacaccatcttactggctgttagagcctgaccactgtccagggattgaagaaggaatttagctacaacaagatccttaaagaactcaagaaagaatttttgctgctatggtactgttgttcaggacccacagcttggtccggttatttaactttcaggggaccaaggatagaacctattaaatttttttgttaagcccgttttt

SEQ ID NO: 8629 - DNA, 260 bp, Oryza sativa
  Clone ID: uC-osflcyp049b09b1
ggagcactagggacaggtgcacgtgcacacccacgcgacgcacggtttcatacacggctcgccggttcttggtggggctgttccctactccacctagtcctcacaggttcttggtgtagcttgccactatcaccagcaaagttttatgtctgatctctacattcagatcccaacttgtctccgatccctttgctgaggccaatgctcgatactttggtgcggctgtaggatcaaaggactatgttcatgtaccgcatcca

SEQ ID NO: 8630 - DNA, 156 bp, Oryza sativa
  Clone ID: uC-osflcyp049b10b1
gaaagtatgaaaagaaaaaaaaaaggaaaatcgtgtctcgtctcgtctcgtcttcgtctcccccgattcccgagcagcttctcgaaaccctcgcggcctcgattccggcgatggcggagcccaacccgcaagtggagagggaggtggaggtcgagg

SEQ ID NO: 8631 - DNA, 383 bp, Oryza sativa
  Clone ID: uC-osflcyp049c03b1
ctctcgttcatcatccacgacggcttcctggaggccatcgggcggggtaaccggtcgggcctcctcaccgccgccgactacaacaacctctgccagtgcgagaacctcgacgacgtcaagatgcacctcaccgccaccgagtacggcccctacctccagaacgaaccttcacccctgcacacaactacaattgtggagaagtgcactcttaaactggttgatgagtacaaacacatgatgtgccaggcgactgaaccactatccacattcttacagtatataacgtatggtcacatgatcgacaatgttgcacttattgttaccggaaccattgcatgagagagatgctaatgaactattggagatatgtccttcatttggga

SEQ ID NO: 8632 - DNA, 109 bp, Oryza sativa
  Clone ID: uC-osflcyp049c08b1
cgactaatggttggatatgttagcagcgattttgggaaggggcctttctaacatctcatggcttcagtacccgcaatgcatgaccgtgacaatgttgaggccttccgcc

SEQ ID NO: 8633 - DNA, 107 bp, Oryza sativa
  Clone ID: uC-osflcyp049c09b1
cacgatctcagcctccagagaaagccagcgtaaaaggggccaactacattctgaagcgcccgctaggcaccccgctcgaaaaaacggaggacaaccgaggtcccaac

SEQ ID NO: 8634 - DNA, 335 bp, Oryza sativa
  Clone ID: uC-osflcyp049d01b1
gctcgaacggtggccgagcgaaccaaaaaaaaaaagaaaggaaaaaaaaaaacagcgcgccgcaccaattacccacacccgtatcgatcgaatccgcgcgagtttaatcccggaaaaatcgcagaaaaattcagagtggagtgttgattcgtccgatacccatccatcatcgtgtccctgtctgtcctgaggtgtagtttggtttccgcttctgtgttggggcttgaaaccctaggaatggcggaggttgaggtggctgcggcggcggtggtggcggaggggatgctgcacaggaggatcgagttccacctcgcatggaggtctcacttctgtgg

SEQ ID NO: 8635 - DNA, 200 bp, Oryza sativa
  Clone ID: uC-osflcyp049d02b1
agatctttcttcctcctcctcgtcttcaggactcaattcgtcttctgatagcttagcttgattggggtgggtgacaatgggaggtggcaaggacaagcatgactagagcgacaaggggctcttctctaacatgatgcacggcgttgcccgcccccatggatatcctcctcaccagggatacccccctcaggcctacccac

SEQ ID NO: 8636 - DNA, 177 bp, Oryza sativa
  Clone ID: uC-osflcyp049d04b1
ggccgccctttttttttttggctgccgcgtgcattttcgaaccaaactgtgcctctgagcgacttgcatgggctagagtgtcagtgctggccaacactatttctaggcatttttacagcgatatgtcaagcatgaaaaggatggagctgttcatgtggagcatcctctatgaagaaa

SEQ ID NO: 8637 - DNA, 242 bp, Oryza sativa
  Clone ID: uC-osflcyp049d11b1
ctgcgatacacatgctgtgttggaggagaagcaagatgaaggggtagctattgctgtagaaactggtttgaagaataccaccgactttgagttggcatctattgatgctatggcagcagcagcccattccctggtaatccctctcgcaatattcagagggaagctgggaattgagcaggcaattgaattgatcagacttgaagaagatcaccaggttgatagatggggcttggttgaaggac

SEQ ID NO: 8638 - DNA, 123 bp, Oryza sativa
  Clone ID: uC-osflcyp049e06b1
gttaccagtggtctccgcttccctggccagttgaactctgacgtcctgatgcttgctgtcaacctgatccctttcccgcggctacacttcttcatggttggattcgctcctcttgacttctag

SEQ ID NO: 8639 - DNA, 64 bp, Oryza sativa
  Clone ID: uC-osflcyp049e11b1
gtcggtggtttagcgagcgcgtgggaggtctaatgcgaggactttttataagctttctacctta

SEQ ID NO: 8640 - DNA, 145 bp, Oryza sativa
  Clone ID: uC-osflcyp049f01b1
gcgccgcatctcagccgctatccgcgtgggcattccgccgagcacctgtcgcgcatggcgatggtttcacaccacctcgcccagccgtccacgcgcgcggttctcttcttgcgccccacctacccgtttttcagtcattaccact

SEQ ID NO: 8641 - DNA, 247 bp, Oryza sativa
  Clone ID: uC-osflcyp049f02b1
cactagggtagagggacacccgcagaggccgggccggaagaaccggggcgacccacgacgccggcgccgatgtttttggccgcagaagaggcgggcactcccaggagggactttgagcccaaggaaacggcttgagaccaccacgccgagctcggaaaccagaccgttgatttcaacgaccacaagcactcccccggatggaaccgtcactcttcaggcatggcgggaatggcaccccgagggcgcc

SEQ ID NO: 8642 - DNA, 231 bp, Oryza sativa
  Clone ID: uC-osflcyp049f04b1
gccaagaactgcgccacccgagttccagaagaccaagctcatgacccgtctgacctacaccctcgacgagatcgagggcccgctcgaggtcagctccgacggaaccatcaagttcgaggagaaggacggaattgactacgccgccgacaccgcgcagctgccgggaggtgagcgtgtgccgtttctcttcaccatcaagaatttggtcgtcaccggctagctggagagctt

SEQ ID NO: 8643 - DNA, 507 bp, Oryza sativa
  unsure (1)..(507): unsure at all n locations
  Clone ID: uC-osflcyp049f06b1
attgaanatggatttttaataattctagttttttctccggggggcctttttataacncgtcccccctcccccccccccctcattccatccctccccccccccatcccccccctccccctccccccctgcccccccccccccccccccccccctccccccccccccctctcccccccatccccccccccccctcacaccacacccctccctcccccacccccccccacccccctacctctccttcccccccccctccccccccccccccccccccccctcccccccttccccccccccaccccccccccccccccccctcccccctcccctccccccccccccccctccccctcccccccccccccctcccctccccctccacccccccctcccatctcctccacatcccccacatctccccctcacccccccctccccccctccccccccctcctccaccccccctttcccccccacttccctctccccaccccctccccccccctc

SEQ ID NO: 8644 - DNA, 100 bp, Oryza sativa
  Clone ID: uC-osflcyp049f11b1
gactgattagtgcagcgcgagcccccggaggcgaggggagtcctttgtaaacttcccccccgagcgcgcggccggcgagaagggcggcaggcgcgggcgg

SEQ ID NO: 8645 - DNA, 614 bp, Oryza sativa
  Clone ID: uC-osflcyp049g02b1
ctcctttttttttccggccatttctcctctccacctgcgatccatccgttttcgctaggaggaggttgtctttacgccgccgtggtgtgagcttttttgtgttgttttttttctttttttttcttttttttttctttttcttttttttttcttttttttttcttttctttttttttttttttcttctttctttctttttttttttttttcttcttttttttttttctattttgtcttttttctttacttttttttttctctttcctcttttcttttttttttttttttcatcttttttttttcttctcttttttcttttttttttctttttttttatcttttctctttttttcttcttttcttctttttattattcttatttttattatcttattctttttctctatttttcttctttttcttcttttcttttttttcatctttttttttcttttttcttttttttttccttttcctattttattttttattttctcttatctctctcatctttttattcttcttttcttttattattcattcttctctctttttctttttttctgttttctctttttctcttttttccttttcttctttttctcttctttctt

SEQ ID NO: 8646 - DNA, 95 bp, Oryza sativa
  Clone ID: uC-osflcyp049g09b1
acggtgatcaaatcggccatgatgaccacggcttatgaggtggtttaaagcgggaacgccattatgtcgccagcgaatgggcggaccgctggact

SEQ ID NO: 8647 - DNA, 173 bp, Oryza sativa
  Clone ID: uC-osflcyp049h03b1
atctatggtgctggggaagagcggcatcttccaaggatactagcccttgttaagatgggattagcattcttcaagattggggatccaaatgtgaagtcagattgggtctatgtggataatcttgctcttgcactgaccttggcacgtatgggactcttccattatcttccccc

SEQ ID NO: 8648 - DNA, 188 bp, Oryza sativa
  unsure (1)..(188): unsure at all n locations
  Clone ID: uC-osflcyp049h07b1
gacacagtaataagaaggaagggggcttgtccaacaagcagaagaaactacaacgaaggatgaagattgcagaactgaaacagatatgcaatagacctgatgttgtggaggtntgggatncttcttctttctatttatcattactttttctattcgcatgtccttccttatctcttcttcctcttttc

SEQ ID NO: 8649 - DNA, 138 bp, Oryza sativa
  Clone ID: uC-osflcyp049h08b1
caaggagtagattccaacaacattttatatctaagggaaggagatgttgatgacaagctggcgtgcagctatccaagcaaagaagggtggaaaggcagttattgtaggaggaggttacattgttttagaacttatttt

SEQ ID NO: 8650 - DNA, 145 bp, Oryza sativa
  Clone ID: uC-osflcyp049h10b1
gaacaatatcttgctgtagctactaacttggagcaggtccgtgtttatgacgttgcatcgatgtcatgttcttatgtgctgtctggccacactgaaattgttgtttgcatcgacacttgtattatttcttctgggaagacactcg

SEQ ID NO: 8651 - DNA, 392 bp, Oryza sativa
  Clone ID: uC-osflcyp050a01b1
gtcttttctaccaaatttactggcatgcaggtaccggatgattggcatgaaacaagtacacttttggctgcattggagaagattgaatcatggatattttctcggatagtagaaacagtgtggtggcaggcactaactcctcacatgcaaactccggtggaaggatcgtcaaccccaaagactgggagagtgttaggtccttctttgggtgatcagcagcaaggcaccttttctgttaacctgtggaaggctgcattttcacgatgcattcaacagaatatgccccctccgtgctggtggacatgaatgtggctgtttaccagtattggcaaaattggtgatggagcaacgcgtatgccgtttaagattgctgattgtttaattgcattcct

SEQ ID NO: 8652 - DNA, 344 bp, Oryza sativa
  Clone ID: uC-osflcyp050b10b1
tttgttcgtcaagatccccgacgacaagatgaagtactacgaggagcgcgccgtgatgtacgtcggcgacgacgtctcgccggacttctacggctgggtgttccccaagtgcgaccacgtcgccgtcggcaccggcaccgtcacccacatgcccgacatcaagatgttccaggccgccacccgccttcgcgccaaggaccggatcgagggcggcaagatcatccgcgtcgaggctcaccccatccccgagcacccgaggcctaagagggtggcggggagggtgacgctggtgggggacgctgagtgggtacgtgtcaaagttgctccggcgaggggttctactt

SEQ ID NO: 8653 - DNA, 299 bp, Oryza sativa
  Clone ID: uC-osflcyp050c05b1
tattccatggctgcaaatgatgcctgcaaagtgcaaggtgcatcagatgttcatctgatttctggtcacccccttgctgattttgagacttttatatattctgcaagttcagtcattgctaagacatcttgcatgaggaatggcaactgtttgcaggacccgcaagctggcagcttaccatatcaatatcagatatcggatgttttcctgagaaatgtgtgggattggcttgttgcttccctcttttattattattttttttttatctctttatttttttatatcttcttatttttttt

SEQ ID NO: 8654 - DNA, 70 bp, Oryza sativa
  Clone ID: uC-osflcyp050c07b1
acttcttctggacagcttacagttaaatgggatggggagagcttaggagaagttctgcccgagttatccc

SEQ ID NO: 8655 - DNA, 453 bp, Oryza sativa
  Clone ID: uC-osflcyp050d01b1
atcttttgttcgtctccactcccctcccctcccggctctccggatcccccgcgcgccgccgtcgtcgcccgcccgccggtcgatacccctccgcggcagccatggctgagcagactgagaaggcattcctgaagcagccaaaggttttcctcagctcaaagaagtctggcaagggtaagaagccaggtaagggtggcaaccgcttctggaagagcattggccttggcttcaagactcccagggaagcaattgaagggacatacattgataagaagtgcccattcactggaacttgttctatcagaggcagaatcattgctggaacatgccatagtgctaagatgaacaggactatcattgttcgcaggaactacctccactttgtgaagaaaaatcagaggtatgagaagaggcattccaacattcgggtcaacgttttccatggcttcgtgt

SEQ ID NO: 8656 - DNA, 257 bp, Oryza sativa
  Clone ID: uC-osflcyp050d03b1
ccggttgttcacaattgagccaggaccgatgagaaggggtagtagaacacatacacgatgaatgccgatcgttgatagaatcactcagaaagaccagctgcagacattatgccgaaaaacacatacagcgtacttgattgccacacttgcaaagattataagctgacgatccagcttccaatcttggacaggttgcataccagtgactccaaagttagggtcgaggtcagatccaaagtataacccctgatctaatt

SEQ ID NO: 8657 - DNA, 134 bp, Oryza sativa
  Clone ID: uC-osflcyp050d07b1
taatagatcgaacagcaatttgcgaattgctgatcgatcgcttgacgatgagctgcagcagcaggccggtgtgcgtcaccggcggcagcggctacatcgcgacgtgcctcatcaagaagctgctgcagcgaggc

SEQ ID NO: 8658 - DNA, 60 bp, Oryza sativa
  Clone ID: uC-osflcyp050d08b1
ttgtagagaagaggaaggcggaatcagtcgagggcgaggcgtcggcggctgctgcgatgg

SEQ ID NO: 8659 - DNA, 199 bp, Oryza sativa
  Clone ID: uC-osflcyp050d11b1
tttcgtatctcgacgcgtgcctcgcccaggaccccgacagcatggtggcgtgcgagacgtgcaccaagaccaacatggtgatggtgctcggcgagatcaccaccaaggccaccgtcgactacgagaagatcgttcgtgacacctgccgcggtatcggcttcttgtccgactacgtttaacttttctcttccgcctgcta

SEQ ID NO: 8660 - DNA, 221 bp, Oryza sativa
  Clone ID: uC-osflcyp050e05b1
gcccggactgaccggccggaccgacccacgcggataattccgatacattgctccctgtgatctgccgcggagccgacatcgatcacatccctaacataccacacgcatgtacgcgccacggtcgccatcctgtactacatcctcacagccgcgcgctcccatgcagagcggaggccaaggtcgcttcggcgtcgtcgtacgcgagcacgggcaacggctgc

SEQ ID NO: 8661 - DNA, 487 bp, Oryza sativa
  Clone ID: uC-osflcyp050e10b1
cctagctctcatgtcatttgtgtacatagcatgcgctttcttgcgcacaaaaaaaaatgcaaatatctttttaatccttcttaacttgtcatcactcatcagcccccgatgtatttatcagtcgcaaccaactgtacagtttcagtcttcaaattaaatgcaactttttgttcccttacttctttcctatattgggcggccgcccttgaggctccatgttttcttcctccctcctgcttcctcattttcttctccatcattgcccctctcttttctatctctcttctccccctctttttttcttttttttctcccctccccctctattcctttcttattttcccctttctccattttcccttcctctttctccatctcctaccctcccccctcttctctttttccctttcttcctcctccttcctttctttttcctttttctctttccttccctccccttcttacttttcttttcttttccccccct

SEQ ID NO: 8662 - DNA, 369 bp, Oryza sativa
  Clone ID: uC-osflcyp050e12b1
tttcgttgccgccgccggtcgatccgtgttcttggctcaggcggcgtcaatggcggcggcgaatgggagcgcctgcggcggaggcggcgtggacaaggagaaggaggagttcaagcagatctacggggtgctcaaggaggagctgctcagggaccccgccttcgagttcaccgactcgtcgcggcagtggatcgatcgcatgttggactacaatgtacctggagggaagtgcaatcgtggtctctctgtggtcgatagctataagctgttgaagggcaccaatgttctaagtcaggaagacatgtctctcgcgagcactcttggttggtgcgttgaatggatttaagcttactttcttgtgcttgatga

SEQ ID NO: 8663 - DNA, 121 bp, Oryza sativa
  Clone ID: uC-osflcyp050f06b1
ttgctgtgttcgagcttcccggacacccccgaggacgccttccttgccggcctcgtcagcggcacggaccagatcatagactggagcatccagtacgcctacatcagcgtaattaggaggg

SEQ ID NO: 8664 - DNA, 142 bp, Oryza sativa
  Clone ID: uC-osflcyp050g05b1
cttgccggcccacgcgtgcggctggttaaaacccctacattcctccctcttctttgccgcggcgccgacatcgatccatccctaacaaataacacgatgtcgcgcgcctcggtcgccattcttttttacattcttacagccg

SEQ ID NO: 8665 - DNA, 129 bp, Oryza sativa
  Clone ID: uC-osflcyp050g07b1
tctgtagctcgactccgcgcgagccgaggcctcgaaccctatcccccattcgatttccggcgagatgcccacccgcgtctgagccttgctcgtcggcggcgaggtggggtggttctttttctttttttt

SEQ ID NO: 8666 - DNA, 333 bp, Oryza sativa
  Clone ID: uC-osflcyp050g09b1
ttcttctgagaagtctccacccccgccagctccggtgatcttgtcgtctcctccaatctaaatctcctcccccaccggctccagtcattttgccaccttcttcagttaagttcccaccaccaccagtaccagttttcttgccacctcctcctgtgaagcctccctccaccacccagatccggtcatccttgcccaccccccccctgtgaagttctccacctttcttcctctcccagatttttttgcctcccttcaccctgtgtaggtctcccccttcatcctgcacccggttaatttcgtccccctccttcagtgatgttttcccccccccct

SEQ ID NO: 8667 - DNA, 519 bp, Oryza sativa
  Clone ID: uC-osflcyp050g12b1
tcccttctcttccctctcgtccggcttcatccgtctgcctcctccctcctcgtccgtggttgttttcttcaggtcttcccctggtgcccctcccccccctcttcttttctcctcttcctttctcttcttttctttctctttccttcttctcccttttcctttttccttcttctcttcttcctttctttctcttcccctctcttcttttttctttcctctttttcttccctctcttttccttctctcattttttattctcctccccttctcttttccttctctttttttcttcccccctttcttttcctctttctttttctctcctcctttctttctctcttctttttttctctccctctttctttctctctctttctcttctttctctttttctctccttttcttctctctctcctcttccttcctcttcctattctcctttcctccctcttctctttcctctttttactattattattctctctctcctctttctctcctctccttctcttcattttt

SEQ ID NO: 8668 - DNA, 54 bp, Oryza sativa
  Clone ID: uC-osflcyp057a01b1
tctgtggagaaggagtggcacttattctgccggggggactttaagtacccgacc

SEQ ID NO: 8669 - DNA, 123 bp, Oryza sativa
  Clone ID: uC-osflcyp057a04b1
ttctttttctccgtccaaacccaaaatcttcggggggttttttttgagaagaaccaggtttccacatcctaccaatcattgtatgggatctagctcgccagcggctatgggcaaggactgcgg

SEQ ID NO: 8670 - DNA, 147 bp, Oryza sativa
  Clone ID: uC-osflcyp057b01b1
tctagcgatggttccagggaacagccgatgctgtcaggcatttcctgtggctatttgaggatgcaaggctcaaacgcatagagaacatactaattctatctggtgatcatctgtataggatggcttatatcggtttttctcaccttc

SEQ ID NO: 8671 - DNA, 222 bp, Oryza sativa
  Clone ID: uC-osflcyp057b05b1
tttttgaccaaccatgtgtggctccagaccctgggaggtgcatactataggtacttacagtgacaagagccatttgatcaagaaggatgtcccctgtgagactgatcagctgactgatgagcacacttagatcatccatgctgatgctgcgtgcaccatacttattgacaatgttgagaagctatcttgcagcttctacctgcactgggattttcttgcctt

SEQ ID NO: 8672 - DNA, 296 bp, Oryza sativa
  Clone ID: uC-osflcyp057b07b1
ttttacgcgtgggctttgatggattttaatggaaatattgttggaatgaacttctatgacaagaaagaaacacctttccttccaagtttcattgtgttgaagtgtttacagcacttcaaagaatttgggaaggttgtacggtcattgcatggatttaagggttggaaatcttttacaaagagtctcttgcttcacttgagaagatatgtcatgagttccctaaggtttgtggcgtgattgtggagaaggttgtaccttcatcattgtatcttgagatattaagttggtgacatcat

SEQ ID NO: 8673 - DNA, 455 bp, Oryza sativa
  Clone ID: uC-osflcyp057b10b1
ggccttcctgccgcgccaccgccggccatcgccgtccgcccccaaccggcgccggcggcatggaacggtggtggcgtacatggagccgaaccccaactcgccgtgctccatcgcgggccgtctaatcggggctctccccgtggtgggcctcgtggcgcgcatgctgagcgactagggtggcagccaaattaaaattgcagatactactgaaatgactaaggtcaacaaggctggagtggatctcccaaaggagactgctgaggagattagaccctgctggtctaaaccaagatcaaatgttcaggagtctaagggtttggttacattctcattgactatgggccctgaattccacatctcacagattcttgatgctgtggttattcgaagaaatttaggcgcaacacttgtgcttccagaaattagaggaattgtatttgtatgatgctgtaaat

SEQ ID NO: 8674 - DNA, 295 bp, Oryza sativa
  Clone ID: uC-osflcyp057b11b1
atcgaatccaccacacggtaccctcctctctcctcctccgaccaccatggccatggccacgcaagcctccgccgccaagtgccacctcctcgccgcctgggcaccggcgaagccgcgctcatccaccctctccatgcccacctcgagggcacccacctccctcagagcggcggcggaggatcagcccgccgcggcggcgacggaggagaagaagccagcccccgtggggttcgtgccgccgtagctggtccccaacacgccgttcccgatcttcggtggtagcacggtgggacct

SEQ ID NO: 8675 - DNA, 383 bp, Oryza sativa
  Clone ID: uC-osflcyp057b12b1
tcttttaattataactcctttagtttactaaatggctgattgccttttgatctagtgcattggtggatattacactttgatacataataataatatggttatccctgcaagaaaattaatatggttatcatttactctctctctctctctctctttatttttgcaggaataactacccctgaatgtagaatggagtgctatattaatatggttatcatttactctctctctctctctctctctctttatttttgcaggaataactacccctgaatgtagaatggagtgctatttagtaaaggaccaatactgaattcatgtaagcagatgatcaaagacatacgttggtgtttcttctttattaacacttctgtgaagataca

SEQ ID NO: 8676 - DNA, 473 bp, Oryza sativa
  unsure (1)..(473): unsure at all n locations
  Clone ID: uC-osflcyp057c04b1
ctctgagttgatagtttaagacggaggatggcagacggcttggatttccaactgatcaggcaaacattcatggatgctactgagtttctttcaccccaaatgggaacagaggatttattgcttttacatgcatactgggccaaattagagcgtactcttggaaatgatctagctgcagctcgtggtgtttgggaaaatactctcaagaaaagtggttctgttttggaagtctggcagcactacattgcaatggagatagaaaccgagcatattcatgaggctaggtcactttataagcgctgttataccaaaaggttttctgggtctggatcagaggagatatgccatgcgtggataagatttgaaagggagtgtggcacgttagaagattatgaccttgctgtaaaaaaggttaacccttgtttgaaggagcttatgatgttcaaggcacagcangaggtttaggttgacac

SEQ ID NO: 8677 - DNA, 367 bp, Oryza sativa
  Clone ID: uC-osflcyp057c05b1
tattagcaatccattccgatccatcaaatttctcgtggagaccgtagagagagagagaggcgccaaccatggacggcatcatccacaagatcgaggagaagctccacatgggcggaggcgagcacaagaaggaagacgagcacaagaaggagggggagcaccacaagaaggacggggagcacaaggaaggcgtggtggagaagatcaaggacaagatcaccggcgaccacggcgacggcggcgagcacaaggagaagaaggccatgaagaagatgaaggagaagatgcacggcaaggtgggccacccgcgccacggggacagtagcattattagctacagcgtctgagccgtcgtgctgccccaccg

SEQ ID NO: 8678 - DNA, 212 bp, Oryza sativa
  unsure (1)..(212): unsure at all n locations
  Clone ID: uC-osflcyp057c06b1
tgcntgctcatcgccatctctctcagctctcacggctcactgcatcaatggccgcggccaccatggcgctctcctccccggtgatggcccgcgcggcgccgtcgacctcctccgcgcttcttcggcgaggcgcggatcaccatgcgcaagaccgccgcgaagcccaagccggcggcgtagtctgtgagcccgtggctctgctccttctgtct

SEQ ID NO: 8679 - DNA, 466 bp, Oryza sativa
  Clone ID: uC-osflcyp057c07b1
tcttaaaaaaaaaaggaaaaaaaaacaaaacacaccaagccaaataaaagcgacaatgggatcgctcaccaccaacatcgtcctcgccgtcgccgtggtggcagcgctggtcggcggcgggtcgtgcggcccgcccaaggtgccacccggcccgaacatcacgaccaactacaacgccccgtggctccccgccagggccacctggtacggccagccctacggctccggctccaccgacaatggtggcgcgtgcgggatcaagaacgtcaacctgcctccctacaacggcatgatctcctgcggcaacgtcccaatcttcaaggacggcaggggatgcggctcatgctacgaggtgaagtgtgagcagtcggcggcgtgcttgaagcagtcggtgactgtgttcattatggacatgaacctccagctcatctcggttgtccacttttatttcttccggcatggtctt

SEQ ID NO: 8680 - DNA, 327 bp, Oryza sativa
  Clone ID: uC-osflcyp057c11b1
tgaaattttgacctggattggcttagatatgtaccacgtgaaagtgcaaaaaattacctcatcagtattctggggcttggagataaaagtgttgactgcatccgtcttttgtcattaaagcataaaggtttcccggttgatgtcaatgtagctcgcatagtcacaaggctaggatgggtcaaacttcaacccttacccttttctgcagagttccatttagttggcttgtttccaatcatgcgtgatgtgcagaaatatttatggccttggttgtgtaccattttctcagtacaaattgtttgaactacacttctattatgatacctt

SEQ ID NO: 8681 - DNA, 314 bp, Oryza sativa
  Clone ID: uC-osflcyp057d03b1
agcagcacgcctcctgcaccaccgctccataattccctggacccacgcatccttcttaacatgttatactaaatggtgatgtcgcaggtacttttgggaaagccattgcaagtttacaggtggaagcttctgatttggcaaacttcctcaccatggaccgaaatgggggttacagaggttctaaaactctcctaagatctgaactgtcagagaagcaggagctatgctttttctgatgcctcatcgctttggcagaagcttattgtattctccccgtaatgcatattttctgtattatagttcattatttcatc

SEQ ID NO: 8682 - DNA, 175 bp, Oryza sativa
  Clone ID: uC-osflcyp057d05b1
tcgttgagccgattcctctctagtggtcgcgcctggtgtgttcgccgacgacgccggcgtcgcgtcagccatgggtgggctcgaggagatcaagaatgaggccgttgatctggagaacataccgatcgaggaggtgtgagaggctttctgatgtatctgacaaggggcatttact

SEQ ID NO: 8683 - DNA, 499 bp, Oryza sativa
  Clone ID: uC-osflcyp057d07b1
tcttccatatacaactctctctctctctctccaactactgtgtcgtctcgcatcggtcggtgtcgcgaccacccggtcgccgacggttgaggtttcatttcatatatatatttttctctttttcttcattatttttttttatttttttataattttcaatataacataattcgtttagttatatcctttgagcatacaaaagaattgactataatagaaagttttttcctttttttttatcatattttattttttgttatgtttatcttttgattttttaaaagaaacaaccctcttattcttactttctattttatattcatattttcttttatttatataacttttctataaaatgcaaaaattaatattcttatttcccttttcatagctattttttttaaatatatttccttataatatcttatcatctattgaatgaagcacccccagtggggattgtttttattggggccttgttatcatagaaatttctttt

SEQ ID NO: 8684 - DNA, 135 bp, Oryza sativa
  Clone ID: uC-osflcyp057d09b1
gacattgaaggtagtgtgatcttcttcctgttttgtaacaatggcctcacgcagtagtgccctgctcctcctcttttcggacttttgcttccttgcccggcgagccgtcgtttactacgtatattgtcatatcac

SEQ ID NO: 8685 - DNA, 446 bp, Oryza sativa
  unsure (1)..(446): unsure at all n locations
  Clone ID: uC-osflcyp057d12b1
taggaagagcacggggaagggtgtgtaccagttcgttgacaagtacggcgcaaacgtcgacggctacagcccaatctactcgccggaggaatggtctcccaccggtgacacctacgttggtggaaccaccgggcttctgatctgggccgtgaccctcgccgggctcctcggcggcggcgccctcctcgtctacaacaccagcgccctcgccggctaaatttcacccaaatccagtctatgtatgtaacaccaagctgggtgtctgcatattcatctgtaatctaagatagccttcctctgaatgcgatgtgatgatgcccactgcttaatcaaactgcattgtgattaatctatgtaacactgtacttgcatgatgatgatatactacacttgatacttgaatttggagattaattgttgataccaaatacatagattacattnna

SEQ ID NO: 8686 - DNA, 442 bp, Oryza sativa
  Clone ID: uC-osflcyp057e03b1
ttcttgatccattgataaatggacattacccgcagataatgtaagatcttgtgaaagataggctgcccaagtctcactcctgaacaagctagattggtcaagggctcggctgactatattggcatcaaccaatacacagctagctacatgaagggccagcaattgatgcagcagacaccgacgagttactcagccgattggtaggttacctatgtttttggaataactgtaaacccatttgaccacaggtatctttataaatggctctaactaacttaccttgctcttattattcgtttttttctttcaatttacagtttttattattttatttttacattttatatacattttatttttatcattttcatttcattatctttatcatatctatatttcttatttacttttttctaattattttatcaattttttttttttt

SEQ ID NO: 8687 - DNA, 154 bp, Oryza sativa
  Clone ID: uC-osflcyp057e05b1
aagtgaaacagcaaaaaaaatcaaacaaggggaaaaaatattccccatctgtgaaattcgcaaaaccctagcgcggcggcgatgtcgaacacgagggtgatcttcgacaatgaccgctggaggagcttcggcggggcggatcgtgatggagctg

SEQ ID NO: 8688 - DNA, 117 bp, Oryza sativa
  Clone ID: uC-osflcyp057e07b1
tccgaggccggcgccaccgacgaggtggtgatggtggtgccaatctatcttgatatcactccgatgcgtgagcagtaggattttttcagatatttagtttattttataaaatttatc

SEQ ID NO: 8689 - DNA, 304 bp, Oryza sativa
  Clone ID: uC-osflcyp057e08b1
tgcctgtcccccaattccccacttccccaacccaggcgatcctccgccgccgccgccggcggccggccgcctccctccgccgccacgcagccgcgccccctccgccggacactccagaccccggtgaacctcccctccttcgccggccgccttgcccgcgcccgaacgccacgccaagctcaggatcatttcgtcgatttcgtggattggatggccaaccttggcggtggcgcgatgccggcgggatcctcgggcggtgacggtgaggtggaggccgatttcgtgtagcttcaggtggaggatt

SEQ ID NO: 8690 - DNA, 484 bp, Oryza sativa
  Clone ID: uC-osflcyp057e11b1
tgtgctttctccttcccctccgagcaccgccgccgtcggcgccaccgccaccgtagcctgaccgctcggtctccggcaaccagacaaaatggtgagagtcagtgtcctcaacgatgctctgaaaacaatgtacaatgctgagaagcgtgggaagcggcaagtgatgatccgacccttattaaaggttatcatcaagtttctcatcgtgatgcagaagcacggctacattgttgatatagagtttgatgttatactatccgttctttctaagtattgttgctactttttttatccgttattcttaattttgtcatactttttctctattattttctttttttttattttttttatttacttattatttttttttttatcctatcacatcactctttttctttattttttctactctttatattttaataattttcctcttctttttatcttatttttttttatatattttttcttatactttctt

SEQ ID NO: 8691 - DNA, 94 bp, Oryza sativa
  Clone ID: uC-osflcyp057e12b1
tttttcaaaatgatgctacacaagacggggcaagcaactagggcatctggagccttgatgagctgctcatggcagctggtgcctactgaggaag

SEQ ID NO: 8692 - DNA, 264 bp, Oryza sativa
  Clone ID: uC-osflcyp057f01b1
ggcaggttcgcccgcgggtcccgccccggtattactttcacgacccacacatcctttttttcaagcaacccaagccgctttccccaggggggtttttttagaactagaattccttcaccccaaatccctaacatggaaggactaccgggtgatgcctgtccaaaaccctcgcttccgtagccggtacggagaggtttttcctccctacataaggacaactacgctccttgttctttttgttgccccaggtttcatatcttggat

SEQ ID NO: 8693 - DNA, 315 bp, Oryza sativa
  Clone ID: uC-osflcyp057f10b1
cccacgcgtccgcttggtttctctctctagccatcggctgcctctctctctctctctctctctctctctcctcgctgccccataggtggacgcgggtcaacgggccggtcgccggcggcggcggctgcggcggcgagaggaggtagaagctccggcgatcgcgagggcaggcggcgggttggtgcgctgccggcttcgagttcgagcgggcgggccatggggaggaacgggagcgttaagcgtacgtcgcaatcgggggtcggcggaggcgttcacggtgatatccccgccgacttaccagcacatggcgggagg

SEQ ID NO: 8694 - DNA, 401 bp, Oryza sativa
  Clone ID: uC-osflcyp057f11b1
tttctcgtcctagctccaaattgaacgagccacgacccgtccgagaggtgtatcgtcggcggcgacttcatccgtgggcagatcgacctccacaagcttcgcggcgaggtctagtctagacgaggtcggcatcaacttcatcggtggccgtgcttcccccttcatcccctctgcttggacggggatccaccggccagatccggcgcatcttcaggccaagggtgagctcgtcgccctcccctcttgggccaacgtggattcccggtgactggatccgattcattcagtaaaataatttggaggaatccctccaaacggatccgatttctccctgccatgtcgcccttggcaggaccttgtgcatgccccagctggtccgacctctattgatcccctcctaa

SEQ ID NO: 8695 - DNA, 206 bp, Oryza sativa
  Clone ID: uC-osflcyp057g08b1
tttgagtttcaggaatcgacaattggagcggcatttttttcacagaccttagcagttaatgacgaaaccgtgaagtttgaaatctgggatacagctgggcaggagagatatcacagcttggctcccatgtactataggggtgcggttgctgccatagttgactatgacatcacgaattcggtctctttcacccgtgcaaagatatg

SEQ ID NO: 8696 - DNA, 65 bp, Oryza sativa
  Clone ID: uC-osflcyp057g11b1
tttctttagccccctccttccatagcgaacgggggggcattttataatatacctctcctcctact

SEQ ID NO: 8697 - DNA, 351 bp, Oryza sativa
  Clone ID: uC-osflcyp057g12b1
gtcctcgtagcaaagccatggactgccaccgaaacgaatcccagagagaactggaaatgggcacaaagcctcacttcgtggtcatcccatggctggccaccagccacatgatacccatcgtcgacatcgcctgcctcctcgccgcgcacggcgccgcggtcaccgtcatcacgacgccggccaacgcgcagctcgtccagagccgcgtagaccgtgccggcgaccagggcgcttccaggatcacggtcaccacgatccctttcccggccgccgaggccgggctaccggaggggtgcgagagtggaggaccacgttcccttgtccgtcattgatgcctatcttttttttgac

SEQ ID NO: 8698 - DNA, 479 bp, Oryza sativa
  Clone ID: uC-osflcyp057h03b1
tcctattccaaaacgaatccccaatctcgtgcgcgccgtcgttcgccgtggcctcccccgtgcgccgcccgccgcttcgcatcccggtgagaagaaaagagaggaggggaaatggagatacagtcatcagggaggccaatcgatgtgctcatggagaaggttttgtcagtgaacatcctctcctcggactacttcaaggagctctacaggctgaagacttaccacgaggtcattgatgagatctacaatcaggttgaccacctagagccatggatgaccggcaactggcgtgggcccttcagcgccttctgccttctttacaagttcttcaccatgaagctcacggttaagcagatgcacggcctggtgaagcaccctgactcgccttacatcagagctgttggatttctttacctgcgatatgttgcggaaccaaagacgttgtggagttggtatgaaccctacattaaagatgatga

SEQ ID NO: 8699 - DNA, 422 bp, Oryza sativa
  Clone ID: uC-osflcyp057h04b1
tcttagcgggaggcctcctcccaatctccccccttccccttccatagttccatggtggcgctcttcagacgcgagcgcgaggagcaccgggtccgcttgccggtggccggcctgactcgttagccgccgtcccgtccggggcgaaaggaagcatacctcgctcactccatttggagcttcccccatccgcacgcgcaccagctgttcgacgaaatgccaccgcgcgctctgcccccagtggaggacgacgccggcagggactgttcttggtgttttttctgatgtgtgtcttttttttattcttatcatttttttactcttctctttttttttttcttgttttcttcattccatttatttttacttttttttattttctttcttttatttttcttttcttttttattttttctttctttttt

SEQ ID NO: 8700 - DNA, 196 bp, Oryza sativa
  Clone ID: uC-osflcyp057h09b1
tttagcaagcccgggcccccagccccttcgggttctccttccaccagcagaaatctgccaattgcagtaccggcaattccccttgatgaaataaagggaataaccaagaacttcagcagtgatgctctcatcggagaaggctcgtacgccagagttttctttggtgggcaaagagattttctgagatctgtggtga

SEQ ID NO: 8701 - DNA, 131 bp, Oryza sativa
  Clone ID: uC-osflcyp058a04b1
ctccaattttttttatacctctcacaactcacgagcgcggaggggggatatttaacattgctgcagcaaatcccctctctcgaccccacttcctacctgattcctgcgggctagatgaccgcggttgtagg

SEQ ID NO: 8702 - DNA, 284 bp, Oryza sativa
  Clone ID: uC-osflcyp058a07b1
atttaatcactataaattggtctgtgaagaaaagggcgtttgtacattgtgaaggctgcaagcatcaggttggctcaggagtccgaggtgctcgtgggcctgatactgttttatatggcccacgccgcgcggcccgtgaagaaacccgccgtcattttttccttcatcttctccatctttgtcgaggatgttaatgccgccatttaactcctgttattatccttggggtttcgaatatgcatgattgtcaatccatacatttcgcggttgaaatctagatcaac

SEQ ID NO: 8703 - DNA, 468 bp, Oryza sativa
  Clone ID: uC-osflcyp058a09b1
aacagacttggtggcgccagattcccttagtgcaagcgggctgtgaaagagcttgagaccttcaaggtgtcactaggaggactaaatggaagatatgcttgttgaagagcacctaacaattgtgtcccaaccactattaccggtctcaacggatcattgacatggtatggttcgttctctgctatgctatcgttagcttatatggctgagtaggaatatattgaactagagaaccacccttgtaacaggagaatatgaactaggactacttgaacattgcgctgagacagaccatgaaaaaaatattgacatcttcatgaaggcccctgagatgtgcctctctgctattaggcgctcttttaccagaagaaatgaccccatgacagttttaattaccattgcatattggaaatattcctcttttgctgtagcttttcccagtggacacgtggtctcagcaagatcttt

SEQ ID NO: 8704 - DNA, 117 bp, Oryza sativa
  Clone ID: uC-osflcyp058b02b1
atcctcctgatttgcgcagaacctttactagaaatgctggagggtcgttaggctatcttcatagccaccgctcccgatccctaggttctacgccactcccgcctacatgagagttca

SEQ ID NO: 8705 - DNA, 355 bp, Oryza sativa
  Clone ID: uC-osflcyp058b07b1
cgctgcatgagggggtttggtggtgcggttgattgccggcaataaattctctagggggaggtatcggtcatggctgccgctgctgcaaggaggggctcatcgctgctctctcgctgcctgctgtccaggcccttcgccgccgcctcgcctgctgtcccctctgcgctccgcagggcagatgggacacaagaattgttgctgggaatccttcagaggttcagcactgcagcagttgcagaggagcccatatcacccccagtccaagtgaactacactcagctcctcattgatggcaaattcgctgattcagctttcggctaaactttcccatctctggacccctcgtaccggggag

SEQ ID NO: 8706 - DNA, 311 bp, Oryza sativa
  Clone ID: uC-osflcyp058b08b1
agcgcctgcgcctgggcctacccgttggagtgctgggacagcggttactggatgtcgtacctgtgggcggacgacccggaggtgcgcgccatgctgggcattcacgagggctccatcgcttactggagccgctgcacggcgctgatgctcttccggcacgacgtggacagcgccattccttaccacgcggagcttacgcagtgcggctacagggcgctggtgtacaacggtgaccacgactctgtacatgactgtttttggcacgcagtactggatccggtcgctgggctacaacgtggagaccgcctgga

SEQ ID NO: 8707 - DNA, 327 bp, Oryza sativa
  Clone ID: uC-osflcyp058b10b1
ctttgctcctttggctgacatggcttctactctccctgggctccatctacctccttgacctcctcgcacactcacgacgctgcctcccgccgggaccccgaccgctgccgctgatcggcagcctccacctgctcggcgaccagccacaccgatcgctcgccggtctcgccaagacgtacggccctctcatgtcgctccgccttggcgctgtcaccacggtggacgccttctcgtcggaggtcgcccgcgagttcctgaagaagcacgatgccgtcttcgccacccggtcaacccccgacgccactggtgaccacgcgtggtactcct

SEQ ID NO: 8708 - DNA, 521 bp, Oryza sativa
  Clone ID: uC-osflcyp058b11b1
gccgccgagctacctcaccggcgagttcccgggcgactacgggtgggacaccgcggggctctccgccgacccggagacgttcgccaagaaccgggagctggaggtgatccactcccggtgggcgatgctgggcgcgctcggctgcgtcttcccggagctcctcgcccggaacggcgtcaagttcggcgaggccgtgtggttcaaggcgggctcgcagatcttcagcgagggcgggctcgactacctcggcaacccgagcctgatccacgcgcagagcatcctcgccatctgggcggtgcaggtggtgctcatgggcgccgtcgaggggtaccgcatcgccggcgggccgctcggggaggtcgtcgacccgctctaccccggcggcgccttcgacccgctcggcctcgccgatgacccccgggcgttcgcggagcttcaggtgaaggagatcaagaacggccgcctcgccatgttcctcatgttcggctttttcgtccagccattggcaccggcaagggccc

SEQ ID NO: 8709 - DNA, 133 bp, Oryza sativa
  Clone ID: uC-osflcyp058d02b1
cttgctcgcgcttcctcgcaccccgtacctatgaaagcggacgctgtctacagaggcggttcaccccgcaaactcgaacgacgagcaattagtttcacacagcctacatatttgaggtggcaatcctgattgc

SEQ ID NO: 8710 - DNA, 516 bp, Oryza sativa
  Clone ID: uC-osflcyp058d03b1
tatctacagaatgctttcactgccgagaatatttgtaacatctgagaacaaaaccagagtgctttctccgatatcataaaaatattggaagaagagagtttcagaaggttattggtggcgatgtcaaaggcacatagacacaggacaaagtgattgactcaaaatgaaggattcaagtcagaagggttgtttgtcagtgacctgcttgaaatctgactgtaatgttgatggtgacattacttcttttaagcgtgtgattcatggacctgtggatttggtaatactaattgatagtgctctctctgatggataggaataaagcttaccttggcactgtaaacttgtgcttgcaccattgcattaccttatatttttggaatcctggatctttaccagttgaccactgttgaatgctcccattctctggatttctggatggatagctaatcatgacttttccattaccaattttggattttaaaatctggattcgtaacctttatctttaaaaatatt

SEQ ID NO: 8711 - DNA, 520 bp, Oryza sativa
  Clone ID: uC-osflcyp058d11b1
ctcatcagatcagcgtgaagcagcggcaagaacacaaaaatggcggacgagaagctcgccaagctgcgtgaagccgtcgccggcctctcgcagatcagtgacaacgagaagtccgggttcatcagcctcgtcgcccgctacctcagtggcgaggaggagcatgtggaatgggcaaagatccacacgccgacggacgaggtggtggtgccgtacgacaccctggcggcgccgccggaggacttggaggagaccaagaagctgctcaacaagctcgccgtgctcaagctcaacggcggcctcggcaccaccatgggatgcaccggaccaaaatcggtcatcgaagtgcgcaacggattcacattcctcgacttgattgtgatccagatcgagtccctcaacaagaagtatggcagcaatgtcccactgcttctgatgaactcattcaacacccatgaagacaccctgaagattgttgagaaatacaccaattcgaacatttgagtccatactttcaatcaga

SEQ ID NO: 8712 - DNA, 445 bp, Oryza sativa
  Clone ID: uC-osflcyp058d12b1
tatgccacttgctgctgtgaagtactcccgcgggatgttcatcttccccagtgcacagcctgctccccacaggagcttctctgaggaagttgctgtcctcaaccgctactttggccatctgaaatctggtggtaatgcttatgtgattggagatccagcaaagcctggccagaagtggcatatctactatgctactcagcacccggagcaacctatggttacccttgaaatgtgcatgaccggactggacaaggagaaagcttcagtctttttcaagacttctgctgatggtcacacatcatgtgctaaggaaatgacaaaactctcgggcatctctgacattatcccagagatggagatctgtgaccttgacttcgaaccctgcggctactccatgaatgcaatccatggctcagcgttttctaccattcatgtgaccccctgt

SEQ ID NO: 8713 - DNA, 412 bp, Oryza sativa
  Clone ID: uC-osflcyp058e05b1
gtcaattgggtatatgcaagtactcaaagagaggatacatcaggccattttaatatttttgttggcgatctttgcccggaagtaacagatgctgctttgtttgcttttttcgctggatttaccagttgctcagatgctagggtaatgtgggatcagaaaactggacgatccagaggttttggttttgtttctttcagaaatcagcaggacgcacaaaatgccataaatgaactgaatgggaagtggctcggcaaccgtcaagttcgttgcaattgggcaacaaagggtgctaatgctggtgaagagaaacaaaatacagactccaagggtttgatagagttgacaaatgtgttatcagaaggttgaaaggttaatgcaaatgaatatggtcctgaaaacaacccacagttca

SEQ ID NO: 8714 - DNA, 63 bp, Oryza sativa
  Clone ID: uC-osflcyp058e09b1
ttgataattttcataaaaacatgttttgtcttaggcactcacctatagtttaaggggacacgc

SEQ ID NO: 8715 - DNA, 400 bp, Oryza sativa
  Clone ID: uC-osflcyp058f08b1
cgacggtatggctttcttcttcttgaggatgtcgcatctcaagacccacttagtgtttcggttgcaattcttcaccaggttaacattttgcctgagatgtatcaagttgggtacacaaaattgttctttcgaactggccagattggcaaacttgaagacactcggaaccgtactctgcatggtattttaagggttcaaagctgtttcagagggcatcaagcccgtcgccatgcaagggaacgaataagaggagttttggctcttcaatcatttattcgaggtgagattgcaagaaaaatgtattcgtctctggcaaggaaacacagggcagccattattttacagagaaatctaaaatgctggcttgcaagaagatatttcgttaacataccgaaggctt

SEQ ID NO: 8716 - DNA, 397 bp, Oryza sativa
  Clone ID: uC-osflcyp058g03b1
agccaatccactgaccatgatcactcctatgtggagtatcctcaagaagcagagtacaaggaagaattccggccaccgtctcctgctccgtcttatactgaaaaggatgtcctctcatctatggtaagacgactaggcgagttggaggagaaggtgcaggcgctcgaaacgaagccatccgagatgccatttgaaaaggaggaattgctgaatgcagccgtccgccgtgtggatgcattagaagccgagttaatctctacaaagaaggctctctatgaagccctgatgcggcaggacgagctgcttgcgtacattgacaagcaagatattgatcaagtttcgtaaaaagaaatttgcttttagctcaacgacgagttaattctccatacacagagct

SEQ ID NO: 8717 - DNA, 135 bp, Oryza sativa
  Clone ID: uC-osflcyp058g11b1
ttttcttttgatcagagactgaaggtgataggaggagggggtaaacatcgagagggcgctcacaatcgtcacgcaccacgtcatggtcagaggttagggtctgggactacaactagtggtgcttcagtcaattcc

SEQ ID NO: 8718 - DNA, 353 bp, Oryza sativa
  Clone ID: uC-osflcyp058g12b1
agacggtcgttggtgtacgtctacttccgctgcttcgacggttgctttcaccattgacgcctcgctcaccatggacatgggcgactacaatggtaaaggtggacgcctggtacgacaacgagtggtgctacagccaacgcttggtctatctggcgcatttgattgcgagcaagaggaccggcgcggttgttcatgtctatcgacgatccacttggaggactttttgatggacaactaggatacctgatgagtgcaaattgttcgaaaactaagaccattgatcaagtacggacttgcgtaagagcagaaatataatactttatataatgtaacgaaatacacacattaactga

SEQ ID NO: 8719 - DNA, 413 bp, Oryza sativa
  Clone ID: uC-osflcyp058h05b1
gtgccttttggtatcagctctaatgctctcgttgatatactccgagatactgaagatgctacgattgtatggcttactggaattcaatgtggagattttctttccacatgatcttaacagtctgcctaggggttatgacaaacacaaaagcatgttgggcgattgaaccgtatattatgacatcaaagtcactttttggttgagattttgtaaactctgaagaatacattttggcctttccagaccaaccagtctggtagcttatttttaaatgctgtttctgcaaaccaacatggccctggtaatgtaggttataattatacaacgccacatggcaatttaagtaccatagcgatggttgttgtatatgctgttcaacataagttgttgcgtggagattggactaatgtccg

SEQ ID NO: 8720 - DNA, 117 bp, Oryza sativa
  Clone ID: uC-osflcyp058h08b1
gtcgtcttcgtcctcaccaagtacccgtcctacgagagcgactggtactacctcctagccgccaattaacaccaccactacttcttggctagtacttacgccgtcgttagcctaatc

SEQ ID NO: 8721 - DNA, 478 bp, Oryza sativa
  Clone ID: uC-osflcyp062a02a1
agtaccgatcataatatcataaactcattagattctaacatacaattaattgatagtcaaagtgttgaagtttggctaaatcttggcctaaacattaaacattttatgacatggggaaggacttaatttatgcaaggtcaaaatctaattaatgacctatattaagaagggtatatggttataaaaaggaaaaatggggtgcatgggccagcacatacatgcatcattccacacttgccactacatgggatagatggtaaaagcggggcttggtgaaaaaccaccttttttttgcgggtttgaaaacgaccttaggggcccccttgggcggactggcagggggcaacctttttgaccctggtggcgagcgcatcgggccccgcggcgaccttcttgaggtcgacgtaaagggtgtagcgggtgggcatgaggtgggtgaagttgacaagcttgaggaagcacttgacgcgcgactttt

SEQ ID NO: 8722 - DNA, 427 bp, Oryza sativa
  Clone ID: uC-osflcyp062a04a1
gtcgtccttttttttttaacccaaaatcccaatgcattttataacttataaaggaaacatacatctgacccaatcggaagaacacacggcgtaccaaacaaaaacatttcgtgctaaccaaggcaaattatacactacgttgccgtccccagcaataagagggaagggtaacaaacaaaacaaaggcccaaactgtggaaattataagaggtctagttaagatgccgggaggcatgaacgaatgatgacacgccgggctaccccatggccgggtacccaaggtttattttaatggggaaacacccaaccgaaaaccaccaaattttgccgtggaaaaaaaccccgggggcagtttaaaaaaattatggggggaagggccctggctcggcccccaaaaacccaaacacggggcggggggggcgcgaaa

SEQ ID NO: 8723 - DNA, 385 bp, Oryza sativa
  Clone ID: uC-osflcyp062a05a1
gatgcgaccgaggcagctttattcaacttgtccagaaccacttttctaccgactaccacttttgcatgggtaaaattaaccaggtaccacgggttgattgtacagtatttctcaaagggtcacttacctgcctgaacatctactatttgcagctacttaaacagacttaccaaatacattgcataatgttaagtaactaagttttgctccagtagctgacgaatgatgatccgcacatttcctaccagccagtaggtgccggagcactgccttcctgccatccaggggcggcaggaggtgcaacagcagcaggagcggcaggaggaacagcaactgcatcccacccttctgcagccacaggagctggagcagcaccccatttccc

SEQ ID NO: 8724 - DNA, 290 bp, Oryza sativa
  Clone ID: uC-osflcyp062a06a1
ctgagaactttcccttccacaaagaagggagggagcttagggggggaccaaaccggccttttgcccgcaaacgggcactaacacgctactacccttttttaccagggggaacatatacatatttggggccaaaaaagggccaaagacaaaaaaatggggggccaaagggggcatgccgttgctgaaagcagcgctagaaaatttcctcccaacagggaggaaaaatgggggaaccagtttggaaggggggggcccgctcaccaggaaaggccccccgaaccattgggggg

SEQ ID NO: 8725 - DNA, 418 bp, Oryza sativa
  unsure (1)..(418): unsure at all n locations
  Clone ID: uC-osflcyp062a07a1
agccaacccaggcaaaaaaaaaacaccagccggccaaacctagtggtaacgaggccttgaacgaaaataaaagatggctgccggcctggccgaaagatatggcatatcaacaatgcacagaagccccccaaccacggcataaaaactgggaactacacaagacactcccagcacacaaaactacagacaggccatatatgtaccaagcaccaacaagggccaaaccaagtcaaggactcaagatccatgcatatgttgcgatgtgagatgccaacactcccaagccaggttccagggggatatggngtttcatttctaggtctgcttcttatctttggctggacccctaggtatctggctgagaacctttgcgtcgagaccagagaccggcctgctgagttccacatgcgccttccca

SEQ ID NO: 8726 - DNA, 245 bp, Oryza sativa
  Clone ID: uC-osflcyp062a08a1
gacacaaaacgtctcccaatatgcttttttaatagatccatactactaaacatccacacccacacaagcaggcagttaaaccatttacatcagggggattgagattaaattatgaaaaggtcaaaaccattataaaggctcctatctgaaagaagggaatatcctttataaaacaggggaaataggggtggcatgggcccagcacaaacatcccatcatatccagacttgcccagcggcatgagg

SEQ ID NO: 8727 - DNA, 340 bp, Oryza sativa
  Clone ID: uC-osflcyp062a10a1
gcaagtcatagcatttgctcacaaaatgcacttgaagcaatgttatccatgaacgttgacaggaaggaagctaacacgcagtaaccagatgcatcggcattcaaaattgattctcacttaacattatgcaatactttaacatggagctacttaaacagatctaccaaatacattacataatggtaagtaactcaattttcctccagtagctgaccaatgatgatccccacatttcctacccaccaagaaggggccgaacactggcttccttccattcaagggccgaaggaggtgcaacaacaacaggaggggcaggaagaacaacaactggattccaacc

SEQ ID NO: 8728 - DNA, 399 bp, Oryza sativa
  Clone ID: uC-osflcyp062b01a1
cggaaaaaaagggcccacatggggaaaaaagattttttttttagggggacattaaatcttttttttaaaaaaggggggccccaaaggtttaaaaaaaaagggggttaggagaaaaattttttacccccccttaaaggggggcaaaaaaaaaaaatttttttttaaaaaaaaggggggtaaaaaaggtaatttgtttttttgaaaaaaatatttttgaaaaaaaatgggggaaaaaaaaaaaagggggtccccgggtttttttggggtttaaaaaaaaaaaaaaaggggggccccgggtaatttctttctcattttggggggggggaaaaacccaatttgtttttcccccccaataattatatttttaacccgggggaaaaaaaaaaagggtaattttaa

SEQ ID NO: 8729 - DNA, 384 bp, Oryza sativa
  Clone ID: uC-osflcyp062b02a1
agcatgaattacatattctagcattaatacgttaaattccattaagatggtagcattaacaggtcgtattatccataaaacaacccctagattctagtattcaacagaactgtttcggttaataccaaaaattacacattagctctacatcactattcctgttgcgaattctttcaccctgtcaaaaatttacaccgaaaacttctgcagatttcacgagaattacaccatgggcacatttaggatgtgaatcttattaagctcagtctcacaatgcactcagctctgggttctcctgcactggagtgatttactgctgacagtttgcttctttttggacgacagtgcaccgatgtttcagtcattgccaaagccaaaatgacc

SEQ ID NO: 8730 - DNA, 282 bp, Oryza sativa
  Clone ID: uC-osflcyp062b03a1
gctccgattgcgagcccttcagggctagcttatatcccaatgttgaattaacaaagctattctaaatttagagattgtctacttagtactatcctatttgaacattgttgcaacattgttacattctatttgccatcacgatgacctggagcttcacaataaaatggttactcaattattgttcatctccagccgagagcctaaaagaagcttcagcccttacttcttctagcttgcccaaaagttccttcatgaactcggatttagtcccatgcgttatgc

SEQ ID NO: 8731 - DNA, 448 bp, Oryza sativa
  unsure (1)..(448): unsure at all n locations
  Clone ID: uC-osflcyp062b04a1
gcacgaaatgtagggatattatcacaatggtagaagcatctgttgcattcaggattacagatacaactagaaaagtgaagaaaaagctgagttaacaacagaagacacgcccttggcttacatagtctatacacatcaagcatacacacatggggtgatgctttgtcaggctcctaggtacgtaggaaggaagcttccatggactgcaggatactcgctgtgtcgaacctgaagtttcggaagcttttacctgggcggctgtcaagagtttgtgggtcagatcctgttctagtaataacggggttctcaacaggcgccgctccagttgaggaattcttcgctttccacacagtacctctagcagacgtgtctgatttctgatactgtgggtgacgatgtgtggctatccaggcttttagaccctgnaaaaatggtgcgaccatataga

SEQ ID NO: 8732 - DNA, 418 bp, Oryza sativa
  Clone ID: uC-osflcyp062b05a1
tgtttttttttacattttgtttcatttgcactgtgttaccgtacggttacttttttttctgtttttttcaaaaccaaaaaaaagggttttttataaccttgcaaattacattaaaaatttttttaccacatacccaaaaaaaaggggtaggaaggatttttactaaaacacacccatgagaaaaattttttccaacttacattaaaacttgggtaaaccaaggggtaatttttttaggagcaaaaattggtgcatacattggaggacacccccaaaaatgggggcgggcccggggtgatggggtccggcccttggggaacctttcttaaaaatgggaacttcgtaaatggccgaggcggcggcggtgggtccgaggtgaaagggtcaagacccgaggggaccttccttaaaaccggga

SEQ ID NO: 8733 - DNA, 428 bp, Oryza sativa
  Clone ID: uC-osflcyp062b08a1
agcatgaattacatattctagcattaatacgttaaattccattaagatggtagcattaacaggtcgtattatccataaaacaacccctagattctagtattcaacagaactgttttggttaataccaaaaattacacatttttttttcatcactatccctgttgcgatttgggacccaaggcccaaaaaagccctggattacttgtggcagccttgcaggggaagggcccaacaaatcccggaaggccaatgggggaaaacagccatgggatggggcctacattttttagccatcccctcccgggggggctaaaatgggtggattttaaagggcggcgggggaaaaattgccgtttcggggatatgctgccttttcgcccagggggttttgggcccaaattaacattttaaaaaggctagggaggttt

SEQ ID NO: 8734 - DNA, 432 bp, Oryza sativa
  Clone ID: uC-osflcyp062b09a1
gaagttaaaacccacactttataggtgaacaatgaattttccatatcaccagttcacagttcttgtcccgatgcgagcccttcagggcagcttatatcccaatgttgaattaacaaagctattctaaatttagagattgtctacttagtactatcctatttgaacattgttgcaacattgttacattctatttgccatcacgatgacctggagcttcacaataaaatggttactcaattattgttcatctccagccgagagcctaaaagaagcttcagcccttacttcttctagcttgcccaaaagttccttcatgaactcggatttagtcccatgcgttatgcgaagtatatctgctgccctggttaaagacatcagagcattctttgtgtactcaagcaacccatgaagctttccgaagtatagaactgt

SEQ ID NO: 8735 - DNA, 443 bp, Oryza sativa
  Clone ID: uC-osflcyp062b10a1
cgttctttttttttgttttctctcacattttgctacactagcacggttaccgcacggtaaccgtggtaaccgtgacaaaccgcgacaaaccgtacaaaatttatcaaaaattcaaattatttttcaaatttatttgaatttgacgcggttaccgcggtttaccccttaccgtacccccgcggtaagcgcggtaaccgcgcggtttaccgcggtaaatgcaaccgtggttacaccatgagaacttcaatatacaacatacaaaaataccacacttggcatgatttcagaaaccctaaatcaaaaaaatccccaaaattagaaccttggcaaatccctaagcgaatcggattgatgacttgccgatttggcaaatcgccgccattaagtgatgtgatcacggcattcggaccgccctgcacgcacccttaccattgccatggact

SEQ ID NO: 8736 - DNA, 122 bp, Oryza sativa
  Clone ID: uC-osflcyp062b12a1
attgtaacattttttctgacctaattggtttgttcacacggtttttttatatacattatcttttttgctaaccagagcaaattattcatcctacgttgccggtcccctgctttaagagggaa

SEQ ID NO: 8737 - DNA, 428 bp, Oryza sativa
  Clone ID: uC-osflcyp062c01a1
ttgcggtctgtacctgccgtccttttttttttttttggtttttttttttttttttttttggaacaaaacattaaatttcttaattgtaattcctggtttaaaccccctagggggattaatattggttttttccaaaaattttttaaatttacaaaccgtttaaaactaactggaatggcccggcccccattggaaaaacaattttattttaaaaaagccggatagtccgctttgttaaaaacaattcaattagagctttcccggaaaaaaattttaagggcccgggaaaataaaaatggaaaggaaaaatttttgggggggggggaagaatatacggggggttgatctttaaaaaacacaaaagctttttggggcacccgggggaaagccccttggattttttgaaaacggccagggttttggggttt

SEQ ID NO: 8738 - DNA, 482 bp, Oryza sativa
  Clone ID: uC-osflcyp062c02a1
aaaccgcgcaattgtctgctttatatttttctcaagtcattctgatgtagcacttttgatatgagaaacatctttatacaacattggaaaaagaaaaaaaaagaggaaaagggtaggggcccttcctttcccttttggcccctcaccctaaaaatacaattggcgcctaaaatatgctcagattacaagccactggactacccccttcaagggtgcaacgaagggcacatttttttacacacacacaggcagatacaagctgatttgcctaaagcgaatagagagttgaaaagcttttgacacctccggggggggttcctgatcaagcaggaacaggagcagcagggcaccaatgcaactttttaggcatcgtcgtcaaccttggattgccctgtgcttttggggcccaaactagcttgaactgccactttgttcccaatgcttcgccccaagctagcatcagagctcccattgggcatgca

SEQ ID NO: 8739 - DNA, 549 bp, Oryza sativa
  unsure (1)..(549): unsure at all n locations
  Clone ID: uC-osflcyp062c04a1
ctgttatgaaaagttcattacgacaattatgactaattggcagcattccaaaatattcctcaacgttgacactccatgccacacaatacaatcgaaatttctagaataggcaacatttccgagcatctcggagacaagaccaacatcaccactcgaatgacactgagggggaaatatacaggggaagaagcaaaaatgctatctttaggtagtcgtttgacgacagacagttaagtgtagtgcacctgttgtagcactcgcttactcccccttgtgctccttatctttcagagcatttcctgtgatttacgaacaatgcgtctaacctttttcttgaaatcgtccctcttttctctccaatccttagccgcttcaatatttgctggagactcatcatttggactagagagcatcgaaatgatgctcagaactatactttcaactgtatgcacaggtgtccaccgttcgctcgcaagctcataacccgtgggatcttngccaggtggatgaaggatagaaatgcatacgcgcccatcaggataaacattg

SEQ ID NO: 8740 - DNA, 533 bp, Oryza sativa
  Clone ID: uC-osflcyp062c05a1
aaagaaaatccaaacacctccaagatttgcgttttgcgaacatagtaatagattcagtacacagagataacggttttgacaaagtatgagctagtagtattccgaatttccgataggccaaacaagcggacaaccagccaaaattttcactcagccaaaagccacaggctatataataatctgatctaacaaacaggcagaaggggggcaaagcttccttctctaggccttcctggctgcgatctgagactcaggctctttcttcactggttcttccttctctgacaggataagctcaatgtggcacggggaggacatgtaagggttgatgcgtccatgagcacggtaggtacggcgcctctgcttctgggcctggttaacttgaatgtgggacacataaagagtatcaacatccagacctttcacctcagcattgctctctgcattcttaagaagatccagaatgaatctagcagacttggcaggccagcgtccctgaccgtttgaatggcgtgacttagcttgagcagtgc

SEQ ID NO: 8741 - DNA, 280 bp, Oryza sativa
  Clone ID: uC-osflcyp062c07a1
ggaacaaaagagtaaattttttaattgaattcccaggtttaaacactcttgacatgctttcaggttcagacaccaaacatactaaaaaaagctacacctgcccaacgcaaaagagaacagaatttaaaagaaaaggaactgcgcaaaccaatgatccatcattgaaaaccaaaagtccaaaaaacctctactgctatccgcacattttaccagacacaatcagctaaacttctagctctcctatgaaaccacctccaagtcctaaccaaaagcaacggag

SEQ ID NO: 8742 - DNA, 418 bp, Oryza sativa
  Clone ID: uC-osflcyp062c08a1
cgtcttttttttttttttttttttttctttttttttttttttttaaaccgcgcaattgtctggttatataatttttttaagtcatttttattgaccacttttgattttaaaaaaccatacattctaaaatttgttacatctgcccaacctatattagaactagtatttattacaaatggaactgcgcctttccaatgatcctttagttgaaagccaaaagtttcaaacaaaccgtttactgtctttccgcactatttcaatacaacaacaatcagactaaactttctaactatttctatgaaaccattcttcaagtccttaaccaaaagcaaccggagaaacttcataaggaaaccttaaatggtacttgtatcgtcttgattgctgtcttcccaacctatatagcccttttacctta

SEQ ID NO: 8743 - DNA, 408 bp, Oryza sativa
  Clone ID: uC-osflcyp062c10a1
atcgcaaaatcacagtgcattttatatctcataaaggaaacatacaactgacccaatcggaagaacacacggtgtaccatacaaaaacatccgtgctaaccaaaacaaataatacaccaggatgacggcccctgctttaagagggaagggaaacaaacagaaacaaagacccaaactgtggaaattataagagttctagttaagatgccgtgagggatgtccacatgatgacacgccaggctaccccatggccgtagacccaagccccaagttcttggctattcattcaaccatttacctctcaattttgtttggaacaaccacaggttttattcggacagatcagttttttaaatcaagccgacgatgagctgctgacccccaagttagcggtgagccatttgcaga

SEQ ID NO: 8744 - DNA, 391 bp, Oryza sativa
  Clone ID: uC-osflcyp062c12a1
aaaccaaataaaaaattggatcgtcgtatccaacaaaatatggtcccatccatgcatgactgtgaaccaaacacaccctaaaatagccatctcatctgaatagctgaaaatgatttatccaaaatggcaatttagaggatctcaaagcacatgattatggagcaaccatggcaagacgattacaatgatcaagcacgcaatcaagagattgcataatgagtggctcttgcagaagccgctgcatgccttggaggagccttcgacgtcgacgcccgccgtcgcgtgccaccgcttcatgaacttcttgccttcgccgccccagccggtgatgttctccgccgtcttgccgcagatctcgcagcgcctgttgcccctgacggagaaccacgcc

SEQ ID NO: 8745 - DNA, 463 bp, Oryza sativa
  Clone ID: uC-osflcyp062d02a1
gttattgttttggcagaatatacgatcccgggttcaaatccaaagcacactagatccatgtatttgcgtgactccatgaccgcgctactaacttagctaatgaaccgaggtgactgcagatggaatgtgtgagatgcatatatatatatatatataacaacatggatatgtatatgaaaataaatcatgggggccggtaattgatgcaggtgagtgagagatcgaagatccatatatagtgtgtagtacgtaggtccgggctgggggctggggcgatgatggttatagtacaggagggaaaaattagtgcatcctgccctgctgcgtctgggggagaaggccggggatgtaagggacgccgaacttggggatgaactcctggccctggatgaaggcctccacggtgaactccttttggacgtcctggtaggtgagggactggaccccttccacttggcgcgct

SEQ ID NO: 8746 - DNA, 550 bp, Oryza sativa
  Clone ID: uC-osflcyp062d04a1
aaacataaaattgaacaaacgcgcatattataagtgacgaagcggtctcacataaaacagggcacacaggttacaacaacgagggttgtaagcccattaagccccaaacatcagatcaccacaagcaaatgtctcgaagacacacgcacacggcaacaggataactccacactggcagatcatgggatagcagcagttatcaatcaggccttgacacacagaacatcaagcccccagacgacgacgactcctctagtactcgtcaccatcatcgccatcctcattctcgtcggactcagcgccaacctcctcgtagtccttctccaacgcggcgagatcctcacgggcctcagagaactcaccctcctccatgccctcacccacgtaccagtggacgaaggcgcgcttggagtacatgaggtcgaacttgtggtcgatgcgggagaacacctccacgacgctggtggagttgagatcatgcacacggccctctgcaccttgggaggtcgccgctgggacgagctgggcggctgtagtgatgccgacttga

SEQ ID NO: 8747 - DNA, 258 bp, Oryza sativa
  Clone ID: uC-osflcyp062d05a1
gaaagtaagtgtgtgtagtataggctaagaaaagagaaagataagacatgataaaagataagtagataaattatgaagggggtaagatttcccataaacggacatatatacgcacggtgatgaattagtatagtaaagtaattcagagctcgccggccggagaggtccatctgtcgagcatgtcgaggcactccttggggcggtactccggggcggagtggccaccgcccttgacggtggcgaaggtgaggttgtggt

SEQ ID NO: 8748 - DNA, 274 bp, Oryza sativa
  Clone ID: uC-osflcyp062d06a1
gtaagtaagtgtgtgtagtttttgttattaaaagagaaagataagacatgataaaagataagtagataaattatgaagggggtaagatttcccataaacggacatatatacgcacggcgatgaattagtatagtaaagtaattcagagctcgccggccggagaggtccatctgtcgagcatgtcgaggcactccttggggcggtactccggggcggtgtggccaccgcccttgacggtggcgaaggtgaggttgtggtcgtagaccgtggtgaa

SEQ ID NO: 8749 - DNA, 395 bp, Oryza sativa
  Clone ID: uC-osflcyp062d08a1
cttcctttttttgagattgaatatacataatatacattccggatccaaatccaaagcacacgagaaccatgcatatgcgtgactccatgaaccgagatactaacatagcaaatgaaccgaggtaaatgaagatagcaatgtgtgatgatgcatatatgcacatacagattaaagcaatggctatatacataaaacataattcaagggcgaaacatgaactgtatgaaatagagttaaaaatttgaaacaaggatactcaggtgcagaggaacaaacagtcaaggtcatgagggtcaagcacacatgaactaatacagtatataaaggtacctagtgatcataaagcggaggaaatcatgaataaatctccaaggaaaagcccaaatagcaccagt

SEQ ID NO: 8750 - DNA, 101 bp, Oryza sativa
  Clone ID: uC-osflcyp062d09a1
gctgcagaaaagaaacttagggacgcacgagggaaacaaaccaaggtcaaaaccggcagaaccatgcacaagaacaaaggtaagccagaacacggggggaa

SEQ ID NO: 8751 - DNA, 72 bp, Oryza sativa
  Clone ID: uC-osflcyp062d10a1
cagaaacgagacaaacagacgcacctgagaaacaacacaacgtcaaaaccggcaaaaccatccacaataaca

SEQ ID NO: 8752 - DNA, 108 bp, Oryza sativa
  Clone ID: uC-osflcyp062d11a1
catgaaccagattgacgcccctacctgagaaaaaatacatggttaaaaacggcggaaccattcacaataaccaagctaagctagttacaagggggaccgcattccgat

SEQ ID NO: 8753 - DNA, 470 bp, Oryza sativa
  unsure (1)..(470): unsure at all n locations
  Clone ID: uC-osflcyp062d12a1
gacaagacaatgttacccggccatcactcaatattgcaataattactgtttcttattccaataacttcctaacaagttttggaataaacaattacagattaaaaaaaaagaaaaacatactattggaataaacaattacagattaaaaaaaaagagagaaaaacatactaactcgacaggcaagactgcagttagctggttgttagctctagttgcccacattcatgttccaggaataaataagtggtaccaaacaatgcattggttcatcagccttccttcactgttcactcttgcaaattctcttgtttgttgaataattcttttgtatcgncatgaagctcgggcaagaaaagtacgacatatggtggcaacccaactacaaggaagtcagatcatagctgagtagttcatggtctcatgcctcaacaacacaaaaaaaaaaacacctttgagttcttaaaacacat

SEQ ID NO: 8754 - DNA, 307 bp, Oryza sativa
  Clone ID: uC-osflcyp062e01a1
aagtagcaatataatccttttgattaatcatcatatcatcaccatttgaaaatgataaattataaaagcgagagtgggcgggagagcgtaaccttgtacgcctacctcctccatttcccacacagctttttttttcttctttcgctcgcccggtttctgcaaatcgcaacacagaccgaccacacaatccccaaccccaacaaactcaaagaacccaaccggtaacacaattacatcatagcagtagtagtattactagcagcagcagcggcggcgatgccggcgccgagggtcgccgccggcgagc

SEQ ID NO: 8755 - DNA, 482 bp, Oryza sativa
  Clone ID: uC-osflcyp062e02a1
atcacaaatccacgatgactgcaatactatttctgtaattctctgtgcgtacctgaattggtacaggaattaatgttcggtccgatatacgctacaaatacagcacaattgtgtaaggaatgtgcatctatatatgcatataggtgtcgtcctaactgaacaaattaagggtcctgtaaaaagtaaaaatgctattctgaattctggatggtgatccttcagtctggcactctgagctgcatcagtaggtatatgagtatcaggtttgtcagctgaaatttttctctatctgcaacatgatttacgattgagtgacatataatccagtgatcatatgcccttcactgataaccatcaatccagtcctcagaaatatatgctgcatgtaagctataggcatatgtccaattgcaagagaagtgccaggtctgaacttctgctctgcctggctaccattctatgggcttgatcctagaagtgga

SEQ ID NO: 8756 - DNA, 431 bp, Oryza sativa
  Clone ID: uC-osflcyp062e04a1
accaaaagaaacttttatatagggggggagacatgaggatttacccatatatatttttcacggagagcacattttggtaaatataaattaacctcggatcatcactggtttgaacaaagtcattgggggggcaaaagctgaaagagcctcatgggggagaggggccctaggttggggttttcccatggggtttgggcttggggtttatgggcactacagggggggggcctcccggcactccaaaggagaagctgatgtcctcctttttaagggctcccttacttgccttgccactgggattagggagctttttggggggaaacgccacctcctgcgagagcaggaggggagaccccgccacgactaacaggaccaccctggggttgggccccatgaccaccggacggagggttagcttagcttaactggga

SEQ ID NO: 8757 - DNA, 424 bp, Oryza sativa
  Clone ID: uC-osflcyp062e06a1
atacaaaaaaaaattttcattttaaaaaaaaaattcaaaaaaaaaaaatacaaaaaaaaaaaaaaaaaaaaaaaaaataaaaaaaaaaaaaaaaataaaaaaaaaaaacctaaaaaaaaaaaaaaaaaaaaaaaaaaaaaaaaaccaaaaaaaaaacaaaaaaaaaccctaaaaaaataaccccaaaaaaagccctaatcccaaaaccattcttatctacaaaaaaaaactaaaaaaaaccactaactaaaaaaaaatccttattcccaaaaacacaatttaaattcagacggataaaataaaaaacctgtaaacaaccaaccaattcaaaattgaaaccataaatttaaaaaaacccaatacaaacaaaccaaacccttttgcttaaaaaaaatgtaagattaaaaaaaaaaacttttaaaaa

SEQ ID NO: 8758 - DNA, 180 bp, Oryza sativa
  Clone ID: uC-osflcyp062e07a1
agagtggcaatagttatggggcaggaaagacttttctagacgcaggggggaaaaaaccggaggtcaagaacggtagaaccacgcactaaaacataggtaatccagaacacgggggagggattcagaaaaaagcgggagtgataacgaaggggagaacatagggacaatacaggtaaggga

SEQ ID NO: 8759 - DNA, 515 bp, Oryza sativa
  Clone ID: uC-osflcyp062e08a1
aatatccacaaataccaatgtatcatccagcccaaacatattataagcaaaaccaggagacgattgttttattatactcatcacataggattcacatcccaaacattcaggcacgattcaaccggcacagagataaaaagaagccaggggaaacaaaacaactcctttagacctttctgcagacgtctccctcgcacacatacccagcgggggcagcctcagcattctcctctcccatctccacatcgcccttctcctccagcgcgcacttgggatgcagatcgaagtcacattccttgcacctgtaggaccatgagtcgcccatctcgtcgcatccatcgcagccatacgtggtgcagcgagtcagcacaagctcatgatcgtgcagatcatgctttagcttctcaggccacccctttgccatgtcattgatcttcttctccttctccttctccagctcctgaagcttctcctcggtgaatggaaaagcgtcggcgccatgggccaccagtggg

SEQ ID NO: 8760 - DNA, 109 bp, Oryza sativa
  Clone ID: uC-osflcyp062e09a1
gcaggaaagacttttacgggacgcacgacggagacaacccaaggtcaagcccggctgaaccatccacaaaaacaaaggtaagctcaaaaaaagggggggcggcatcccg

SEQ ID NO: 8761 - DNA, 434 bp, Oryza sativa
  Clone ID: uC-osflcyp062e10a1
gctatataccgcgaacttggattttaaagatgccacaaataagggtcacataaacaacacaagccacagaagtgaaagctacaagcaaaccctgcataatcgaaaagcaaatgatgtggaaaaccagacacacaaactgatagatggaagcccacacggacagatcatgggattgcagcattaatcaagcattgccaaggcaccaggcaagaaccctgaacatctgtagaactcgggacactcattaccctcggaaccatcgtcgaactaggaggcgacctcctggaagtgcttctccagcgcggtgaggacctcaagtgcctcggagaactccgccttctgcatgcccgcgccgacgtaccaggggacgaaggcccgcttggaggacatgaggccgaactagatgtcgatgccgaagaacaccacgaccaccc

SEQ ID NO: 8762 - DNA, 375 bp, Oryza sativa
  Clone ID: uC-osflcyp062e12a1
acgacaaaccacgaacttggatattaaagatgccacaaagaagggtcacataaacaacacaggtcacagcagcgaaagctacaagcaaaccctgcataatcgaaaagcaaatgtttttcaaaaccagacacacaaactggtagatagaagcccacacgggcagatcatagggtagcggcagtaataaagcattgcccagggaccacgcaagaacccctggacctttttaggactcgggaccctcataaccctggggaccataggggaaatcggagccgacctcctttgcagacgttttccagggcggggagggcctcgggggccttggagaaatcccccttctccatgcccttggcgacgtaccaatggaccaag

SEQ ID NO: 8763 - DNA, 274 bp, Oryza sativa
  unsure (1)..(274): unsure at all n locations
  Clone ID: uC-osflcyp062f01a1
gaagaattaaaaaaattcccaaacatttccatgaatacaaataaccggatccatttttttaccagtggcgggggtatttagctgccggccgtgcagagggggcagcaaaaccggngtggtggtggtggtcggcgaggaccgccctgaggacgggcacgaccctgcccatggggggcctgaccttggggttctggctgaggcagtcgtaggcaaggcgcgccacccgtttgacgggggtgtttacccccccgcccaaatccgccgccggggccgg

SEQ ID NO: 8764 - DNA, 258 bp, Oryza sativa
  Clone ID: uC-osflcyp062f03a1
ggcaaaaggatatattccaggggataatatccagggaaagccaaagcctacacaaaccaaccccagaaccccattttcaccagggcacctaaacttttaaacaagtttttgggggagaaatccaggggggatatatattgggaatcctcacccagggtttaccatgtaaaaaattgggatgtcctgcccacaggaatgggcatcagtcccatataacgggcgatgggtgattaccattaccgggggcaaaggaacact

SEQ ID NO: 8765 - DNA, 451 bp, Oryza sativa
  Clone ID: uC-osflcyp062f04a1
gaaaaaaaaaaaaagaatttgacccgtttgttgatcataagggaaagttgggggcgccaaaacattttattactacagctttttggggatttgctacaggagttttttcctcccttggaaaaagaaacccaaaccttttttacaacgcaacacacacaccggacacagagggtttgatcgatcgaagcaaacgagacgacgagggggaacttcttcttgggaggggacaacccctaggttttacagggatacagcgcgcggggggaacgggggggaaaacggcggaaaaaatcaggcgctggccttgggggcctttttggaaatggcggaccggatggatttgggcggttgaattggttttgggggggggggcttcctcgcctttttggcccggcttgggcgggcggggggaaccccttttttggcctccgccgaccacccgggttttttg

SEQ ID NO: 8766 - DNA, 416 bp, Oryza sativa
  Clone ID: uC-osflcyp062f05a1
aaaaagaaaaagggggggactcataaaaaggggtgaaactcccaacatttgaaaaaaaaggtggaagggcaaaccccttcgaaaaagttaacggaaaccacaccttttcttttacccccattttggcaaaaaagcaggacttgggaaaacgactaaaaggattacacacgggcccagacacaagaccattaccactggtcattgcacacgatttttattttagcaacaaagggagaggggaaaaggccacgggggcaaacttttccaacttcacaaataacggggacaaccaatggagttccagcacaccggatttaccaggggacgattttccagggctggggggggcccttgcaccactttcaaagggcgaagggggggccctcggggacccccccggggtccttgtccccggg

SEQ ID NO: 8767 - DNA, 245 bp, Oryza sativa
  Clone ID: uC-osflcyp062f06a1
cgggggaaaaaaaatttttttttttgggggggggcatctcaaaaaggaaaaaatataggtttttttttttccccaaaaaaaaaattatccccaaataaaccccgcctaaaaaaaaaaaacccccttcttaaagttggggatgaataaatttttcccaaaaaaaaaaaaaggggggaaaaaatttaaaaaaaaggggggccccattttttttgggggggcccccttaggggtaaggggtttttttt

SEQ ID NO: 8768 - DNA, 281 bp, Oryza sativa
  unsure (1)..(281): unsure at all n locations
  Clone ID: uC-osflcyp062f08a1
aatccttcttttttttttcttattcttgttttgcaaaagtttttatttcccagtgtctgacttgcgaaaacaccctttttctccacaaaccaaccgcaaaaccacctttttaccagggcccccaaacttaaaaacaagcttttgggggagaaatccaggtggggggtgttttgggaatccccccccagggtttaccatgtnnaaaattgaaatgtcccgccccccggaatggcccccaaaacccaataacgggcgatggctgattactattaccgggggcc

SEQ ID NO: 8769 - DNA, 89 bp, Oryza sativa
  Clone ID: uC-osflcyp062f09a1
ctattgttcttttgcaggaacgaattttaggtacgtacgtgtgaaaaaacacaaggcaaaaacggcagaaccatcactaaaacaaagga

SEQ ID NO: 8770 - DNA, 391 bp, Oryza sativa
  Clone ID: uC-osflcyp062f10a1
gtaaaaaaaaacccccccttaaaaaggaaaaaaaaacgggggaaagggccaactcggggaaaaaaaaaatggcccaaagaacaaacatttccccgggggaggggacacccacggccaaacaaggggggatactatttccccccgacaaaaaaaaaacaaggtcctgggggagggaagcgagcggcttcaaattggaacgcttaatggttggccagggggaccccgtttaaaaagaaagggaggaatccgaggggaacccgggtgggggggaaaaaaacgggcacgggaaaaaaaaaaaagggttttgcacaaaaaacattgcgcaggaaaatcccgggatttccgcgggggaccaagaatatcaaaaacccccttatttttttctccaaaa

SEQ ID NO: 8771 - DNA, 570 bp, Oryza sativa
  Clone ID: uC-osflcyp062f11a1
ttgtcctttgttcttcttttttaaccaaaacattccctagatattccatatttgccttagcttgacactgtaattcctcaactacatatatttcagaactcgtttaaatcccaacacaactcaaggttcactcaaggttcaacaataaatttgcctcgttagccttcaaaagaaaaaccatgataaggcttaaacatcctcctcgctactctcaacacaaataacatcctccttatctttcttttgcctcttcgatgcacaggcctttcctccggctacttctgaatcgacatgtaacagcatgagctcaatgatcgcgctcccgtacttaactgtcttaacctttcctataagcttttcaagctcagcaacagtggttggtttttggcggttcaggagggaaatttgctgggcagaaagaacagcatgtgggaataccccttcattactggaagagagcttttttcgcaggtcatcaagcttagcttccaaattactcatctggttgcgcttagtccgtttgatccactacctttatcctgagagtgaaaagcaacgctaagcttgacc

SEQ ID NO: 8772 - DNA, 558 bp, Oryza sativa
  Clone ID: uC-osflcyp062f12a1
acgacaaaccacgaacttggatattaaagatgccacaaagaaggttcacataaacaacacaggtcacagcagcgaaagctacaagcaaaccctgcataatcgaaaagcaaatgtttttcaaaaccagacacacaaactgatagatagaagcccacacggacagatcataggatagcagcagtaatcaagcattgccaaggcaccaggcaagaaccctgaacctctctagtactcgtcaccctcatcaccctcgtcaccatcgtcgaactcggagccgacctcctcgtagtccttctccagcgcggcgaggtcctcgcgggcctcggagaactccccctcctccatgccctcgccgacgtaccagtggacgaaggcgcgcttggagtacatgaggtcgaacttgatgtcgatgcgggagaacacctcgacgacgctggtggagttgggatcatgcacacggccctctgcaccttggccaggtctccccccgggacgacgctgggcggctggagttgatgccgcacttgaaccccgtggggcaccagtccacgaacttga

SEQ ID NO: 8773 - DNA, 378 bp, Oryza sativa
  Clone ID: uC-osflcyp062g01a1
cgaccgccctcggaggaacccacattgccctccgccgccgccgatggggcggctagtagcgggacaacatctggcgctggtgctggaacgggaatcaactcgaactcggtgctggtggcgctgctggactcgcattacacggagctggcggagctggtggagaaggccctgctgctccagacgctggaggacgccgtcggcaagcacaacgtcaccatcttcgcgccgcggaacgaggcgctggagcgtgaccttgacccggagttcaagcgctttctgctcgagccgaggaacctcaagtcgctccagtcgctggtcctttttcacggtcttcccggccggcttcccttcgggtcctggtccgccggcttccacccc

SEQ ID NO: 8774 - DNA, 363 bp, Oryza sativa
  Clone ID: uC-osflcyp062g05a1
aggggccgaaaacggggtccccaagggggggacgggaaaatttttatgccgggaaaaaaaaaaaacaggggcaatggccaaggccccaggaaaacaccaaaaaagacccaaaatccccgggggggggaaaaccccgggctgaaggggggggcagcccccaagggggccaccaattccccgggaaaaaatcccccaaccgggccccaagggagcccggggccgagggccaagcccatatggccacctttcccccccccccggtgggggggccccccaaaaaataaaccccccccgggggggggggcccggataatacccgaacggggggggaccccccaaaacccactggtgtttaaggggggg

SEQ ID NO: 8775 - DNA, 300 bp, Oryza sativa
  Clone ID: uC-osflcyp062g06a1
gacaggaatgatgtatatatatgatatttaactcaaatgaagtttctacaagcaaagtagacacttttatctgacatttcaacctcaataacttccaggttcaaatatacaaagggctacacaaatgatgagttcttgattcagaatttgtaccgagttctttagacactatatatttattttttaaaaaaataagaagacggcaattggaattggaagccactccccgccacttgctccagcattggcgattggcatctccagaaccaatcacaaacaccctcttgagtttcacccaac

SEQ ID NO: 8776 - DNA, 507 bp, Oryza sativa
  unsure (1)..(507): unsure at all n locations
  Clone ID: uC-osflcyp062g07a1
accaacagatctgcacctgcttttttattccaagctatatactgtagtaaataaacagtcttgtttgtatggtacaaagcacaaacaccacttgtggtgggtacctttaggatagttctacttgctcttttggcatagaagaactaagctacacggccatgatttaatcatcaaagtagttataagtagaagtctgacgaataaaagttcaaacttcttatttcgagcaaaatatcctcctccacctccattgttgtatggagtatgcatacaatctttaccagattttatcagagcaccgtggttgatagctgcgcataccaatgcttcaatcgctcttattcaaagtaaaaatgtataaactttgtatcatgggatcctaacatgtcccctgccgttgccctattcattccttcataacttggatgttactgacaatcttgttcttaaatnctaagnaacagcatcgatgaactcaacagcctaagatacttatctcggctacat

SEQ ID NO: 8777 - DNA, 482 bp, Oryza sativa
  Clone ID: uC-osflcyp062g08a1
attcaaataccactttttttgaaacaaccagcacaagatattgcgacgtttctattgatattgaagaaaaaaaatacaagattacgatcctgggagactgcagttaggaaaaagaaaaaacaatggacatcatcgtaatcgtctgatcccactggagaaacgaaaacagtttatctgatatggatgtgacatgtaacagcttctaaaactatatgtatggttataaagagactctggaggaccatagcttccatagttccaatcaacacttatacacaccatgtaagaatgacaactggaagggggggaggggcagagagacttagcttatgatatacggcttcagtgtaccactgtctaagctgatgattataaggctggtgctagctatgacatgttgatcttaacgctgtaactcttggggaacagggagacagggcacacgttagcatttttctcgcattagcacacaagcagaggtg

SEQ ID NO: 8778 - DNA, 433 bp, Oryza sativa
  Clone ID: uC-osflcyp062g09a1
ggggaaaaagggatgaaggatacaattttttaccagatttggggttatttacacatgaaatggaccaacgacccttcaaaaagggggtggtggtacttaactggggggaggttattaggtatttaggacaaaaattttaacgagggaaaaactgtttggactaaaaaattttttttgaaaatccggtttcctgggaattttccttgagttttttgccatggggaaaaaaagagcttggatgtcctaaccccttaaaaaaagaaccactggactggatttggaggttcagggtttaaaaatttgggggataagggaggttttctatttgaacttcccgtccttgatgggggggtttttaaggaacaccaagattcccgaccttatgtagaaccctttctaaaggcgataacttttttggaaaaccttgttgttt

SEQ ID NO: 8779 - DNA, 449 bp, Oryza sativa
  Clone ID: uC-osflcyp062g12a1
gtcaccaactagaacaatgcaggttgcaaaacgttcacatagcacggcaagagattgcaactgaatttagagggtaaatcactgcagatttcctattccattcgaacgaacgaaccagtagttcatacatccctaattaatgaaggaacaggagacgagatgaaacaacagctacaggagaagaggctaggctactacgacgaactgaagaacatggcactaatcgaatccctatccaatcgcgtggcctcgcatcgcctcgcctagccgccgaatccgtagagggtgcggccctggcgcttgagcgcgtagacgacgtccatggcggtgacggtcttgcggcgggcgtgctccgtgtaggtgacggcgtcccggatgacgttctcgaggaagatcttgagcacgccgcggttctcctcgtagatcagccccgagatgcgctttacgcc

SEQ ID NO: 8780 - DNA, 430 bp, Oryza sativa
  Clone ID: uC-osflcyp062h01a1
agcaatccatatgataacttataaagcaaaataaaagatccgagcaaacaaaatacccaatccacgcgcattgcctaaatgcctagttcaactaccaataaaactaaaactccaataaaccaagtaaccaagtcgttttcaattctagatagataagataactgagatatggatcaaaaattgctgtcgccgttatgcttaggaggaaacgacgccgttattcagcgacagagaagcaagctgctgttcaggcgtcgcgttcgtctggatctgctgggccgtgcgaaggacctccatggctttagcaaccttggccttgagagcctttggagactcgagcaggtgcagcacctcagtctggtccatctccagcagcatgccagtcaccttcgcagcctgcttatgctccagctgatcaacaagaggatac

SEQ ID NO: 8781 - DNA, 379 bp, Oryza sativa
  Clone ID: uC-osflcyp062h02a1
accatcagacctgctcttgcttttttatcccaagctatttgctgtacataataaacccacttgtttgtattgcgcaaagcacaaaccccactggtggtgggtacctttgggatcgttgtacttgctcttttggtgtaaactaactaatattcacggacatcagaaaataataaacgatggtatagagttgaagcctcgctacttaaaatgcaaacttcttaatttgagcacaaaatgcttctacacatgcattgcctggagcagtatgcctacgatctggaccacggttttttaagactccgcagtttatagctcgaggtaccaatggtataattgctcttaattaaaggcaaaaacgttaaactttggatgatgggag

SEQ ID NO: 8782 - DNA, 61 bp, Oryza sativa
  Clone ID: uC-osflcyp062h03a1
aaactaggtaatttatctcttgattaatcagaataaaaacgtcatgagcaaccgtacaaac

SEQ ID NO: 8783 - DNA, 509 bp, Oryza sativa
  Clone ID: uC-osflcyp062h04a1
aaaataaaaatatatagcatattatatattgatatatcatcaacatagcccaaaacaaagctgcatactattattataggcagcaatccaccagcgcgatgcttgatcttagcttagttgccaccagactcctcgcaacctgggggcttgtaggcgatgaagctaatcaactgcacctgcctgacgttgtcgaagccgatgatacggacaaaggcattggggtaggccttcttggcctcctcgagctccttgagcacctgggtggcatcggtgcagccgaacatgggcagcttccacatgggccaatacctgccatcgtagtatccgggagacctggggttctcacgggagacgaacccaaccttgctgaactcgagacaaggcacccacttggatcgaagcaggtactcgatctgtttcaaaagatcctccacggtgaggggtggcaggtaccatagggtctcgaactttttgatgccctcaattggccacacctgcatgcacttgat

SEQ ID NO: 8784 - DNA, 530 bp, Oryza sativa
  Clone ID: uC-osflcyp062h11a1
gacctgtaaattgagttgttaatgaatccgctttattcgctgactctatatgatatttctttttctttgaaggaaaaattctataacaaggtttgagaccttggatctattcctcttttttctatactagtagaatttcattgcattgagttctttcttagatctagatggagtggaatagagaaatagaaaaaagtcctttcggatgaaaatggaagaatattaccccatatatcccacttggacaaattagaagcaattttctcttatcctcattggttccttcctttagataaatactcaaaatccccttacaataatgcaatttcgaagggaccttttccctcgggttgagaaaacttttcttcttccaattcttcttcattcaattcatttcaaaaaattcaattggtactcaaaatacttccattggtatgcgcaagaaataagccaattcggcagctttttgttcaatttctcgtgagtaaaaaacttttcatcagtacgagtcaagggaatggccccctggc

SEQ ID NO: 8785 - DNA, 417 bp, Oryza sativa
  Clone ID: uC-osflcyp062h12a1
tttattttttttttttttttttgatcgatgtacaagtggatgcattaattaatcatcttgggtgttcttatactacaaatcaccaccatgcaagtcgccattaaccaccaacccagctttcctaatttaagtagtaaatcaacaaaaggatgacctctcctctctccataccctcccagcttgctcgtcatcacaaaactaaacagcgcgcgcgaacgcacaccaacgcatcgatcccgtttgaattgcgcgcgaaagaacttaaattaagaggatgaggagaaggtgtcaaaaatggtgagtgtggagccggtcgttgaggtgggtggcccaattgttgaggggccccttgccggaggcggaggtctgcacggcaaaacccaggaaggcgaccaatggcaggcggccgtgcttgat

SEQ ID NO: 8786 - DNA, 433 bp, Oryza sativa
  Clone ID: uC-osflcyp064a01a1
gaacaaaatcaacaccttcaacaagcatggatcttactgaaatgttaattacatagtagagcaccacacatactcttaacaatatgactaaaatgcttccaatttccaatagtcgagaggacagaggaaaagcagacaacttcttcaatggagatcccaaacaaaaagatgggaaaaagaacgggaaaaaagggactttttttttccaaatggcaccacatcaagggaggaaccaaataatatcccttttcttatgaatgacacaaatattctttggtttagattatgttctttccttcttttttccttctcctctcttcttgttgggcgtttcttggtccgagagaccgttcttgcgtcactgcgccgcgacggtgcgggaggacgaggactgcacggccgccgtcggcgcggcggcggcggtgggagagga

SEQ ID NO: 8787 - DNA, 178 bp, Oryza sativa
  Clone ID: uC-osflcyp064b01b1
cttcgattgccctgccccgccgcccgcccgtctgcgccgtccgttgcccccgccccgtcgcggagtaccggtctcgcgatgtgtcgctgacacagcccgccgtcccaagtccacggtcaggccctacacgctcgcgccgccccggctgccgccagggggcaggcgaccacgccacggc

SEQ ID NO: 8788 - DNA, 197 bp, Oryza sativa
  Clone ID: uC-osflcyp064b05b1
ttttgatttcgagctgccgcccttattatattcgggagggtttaaattacaaacggtgtggctcaaaagacacgcaccaaaggaggatgtgattaggcacgaccatccgttaagcaccttggcagcggatcatgccggaacagggcgcgaaagacatgcatgggactggggataacctgacaagcgctctaaagcgg

SEQ ID NO: 8789 - DNA, 538 bp, Oryza sativa
  unsure (1)..(538): unsure at all n locations
  Clone ID: uC-osflcyp064b11b1
tgcatacccccccacctcgagctctagggtttcgcggatcgaggggcgccgcggctagggtttgggtggggggtgcctgcgcgatggccgctccggcggcggagtcggcggtggtgggggtgggggtggattcggcgacgagcgcggcggtgagggatggttttgcggagctggagcggcagcagcagctgctcgcgacctgcacgcgcctgtaccagcagctcacggagcacttcggctcgctggagcgccgtctcgccgcgcgctccgagacgctccgcaccaagcgccgcttactcgacgtgcgcaccttccgtaggctcgaggcgctccgacgccgggaggccttcatcgacggctacgtctcgctcgcgctctcccggctcgattccctcgacaagggcgacgcggngacgaccggctccgtcttcgacgacgccgcttgaatcgccgaggggctcaggtcgctctgcgccagcatggacttcggtcggttctttacctttgatgtcgcgaggcgcaaggaggtggacgcgct

SEQ ID NO: 8790 - DNA, 530 bp, Oryza sativa
  Clone ID: uC-osflcyp064c01b1
gttttcttttggaacctactgccataacttggaagtcctatccgtggagtccaagcatgttaatgaaaacaaaggaataatctctgttgcaaaggatgccaatatttggaatccttaaagatggtatggcttggtgtcggcgacgaagctttagaagctattggttcatcttgctctgcattagaaaatctgtcacttgacaaccttaataagtgctcagacaggtaataggtccaattattaaatctactgttgcatttttacagggatggaagtatcggtgtctcatttctcttagaaatttgatatagcttatactgatactgcattgtgatgcttatagacttgaagagtagaaatgctgaaccatttgttaacaattggtttatattttttttatattgatttgaacacatgctctttttttaatttagtagtgagccacctgagtataagttctaaataaatgcttctgtaattgacatcatggtgtattttaaatattctgcaccgatagtgacagttattga

SEQ ID NO: 8791 - DNA, 280 bp, Oryza sativa
  Clone ID: uC-osflcyp064c02b1
cattgattataatatcccattccttccttccaatgtgagatttgattagcggaggaaggaatggccgtgacggcggaggtggagtcgtcgccggcggcgacggggaagctgcggtacaactcgccgttggtgcaggtgtccctgatcgggttggtgtgcttttgctgccctggcatgttcaacgccctgaccgggctcggtggcggtgggcatctggaccactccaccgccgacaacgccaacacccccctttacttctggcttcgccgtattcggcgta

SEQ ID NO: 8792 - DNA, 394 bp, Oryza sativa
  Clone ID: uC-osflcyp064c03b1
gccaatctttctttcccacatcctcctccgccgccggctgcttcccaccggctcccgatctccgaggcaagcagcgccgcacccggccgccgccgccgccgccatggcgttcgagaagatcaaggtcgccaaccccatcgtcgagatggacggtgatgagatgaccaggatattctggcagtctatcaaggacaagcttatctttccattcttggatctggacattaagtactatgacttgggagttctccaccgtgatgcaactgatgacaaggtcaccgtggaggctgcagaggctactctcaagtacaatgtggctattaagtgtgcgacgattacttcagatgaggctcgggttaaggagttcaacctaaagcaaatgtggaagagcccc

SEQ ID NO: 8793 - DNA, 501 bp, Oryza sativa
  unsure (1)..(501): unsure at all n locations
  Clone ID: uC-osflcyp064c08b1
ggttcatctcgcgcagttccaacatccggcctcatttcagcagcctatgcctcagcagagcagcctccagggcttgggtgtgagcccacaatatcagcagcatgtgctccatcagttgctgcaagaggccaagaacactaacaaccgtgtcttggcgcagcagcagcagcaacaacaacttcaacatgctcctgctaacagtggtcttgcatcaggaggaacggctatcaccggcagcgccgctagcggngatcatatgaataacaacggcgcggtgaagggtgggactccaatggttacaacaggtcctagcagtgtgatcaacaatacagccagcatcctccccagcagaagtaacagcttcaagtcagtgagcagcaacccccaagttgcagctgctgcgggcggcggaattggcagcggcggccatgcggctacccccaggctgatgctctgcatgagttggatgatcttgacaatcttgggaatctgatcagtact

SEQ ID NO: 8794 - DNA, 540 bp, Oryza sativa
  Clone ID: uC-osflcyp064d02b1
gtttatttttgaggcgcttcacccgtgtgtgttcacgccggcggcagccgtattggctcccaacctgggaccaagggaaattgatggagaatgccaaggatttaggaccgacacctaaattaaatagttgatagattaaatctatttggatgttatcccaggcttcatggacaacaacgtcgcctcgaggaaataagcctcctccgtccctccatatattcagttacaggacacatagtccctggagatgaaacaagggaaaatagactgcaccaagcataagttaatgtacattcagcataagagagttaaggccactacctagctagagaaaccgaaggtgatgacaaaagctacaattattcagcgccgtcattttctcctgcaggaccaaagcgccatttatactgctgtgcttttgttgtggattgaactagcaggagagaagaatgcacatgaactttataatggaacaattccttgagccacccagttgatctcactagaaaaaggcagctactttaattgtcctatatatta

SEQ ID NO: 8795 - DNA, 255 bp, Oryza sativa
  Clone ID: uC-osflcyp064d03b1
ctttagctatagcgcacgcctcctgtccagctcattagggttggactaagacaacgccctggtccttgcagccatagcggcaacggtcgtgatagtgcaagaggaatgcgacgcccccgtccagaagagctataacaagggcctccttggccctgtcgaatagcgctgggatgagggaacataaggcaccaacgaggcttgccgactcccgttgtggctgcttgccccaccagcaaaaaaagatgacatttgaag

SEQ ID NO: 8796 - DNA, 315 bp, Oryza sativa
  Clone ID: uC-osflcyp064d06b1
cttcaccttgccttcagctagagtgcaagctggcggcggcggtaactgcggcgccggcggcggaggctcggggaggttcaagcgggcgctgctccggaacctcatgctagggctcaggaagggcggcgtggcgtccggggagatgggtttccacgagaggaagagcgccattaagcgcgccgacgacgccgcgctcgtcgtcttcaggggcgccggcgacgtgctgatgtcgttcgctgtcctttaaagttctcacgggaccgaacgatacaactatttgcacctcgattgatctacatcatatccctttatgca

SEQ ID NO: 8797 - DNA, 488 bp, Oryza sativa
  Clone ID: uC-osflcyp064e05b1
gtttatgatctgctgctgcaacaagatggatgccaccactcccaagtactccaaggcccgttacgatgaaatcgtgaaggaagtctcatcctacctgaagaaggttggctacaaccctgacaagattcccttcgttcccatctctgggtttgagggtgacaacatgattgagaggtccaccaaccttgactggtacaagggccccaccttgcttgaggctcttgaccagatcaacgagcccaagaggccatcagacaagcccctgcgtcttccccttcaggacgtgtacaagatcggtggtattggcaccgtgcctgtgggtcgtgttgagactggagtcctcaagcctggtatggtggtgacctttggtcccagcggcctgaccactgaggtcaagtcggttgagatgcaccacgaggctctccaggaggctcttcctggtgacaacgtcgggttcaacgtgaagaacgtcgcggtgaaggatctga

SEQ ID NO: 8798 - DNA, 538 bp, Oryza sativa
  unsure (1)..(538): unsure at all n locations
  Clone ID: uC-osflcyp064e07b1
tcggtttaagaagcggaagcgggaggagcagtgggcggtggacaggaaggagaaggcgctcaccgagaagaagaaggccgtcgagagccgcaagctcatcttcgcccgcgccaagaagtacgcccaggagtacgacgcgcaggagaaggagcttgtgcagctcaagcgtgaggctcggatgaagggtgggttctacgtcagccctgaggccaaacttctgtttgtggtccgcatccgtggtatcaatgccatgcaccccaagaccaggaagatcttgcagcttctgcggttgaggcagatcttcaatggtgtcttcctcaaggttaacaaggcaaccattaacatgctgcgcagggttgagccatatgttgcatatgggtacccaaacctgaagagtgtcagggaattgatctacaagaggggttacggaaagctcaacaagcagaggattcctcttcagaacaacaaagtcattgaggagggcttggngaagcatgacatcatctgcattgaggatcttgtccacgagatcatgact

SEQ ID NO: 8799 - DNA, 526 bp, Oryza sativa
  Clone ID: uC-osflcyp064f01b1
gttacgtttaccctattggacatttgttcggcaccatggacatcagtgacccggcgagaccctgcttcctggacatcgacaccggcagcaccctcacctggctgcagagcgactacccctgcattaattgcaacaaggtaccacacgggttgtacaagccagaactaaaatatgtggtgaaatgcaccgaacaacggtgtgccgacctgtacgctgatctgagaaagccgatgaaatgcgggcccaagaaccaatgtcactatgggattcagtatgttggtgggtcatccattggcgtgctcatcgtcgacagcttctccctcccagcaagcaatggcaccaatcctaccagcatcgcatttggctgtgggtacaatcaggggaagaacaatcacaatgtgcccacaccggtaaacggcattctcgggctcggtagaggaaaggttacgctgctctcacagctcaagtcccagggggtgatcaccaagcatgtgttgggccattgcatcagcttaaaaggaaaggg

SEQ ID NO: 8800 - DNA, 414 bp, Oryza sativa
  Clone ID: uC-osflcyp064f05b1
ccgttcgcgtcagcttcgaaccccactgcaagcaaacagcgtctcccccccttcccgatccgacggcggcgacggcgatccatgccatgtcgcagccggacgccgccgccgacgacccctccccctccccgtcccccaacccgccgccgccgcccgtcgcgtggccggaggacggcgcgctgacgcgggagtgggtggcggagctcacggcgacgctggactggtgctcccgcagcctccccgcggaccggctccccgacgtgcttcccgcggcgctcgtccagcggctcgtccttgcggactccgtcatcctgcaccgggagctcaacctcgtgcgggtggacccgtggtccgaccaggccctcgtcgtggtcggagacgtccacggtcagctccacgacgtgatctttctgc

SEQ ID NO: 8801 - DNA, 499 bp, Oryza sativa
  Clone ID: uC-osflcyp064f09b1
tcgggtcgacgctgtcgagtaccggagtaggggagctcgccggagtaagctcttctcaggctgtgcgggggtggcggagggcggcgcggcgcggcgagggggcatggacacgatgaggggggcgctggagcgggcgaggatgctggtggggatggaggtggacgaggagtcggtgccggaggagcagtccttcttcgacgacgtcacccgcaactgcgccctcaccaccacccagaggctgtacggcttcgcgatatgcttggctgccggattgacgtgcaccttcttgacaatgcttgttttcttcaatcctgtgaaattcggggtaacattcacccttggcaatttgatggcacttggaagtacagcgtttcttataggtcccaaaaggcaatttgacatgatgcttgattctgggcggatatatgcaactggtggatacattgcaagcatcataattgctctgttctgtgctctctttgtgcacagaaggctgctg

SEQ ID NO: 8802 - DNA, 161 bp, Oryza sativa
  Clone ID: uC-osflcyp064f11b1
gcccctgcgcgtgccggtaccgatccgcaggttcgggccacacccacgcgttctgtttagccggacgacggatggggtcaccgccgacttgagtgcggataggggaggatccgtgcggaaagcggggcatttgaggaggacacctcgcattgcccgcgcga

SEQ ID NO: 8803 - DNA, 441 bp, Oryza sativa
  Clone ID: uC-osflcyp064g03b1
gggctagacgtacgcctgcattttatgaacgacgaggggaagctgtaccgctgacacaccatcaagaactgcacacacgcctgccccaagggcctcaacccagcgaagcacatggacacaatcaagaagctccagctcgaggcctgagtgagcagtatatctctcttcatgagatgaaactctgtcgaaaaattgtaatcagccagcctcttgtttctctgcctttttagtccatcgcctgacgaataattgctggaacgcaggattcccttctgggcctccgatctgatgacttccatttccatcagatggagggagcattgtagggagtgaataatttgctaccgtattttacgttttgttctgtatctaattcgggttgttgttcaccgtccattccattatgtcgtgcggtttatgcatgaagtaattcatggattt

SEQ ID NO: 8804 - DNA, 516 bp, Oryza sativa
  Clone ID: uC-osflcyp064g05b1
tttttatatgggatgctgtaatcctggggacacttccaggccttgcaggggatggaaccattattgatccactagaacagcttcgatcaagtaatggaacagtggggcctattgttgaggcattctcatttcttgcaattggcacatcatacattggatttgttctaggactctcagacttcatagcagacttgcttaaactaccaagtggacagaacaaacctctgccgtaccttgtgactttgctcccaccgcttgttctgtcattgcttgatccagagatatttttcaaggcattggactttgcaggaacttatggaagtctagtactttttggagtttttccagcagctatgtcttggtcagagaggtactcagatgatctggaagctccagtacccaccatagtcccgggaggaaaattaccctctcatttgtcatggggggtgccttgctcgtatttttttcagagattttaaaggacataatgcagttgcagggactacactgacactt

SEQ ID NO: 8805 - DNA, 211 bp, Oryza sativa
  Clone ID: uC-osflcyp064g06b1
tgttgattttgtggactatggaggctacaaacaggcccggcttaatagatccggccgggcttaagacagggcgaagagatcaggagagctacagtacactgtctgaggagcagtgtaggagccaaattgtaagagctaggctgacgaagaacattgaggcgatggatgaaggcttgcacgctcggggcaggtacacacgaggcttcagggg

SEQ ID NO: 8806 - DNA, 543 bp, Oryza sativa
  Clone ID: uC-osflcyp064g07b1
tcgtttattgaagacggtgttgcaaggaatcctcctttcatccgagggggagaagcttaattctatgaatttgcttttatacatggctccaattgctgttattctcttgctccctgctaccatcttcatggaggacaacgttgttggcattacaatagaactggccaaaaaggacaccacgattgtttggttgctgctgttcaattcctgtttggcatattttgtcaatttgaccaatttcttggtgactaagcatactagtgcattgactctacaggtcctaggtaacgcgaaaggtgctgtggcagttgttgtctcaattctaatattcaggaatcccgtatctgtaaccggaatgctcggttacactcttacagttataggcgtaattctttacagtgaatccaaaaaacgcaacaagccctgaatattttagaatgccgtaaatatggctgtcctttctcattccggtggatgcccagggctaatatatgacggggaactacattgggaacattgcaacaaatcctgcactgtatggag

SEQ ID NO: 8807 - DNA, 542 bp, Oryza sativa
  unsure (1)..(542): unsure at all n locations
  Clone ID: uC-osflcyp064g08b1
gttttacgcatctttgtggaagagcttggtgctgctgaaagctcattgttgaactgtgttccgaaggaagactttggagggggccatccagatcctaacctcacctatgcaaaagaacttgttgaccggatgggccttggaaaatcctcaaatgctgaacccccagaatttggtgctgcagctgatggtgatgctgatcgcaacatgattctgggtaaaagattcttcgtaacaccttcagattcggttgccattattgcagccaatgctgttcagtcgattccttacttttcttctggccttaagggagttgccaggagcatgcccacatcagctgcccttgatgttgtcgctaagaatttgaatctcaagttctttgaggtgcctactgggtggaaattttttgggaacttgatggatgctggaatgtgctcaatttgtggtgaagaaagctttggcactggttctgatcacattcgtgagaaagatggtatntgggctgttctagcatggttatctattcttgctttcaagacaaggac

SEQ ID NO: 8808 - DNA, 296 bp, Oryza sativa
  Clone ID: uC-osflcyp064g10b1
ttgctactggacatactatactactactagccagtaagctagctaactaactacgtggctatggcccccaccgtgatggcctcctcggccacctccgtggctccattccaagggctcaagtccaccgccggcctgcccgtcagacgccgctccaccaactcgggcttcggcaacgtcagcaatggcggaaggataaagtgcatgcaggtgggggccaatggggggcataaagaagttcgagaccctatcgtacctgccacaattaaccgggagggacttttggaagcaaatcgagt

SEQ ID NO: 8809 - DNA, 485 bp, Oryza sativa
  Clone ID: uC-osflcyp064h02b1
ccttcctttttcctctcctcccccccacggcggcggcggcggcggcggcggcaggatggcggattcgacggcgaggacggtgaaggacgtgaaccctcatgagttcgtcaaggcctactccgcccacctcaagcgctccggcaagatggagctccctgagtgggttgacatcgtgaagactgcgaggttcaaggagctccctccttatgatccggactggtactacacgagggctgcctcgattgcaaggaagatctacctgaggcagggtattggtgtaggtggcttccagaagatctatggtggccgccagaggaatggctcacgtcccccgcacttctgcaagagcagcggcgctatctcacgcaacatccttcagcagctgcagaagatgggcatcatcgatgtcgaccccaagggccggagactcatcaccttccagggaaggcgtgatctggaccaagtggcccgaagaagttgatgta

SEQ ID NO: 8810 - DNA, 464 bp, Oryza sativa
  Clone ID: uC-osflcyp064h10b1
ttggtttcgatggtggcgatgtcggccaagagcaagaacagcgtgctgacattggagaagaagcagggctggtctatcccacaacttccggagctccggttcccttgggatttgcatgaagacaagggcttctctttgagcttacatggctctgcctcccctcatggtgggctgtttgctagcgtcggtctcaaagtgtccacagctgcaccagcagtggcacccagtcctgccgagcatgacttcaagattccgttcgctgatcattgcataaagtatgtctcctcagcagtggggtaccaagttcctgggactgaggctgaatctgtcaatgaggaagaggtggtggatggcaaggctgtgaagaaagccaagaaacgtgggctgaagctgaaaattaagattgggaacccacatttgaggcggctggttagcggagccgttgcgggagctgtcttgaggac

SEQ ID NO: 8811 - DNA, 395 bp, Oryza sativa
  Clone ID: uC-osflcyp073a01b1
gctcaaggccgagtacaacaaggccattgctgcctacaacaagggcgagagcactgccaagaaggcacccgccaaggaggaagaggaggacgacgaggaggaatctgacaagtccaagtccgaggtcaatgatgaggatgacgacgagggcagcgaagaggatgaagacgatgacgagtgagccttccagtggacaagatgggagcagcaagacgctaagggcggcgggcgtcctaaggagcctatccatcatcatcatcgtctactagaattattcagtttcacttcacatcgtgatgttttactttttctctcgtcctataacggatagcgctccttggtggcgccactgggggttgtgggtgcagccaatgtcttgtcttcaccgtaatgat

SEQ ID NO: 8812 - DNA, 320 bp, Oryza sativa
  Clone ID: uC-osflcyp073a02b1
ccaccacctcgactcggcgggaggagaaggatacgcgattacaggggaaggtgcccgatcctgccattcctaaggctctggcagaagtggactgagccagggcaaggtggtggaggagtagttcgggcaattgggaaaggtactgctggtcaggagtctgaatttgctgttcgaaaatcccgcagaatgacccctgcccatggaggccttgtacacaatgacaactacaacaggcgtgagtacggggtccaagtcctgatcgaaggtatacctgggatgacccgcctcaatgctcgtcaacatcatgcaagacgcttcat

SEQ ID NO: 8813 - DNA, 435 bp, Oryza sativa
  Clone ID: uC-osflcyp073a03b1
atgcacccgcggtagcaattcgcatcgccccgccctcctcgccgcgcggattcgctcgccgcccccgccaccgcacccccatggacgcctccgccggatccggcaatgcctccggtggcgccggcgccggcgcgtccgcgtgctgctactactccctgctcggcatccggaagaacgcgtccgccaccgacgtgcgcgccgcctaccggaggctcgccatgaagtggcacccggaccggtgcgtgagcgaccccggcgaggccaatcggcggtttcagcggatccaagaagcgtactccgttctgtccgacaaggggaagcgagccatgtacgaagccgggctgttcgatccccctcgacgacgacgaccaggatttctcccgattttcatgcaggagatgctggtggatgatgataacgtgaaaaacgagaagc

SEQ ID NO: 8814 - DNA, 265 bp, Oryza sativa
  Clone ID: uC-osflcyp073a05b1
ggtggagaatggggcactgacgctgcaacttaacctgctgccgtttcagctcaggctggtgctgactggactgctgctccagctcctgcagccggaggatgggacacggctgctgcccctgcccctggatgggaacaaggcagtgcaccagttccagcggtagcacccacccctaactggggggagtgagtgaaagagtaactgatccagtttatgggtcataggctgagtttgttgccggagcacccttgtacacactatttaa

SEQ ID NO: 8815 - DNA, 272 bp, Oryza sativa
  Clone ID: uC-osflcyp073a06b1
aaatttccctatgtccaacttcaaccagccacagatgttcaaagatgctcctcctgatgctgaaattcatgctgctaatacaagtaacaatgcattgtttggaatcaatggtgatggtccgctgggcttccctataggactaggaacagatgatttcctgtcgaatggaattgatgctgccaagtacgaagaccatatctcaacagaaattgatgatagcttcagaaatttcgaaagatgcccagcaaggaaattatcatcttaatggtttc

SEQ ID NO: 8816 - DNA, 482 bp, Oryza sativa
  Clone ID: uC-osflcyp073a11b1
ctagacaagcttgaaattgataccactgtgttatttaacacagaagtttgcaagaagcttccatctcttcgacatttagtgtttttcatggccaagaatgtgagatccttcacagaagaagaagaaaaagcactttgtcacccttacatctctcccatgtacttgatttttgttattgccctaatcccctatcactgcctaaaatgttgcattgcctttcttccctgaagcagttgccaatcaaggcttgtccaggaattaaatcattgccagaaaatggccttccaggtttcctttacacgagctctacgtgagcagttgcagcgcagaactaaaggagcagtgcaagaagacaataaatgccagatgtgtttatgttgaatgaaatgcaagcaaattcatagctattgcaagctgctacggttctatttaggaaacggagagatgagaaaaagagaccactgttctgaatgaccttcagt

SEQ ID NO: 8817 - DNA, 163 bp, Oryza sativa
  Clone ID: uC-osflcyp073b01b1
tgtcgccggtggtgaggagatcggatgggggcgggggtgactgcggtgatagccatcgcggtggtggtgctgggctggatcaccatcgagatggcccgcaagccctgcctcgacttcggtcgccgcgccatggatcgtgcccttgaccccaactaacgacccc

SEQ ID NO: 8818 - DNA, 319 bp, Oryza sativa
  Clone ID: uC-osflcyp073b03b1
cgatttggtagaatgaaaatagatgacatcaatgagaaatgcagaatgatgtattaatgtatcgcaaaaaacttgtgaaggacatatatgagaatcctaacaacaatcctaaggatgtaagtgacgaggtcatagctcaagatgaatatcacattttggacgacaccatatgtttgtcaccacccccttcagatttgcgaaattcccctccacgcccaaatctgacagtatcccccatgagtcatgaagatggggcgtatgatggtcctctgtcaccatccttaccagggacaagcgatggtaacaagaattttggaag

SEQ ID NO: 8819 - DNA, 365 bp, Oryza sativa
  Clone ID: uC-osflcyp073b05b1
cgctttgcgagcaccatagcctagcccaccatgtgcggcggcgccatcctgtccgacctcatcccgccgccgcggcgggtcaccgccggcgacctctggctggagaagaccaagaagcagcagcagcagaagaagaagaacaagggcgcgaggaggctgccactgcgccaagaggaggaggatgatttcgaggccgacttcgaagagttcgaggtggattccggtgagtgggaggaggagtccgacgccgacgaggccaagccggtcgccgcgccccggaacgggttttgtaaaggtggattgaaaaacactactgtcgctggtgctgatgggcctgcagcaaggtttgcttataggaagagaaa

SEQ ID NO: 8820 - DNA, 511 bp, Oryza sativa
  Clone ID: uC-osflcyp073b08b1
gccggccgccttcctccgccgtcacgcagccgcgccccctccgtcggacactccagaccccggtgaacctcccctccttcgccggccgccttgcccgcgcccgaacgccacgccaagctcaggatcatttcgtcgatttcgtggattggatggccaaccttggcggtggcgcgatgccggcgggatcctcgggcggcgacggcgaggtggaggccgggttcgcgaagctccagggggaggatttcgagtactacatgcagacctactcgatcatgctggggcgcaacagcaagaagtcgacggtggacgtggacctctccagcctcggcggcgggatgaacatctcgcgccaccacgcccggatcttttacgactttcagcgccgccgctttgcgcttcgacgtgatcggcaagaacgggtgcctcgttgagggcgtccttcacctcccgggaaccacccggtgagctggatttccagatctgctcagattgcggcaagaagtttactttt

SEQ ID NO: 8821 - DNA, 273 bp, Oryza sativa
  Clone ID: uC-osflcyp073b09b1
ccatgaagacggcggcggcggcggcggcgggagccacgggcacagcgggagcctctccagtcggcggcggaccagcgggagatgcaagtgctgctgcggggaggagggttacccgccttcgatcgagggagctagggctggaggcgacgacggccgctgggggggatgtcgcgccggatgatccgggtccggctcggaagaaggggaaggtcccagccggcgaacaaaggtgccaagggtaaggccgcacgaagcggaccccctaccccgccg

SEQ ID NO: 8822 - DNA, 417 bp, Oryza sativa
  Clone ID: uC-osflcyp073b10b1
cccagtctggtaagccggtcgactgaatttgaagctgctatacagaacggggacaaaagttcactgcgtgctctgtgcgataaaaaagcacaagaatctctatctgatgaggagagagaaacatggggctttctaagggtaatgtttgaggatggggatgctgccaggacaaagctgcttgctcatcttggctttaaccctccttaagaacagacttctagttcaacagatgaactgaacagaacattggcagatcctcttaaccttgaacatggcgcgccaaccgatacattagattctcaatttatggttgataatggggaagattttttcaacaatcctaaacctttggaggcttagtttggcagaagaaatcaatttctacaaatggtcaacagatcgagcatgaaatgcctg

SEQ ID NO: 8823 - DNA, 387 bp, Oryza sativa
  Clone ID: uC-osflcyp073c03b1
accagtccactctccacctacaccagtaaaacctcctccacccccagcaccagtccactcttctcctccaccattaaaatccccaccaccgcccgcaccggtgagctctccacccccactgataaaattcccaccaccacccgcgccggtgatctctccaccggcaccagtaaaatttccaccgcccccggcaccagtgagctctccaccaccaccagtaaaatctcctccaccttctgcgccggtcaagttcttccacctccacctatggaatccccaccaccacctgcaccagtaaagcttaccgccttcttctgtaaggcttcttcccaaccgcgcctggaagttcttcacttcaccagtacatttacccccaacttctttttc

SEQ ID NO: 8824 - DNA, 411 bp, Oryza sativa
  Clone ID: uC-osflcyp073c05b1
ggcggcggcggcggtggtcgcggtggcggcgctggaggcgatcaacgtgacgacggtggcgttcgaggaggggtacacgccgctgttcggcttcgacaacatcctccgttccgccgacgaccgcaccgtcagccttcttcttgaccgctccaccggctctgggttcatgtcgtcgtccatgtaccagcacggctttttcagcgcctccattaagctcccctacgactacaccggcggcgtcgtcgtcgccttctacacatcgaacggcgacgtgatcgagaagcggcacgacgagctggacttcgagttcctgggcaacatcccggggaagccaatggcgggtgcaaacgaacgtttccggcatggcagcgtgagccggggagggaggagcgctacctggttccctttgac

SEQ ID NO: 8825 - DNA, 495 bp, Oryza sativa
  Clone ID: uC-osflcyp073c06b1
attatcaagcaaggctagggatcatggctgctggatgttatggccttccacaatttcggatgcgtgtatttttattaggctgtcattctaaggagaaattacccccttttccactgcctacgcatgaggcgattgtgaagaatggctgcccgttggcttttgagcgtaatttggttggttggcccaatgacacaccaatgcaactagcaagaccaattgtccttgaagacattcttttctgatctcccagaagttactgacaacattatatctttgaaatatctaaatttgaatggcattttgatacttaagttgaattattaggtggcaaatggggaaagccgcgatgaaatgctgtatgttaagggtccttacactggattccaaagatacattcggtcatttaatgttgaagtgcatggtcccagagcttatgttacaaagattccaattctcaaaatgtatgatcatcgccattgtactggatatgattac

SEQ ID NO: 8826 - DNA, 390 bp, Oryza sativa
  Clone ID: uC-osflcyp073c07b1
cgaccaagatcgagatggcccgtgcacagctggtgttggtcgcccttgtggcagcggctctgctcctggcgggcccacacaccaccatggccgtcatcagctgcggccaggtcaactccgccgtgtcgccctgcctcagctacgcccgcggcggctccggcccgtcggcggcctgctgcagcggcgttaggagcctcaactccgacgtcagcaccaccgccgaccgtcgcaaccgtctgcaactgcctcaagaaacgtggccgggagcatcagcggccttaacgccggctatgccgccagcatccccttcaagtggcgtgttaggatcccctacaccattaggcccttcattgactgttcagcgtgaactattccatcgatccgctaccc

SEQ ID NO: 8827 - DNA, 394 bp, Oryza sativa
  Clone ID: uC-osflcyp073d03b1
cgtatacatgggccatccgtcatccagcaagtggttatgttcaaggaataaacgaccttcttacaccattcttggtcgtattcttatcagagcatctagagggcaacatggacacctggtccatggaaaagctttctccacaggatgtttctaatattgaagcggactgttattggtgtctttcaaagtttttcgatggtatgcaagaccattacacctttgctcaaccaggaattcagcgccttgttttcaggttgaaagaaccttgtcattcgattagatgaacctgtgtcaaagcacatggaggaacaaggaatggactttctttagtttgcgtttcgttggttcaattgcctaatgactcgcgagattcctttcatcttgtaacacgctt

SEQ ID NO: 8828 - DNA, 342 bp, Oryza sativa
  Clone ID: uC-osflcyp073d06b1
ttattgatgcaaacaccggacgttctaggggctacggctttgttaggtttggagatgataacgacaaaactcatgcgatgactgaaatgaatggtgcatattgctctacccggccaattcgtataggacctgcaacacctagaagatcttcaggtgattctggctcctcgccaccaaggcagtcagatagtgactcaactaacaggacgatatatgttggcgggcttgatcccaacgctacctgaagatgaactaaggaaagcatttgctaagcatggtgatcttgcctttgttaaaattcctgttggcatacagtgtggatttgttcaatttgtcaacaga

SEQ ID NO: 8829 - DNA, 381 bp, Oryza sativa
  Clone ID: uC-osflcyp073d08b1
accgcgttgggcaggaaccccgacgtgaactatgtccaggaggaagaggaggactaggagggcaacaagcgcgccgtcttgctcggcccccaggtacccctcaaggagcagttcgagctctacaaggatgatgagagcctgaggaggtggaaggagcaactcctctgccaggttgatactgaacagcttggatagactgctgagccggaggtgaaggtgctgaacctgaccattcctgttccggataggccggaccttgggctgtcgatcccgtttgttccctaccagaaaggctatctccttcttgcttaaggaccggaggacttacagtttccgctttaattttaattgtttcaacaacaatcttgtcatgccttaagt

SEQ ID NO: 8830 - DNA, 246 bp, Oryza sativa
  Clone ID: uC-osflcyp073d11b1
cgaagaagtacctcggcggcgcctttgatcctctcggcttcttcaaggtccccgtcaagctcgtggagtacaagctcatggagatcaagaacgggcgattggccatgctggcttttgtgggtttctgcgtccaacagttggtgtacccgggcaccggcccactggagaacctggccagccacctttcgtacccgtggcacaacaacattggtgacatcattatcctgagaaccaattcttacccct

SEQ ID NO: 8831 - DNA, 373 bp, Oryza sativa
  Clone ID: uC-osflcyp073e01b1
ccattttctaaaaaaacagataatctaagatctgtttttcttgtcgtaactcgtaacagataatctcgtggaggatctattgagtgactttgaatttgaacttcagcctccgtatttgttataccgaaatgctgcacaagaagtaaacggtatttggttttataaccaacaagactgtgatgctgttgcaggtgtttttggaaggatattgaatgcttacgccaaagggcctccaaagcccaaaggacctttccacaaaaagtgagtttgaggaattggaagctgttcctacattccgtgctatagatggcccccttgaacctttttcgtcggccactgttctagtttctaatgcccctgatgaatcattgac

SEQ ID NO: 8832 - DNA, 293 bp, Oryza sativa
  Clone ID: uC-osflcyp073e03b1
gatcccgacgttacatgggaggttgtctagtcgctcaagtgtgagaaggcatattcctgaggaagaagataaagatgatgaccatgagaggggggtctatctctcgttatgtacctccattgacgggcgttggcggcgccgccggcgcctacctgatgtgtctttgatcagtagtgactggctgctccatggaagaagaagaagatgggaagatgatgaaagggttgaaatcgacttgcgaagttgctagtgatatcggcgtatgacccagagttttagtgatcagatgtctt

SEQ ID NO: 8833 - DNA, 465 bp, Oryza sativa
  Clone ID: uC-osflcyp073e06b1
ccccctgctcgggtcgggtagctcccttccatcatccatggccgacgccaccgccgtcctctcagctcggagcaaggtgcaagctttcctcgaagcggctcgtgccggtgatctcgactccctcaagaagctcgctgcggcgctcgacgaggagggcaagggcgtcgccgccgtcgctgctgccgtcaaggacgccaacaagcgcaccgtccttgcacttcgccgcccgcgagggccgcacccacgtctgtcacttttctcatcttcgacctcgccctccccgttgaccccaaggacgacgatggtgaaactccactcattcatgctacgcgccaagcccatcttcaaacttgtaacctatctgtttcaccatggagcaaatccttccgttgctttttcctcggagccacgccattgcaccatgctgccggatagggaacctgtaccttatgaaactattcttct

SEQ ID NO: 8834 - DNA, 371 bp, Oryza sativa
  Clone ID: uC-osflcyp073e07b1
atccggtagcgctgctgattggtttattcttctgtgttagcctagatgggtcttcccacctgttttcaccgatgagaaacactctattttcagacaaccctactcctgagacaccatttcctttcacaacagtttgttgaatctctgcaatttctgttatggagggaatggctgctccatttatgccatcctacaagagagttggattagaatatcatgccatgactacaggtactgcttatcgcttgaactttctttatatgcaaagtaaggaggccctatatatgggagcaactgctgcagaattgtagatagcgaattttttgttcagaaaagataattgtgttttcttaaacacagaatggtgtcat

SEQ ID NO: 8835 - DNA, 341 bp, Oryza sativa
  Clone ID: uC-osflcyp073e11b1
atcgcttctgcgctcatcaagatgctgctggagaagggatatgctgtcaacaccgacggtcagaaaccccgatgacatggcgaagaactcccacctcaaggacttggaggcacttggccccttgaaggtcttccgcgccgacatggacgacgaaggcaacttcgacgatgccgttgccggctgcgactacgccttccttgtcgccgctccgatgaacttcaattcagagaatcctgagaaagacttggttgaaagccggcggaaatgggaaccctaacccgatgagatcgtgcgcgaaggcggggacggggaagcgcgtgatcataacatcggcggacgct

SEQ ID NO: 8836 - DNA, 121 bp, Oryza sativa
  Clone ID: uC-osflcyp073e12b1
agcgaggagtgcaccgtcgcttggggagtttgcaaccatgcattcccactttccactgcatcagtcggttgggtcaagacccgttaagtgtgccctttagaccaacagctagtgggagttt

SEQ ID NO: 8837 - DNA, 364 bp, Oryza sativa
  Clone ID: uC-osflcyp073f02b1
gaagaagatgtcttgctgcggcggcaactgcggctgcggcagcggctgccagtgcggcggcggctgcggcggatgcaagatgttccctgatgtggaggccacagccaccaccaagaccttcgtcctcgctgctccatccaacaaggcgagctctggaggaatggagatggcggcggagagcggcgagaacggcggctgcggctgcaacacctgcaagtgtggcaccagctgcagcggctgctcctgctgctcctgcaactgaatctatcgtcgtcgtcgcccggctgcatgaggatttatcgtatggatgctgctactgccgatcagagctttgatcgaggccttaatttgctttgcattagta

SEQ ID NO: 8838 - DNA, 420 bp, Oryza sativa
  Clone ID: uC-osflcyp073f03b1
tctattgaatgtgctaagagaattcgaatcaaagaaggaggcagagggtgaccaaattttgattaaggcatcattcctggctgagctacaaaggcgaatattaaaggccgaggcgacagtccgagaaaaggatgaagagaacgagatgcttcagcagcgacttcagcaatatgaaaaccgatggtcagaatacgagcagaaaatgaaagcgatggaggaaatgtggcagaagcaaatgcggtcattacaatcaagcctatccgtagcaaagaagagccttgctcttgatgagacgcctaggatgtccgactcatcggtcgaccagagctgggagagcaatggggttcacattggcagcgcgtcgcagctggttccacgcaccgttggacgggagatgaatgccagcatcagcgtcatcag

SEQ ID NO: 8839 - DNA, 332 bp, Oryza sativa
  Clone ID: uC-osflcyp073f05b1
ctgtcgcagggcatcaagcgcgcgtcgcggtcgcacacctaccaccgacgcgggctctgggccatcaaggccaagaacggcggcaccttccccaaggccggcaagcccgccgccgccgtcgagcccaagttctaccccgccgacgacgtcaagccccgcgcccccagcacccgcaaggtcaaccctaccaagctcaggtcgaccatcacgcccgggacggtgctgatcctgctcgccgggaggtacatggggaagcgccgtgtgttccttaagcagcttaagtccggcctgctccttattaccggaccttttcaagatcaatggagtgccca

SEQ ID NO: 8840 - DNA, 236 bp, Oryza sativa
  Clone ID: uC-osflcyp073f09b1
ttggatggataagagttacacaagcagcactttggagtgtaacttattaatgcagaacattcaggtcttagaaaggagtttggctggtaaagactcggtaaggctggaaagagatatgctctgccatatcgaacggctgggagcattgaaatcattcaacgcgtctatctccagggccactctaacacaaacatatgaattagagttttcacttcctggggatattattaagcttg

SEQ ID NO: 8841 - DNA, 235 bp, Oryza sativa
  Clone ID: uC-osflcyp073g07b1
tattctccacaaccataagggagaacataatctatgcaaggcacaatgcaacagagtctgagatgaaagaggcggctaggattgcgaacgctcaccatttcattagcagtttgccacatggctatgacacacatgtgggaatgaggggagtggatttaacttctgggcagaagcagcgaatcgccattgcccgtgtagtgctgaagaatgcacccattttgctgcttgacgaagc

SEQ ID NO: 8842 - DNA, 434 bp, Oryza sativa
  Clone ID: uC-osflcyp073g10b1
tgccaccaccaccaccatctctccccctcctcctcctcgtactttgtgagttctagctactagccaagaagcatggctgaggaaactggcaacgacaaccaggtggttcaaggtaatgagattgtcccaagcaatgaggaagctcaagctgaggaagttcagggtgatgaattggtccctgctgaggacttaactcaaggtgacgaggtccaaggaaatgaattggtcagtgctgagatcagtacccctccaacattaaggctgccgtaggaagaagtctctagtgtgggagcacttcactattgaagctgtctctggaggggctacacgggcgtgctgcacactgtgcaagcaaacttttgcttacagctttggttcaaaaattgcgggtactaaccatctcaagaggcacattacattgggttcatgcccta

SEQ ID NO: 8843 - DNA, 224 bp, Oryza sativa
  Clone ID: uC-osflcyp073h01b1
agagagcgccagactctccccaggattcaggcatgaagggggccaaatacaagggcgccgccaagcccgacgtcaagtttggctgtgaagagtaagggctcggagaatcccgccgtcaatggcaggaaggggaaggccttcaaggacccctaacaagcccaaagagggcttccttcgttttttttcttttttattggaggagttcccttagggagtttaagggg

SEQ ID NO: 8844 - DNA, 256 bp, Oryza sativa
  Clone ID: uC-osflcyp073h05b1
ccatgttttgtagtagcgtcagctttcgtttgtctgagttctggtatctgaatcgatatgttggttgctgactacattctgttagatgatccggaactctttgtcataaaaaaaaaaaaaaaaaaaaaaaaaaaaaaaaaaaaaaaaatttaataaaatatctctatcataaattattttatttttcatatcatactcattatttctcttatattattttttactataaattttatctttaataacctatatttac

SEQ ID NO: 8845 - DNA, 440 bp, Oryza sativa
  Clone ID: uC-osflcyp073h10b1
gaacttattgtaacatatgagggatcaaggcttgcaattagtgacctaaggctgcttatggatactttccaccgcgaagactttactggtacatggaggagactattctcaagagtcaaaaaacacatcatctggagtgtcttgaagtcgatggctggaatgcaggttaagaagtttaaggcccacaatcgggaaacacatgatggagctgttcctgatcatgatctgaatttaagtgacagtgacggtgaccatcacggaaagcccgatcagtttcctgtgtcatggctgaagaggccgggtgaaggcgcaggggatggatttgtcacatcaattagagggctctttaattcacagcgccgtaaagaaaggcgtttgtgctacggactgtgcggggagaggagacaatgaatgccatgacgaatgcagtgacagtgatg

SEQ ID NO: 8846 - DNA, 390 bp, Oryza sativa
  Clone ID: uC-osflcyp073h11b1
agacctaagcctagggttagggtttgtgtagctcgcagcgatggcgatcaagaggaccaaggcggagaagaaggtggcgtacgacaagaagctctgccagcttctcgacgagtacaccaaggtgctcatcgccgtcgccgacaacgtcgggtccaaccagctgcaggagatccgcaagggcctcaggggcgactccatcgtcctcatggggaagaacaccctcatccgccgttgcatcaaggtgcacgccgacaacaccggcaacaaggagtttctcgagctcatgcccctcctcgtcggaaaacgttggccttatcttcaccaagggtgacctcaaggaggtccgcgaggaggttgccaagtacaaggttggagcttctgcttgtgctg

SEQ ID NO: 8847 - DNA, 339 bp, Oryza sativa
  Clone ID: uC-osflcyp078a06b1
ctctctctcgcttctgccactgctggctgtgctgcttcccgagctcctcggttggatcaaagagaagagaagagaagagttaatgctgatggcctccgaggcgtggctgtcgccggcttcccgcctcttccaccctccacgctcctacaccgtcgccttcttctccgcttccgggctcccccgcctgcctcgccgctcctcctgtgcactcgcaacctccacgcgtgggcggcgcctccgtcttggcgccaccgatcagcagcagcagtcaggcaaacaagatggtgatgaggttgtggacagcaacgtgttccagtactgcaacatcgccggaagggg

SEQ ID NO: 8848 - DNA, 526 bp, Oryza sativa
  unsure (1)..(526): unsure at all n locations
  Clone ID: uC-osflcyp078a07b1
ttattttgcaatggtatgagtttgttggccgtgtttggagttttcgatggttacctgcggatttgaagctaattaactggaatatgtgtgtatttcaaaggtacaaagcattgtgcatagtctctatggatcaccaataatcactctaaagctacatttgtcagcaacgctactattgacatcatccagattttttgctgctcctaattttgatgttccaaatctctataagtgaaagattaatctcaaaacgccacatgattgatccacataatgaagaaatcagacaattcagtaaaagaaaaaataaagagatgaaaaagatatccatcagacaaaaatagtaaagcaaaggggacacgaggagggtttgagaagggggaaaaagaaaaaggaaaaaaaatgaccgacttcggcgatgccacatcgcttctcctctatgctctccgactccaccgctgcttaagtgctttcaccccatgcctcccccgccactggggacctaaattcataattggngatctag

SEQ ID NO: 8849 - DNA, 507 bp, Oryza sativa
  unsure (1)..(507): unsure at all n locations
  Clone ID: uC-osflcyp078a08b1
tcagtttccaaaccagcaggagtcgcctcgcctcctgcttcatcctcctcgtcgtcgccgcgggggtcgcctgagatcacattaacaatggtgaaggctgttgttgtgcttggtagcagtgagattgttaagggcactatccactttgtccaagagggagatggtcccaccactgtgactggaagtgtctctggcctcaagcctggtctccatgggttccatattcatgcacttggtgacaccaccaatggttgcatgtcaactgggccacactacaatcctgccggaaaggagcatggagcaccagaagatgagacccgccatgctggtgatcttggaaatgtcaccgctggagaagatggtgttgctaatatccatgttgttgacagtcagattccacttactggaccaaattcaatcattggcagagccgtcgttgtgcatgccgatcctgatgatcttggaaagggtgggcacgagctgagcangaccaccgganacgctggt

SEQ ID NO: 8850 - DNA, 344 bp, Oryza sativa
  Clone ID: uC-osflcyp078a09b1
cgcgtgccgtcgccgccgcgctcgccacgccacgccgcgccacgccgagcgcgcgcacagcaatggagctctcgcttgcctccgcgaagccctcgcctcgcgccgccgccgccgccgaggaggcggcggttgcatcgtagtcactgatgtcaatgcgggggaggaggaggagggaggaagataactgtgtcgggtaccagatcctgccggcagggcggatacggttacaccatcaatggtgccacgagggggaagaaggaacagtatactgcctgcgtgcttttaatggagggacctcggcggcaggcgagaggactaccaccaggtggtcggatgcccgcatg

SEQ ID NO: 8851 - DNA, 529 bp, Oryza sativa
  Clone ID: uC-osflcyp078b05b1
acttgttccctcttttgtgttgccgtggtttcgtgttagggggatgatccaagaggaggaggaggaggaggagaaggatgacaagtttttcatggcgcggtcaggggctttgtgcttgatttgattggcggctaactatcgagtagtgattcttgaatcagaggctaggacatgaggtttcagtggcggattttgaattagatctgcccgattttgctctgaattagcttagcctaatcgggttccagctcctggctggtgtgaggatgtggccatgattttgaatttgaggagtgtttgaaaacgaaaagtctaattctttgtaagggcatatggtagaggaattaacctttttcttgtttgatgtgtctgtgtgtagcaactgatttttatggagtgttattagttgtagggatctgtagtctgatctgatttggtaggagctccaaaaataaaaaaacattcatgagataacatgtgagaaatcgatttatgcagacacgttctttttgtgttcatttagtatgta

SEQ ID NO: 8852 - DNA, 337 bp, Oryza sativa
  Clone ID: uC-osflcyp078c01b1
gttttattttagctacgaagggaatgacaatggcatggggggtttttttaataatgtcacggggggcctgccctacactgttggaaaaataaagcaaccgcaaactgaagatagcacggctcgcatccatattatgcagccaatattaaaggctatgcccgagtgaaacacctgaaaaaggctaacaccgatcgatatggacctcctgctaatgcattcagtgattctccctataactaagcagtgggccatggcacgacgagcatcgtgtaacaagagtggagacacaatcgtagtctctacaagatgtgccagcagagaaatgctcagcacttct

SEQ ID NO: 8853 - DNA, 472 bp, Oryza sativa
  Clone ID: uC-osflcyp078c06b1
gccgttctcttcgccggggagaccgggcggccggcgggtccgccaccctaaaacggtggcgggggttatcacgggctgtgcgcggtcgagcgtccccggaggcccggactcgtcggcgtggacgccgcgcgcggcgcggtaggttagatttggatccgcgccttgtcgggggatcagacgagaatcggttgcgtctgccactgcattcttgcagccagggtgcattccgtcggggcaattgcaggcgaactccagggcgtcgctgtacgtgcaatttccgccgcttacttgacatttgggacaatcccctgaaaccaccgcccactctagtagaaacccactcctcatgctggcaatatagccggccatactcccattgtgacgctgaacgatcggcacaactgtgaagttacagcccggtggaatcccatcctcgtgtaaatggtggtcgctgacgagccggacggaggag

SEQ ID NO: 8854 - DNA, 442 bp, Oryza sativa
  unsure (1)..(442): unsure at all n locations
  Clone ID: uC-osflcyp078c11b1
taggtatatggccatggctgccacgtcccgcgcgccggccacgctggcacccggcgtgggtctccgccgccggcggcagcaggaggcggcgccggtgcccgaatcccagggtgcgggtgggggtgggggtgcngttctctcctctgcagccacgactcgttacttgggctgaatacggtgagaggggttgtgatctccatatgccgagcagagcagaggatcggaggtgatcctggttgtaatagacgcacatgttttcatatgatgctgcctggtgcagctcatcctttatgagtatgtagaagagcctagactgatgatgacaggatgattgcaatggctcttctggttgattatgttgggttggattgtgtttcgccaagtggttctcgatttatcatctattcctgacgttccctgatcaacatatacttgttgacat

SEQ ID NO: 8855 - DNA, 487 bp, Oryza sativa
  unsure (1)..(487): unsure at all n locations
  Clone ID: uC-osflcyp078d09b1
taaaatgctcgccctccgcaaaaccctcctccacgggcgtctccccgccgcgccgccggccgccgccgccgccgccatcgcgtctaggatccccgccctcctccgtcgcctctcctcttctcccggagacgggcagggcggggacgaatggggctcgtcctggtccaccggcatcaccaaggaacacttcgacggctccgacgccgcggtcggccgcccggtcacctccccgtccaagccggtctcccctgagcttgcggccgtccgggccatggacgaggaggacgagatcttccgcgccatggagcgcgacaacagggaggccaaggcgtacgtggactcgtggggcgaccggatgcgggagacgtgcgagctgctgaagcaggtgcgcgagccgggctccggggatcctacctcanggactcggagaagcaggagatgtaccggctgcacatggaggaccccgagacgtacaccgtggagcgcc

SEQ ID NO: 8856 - DNA, 542 bp, Oryza sativa
  Clone ID: uC-osflcyp078e03b1
cttgtggttcttggaataataaatgaacgcacaacttttgacgtatcccctggtcagccatctttaatctctgatgacacggatgttgttgctctagttggaacaaagaaggatttggcaaaacaaataaatctgaaggaggtgcattgggggttgcttgaagattcagttgaagagcgcatggagaaaacacttttagaatcagataaaactgaagcagaaagcaaggatgcagatgccgaagataacaataagagaaaatcttcggaaggtggaaagcagggaggttctgttaaaaaggtcaaaaaagataagattgcaggagccacagggaaaaccaataaatctgaaacaagcatagtttcggtggcacctcgtgtgaaaccagagcttacacttccatcctgttgaagtcgagcagtcaattcttgaggatttgcgaaaccgtgcacagttgaatagcctggcattgccatctgttagcttctacacattccttaatactcataatgggctaaattgctcatcaatttcacatgacg

SEQ ID NO: 8857 - DNA, 548 bp, Oryza sativa
  unsure (1)..(548): unsure at all n locations
  Clone ID: uC-osflcyp078e05b1
ggatgatccgtgagattgccatggacagtgctgattcagacctgaagaaggatgacgcaaacgaacttttagtagctcttaaagctgagaaagaggaactagaagcagcacttaacagggagcaagtgcaaactatacagcttaaagaagagattgctgaagcagaggctagaaatgcagagctgacgaaggaacttcaaactgtccgtggccaacttgctgctgaacagtcaagatgtttcaaacttgaggtggatgttgcggagctacggcagaagctccagagtatggatgcattggaaagggaggttgagctgcttcgaagacagaaggctgcctctgagcaagcagcgttggaggcaaagcaaaggcaaagtttcagtggcatgtggggctggctggtgggaaccccacctgataagtccgagtcttgatcacctatctatctttacccgacaatctcatacggatcgcgcagattcatatacgtgtaacatgtataaacttnttgaatgtcttctacacttttccttttccttattctttta

SEQ ID NO: 8858 - DNA, 482 bp, Oryza sativa
  Clone ID: uC-osflcyp078e06b1
cgagactctatcaagaataaggagcacgctgaagttgaatatgctattgtaccaatacctgttgatgatgatgatgacataggaaaggaggttgttaccagactgacaacaaatatggccaccaacaaaatattttatacagattctaatggaagagatttcctcgaaagggtgagaaaccacagggatgattgggaccttaatttgactcaacctgttgcaggaaattactacccggtcaatcaaggaatatatgtagcagatgggaaatatgaactatctgtccttgtggatcatgctgttggagcttcgagtattcaagatggtcagattgaagttatgctccacaggcgtctttctgcagacgatggcagaggagttggggaaccacttaatgaagtagtatgtgtggatcaaaagtgcgatgggctagtggccagggcaacttactatatcaatgtcaataagaaaggacatggagc

SEQ ID NO: 8859 - DNA, 432 bp, Oryza sativa
  Clone ID: uC-osflcyp078e08b1
ggagtacaagcccgatccgccgtcggcggaggagaagagctgaggtggtcgcggcggtctctaatggcgggtctctggagaccgtggcggtggagccggtgtcgtcgggggcagccgaggaggaccgcgttttggatgacatccttagtaagctggacatccaagagacaccaactcttgtgctctatggatccggtgctttggttgtcctatgggttctatcttcagttgatactgcaatcgattccattcccttggatccaaaagttcttgaactcataggaactggttactcaatttggatcacttcacggtaccttctcttcaaggaaagtagggacaaactgtttgcgacattcgaagagctgaaagagaggattattcgagctcaccacttatgatcctgtggtgtatgataggcttcctttccaa

SEQ ID NO: 8860 - DNA, 234 bp, Oryza sativa
  Clone ID: uC-osflcyp078e12b1
gcgctagagcccgccgccgccgccgaggcggaggccgaggaggttcgagccggcggcgcaggtggcctaggaggtgaaggaggaggaggcggctccggcgccggtcgtcgtggaggtgatggtggaggaggcggctctaattccgtagtcggatgtcgttaaggtcatctagtgagtgtatgtcggtgaaggctggcttgtcgtcgtcttacaccgtgtagtacatgcatggtc

SEQ ID NO: 8861 - DNA, 497 bp, Oryza sativa
  unsure (1)..(497): unsure at all n locations
  Clone ID: uC-osflcyp078g09b1
tatttacctcctccacctcctcctcctccccccgaggggatcggcccggctcctcctgctccgccgccgccaccgccgccgcagataggagaagatggccgcacttgataccttcctctttacctcggagtctgtgaacgagggccaccctgacaagctctgcgaccaagtctcagatgctgtgcttgatgcctgcctcgccgaggaccctgacagcaaggtcgcttgtgagacctgcaccaagacaaacatggtcatggtctttggtgagatcaccaccaaggctaacgttgactatgagaagattggcagggagacatgccgtaacatcggttttgtgtcagctgatgtcggtctcgatgctgaccactgcaaggtgcttgtgaacatcgagcagcagtcccctgacattgcacaaggtgtgcacggncactttaccaagcgccctgaggagattggtgcttgttaccaaggacaccatgttggatatgcaactg

SEQ ID NO: 8862 - DNA, 478 bp, Oryza sativa
  Clone ID: uC-osflcyp078h02b1
gcggatcttccttctttctcctcctccgtcgcgccgcagacgcggaccccgatcccgatggccggctgcgactccgccgccggcgccggcgccggcaagtcgctgttccagaccttccgcaagttcttcaagaagccgtgggagatcaccggcccgtgcgccttccccgagtaccgcagcgcgctcccgggcgccctggagtaccgccaccgctgcccggccaccctgacgaaggacacgatggccgtcgtgcccacctccgagcccgagaccgtctacgacatcaagtactacacgcgcgaccgacgccgtgaccgcccgcccgttcgccgcaccctgctccgcaggcccgacctcgagcgctacatggctcgcaagcagttcgaccccgccaaggacttccccgtgccttacgtgaacaccgtcgtggaggaggactacgacgccgtcggcggcggctaccagaagtgatggtcga

SEQ ID NO: 8863 - DNA, 485 bp, Oryza sativa
  Clone ID: uC-osflcyp078h04b1
gacggagatgtccacctcgccgtcgccggcgccgccggaggcgcttgacaacgacgacctgctgtcggagatcctcctccgcctcccgccgcagccgtcctccctccctcgcgcctccctcgtctgcacccgctggcgccgcctcctctcctccgccgccttcctccgccgcttccgcgcccgccaccggcggccaccactcctcggcctcttcaaggaagattcagtataccccatcttcatccccacgctggactcgccggaccgcatcccgcccgcgcgcttctcatggcgagtccccggcggcagcggcgaggactaccaccagctgttcggatgccgccatggccgcgtccttcactacagccggaggcggcgcctactcatggtgtgggatcccctcaccggcgaccgccgcgccgtggatatcccggcgctgttccatcgctgggacatggacgggtaccatgggtcggagcgctgcg

SEQ ID NO: 8864 - DNA, 315 bp, Oryza sativa
  Clone ID: uC-osflcyp078h07b1
acccaccccattttttactccacacccactaacccctgattcgattggatccaatccaatccaaggggaggggaaacaatggcgacaaagaagaccctccggacgctgggggaggcggatctgagggggaagaaagagaacgtgcgggccgacctcaacgagccgctcgacgacgcccagaacatcaccgacgacacccgaatccgcgcgtacatgcccactgtcaagatcctcctcgagaagaacgccaaaattaaaacgaacagcaaacaggccgtccgaacgaaatcacccccaagtacaacctgaaaccaa

SEQ ID NO: 8865 - DNA, 513 bp, Oryza sativa
  unsure (1)..(513): unsure at all n locations
  Clone ID: uC-osflcyp078h08b1
tgattgtggaactaaatctcattcagatgcaaactcgtcctctacattgacccaaccagggctaataaataactcaatggaagatcgggttgttgtttactcacctaatgaagttgatggttcaacagtaattgcagatgctcgtcaagcatatcagcattatgatccattatcagttgttttagattgtcaattttgtggagcttgtgttgccttgtggcctttttcacttgtagaacgacctcttcaactctttaagctgatatcagattctagtaggcaagatgagcaaactgaggggcatgctggcagagtcagtggcgcaagaccttcaaagactgcgaatattggttttaatttcactattgctggtggtcctccgccaactagacagaattttcggcaagagtttccttacctgttgtcagtcgacatttgaaagctgacttaagcttccatgggcattttatttnctctggaagtgataaccacatggntcnctgtactttgcat

SEQ ID NO: 8866 - DNA, 433 bp, Oryza sativa
  Clone ID: uC-osflcyp078h09b1
gcagttaacaaacccctctcactcccactaccatggggccttgcatgttccggccgtcgagctcgttcgacacgaagacgacgacgacgaacgcgggagctccggtgtggaacgacaacgaggcgctgacagtggggcccagggggccgatcctcctcgaggactaccacctgatcgagaaggtggcgcacttcgcccgggagcgcatcccggagcgcgtggtccacgcccgcggcgcctccgccaagggcttcttcgagtgcacccacgacgtcaccgacatcacctgcgccgacttcctccggtccccgggcgcccagacccccgtcatcgtccgcttctccaccgtcatccacgagcgcggcagcccggagacgatccgcgacccgcgcgggttcgacgtcaagttctacacccgcgagggcaactggga

SEQ ID NO: 8867 - DNA, 550 bp, Oryza sativa
  unsure (1)..(550): unsure at all n locations
  Clone ID: uC-osflcyp078h10b1
taagaatccccatagctcaagcaaagggagagagcaggagcagcaagaggagcacgcggggagctagctagctccgccgccgccgacgagctccggcggctcgccgttatccgctcgctgatcgagccgtgtgcgggtgagaaagaaaaagaaaaaaaaaagatcgcgcctttttggcggcttcttggggtgtgaatccacggtttccccggggtaggatcttgatggggctcgaggaaggcggcgcgatgagggcgctgatgcggcggaagcaggtggactccgaccgggtccgcgccgccggcggccaccagctcgccaaggagctctccgttacgcagctcgtcgcgattggtgttggttcaacaattggagctggagtatatgttcttgtgggaacagttgctcgggagcatgctgggccggcattgacactttcatttctgatagctggagtggcagctgcactctcagctntctgttatgcagagcttgctagtcgctgcccttctgcaggaagtgccctaccatattcgtacatctgcgttgg

SEQ ID NO: 8868 - DNA, 226 bp, Oryza sativa
  unsure (1)..(226): unsure at all n locations
  Clone ID: uC-osflcyp109a01b1
tgaagtcgttcgagtcgtcgtcttcgtctgcgttccgttgcgcccgcctcgtcggctcctcggcgccgccgacgccgacgncgacgcggggaagaggctagccctagaggagaagtgggggtgaggtgggagagaggagcggcggcaaatggataccatctatccataacttttaccgccaaaattatctccaggggcctaaaaccgtgtctgcaatgcactagca

SEQ ID NO: 8869 - DNA, 467 bp, Oryza sativa
  Clone ID: uC-osflcyp109a02b1
tacggtaccctcctctctcctcctccgaccaccatggtcatggccacgcaggcctccgccgccaggggccacctcctggccgcctgggcaccggcgaagccgcgctcatccaccctttccatgcccacctcgagggcacccacctccctcagagcggcggcggaggatcagcccgccgcggcggcgacggaggagaagaagccagcccccgcggggttcgtgccgccgcagctggaccccaacacgccgtccccgatcttcggcgggagcacggggggactcctccggaaggcgcaggtggaggagttctacgtcatcacatggacgtcgcccaaggagcaggtgttcgagatgcccacgggcggcgccgccatcatgcgcgagggccccaacctgctgaagctggccaggaaggagcagtgcctggccctgggcaccagggttccgttccagtacaagatcaacta

SEQ ID NO: 8870 - DNA, 451 bp, Oryza sativa
  Clone ID: uC-osflcyp109a04b1
tgtgggatcatggccagttcttctgtggcttgttacaagaacctgcataagaactgggccgtcgcaaatggcgaaagcgcgccattgagctcgccgagtccaggcttctgaaggacggctggccagagtactacgatggcaagctgggacggttcatcggcaagcaggccaggaagttccagacatggtccatcgctggctacctcgtagcccgtatgatgctggaggacccgtcgacgctgatgatgatctccatggaggaagaccggccggtgaagccgaccatgccgacggtcggcatcatggaatgcctgaaatgttttgatagaattttttttttcccaaagagaggttcaatgtggaaacttataggagtttttgccaaacatgaaaatggggttcaaaatttactgtaactgtcctgtcagttaggacagaagtgtttaccata

SEQ ID NO: 8871 - DNA, 478 bp, Oryza sativa
  unsure (1)..(478): unsure at all n locations
  Clone ID: uC-osflcyp109a05b1
tgtacttttcaacttggatataattggaatcttggtttttccaagttttctggccttttccctttctaagagcggattttttcgattgataacctagtactactgcaattcacattgtcagctcttgcttgttcccaggaggatcagtttcttgctgagcaatggatcctgagttcgggagaggcatggcgcctcgaaagagagagccatggcggacgacgctgctgctggcgtaccagagcctcggggtggtgtacggcgacctgagcatctcgcccctgtacgtgtacaagagcaccttcgcggaggacatcacccactcggagtccaacgaggagatcttcggcgtcctctccttcgtcttctggaccctcaccctcatccccctcatcaagtacgntttcatcgtcctccgcgccgacgacaacggngaaggagggacgtttgcgctctactctttgatctgaggcacgccaat

SEQ ID NO: 8872 - DNA, 401 bp, Oryza sativa
  Clone ID: uC-osflcyp109a06b1
acccgccgtaaggacctttgagcaatggtcttccgaccccatgattggggacaactggggctcttctcccccgtacgacgacccagcaggcgtggcaaagagctagccctagaggagaactgctgttcatgctcacctcagggggatccacctccctcaaagcgctgcagggacgaccacacggacgtaccggcgacggccgagatgaccaacacgccccagctggttgaggcgacgaattgggaccacagaaccgcaggcacaatcgttggcgggagcacggggagacttgtacccaacgtgcacttggatgattattacgctataacatgaactgcttccaaggagaaagcacttgataggtgctccaattggacatccaacctgacagagggtctcga

SEQ ID NO: 8873 - DNA, 446 bp, Oryza sativa
  Clone ID: uC-osflcyp109a08b1
tgtgacagacgacacatagaaggttttcatggagaaagtactggtgctctccttgatatgtatttcactctgccaaggatgggtggtgcaatctttagaatatgatcatacagcaagtattgagtgccttcgcgatccgatgaagccgctgtacaacggcggcatcatccagaacggcgagttcaacagcggcctcatgggctggtccacgcaccgcgacatcaaggccggcctgagcagctcgccgtccggcaacaagttcgccgtggtgcagcgcgccgactccctctccggcgccgccgtgccgtcgcgcagcgtctaccagaagatccagctgcagggcgacacccactactcgctgtccgcgtggttgaaggtgtcggccggcgccgcgcacgtgaaggcgttcgtcaagacgcccaacggcgagcgcgtcgtcgtcgaca

SEQ ID NO: 8874 - DNA, 401 bp, Oryza sativa
  Clone ID: uC-osflcyp109b04b1
cgtcgttaaggcaggaattgaaaggccaaggtttcaaaaaaccggtttccatttggggaaactacactaggcggtaggcgccaaatccaaccgacgatgtcgctgatccgccgcagcaacgtgttcgaccccttctccctcgacctctgggaccccttcgacggcttccccttcggctccggcggcagcagcagcggcagcatcttcccgtccttcccgcgcggcgcctcctccgagaccgcggccttcgccggcgcgcggatcgactggaaggagacgcccgaggcgcacgtgttcaaggcggacgtgccggggctgaagaaggaggaggtcaaggtggaggtggacgacggcaacatcctgcagatcagcggcgagcgcaacaggagcaagaggagaag

SEQ ID NO: 8875 - DNA, 381 bp, Oryza sativa
  unsure (1)..(381): unsure at all n locations
  Clone ID: uC-osflcyp109b05b1
ttccaattgcttgtgtcaacggaactattcatctacctggggagagccgttggtttcacaatgcttgggcccttccggtggtgctcgatcgacgggctcgccgccgccgtagctgcacgccgccgngcgccatgtcaggcgagctctccacgcgcgcgtcgacctcctcgtcgagcagctcccctcccggcgacgcgcgggggccggaacatggagggacgccgcgtggcgaggtgtcgtccaagcgccgtctggtgctgcggcggcggcagcggtgccggcgtctcggcggcggcgccgcggcgtcgtgggcggcggcggacccgcgggcgaggtgggtcagggagtggaaccgcgcgtacctgctggcctgcgcggggg

SEQ ID NO: 8876 - DNA, 471 bp, Oryza sativa
  Clone ID: uC-osflcyp109b07b1
taagaacttgcagcagatggaacagttatcgataaaaactccagtgaagctaacaggattgtacataatagtgataagttggctttggagagttcaaaagaacaatcacaatcaggctctgcttctgcagctgttgataagggaagaggaaaacctcaaggtgtgggaacaatggaaaataatgccatttcagaacgtggcaatgttcatgagttgacatcgaatggggatttatctacaaagaatgaaattgttataggcgatgctaaggataaaactattgtttgcagcacagatcacagtattgtgggttgggttggtgatcctctcagagtagtcgagaacaagacttactattactcttgtaacattgatggtatagcatacaatcttgatgatcatattttggttcgcctgcagagataaggagtctgctccatccaagctgcagtcactgtgggaagagcatga

SEQ ID NO: 8877 - DNA, 250 bp, Oryza sativa
  Clone ID: uC-osflcyp109b08b1
ttcctccgtatcctcctccagatagcggcggctgcctcgccttctccgacgagctccaccgccgagtcgccgccccttgccaggacaggatggtggtggccacggaggaaatggcggtctactgcttcgacgccctcgtctcccactacagcggcgaccagccgccgccgcccgccttcgaggagggcatccacccattgtttgtcacctggaagaaggctaccaatggttcagaaccacgccttcgagg

SEQ ID NO: 8878 - DNA, 411 bp, Oryza sativa
  Clone ID: uC-osflcyp109b11b1
tttagacatggatctatgacaaaattcatcatgagataaaccagttctgtagtgcccacagtttgcagcaagtttacatcgacttgtttgatcagattgatgaaacgatgaaagaagctattcaaagagactgtacacgctatgctcctggtattgagataatcagtgttcgtgttacaaagccgaacatacctgatagcattaggagaaattttgaacttatggaggaggagcgtacaaaggcattgattgccattgagaagcaaaaggtagcagagaaggaagcagaaacgcagaagaaaattgcactatctgaagcagagaagaatgcacaggtgagcaagatcctcatggagcagaagcttatggaaaaggacagcttcaagaggcagcaacagattgataatgaaa

SEQ ID NO: 8879 - DNA, 123 bp, Oryza sativa
  Clone ID: uC-osflcyp109c03b1
gctcccgttttaccaacacctagaatcagcattcaaaatcttttcaatagaaaaacctaaatttaatgcacttggacgttaatttacatggacgggactggcaaaaccttgacctggccaaac

SEQ ID NO: 8880 - DNA, 418 bp, Oryza sativa
  Clone ID: uC-osflcyp109c04b1
ttcagggtaggctggtagcttttatggttggttaaaatacatttgcttgataatttggctggttggtatgctggttaccccggggaatggggtgggaaaaaaaaaggtattgcaggagaaaagaaggggaagcctgcaaatttcatcagacttttcagataggaaattacattgttcagatttagtatatgtcaataatcaatggccgagattttaggaagagtctccatagagtcccttttgcaatgcagtgcatggtctgttgaggtagttgagcagcaaatggctaatgtgcagtttgtaccttgtgttgtaatacaactaagggtccaggcaatgaattgcttaggacctctgcactgtagctgccatgagcaagagtgaactgtttatctgtagtctgtactgcacaataaat

SEQ ID NO: 8881 - DNA, 376 bp, Oryza sativa
  Clone ID: uC-osflcyp109c06b1
ttccagcgacgcgaaacgcgagctcgcgaagtcccaccaccacccaccgccggcggggagggaagcttggaaggggcgcatcggggagggaagggagcggatcatggaggatttctacgtcaccatcccgtacggcgccgcggtcctcggcggcggcgtcgccggctacctcaagcgcgggagcaaggcatcgctggccgcgggcggcgggttcggcggcgcgctcctcctcgccggcgcgctgagcgcccgggcctttgcgcgcggccaccccggcggctccctcttcgccaccgtcctccagaccggtccgtttctggtagtgttgctacagtgctactccccccccatccttcattcatcccctccgttttat

SEQ ID NO: 8882 - DNA, 451 bp, Oryza sativa
  Clone ID: uC-osflcyp109c09b1
tgaaaaaaataatttattttttataggagaaaaaaagaggagaaaaaaaagggaagaaagagatggacgaggcgtgggagagggcggtggaggcggcgcttcatgccgccggagaggggtgctcgtctccgtcgaggagcctgacgctggacggcgccgtgaagtgcctgcacggacggttgcccttcgcggacattctggagcgttaccagagcctgtagcccctgttcgtcgccggcgttggtgtcgtgtctcttgcccgggctccctcgtttgctctacctgtctctcctgccgttctcctcctcccgtttcgccttattccttctccaccttcgcttcttcccctcttggcccttcttcctttcctcatcctctgttctcttcttttcattactcctcctctcctcttctcccttcccctccttccccctcttttcgttcccctttt

SEQ ID NO: 8883 - DNA, 504 bp, Oryza sativa
  Clone ID: uC-osflcyp109c10b1
ttggcgtgatgtcgctgcgccgcctggccgcgtccgccctgcgccgcggcggcgccaacgacggcggcgtgctggccgccgtccgcgccgagatcgctcatgagctctcctcctccccctcctcctctcctccgtcgctccaatcccaggtacccaccaccgcatgctgcctcgcccccaaatccagcgccactcactcccccctcgttctcgcaggacattcctgatttctccaccgtgtcggacgcgccgcgcgggcaggaggtgctcctgcgccgccgggatgcttccgaggaggtcctcgtgtcggcggtgctcgcgccgctgcggttcgaaggggaggagcccctgcccagggacgcgctcatgaaggtgttcgtcagtaagcctgatgtgaagccggtgatgcggttcgattgccgcgcgtttgcagctgaaggtgatggcggctctgctgactatgatgttactgctggttggtaccacccgtttgctggcgagtgc

SEQ ID NO: 8884 - DNA, 228 bp, Oryza sativa
  Clone ID: uC-osflcyp109c11b1
tatctcctccttcctcccaccacctcgccttgccatggcgggcaccctgttctccacctcgctcacccccaccttgctcccggccgtcccctgccccaagcccgcgccgccggcctccgtctgcttcccctgcgcgctgccgccgcgcgccgcgctagcgctgcggaggcggctttctcccgtggccgtcgcggtgtcctcggaggtggaggaggaggaagggtggct

SEQ ID NO: 8885 - DNA, 294 bp, Oryza sativa
  unsure (1)..(294): unsure at all n locations
  Clone ID: uC-osflcyp109d04b1
tcgtcgncgncgncgnccgaancatgggcgacgcgggggatggcttcttcggcttcttttggggccgcttcctggccaacacccttaaacccgggtcgctggcctcgatcgcgacgcgaaccctagcctccttggccaagcccctcgtgccgcaggcatcccgcgtcctcgcctccccccgcctcttcccctcgcgctgccactacgcgtcgaaccgatcctccggcgacgaggaggagggggacgacgacgatcactacgacgaggaggggagcggngatgagggnnggggag

SEQ ID NO: 8886 - DNA, 550 bp, Oryza sativa
  Clone ID: uC-osflcyp109d07b1
tgcgattcctgccatctgaattcggcatggatccatcaaggatgggggacgctctagaacctgggagggtttcatttgatgagaagatggtgataaggagagcaattgaggatgcaaacatcccccacacatatgtttctgccaattgctttgcagcttacttctgtcctaacctctgtcagatgaaaactctcctccctcccaaagagagagttggtgtgtatggagatggcaacgtcaaggtgtttttcgtggacgaaaatgatgtgggaacatatgcaataaaatcaatcgatgatcctcgcaccttgaacaagacaatatacataaggcctcaagataactgtctcactcagaacgagttgatctcaaagtgggaaacactcactgggaaaagtcttgagaaattccacatacctggtgatgaatttttggcttctatgaaagatttggattttgctagtcaagtaggaataggacattattaccacatcttttacgagggctgcctggcaaacttcgagattggtgacaatggtgccgaggcaac

SEQ ID NO: 8887 - DNA, 499 bp, Oryza sativa
  Clone ID: uC-osflcyp109d09b1
tcgatatggtccttggtgggatgagagggatgactggaatgctttgggaaacatcattgcttgacccggatgagggtattcgttttaggggtctctcgattccagagtgccagaaagtgctgccgacagcagttaaagatggggagcctttgcctgagggtctactttggcttcttttgaccggaaaggtgccaaccaaagagcaagttgatgctctatcaaaggaattggctagtcgttcgagtgttccaggtcatgtgtatgaggcaatcgatgctcttcctgtaactgctcatccgatgacccagtttaccacaggagtgatggcacttcaggtggagagtgagtttcaaaaagcctatgacaaaggaatgtcaaaatcaaagttctgggagcctacctatgaagattgcttaaatttgatagctcgccttcagcagtggcttcatatgtttaccggaggatattcaagggagggaaactatagcagctgataatg

SEQ ID NO: 8888 - DNA, 423 bp, Oryza sativa
  unsure (1)..(423): unsure at all n locations
  Clone ID: uC-osflcyp109e02b1
tacacttgcacctcgtctggttcttcgcgccaggaaggaaccggaggtacttcttcttaatcctccatggccacaaccgggtcgctgtccgccgtcgcggcgcggccactgtccgtggcctggctcaagaagcccctgtgcgcctcgttccagcccgtgccgagggcgaggccggcggcggcggcgaggatggccgtgagggcgtcggcgtcgatgaaggagagggcgacggccgggctgacggccgcggccatggcggcggcgatggtcctccccgacgtcgcggaggccgcgcagggcagcctgacgccgtcgctcaagaacttcctcctcagcatcgtgtccggcggnngccgtgctcgtcgccatcgtcggcgccgttgtcgccgtctccaacttcgaccccgtcaagcggacctgaac

SEQ ID NO: 8889 - DNA, 493 bp, Oryza sativa
  Clone ID: uC-osflcyp109e03b1
ttggggggagggagaaaatggtgtgtagaatactagaattcgattggagggacggaattttgcaggattctgttattgttctccgttggccgcgtgctcgctgttggttcctgaaaaggagataattgagtaatgtgatcaggccattttgagtaaatttccctaatgctttagtccctcttttattttttttcttccattaattaagatattaagaaagtaagaatagcatgatttacggaatcccggcagtggcagaatccagtttattgcaacctggagtggaaatttcactgaacattttggttcatcatgttgggtgtgttgttactgccgtaccggctcccattggttcaatattgttcgtcatcccaaagtagtaggatgagaaatagtgtacccgttttcccgcttaatatgttagcatgctacaataaataaccctcaatttctgtacggaagaaaataatattcttttttcctacagcctgaa

SEQ ID NO: 8890 - DNA, 462 bp, Oryza sativa
  Clone ID: uC-osflcyp109e08b1
tgaagagagacaggggagaaaaccctaatctcaaggctcgcggctgtgagcgctcctcccgtctctcccccaacccgccgccagccaccgagctcgccaccgtctccgttgcctcgccgtgctctaggttctcggatggaggccgaggcggcggcgaagagggcgcgggagagcggtgacgcggcggcggccggtgccggcgagcaggcgggtatctctgccgtcatccctggatggttctccgagattagccccatgtggcctggtgaggcacactcattgaaggtcgaaaaggtactattccaaggaaagtcggactaccaaaatgtgatggtgtttcagtcctccacgtacggcaaggtgcttgtgctggatggagtgattcaggtcactgagagggatgagtgtgcttaccagagatgattacccaccttcccctttgcttatcaaagatccccaaga

SEQ ID NO: 8891 - DNA, 555 bp, Oryza sativa
  Clone ID: uC-osflcyp109e09b1
ttttaaagaagaagggaaggatggtgttaaatttggacagtacatctatgaaatttacaatcatgatgtggagcttagagtttcgaaagctggggttaacttgctcttgacaaaatggatgaaagaacttgagaagatattctatgggaacattgtgaaatatgactctgcaataagcccagaagcacgtcaggatgatcttgtaaatgtcatctggaggaatgtgtatgccgacgaaggttcagaggctatggatgcagcagctgtccctgctatccaggcattggcacggtacactcggagggaggcaacttgcctatcactgacagataaagaagctatgttctctggcaacttcaaatttacagccctgctgccgaattctcccagcccagcgaagcctgtgcggtgaaccatgacatggtaggttggtatcccatgcgaagattggtaaacaacatggacaaaaaatattctatcagcgtcataaaataacaggaatttccctacacttatttatcgtggaatccttgcgaatctgcccttttttatgac

SEQ ID NO: 8892 - DNA, 442 bp, Oryza sativa
  Clone ID: uC-osflcyp109f01b1
ttctattgtgcgaacatccctgttcctctgctccagtgtttacattgctacaagtttctttgcatatctcctcttcggcgagggtaccctagatgatgttctcgctaacttcgatgcaaatcttgggattccatttagttccgtctttgatgatatagtgcgagtgagctatgctgctcacgttatgcttgtctttcccatagtcttctttgcccttaggctcaacttggatggactgctcttccccacatcaaggcacatttctcgtgacaacaagagatttgccataatcactatctcactcctcacagtaatttatcttgctgccattttcataccgagcatttgggatgcattccagtttactggtgcaactgctgctgtcctgattggtttcatcttccctgccatggttatacttaaggatccttatggaatcgca

SEQ ID NO: 8893 - DNA, 505 bp, Oryza sativa
  Clone ID: uC-osflcyp109f02b1
ttgatgtaaaggcaatcgatctacaatccccaattagcagtctcatcggaagacaggttgtcaaagttggaaggagctctggtttgacgacagggaccgttgtggcatacgctcttgaatacaatgatgagaagggcatatgcttcttcacagactttcttgttgttggggagaaccaacaaacatttgatcttgaaggggatagtggaagccttataatcttaacaggaaaagatggcgaaaagccacagcccatagggattatatggggtggcacagccaatcgggggaggttgaagctcaaaagtggtcagggtcctgagaactggacaagtggggttgatctcggacggcttctggatctattggagcttgatctaatcactacaagtgaaggactacaagaggccctagaggaacaacgaattattctagctgctgctgcagcagcagctaattcaactgctggggaatcgtcacctgttgctggtcctcaagaaaatga

SEQ ID NO: 8894 - DNA, 532 bp, Oryza sativa
  Clone ID: uC-osflcyp109f03b1
tatgttattcatgaactgaaggactaccttaaaagtgctaatgcagatatacatgtcattccaaagattgaaagtgcagattcaataccaaacctccagtccattattgctgcttcagatggggcgatggtggcaagaggggatcttggtgctgaacttccaattgaggaagttcctttgctgcaggaggagattgtcagaacatgccgaagcatgcagaaaccagttattgttgccacgaatatgttagagagcatgatagaccatcccactccaacaagagcagaagtttctgatatagcaattgcagttcgtgaaggttctgatgccatcatgctgtctggtgaaactgcccatggaaagttcccactgaaggcagtcaaggtgatgcacacagtggcacagagaacagaatccagcctgtataacccaactacatctcctagtcttgttgcacatcctcaggctctgctcaacgaggaattttcgcaaagccaactaagcacaatggttggatctcatgctacaatga

SEQ ID NO: 8895 - DNA, 513 bp, Oryza sativa
  Clone ID: uC-osflcyp109f04b1
tttagtttactcagtttggcaccttaataattttttggcccttgacccttaaccggcctttggattaatctggcaggaaaagagtatagttaatggaaattctgttatgcttgttcagtctgctaactggctggatgtattacttgtggtagttcagaacaagttgactccaagcacctcttccagaggagatgcgacagtacgacaccttgctcgtctgaaaagcaagggttcccggaaaatcatttccagtgctacctcaactaatggaactatgttggcctattcagattgtgtgaaaccctgcctttttgcactaagacataagggtggaaaaaagtttactctagacaaactagagctgccaaagggattgctgaattcttaatgtatgctggtttctattgactcatccagtttgattctagctggccgtgatggaaagatttatgttgtagacattgccacaacggaaatttaaatgtctttcacctatgagaaaaatgatggagc

SEQ ID NO: 8896 - DNA, 449 bp, Oryza sativa
  Clone ID: uC-osflcyp109f06b1
ttttcattccagtccttaacccagcttaagaatggcaatgatggatccccattcattaggggatcgtcgtttcagggtttgtgaccggattagctttgggagtaggccaagtgatgttgacaccagtatgagatatggtgggtcatctgatgatgagaatattgacgaggaatcacctagtggtatatacatctcaccaatgccatacggttatggtgctccactatgctatgatgataacaaaagacagttgataaacactagatattgcctagttgccagcaagcaaatggttggtgtttttctcatggtttgggtccgaagtgatataagggaacatgtgaagaacttgaaggtttcatgtgttggcagaggtttgatgggatatctcggaaataagggatcgatatcaatcagcatgtctctgcatcagacaagcttttgctttg

SEQ ID NO: 8897 - DNA, 506 bp, Oryza sativa
  unsure (1)..(506): unsure at all n locations
  Clone ID: uC-osflcyp109f07b1
tctgctccgcccgcccgcccgccgccgccgccgtcgagttcgccgcacctctcgcacggcccccaccccgcgcttccttcctcgtcggaccgcccgcgaccgcgagcctgcctcccgtccaagttgacgggaaccctcgccgcggaagaccgcggagaggtggggggccgcgtcccgaccccggcggtggtcgatcggttccggacgagaggagcgatgcagggcggcgtgtccggattccagaacgcgccggtgacgcgggccgtcgtcctcgccagcggcctcctctccgtcgtcttcagcgcccagcgccgcgcccgcgccctcgtcctctcccaccaggggattgtcaaaaacttccgtctatggaagttgtttgcatctgggtttgcctttcagtcaacaccggagctattgtttggagtctacctgctctattacttncgtgttttcgagaggcagataggctctaacaaatactcggnttttagtttattcactatctc

SEQ ID NO: 8898 - DNA, 85 bp, Oryza sativa
  Clone ID: uC-osflcyp109g05b1
tttgaataaaaacattactcgagtctttggtccaattttcggttcaggcttctaattttaattaattttttttgggggggggggg

SEQ ID NO: 8899 - DNA, 509 bp, Oryza sativa
  Clone ID: uC-osflcyp109g09b1
tgtcggcagccggacgccgtcgcccaagacgcgggcgtcggagctggtcggccgcttcctcgccgccgccgagccggccgtgtccctgcagctcggcgaccttggccacctcgcctactcccacgccaaccaatccctcctccgcccaagatcctttgcatcaaaagatgacattttctgcctgtttgagggagtcctggacaatctgggcaggctgagccagcagtatggcctgtccaagggcgccaatgaggtgctcctggttatcgaggcgtacaagacgctgagagacagagcaccttaccctgctagcttcatgctctcgcagctcaccggcagctacgcctttgtgctcttcgacaagtccacctcttctctccttgtggcctctgatccagagggcaaggtgcctctgttctgggggataactgctgatggatcttgtgccttctctaacgacattgacctggctaaaggatcatgtggcaagtcacttgcacctttcccac

SEQ ID NO: 8900 - DNA, 434 bp, Oryza sativa
  Clone ID: uC-osflcyp109h01b1
taatcatcttcctcctcgctgtaccaatctcttgctgcgtttggggggagcaaagcgagcgagaggccgtgatggcggcggcggcggcggcggtgctgcacgcgctggtggcgctcagcctcgccggcgcggtcgcggcggcaggaagaggcggggagcagccgctgtcgaggatcggcatccaccggaccaccttcgcgatccagccgggtgcctccgtcgacgcctcgccgctcctcctcggcctcgagggacaggacagagaatgggtgactcttacctataacaaccccaagccatcgaaggatgattggattggggtgttctctcctgctaatttcagggattctacttgtccatcagagagccaatgggttgaaccaccacttctatgtacagctcccataagtttatatttgcaaactacaagaatc

SEQ ID NO: 8901 - DNA, 324 bp, Oryza sativa
  Clone ID: uC-osflcyp109h02b1
aatcgccgccgtttgtcctggattccaccgacatgacaatgagggagtgaatgacaagccacaagaggccaatcgctatccacgatgagaacgcgagcgaggagctccaaggactctagcatggagatcagactgtgggacagaaacccggatacaagaccggtgagggaggagacgatactgttgacacctatggcagagagacagggagcgaccaccatggaacatgagctagatcagcagaaagcgcgactaccgaaactgacgatgatgaggctggcaaccaccagcgagtctatgatcataggcatgtcataagaagca

SEQ ID NO: 8902 - DNA, 173 bp, Oryza sativa
  unsure (1)..(173): unsure at all n locations
  Clone ID: uC-osflcyp109h03b1
gtcgtccaccaccaccaccaaccccnatcgggggtttttttcggcgacttccattcggtcgcgccccgcgccggggcgcaccacccgcgccgacccaacccggacaccagggactcgtccgtctccgtcttccagaacccacgcgccggagggcccgcgccgccccgtggctg

SEQ ID NO: 8903 - DNA, 220 bp, Oryza sativa
  unsure (1)..(220): unsure at all n locations
  Clone ID: uC-osflcyp109h11b1
tgccgcccttttttttttttttttaaatgggttttttttaaggngaaaaggctgtattacatacctaagaaagcttaccacaaacaatagcagtgaatgcattctgaggatcaacccctacgctccataattcaacattgacaaacatgagcatgaggaccaaagtaataagaagagccttgtaagcaccaaggctaagaatggaagtaatatgatggaa

SEQ ID NO: 8904 - DNA, 278 bp, Oryza sativa
  Clone ID: uC-osflcyp111a01b1
tcttcttcctcttctcccaagaactctctcctctctctctctactcttctcttctctctccttttgttgcttccatttctcgttcttgcacggggaagaggagagaaagatgtgtgtcgctgtggtttgaaaaaggttgggtgtgagaggagagagaaagtggagtggaggggagagagagagagagagacagagagagagagagatggctacctgctctttggctcacaaggacctctgacacaccaagaagcagattcttgctcagacgactacca

SEQ ID NO: 8905 - DNA, 511 bp, Oryza sativa
  Clone ID: uC-osflcyp111a03b1
tttcactgctcaaggataatcttgtttccaaagggatagtgctttcgttcattactgagtttttcaaagaatatctgaaggagaacactttagatgatcttattgcacttttgaagaaaggcaaaatggaggacaatttgctggaatttttcccatcggcaaaaagaacctccgaggctttatctgaacatttcactaaagaaggtctgacaagtcttgttgagtacaatgaaaagaagatgtttgaggttaaacttaaggagataaagttaacactgacaacaatgatcaatgaagaggctgaaatatctgaagtcacagaagctgtcaagcaacaggtgaaagatgctaaatttcctgaataaagggttgttcgcatgctatgggatgtgctgatggaggctgttcaatggtctgggaagaaaccagcacaaaattctaattcagcacttcgcaggtgaaagcatgggctggccttttgaatgcattctgcacagtggcaagcttgaac

SEQ ID NO: 8906 - DNA, 324 bp, Oryza sativa
  Clone ID: uC-osflcyp111a06b1
tcttttttgatttaagaattgtttggtctggtgattagaagagaagagagtagattcttaagaggcctgccaatatggtccagtggcttgactttacccggtaccccttttgctttagtactgacttataatggtggtacaaaggatttacctgaatttttggtctggcaaatagcggtttgtgatatctttcttgggtgaaaaaactgaaaaaaaaaaaaaaaaaaaaaaaaaaaaaaaaaaaaaagggcggacactgtgggggcgccaagattactcccaggtgccttccccgtgcaagctattctatagcgttcctttagt

SEQ ID NO: 8907 - DNA, 453 bp, Oryza sativa
  unsure (1)..(453): unsure at all n locations
  Clone ID: uC-osflcyp111b01b1
cacatcgcgaggttcttctttggagtttccggcaatgtcatcgctctcttcctgttcctttcgccagttgtcaccttctggaggatcatcaagaagagatcaacggaggacttctccggcgtgccttacaacatgacacttctcaactgcctgctatctgcttggtacgggctgccgttcgtgtcaccgaacaacatcctggtgacgacgatcaacgggaccggggtcggtgatcgaggccatctacgtgggtgatcttcctcatcttcgcgnagaggaaggccaggctgaagatgatgggtctcctgggcctcgtcacctccatcttcacaggggtgggggctcgtctccctcctggccctgcacggccagggccgcaagctcttctgcggcctcgccgccaccatcttctccatctgcatgtacgcctcgcctctctccatcatgaggctg

SEQ ID NO: 8908 - DNA, 324 bp, Oryza sativa
  unsure (1)..(324): unsure at all n locations
  Clone ID: uC-osflcyp111b09b1
gaaggtgggcgcgtgtgcgggccccgccgcggaattcggggcgacgccacacgcgcgctgatatctatgctaccaagaactcatagtccgctgtggctcgactcttgtctgatgtctccttgcggagataccatgtctcgtgctagcacgggaaagaggggtgagggatgcatgacgctggggagggaaaaagggagcttgtgagaggagagagaaagcagagtggagggcatagagagcttacgcttgccagtctacttagttcctgtgccgacatggcnggctgctaatgaggctactcagcttcatgcttacactgttaga

SEQ ID NO: 8909 - DNA, 514 bp, Oryza sativa
  Clone ID: uC-osflcyp111b11b1
tctaagcaagaagagacgagacgagggagagaaggagaagagggggccggccgcgggcgtcgccgggatcctccccccctctctctcctctgctctcctctcgatctccatacttccttccatacattcctccccgcacccttcgcattgctctcgtcgtctcgattcggtcgaggatctccaggaaaagaggaggaagcgatatgggttgcttttcatgctgcggagcggatgatgtcggcaagaagaagaagcgcgacgatccttacgtcccgatccctgatccaggtggtaactatggacgtagcaagcccgggcccccagccccttcgcgttctccccccaccagcagaaatctgccaattgcagtaccggcaattccccttgatgaaataaagggaataaccaagaacttcagcagtgatgctctcatcggagaaggctcgtacgccagagttttctttggtgtgctgagagatggcaggaagatctgcgtgaagaagctcgactccag

SEQ ID NO: 8910 - DNA, 465 bp, Oryza sativa
  Clone ID: uC-osflcyp111c01b1
ttcaccgccgccgccgccgccaccaccgttgccgttgccgcctccaccacccgccctcgaccacagccatgccgccgaagctcgacccgacccaggtggtggatgtgttcgtccgcgtgaccggcggtgaggtcggcgcggcgtcgtcgctcgcccccaagatcgggccgctcggtctctccccgaagaagatcggagaggacatcgccaaggagaccgccaaggactggaagggcctccgcgtcaccgtgaagctcaccgtccagaaccggcaggccaaggtctccgtcgtgccctccgccgcggcgctcgtcatcaaggcgctcaaggagcccgagagggaccgcaagaaggtgaagaacatcaagcacagcggcaacatcagcctcgacgacgtcatcgagatcgcgagggtcatgaggcccaggtccatggtcaaggagatggccggcaccgtaaggagat

SEQ ID NO: 8911 - DNA, 471 bp, Oryza sativa
  unsure (1)..(471): unsure at all n locations
  Clone ID: uC-osflcyp111c03b1
tctcaaacacaaccaatccacctccgattccttcatccgccgccaccgccgccgtcgccgccgccgggatcccgcccgcaaccgcaccgcggcggctccttcccttcctccaggtaccaaccagattgtgggatcttcctagagagcgctgttgtcctgcacgagtagaatagcagatggcgaggataaagccgaagcaattgctaattcaaagcaagacgaagaaggccccaacacggatcagttactccactatcgttacttggaacctaattgttatctttggntgcgctatccctctatgctacctacaggcattggcatcacaggccaatgctcgagactgaaatgggatctccctcgtgctgagcatgttggaaagatctgaaggattccacgaagactagtagaccaagctatgcgggtattgatactgccaaaggctcaattactatagaaatttacaaagat

SEQ ID NO: 8912 - DNA, 516 bp, Oryza sativa
  Clone ID: uC-osflcyp111c04b1
atcggagccccctcccctcttcgatggaaccaccaggttgtacgttgcgtaccactgcccttacgcgcagcgcgcgtggattgccaggaactacaagggtttgcaggataagatcaagattgtcgcgattgatcttgcagacaggcctgcttggtacaaggagaaggtttacccagagaacaaggtaccttcacttgagcacaacaatcaggtgaaaggagaaagcttggatttggtcaagtacattgacaccaatttcgaagggccagcattactccctgatgattctgagaagcagcagttcgctgaggagcttcttgcgtacactgatgcgttcaacaaagcatcgtactcatccatagtcgccaagggagatgtgtgcgatgaggctgttgctgctcttgacaaaatagaagctgctctgtcaaagttcaacgatggcccattcttccttggccagttcagcttggtggacattgcgtatgttccatttattgaaaggttttagatattttt

SEQ ID NO: 8913 - DNA, 221 bp, Oryza sativa
  Clone ID: uC-osflcyp111c05b1
gtcgcgctccacctcccagcgtcttcggcggccagccaccggcggcttctcagcttcgccttcgatgaggacgtcacaaagcagcccgaagtgaaccgttcgtccgggaacagcctccggcggcttctcagcttcgccttcgatgaggacgccacgaagcagcccgaagtgaaccgttcgtccgggaacagcctccggcggcttctcagcttcggcttcga

SEQ ID NO: 8914 - DNA, 423 bp, Oryza sativa
  Clone ID: uC-osflcyp111c06b1
tgcagccatggcgtcgtcggtggcagcggcggcgagcacgttcctggggacgaggctggcggacccggcgccgcagagcgggaggatcgtggcgaggttcgggttcggcggcgggaagaaggcggcggcgaagaaggcggcgaggccgtcggcgccgacgacggacaggccgctgtggttccccggcgcggtggcgccggactacctggacgggtcgctcgtcggcgactacggcttcgacccgttcggcctcgggaagccggcggagtacctgcagttcgagctggactcgctggaccagaacctggccaagaacaacgccggcgagatcatcggcacccggttcgagaccgtcgaggtgaagtccaccccgttccagccctacacgaggtgttcgggcttcagcgcttcgcgagtgcgagc

SEQ ID NO: 8915 - DNA, 463 bp, Oryza sativa
  unsure (1)..(463): unsure at all n locations
  Clone ID: uC-osflcyp111d01b1
tccttcttccccgtaaccccacgggaaggcgatccatggcggcggcggcgggttggctccggcgagcggcagcggcggcggcggcgcctcgcctgccttcaggccttcctatactacctactccccctccagcccctctcacagaggcccaatcgttcgtgctcccgggcataggcaccgccgtcgccggcggcatggacctcatggccgttcccaagaaaaaggtctcaaaatacaagaagggtttgaggaatggaccgaaagcattgaagccggttccagtgattgtccgttgcaggtgctgtggccgagtgaagctgccccacttctactgctgtagcggagaaaaagggaaccccggcgactcaagctcataaacctgttctgtttctccccagttcagtctgcactcagcacatcaagcaatgtctgaacactattccacctgaacgttntcagatct

SEQ ID NO: 8916 - DNA, 515 bp, Oryza sativa
  unsure (1)..(515): unsure at all n locations
  Clone ID: uC-osflcyp111d02b1
tatctagctaggtgatactgggatgtgttttgccaactgatcatgtatgagttcaaagagtaaggtggatttgttaatcacaaatgaaaatttagggtgcatctcaagcattggcgtgataaaaaattcagagaagagtaaaactgatggtgagataggtaattttggttccctgtattgatctttcattactcaccgtaaaagacatgatggtaaaaatatagtttactcctaatggttcaaaaaagttctggatgcattgcatggcgcacaatcctttgattcggcctaataattgtatagngagttgactaatagtaatataacctaattttgcattatttgtactatattttagttttttaaataaatgttttcctttgatgggtctatttctaaatgcagagagtgcatgcttatccacagtcaatatatgcagagaacaggttgattatatatgaaattccagcggaaatttttcgagggaaatttgacaggccagaactatttgtatg

SEQ ID NO: 8917 - DNA, 513 bp, Oryza sativa
  Clone ID: uC-osflcyp111d07b1
tgtcgctgggcgtaggacacctgaatcccatggtggagctggccaagcacctgcgcctctcacggcctcggcgtctatattaaaatatctattgccttcaatacttaaaatattaataatataaatatataattattacaaattcaaaattaatataaaattacagatatataaaattaatatataagtataataatatctaataatatttcttaataaaaaaaattttaaattaaataataaattataaaaatttacataaaacaatataaaataattaataaaaatttttataaataattaaattattttactataataatttttaataaaatattaattttttaatataaataaaaaataaaactattctataattaaaataaataattttattattgtttttttttaaattaaataataaaataattttataattaattataaaacattattataaaattaacattatcataaataatatttactatctttaattaaataataattaaa

SEQ ID NO: 8918 - DNA, 456 bp, Oryza sativa
  Clone ID: uC-osflcyp111d08b1
ggcaccaaatccccccaccatggatcaccgcctcctcctcctcggcctcctcctcctctccccggcggtggccgccgcctcagtccccggcgaggaggagccgctgatccggcaggtggtcggcggcggcgacgacaacgagctggagctgaacgcggagcgccacttcgccagcttcgtccagaggttcgggaagtcctaccgtgacgccgacgagcacgcgtaccggctctccgtgttcaaggccaacctccgccgcgcgcgccgccaccagctgctcgacccctccgcggagcacggcgtcaccaagttctccgacctcaccccggccgagttccgccgggcctacctcggcctccgcacgtcgcgccgcgccttctgcgggggctcggcgggtccgcccacgaggcgcccgttctcccaccgacgggctccccgacgacttcgactggagag

SEQ ID NO: 8919 - DNA, 452 bp, Oryza sativa
  unsure (1)..(452): unsure at all n locations
  Clone ID: uC-osflcyp111d10b1
tcgattgaaacttgcagggaggaggagggcctgagccggaggaggaggaggcggtggcgcacggagagcagtggccgcggtggctgagcccgctgctctcggccagcttcttctcgcagtgcaaggtgcacgccgactcgcaccggagcggcgagtgcaacatgttctgcctcgactgcgccgccgacgccgacgccgccgccgccgcgctctgctccctctgcctcgcccacaaccaccgcgaccaccacaccatccagatccggcggtcgtcgtaccacgacgtgatcagggtgtcggacatccagaggttcatggacatcggcggngtgcagacgtacgtcatcaacagcgccgggtggtgttcctcaacgagcgcccccagcacaaggccggcaagggcgccgtcgccaacatctgcgaggtctgcagcccgagccttcttgacaact

SEQ ID NO: 8920 - DNA, 506 bp, Oryza sativa
  Clone ID: uC-osflcyp111d11b1
tcggcatccgactccgacgccgccgcgcgccaccacccggccgatcgccgacgccgcagccgctggaagcagcagggacgacggagaatcggagatggacatcgaggcgttcatccacggcggaagcgggggcggcgacgccgacgccgaccacccgctcggcatcttctccgccgccgacctctccggcttcggcttcgcggactcgagcaccatcacagggggcattcccaatcacatatggccccagtcccagaacctgaacgcacggcatcctgcggtctccacgacaattgagtcgcagtcatcaatctgtgcagcagcaagtcccacatcagctaccaatctgaacatgaaggagagccaaactctgggaggcacaagtggttcggattctgaaagtgaatcgctgttggatatagggggtggtccatgcgaacaaagcacgaacccgttggacgtgaagagagtgaggaggatggtgttcaatcgggagtctgctcgcg

SEQ ID NO: 8921 - DNA, 400 bp, Oryza sativa
  Clone ID: uC-osflcyp111e01b1
taagcgaattgagagtgctggtggggttgttatgtgggctggaacttggagggtaggtggtgtacttgcaatgtctcgggcatttggcaaccgcttgttgaagcaatttgttgttgcagatcctgagattcaggaacaagaaatagatgatgaattggagtttctgattttagctagtgatgggctgtgggatgtggttccgaatgaggatgctgtttcactcgtgaagattgatgaggaacctgaggcagcagctcggaagctgacagagactgcattttcccgagggaagtggtgacaatatcacatgcattgtcgtgaaatttcaacatgacaagatggacggtgattcctcaccaacaagcgataaaagctgattcatttgttgtttgtatacatg

SEQ ID NO: 8922 - DNA, 464 bp, Oryza sativa
  Clone ID: uC-osflcyp111e05b1
ggcgtacgtgctaagctgcagcacaacccaaagccatatatctccgataatggcgaactcaccgacgctgacaatgctggtgttcctagctattgggctatctctcgtcctctccgcagccggcgtgtctgtggagagcgtggtcaccgaggcgttcttcaacgggatcaagaaccaggccccgaacggctgcgccggtaagagcttctacacacggcaatcgttcctgaacgccgcccgctcctactcgggcttcgccaatgaccgcaccaacgacgactccaagcgcgagatcgctgccttcttcgcgcatgtcacacacgagactggacatatgtgctacatcaatgagataaatggggcaaacatggactattgtgacaagagcaacaaacagtggccgtgccagccggcaagaagtactacggacgcggaccgctgcagatctcatggaacttcaacta

SEQ ID NO: 8923 - DNA, 417 bp, Oryza sativa
  Clone ID: uC-osflcyp111e06b1
cccagctcgcgctcccctcgccgccgcagccgccgccgcctcgcctcctcggagatcttcgctgcccttccgtcaacatggggaagacacgtggtatgggagctgggcgcaagctcaagacccaccgcaggaaccagagatgggcagacaaggcctacaagaagagccacttgggtaatgagtggaagaaaccctttgctgggtcatctcatgccaagggcatcgttctggagaagattggtattgaggccaagcagcccaactctgccatccgtaagtgtgctcgtgtgcagcttgtgaagaatgggaagaagattgctgcctttgtgcccaatgacggttgcctgaacttcattgaggaaaatgacgaggtgttgattgctggatttggtcgtaagggccatgctgtgggagata

SEQ ID NO: 8924 - DNA, 395 bp, Oryza sativa
  Clone ID: uC-osflcyp111e07b1
tctctttgaggtgggttggcttctcctccccctctttaccttttcctcctcggttcggttccgtggttcgtctagggtttagtgggttgagatggcggcgccggatgtcgagtaccgttgcttcgtcggcggcctcgcctgggccaccgacgaccgctccctcgaggccgccttctccacctacggcgagatcctcgactccaagatcatcaacgacagggagacggggaggtcacgtgggtttggcttcgtcaccttctcctccgagcagttgatgcgcgacgccattgagggcatgaacggcaaggagctctgacggccgcaacatcaccgtcaatgaggcccagtcccgccgctccggcggcggaggcgggggctaccgcggcggctgtggc

SEQ ID NO: 8925 - DNA, 473 bp, Oryza sativa
  Clone ID: uC-osflcyp111e08b1
cgtagtactatttcgcttcgcctctcctctctacctccgtcgccgtccggttcctttctcttcctccaagtaaactcggtctccgccgcctcctccgccgccgcgccgccgattcgcagccatgccgaccgtaagcgtgaaatggcagaaggagaccttcccaggcatagagatagacaccagccagccgcctgttgtctttaagacccagctatacactctgactggtgtaccacctgaaaggcaaaaaattatggtgaagggtggaatattgaaggatgatgcagaatggtctactttgggagtgaaagatggtcaaaaattgatgatgataggtacagctgatgagattgtgaaagctccagagaaaggaccagtatttgggagggatctaccagaagagagcaagtgggtgcactgggacacagtgctgggctttataacttggggaatacatgttacatgaattccac

SEQ ID NO: 8926 - DNA, 513 bp, Oryza sativa
  unsure (1)..(513): unsure at all n locations
  Clone ID: uC-osflcyp111f03b1
ccttcctcctcatcctccccaaccactgcatccgggtcggcgtcctcctcctcctcctcctcctcgcagaatgcaacgggcaattcaagctatcgggtcacatggcagtctcctcaagtctgctgttctgcgacacatcagtgctccaaaaccatctattttacctgctgtatattcacgctccatgtcagtttcatctgctcaaatagaggagagtggatttgagactgccactgtggcagatattttgaagtctaaggggaagagtgctgatggatcttggctctggtgcactactgatgactctgtctatgatgctgncaaatctatgacgcaacacaatgttggagcttgggggggttgttaaacctggacaggataaatcaattgctggtattgttactgagagagattacctcaagaaaatcatagtgcagggacgatcttccaagtcaactaaagttggagaacatatgactgaagagaaccagctgatcacggtgaagcctgata

SEQ ID NO: 8927 - DNA, 380 bp, Oryza sativa
  Clone ID: uC-osflcyp111f07b1
tcgctcctctcctgccccccacggcggcggcgggatggcggattcgacggcgaggacggtgaaggacgtgaaccctcatgagttcgtcaaggcctactccgcccacctcaagcgctccggcaagatggagctccctgagtgggttgacatcgtgaagactgcgaggttcaaggagctccctccttatgatccggactggtactacacgagggctgcctcgattgcaaggaagatctacctgaggcagggtattggtgtagagtggcttccagaagatctatggtggccgccagaggaacggttcacgccccccgcacttctgcaagagcagcggcgctatctcacgcaacattctttagcagctgtagaagatgggcata

SEQ ID NO: 8928 - DNA, 433 bp, Oryza sativa
  Clone ID: uC-osflcyp111f10b1
gcgggaccggaggagcctaccgcgcgtctcgccgtctcagctccgcaaggcttgcagccctgccggagatgcagacgacgaccgtgcccatggcggcagcggcggcggtggcgccgtccaccaccacctcctcctccgcctccttcaaggttgcggcctatgcttggtcgtcatgccggagcagctcctctccggcgacaagattggtcgccgcccccaatcaccagcgaccaccgctagttgttggagccattgccggcctggatccggttaccgcggtgcagctgccattaaccgctgggaacgtcgagtctgttctagatcaagtgcgcccttacctgacggcagatggagggaatgttgcccttcatgaaattgccgggaatgtggtgaggctgaagcttcaaggagcttgtggatcgtgcccaagctc

SEQ ID NO: 8929 - DNA, 478 bp, Oryza sativa
  Clone ID: uC-osflcyp111g07b1
tcggtggactcctctctcctccccttccctcccctcccccgcgcgcggtggtggttcgccggagcgcagcagcagcagcagcaaaaggccgcgagggccgccgtcgggatccccgccgccgccaagatgaacgacgccgatgtcgccaagcagatccagcagatggtgcggttcatccgccaggaggccgaggagaaggccagcgagatctccgtctccgccgaggaggagttcaatattgagaagcttcaacttgttgaagctgagaaaaagaagatcaggcaagaatatgaacggaaagagaagcaagtcgaagttagaaagaaaattgagtactctatgcagctgaatgcttctcgcatcaaagtgcttaagctcaagatgatttgggtaattccatgaaagaggatgctacaaagcaactcctgcgtgtcagccacacccaccatgaatacaagaaccttttgaaagaactcgt

SEQ ID NO: 8930 - DNA, 446 bp, Oryza sativa
  Clone ID: uC-osflcyp111g10b1
tttagcgagcaaccagccccccgcccccaatggcggcagtagcagctttgcccaccgctgccgcttttgcccacctctcctccgattaatcccctcccctcctcttcctcccacttctccgcctcctcttcctcccctcgccgaccctacctactcgcgccgccgccgtcgcattgggcggcaaacggagggggggttaaccctgatggagcagtacgagacggaggagaagattggggagggcacgtacggtggtggtgtacagggcgcgggacacggtcaccaacgagacgatcgcgctcaagaagatccggcttgagcaggaggatgagggcggcccctccaccggaatccgcgagatctcgctcctcatggagatgcatcacgcgtacatcgacaggttacaccatgttatccacagcgggaagcgcatataccttgccttt

SEQ ID NO: 8931 - DNA, 118 bp, Oryza sativa
  Clone ID: uC-osflcyp111g12b1
cctccgcagatttccgccgtctccgccccacgcgcttgtctgtcttcttttccaccactggcctagggcaagagatcgaggataggagcgtagggaggaggaggagatggcctttgtt

SEQ ID NO: 8932 - DNA, 428 bp, Oryza sativa
  unsure (1)..(428): unsure at all n locations
  Clone ID: uC-osflcyp111h03b1
ttaggacggttcacatgagctgcagtctgagtgtgggcatcatgggcacatattggctttgtacactcagactcgtggcgatttcattgtagttggagacttgatgaaatcaatatccttgctcgtgtacaagcacgaggaaagtgcgattgaagagcttgctagggattacaatgcaaactggatgagtgcagttgagatgcttgatgacgagatctatattggagcagagaataactacaacattttcactgtgcggaagaaacagtgatgcagcgacagatgaagagaggggcaggtggaggttgttgnnagagtaccatcttggagaggtttgtgaatagactccggcatggttcggtggtaatgcggctttccgactcagagatgngccagatccgaacggttatctttggcaccataacggg

SEQ ID NO: 8933 - DNA, 439 bp, Oryza sativa
  Clone ID: uC-osflcyp111h07b1
tctgttcctcctccagaagagctcctgaatctggaagagatacgggaaagaagacttactgatcctcgcttcccaatgcaatataggaactcagctgccaagaaaaagttcgtaccttggcccatagaaatgaggttttgtgaagattcagcatctcaacataaaccaagcttaaattattggtttagagccagaggaaaactttctgatgatccagcactgcataggtgtgttgtagcatatgcttcggatctactatattctggtgtcagcctaaatcctcatagggagaagggtctgaagacatactcactcagtcttgatcactcgatttggttccacaagcctgtgaaagctgatgattggctttatatgtgatcgacagcccatctgccacggtggcggggttttgttacagggcgaatgttcaaccgacaag

SEQ ID NO: 8934 - DNA, 384 bp, Oryza sativa
  Clone ID: uC-osflcyp112a01b1
tcgagccctagctctcccctatccctcggcggacgcaccaccaccaaccatggccggcgcgcaggagtctctggtgttggccggcgtgatgcacggccacaacgacgtggtgacggccatcgcgacccccatcgacaactcgccgttcatcgtctcctcctcccgcgacaagtcgctgctggtgtgggacctcaccaaccccgtccagaacgtcggcgagggcgccggcgcctccgagtacggcgtgcccttccgccgcctcaccggccactcccacttcgtccaggacgtcgtcctcagctccgacggccagttcgcgctctctggctcctgggacggcgagctccgcctctgggaccttttcaccgggggcaccacccggcg

SEQ ID NO: 8935 - DNA, 108 bp, Oryza sativa
  Clone ID: uC-osflcyp112a05b1
tataataagagtaagcgcaagcaggtgtggggtacattatatagagtactcgataatatgtcaacggatgacttgcagcagggattactaaatatgtaaccgaaaaat

SEQ ID NO: 8936 - DNA, 276 bp, Oryza sativa
  Clone ID: uC-osflcyp112a06b1
tgttcattggggcgagcgccgcgagccgtggcgaagccaaaccagagcactccgtcgtcgcgccatgggttacccgggcccggcctcctgacctcttccacccgcagcatcaacaccagcacccgcttaccccgcacccgcagccccagtaccaagccccaccgcctccgatgccgccgccgtcccccgcggcgccactcaaagctatcgatctggaggtgaccgtcgtctcgggcaagcacctgaagaacgtcaactggcgccgcggcgaccttc

SEQ ID NO: 8937 - DNA, 222 bp, Oryza sativa
  Clone ID: uC-osflcyp112a08b1
tgattaaaaagaaaatcacggcgcgcgagcttgcatagacagcaatggcgagagttgctgccgccgcggcggtgctcgagctggcggcggcggcggcggcggcggcggccatggccgcacgagccgcccaccgatgaccgcgcggtccgcccgagcgcagagctgacgaacagctccaaccggacggggtaacaaggagacctactgcttgctcggctacta

SEQ ID NO: 8938 - DNA, 290 bp, Oryza sativa
  Clone ID: uC-osflcyp112a09b1
tcgttctcatacgacatccaacttcaagagaggcctttatgtgtgagatagagagatatcctattgaggacgggcccagtctcccctcctgctagatacaaaggcgacgttcctggcgcatgctcatggcggcgtgctgctcatcgtaatgtgagaacgacaggacagggctgtggcctgctgctgctgccgactcaagtgctgtggattatgcctccagtggccacaataagactggccagggatcgctcatttgaggaccctgagctggcaccctttgatggatagaa

SEQ ID NO: 8939 - DNA, 284 bp, Oryza sativa
  Clone ID: uC-osflcyp112b03b1
tacaaaatggccaacgaggccatcctaggggtgctttttctgcgcctacagaaccttgaccggggtcttccacaaaaccctcgccgagtcgtcggactccgccgtcgtccccatcgcgaactactcgcaggctactgcttcggccatgaggggcttggatccggaccggggcggaggctagccgtacatactccaagctcttctgacactacaacgccctctactttcacgtactcctacgcacctgcgccgaattctgggccaccgactaggatccactcccc

SEQ ID NO: 8940 - DNA, 426 bp, Oryza sativa
  Clone ID: uC-osflcyp112b04b1
ttattctcctccttcccctgcgcctcctccaccgaccgtgttgacggcgcgcgcgtatatcccctcgccgccgtcgtcgacgacgccgtctactccgtgtgaggaccggattggttgaaaggctgatcgaggtgcttttattgctaactggagcagattgtgcagtttctttctttctctatgagaattctctcagtttgttgggcaggctcttgagctaccaagtatgttagcttcaaatgagaagtggattgatgggctccagctctcatgactgctctggcccccaccacaggattcacaacaaatacaggcacaaattctggcctatgctgagtactttggccagattacagctgacagcgagcaagtccctgaagatatagtctagctaattcaaagctgctatccatcaaaagaaaagcg

SEQ ID NO: 8941 - DNA, 279 bp, Oryza sativa
  Clone ID: uC-osflcyp112b11b1
atcggagactgatgacaaaagatcaggctgagatggtttttagggggccgacccgtttctcacatcgcgatgttggccgatctgtcgaagcaggtggcctctggagctcaatacgcgattcgataaattcgttaccgggacctgcccagtggatctcgtcctctaggagtggcacaggagctccctgagacgaggactaggcggtgtggagagggcatagggggcggggctgtaccacgtcaagcacgtcaagagcggctactatgcttacgttactac

SEQ ID NO: 8942 - DNA, 384 bp, Oryza sativa
  Clone ID: uC-osflcyp112b12b1
tgtgtgcgcatagatgagaataaatatgggggttatttgaatggcccactagtttgagtactacggaaacgggagtgggtcgagagtaagccgggctttgactgttccagacgacgacgccgccgccgcgtggagaggaggaggaggtgaggagggcggtggcggagtgcccggatggaggtggtgggtcggagcgggtgctgcctgagccgggtggcgaatcggatgctgcaagggttcggtgccaacccgggggagcacgaggttttctggtgaggccgagctagtcaatgtgagtggccggcggttgtagacgtccgctgtgggaaaactttgctgtccccaggtttatcggcgtgctcgaccatctcattgtcgtgcaca

SEQ ID NO: 8943 - DNA, 512 bp, Oryza sativa
  Clone ID: uC-osflcyp112c01b1
ttgtccgcagccgcatcggctgccagccagcccagcgcggcggtggccaacggcaaggtggggaagaagcccgcgctgtcgcatagcgcgtcgctcccggcgagaggggcggctgccaagaaggcggcgacaccaaagcacgccaagacgactgacgggaaaggcgctgcgcccaatggatcggagaaggcggctgggcgagccgtggagaagaaggcgaattcagcccggacgcctgccgcaagccgctccttgcctgataaatctggatcggtggacgcgcctccaaatgatgcttttcctgaaacccaagagtcaaacgagaacaccacaaatgctttggaacagactatgccagagaaaatggaggatgatgtgcactccaccacatcgagtaccaatacttcccgagcaggctgctaacgcaagaatgctgctgctgctgctgcctttagcttcaggctgcaagaacgtgcttagaagaagaaggagttctaccaaaacttgaagag

SEQ ID NO: 8944 - DNA, 400 bp, Oryza sativa
  Clone ID: uC-osflcyp112c05b1
tcttctcccagttctccactgaaccgtcgccaccccccgccgccacccccttgcattgtgtagcggcggcgcctccgccatctctcctgcgccgtggacccccattctcgagctggacgcggtggcacgccttcaccttccttgggtagcgactcctcctcatcctccccctctccaaagctccatcgttgacccctctcccaccccttcctgtgcattcggccagaaccagccaatagaagctatggccatggcatctggctcccctgagcttcgcggagtggagaggccaaggaggggaggcctgcactagtatcttcctctcccaagcaccattgctgacagctctttctgcgccttccggatccggccggatctaggcttcatcgagttggggact

SEQ ID NO: 8945 - DNA, 246 bp, Oryza sativa
  Clone ID: uC-osflcyp112c07b1
actgattggcaccgggcctgtgggtcgtgttgagactggtgtcctcaagcctgggatggtggtgaccttcggtcccagcggctctgaccactgaggtcaagtcggttgagatgcaccacgaggctctccaggaggatctagctggtgacaacatcgggtctaacgagaaaaacagtgcggtgaaggatctgaaacactgtgtacgtgggccttcaactgcaaggatgaccctgcctaggaggcatg

SEQ ID NO: 8946 - DNA, 539 bp, Oryza sativa
  Clone ID: uC-osflcyp112d07b1
tttgaagaattcagatatttatgggccctggaagcggaaatgtcttgctgaatttgggattattacacaatgtgtggcccctactagggtcaatgatcagtatattacaaatgtactgttaaagataaatgcaaagcttggtggcttgaactccctgcttcaaattgaaacatccccttccattcctcttgtatccaaggtcccgacaataatattgggaatggatgtttcccatggatcacctggacagtctgatataccttcaattgctgcggtcgttagttctcgtgaatggcctcttgtatcaaaatacagggcttcagtccgttctcagtcacctaagttagaaatgattgatggactatttaagccacaaggagctcaggaagatgatggcctcattcgggagttattagttgacttctataccaggactgggaaacgtaagcctgaacaagtcattatttttagggatggggtcagtgagagcccagttacccaggtgctgacattgagctgatcaaatattgaggcatgca

SEQ ID NO: 8947 - DNA, 447 bp, Oryza sativa
  Clone ID: uC-osflcyp112d11b1
tgttggtgaattactacttgagtagaagtggtacaagaagagtcgtcgtctacctgtgagcgaattatttcgaggttgtgcgttgcgatgatgggaggtggtctggtgatggaccagggcatgatgttccccggcgtgcacaacttcgtggatctcctgcagcagaacggctgcgacaagaacctctgcttctgcgcgctcgtgccgcagacgtcgtcgggggagcagtgcgtgatgggggagggcgacctcgtggacccgtcgccggagagcttcctggacgccggtgaggacgacagcgacgacgacgtggatgacatcgaggagctggagcgccgcatgtggcgcgaccgtatgaagctgaagcggtttatggagctgcagctgagccgatgcaaggaccccgtgggcggtgtcgtgggcgacccgtccaagccgccgcagtcg

SEQ ID NO: 8948 - DNA, 535 bp, Oryza sativa
  Clone ID: uC-osflcyp112e05b1
ttgttagccaacatgttctcggagaggcagccgatcggtacggcggcgcagggctccgactacaaggactacaaggagccgccgccggtgccgatgttcgagccaggggagctcaagtcgcgggccttctaccgcgcaaggatcgccgagttcatggccaccttcctcttcctttacatcaccgtcctcaccgtcatgggggtcaacaactacacctgcaagtgcgccaccgtcggcatccagggcatcgtctggtccttcggcggcatgatcttcgacctcgtctactgcaccgacggtatcttcggcggccacatcaacccggacgacaccttcgggctcttcctcgacaggaagctgtccctcaccagggccctttgctacatggagatgcaatgcctcggcgccatctgtggcgccggcgtcgtcaagggcttccaaaagggcctgtacgagaccaccggcggcggcggcaacgttaagaagcccggctacaccaagggtgacggcctcggcgccgagatcgttggcacct

SEQ ID NO: 8949 - DNA, 169 bp, Oryza sativa
  Clone ID: uC-osflcyp112f03b1
taactttcttcctcctcctcgacttcaggactcaattcgtcttctgatagctcagcttgatcggggcggatgacaatgggaggtggcagggccaagcacgacgagagcgaccaggggcttttttttaacatgatgcacggcgctgcccggcgacatgggtatcctcctc

SEQ ID NO: 8950 - DNA, 426 bp, Oryza sativa
  Clone ID: uC-osflcyp112f05b1
tgcgaagcgaccatggccatccctcccctcgccgtcagcggggtcgccgacgccaccctcgccgtgctcggcctcgccgtcttcgcctgccgacggtggcagcaggaataccatgagttataacacacattttgtgtaagacagtcgtactccaattttgaagtacatatcaaaggagaatgaaccagaaatgaagcctccaatatatgataaaaagggagtgagaccacataaaaaataggaagaaagcaccacattaggaacaggaaaaaaatgggactaaaatgtacaagcatgatgtggagatacactgctatttctgcaaagagcctagacataacaagaaagggtgcccactgaaaaaggctagacttatacccaaactgaagacaagtaggatcctagcttgccagtataaaaaagagt

SEQ ID NO: 8951 - DNA, 88 bp, Oryza sativa
  Clone ID: uC-osflcyp112f10b1
ctgtatcgatcatccgacgatcaaatcagtaatcttgaatatggcgcctttgaacggtaaggtggtggtggcggcgatggtggagccg

SEQ ID NO: 8952 - DNA, 327 bp, Oryza sativa
  Clone ID: uC-osflcyp112g01b1
tcttataattccctagattaaacgaaccactaaccaaattgactacagaaggtggtgaatataccactgttaatgactcaggagatatcacacctgttcaggagtatacataacatatgaacgcaacccaacctattcctgagacctttagcaatgacttttctgacctaaatttcagcttgaagggaaatgtcaaaatgtgcgaagagaaatgttctgatgaactcgaagattctactgcttcagatgaaaaaacaaaatggcgtgatgactttgaccatcatgcagtttcggagttgcaacatggcccttttgacaccaagatga

SEQ ID NO: 8953 - DNA, 484 bp, Oryza sativa
  Clone ID: uC-osflcyp112g05b1
tgttagccaagatcaagagatcgatcatatcgtattttgtagtaatttagcagctagctagtgcagctgcaagctattagcgactgcatgctttgatcgatccatctagctaattgttgaatccatctaagcttaatggctctgcagcagagcatggcgatgccgatgatggtagtgtctgaccttggcaccgctcctcggtcatcgccgatggttcagctgcagaggatgaagaagcatctggtggtggtggcggcgttcaagagcagaaccaaggcttcccccaaggtggacaagtcgaacaagaacaagtcgatcgtggaggacggcatcttcggcacctccggcggcattcgggttcaccaaggagaacgagctgttcgtggggagggtggccatgctggggttcgcggcgtccctcctcggcgaggcggtcaccggcaagggcatcctggcgcagctcaacctggagacgggcatcccc

SEQ ID NO: 8954 - DNA, 294 bp, Oryza sativa
  Clone ID: uC-osflcyp112g08b1
tgtgttagtgctagatgatgagagcaaagctcatgtaactgattcagagcccatgagcaaaatcgaagaagagcttgaagctgagcttgcgagattggaatgaaatataacttcaaactgcttgaaagaacaaacatttgactccagggaggctgaacaggatctcattggagatattgtccagggagaactgaagatcgatacaacccattgtgatctttgctgaccacagctgtgagagtgcccatggaagggatagtagagaaagctccccagattccacacatggatgca

SEQ ID NO: 8955 - DNA, 465 bp, Oryza sativa
  Clone ID: uC-osflcyp112g11b1
tgttgtcttcgtgaaatccgcaagtaccagaagagcactgagctgctcataaggaagcttccattccagaggcttgttagggagattgcccaggattttaagactgatcttcgtttccagagccatgcggtgcttgcccttcaggaagctgccgaggcgtacctggtgggtctcttcgaggacaccaacctgtgcgccatccatgccaagcgtgtgaccatcatgcccaaggacattcagctggctaggaggatccgtggtgagagggcttaggctttctcatctctgggaggggctctggtgtttcatctgtgactacttcctgcttttgctgctgaactcttatttggggtcgtgaatggtgctaatactactcacatgtagtagtagattgctagtgaaggactctgtttctgtgttccagaactggatattatgctagtaagttgtttcgactggtgattt

SEQ ID NO: 8956 - DNA, 57 bp, Oryza sativa
  Clone ID: uC-osflcyp112h01b1
tgtttacagagggaggactacaacatgaggggggtaggtgttatctggagggggatt

SEQ ID NO: 8957 - DNA, 85 bp, Oryza sativa
  Clone ID: uC-osflcyp112h02b1
taaaaagattgaagaacaatccaaaaaggaggtatttatgtgatctgtgcgcagattgacacttgaacacagacatggcgagcat

SEQ ID NO: 8958 - DNA, 452 bp, Oryza sativa
  Clone ID: uC-osflcyp112h05b1
tttgattacctgctagctccttgagcaatatcaatatggctcagccgacttggtcagcaaggcgcgtcactgccgccctggtcgtgatggtggtggtggtggtggtgctcgtcgtcgccggcgggtcgtgggcgcagctgtctccaagcttttactcgctctcgtgcccgggagtgtttaacgtggtgaagcggttgatgcagtcggccattgccagggtgaagcgtattgccacctttcatcgctcgcctttctttccacgactgattcgtccaaggctgcgacgcatcactgttgtcgtactacacttctagcctttactggttagaagacggtgaactttaacaacggtctcgtcagaagtgtatgaggcgatccactccatcaatgtttcggtgtagaacttttgccctgacgtcctttcctgaaccgtctattccttagccttttct

SEQ ID NO: 8959 - DNA, 435 bp, Oryza sativa
  Clone ID: uC-osflcyp112h07b1
gaaggcctcctctatggaggctaactcaccagtctttctggctgattctgttgctgcaagcggcactcatagcagaggaaataatttgtcagacagtaagaaccgcatgacaccaaatagagggaaaaatcagcgtaacaagggcataagcattatcagcttttctgaggaaggtgagggtattccctcgagttctactggtggttcggctcgttgtagttctagtttgcggcacatctggaaagttggaccaagataccgttctacttaccttgaaggataaacttcggaaggttggggcaacttttacatgagaaaaaattgaggggggaaaacttttccaagctcattttgaagccatgggagcaaagacgaagtgttcatttcccttatccagtcctttggatgaaaacactgatgttgggaagaagccct

SEQ ID NO: 8960 - DNA, 217 bp, Oryza sativa
  Clone ID: uC-osflcyp112h09b1
gatggaggagacagaaaacacctgatccagcgtgtatctttgaggtcgtaggagcgtatatccagtagtgcctggtgcaagaggaggcctgggccagaatttggtgataagggcacgttaccaaatcacttgttgtgcgagatccagggccaccgccttacctgcgctgccattggcagggacgacgaaaccttaaggggacagaggcgcgccttta

SEQ ID NO: 8961 - DNA, 440 bp, Oryza sativa
  Clone ID: uC-osflcyp112h11b1
atcgtaaacctaggcttgctcaccattgagggcttccttaattaacatggcgtgttgtccacaagacttatctcactttctatatctatgttatatggaggtgatggattgtgctatggtttactagatagctgatctatcaaaatcaatcctagcattccccaaattacctatcacaggaggtgtgcatggatcggtacaacatatatatatacagtaggttagttttgttctgttgtgtcaacacagagtcatgaggaatgttagatgtgttcattctgtgatgctgtctataattctatatgtattaaatttatatgacacgtgagtgcatatatgcaatgccattacgaactgctactatagtctccctgtgtcttcctttcgcatacatggataacacatatggcacaatttaaggcaattgccgttttacaggc

SEQ ID NO: 8962 - DNA, 545 bp, Oryza sativa
  Clone ID: uC-osflcyp115a02a1
agctgcggagtcctctagtagtgggcgccctctttttttttttttggaaggttcacccatcatgcattcaggagtaccgattgattgttgtgtcctgaatttttgctagtatatgcatataagtagatactactccactacagtacagaggagaggattgacattgactagctagtccacttaaccgtctccttactactatcagaagaagctaatttaattaagtggagtaaaagcaaaatgaggggtgggctgggctcattggtcgtcgttgtcgtaggtgacgaacttgccggttccggggttgatggcggcgaagaagaagaagaggatgttgaagaggaggagcggctcgatcttgttgatggggacgccggtctcgatgttgagctgcgccagcgcgcccttcccggtgatgatctcgccgatgagggaaaaggcgatccccagctgcgcgaggcgacccacgaagagctcgttcgccttggtgaacccgaacaggggccacccttcgttagccccagcgccgcccggaacccctttcc

SEQ ID NO: 8963 - DNA, 413 bp, Oryza sativa
  Clone ID: uC-osflcyp115a03a1
ataattaatacattaatattttaatttaaattttcaaatgttaaatttaagtacattaaaattggatatgaggaccaaaaaaaaaaaaaaactttttctatttaaaaaaaaacaaaagcctgacacgatttggtccaaaacaaaaaaatggtggaaaaaaaagaaaatcatctgtcccaaagtacctatccacaaactgaccaatcccagggatgacaaggaaatcatcattcataccaaactcgattactgatgtcacgaacttcactctgggaaatctctagctgaccacatgcacttcttggggagctgatataagaatcacaaaaaggataagggaatcctgaacaccctatttcaagagtagaaacctaggttgaacagctgaatatcctggtcccagtttgggatcc

SEQ ID NO: 8964 - DNA, 515 bp, Oryza sativa
  unsure (1)..(515): unsure at all n locations
  Clone ID: uC-osflcyp115a04a1
aaaaacataaaggaatttgctccgtttatgtcattaggcaagatcggcctgtaatgttcaaccgatacacagtttctggtaatgaatacatcaatatgggcatttgaatttccaaatgtaaaatttaagtttctcaaaaatggagatgatgcccacgtcgtcgccaggactttgtctatttaaatgctcacaaaagcctgacacgatttttctcatcacaaaagaatggtgttgatgactgataatcatctgtcccaaagtacctatccccaaactcacccatcccagggatgacgcggaaatcatcattcagaccaaactcgatttctgatgtcacgatcttcactcttggaaatctcttgctgaccacatgcactccttggggagctgatataagattcagaaaaataatatttgtttcctgtacaccctttttcaagagtagagatatagcttgaacagctgaatttnctgtcccagtatgggatccaacaacagcacatgcctgttgcata

SEQ ID NO: 8965 - DNA, 526 bp, Oryza sativa
  Clone ID: uC-osflcyp115a05a1
gaaacaaggtgaaaggtcgcgtgatttgctattaagtgcaaaatttcaatcagtttcaggcggccacaagtgcttatcatgttacaaggtcctttgaaactcccagcctgaatgactgagacaggttatcaacaggaaatctacgagtatttgattcgaattcgagcatatcaaattcgcacaatgagaaaccaggtgatccattctccagtctaattgctaaattgacataccatgcagcgccggattcgctcagatctcactgatgtactctaaaagagattcgacctcttgcctcagggcagcaactttctgctgctgggcagcaatcctgttctccacatcttgccctcgcaacttcttttcaaagctgtcaaccacagtggaatgccttgtcatgagcttatcctgcaactctctttccttggcaaccaattcctctacctttggccatatctggtaagactgagaggatgacttgcaggatgtaacaatggctcaactcttttgctattccttaactggc

SEQ ID NO: 8966 - DNA, 371 bp, Oryza sativa
  Clone ID: uC-osflcyp115a06a1
cattccgatagatagcaacaagcagttcaaacaccataaccaaagcgaactcaattcatggtaacatcacggacgaagaacacctaacactggatggatggatagagggcttctcgactcgagagagccactggacacgataacgactcgactcgatgataagatgattctgacacggatagctaaggataactggccacgatgggccccaccaatcagttcctccagttcccgccggagtcgccgccgtagccgccgccacggctgccaccgtagccgccgccgccgccgccacggtcgccgtcgtagccgccgccgccaccgtagccgccctcacggcgcccgtagccgccgccgccacctccttcgta

SEQ ID NO: 8967 - DNA, 504 bp, Oryza sativa
  Clone ID: uC-osflcyp115a07a1
caaggtagtatctagaagagttttacattagaaaatgtgatacaccccggtgtcttctcaataaaattaccctgtgccaagaatatttggtaattctggcgaatggtctccaaatcaagtacaattagccgagactataatgcctctcatatcattttaaccaggaatataatacttgctaccagtacaaattaaaccatcgaaaaaacaaaatttacaaagtcagttaattcggcggtaagcgtgccaacctttaagctgtaacaggtgacaatattgtgcacgcttactatttgtcatctggcacttgctcttgaaccattttttcttagagtttcatctgcccgtgaagtgagatatcagtatgctcagcagtactaacagcataatcggtcgcagttgtatggatatggaggccttgcgtctgttgacactcatgcctggacggtactcgacgccgatcagtggaaggaaacacacgcaatatatcagtacatagaacat

SEQ ID NO: 8968 - DNA, 461 bp, Oryza sativa
  Clone ID: uC-osflcyp115a08a1
tttttttttttttttttttttttttttttttttttttttttttttttttttttttttttttttttttttttttttttttttttttttttttttttttttttggaaaaaacaatatgtttgacagggggcaccaaccaaagggatgcgaagccataaacagttaaattaaaaaccttcccttggaaaagttaaaataaaaaaaaaatttttgggggaaaacaacggggggggaagaaaaaaaaaaatttttcgccccaacaaggggggaaaacccttaagaataagcccacataaagggaatgccagggaaggctccgggtgaaaaccccaaaaattttttggaaagttaaaaggacccggttttaaacggggggggaacaaatgggcagggaggaaaaaatacccccggggcccgaaaaaaaaaatccacccctttttaaatccagggggaaacccggaag

SEQ ID NO: 8969 - DNA, 497 bp, Oryza sativa
  Clone ID: uC-osflcyp115a10a1
atgttaagatgatataataagatgtcataggcttgggaagccctacaaaataccaccctgggagctgcacagctctccttatgcacgtagtacatatataaccgatgttatatacatggcagcttttagaacatatatgtacttcaaccaagtgatagtgggcctatgctacgagttacatgaccgtcagtgtgcattgcttgccgccatagaactctaatagaacaacatcgtccaaagctgaacttacagtctggcatgccaggaatcaggagactggagggaccacctcgacaccgagaatcaccgatgccgttccaaagttcagatgtgcttcatcagagtggacgaaatgttggtttctggaactctcataaactgggttctccatcagaagatcccaggtcacctggttgaccgaatagttatgcgaggttagcgacgagcatacaccatatcagcttggccccctacttgctgcttgctgaggctggggc

SEQ ID NO: 8970 - DNA, 344 bp, Oryza sativa
  Clone ID: uC-osflcyp115a11a1
aaagcagaggtcgatgatattaagaagcctggctcgcatgaggagatggagcaggagtacatgatgagatcaccatgatgatagatgatccatccaagctagctagggatccatccaacattgatcgacacacgcacacactgacaacgacgacgacagttttatttaggcgtcagagcaaaaggcaaggcctgcctacatataagctgggtactaatgcaagcaaattaaggcctcgatcaaagctctgatcgacagtagcagcatccatacgataaatcgtaatgcagccgggcgacgacaacgatagattcagttgcaggagcaggaggagcagccgatgc

SEQ ID NO: 8971 - DNA, 211 bp, Oryza sativa
  Clone ID: uC-osflcyp115a12a1
cattccgatagatagcaacaagcagttcaaacaccataaccaaagcgaactcaattcatggtaacatcacggacgaagaacacctaacactggatggatggatagagggcttctcgactcgagagagccactggacacgataacgactcgactcgatgataagatgattctggccacggatagctaaggataactggccacgatgggcccc

SEQ ID NO: 8972 - DNA, 421 bp, Oryza sativa
  Clone ID: uC-osflcyp115b01a1
aaccaaaacataggaggtttcatttcttcttctcaaagtagtgtagcatctttccttctttcaccattacataagcttaagcaataacagataacaaatcctcctcctcctctaggtaaaatattcaaacacaatacccttataagtacttattattaagaaagtagcgtgcatgggcataaatggcagcggggggcaggttaagaatcacaatgctgagcagcgaggaaacaaaacaccataatgggacagagcaaaagcctccgaaagggagcttttaggcagaaggcttctcccacttgaggggcttcaccacctcccaggtgaagtctgggtcgtcccttccgaagtgaccgtaagccgccgtcttgaggtagcgtccgttgccgcctttcttgaggtcaaggttgatgatgatcat

SEQ ID NO: 8973 - DNA, 455 bp, Oryza sativa
  Clone ID: uC-osflcyp115b02a1
gggaacaaaccaaacatgcatttgctactattgaagtttccaaaaattaatttggtaggccttaacaggcattacaaagctttgacacaagaatagcagcagtaacaatcattacatgagcttaccataccctgatcacacttatacatgacaccaccacttaagacgagcacatatcagatctagttattggacttacattcgatagagcagaatatattgacacgataggttttttagttaggcactactacagcagatagcaacatggagacaataccccaagcaaatgcgtgcatacaggcaatcaagcttagagaacattactctttccatgaaacctcctgcttataccagaacatttgacagctgagcaatgattatttttttgacctgaaaagcccgataaggtggcctcgaacatgtcatctattttattgctgagttctggacca

SEQ ID NO: 8974 - DNA, 526 bp, Oryza sativa
  Clone ID: uC-osflcyp115b03a1
gtcaataacaataacaatgtggcttcttaactacacataagaatgttgcctgtcaagcatcaaacatgtacagcaccaaacatatctgtcttgggagtaatatgttatatacagcaacaccagactttacacaccaggcacgacctttcttgcaccaacaaacacactacgcacttgggagggtgaaagaagcaaagcaaccactgatgaacactttcacgtttgctcgttgtgaatcgaaaatttctttaggccccaaagcacccgatgagtttcttgggagcatggccggtggcacggtacttggctgccatctcctcggcctttaggacttcctcgccgcgctttgcctcgaccattgctctcttctcctcagcttccttgtggacgatcgcgactttgttcttcatcttctctgcatattcagccttcttcttttccagttgctcctcaatcttcttcagttgagcttctatgtttgctttctttgggttctcccaggaaagaatagcagatagcttcttcg

SEQ ID NO: 8975 - DNA, 368 bp, Oryza sativa
  unsure (1)..(368): unsure at all n locations
  Clone ID: uC-osflcyp115b04a1
ggacaagcaagaagtatatatattcatccatttttcaaactactacaagagggcggggggaacacataatcaggggggattgggacaatttacagcaacaggagtttggaaatcgaggcaagaacaagacaggcagcagcagagctacccttttaatttccactgaatttttacacatttggaatccatggaaaccgagcctttccttccgtngtgggggggtcaccggagtccgatgagaaaaaagggcatggggtgcttataatccggatcgctcgccggcgtcggtgaaggaggcggggcgattgttcgggcggctgttgaggagtgggttcaaagccttgaccacaattcttatgttgggcctg

SEQ ID NO: 8976 - DNA, 401 bp, Oryza sativa
  Clone ID: uC-osflcyp115b06a1
tttttttttttttttttttttttttttttttttttttttttttttttttgtttttttttttttttttttttttttttttttttttttttttgaaaaaaaaaaaatgggccatgaccaggcccaaccaaccaccatgaaaaaaccaaacatagctttggggtcatgccgggaaaaaaacccaacaaaaataaaaaatttttttgggaaggggggtaaaaaactttttttggggggaaaaaaaaaatcccctggatttggaggcccccaaaaggggggccccttaaagggggggtgggcatgggaaagaaaaagggtaacaaaccggggggggaaccccaattgggggggaaccaaaaaaaaagttttaaaaaaggggtcttaaaaaaaaagcccgccttggg

SEQ ID NO: 8977 - DNA, 365 bp, Oryza sativa
  Clone ID: uC-osflcyp115b07a1
gggaacaaaccaaacatgcatttgttactatggaagttttcaaaaattaatttggttggccttaacaggcattacaaagatttgacacacgaatagcactaggaacaattattacatgagcttaccatatccctgatcacatttatacatgacaccaccacttaagacgagcacatatcagatctaggtattgggcttaaatttgttagggcagaagtatattgacacgctcaggtttttttagtttgggacttcttccgcaggaagcatcctggggacaatatcccaagcatatgcgggcataccggccatcaaggttagagaacattactcttttcatgaaacctcctggttataccaaaaca

SEQ ID NO: 8978 - DNA, 396 bp, Oryza sativa
  Clone ID: uC-osflcyp115b08a1
ggtaacaaaccaaacatgcatttgctactattgaagtttccaaaaattaatttggtaggccttaacaggcattacaaagctttgacacaagaatagcagcagtaacaatcattacatgagcttaccataccctgatcacacttatacatgacaccaccacttaagacgagcacatatcagatctagttattggccttacattcgatagagcgggaattattgacacgattgggtttttagttaggcactactacagtagatagcaacatggagacaataccccaagcaaatgcgtgcatacaggcaatcaagcttagagaacattacttttttcatgaaaccttctggttataccagaacatttgacaggttaccaatgattattttcttgacctg

SEQ ID NO: 8979 - DNA, 354 bp, Oryza sativa
  Clone ID: uC-osflcyp115b10a1
tttgtttttttttttttttttttttttttttttttttttttttttttttttttcaatgaagaaatttatattttcaaccattttttaaagcaccccaagaggcctaggggaccccacaaaaaaaaaggcacgcaaaaatacacaaacacagggggatgaaaaaaaaggggggaccaaaaaaggcaacacccaaacccccgtttaaagtcccacggaattttaacacctcgggaaggcacggaaaccaagcccaaccacccgaaggtttgaaggaaacggcacccaaggaaaaaaaagcgcacggggggcctaaaaaaaagaaaggcggcgggcggccattaaaggagggggaaa

SEQ ID NO: 8980 - DNA, 395 bp, Oryza sativa
  unsure (1)..(395): unsure at all n locations
  Clone ID: uC-osflcyp115b11a1
ataaaaaaaattgataaatttttttacaaaaaaaaaagactgatttttacaaaccaaaaggctacctgcttgtttataaaaacaaccactcccgcttcgtttttaaaaaaaaaaccgtacttaaaaaaaaattccaacaaccaacctatttgggctggatacaacgaaaaagaaggggaggtcgacccttctaccagctatgaaaaaaaggtccaaatctatccgatacttgtacttttatacaagatggaacctaatgcactcccagcatacggntgttttttttgggaagggaacaacaagttggcggcggggatgatcattggacccattatgaaggggggcttattgatggtctgatcctcccaggcatgggaaggccaaagccactattt

SEQ ID NO: 8981 - DNA, 445 bp, Oryza sativa
  Clone ID: uC-osflcyp115b12a1
accatataacggacgattgctgattactattactggttgcaatgtaacacttcggatacaatagtacattacagagctagctaaatgcgaagccacaataccgtcagcgcaagacgatcataaataaagcttacacaacatatccaacatgcaaaccattcggactgaccagagatgagggttcttgaagctgccgcggtgtgccatgcatcacaaatgccgaacaactagattgtagcagccaacatgaaaggaaaaggcatggataatgcagcaaagatggatgatgaagaccgcagattgtgacgcttcgttcaccaaccatatgaaacccctaaattttgtcaagtttctccgccttcaccaccggattagccttggcaatagcatccctagcagcggtccgatagtcaaactggcagacatgcttatcggaatagcggtg

SEQ ID NO: 8982 - DNA, 457 bp, Oryza sativa
  unsure (1)..(457): unsure at all n locations
  Clone ID: uC-osflcyp115c02a1
agcaaaaatggtgaattctgattttttttttttttgcatgattcaccactcacttcccccatttgcatttccatttccatttcctgtacataggtagccgagcttttcggttttttttcgtagctcgaaacatttctttcccatctctcctcgcatttttttttggttcttccgtttcggactgctgtttcggttttcacagcagttttggaaacaaatttttaaggaaaaaaaaagttgaaacgatagtagagattctaatggacgctaggtttttgatcagtgcatcctcccgacgcgctccgnggcggcgcgcatgacgccctccaccagctgcggcatgtggaggtcggcaccgccggcgtcgccgcacccggcgcggacgccgacgctcgccatgtacttgtgcaccttggcgcggatcatctcctgcatcgcggcggcgaactccggggtg

SEQ ID NO: 8983 - DNA, 248 bp, Oryza sativa
  Clone ID: uC-osflcyp115c03a1
gaaccaaactccaataggagggggaaagcttaattggcacaaagaaaaaaagggatacacaactggggactgaaaatacaaggctgtgttcagataaaaacagtggtacaacaaacttgaaaaggaacgtaaactccacaataattactaacaaagcaggcagcggaaaacagccgcgcccatcaaaaacaggttggtctggattggcattttgacagggataaaagctgatgcaggttacaacctgc

SEQ ID NO: 8984 - DNA, 408 bp, Oryza sativa
  Clone ID: uC-osflcyp115c04a1
aaaaaatgtgataccattgctactgtttcagtgcaaaaggaagcgttgcgtttctaagattgttacacgtatggggaacaccagggctacaaaatttgtgacaattaactgtattgaagcttgctatgtgaatccgagaaaaagaatggacatactgtagttgacgtacccaatatgccagcgaaaggcccagcagatctcctatttcagggtaggtagccttcaaggggatggcttctgactttcagctgtaaaatctgcacaaaatctgcttgcccactttgctatgatgatgttacaacaatcatatggcagtagagccgccagaaggtatacatttttaatcatgtgaagaatgtgacaacatcttttttgtatcccctaactatcaacatgcgtgggacgttt

SEQ ID NO: 8985 - DNA, 322 bp, Oryza sativa
  Clone ID: uC-osflcyp115c05a1
ccggcccaaaaggaaaaacggaaagggcccttttttcccccgtcaaaggcccccccccccaaccccggggggggccgggaaaataaacaaattaagccccgggcaagaaaaaaacccccaaaattgggaaaggaatttcgggaaaggggggaaaacccaaccccgggccccccccaaacccggggccaccctgaccaaaggccgggccctccaaaattccaaaggggccaccccctcagggggctaaaataaggcgggccagggcaacgcaatttgggcccatcggggggggctcccccggaatcttccccagggggggggg

SEQ ID NO: 8986 - DNA, 386 bp, Oryza sativa
  Clone ID: uC-osflcyp115c07a1
gttagtaaaaatggtgaattctgattttttttttttttgcatgattcaccactcactttccccatttgcatttccatttccatttcctgtacataggtagccgagcttttcggttttttttcgaagctcgaaacatttctttcccatctctcctcgcattattttttggttcttccgtttcggactgctgtttcggttttcacagcagctttggaaacaaatttttaaggaaaaaaaaagttgaaacgatagttgagattttaatggacgctaggtttttgatcagtgcatcctcccgacccgctccgaggcggcgcgcatgacgccctccaccagctgcggtatgtggaggtcggtaccgccggcgttgacgcacccggtgcgga

SEQ ID NO: 8987 - DNA, 397 bp, Oryza sativa
  Clone ID: uC-osflcyp115c08a1
agcaaaaatggtgaattctgattttttttttttttgcatgattcaccactcacttcccccatttgcatttccatttccatttcctgtacataggtagccgagcttttcggttttttttcgtagctcgaaacatttctttcccatctctcctcgcatttttttttggttcttccgtttcggactgctgtttcggttttcacagcagttttggaaacaaatttttaaggaaaaaaaaagtcgaaacgatagtagagattttaatggacgctaggtttttgatcagtgcatcctcccgacgcgctccgcggcggcgcgcatgacgccctccaaccagctgcggcatgtggaggtcggcaccgccggcgtcaccgcaccccgtgcggacgccgacgctcgc

SEQ ID NO: 8988 - DNA, 426 bp, Oryza sativa
  Clone ID: uC-osflcyp115c10a1
ctggtcatatgaccatacatgtaaagctttccttccaactatcatgtgcttgggcttcagcattgttacaaaaaaggattatagtagctattaaacctacacatttgcataatggaagaccataaaaagggtcgcaaaagaaatatgtccacctcggcaatgcaaaatatcagctttgctagtattttcttgaccattactccaagaaaattgaccaagaaaagaagcaatggtaaattagtgtttgagcgaaggttgtcatttgttaacggacaactcgtgaaggtgagccatgtcagggttgggagtttggtttgtgccacacattttctccaaaggacctttacagcgcctttggagctccaggtacctatccaggttgaagttctgcctctgaatcagcttcttctgccgagactcaaacag

SEQ ID NO: 8989 - DNA, 459 bp, Oryza sativa
  Clone ID: uC-osflcyp115c11a1
ggacaggtagattgcatccttaattaaatagatgaacagaacttcagacagccaatcatctaatttactggtatggccgttgttttacagagtatggcatagcaacaatcaattggtgtttttcctaaacttgcaaactatgactcatgaatattcatgccgaactcgtccagttaccttcctagtttaggtgtacactgaaaatttctggaaaaaaattgtacacgtttatgttctgatcatctatgaaagctgtggatgttttgctggggggcacgctaaccttccgacaatcaatctatctccaggagaatgcaaaattggactggaaattccgtggtatttagagttcagttttgctggattttgaaggtttcttctttccttgccaccatttctttaccacctttgacaccttgttcacatggccttttaactttttgcctgtatccttgatct

SEQ ID NO: 8990 - DNA, 272 bp, Oryza sativa
  Clone ID: uC-osflcyp115c12a1
ggacaagcaaaaagtatttttattcatccctttttcaaactacttcaagaggggggggggaacacattatcagggggggttgcgacaatttacagcaacaggagtttggagatcgagggaagaacaagacaggccgcaaaagaactacccttttcatttccactgaatttttacacatttggaattcatggaaaccgagcctttccttccgtagttggggggtcaccggagttcgatgagaaaaatggttatggcgggcttataattcggat

SEQ ID NO: 8991 - DNA, 517 bp, Oryza sativa
  Clone ID: uC-osflcyp115d01a1
aagctgaagacattgtattataggatcaaaacatttctattaccacaactttttaaggatggaattgagtagcaatactttcaccccaaaatacagtttagcgacaatatcttagaaaagccgcttgctttgccgccatggctggcaagctgagcagagcagctaacacaaagaacacgagatcactataaaccaaacggcaacgaacgaagaaaatacagggtcttttttgtctgaagatacacgaagcggttcgttttcttttatttttagtctcctctcctcctcgatgatgggtgtatggcaatggcaatggcgatgggatcttggcttagttgatgggaaggggctcgccgttccactccttgaggcagtcgagcatggggtcgatgagcttgccctggctgatgccgaggaacaccttgttgcactcctcgccgggggacttgagcttctcgccggtgaggaatacgcagccgagctcctcgcggacgaagcggtagagcgggaacgaccg

SEQ ID NO: 8992 - DNA, 372 bp, Oryza sativa
  Clone ID: uC-osflcyp115d03a1
gattataatagacgcaggaaataattaatagatagatgtgctgcgtatatatacactgttgatgggtggtaaaaacagcgatccgatgagaaagatggatcatgcatatacaaccaaatcggagtacgtagctagggaggtgtgttgtggtgggcggtggcggtggcggtggagaaatcgtgcagcgtgggcaggtcgacctccccgcacctccggcagcggccggggagagggaggaataatgtactagtcccgacggtggcgcggaaggaggggcaggtggcgtgggtccccagccacgtatcgatgcaggagacgtggaaggtgtgggcgcagtgcggtagcaagcgtagcttcccccccccggtgaac

SEQ ID NO: 8993 - DNA, 485 bp, Oryza sativa
  Clone ID: uC-osflcyp115d06a1
ccagcaaaaaattctcaaccatctcaggtgcataataacaacagtggtatctcatttagtcattacatgtcggcaagttatctgaatctgaataacagtgctacctcaatttgaagtcgattccttcacgctctcgaaatacaagaatccgatgaattgatgctacaaataattatgactcgacacgacaaaaagaataagaacgaacagtgttacaagaaagcagcagatccatcgaattcataccccttccttcccatggagaatttcagcaggtgttagaaagtggaagcacgcaatatcgctacccgacgattatttgcaaattgcaagctagttacagccgatctctgcattcaggacatcacccaccgatgaacccaagctggcgaaggatgaaggccaggatcagcatgacgatagcaaggaccaatcctttcctgcctaacagccagttcttgttttcttcgcagcttctactcctt

SEQ ID NO: 8994 - DNA, 358 bp, Oryza sativa
  Clone ID: uC-osflcyp115d08a1
ggaaaacaacaaagggaaaaggaaatatatttggaaaccaatacaaaccctttgttttgaaaaaagcaggggtggggccaaggacaaagccagaggaacaaaatttcaaaaaaaccaaaatgggttccttgggaaaaactttttaccttaacagggccattttaaggggccccagggggaaacaggccaaaacttttttaaggctttggggacggggggaaaaggccaccacctttttcctttacattaaaaactttggggcaggggaacaacatagaaccccgacctaaagaaaaacccctaaaacagggggggggggaaaacaaatttgattggggcccttaacgggaggggcatt

SEQ ID NO: 8995 - DNA, 396 bp, Oryza sativa
  Clone ID: uC-osflcyp115d10a1
aaaggaatgacgggttcagatcagcttatcaataaacacggggttgtcctaacacaggcagggggaattaagaaaggtagaccatagcaattactcacccaagaaaattagcccactccaattcaaataaacctaactggtaatttaatcacctaaaggcgttacagggctttccaccaagggggttccttggggccaggattaccggagaatcgggggggttcctgggtccccatcagagtacttttgggcatgtccagttagggaagcatgatgaaaaatttggcgggtataatacagggaaactccaactcactggaagggtcaaaatcaaaggggagacccttcactggtagggctgcacaaaccggagaaaggagctttccggataagagg

SEQ ID NO: 8996 - DNA, 502 bp, Oryza sativa
  Clone ID: uC-osflcyp115d11a1
ccagcaaaaaattctcaaccatctcaggtgcataataacaacagtggtatctcatttagtcattacatgtcggcaagttatctgaatctgaataacagtgctacctcaatttgaagtcgattccttcacgctctcgaaatacaagaatccgatgaattgatgctacaaataattatgactcgacacgacaaaaagaataagaacgaacagtgttacaagaaagcagcagatccatcgaattcataccccttccttcccatggagaatttcagcaggtgttagaaagcggaagcacgcaatatcgctacccgacgattatttgcaaattgcaagctagttacagccgatctctgcattcaggacatcacccaccgatgaacccaagctggcgaaggatgaaggccaggatcagcatgacgatagcaaggaccaatcctttcctgcctaacagccagttcttggtttttttcgcagcttctactccttgctgtgctcggtccat

SEQ ID NO: 8997 - DNA, 343 bp, Oryza sativa
  Clone ID: uC-osflcyp115d12a1
gcagcaaaaaattataaaccatcttacgagcgtaataacaacagtggtatctgatttagtcattacatgtcggcaagttatctgaatctgaataacagggctacctcaatgtgaagtcgattccttcacgctctcgaaatacaagaatccgatgaatagatgctacaaataattatgactcgccacgacaaaaagaataagaacgaacagtgttacaagaaagcagcagatccatcgaattcataccccttccttcccatggagaatttcagcaggcgttagaaagtggaagcacgcaatatcggtacccgaccgattatttgcaaattgcaagctagttaca

SEQ ID NO: 8998 - DNA, 472 bp, Oryza sativa
  Clone ID: uC-osflcyp115e02a1
aatatcagcgaactgctatcacaaagacgatattattgatgtccaaggagtttcacacgggcacaggatagctatcacacgatactagacggcaacaagtaatggtcttgccaaacaaacatccacctttattatctaatagaatggatgcagtataaagaggtcaacgaaggctagtcccagtgtcccacgaagaactatgcggtgattgtcgtctttgcagaactggcaattgctccagcctcggtcagcagaggcaccagcttcccttcattgttcaatgccaaagtatcatcacagccaccaatatgcttcccattgatgaagacatttggaacagtcctttgtccagtccattcagcaagtgccgactgcagctcagatccatcactctccccatccaactcaatggccttgaaagttgctccaagctgctcgaacaacttcttcacacggacgcaaaaaggacagt

SEQ ID NO: 8999 - DNA, 499 bp, Oryza sativa
  Clone ID: uC-osflcyp115e03a1
agccgcgctcaattgttccactaacatagaaaagctgctcaagctggcataatttagtttctacattattgccattacataatttacagctagattgctagtactatggtacatgctagtatatcacagcgtacatcacaggaaatcccagactggaatggtgtactggctttgatccgtggcttggtgacccagttgaggattgctgctaagaaactgcaatgactggatgtccggaggtggggcctgggggatttgtggaccgctatgaaagggtggttgctgtagatgaggttgctggagaggagcaggtgctggttcctgcaactgcccaaatggtgatatgccaggaaatccctgaagagagctaagtccgaattgctgtgcaatatacggtgcctgcattatatggcttgttgcaagaaattgactggttggagttctcagatgatttggaatgtcatttgatattgtaggggatcaaccctagcggaacttc

SEQ ID NO: 9000 - DNA, 499 bp, Oryza sativa
  Clone ID: uC-osflcyp115e04a1
aatgaacacctgaattcttaatttacatctcgctccagatgacctcagcaggtcgattcttattgtgacacactgatagacacaaacacttgacactaaggagtacaaatataaccgcagaaactacaaaccaacagcacacatatcggaggtacacattgcaaacaacgtccacacgcatagtctacaatatcacattcagagaccagctgcacctgcagctccatcgacgaccatcggacactgctcagagggtaacacctgggacgtgaacccactccagctgcagcacgatcaggccactgtcaaccttgctcagcttcagagtgatgtcttgaacgaccttgccatttttccatgaaacgtggctctcggcgccaagatagttcacaccaactgggtagatcgtcttgatcctggccccgtcagagacatgctttagatccagcttagcagcattcgagatgtcagtcacgttgaactcagctacgcccatgct

SEQ ID NO: 9001 - DNA, 433 bp, Oryza sativa
  Clone ID: uC-osflcyp115e05a1
aaaaaaggtcagttggatactataacacacagtacatactggaaattggcaaaaaaaggggggggggacacagttaaaagggggaacatagggaccaaagttggcacaggggttacaaaaaaacccccccttaaaaggggcacaaaatagctccaccatggcccaagggacattttagggggaacgggggaaacaaacgacccctaaacgggtaaaccccccaagggaagaaggggaccgattttggaaaaggtaaactgggtggctaaattgggggggcctaaggacattttattttcctttcgaacggggggggggggcacacacgtacccataagggcggccgccctagttaatcgggttgaaattgaccctggggctgatcttgaaggggggggagaccttccccttggaggggaacccggcgcccccg

SEQ ID NO: 9002 - DNA, 398 bp, Oryza sativa
  Clone ID: uC-osflcyp115e07a1
cattgtactcatgcgggaacaggaagaaaaaaaatatcacagtatcacgagcagtacgcgcgatcaatataaagcaaacggagccattgcaaccaacacatgcattacaacccaactagacaggccctacttagcttaggagtgtatatggatgacaaatactaatgacaaagcacaggtgacctagaatgcccgacgaattaaaaaaacctacaaggtggtatttgtaaaaccgggaaaagtgccagcacatgcgagtaaaggtaccgacctccctgtattgagcaattgcagactgttcgcctacgccccgagatgctcccgattgtgaaacacctgtgccacaaccacttagagcaataagttaccaagtgtctgatgcagcctagatgccccat

SEQ ID NO: 9003 - DNA, 368 bp, Oryza sativa
  Clone ID: uC-osflcyp115e08a1
caaaaagggctttattaattaaactgccaacaaaggccaaaacattacgggtttaaagggaacaagcttgaagagacccctttggaaaaaaaggagttcccaaaacaggttaaatgaaatcattattgagggcaaagatggtctcaagcatatagtacccagctttgattgaaaaatggtttttggggcccactggggagtttaggggcccccagtgggcggggccatggccaagggctagggcgtgcacaaggtggccggccgggggaaaaccacaagggggggcctgggcgcccggggatcgacctagggctgcctgcggggggggaacatttcttgggccatgccaacaaaaaggcccttgacct

SEQ ID NO: 9004 - DNA, 455 bp, Oryza sativa
  Clone ID: uC-osflcyp115e10a1
atgagcatgcacaatatttacaaataaacagcctgaggacacaggttgagactcccgaatggatgattcaccaactcaatttcaggaccgtcttaaatacgacatgcaaccatgctaaaatgaccaaatatttgtgacctgtgacaaacccacattctcttaacctaacatatgtactaacagcttgcccacttcaagcattacgccattcaatccagttatagatgcaaaataggcggacaacattaatacagggctaattataatgtgccaaacaaatgatggctcaaaaaattatgcaaggtcacatcaatgcacggggccgaacttaacaacttttttactgacaggtttttcttggttcagaagggcaacatcaacaaagctgagtgtttttgatgaaaatctaacatgaggtacattgccagcgcttgcttatatccaggaaattttca

SEQ ID NO: 9005 - DNA, 390 bp, Oryza sativa
  Clone ID: uC-osflcyp115e11a1
gggggaaaaaaaaaaggaaaaaggaataaaaaaaaaaaaaaaaaaaaaatttttgggggggggggtttaaaaaaaaaaaaaaattttaaaaaaaaaaaaaaaagggaaaaaaaaaaaaatgggaaaaaaaaattttaaaattttggggaaaaaaaaaaaaaaccctcaaaaaaagggggggaagaaaaaaaaattgaaaaaaggcccgttaaaaaaaacccaaaaatccggatttcggggaaaaaaaaaaaattttttttttaaaaaagaggcaaaatttttggggggggaactttcaaaaggggggagtttaaaaacccccaaaaaaaatataaaaaggtccccttttaaaaaagaaagggggtttttatggaaaaaaattcggggggg

SEQ ID NO: 9006 - DNA, 501 bp, Oryza sativa
  Clone ID: uC-osflcyp115f01a1
ttttttttttttttttttttttttttttttttttttttttttttttttaataaaaaaaaaaatttttttttgatttaaaaaaaaaaaaaaaaaaaaaaaaaaaaaagaaaaaaaaaaaaaaaaaaaaaaaaaaaaaaaaaaaaaaaaaaaaaaagaagaaagaaaaaaaaaggcgaaaagggaagaaaaaaaaaggagaaaaagggagaaaaaacgagaaaaaaaaaaaattggtaaaaaacgacccccgttgtttggaaaaagaacagacggcttgtctactcgggggaaccaacaaccagggagtgggaagaaaaattttaggaacattaaaaaaaggttgaaaaggaactcaaaaaagacatttggaagaaaggtggggaaaacccttttaaaaaaaatttaaaaaaaaatcaaaaaaaacagtccaaaaaaaggtaaaaaggatgaaaaaaaaaagggacaaattataaaagccaaaaacaactgggggaatcccgg

SEQ ID NO: 9007 - DNA, 462 bp, Oryza sativa
  Clone ID: uC-osflcyp115f02a1
ccctatacccctctcactcctgatggaggcaacaacaacaacaaggtgctggagggggaacagctagaccaatttttcatcaacaataagagttccagaaacctattatacatgaagaggaggcaagcagcaaaacaagattagttccactagtacaggaggtcaaataaaagaatcaccacacccaagggctgggggtcctatcgacgacgacgatttcaccgggcaccgtcagcagggtgcaactagttagcacagaacacagtagttaccacctattgtggtacacccctttcatccatttcatttctttcctttgaagaagaggaggcagaggcaggcttccaagccataggttaacaactggcggaagaatgcgcgacgtcttgcatctccaggacagtttcatgggacgaatccatctgagacaacttcttagctagatcctctaatcaaccatat

SEQ ID NO: 9008 - DNA, 502 bp, Oryza sativa
  Clone ID: uC-osflcyp115f03a1
atcagagccagtttttcagtagatatcatttcaaagttctgtgttgtgagcaaattcttagacaggtcagtccttcatattggatgcctgagctcaagaacagctctcgtaacaggcagaaacctgagggtcaccttccttacgtgtgaaaactgcgatctatcaaacacctatatacaatatgatttacttacatgataaactttcaaacaacatcctactttcagttgtgggggcacagtgtcagcaacgcgctggccgcttgtacgttgggggtaaagatgggcagttctcattcattttggcatacggttctattgtgttgtactccggtagctccatcctgtactcccccaggatctggcagaaggggagcttgtcagattctgtgttgcaccagcttggaagtctggcctggttatcttcgaaaatcttgagcatgtacgcgtcgcgtatagtgaactcggtcacctgaatcgactctgcaaaaggcgtgaatatt

SEQ ID NO: 9009 - DNA, 518 bp, Oryza sativa
  Clone ID: uC-osflcyp115f04a1
gaaactaaagacgtatattgattgatattgggatggacgatacgaaacagatacttccatccagttagccaaaaaagagtttgtaatcatccatccagttagccaaaccaaaccaaaaaaaagagagtttctatgtgcacgcccagttggaccaatgttgtacggtatcatatccacattgcacaatccagcgtgccatcacgcgacagcttttctatggatataaatatatatttttacgatatgaaacaaaattgagcactataccggttagccactttagtccaacacgcctgagaaagctacatggacggtgaagcggttggaaaccatccctctaaaaacaaacggaggtctgtcgtctcccaccgcgttacaaactcccatccaccatttttgctctcccctgcgatcaatccagtcgatcaaactatctcgatgtagacttccccgttgatccggcgcgcgaagagcgcgatcatgaaggggagcttcctaagggatgccatcaggtcatc

SEQ ID NO: 9010 - DNA, 502 bp, Oryza sativa
  Clone ID: uC-osflcyp115f06a1
aaccacagaatcagtataatatacgagtagttgttatacatggaagaactgggtaacaacatcaattgtctgatggcagtagtaaacaaaataactgctaactgccacatagtactatattctctagtataattaggcgcaccactaaattatttatatatatatagagtagtattatatatagtagtatatcacaatacttcatatgctgccactttttcttccataagggctaatggcatcttcttcttctcgtgttgtttaatggagctatccactaaaaggtgagagaagcttaaaaacgaaaagaaaggggagctaaacatcctaaaaactacgctgacactccactccttttttcccctatattccgataacactttctttgcttcatgtattctatgatttctggagagggtttcagccacttccattgtggactactttacatcccgatcgccccgtgctcggacagcctgggcatggggaagaagcaggtcct

SEQ ID NO: 9011 - DNA, 186 bp, Oryza sativa
  Clone ID: uC-osflcyp115f07a1
atggaggtaacaacatcatcaaggttttttagggggaacagttataccaatattttatcaacaataagagttccagaaacctataatacatgaagaggaggaaagaagcataacatgaattagttcactcgcacaggaggccaacataaaagaaattaccaacacccaagggcttgggggatccta

SEQ ID NO: 9012 - DNA, 488 bp, Oryza sativa
  Clone ID: uC-osflcyp115f08a1
tttttgggggtttcagtcagcccctctcactactgaaggaggcaacaatgagatcagggcgctggagggggaacagcaagaccaatttttcattaacaatactagttacagaaacctattatacatgaagaggaggcaagtactaaaacaagattagttccactagtacaggaggtcaaataaaagaatcaccacacccaagacattgggggtccttatcacaacatcctactttaacgggtacccggcacagtgtcagcacacgcgttgacagaacacagtagttaccacctattgaggaacacccctttcatccatttcatttctttcctttgaagaaaaggaggcagaggaaggtttccaagccattagtaacaactggcggaagaatgcgcgacgttttggatttcagacaggtttaagggacgaatcatttgagaacttcttagctagatccttaataacctatccaagttttacttgggagt

SEQ ID NO: 9013 - DNA, 358 bp, Oryza sativa
  Clone ID: uC-osflcyp115f09a1
aaggaaagaaaaacttaaattacttttttttgggggcggaaaaaaaaaaaacccggggaaatttcccctttcaaaaaaaaaaaggaacagggaaaaaaaaaagggggagaaccccttgggatttgggtaaaccggcaaattaaaattggcccccggaacacggaaaaaagcgggggaaaacccaaaagggggcaaaaaaaaggaaaaaggtctggagaattggtacggggaaccagcaaaaagggtggcctccaagttaaaaaaaaaaaccctacgccattaaaaaaaaaattagagaaaattccctcccactgaaaaaacccagggaggtttggggtaaaagggggaaaaaaaggag

SEQ ID NO: 9014 - DNA, 440 bp, Oryza sativa
  Clone ID: uC-osflcyp115f10a1
agaaatgcacactcccttcgcaggccttatcctgttcaggttcaaagggactttctcagcccaattcacaacaatccaggccaagaggccttcagatcgttgagaatacaggcacccctggggcaactttcattactaacaacccacagtgatgcaaagagtagaaaatatgacacggaaggatcacatatagagtttaattttattacaagccacgacagaattaacaaattgagctaagcaacaccagttttattcaaggcacttatactggttaccacctcctaacataggatggtgaggagtgctgctgataaacgctccacccggagtagatggacaccaagacgatctgcacggagattgtattctgagttccgagaaggcgagaacatgttattgtgatataaaagttagtgcctttgcagtaatgcacatac

SEQ ID NO: 9015 - DNA, 335 bp, Oryza sativa
  Clone ID: uC-osflcyp115f11a1
ataatattaattgttttatggtattagtaaacaaaataactgttaactgccacaaagaactatattctctagtaaaaaaaggcgcaccactaaattatttatatatatatagagtaggattatatatagaaaaataataaaaaaaagcataagaagccactaaatattacaaaagggataaagggctcatcttacttccaaaggagggcaaagaagcaaacaactaaaaggggagagaagctcaaaacccaaaagaaaaaggaagctaaaaaaacaaaaaatagtttgaacacttcacccgtttatacaccataaaccaaaaaaagaactttgat

SEQ ID NO: 9016 - DNA, 425 bp, Oryza sativa
  Clone ID: uC-osflcyp115f12a1
ccagatgaccttatttttttttttttaagggaaacacacagggggaggcaaactctcgacacccaggagtacaaaactaaccgcaaaaacaacggaccggcgcccggaaaacaggggggcacaaaaaaaacaacttgcacacgcaaagaaggcaataagacaaactgggaccaggggcaaaaacaaataaagagaccacaacctcccaaaggtcataggggggcaactggcaaggggaaccaacaacagatgtacccccaacacaacactgaaggccctagtttaaagggaaacagaggtttaaccccaccacaccaaaacatcatgaaaacacaatattagcggcaaaaaaaatgacgccaaccggggggaccggttagagaccggacccgtcagaaagaggcttgcgagccaacacaaaagaa

SEQ ID NO: 9017 - DNA, 399 bp, Oryza sativa
  Clone ID: uC-osflcyp115g02a1
agactgaattacaacacaagatgacgacgagggtccagggacaacacgtccataatttacattcagtttcttcagtgcgaagtagcgagagcagctaataacggggagaactaaccaacacaagcatcttctagtattaaggaacacacgcccccacccacctaccgttgtagtcagtcactacaaaacatggccatggtggcgagccgccctgccaccatcagcgattcagctcattgtcatttcatcggcttcgactgatcctaccggtagtaagcctggtggtgaaaggctggggccattgcattgctgtagccgattccattgctgtatccagcataggccgggtaggttatgggaggggatgggtatgacatgcccaggccgacgctggatacc

SEQ ID NO: 9018 - DNA, 469 bp, Oryza sativa
  Clone ID: uC-osflcyp115g03a1
aagatatcaaacataaattatttaccttctcgatccaggatccaagaggtagaaggatatacagtgcatgctatatggtacatgccttcatgctgaagctgactagaagtgttaatacaatgacaatttattcacacagataccgtcacaatttggtggtagatatatacatgaatgatactgttcagtccaggctggggccgccgctcatggactcagtgcttgggcttcggcttttttactatcatcacggggcaatgcgcatgatgagaacagtagtcactcacgcttccaagaacagctcgtttaattgctccatagccatggcttccgacaaccaacatttccgcctgatgcctctcaacagactcacaaagaacattcctggcatccccttccagcacttcaaacagagcatcactcacctgggcgcagagctccctggccttctcgatgacgcgcatggagc

SEQ ID NO: 9019 - DNA, 249 bp, Oryza sativa
  Clone ID: uC-osflcyp115g04a1
aattgaaggttcaataaaatatgggttactgaattcaaattgggaagcaaattttagaaagtgagtgacataaatgctaagacaacatgtaggaaggataacagtaataacggggcaaaaggggcataaaggaacttgagtaagccataacagacaaaggataatatcagaactaccaagtgggaaccaggcaacggaaggtgggcggatagcggggtagaataaaaccgtcggaggggtggacctaaa

SEQ ID NO: 9020 - DNA, 341 bp, Oryza sativa
  Clone ID: uC-osflcyp115g05a1
aaaaaatattggaatttttttttttatggaggaatgataaaaaagaaagaaaaaaagggaggaaaacaccatcggaagaaaggcaacaaagcaaagaagcaacaggggaagagaaaactagaggagcacgaacggcgggggcaaggacagcacgacaaggaaaggaaaaaaaaagcctgaatgatggagcaaacaaggaagaaaggaaaaaaacccacgaagaggccgtcggaagaaggtatgttgcagaagaaaggacataaccgccggcttcaccgggccgaacaaaaaaaccaaccgggggcaaggataaccggaacagcacaccattcaggaggaaa

SEQ ID NO: 9021 - DNA, 492 bp, Oryza sativa
  Clone ID: uC-osflcyp115g06a1
ggagtacacgacacaaccaactaaattgaacactattaatacatagtttaagttacatcatgatttattatgactggcaaagacccaaaaaaaaaaaaactctcacacaatgcaaacaatagtagagtttagatgcagactatacctgactagaaaggattatgtagttagttgcagaaggtcgacgagcgtgacaaactgtaaccatatacgacgcatacacgacgtatattatgtatcacaaacgacgtagaaaattaacagatacggtacaccatgacttaatcaaagaaagctgattactatgctggttggacacttgctaaccgcagggcaaacttaaggctacagcgacgacatcagttaaatctaggccaacttagacgtaaatggttatcttgcgttttttctcttcccttgaaaaaaaagcattgagaagctttcaccaacatgtcatctaaacttgcaattagcttagatttattggattgg

SEQ ID NO: 9022 - DNA, 464 bp, Oryza sativa
  Clone ID: uC-osflcyp115g07a1
aaagtcaattctatgctatgctgattatcgatccgtacaaacaaatagcaaatacaatgtcctaaaacctttataaaatctataaattaatcatgggcttgatcttgagacatgtaaattctatatttgttctagctcgtctgtttgcaaatttccatatatttgggagttcagtggtcatctgtacaattattgtgttctcaatcattggccgttgtttctactaactcactgatccttttttccgccaatattgcctgtgcctcccactttgttctcatgataatgaaaaatagtatggccatctggagtaatgttcctgtcaacatgcccatccatatccccaatgcaccaagctttagcttgaagccaaagagaaccccaaatgggatccctaccaagtagtagcaaccgatgttcacaaatgccaccagaatttgcaacctgccctactgcccacctga

SEQ ID NO: 9023 - DNA, 384 bp, Oryza sativa
  Clone ID: uC-osflcyp115g08a1
aaatactggacaagagcatgtttgacgcctcgcattatcgcatatagcggatgaaaaaacgtcaggccagcctgcgcgacaacgtctagttacagataagagcagaactgcaagtcaaatacactcttttctctccatagtagagtttgagcagcgagcgggcaaacataaattattcaattattaaatgatatgatcactcttgatcatctcaacactataggaacaaaacttcgctaccgcgattttactattttagttgtccacaacttcaatgagggttggttcgtagtcagcaggagcctcgaaaccatggaagttcattacggttgcagcaacattggcgagcccaggggtctgaatgtcagaccggaatttcacacc

SEQ ID NO: 9024 - DNA, 414 bp, Oryza sativa
  Clone ID: uC-osflcyp115g10a1
attacttaaagtggcctacaaattgagagaacatgggtgtttcaaaccaagcatataatttgggacaatcattgatgctggggttaacagaatcggtgcttatgataactgtaatgacagggcacgtggagcataagctaatttttttaagctgttttagctttggtgtaacatcggaattaccatgtgtgaaccatgcacaggatggttgggggattactgactggaaaagactcgtttgaggggtggacggataacaccgtggagaccattgaaggcatgtaccagttcgtgcggagcgcggaggccctgaacatattgacgtcccgttctgtcccaagagttagtcgcaggagttcttgaagatgcagttggagctattctttatggggattggagcaaaaccaggagcgc

SEQ ID NO: 9025 - DNA, 495 bp, Oryza sativa
  Clone ID: uC-osflcyp115g11a1
aacagcaagtgaggatgctatatatattgccatagctagcaagataatcagtttcggagttttcacaggaacatatttgttcccgtatactcaaacaccaggtagataatggcatcaagaaatccaagggaaggctacagactgcagacagaagaatgggactgagggtgagctgaaagcctttcaaggaaaggctacagagtgcctgaatgttagtccttacaaggttgatatcgatttattcgaccagatgcacctaggtaaatactttcttgtggaaaaaaaaaaaaaaggcggccactcaccgggccgatcaatcatcccatcctgttgcagggatatttgaaacatcacaccattcaggaggaaaggagtacttcgctgcatacgcatcttggagtttgttgtccttggctggacattgctcaggctgtaccatcttgctcaacatgttcctcttcctcagccttctgcttcaggatgaactcaggagag

SEQ ID NO: 9026 - DNA, 459 bp, Oryza sativa
  Clone ID: uC-osflcyp115g12a1
agagggaagagatggtagcatcatcatgattcatgagctcacttcatccagtacaaatgattgcgaaaatgccatcgaaattatatgtacaagctcgtgttgtttcagtaaaaccgtatacacatgtaacgcatcgtcctatctaattctaccacggctcggagttcttcgtccagtaactcgtggcaggggatctgcggctgctccagccatcctctgctaaaatcaagcttacccgcgctctcagggggttcaccgcttcgtcctccatgatctccagcggattgttccaatgctgcccagccactgcggtttggtatgatgccaagtattgcaggcagtcttcatagtacccacagtggtagagaagggcggcataatccctcagttcacggggatcgaggttcagtaggataagtccgtcacatgctgctaaagcacgccgcatatcaccaaacc

SEQ ID NO: 9027 - DNA, 390 bp, Oryza sativa
  Clone ID: uC-osflcyp115h01a1
gacctgcagcagaaacgcagtattggcaagaaaacgagaacagttgatacatacacgtttattcggggagagatgtaaaaaggctatcaaacaggaggccataaagaaagttcatgggtagcctcaaaagcattctagaatggctcttgaaaagtttatgtgatgacggtgggagcagatcggccagtgtactcttgcatctttgacagcttcagtgcaacatcaaccagaggagcaagggcatcctgcgaatccctgccggtcttggaagaatccttctcatactgctcgatgtagacacggatagtagcaccaacagagccagttccagagaggcggaacaccagccgggaaccatctccgaagaggtaccggacaccctgatgcttg

SEQ ID NO: 9028 - DNA, 445 bp, Oryza sativa
  Clone ID: uC-osflcyp115h02a1
ggagaaaaatatatgatgttcaagtagatggtcatcgtgcttattcaactatcaacatgtgcacaggtatcttacaatataaataattgtacaccaaaaagaatgccttcatcgagcaccggaggtcaaacaggaagctacaaaaagcagcagcagtgtcgatgcagaaggaaaatatgatgattctgaaacgtaattcacatctacaacctcacgcgaagcaaaataaattgccccaactcgcttcgaatatctggtgatattttattgtttacacgaatgtgatcctcaatttacagcacttcacctagcttcatcttctaggttgcggaatccggctgtgaggtcatcatacaatttctggaattttgcgactaggacatcttcaccctctgcagggtcctcaaacttttgagatactaggcgataaaatagatcacccata

SEQ ID NO: 9029 - DNA, 389 bp, Oryza sativa
  Clone ID: uC-osflcyp115h03a1
atacggctaatgttataaaattggtataatcattgatgttttgatacaacagactgtggcttttcatgaaacaaaacagcggggacacacaacaaaactggggacatcctttaacaaaaacttctcagtatcccccagaactataccgtggatggtatgactgcacacttgtgccctgccagctccagatgaaccagtgattataatatttttcgagtagatctaccaagacaaatcattcaggattcttcgctggtagtagtaggatgctttgttctattgctgagccgaagctccaactttatgttcatggccgccaacttggaggccaggtatttgaagacgtaaggcatggggacgggcttcatccctttgcttggtttgcaggc

SEQ ID NO: 9030 - DNA, 529 bp, Oryza sativa
  Clone ID: uC-osflcyp115h04a1
atagagtaaatccaacatttcaaaaaagatgaaaaggggaagaatgcccaaacttacaccatggtgctaaggagtcatccatatacataagatttctactgttcatacatattaggcgttggaaggatcacacaacttaaaaagatcaaagtcgcatatagagatgtagataactgatcatgactttcataactactaagatgtactactacaaaagtgatagcttaataaacttctcagcaagacttgtcaatccaaatatgtgaaaccttactcaagatctccttcataatcaacgggcagctttctaccagatgcttaaatccatcgctttctatgactggcccaagcatgtttggagatgccacaaacccaatgcaagcctgtctcagctgcgagcagtgatgttgttctgctaaaacaagagtggttgccactgtttccacatcaatggtttcgctgagccgcctctcacaaatcagcctcagcctgtccactccgtaccgatccgcagcaactagcaagtgct

SEQ ID NO: 9031 - DNA, 280 bp, Oryza sativa
  Clone ID: uC-osflcyp115h06a1
caaccttatttttgatttatttatactttggcaagcgcatatgttgggcagctgcaagcccaatcaagaagcattacatataatcactaaaacaagcttgtgtatataccaatgttacacaatcatcatatattgagtgcacaagtcccacagtagaattgctccattgccgagtataggactagtagtgcccaccaccttcaccggatccatatccgtagccagagccagaaccatagccagatcctccgccttggctgccgccgctaccttaaccatg

SEQ ID NO: 9032 - DNA, 392 bp, Oryza sativa
  Clone ID: uC-osflcyp115h07a1
ggaaaaaaaaaaccatttgggtatttttacccaaacaggggggaaaaaggacaggcaacgggtaaaaaataaaactccccagtgtgcctggcacagggggggactaaaaaaacggggggaaacaggggcaaaagccacagttaaaaaattgggcggggctggggatattgccccaaccccaaaaaaaaatttgacaaccattaaggggttttgggtgggccaaaagaaaaaggggttaagtttggagggaaaaaaaaaagcctggcggggaaaaaccgatttttttgggggttttgccccagggggggaaactcccggcgggggggaaaatcgaaaccggggtcaaaatttgggccttactttttggcaaagtttgacctgggggggggcct

SEQ ID NO: 9033 - DNA, 523 bp, Oryza sativa
  Clone ID: uC-osflcyp115h08a1
agcatgtcaagagtagtatctttattgagaagcaaaagcaagcggcaaaaccattacacactgcttgctgggcaccgtcccatggccgaacgtgaaaaacatagcccaagagagtagtacaatttacagcagcagtagcatatctccctcaattatacactcaccactcatcgtcacagcacaagcactaggtttttggtcatgctaaggaatgaaatttctccagagctagcacctaaaacctttttccgtttcggaggaaatcagctcaggttttctgacgtggcatggttacaacaaggtttcttgcttgtttctgcaagagaaaccagtcatggtcctcatggagttcaccaaatttacaatgacaggcttggaggcgacgagaagatgtcggtgaaggcttttttttactggatgatcattgttcacagttcatggcgcggattgctgatgcgaagagatcaatcttccatcttctctttgctcaagcagtggttgattctgcaagcttcaatggccc

SEQ ID NO: 9034 - DNA, 314 bp, Oryza sativa
  Clone ID: uC-osflcyp115h09a1
gattcaacatactttttctttttatgaaataaaatatttttgacacacaacacaactggagacatcctttaaggaaaactttttaggatcccccaggaaaatgccgtggatggcatgactgcacacttgtgccctgccacctccagatgaaccaccccccccaatatttccagaggagatctaataagacaaatcattcaggaatcatagctggtaggagtaagaagctctgctctattgccgagccgaagctccaactttatggccaaggacaccaactccgaggccaggtatctgaagaccccaggcatgga

SEQ ID NO: 9035 - DNA, 528 bp, Oryza sativa
  Clone ID: uC-osflcyp115h10a1
gcacacacatatatattattatttatatacactactaagtagaaaagaatgccacagacacggtaataaaaatggcagtagatacataagaaataatttaattacactagctagcagtggcacatctgaaaaaacaacgtgaaataaaagggaaaaaaagcaagcagaaagctagctcatcactttattccagaaacggtacagtgtagtgactcgctcgctcctccctctggcgaaataatgtcgtcaatgcctcaatcgtgcagcagcaagtgctcggtctccggtgatcgccgtcactggtcggtcgctggcggtatgtgcggcggcttgtgcttcttcggaggtgcttcaggttttggctcaggcttaggcttaggtttcggttcaggctttggctctgggtatggtttaggctccggttttggttcgggcttaggctctggtttaggttcaggcttcggctctggttttggctccggttgtggcttgggctctggctttggttctgggtgtggtttgggttct

SEQ ID NO: 9036 - DNA, 525 bp, Oryza sativa
  Clone ID: uC-osflcyp115h11a1
gggacttgaatatgtcatccttccataatcccttatcttttggaaatataggcatacgagtatgtgatatgtttctgacatagggtcatttctgctctggattcgccattgttacgaatagcggaatcatcaacgaaatcacaacgccaacgttgagccctattccaaatgtatcggcaactattccaaatgttgtggaaaggagcagcttttgcagtacagcacattaataaatacgaaaataatgtccaggtaaaaaaaccagccgaggaaaactgcccagtccgtactgagtccaaaccttgctcttgggaaaaaaagcaaattatggcaccagcctttgtggatcgcgagggaaaagtgatgtcttcctgatgttgtttagggcgcagaacagcattaccaccctctccaggccgacaccaaaaccaccatgaggaggtgcaccatagctgaacgattcgatatatgatgaaatagtactcgcatcaattccacactctgttgcacgtttcgtcaatagct

SEQ ID NO: 9037 - DNA, 315 bp, Oryza sativa
  Clone ID: uC-osflcyp115h12a1
caccaaacaagaacatgggggagtttttaacattaaaacccaaaagcccaagcaaaagagggtccattggaaacacaacaccttttttaaagcaaagaacattactccagggggaaaaatgactccttcctcccttttataatactaggaaagattttggggggggggggaatttggccccacagaattttatcccttgggcggggggaaacaaaaacaccctgctgggctgtttccatgcggccccggggacacacagttggctacaggacggagcaggcgtgggggttctggtttttaaaggaaggggtgtat

SEQ ID NO: 9038 - DNA, 378 bp, Oryza sativa
  Clone ID: uC-osflcyp118c07a1
gtgattgtatttacaacaacacatgacattgagcaggctaaacaccagaacagcaaggcccactaccggagcagcacgcagcatactttgaaaacgggaacaacaatccccgcgggccacacaaatacgaacacatattcggtccacggactggcaccaacgcggaccgagaacacaaaacgcccactgatactgcagatgacggcgcagcgaagctcacaccaagggtagacggagcaagaaggccgatgcgcacgaggagtgaagaacggaaagcgagcggccgctcaattggcggggtacgaagcaggcggcgcaggcccaggcgttggtgacgacaggacagcacacggaggagcggcgaggcggacagagggg

SEQ ID NO: 9039 - DNA, 430 bp, Oryza sativa
  Clone ID: uC-osflcyp118d05a1
caaacaacaaccttctctatctaagggccgggaagaaagtcacagctgcctatttacatggtgtcctttattcattattgcagtgaaaaaccgcacatgataaaaccctaggtttggttattcactgaagccaacacggggtactatagaaccctcagtttggtaaggaaggctgcacagaagtccaggaaaaggagctgaggccccgtaactctctgcatatccagcagatacttctcgtctctgctcttgtaaagctggatttcaaacttgatcacagcaggtaacctcccgtttacatcgccattatccattataattgagtcatcaacaaagctgtggttgacatctaacatatcagtggcctgaggatacccaacgctccatctgcacttcatgttgaactgtccattcttcttccagcagacat

SEQ ID NO: 9040 - DNA, 104 bp, Oryza sativa
  Clone ID: uC-osflcyp118d06a1
acacaatgtcaaaaactttataactatgaattataaaatggaacaataaaaaagactccaattattaaaacaaaggcaataaaaaggcaagactaacaacttaa

SEQ ID NO: 9041 - DNA, 162 bp, Oryza sativa
  Clone ID: uC-osflcyp118d07a1
gttaaaaatggttggagtaggatgaacccgggaatcaaaaatctaaaccccatgaataaacaaaggttatcttggacataatttaataacattttacaaataaagggaaaccttctgcaaaaaggggggagcctgagagcaaacctggaagggttattgaca

SEQ ID NO: 9042 - DNA, 460 bp, Oryza sativa
  Clone ID: uC-osflcyp118d11a1
attcattattttttttttatttaaggttcgtgaagaaagtcacagctgcctatttacatggagacctttattcattattgctaggaaaaaccgcacatgataaaaccctaggtttggttattcactgaagccaacacggggtactatagaaccctgagcttggtaaggaaggctgcacagaagtccaggaaaaggagctgaggccccgtaactctgtgcatatccagcagatactgctcgtatctgctcttgtaaagctggatttgaaacttgatcacaggaggcaacctcccgtttacataggcattatccattataattgagtcatcaacaaagctgtggttgacatctaacatatcagcgggctgaggataccccaacgctccatctgaaactttatgttgtactgtccattttttttccaatagacaattaagaattcaagggcctataggacccc

SEQ ID NO: 9043 - DNA, 418 bp, Oryza sativa
  Clone ID: uC-osflcyp118d12a1
acacaatgtcaaaaactttattactctgaattatcatatggaactcttcaactgtctccgcttcgttcaacagaggccatggaaaggcaagcttacaacttacaagctgcgttattacaagaacactgttggtataattttccgtcgatgcactggagctatgcaatgtctgaaaagagcctatatttttatgttccttgctcctggctccataacgattccgtaaaggaagcaccggtttcaggatccggtttcattcccttctttttcctgccgaaaaggaatgaagagcaatgcttcttccagctcaacaaatggcaatttcacaccttttacattgcctccaatttcccggcaaggagctttttgacgtacttgccgagtttgtcggcctcgaggtttaccttgttcccaacct

SEQ ID NO: 9044 - DNA, 206 bp, Oryza sativa
  unsure (1)..(206): unsure at all n locations
  Clone ID: uC-osflcyp118e05a1
tcattagtagcagctgctgtcgactagtcgatcagccggctgatcagctgataagacgtcttgtggagtactcctccttcatgtatgtatggggngcngcngcntctcntntnntntctgtttttttttttttgtggatgtattttgttctttatttncaaaacatgtgtgtctatatatatatatttctttttctttgtatatat

SEQ ID NO: 9045 - DNA, 443 bp, Oryza sativa
  Clone ID: uC-osflcyp118e06a1
ggatcctcctatttgggggcgcccttttttttttttttttgttttttttctcttatttgttttcgggttgaaacctatctgactaatgctagagcttgagcgggcaagataccctcacaccattctaactttgatgcattcatccacagcaaagcctcactgcttgagccacaggtgaactctgaatgactagagcagtgcaaatttaaccggagcttggaccacccagagttgcagtaaaagatattgctatcgacaaatagcagttggcagcccaagtggatatgaatgtaacctttgtattcaaatgctaggggtttttaactagcaaaaacctgataaaaagatcaaaagggtgaaccctcatcggagctatcaagtcctcacccggtaactcttaggcctatgtgcgcagaacttcctgggacgctggaaactgaatc

SEQ ID NO: 9046 - DNA, 303 bp, Oryza sativa
  Clone ID: uC-osflcyp118e07a1
agggacagttctactggtatctatctccagaaaggagtaacagcgcaatctgactcgaagaaggctcagcacataaactctgggtggtacattcaaaactcaagacagataaaatttcagcatctaatagctactaatgcgaacgggagcaagcaatcctgctggtacaaacagaatgggctggctttgatgcctaaacccccctgggcaggcaaacccgggggaagcgactggttgagcctggtggccttgtcggcgtcgaaaacccaaagggtgtagaggtacttggagcagcgcaccttg

SEQ ID NO: 9047 - DNA, 368 bp, Oryza sativa
  Clone ID: uC-osflcyp118e11a1
ttttggtgtttttctttttaaaccccaaaagagtaacagaagaccagactagtctattgactggctggggcaggggccaaatggacactacaacatttcctgactataggacgacacatccgaaatttgaaacggtgccagacggtaaatcgaaactcgaagcattgcaagtggaaatcttgcattacatggggccagtaatgaagagcgttgcagcaatgtcaagaaaggacgggtaaggagtgagcaacatggtgaagcggacatgacattgtgacgaggttgacagagatacacagccgcgtgtcctgatcttactgcgtatcagctagccttgagcgaaggatctaatcatctgcactcacaca

SEQ ID NO: 9048 - DNA, 387 bp, Oryza sativa
  Clone ID: uC-osflcyp118e12a1
gaaaaataaccagaacggagtactagcactatacttcatcaaaatgattagcttaagagtcatcagcccatacgcaatctcaccaaccttgtacgagtacgacaccgccataactgccgagacgatcccagccgtccaaatccacatcgacggctcagtcttccttttacccaaccaaatgccgaagttttttttaaaaaaaaattcccagaaagccgaaaagctttgcgttagaaagaaaaagaaaaaaaaaaagaaaaacccaactccgaaccctttcttttgctccaagcgcgcgcgccgccactggactaccgtaccaccaccaccggccgatcgagcgcggcggcggctgcggcgaggccggcggaggaggccagaagagga

SEQ ID NO: 9049 - DNA, 349 bp, Oryza sativa
  Clone ID: uC-osflcyp118f01a1
acatagataacaaagagtaattgctatattagtccgcctgggtagacgatggcatgccaacacattatcgactgaaccacgatcatgcccaaacattggtaaaataccaatgccataaagtaaaccccatgcgcaggtgcatcccaagagttacataggcacggcctaatagtgaaacaacaaatttaggacccttagtgggaacacataaaaggggcttattgaccaagcgaaagacctactgaacaaacggacagggctcggtccctgaaatatggtgtcccatccgaccagtgggaccccacttgcctagtttcaagggcccaagctgatgataatctgtgaaaat

SEQ ID NO: 9050 - DNA, 433 bp, Oryza sativa
  Clone ID: uC-osflcyp118f05a1
accaagtatacattaacacaaaaacactatagaatataatctatagtagtctgtagtctatgtatacacatgaatgtctgaacgagatgtagctgcacgacattgtgttcacagcataaatgttagatacagttacttatgcaaaccgtgaggactctaggctattcctaacaatccacaactatagtcgagtactgttgtctcccttcaccctttcttgggaaacaagtgaagctcatgtgatacaattgtatgatcttccagttatctgccaccggattgctgaatgtcttcctggatattgagagactcctggctacttcaccctttcttggggaacaagtgaagctcatgtgatacaattgtatgatcttgcagttatctggcactggatagctgaatggcttcctggatattgagagacttcttactg

SEQ ID NO: 9051 - DNA, 438 bp, Oryza sativa
  Clone ID: uC-osflcyp118f11a1
attgagtcggaactattccgtcctctaagaattaattaacttggtacataattaagcagcatcaacccgaaaatgggatgagagcagacttgagacggtaaaccgatcgacacggtaaaaattaagaagtcgcaattacgaagtggaccataataataggatacgatccccgctgcgcagctgacttgctttagcagacgccgttggacttcttcttggccagcacggccctcttccagagggagatcacctcgcgctgcttctccatctccctctcgctcgccgacgcggcggtggcgtcgccgacgttggcgactactcggcctgggagcgcgtccagctcgtgcagcaccttctcgacgtggagcacgatgcgctcggctagcgtgcggttgaagtactggtggatgacgacccggagcacggtgacttgctgtg

SEQ ID NO: 9052 - DNA, 355 bp, Oryza sativa
  Clone ID: uC-osflcyp118f12a1
cacaacaccatattttattgcacaggttaagaacctgcacagaaatacacactaccggaacaaatctaaccttgtttcaaatgcttgcacatccatgcacggggtccacacaaatacgtacatttatacggtacacgtccgtccatttactgaaccgggtacacacacgcacactttcctgaagagacgcgcatggtcagaaacctagttggcttagctgaaggcgatgcgtctccatggcatcacggtggcggcggccctcacttgccggggacgaatttggtggcataggcccaggccttgttgttgacggggccggtgaggtggcccgcgaggttttagagggggcccttgc

SEQ ID NO: 9053 - DNA, 368 bp, Oryza sativa
  unsure (1)..(368): unsure at all n locations
  Clone ID: uC-osflcyp118g01a1
agttaaaaaaacccccccccttttttttaatattttttaagcttccatgtagataggagattgtaagcaggaccagaaaatgcgactagagggagaaaantgaaggaaaaannaaagaaagtgatattgattactgaaaaagcagcaatcgttgatttattacgcgcaacccgaccagctgtagtgatgaacggggtgacaactattccgggaggaggagatcagctcgacccggattacggaggcatcggtaggtcttacaccttgaacctaaagttgaggaggaacttgtttaggccgtccttacagccgtcgacggaccgttgattgcaggcattgcaggtcgcgacattcggcagctcaggccg

SEQ ID NO: 9054 - DNA, 310 bp, Oryza sativa
  Clone ID: uC-osflcyp118g05a1
cattaacaattgataccaccatgtattgcattttccagcaaggctggctggttcattgacaaatgaaagtgtgaagcccataatattacagagtattgctgcctgtttagaactaccataacattaccgaggactcaccatcccagaaagtacgccgttactacttgcatcaacactaggaaaagttcgagacgaggccaagtaattcccatttgtcgaatttgatggagatccactcatagggtccttgatcatagcaggccctgagtatgtctggggaggttccagctggataagatcaccctctggc

SEQ ID NO: 9055 - DNA, 400 bp, Oryza sativa
  Clone ID: uC-osflcyp118g06a1
gtctacaaaattccacgtattctttaaaagcaacggaagctaaataacatttgtgggtgggtgtggggggttatgatggaagaacgcgagactgaatactgagcaagatacaaaatacgctggagttactactgtcagtaggtacaaataatgtccacatcagttgccagccaacgacataattgtacaccggacgaattattgtgagctgctgcgcacaaacaggactggaagcctgatggatggagaacgcgttggtggtaatggtatacatcaaagccacatcgtgccggactgctacatgggccacaactctttcacaatagttttctaaacagattgtctccaatgttatctttgaaacaaattgagttaccaggctcatcatgcatgtaactta

SEQ ID NO: 9056 - DNA, 189 bp, Oryza sativa
  Clone ID: uC-osflcyp118h05a1
aattccagtttcatgcactgcggaagtgggatacctaaccaccccacggacgaatcgacagaagcacatgtaaaaccacacggcagaccccacaaacaaaacgaaacaggcagagggacacagcaaaggccgataacaccacgaagataaaagatgactcaatgatgaaaccagtcccaccacaccagg

SEQ ID NO: 9057 - DNA, 91 bp, Oryza sativa
  Clone ID: uC-osflcyp118h06a1
ccgacactataaaaagagaatacagcacgtgcacatgacagcgcgacacgaaaagtctgtgagtatcccttatttgtaggcggcgcgcccc

SEQ ID NO: 9058 - DNA, 518 bp, Oryza sativa
  Clone ID: uC-osflcyp118h07a1
tccttcggctggttggctcctgtgttgcggccgtcctttttttttttttttagagtgaattctaatcattcatataataataataatagaacaaggaggttaaaatccaagctatacacacatagcatccaaaaatacacgacacttcaacccacaacccactgaccgagtcaccaaccagcattcaacagacacgacagcgtaaacactcaggcgccgtaaccagccagagcacaaactagaaagaaccaaacacctttccaatttccccccctttttgccccaagcaagcaatactgtaagtgcagttgaatgagtcaatttatgcctacttgcatttgaatccatggcacacggacaggattatgataaggatgagcgcaattattatgccaagaacaatcagcttgatcttcatgttttgcagccacatctttctccttacctgtgttcctgcctgcctgaaatcttgggcctgtgaacgagattcttggtcttgttaacgagcagtttaattt

SEQ ID NO: 9059 - DNA, 258 bp, Oryza sativa
  Clone ID: uC-osflcyp118h11a1
cactgtggttttgggtttcttagccacaggaaggtgaaacatgcaaaagaacccaaatccccccaggaaaaaaacacccacaacgaaagggggggaagaaaaagaaccggaacgccccccgggggggaaagaccacacaagaaaaacagtcccaggggcggggaacctgggggaggaagcaaccccaggccgggggcccaccaaaggacccgctgtggagcatgaagcagccgagacccaccatcagcccaggggggg

SEQ ID NO: 9060 - DNA, 403 bp, Oryza sativa
  Clone ID: uC-osflcyp118h12a1
cagttgttcagaattgccaactgatgcataaagatgggatttggtatggccaaaatttcttcttttacatcctctctgttcacgaacaaacaaaaactggaaaaaaaaaagctaatatgcagacatgtaagttttgcagcaactaagctagctagtcattgacaattgtctcgtctatgattgacaaatattattagacatgacacatagaacacatccccttcaaatcaaagcaatcgcacaaaaaacatatatgagacaaaccaaaaaaaaaaaaaatctttctgccacataggttagacattgccacatcattaagactgggagattcaagagctgtggatgcctcttcctttgttacccttatgtgaaaatatgctggatggttgggtttaggcagtgt

SEQ ID NO: 9061 - DNA, 372 bp, Oryza sativa
  Clone ID: uC-osflcyp127a02a1
acgcgcgcagcatgcattttatttaggcacggtccacaattcatacatgtataggggatacgtctcgttggcagacactcacggtatagtagggtagttgggtgtacagggatatagtcatatttgcgcgtcttttcatgccgttcgttgacttcgttcacagggtcagggtcgggtaggcgatatcgagtgtgaccccacacaggccggggccaccgacgtcgcggagaatccggatgtagccgcgctcgccccatgactggccccatgagttcttgatggtccaatacttggcgccggaagacgcgttggtgccgtacccgacgacggtgacggcgtgcgctaggcgcgtgccgcacgggcccgtgtaaa

SEQ ID NO: 9062 - DNA, 402 bp, Oryza sativa
  Clone ID: uC-osflcyp127a03a1
aggggaaaagaaagcccccccccaaaagaccccaaaaaaaaaccaaaaaaaaacccccgagggggaaggcaaaaaatttgcccaaaaaaagcccctgaagaaagggtcaccaaaaaccgggccagggagggaagtaaaccccgaaaacccaaagcaaggggataaaaaaaagggtcccccccaaaaaaaaggaaaacctaaaaaggggggcccctaaaaaaaacccccaaaaacaataaaaaaggggaaggaacccaagttccccccagaaggggaaaaaaaaaaaaccccaaaattcccaccaagcaaaaaggggcggaaaaaaggcttccccccaaaaaaggggggggggggggggaaaaaaaaaaaaagggggggggggaaaaaaaaatggttcccccc

SEQ ID NO: 9063 - DNA, 498 bp, Oryza sativa
  Clone ID: uC-osflcyp127a04a1
gatcaaatcgccacgagggctatgtgtgttttcatttttcaacattccacgctgggagaagcacaaagtattcaacaattcaagctccaaacggacaaaagtagcagcctattcacccaaggttgccacgtatcgacactgacatcagtaatccactcatctttataggtgccccacaaggagaattaaaaagcattgagatagatactgatgttcgataatatcactgagagttggttgggggagcttgtttggcagtctcaaatgaatccagtatgggcctaacaacagctggaagaaaaagaccgaagccggcgatgaggcaggaggcggcgacgaccggctcctgcaccacgaagaccctcagcttccccatcgcccccatcgctcctcgtcgccgatccaaccacgcccgctttccctcaaccccgttttcacggtttaggctgctcccatttcgctcgccgctactacggggatcgcttttgctttcttttc

SEQ ID NO: 9064 - DNA, 405 bp, Oryza sativa
  Clone ID: uC-osflcyp127a05a1
gcgctgtcagtaccaccgtattcacaacttgaagataaggggaataatgctacaggcaagggatgtaggagatcgaccacacgggaacacagaccagccgagacgggaacgacggtgtagatcgcggcctcggcacacaggcaaacacgtacgaatcatggtagcagcttcgctggagacataaatcgaggccggtagaacgccggagaggcaaacacaaggatggcgcgacgccggagacgcggacgtgcatggcggcggtagagcaggtggcgccgtggcggcagggagccgatcgagcatccggtggtggcgagttgaaaagaaagttttcccctgctatttcccctgttaaccaagcaccatccggatgacatgggggtttaacacccaacgtggaaaggg

SEQ ID NO: 9065 - DNA, 322 bp, Oryza sativa
  Clone ID: uC-osflcyp127a06a1
aaaaaaaaaaaaaaaaaaaaaaacaagggcaaaaaaaaaaaacaaaaaaaaaaaaaaaaaaaaaaaaaaaaaaaaaaacccacagggggaaaaaaaaaaaaaaaaaaaaaaagggggggtggtttacacacaccccggaaaaaaaaaaaaaccccaaaaaaaaaaaaaaaaaggggggccgaaaaaaaaaagggggaaaaaaccgggggaaaaaaaaagccccccaaaaaaaaaaacccccccgggaaaaaaaaaaaaacccccaggcggggggggggggggccaaaaaaaaaaaaaaaaaccccgaaaagagggggggggg

SEQ ID NO: 9066 - DNA, 430 bp, Oryza sativa
  Clone ID: uC-osflcyp127a07a1
ggtgatacaaagctaccttaataaccgtcagcaatagataatgttctgctggaattaaggtaagttcgtagtttagagtagcatggcgacgttattactaataatagcgttctaagtctagaaagagtagaaatatacagcaagttcaagctgcatggcaaccattatatacatgcactaatggattgcagctgatcctggatcgagcttaccacccaccattgccggagctcccacccttgctgctgctgttccatccgccatctgccttgtcccaggagctgccgccaccacctccttgggtgcccttgttactgttcccgccatccgccttgtcccaggagctaccgccgccacctccttgggtgccctcgcacttgctgctgttccatcctccatccggcttgtcccaggagctgcctccaccgac

SEQ ID NO: 9067 - DNA, 480 bp, Oryza sativa
  Clone ID: uC-osflcyp127a08a1
tttttgtttttttttttttttttttttttttttttttttttatttttttatttttttattgttttagattaaagaaggtaagaaggaaaaaaaaagaggggaggcaaaaaaaaaacgaacacgcgcaccaaaaaccaaaaagggggggaaaaaaacgggggggggggccccaaaaaaacaaaggggaaaaacccccaagggaccgaaaaaaaaacccaaaggaaaagaccaccaaagctggggggacaaaagggcaaaaaaaaagggggccaaaaaacacgggggaaaaacagccggggggcccaccggaaaaaaagctgaaaaaaaaaccgaaaaggaaggcgggggggggggcccccctaaaactgggggggaccccggaaacaacccaccggggggggggggggggccaaaaagcgcggcccgggggaaaaaccaaccggatagggaacaaaaggggggagaccaaggggaggaccc

SEQ ID NO: 9068 - DNA, 376 bp, Oryza sativa
  Clone ID: uC-osflcyp127a11a1
ggccctgcaaaagtagaaccccaaaataagcccaaatttggatttcattcttgggcttttatggcatatatatatatatatcagggaaaaggtgggtccatcgaagggaaagaaaactaaaatcaacttgctgcaatttcgacggggggacaaaagcttcaaaatgaggggggaagtaggttgggaacaaacacccagctttccttattccgggtacctaaaactttgccggggaggggacggcatttatatacaagggactgggcccaacctttatatatacaagttatcaaggggatatgatttcgccacgcagttcagggggccgagggcctcaggggggggggggcagccttgataaaccggaaaaattcct

SEQ ID NO: 9069 - DNA, 523 bp, Oryza sativa
  Clone ID: uC-osflcyp127b01a1
gtgcttgtgtgtaacataatatacatatgcataccaagtactacatatacagaaagtcacataaacgcgcactcaaaatacacagcttacaagcaacgtacacagatgtaggcaatagtatgtatgtactactaacatgtctgtatgtgtatgtactactaagaaacaaattagttaatgcacaagctgcattaacatgacagatcaggatcagccaactcacggtcacagtacaatcaccttctgcctgcggaacggtgacagtagggagaacgaccgagaagctttagatgaagaaccagagtcatctcgcgaaatgagggttttcagcattgacccgtctccggctaaggctccgtcaacagatgatgcatcagaatccattgtacctgatgtgtggctcttcctaccaaacttcaaaagtttcctgaagccttttgattccttattacgaggtttttcatttgcttcaggggtctcctccactgaaactgtcgatactgggtctagtactcgagcccta

SEQ ID NO: 9070 - DNA, 122 bp, Oryza sativa
  Clone ID: uC-osflcyp127b02a1
ggggcttactttacatatatttactaattactacatatacggaaggtaacataaacgcgcactcaaaatacacaggttacaagggaggaccaggagcagtaggcaacaaaaccggaagaaca

SEQ ID NO: 9071 - DNA, 503 bp, Oryza sativa
  Clone ID: uC-osflcyp127b03a1
atataaaaaggggaaatttaatacacttttatttaccagccagattgagttggcaacgaattcttaacaagaatgacaaaaaaaaaagggaaaatgaaaagagaaaatatcatcgagcttttggtcgctgttaaaaaaaactcgacacgacattacttgcaaaattaagcctagtaattagcggtagtagtatgctcgtcccttctacaaacaggcgagagagagagtgagaaaatcaaaaacgataaatggcaatgcgcgctcgatcaggccgccgtgcgaacggctcagctagcagcgcggcatcttcttcttcttcttcttcttcttcttcttcttcgactactgttgcggctggcccgccatgctgaaggattggctcttcatcgccgtcgacttcttcgccggctcgccgccggcgccggcgccggccatgctgaacgattgtccgcccatcgcccttggcttctttgccgccggcggccgctcgtcggcaggtactt

SEQ ID NO: 9072 - DNA, 373 bp, Oryza sativa
  Clone ID: uC-osflcyp127b04a1
ggggaaaagaggggcccaaatatcaaatcttcagcggggatgggaaccctttcacaatcgactggggcaacaaaagcttcttccccaatgcccgtaaaagaaacccggtttaggcccttttttttccccctggcatttgcaaaggttctatcaacaaaaggggttaagcctaaaaaaaggggaaaaaaaaccatcccatttctgcagcatgggaagttttgcactatcacccccccgagggcaaagccaacttgggtttggcagccgtcccttaaacagggggggggtttatcggcaattcagctctcaaatgcaacacccccccaaggaaaaaaagggtgtctccagccatgaacccccaccctgggatcgc

SEQ ID NO: 9073 - DNA, 352 bp, Oryza sativa
  Clone ID: uC-osflcyp127b06a1
aaaaaaaggggaaaaaaaaaagggggataaagggcccaaaaagggggaaaaaaaaaaaaaattcctttggaaaaaaaagtgggccaaaaaaaaaggatcccaatttttggggaaaacccaaaagggggggggaaaaaaccccggggaaattttttaaaaaaacaaaacccaaaaaaggggggaaaaaaaaaaaaaatggaaacccccaaaaaaagggggggatccccccccaaaaagggggggggaaaaaaaaaaccaccttggggggggaaaaaaaaaaaaaaaaacccgtataaaaacgggaataaaaaaaaaaaaagggggcccccaaaaaaccaaaaaaaaagttttt

SEQ ID NO: 9074 - DNA, 457 bp, Oryza sativa
  Clone ID: uC-osflcyp127b07a1
gcctcgccgctgtgccggttgtgatgctgctgctggtgcagaacacgagcgggaggagacgacatctgatgcgccgcccaccgggatgcgcacgacggcgcgctgccagtctgacggtggtacagggcatggggtaccgtcctggacggcggcggcggtgtcgttgtcgtcgtccttgggaacaggaacgcccggatcttgagcggctggaggcggtcccggctggccgcgtcgtactcctccagcaggttggcgaggtcgtcgtcgccggtgacggagacgagcgcgtccaggtcctccgtcgggagctggcaccgcaggcacaccgtctcccacccgcacatgtccctcagcttccgttgcaactcgtggaaagggagggagcggtcgacggagacgacgcggttgtcgccgccgacgtagcgcaacgcgccgtcggcgtggcgagggaggatcc

SEQ ID NO: 9075 - DNA, 486 bp, Oryza sativa
  Clone ID: uC-osflcyp127b08a1
tttttttttttttttttttttttttttttttttttttttttttttttttttttttttttttttttttaaaaaataaaatttattaaatttaaattacaaaaaaaaaaaaaaagagggcaagaaaaacaaaaaaaaacaaaagcggcggggactttgaaattcaacatgaaaacaggaacgcaaaaaaaaaaaagggccgaaaaagaaaaaaaaggcactcaaacaacaaagggggagagccaaaaaaaaagggaaaaaaaccacaaagacaaaaaagttcaaaccccacgaaaaaaaaggaaaaaaaaaaaaagctgaaaacccccggacatacaccaaaaaatacaaccaaaagaaaaaaaaggaaggcaggggcctccaaaaaggcgggggaaaaacccggagagggggagaacccatgaacccaaaaaaagggggaggatcaaggggggggcaaaaaaacaggggggggcaaaccccccggag

SEQ ID NO: 9076 - DNA, 412 bp, Oryza sativa
  Clone ID: uC-osflcyp127b09a1
aaacccccaaaacaaaggaaaaggggggggaaaaaaacaacaggccgggccgggggccccaaaaaaaacccccaggggggggggaaaaacggggggcaaaaacacaccgcattcagggggggggctccttaaaaccccggggaaatggccccccccccgggggggggcccaaacaaaaacggggttggggggaaaaaaacccggggggggccccggggttgaaaaccggggggggcccccccccggggggcccgggggggggcacggcccaaaaaaaaagcccggggggccccccaacgggggggcccccggggggggaccccccccccggggagaaaaaggggctgaaccccccaaccttgggccccaccctggaaacaaaaggggcccccggccggggggggcgccccgg

SEQ ID NO: 9077 - DNA, 560 bp, Oryza sativa
  Clone ID: uC-osflcyp127b10a1
tttttggttttttttttttttttttttttttttttttttttttttttttttttttttttttttttttttttttttttttttttttttttttttttcccggaaaaaccccagggggcccccgggttcccccccccccgggggcccccggggtccccccccggtccccccaaacccgggcacccaaagggggggggggcccaaaaacccaagggggcccccccagggtcccgggggggccccccccccaaaaaaaaaggggccccccccccccggggggggacccccccccgggggaaaaaccggcattcaacggcgccggcccccccaaaaggtccccctgggtaaaaggggcgggaaaaaggggccggtgggggcaaaagcccccccaaagggcagggggggcccccccccgggggagccctgaacccgaaagcggggcccggccccccgggggggggggggtgactgggcccccgccacgagttggccgggggccgggcaacgggggcagcggaaggaccgggggcccggggggggggaacaacccgaaggggcccccc

SEQ ID NO: 9078 - DNA, 424 bp, Oryza sativa
  Clone ID: uC-osflcyp127b11a1
gaataaccaaaacataggaggtttcatttcttcttctcaaagtagtgtagcatctttccttctttcaccattacataagcttaagcaataacagataacaaatcctcctcctcctctaggtaaaatattcaaacacaatacccttataagtacttattattaggaaagtagcgtgcatgggcataaatggcagcggggggcaggttaagaatcacaatgctgagcagcgaggaaacaaaacaccataatgggacagagcaaaagcctccgaaagggagcttttaggcagaaggcttctcccacttgaggggcttcaccacctcccaggtgaagtctgggtcgtcccttccgaagtgaccgtaagccgccgtcttgaggtagcgtccgttgccgcctttcttgaggtcaaggttgatgatgatca

SEQ ID NO: 9079 - DNA, 80 bp, Oryza sativa
  Clone ID: uC-osflcyp127b12a1
caaacacacgcacacaaaagcggagacccaatctccgcaccccccctaaaaacaacacgggaaacaaaaaaaaccacgag

SEQ ID NO: 9080 - DNA, 412 bp, Oryza sativa
  Clone ID: uC-osflcyp127c02a1
ccacagaatcaccaaaattgatattccttctaatgggtaagaaggggtgcccgattgagcaaatgaacttactgccatttacaaatcaccacgtgacacaaatcggggagcccatatccaaacaattatcttgtgtgaatcacagcttcccctggacggcgtatctcatgaagacgcccgatatggaggggtgcgcggcctgcttcattgggcggaccatagaggccatcgatggccggaggctcgggttctcgccgacgcacgacgccgccagcgacgcccaagtaacattcattttagcggccaaagccctgaaggaatttttggaagggactcaggaccggctgtttacagaaattagagtgccattgttcgtctttcgttgatccaaacccaggcgttggagaatttt

SEQ ID NO: 9081 - DNA, 344 bp, Oryza sativa
  Clone ID: uC-osflcyp127c03a1
gggaacgagggaaccccccccaaacaaaaaatattagggccccccaaaaaaaaggggcccaggtacgggcacggacacacacaactggggggaaccccaaaaacaaacgggcggacaaacaaggggggaaaaaaacaaagacccaaggggggggtcgatcccaacaaaaaggggccccccaccgattagtttacaaaccgggcgatcttaaaaaacggccccaaattttttttacaaggaacaaaaatggatggatatggggcccactagctaggcgagcttaactaggggtgacaaacccggagttttttttgacccccccctgggccccggtgagggggccc

SEQ ID NO: 9082 - DNA, 484 bp, Oryza sativa
  Clone ID: uC-osflcyp127c04a1
cccgcaaatacttattcatatgttttgacaacatttctcccgacgcatgctcattggggcagacgcagctgaccacctagagcttttagttcaccattattatttagaccaagcatacgtcccaagatcagaacacatgcttacaagcgaaaatactaatagcctggctggctgcttcacagaataaccaaacgacaacctcaacagataaaaatgccacggaatgaaaacaaagcagcgaatcgtcaccagaagtcccatcttactcatcaaacactccatcattctcctccaacgcatcctttccccaggggagaagattgcccagtttaccttccttaacaggagcagggttcaccatattctcagcctcgaagcagtgcagaacagatttgggcgacccaacagcaacaggtacgtcttcagtagcgtcgaagctctggtagatgaggaggccaccacagggcagctcctgctctaccat

SEQ ID NO: 9083 - DNA, 489 bp, Oryza sativa
  Clone ID: uC-osflcyp127c05a1
gatgcaaattatttctttgatggacatatgagttcagatcaggcaggttgcaccttcaatctcaaaaatggaaaccaatcctacactagacctttcggttgatctgaaccaaaaactcccagacaaaaattctaccatttcagttggtatgaaccatctaaacaaagccaccctgaagaaattcaccactgtttagacggtaagggttccctctgccggctcagcaacaggagccttgggcttcggcttctcgacaacaatggcctgtgtggtaaggaccattccagccaccgaggcggcattctggagcgcgcatctcgtcaccttagctgggtcaataacacccgcctcaatcaagttctcatacttgtcgttcatcgcattgtacccgacttcccactcgccgtccttgatcttgttaactaccacttccccttccactccagcattgtgggcaatcagtgaagcgggagctaccaacgctttttg

SEQ ID NO: 9084 - DNA, 424 bp, Oryza sativa
  Clone ID: uC-osflcyp127c06a1
acgacaaaccacgaacttggatattaaagatgccacaaagaagggtcacataaacaacacaggtcacagcagcgaaagctacaagcaaaccctgcataatcgaaaagcaaatgtttttcaaaaccagacacacaaactgatagatagaagcccacacggacagatcataggatagcagcagtaatcaagcattgccaaggcaccaggcaagaaccctgaacctttttagtactcgtcacccttatcacccttgtcaccattgtcgaactcggagccgacctcctcgtagtccttctccagcgcggggaggtcctcgcgggcctcggagaactccccctcctccatgcccttgccgacgtaccagtggacgaaggcgcgcttggagtacatgaggtcgaacttgatgtcgatgcgggagaacacc

SEQ ID NO: 9085 - DNA, 445 bp, Oryza sativa
  Clone ID: uC-osflcyp127c07a1
tttttggttttttttttttttttttttttttttttttttttttttttttttttcctcgaagacccaacaacaaagttttgcataaagaaacatcccatggggggccagaaacaaaattaagctagaaaagcacggatcccccgcacaatttacaggatcattacatgggccataacacaggcactaaggcatggataccacaagggggtatggatccgggggactgggtaaaagaattggataagccgaagaccgggcccaggacgcccatgttctgggggccggggacaacgccgacccccaagatggggccgacggggccaaaggccagcgggtcggcgagggtaaacccggggggggcgccggtctgcaggccggagtcccgcccctccagctaaagccccgccggggacttccggatccccgacggggccagcccgaacct

SEQ ID NO: 9086 - DNA, 514 bp, Oryza sativa
  Clone ID: uC-osflcyp127c08a1
gaggtgctcgcccactaccccgctttgttctaagctccacccagtaggaggggtccacgtgtgcaggtgacgccagatgacgtcatcgtcgtcatcgcaagttacagctcaccaaaagccccccagatctaagcgcctaggattcgacacgcctcgtgtgaatcacagcttcccgtggccgtcggatctcctcgcgacggccgagatggagccgtgcgcgccctgctccagcgcgcgcaccacgtcggccatcgatggccggaggctcgggttctcgccgacgcacgacgccgccagcgacgccacggcggaggcctcgccggcgtcgtaggcgctgcccagcctctcgtcgaccagcatgcgggcgtcgcaggcggcgccggaggcgggcctgaggcgcggcgcgaggacggcggtgaggaggcggccctcggcggcgcagaaggcctccatgccggtgaggagctcgaggaggaggacgccgaagcttgacacgtcgctcttcttgtcacca

SEQ ID NO: 9087 - DNA, 402 bp, Oryza sativa
  Clone ID: uC-osflcyp127c11a1
aaaatcgcatcttcacgggtttattgacctataattctatattatcaaaaccaaggcttttatggagatgcatattcaggctacaaccagcaataaggggcccaaaatttttggctataccggcaaggaacaacccatagggggcttgccccagccccccagtaatttacaggtgctttgatagcgcccaggaccttgttctttgggggcatgtaaaaggtttcataaacaagagggaaaggggtgtccaggccgaatacttttgggacgggcgcttctaacctttggaagcaaccctcggtgatggatgcggaaatttctgcaccaaaccctccggggattggagccccatggctaacaagaagttttcctgtcttgctgacagaggcctctactgtttct

SEQ ID NO: 9088 - DNA, 436 bp, Oryza sativa
  Clone ID: uC-osflcyp127c12a1
aaaaaggtacccctcagtttttgaaaacttcagtctcacacagtagcaggcaaattagcgtccagcaaaatgaatcaacacttgcccttgagtccctagaaagacttatacgaattgataattgcagggtcatcctgcttccagctaccaaactttggggattcacattttcaccatcgccgttatgaaaatggcgctcaaaacagaagctattgcaatccgtttcacgactagctttattccgtaaccattaactaggggcttaagttcacggtatggcggaagctgcctgagtatcctttcgtcctccagggtggagttctcaccactatattccagctgggatagcagatggaacagctcgattttcttctcctcgacttgggccctaaggctagcaggttctttgttggtgataccagactccccgttcaca

SEQ ID NO: 9089 - DNA, 530 bp, Oryza sativa
  Clone ID: uC-osflcyp127d01a1
ggcgcagcaggcgcggccgaactcaatggcggagcgcgcgcggctggcgcgggcgccgcagccggagccggcgctcaagtgcccgcgctgcgactccaccaacaccaagttctgctactacaacaactactccctctcccagccccgccacttctgcaagacctgccgccgctactggacgcgcggcggctcgctccgcaacgtccccgtcggcggcgggtgccgccggaacaagcgctcgggcaagtcctcctccgccgccgccgccggcgcgtcgtcctcctcctccaagccgtcctcgtcggcggccaggcagctgcccggcggtggcgcgtccccgatgccgtccgccgcggcgtccacgcagccaggaggcgccgccgccggcgcgatcatcccgccgtcgggcctcagctccatgtctcaccacctcccgttcttgggggcgatgcacccgccggggcccaacctagggctaaccttctccgccggattccagcctctcggcggcatgcaccaccacgtggaca

SEQ ID NO: 9090 - DNA, 470 bp, Oryza sativa
  Clone ID: uC-osflcyp127d02a1
actgaatgcgcatatatatatatatccttataataaataaaataagaacaaccatgtatgcatggagaaagtgtttcatttaacgtaaataaaaagaaagaaataaaaatgagcaggcataaatcaaatgcacatcaatcggctgcatgtacaactagagcgcgcatggttatataaaatgcgaaaacaacacatgaaaataacaaatatatacgtatatatatatgctaggtcgatgttgaattaattgttgggggatggcgcaggtgctggcccatcagaggcggaggcaggggcgggggcgggggcggagtcggagtcggagggaacgaccaatctcatgtcggcgtagacgacgcggccttcagcttcagagccgcccttcttcaagccaccggcatgggcgttcttggcgttagcagtggtggcgacgaggagaagccccaccagcaccagggccaggctcacca

SEQ ID NO: 9091 - DNA, 526 bp, Oryza sativa
  Clone ID: uC-osflcyp127d03a1
aacagcaacggaacattacattaacacggattagagacaggtgaattacaatgtaattgtatctagccatgcacagtgccaaagaggcagcaccgctagaataagacgcaaacgaatccgactaacaaaatacgagtcaccaaacacactgacaatattctgagtatttttgacagatccaccaataagacgaatacagcaccatcatgtcacagagagaaacatattgttccacaaaatacaccctactcagattgttcttataagcaaaagattaaacccactactaacactacgacgcatgcttcatttgtcaaaggagtcgccgaggggaatttaagccctctcaccacgaatcctcctagccagctgaatgtccttaggcatgatggtcacacgcttggcatgaatagcgcacaggttggtgtcctcgaagagaccaacaaggtatgcctccgcagcctcctggagggcaaggacagcatggctctggaaacgcaaatcggttcttgagtcctgtgcaatt

SEQ ID NO: 9092 - DNA, 469 bp, Oryza sativa
  Clone ID: uC-osflcyp127d04a1
gggggagcgggatgatttctcagggagtactaggcccaaacaaagctcggagatgaagccgtgctttacggttcacatcatgtacaactcattggggaactttttattccggctccctggcttagcttaccccactttattttaattatttcttcttattattattctaaggttctaacctgtcctgcaggggcaaggagccccagggctcttcagttcttgcagctactcttgcccccggcttcgattcatcaccagccaggtacttcggttttaagacgcacgggactctcaaggggatcagttcaggtttcccatgcaaatgtacttgagctccaggtactcgtccatgccgtattttgatccttttttcccaaggccagattggttgacgcccccaaacggggcaacctctgtagagatgatcccctcgttcacaccgactaggccatattcaagagcttccgaa

SEQ ID NO: 9093 - DNA, 451 bp, Oryza sativa
  Clone ID: uC-osflcyp127d06a1
aggattcacatccatctcgtaccctttgtataaatatatatagccggagcttccatatatttcattcacatatgcctcacccaacaacatatagtcgtagcagataccactcttacatcaagtcagagagagatcaggtgaaacaaaaacaaaagcagagcacggccggtaaaatcaaaagacgatgaacaaactgggaacacacgaaacaaggtgggagacatcatcgaatcagagatgaacaattaaacaaggctatatatgacgatgacggcttagttgccaccagactcctcgcagcccgggggcttgtaggcgatgaagctgatgagctgcacctgcctgacgttgtcgaagccgatgatacggacgaatgcatcagggtacgccttcttggcctcctcgagctccttgagcacctgggtggcgtcagtgcacccgaacatgggca

SEQ ID NO: 9094 - DNA, 373 bp, Oryza sativa
  Clone ID: uC-osflcyp127d07a1
tttttttttttttttttttttttttttttttttttttttttttttttttttttttttttttttttttttttataaatttttttttttttttaaaaaaaaaaatttaaaaaacaaaaaaaaaaaaaaaaaaaaaaacaaaaaaaaaaaaaaaaaaaaaaaaaaaaaaaaaaaaaaaaaaaagaaaaaaaaaaaaaaaaaaaaaaaaaaaaaaaaaaaaacaagaaaaagaacaagaaaaaattatcaaaaaacaaaagaaaagaggtccaaaaaggtaaaaaaaaagagcaaaaagtcttttaaaaaaccaaaaaaaatggaaaaaaaaccaaaagaaaaaggggataaaacaaaaaaaaagaaacgtttgggc

SEQ ID NO: 9095 - DNA, 392 bp, Oryza sativa
  Clone ID: uC-osflcyp127d08a1
gtcccacaacccccaaaattaattaacggcccaaccccaacgggaagggcccaaaagggccccaaaaaatttaaagggggaggccccccccaaaaaaaaagcaaaggggaaaaaaggtatgggccaaagggggggcccaaccttaggggggcccccgttccaaagggccaaagccccctttctaaaagcccaaaaaaaattttggaacctccaatttttttttcgaaaaaaataaaagggacccccccaaatcccaaacgccaaaattttccccccccccacaaaaaccaggtgccagccaggggccccccagtgggctttaaacccaagggccatcaaggggggagaagaaaaaaattgccgacaaacgggggggaacagggggcccaggg

SEQ ID NO: 9096 - DNA, 418 bp, Oryza sativa
  Clone ID: uC-osflcyp127d10a1
gggggtaacccaacgggggaagcgcaagaaacagtaggtctcaacacagaagaagcacacccgtccagcaggagcgcatgaggggccggaagcatcaaccggtcatgggaaaaggagccctgcgagcaccttcgggtcccggcaagggaaacccacctatctaggtagacacagggaggtaaagggaaccagaggtctggccgaaacaaccgggggcttcggcggggaaagaaacctggatgaacggtgagccgcccaaaaattggatccccgaaccggaatcacatcagggagggcctcaatagaagaggggacccgccactcccaaggtgagacccccgggtcttggttttccgggtcttctggttctgatattagggagggtgactccgggtcccggtcttcccccccttctggt

SEQ ID NO: 9097 - DNA, 532 bp, Oryza sativa
  Clone ID: uC-osflcyp127d11a1
caaattcaaaaaccacgatttataaagtgccggagatgaagtacacaaattaacattacatcgagttttaataaaacatcatgcgaaaagccagcaaaaacaaaaggcagcatacagctaatgaagctctactggagtagctcgcaaaaggtccgacttattttcagtagcactctactccatttcttccgaaagagtgaccatcttctactgggtgttgtacatgtgacggatcaggtcaacaacgcgagagctgtatccccattcgttgtcataccaagacacaagcttaacaaagttgtcattgagagcaataccggcctttgcatcaaagatgcttgacctgttgtcaccctggaagtctgtggaaacaaggtcctcctcaacgtaacccagaatacccttgagtttcccctcagactcctccttgatagctgccttaatctgatcataggatgctggcttctcaagcctgacagtcaaatcaacgacagagacatccacggttggaacacggaaagccataccagtc

SEQ ID NO: 9098 - DNA, 477 bp, Oryza sativa
  Clone ID: uC-osflcyp127d12a1
gggagaacagtagagtagatgaatgtagtagtaaaagacatactagtggtagctagtggtcgtccttaagaagcgttttaaccacagcttaatcaaagacttaatcaaggtgatcgtgatgagtaactacaccgagctagggtaggtagacattcgggtccgggacgtccgtccagcagctcccggcgttccagtacgccgccggcggcacgtcgccgagctcgaagatccccgcgtccagcgacgtgaacggcgtcatgtcggcaacggtggcggcagtgggcgccgtcgtctgtccggcgagtagaacggaggcaatcccgtcctcggtcttcgcctgcgctgcgaagctgaacaccgggagaggcggcggcggaggaggggcgaacagtgacgcgagcgctgccgcttggtcggcgaaaatcggcgccggaggtggcacgtctgtcgggaaggggttcgtcgtcgtcgtcgtcg

SEQ ID NO: 9099 - DNA, 481 bp, Oryza sativa
  Clone ID: uC-osflcyp127e02a1
agcttattggaacattccaaatatacagggttcaagcaaaacatcttctagccaagaagcctcgagcattgcaaatatacaaggttcaagcaaagcatctactacttgagaattcagataatacatcaagcaaaatcacacaccagccatcagtgcttccatctttagcatcacagcctgaaagctcattccaccatcctccacatgcccatccatttgacatagttgcagagggctcaaaaggactcgaaaacacgacgcagcgatgaactgcgggcttggctgcagactgcatgacgctccattacagcccacagcaaacatatgtacatatatgacacagcagacgacaaccttactacacaaaccatacacgactgaacatattatactgtgagccgcagtatgcgtacttaattactagtagcatgtacggtatatcacagtagtagaggtaagataggtagacaacactcgactt

SEQ ID NO: 9100 - DNA, 381 bp, Oryza sativa
  Clone ID: uC-osflcyp127e03a1
ggggggaaaatttggttcccattggattggattggttgggcagctgtttcaatgtccatgaatgaggaaggccggccggccaattgttgaagagaaaaaaagccttttaggagtaggggggaggggtcccccaaggacttcagctccggcagggggggggccgaaccgccaccgccgggagccggaaaccccccaacgcccaaaccagggggggaggagccccccaaggggcctgccccggctgaaaagggggaaggcaagccaccgtcgtcgtcggaagggttcggtctcgacgacctcatgaagggggcccagtccctgatggaaaaaaaaggccgcggggaggaaaacccccgcagcggcggcccccccggggggctg

SEQ ID NO: 9101 - DNA, 500 bp, Oryza sativa
  unsure (1)..(500): unsure at all n locations
  Clone ID: uC-osflcyp127e04a1
aatcctcaaaaagggttacttatgcagtgaaaagggttttatgctctttcatacagtgtgacagtgtgtgtacatataatttggaaaaacaaagtgaagatggatttacagcagcgtttctcagatacagcggacttatagctacaagctgatcacacaagtgaactttgctgctgatgatgatatggatcatgttgttatagcttacgcccaccacgggttgtcgccggtcctgaagtcggtctccacccacggcacgaagagaaccttgccgtcgtcgacgtcggcgtgcaccaatgccagcgacaggggagcaggtccacggacgaccctgccctggttgttgtactgcgagccgtggcaggggcagatgaacttgttctcggcggcgttccacggcacgacgcacccaaggtgcgtgcacacggcgttgatcccgtacgtggccagcgtcttgtcggcctccacgacgaggtacntcgggtcacccttgagcccct

SEQ ID NO: 9102 - DNA, 310 bp, Oryza sativa
  Clone ID: uC-osflcyp127e05a1
aaaaaaaaaataagaaaaaaaaaaaaacaaaaaaaaaaaaataaaaaaaaaaaaaaaaaaaaaaaaacaaagaaaaaaaaaaaaaaaagaaaaaaaaaagggaaaaaaaaaaaaaaaaaaaaataagaggggagaaggaaaagggcccaggaaaaaaggcaaggaaaaaaaaaaaaagaaaaaaacaaaagaaaaaaggaaaagaaaaaaggaaggaaaaaaaaaagggacaccaaaagcaggaaacgaaaagaaaaaaaaaaacggagaaaacaaactggaaagacagggacccacaaaaaaggcacat

SEQ ID NO: 9103 - DNA, 562 bp, Oryza sativa
  unsure (1)..(562): unsure at all n locations
  Clone ID: uC-osflcyp127e06a1
gtcccagaacacactgaaatatcatataagttataacaatatataatatcttctcatcagaaagtaagcggataacgcgcttaaccaaatttcagccaagctgctaggagactccataccacgctgtctgatactgaaccattaagttcacaccggtactcaataatatcccggaaacagaaatccagtcctacaaacacccgaagggaaaacttgctagtcctttttgtggttcccgttggtagccggtgacctggacctgtctccacgcctcctgtgagaatctctgtcatgtggagagctgccccgacgatcccttgagcgcgagcggtccctgcggcgatccctcgagcgagagcggtccctgcggcgatccctcgagcgagagcggtccctgcggcgatccctggagcgtgagcggtccctctgacgatctcttgagcgagatcgctcccttctgcgagaccggtaaggtgatgggctcctggaacttctttgagagcctctgcggccacaatattttncaggtggaggagttcttctcccgagtcttttagctttt

SEQ ID NO: 9104 - DNA, 390 bp, Oryza sativa
  Clone ID: uC-osflcyp127e07a1
gaacttagctactctcagtaacttctgtgagttctcaaaataaagtacagattacatctctattacccatgcgccatggtcaactccaaaaagacacggatattttcatattctcagatccaagtaccttcaaaacgagcacctgaactgcttactaccaaggtaatggaggaaagcatcttccatcaaaaaccatcaactactacatgatcaactcaactcttcataggcagcaaaaagggaatgccaagtcgctaatactttggatgctcatacccatcgttcttggtcttggcctcaagaaacgaggcactcgccttgtccaaaaaccaaaccaacttaccgtccgttggctgaaccattcttgcaggaattgatggagcatcagga

SEQ ID NO: 9105 - DNA, 493 bp, Oryza sativa
  Clone ID: uC-osflcyp127e08a1
agttaacaaaagatacttcaatattggaattccatacgaaataactgtagttcatgtgctcgaattacaaaacctttctgaacagagtactgaagcaaaagatgaatccaaaacaagttctagcgtctcatacaatacaaaagcagggaagtgcaaaaacatcttaactcccaaaccacaaaaggaacaacagacagtaacaccggtattacatatccagccttgcaaagcggcagagctcaagcgccaggcaacaagtaaacatgcttctgcctcttttggcaacaatgacgagcacctagaacaaccgttcaagcagtgcagcaatcaaatttcagttattgtgctcatcagcagcttggtgatactggtagtcaccttcatcatatgcctcgccctcttcagggccttcaagttctgtgtttgtaggttgcatctgatagtactcatgctcatgtcgctttgagcgctccgtctcataagcatcatgggc

SEQ ID NO: 9106 - DNA, 468 bp, Oryza sativa
  Clone ID: uC-osflcyp127e11a1
gtcccacaggaaactgtttcataaaactaacatatcatacggactcgatggtccattaaaccagacacaagtagacatcagcaccacaaatacttgacgaacagaggctcgggatgaccaggcacatcggcagctccaccaaactggctgattactgaccaccacggaggcggagcaccaggtggagggtggactccttctggatgttgtagtcggcgagggtgcgtccatcctccagctgcttgccagcgaagatcagacgctgctggtctgggggaatcccctccttgtcctggatcttggccttcacattatcaatggtgtcggagctctcaacctccaaagtgatggtcttcccagtcaaggtcttcacgaagatctgcataccaccacggagacgaagcaccaggtggagggtagactccttctggatgttgtagtcggcaagggtgcggccatcctcgagct

SEQ ID NO: 9107 - DNA, 320 bp, Oryza sativa
  Clone ID: uC-osflcyp127e12a1
gggggggaaaagggaattgaaggtgaaaaacccccacaggggggaatttaccccgggggggtggaattcaaccaagacaacattttcattatcacaacatactattttacaaacagattatttgcccctaacatatggtacaaaaacatgctacaagaacctaaaattctaacttaaaccaccctaatccaggacctgaggccgggcttaaaaagggagggacttttctgggaccacaagggggaccccgggccctcataaacaggagccagcttttaggaggggcccaaagcaaaaggcgatgcaatgttgaatgcccc

SEQ ID NO: 9108 - DNA, 404 bp, Oryza sativa
  Clone ID: uC-osflcyp127f01a1
aaacaccaactttttttcaacgatttttgggggggggggcaactgggtgggggaacaaaccccaaggtggcccccaaaagccggccggccgcccccggggataggccactaaaaacaaaggggccccggccccaaattaaggccccccggggaacctttttaaggaattccccggggggcccaatttttaattcccatttagggggagggccccccccgagggcacgcccgccttattagctagggccaaaccgggaacaggtggggtctggtgcaggggacagccaaaggggcccggggggccttggtgcaaaactggggggggccccccgggacattatggggcgggggtaacccgaatgaaaatccgggggccccgagaggggccccccccccaattgggg

SEQ ID NO: 9109 - DNA, 463 bp, Oryza sativa
  Clone ID: uC-osflcyp127f02a1
cacaagcttctcagaagattactgatatgtaagaacatgtagtagcaagtacaattaaatgaatagcctctcgatccatgcccaaatatttggaccgaacgaacattgccatacaaagtgtgcaacatccttcctcgcatgttgctacaatcttgacaaaccgatcgaattcagttttcaacctgattttacactcttcttcatcaactttacagaaccgtggatgattttttggttacaccggcagcagcaaagtgggaggggggaaaagaatacgcggcgtcagaatcccggacaaaaaaaatgtagttccacttccatatgcaccagctttcccaaatggctgcaggcagggctcatctctgttttctaatggaggacggtgaagaaattttgaactagttttcatgctgacctgacaaattaccatcctacgaagcgcattgttttcgagcatgttctg

SEQ ID NO: 9110 - DNA, 272 bp, Oryza sativa
  Clone ID: uC-osflcyp127f03a1
aattaaacgacagtcctaaaaagagcagatcgacagaacccgtaggcacaaaaaccaggaaaacaagcaagaatcttgaggagaaaaagaaaagaaccaaaaaaaaaaaatatgcagccaactagacagaaagaaaccaatcgtagaagaaatcgaacaaccagaacgataaacgccaagggaaggagcagaccatatgcaaaagaggcacaccgggaatggaataaacacaccagtccgcaatattacaaggaagacacaaaggagcggat

SEQ ID NO: 9111 - DNA, 402 bp, Oryza sativa
  Clone ID: uC-osflcyp127f04a1
aaaggggaaaaaacccttggggggaatctgggattctttgaaaatcccccccttgaaaaaaaggggtttgaaagggaaaattgccaaaaattacaaaaatggtgggtgacaaaaaaaaaaattttttaggaaaaaaaaaactaacccctgggcctatgaaacaaccacctttttttgaaaggggaaaaaagaacctaaaaaaaattgggagggttacaaaaccaacactccaagggagggggagcccgccccaagggggtttgctacaaccggaagggttggaaccccgggaccaaaatggaagggggtgtttggtaaaccccctctttggggaggaaaaagatttttaaagggccccaatttttaaaccagggtggcaccacaagggtgggggaaacaaac

SEQ ID NO: 9112 - DNA, 442 bp, Oryza sativa
  Clone ID: uC-osflcyp127f06a1
agcaaatcgatccatgcgaccatgcgtgcaaatcagttggagcacaaatttacatgttacacccacaccctacacccatgcataataatacatcgtatatacgtacgtacatacatacccctctcgatcacacgcaccatcgatcgtacaaagttgcgtacatacatacgtacacacatatacgcatacgcacgtacatacatacataattaaaaactcgtaattaattaaatacgtagttgatggcatctctaatggaacttgaggctggtgaggatgttgttgtggacgggatcagcgaggtgatcaagcaggttctgcacggggccaaccccggtgaagagcgcctggacggagaagccgaggaaggcgagcatggcgagcctgccattcttgatctccttgagcttgagctccttcatctccgcctcgctcttggtcc

SEQ ID NO: 9113 - DNA, 433 bp, Oryza sativa
  Clone ID: uC-osflcyp127f07a1
ttttgggtttttatttttttttttttatttttctgattttttatttcattttttttcttttacttttttactattagcgtttagaacaacaccctgggggaaagaacaaacggggaaaggcccacacagggggcaagagcaaaccccacacgaggcaacaaaaaaacccaaccgaacacacgggggtaaaaaccaaaaacaaaggtggcccggacccaaaaaacagacaccccaaagaccattaaaaaaaaaaccccaaggcagaaagccaggagaaaccaaaaaaggggacaaaccccccccggagcaagcgcccctaaaaagcgggggccgaaccccaaacaacaaggatgggccccgggggacaaacaaaaggccccggggggcctgggggcaaaaccgggggaggcccccggggacaaaaagggggggg

SEQ ID NO: 9114 - DNA, 404 bp, Oryza sativa
  unsure (1)..(404): unsure at all n locations
  Clone ID: uC-osflcyp127f08a1
gcatagaaacagtaatatgctaatcataattgggaacaatgaaacgacagtcctaaaaagagcagagcgacagaacctctgcacacatagaccagttttacatgcaagtatcttgaggacataacttgctgctccaaaattcaaatttatgcagccaactcgccagcttctagtttatagtagaagatatcgtacaaccagaacgatagtcatcaagggctgaatagactatatgcaaaacatgcatatcggatatggaggtaagacagcatactgaaatcttacaaggaagacacaaaggagttgatttatttcttctcatcttctggcttggctgatttgncttccttcttctcttgctcgccctgcccatgcaatgatgccagcaaatctttcacagaggg

SEQ ID NO: 9115 - DNA, 429 bp, Oryza sativa
  Clone ID: uC-osflcyp127f09a1
cctatagagaattatacagctacattgatgattatagtattaaggctttgcatccaacacaacacagtagttgtagcattgcccccgttcacatgtcatatatttagtagatacaatatccaacatggataggaaaagaatagtgatgaaaaattataacccccccccacccaaaacaaaagaaaccatacataaagaaaatccaggtgaccaaaatccaaacgcctcctaaactgtttctcaacccctcactgagtatcgcattgtacagtataatctcacctgtacccaccatatggttgctgccctccgtatccggtacccattggattatatccactacctggacccattcccataggaggccgcatgttcattcccataccctggttcatccccatgcccatgttcattcccattggttgttgg

SEQ ID NO: 9116 - DNA, 525 bp, Oryza sativa
  Clone ID: uC-osflcyp127f10a1
tttttgtttttttttttttttttttttttttttttttttttttttttttttttttttttttttttttttttttttcttttttttaaaggggcaaaaaaaccccttggggaaaacaacaaatccccccccttggaaaagggaaaactaaaaaaccgggggggggcgggaaagggaaaccctggcccccccccccccccatttcccacaaaggtttttttttcttcttccgcccccccggtttttggaaaaggaaaaaaaaaccggccccaaaatccccaaccccaaaaaaataaaagaacccacccgggaacccaatccccccaaaggggggggggttttcccagcacccccaggggggggaaaccccccccccagggcccccccccgggagggggggttcaattgccccggacaaaggggcgggaaaatggggggggcccccaattggccgggatgaccttgttgggaaaaagggttttgcccgacctcttgggaatgccgatggaaaagggggcccggaacccg

SEQ ID NO: 9117 - DNA, 497 bp, Oryza sativa
  Clone ID: uC-osflcyp127f11a1
aaaagaaaaagaagatgcttatggacaaataattatttcatattggaaaaaaatcaagaaaaacaatacaagtcccccccattgtagtgagacacgcctccaacgaccaaaccaatcacccgaatgaattaagttatacaaatggactacatacagagaaccccaacgctaacctttttggtatatatatttttcttcagctcccagatgcagttgttactctgaaacagtcgatatatctgacggacttcatcaccccaccaaagcggtcaacgcttttccttggccgatcaggctgatcgacactagcccgtggttggtccacactctttctgtttttatccctcctatctgtgctgccccttgatttgtcccggcgatctgtgctttgtctgtgatctatgcttggccttgttttctccctgcagtctgtgcttttcctagattcctctgtgccttcagggttggttgatattatctgatggacctgagctctc

SEQ ID NO: 9118 - DNA, 431 bp, Oryza sativa
  Clone ID: uC-osflcyp127f12a1
attgcaaaaacatcatcttcttcttcatcttcttagggtacacaacaccaactcgatcatcatctcgtcgcactaaacccatcttccccaacccaaagacaacgaactcgctggccacaaatccatccaaccacaattaaccactgctaagctacggtcccccacttcacttgccggggacgaagttggtggcgtacgcccaggcgttgttgttgacggggtcggcgaggtggtcggcgaggttctcgagggggcccttgccggtgacgatggcctggacgaagaagccgaacatggagaacatggcgaggcggccgttcttgatctccttcaccttgagctccgcgaacgcctcggggtcatcggcgaggccgagcgggtcgaaggcgccgccggggtagagcgggtcgacgacctcgccgagcggcccg

SEQ ID NO: 9119 - DNA, 332 bp, Oryza sativa
  Clone ID: uC-osflcyp127g02a1
gattatctattttctttttttttttttttctttttgtctcacaaaaagggcccccttaaaaaataaaaaccctgtacaggaaagggctcccggaaccaggataaaacggaaacaccgaatggggggtgtcaaaaaccccaaaatttacccagccttgtggcccccccaattttggcccaacttaatgagggtgcctcctggcaccctaaagggaaaggccacccgacccgatggccttgtttggcaataccatcggatattttagccccaacctgaagcaaggcagctggcccacccgtggaggatgttctccccaagtccggaccgaacca

SEQ ID NO: 9120 - DNA, 334 bp, Oryza sativa
  Clone ID: uC-osflcyp127g03a1
aaaattgaacaaacgcgcatattataagtgacgaagcggtctcacataaaacagggcacacaggttacaacaacgagggttgtaagcccattaagccccaaacatcagatcaccacaagcaaatgtctcgaagacacacgcacacggcaacaggataactccacactggcagatcatgggatagcagcagttatcaatcaggccttgacacacagaacatcaagcccccagacgacgacgactcctctagtacttcgtaccatcatcgccatcctcattctcgttggactcaacgccaacctccttgtagtccttcttcaacgcggtgagatcc

SEQ ID NO: 9121 - DNA, 466 bp, Oryza sativa
  Clone ID: uC-osflcyp127g04a1
aaacaaaaagaatctcccattattttattcaaatgatacatgaaaggataatatttaccagacaggaaccgaggttttcaaagtacgaaacatggctgctgatgaacagaagcagtttattccgttattcggaacacggaattacagctagaagagacgaagttattcttaccaccctctcaaaaaataaacagtacaagtttgccatcagatgtatggcaaatcgcctagcagcaagccatcaacccttagttcttcacagtggtgacatgcctcagaagcatctgaatcacttaaggggagatacttgcagcctgctgcttgaggtgggcgatttttttcggtggctcctgctcaagacgcttgacatttgcaccagagtcaccgttactctctgaaccttcctctgaaattcagcctccatctgggcacgggaattaagttatttccttttaagcctcctttt

SEQ ID NO: 9122 - DNA, 411 bp, Oryza sativa
  Clone ID: uC-osflcyp127g05a1
gggggaaagcaaaactaaccgcggggaccttaactcagaaggggctgcgctcaacattcgggccaaacaaaccatgaaacaaagcgaaggccccccgaggccaaaaaattggcgttcacacgggagcccgccgctgaaaaaaggacccaaaacccactggaaatgggacaagctccccaaattttccttggattgggaagccaaacaaccaaatcaccccggggggcaaagagaacaacctgaggagcagcgaatccctggggaaccctttcctcccttgggggaaaaaacaccggagtctttccttgacaaaaaacctcttgggggctacccaacccctttcaaaatacccctaacatggggacgtgagcagggccactatagagcacgagggaatggggcatgtaagga

SEQ ID NO: 9123 - DNA, 412 bp, Oryza sativa
  Clone ID: uC-osflcyp127g06a1
cttcgaaacatttgtttacaattaccaaacacccagctttaaatttacgtatgtattacaaactgctcccagattgatttaaggataaaagagaagagtagaagatgttcagagaaatttcacagtcccctcacaggcctaattataagggcaaaggtaactgttttatttatcgaacaaacagctatgggggggtatgatacttctcagaaaaaaaaactaatggccagaaatctcagaaacaattatgatgttgggaacactgaagttaggctcatggttcaggttgcaacttctcacattctttttttatcgactgaaaaaggatagatgaaaggtccctctcaccaaagcttggaaacacaaccactaccaactttccagcattttctggtctttttgcaactttaat

SEQ ID NO: 9124 - DNA, 441 bp, Oryza sativa
  Clone ID: uC-osflcyp127g07a1
aagcaattagtaggtctgcttatacttttttttcttgagaactaggtctgattatactcctttacagtttacacgctagatatcagatacactagataacaatacatacttcaggaagcaggtacagatatcagatattgctacatactacctagcttagctagtcatcaggcaggttgcagtatgattcttggtccccatgacttgcttaaatcgacctctgaactcatccaagatgtctggtctctagggtgggacactagatagaaagactagcatgatacaaacctagacaacactatacaagttttctcaaggattacaggaagttgttctgacagcttcattcgtctacacataatctacatgtcagttttggaagccttctcagaatcagctagcaggaaaaatgaaactagaagattaatcaagcacaagttc

SEQ ID NO: 9125 - DNA, 450 bp, Oryza sativa
  Clone ID: uC-osflcyp127g08a1
agacaaattcatctgcaaaagcagctgaagatctatatcctgatatgcgtttgtgcaatctgatgcacacaagtgtctatgtatgatatataaatttcctgtaaacaaagaaactctttacatattttatcaagctgaactattttctgggtggtttctaagatttttctcttgcccttgcttgatggtacgcaaaaattgatccacgagaaaggaaggtcaatcatggattactcaagagaaaggtttctgatgttgcgctgctgatctgcaattcctttggctaatcgtgacggcagaggaagcaagtcagctggtgttccagtggaggatgtgctcgtcaatttcggattgaaccaccttcttagagtaagcccgttgatcctcatttttccatgagactcctcgccatgatatttgattcctaatctcctcagcagggaaccaact

SEQ ID NO: 9126 - DNA, 487 bp, Oryza sativa
  Clone ID: uC-osflcyp127g11a1
aaaacaaatgagcagtgatatctctgaactttcgcttacacatagatagcaagcagtctagtagtggaccaatccggccttctgcacgcatacagtcactcacacgctactacgctatctttacatggagaacatatacatatattgcgacatagaagtgcatatgacatataattagtgtgcacatgtgtgcatgctgctgctgcatgcagcgctagattattcgttcgcagcaggtagcgaagttgtgtgatcagttttgtcaggcgtggtccggctcaccaggaagagcagcgagaacatcaggaggagcagcgaatacatggcggtctatgtcgtcaggtggactagcgaacacttggtccggatcatggtctacgtcatcatgggggctagagaacacgtagcggtggtccggatcatggtctacgtcatcagggggactagagagcacgtagtggccggcgcggagaggcctcggcagtct

SEQ ID NO: 9127 - DNA, 484 bp, Oryza sativa
  Clone ID: uC-osflcyp127g12a1
acagaaatcttctgacagtactaatccatttatctgaaagatttgcgtggtacaaaaaaacacacacacacaaacttgatacatcggcatgcaacattagttgcagctcaagcttctccctcaacatgacaataacagaggaagatataactaagaaaaataaaattttacagacaaatcgacgacgacacagtcacatcactaggggaatgcagagaccgtggagggaagaacacgattcttaaacctcctttcctcctcttctgacaccgcctctcgcaacacccggacgcacatttcccgccatataattaacccgaggctaattataaatctgtaattaccaatttaccgcaactctgcactgcagcttcttgcaggagatgtggagagagctgtaattaatttaggagtagttcaccagggagcggtacgtcacgccgggcttccagctcgccgggatgacgtgtttgcgacgagcacc

SEQ ID NO: 9128 - DNA, 435 bp, Oryza sativa
  unsure (1)..(435): unsure at all n locations
  Clone ID: uC-osflcyp127h01a1
tttttgggggtttttttttgttttgtttttttctttttttctttgtgtggcgttttttgttgtgctttcttggggcccaagcgggggccgccgcgaccaccggcccatgatatttggagggacaggagaacacaccgggccccccaaaaaaagggggaaaggcgggcccccccccaacggggggggaaaagagcccttggccctgggcggggccaaaaaaaaaaaaaacggggggcgccaaagggggggggggggaaaacccgcccttgggtttctgcaaccccaaaagggggggtttttcggggggcccccccccgggcgggattccagagggggggggccccaaaaccagnnccccgcggggggggcccccgaaaaaagggcccgggccccgggggggaacccaaccccccccagggggggggggaaaggggg

SEQ ID NO: 9129 - DNA, 377 bp, Oryza sativa
  Clone ID: uC-osflcyp127h02a1
aaacacaacctggaacccccatagggcaagggcccaaaagaatttacgggttccccctccttaccagtttttccaaagggggcaggaaaaatgggggggaattcattcaacccggtatttttctataccccacactttcaagaaaaaagtttcccaacaattttccagattaatggcccaggaaattaattcccccggggtgggctggcaaactatgggccgagctagaccggggggaaggcccctccggcatggccccccctggggggaaaggggccccggggccgcccggcccgggggcggaaaaacgggcaccctggggggccccggagccacttgccgaggcccttggggggggaaggggcacccccccccgg

SEQ ID NO: 9130 - DNA, 354 bp, Oryza sativa
  Clone ID: uC-osflcyp127h03a1
acacacgaacagggcgtgcagtggcttactacgaaacagagaacaaaaaagaattttacccaccacagctacattacactttttttttaccacccccagtgccaatctttatttatttttacagacgccagccagtcaccttcctcatttccggccattttgctccgccggggatcgacgacgacgacgacgacgacgatgggatattcttactatcacatggagcactcgggggggaccccctgggggaagcgcttgggatcggggcaatagttgtagatcatgtacttgctctgcacccaccgaattcgttgttgccgggtgaggtcgagctcctggttgtaccatccaccg

SEQ ID NO: 9131 - DNA, 422 bp, Oryza sativa
  Clone ID: uC-osflcyp127h04a1
aaaattattattttttttatataaattaaaaaattttttaaagatggaacaaaagatggaaaagcaaaaaggaaaaaaaggcaaaaaagggaaaaaaaaaaaaaattttttaaaacaaaaaaaagaaaatttaagaaaaaacccccgggggggcctttaaaaaaaaaaaaaaacggcacaagggacaacagagttggccctgaacggggccaaaaaagggcggaaaaaaaaaaaggtattgggggcgaacaaaaaaaaaagggggaaacggaacccaaaaaaaaagggggggggggccacccggcccgaaaagggggaagccaccacccttttttgaaaaaaaaaaaaaaaaccggggggggaaacaaccgaaacccaaacgggaaggggggggaaacaaaaaaaaagacgcggaaagaaaa

SEQ ID NO: 9132 - DNA, 426 bp, Oryza sativa
  Clone ID: uC-osflcyp127h06a1
ggggagagtattttcactggattgacccgaaaatgatttagcaaaatttactggtttacagttacccacatactagtacgaggcctaactacagattccattattatggggaaatctcacttgggcacccatgctagtatgctactggatcattgacccggaatatgattcatgattgattggcccatctacaaaaatttttgggtaatttcaactcatctgaagctgattttctaatggaaaaaccacaagctttggaaaccaccgatcgatgaaatacggttgagatcgagccacgacgatgaattattcgggtttgaacacccttgatctgagccgttgattctttgatcggatgaccaacaagggcccacgttgttcactcccccttatgggccaaatgcctcctagtcctaggggaacacc

SEQ ID NO: 9133 - DNA, 430 bp, Oryza sativa
  Clone ID: uC-osflcyp127h07a1
ttttttttttttttttttttttttttttttttttttttttttttttttttttttttttttttttttttttttttttttttttttttttttttttttttttttttttttgggggggaaaaaaaaaattttttgggggggtataaaaaattttgaaaaaaatttgggccaaaaaaaattaaaaacccggggggaaaaagtttaaaaaaaaaggtgaattgtttagggggaaaaaaaaaaaaaaagggggggggggtaaaaaagggtttaacaatatttagaaaaaattccccgaaaaaaaacttgacacctttttaaaggaaggtttaagggttacaaaaaaaaattttgccccccggggggttggccaaaaagggaaaatgccaagttttgcagcccccattttttttttttttaggaaaaaaccatggtg

SEQ ID NO: 9134 - DNA, 456 bp, Oryza sativa
  Clone ID: uC-osflcyp127h08a1
gaagaaagtttcactcaaaagtgaatcagatatgaatcagtactgcaagaaataagtatgtcttgtcatatcaattttttttaccacgcaaagaaatattttatttaccgctctaatggatcgttggatgtattttgactgccttggccatctggtggtgttggtacggcacccatccaagctccatatggggaaacaaatgaattaatctgcagtggaggtgctgtccaccaacttggaacagccatggcttcaccagacagagggaaggcgacgccgggcttcactacaccaccccaccaaggaacgccgggaggcaaagcttgaggcgttggaggagcaatctcccgcttggatctatggctcatcacttgaggtttgaggagatatgaggattagggatgagtttcaggaagactgagcgacaagcggtggatttatggattaggggcaaac

SEQ ID NO: 9135 - DNA, 323 bp, Oryza sativa
  Clone ID: uC-osflcyp127h09a1
gatctctgttcagggtgtactacgaaacagagaacaaaaaaaaattttacccaccacagaggcataccactttattttgaccacccccagggccaaaacttaataatttttacagaggctaccgcaaccaccttactcaaccacggacaaattgctccgacggccaccgagaaggacgagaaaaaccacaaggggacattctaaccagaacaggaaaaacacgggaggaacccccagggggaagcgcttgggataaaagcaaactgggcagaacatggactttggctgagcccaccgcaacagctgcaaaaccacccaggatt

SEQ ID NO: 9136 - DNA, 478 bp, Oryza sativa
  Clone ID: uC-osflcyp127h10a1
gacaaattaaagagtacacatccattcttttgcgtgattattcaatagttttcaactctttgtaccaccacataaataaggaggatacaagtacaacagtatgcttgtctatagtatgaatttggtgtgtatctggactggacactaatcttctacccttcacaagtacatttccttttcgtcaacatcagtggatgaatgctcgagcgctgtctccttctcaatcttatcgaggaaacggagcatgatttccagactcttctcatcaagccttggaacagtgtggccctttggatgacgtatgatgaatggatccacatatgattctataagcttttcgccatgggttttcagaaagtcagtgtcaccgaggaagtgaaccgaggggcatttgatgttattggcgtacgccttctcggcaaccgtcggcgactgaaacttggcgcctcctatgattatgaggtactgatcttaggaa

SEQ ID NO: 9137 - DNA, 422 bp, Oryza sativa
  Clone ID: uC-osflcyp127h11a1
tttttggtttttttttttttttttgtttttcttttttttcctgggcccccccccccacccccccacggcccaacaacccccgggagagcccgggggcggcaaaacacccggggacacccggggacccccccccagccgccgaagcgcccagcggccccccaaagggccgcacccggccccgggccagcaaaaaggagcaccccccccacccacccccaaagggggggcccccccgggggcgccaccaaagggggggggccccccggcggggggggacggggggggggggggcgacacgggcccgcacctgcagcgggggcgggaccagcgggggccgcaggggcagccgggggccccccgggcggcggggacccccccaagggggcccccccggggggaacgaccccaacggccgaacaggg

SEQ ID NO: 9138 - DNA, 297 bp, Oryza sativa
  Clone ID: uC-osflcyp127h12a1
gatcgaaacatgcacttttatttcacaatagcaggtatccttacgaagcaacacattattacaacgccagggggcccctagacaggcaaaaaggggaaaatatgaaacgaaaaaacccgaaaaaacaaccaggtaggggcacccaagcgggctaaacaaaaaaacggacgggctgtctgccggaaaaagcaaggggggggggcccccatagggaacaaagggaccgcatatccccaaccctttggctcaaaaaagggggggccgggggcccaaggccgccagggccgcgagaaaccc

SEQ ID NO: 9139 - DNA, 138 bp, Oryza sativa
  unsure (1)..(138): unsure at all n locations
  Clone ID: uC-osflcyp128a02a1
acatataaaagtggccttttattctgcacagattcagaattgggggggggggggggggnaacacacaataaaacattaggaaacccttaaacaaaagattattcgttgctcattcctcaggggcggttcactgtaacc

SEQ ID NO: 9140 - DNA, 464 bp, Oryza sativa
  Clone ID: uC-osflcyp128a03a1
gcggagggtggccgcgtcacgggggagatcgtgcggcgcttcgctgagatggagggctcggcgctgctccggtggctgctccagttccaggggttcagggagcgcctcctggcggacgatctcttcctcgctaagcttgccatggagtgcggcgtcggcgtcatcgcaaagactgctgcggagtatgagaagagaagggagaattttgtcaaagagattgatatcgtgattgccgatgtggtcatggcaatagttgctgatttcatgcttgtctatcttcctgctccaactgtatctctgcaaccaccacttgcaacaaatgctgggcatattgctaattttttccacaattgcccggataatgctttccaaattgctttggctggaagatcatactcaattctgcagaggctaggggctattctgagaaatggtgcaaagcttttcactgtggggactagtgc

SEQ ID NO: 9141 - DNA, 235 bp, Oryza sativa
  Clone ID: uC-osflcyp128a04a1
attgcaaaagaatgtttcaattcaccgcaacatttgatccgtacatagtaaaacattgggaatacactaaacgaaacatttttgatggaacattttacagaggcgatttattgcaacggcctgcgtggtggggacacgtggcaggagcggcgcaggacacgtggtgagggtggcccccgggggggggggggtttttttctaccccctaaaacttccaccctttcccctaccatcc

SEQ ID NO: 9142 - DNA, 348 bp, Oryza sativa
  Clone ID: uC-osflcyp128a05a1
agagaaccaactgaacacatggcaaagcctgaagattcagttattaatcgtatacggatacagagcagttgctgcaacagggagaaattaggccggagtgacaaaatgggagagaaaaaaaacagagaggaagagcctagtgagcgtcttcctcctcgcagtgcttggtgtacttggccgggcaccagcagggcgtccagctccgacgggctgctcggcttcaccttgatcatccacccgtcctcgtacgggcttgagttaatcaggccggaagtctcagagagcttgtcgttaacctcgacgacctcaccggagatggggagttgaagtcgctggtggccttcacac

SEQ ID NO: 9143 - DNA, 385 bp, Oryza sativa
  Clone ID: uC-osflcyp128a06a1
ggaaacataaggcggaacttcgttccacttttatatttagaagaagagaattgacccagtttataaggataaccggacccgaaaaccatacatccgcatggttaattacaggaaaaccggttaaaacccaccgttacactactaaccatgatggcggagcccaaatgcaggacgtcgtcgccaagctaaacacaaaagccacccaacagctcccacaccgaaaaagaggtgttatcgttgccgagctagccgcccaagcgacccagcagcgccgacttcacaaccacagcgacactaaagccatgaaagtcgccaaagcaaaaagcagctccgacatccaacaatggacatcagccaagccaccgaggagccactttctttacac

SEQ ID NO: 9144 - DNA, 404 bp, Oryza sativa
  Clone ID: uC-osflcyp128a07a1
gtatatgtcacctagagggatgaataggtatttccaaaaatttcttaaacttacaaacagcttagaactaactggatagtccggtaccactgcagacaatctgactatagagcagtcggatagtccgactgcatcagaacaatccaatcagagcatcgccagagaaaaactataagtgacctggaaaatagaaatagaaatgaaaaaataatggtggcggtggcaggatgtagcgtgggttgatcgtttagaagcacgaaagctccttgaggcagccggtggcagtgcccttggcattcttgcagacggccatggccttgttgtttttgccagagtactcgaccttgatgtcattcaaggtgacgccggtgcacggcagcttgtcggagcagaggaggctaaca

SEQ ID NO: 9145 - DNA, 156 bp, Oryza sativa
  Clone ID: uC-osflcyp128a08a1
aaggcttaaaaggtccatcgaacgaatcatgatttcacaacatgcattcagccaaaactaccccatggggatcagccaaaaagggtgcccctgataaactgaacccttacattgcaatcatacaggcctgcgatactactacacgctcttggaaag

SEQ ID NO: 9146 - DNA, 391 bp, Oryza sativa
  Clone ID: uC-osflcyp128a10a1
gaagtgattatttaaatacttaatagtaatagactctttgatggagtattacaacatgcagcagtggcattaatacgccagtacattaattaagttacacatatgcaggctccattttggtttcttttaatttatcgtattacagaatttctgtagccttgcagatgatcacttggatatcatgtactagtaattaacaataggatgcatacaaaagatggcccaacgacaacagaagatgcgtgcatctgacattgtctggccttatttgttggtagtactccaattaattaacaagagatgatgcattcttgtgccttagtttcttcacatgcttggctttacgttgagcctattcgcaatctttaaccccaacgacttattacactgg

SEQ ID NO: 9147 - DNA, 329 bp, Oryza sativa
  Clone ID: uC-osflcyp128a11a1
ggaaaggatatttttttttttttttctttcaaaacaaaatccaaaccggggaaaaaggtaaaaaataaagggttaaagtacaaaaaaaaaggggggggccaaaaaaaaaaattaaacggctaaaagggaaaaccaaggaacggaaaaccccgaaggggcccaagaaggaaaaaccccttttaaggggaaaaaaaattaaaaaaatggggggaaagaaaaaaccccccagaaaaaatttttctcaaaaaaaaaggggggggaaaaacggcgggatgccaaaaaatgtctttagaggagtttataaaaaaaactttctctaaccggggggg

SEQ ID NO: 9148 - DNA, 370 bp, Oryza sativa
  Clone ID: uC-osflcyp128b01a1
aattgggggggggcggaaaaacccccaaaaaaaaaaaaacccaaaaaaaaaaaaaaagcaacccccatttggggcccccacccctttttaaaaaatttttaaaaaaaagggggaaaaacccccccactttggggaacgggggacgaacctaaaaaaaaggcaggggggggcaaaaaaaaaacggggggaccccgggaagggcagggggaaaattaaaaggggaaaaaaacttaaaattaaagggaaacaagggggaaaaaaaaaccacggcccgggggcaaaaggcgagggcccccgaaaacaccggaagagcactgttccggggggcccggaggggagactggacccccacctcggccgggaggggggg

SEQ ID NO: 9149 - DNA, 399 bp, Oryza sativa
  Clone ID: uC-osflcyp128b02a1
gggaaatggcccatcatcttttctaatctttataaaagggaatcataaactcgtcgttcgagattaaaaaggcaactggcctttcctgtcagctaaggatgttttacccaaggaacatgagtcctcaaatgtcaattcccagtcaataataacctgaagttcaaccgggtaaccgggttactggagctcatgggggaccaggcgttactgattgaagcctccgtcgaacgttgaggcaacactttgtagcagtttttggcattttcaacgctcccttataccttttattgccgccaaagaagcccctcatttgaacaaagacccctcctggaatgcccatatcgtttgacaggtcattatttttcaagcccctccacttttccggcagagggttttggg

SEQ ID NO: 9150 - DNA, 373 bp, Oryza sativa
  Clone ID: uC-osflcyp128b03a1
acacacacaagccaccgctatctttgatgtgagcaggatagatgcaatccaatgaacatacaaccaggcaccggtgcgaactcctgccacagcatttctcgaaaggaatcacatcccagagggcaatccttaaaaaatacaaccatgccagaatgtatttgggtccaggccttcaagggtggggtgcgcctccctggatatgagcgctcactggggggggggtgaccacagggatatccaaactgccgccttgtgattctggggagacctcccgcgcatcggggatcaatgcgttccactgttggaaactaccccactccggataacccatagggcggatgtggaccccatacacgggcagatggactttaca

SEQ ID NO: 9151 - DNA, 341 bp, Oryza sativa
  Clone ID: uC-osflcyp128b04a1
gggagggggaaaacctttaaaaacccttggagcatttggtgggggaaacagatgttcacaaggggaaacagggctcccgaaacgggaaaaacaaaaacccgggggaagggccccagggaacaaaactggggggcaaaggggtcacattattatgagggggcccagtttggaacaaggcctaaaaggttttactggggatttgggggcctggagttgggaaaaaaaacccttgaaccccattccaggaggtttttggggggggcgcccttgggcgggaacccctaaatgaagcacaggggggccttttcccccaggggcatcccgaacggctccggagggtc

SEQ ID NO: 9152 - DNA, 367 bp, Oryza sativa
  Clone ID: uC-osflcyp128b06a1
gggaaaggagtaactttagtctgcgtatgcacgaaaagacagacatttgatctttcatgaaccacaacattatttcctgaccctcgacaggtaagaacgttttattccagccgaacaatagaggattcttctcaacttagaaatcttggcctcaactcagcatgatctctgactgcgcggagaacatgcgataagttcacagcttactatgaaaccaaaaacagcaaagtctccgggggaagaagattagccctctggcacctattagaccactggaagctccccacactcactgatgaccaccttcttcttcgggcggtcccctctgtcagtctcctgcgattcgatcatcttaacgatgtccatg

SEQ ID NO: 9153 - DNA, 420 bp, Oryza sativa
  Clone ID: uC-osflcyp128b07a1
ggccaataaaaaaaaactagatatgtagcaattctgatatcgtttgccctgaagatggcatcagtgtacatgatcttattcctggtagattcatgctactacataacagtattatatctacattcatgcactccaatatccatggtttattggcttaattcagcgtgatcagccagtgccatggcttcactcagcagctcttgccatagttgagctcttcaggttgggcagcatcttggatgttgagccagtggcaatcctggaacgcgcacctgcccgaggcttgcagcgtctcgccgacgtctcggggctccaggaagtatggcgtccacgacggcgtgccgtcctcgaacgagttgtgcgtgagccgccggatgttggacccgtcgatgtcgacggtgaagatctcgccgtatggct

SEQ ID NO: 9154 - DNA, 312 bp, Oryza sativa
  Clone ID: uC-osflcyp128b09a1
caggactaagttaaataagacagtacgaaaaaaacgacagcactatgccactttggtatgttcaggtctttgttagccgaatatacagtgaggatgtaacaagggggcaatgctgactgctactgctaggagaacaattatttggataaactttcttgattgttgcattagcatcctccacgacaccatttttaccgacataattgtcttgtctgccgctttgtagtttttattgaggattctgcttaatacaggacttgcctacgaaattcatacctaaaaaaccggagggaaaacttacctaggaaattt

SEQ ID NO: 9155 - DNA, 474 bp, Oryza sativa
  Clone ID: uC-osflcyp128b10a1
gaacagataaacacacgctcaaaaagcaatcaacaaaatagagtacggtatatcagtacttgcacaacgatttctttgaaagggacatgatattcatggttcaccaatgtgatcgagtctagcacagcagaggacacgaaattgataggtcccggtatcctcagaactggaacatggcatacaagcaggttgtaaaacagagggcttccgaattttcgccctcaagcctcactggagatatggtacattcaggaggaatctgcagcggccggtggtggtgccggctgtgcttcggcgcgcttgactgatgcgcatttgatcagatggttgtagctccctttctccttgaaaagttgggagaaatggtgcttgcagtataggataccttccaaagctgcataattggatggcgaaatggcacagccaccgtgagaacatttgaagcaggacttgtggtaggcctgtccttcaact

SEQ ID NO: 9156 - DNA, 119 bp, Oryza sativa
  Clone ID: uC-osflcyp128b11a1
aataaaagaacaagggggttagtaacactagaacaaagaagatgtccattggcaggggatttggacggattaccattaggagtctggcttttacgggtacaacgccagctaattttgga

SEQ ID NO: 9157 - DNA, 248 bp, Oryza sativa
  Clone ID: uC-osflcyp128b12a1
ttttggggttttttttttgtttttgttattgcaaaagaatgtttcaattcaccgcaacatttgatccgtacatagtaaaacattgggaatacactaaacgaaacatttttgatggaacattttacagaggcgatttattgcaacggcctgggtgggggagacacgtggcaggtgcggcgcaggacctgactgtgagggtaacatgcgatgggggcacagcttactattaaacccaaaccagcaaagtt

SEQ ID NO: 9158 - DNA, 371 bp, Oryza sativa
  Clone ID: uC-osflcyp128c02a1
gttgtaggaccacagacccacaagctatattgatgtacgtatttacatatgtaggtcctgggatacggacctggtaacctgactacaattacggtactcgcaagcacacaaatgaaacgaggacacattatgttaaaatggagcatacctcaaaaccggatacaagggcacatacgaagatggacggaaagactctatctccacacgaaagctatgaacacaggaaaattgcctacttggtttactctctttccccttatcccatcaacagaaatacgggaaactgcattgcgacagggggttgatacatagtgaccgagtgaccgaaattttgaagagccctatgacccttttacgtttttaggttttta

SEQ ID NO: 9159 - DNA, 399 bp, Oryza sativa
  Clone ID: uC-osflcyp128c03a1
atcatatattcgattatatatatatatataatagcagacaggttacatccattagaactcagaatcaccggaattgaacatcaaaagtacaacacaagcagcagcagcatcagccagcagcaaacgacatgattacccacgcttttggatgaagaacaagaagtacgagaagaagaagacgatggtcgaacaccttgatcgagctcaacaatggcgatcgatcaccaatcacctacttggtgaactcgatggcccaggcgttggcgtagatgtaggtggccttgaagccggtgaatccggcggcgcgggcgagctccctgaactccctctcgtacctctccttgccgccggggttgtgggcgagcatgatcatgtcgacgtggaacaccccctgctccc

SEQ ID NO: 9160 - DNA, 419 bp, Oryza sativa
  Clone ID: uC-osflcyp128c04a1
gtgtgaaggatcaaccagccggggttggtggtatcagacggtcacgcgctgttcatgctgaagctgttctgcctgttcgcgcgcacgcccacgccggcgccgacgttggcgccgacgttggcaccgacgttggcgccgatgcccgcaccagcgccagctccagcgccagcgccgacgccagcgccgacgttggcaccgacgttggccccgatgccggcgcgagcgccgactcccgcaccagcgccagcaccagcaccagcaccagcgccgacgccggcgccgacgttggcaccgacgttagctccgatgccagcgcgagctccagcgccgactcccgcaccagcgccagcgccagcaccagcaccagcgccgacgccagcgccgacgttcgcaccgacgttagcaccgatgccggcgcg

SEQ ID NO: 9161 - DNA, 424 bp, Oryza sativa
  Clone ID: uC-osflcyp128c05a1
aagcaaccaatcatatgaattccacaaagttcaatcgttcgcggtttgtcccataccacactgaaatatcatataagttataacaatatataatatcttctcatcagaaagtaagcggataacgcgcttaaccaaatttcagccaagctgctaggagactccataccacgctgtctgatactgaaccattaagttcacaccggtactcaataatatcccggaaacagaaatccagtcctacaaacacccgaagggaaaacttgctagtcctttttgtggttcccgatggtagccggtgacctggacctgtctccacgcctcctgtgagaatctctgtcatgtggagagctgccccgacgatcccttgagcgcgagcggtccctgcggcgatccctcgagcgagagcggcccctgcggcgatccc

SEQ ID NO: 9162 - DNA, 257 bp, Oryza sativa
  Clone ID: uC-osflcyp128c06a1
ggattcgtcaagctcatttcaatctgaacccaaacatggtacaggcaggagggagcatcacaccccctttggaattggaccgggcaaatttgaaatggatgggatataaaacgacagggtcacaactcacatgggcgggtattgggttgaacttcgggggtacagaaaccttgggggggggaataccggggggaaccatttttaagctcgcccaaaaaggggcagccaaaccctggattgaaaaaatcagggccccc

SEQ ID NO: 9163 - DNA, 431 bp, Oryza sativa
  Clone ID: uC-osflcyp128c07a1
acgacaaaccacgaacttggatattaaagatgccacaaagaaggttcacataaacaacacaggtcacagcagcgaaagctacaagcaaaccctgcataatcgaaaagcaaatgtttttcaaaaccagacacacaaactgatagatagaagcccacacggacagatcataggatagcagcagtaatcaagcattgccaaggcaccaggcaagaaccctgaacctttttagtactcggcaccctcatcacccttgtcaccatcgtcgaactcggagccgacctcctcgtagtccttctccagcgcggggagggcctcgcgggcctcggagaacttccccttcttcatgcccttgccgacgtaccaatggacgaaggcgcgcttggagtacatgaggtcgaacttgatgtcgatgcgggagaacaccttgacga

SEQ ID NO: 9164 - DNA, 446 bp, Oryza sativa
  Clone ID: uC-osflcyp128c08a1
tttttatcaccaatctgcttcaccaagaatggagttagggaggcagagccagtggctaggagttggagggaacggggatggtgcctcttcttggctgcttcagttcttttttcctctcggccacaagcaaatcagccaagactctgttttagatggcgccgaaggccacggtgaggcagggttcgacagagggatagccgtgacactgtacatgagggcaccagaggctgccattacgccttcgaggaggtgggggatgcttccatggtttttctcgcaccggtgggcgaggcagccgtgatatctctcctggatctcagtaagcaagcaagcacgttcccagtgctatcgaggaggcagtgacaatgaccctgatggtcttcagcgaggcatatatgaattcctttgacgcaggtggcgatgcagtcccgacgctaatcatgttg

SEQ ID NO: 9165 - DNA, 317 bp, Oryza sativa
  Clone ID: uC-osflcyp128c10a1
atataaactccttatatttcttaatatatcacagtaggagcctctcatgctgtttctcgtaaaaaaaaagtgaatgtaattatttgtcatcgtcttggaagagactacggttcaacttgtggtgagcctcccgcatctccattttctcacacgtggtggtggccgccgcctcctcatcctgtgacgtattgctggcattggtgccatgtgtggtgagctgagggttgtgcattagctcttcgccatccacaaccacatctttcatcatctgccagtccctaaaatccgtcctcattataaaatggatggtttttacc

SEQ ID NO: 9166 - DNA, 448 bp, Oryza sativa
  Clone ID: uC-osflcyp128c11a1
ctcttgaacataatgtgcagtatatgcacatcgatcagccgtatacatgcaaatatttgcattagccataagccattacattaattagtagcagtacaaaactcggttcgtatgaaacaaccgatcgatcgaactcgacccaatttcacgtacttgatcgaatacaaattaaactgaaaattagcagtacaggtcaaaggtgatggtatactagactggtaatgcgccgtacgtgtcgtcacacattacgcctagccgtgcgtggttattgcgctatccaattccaaacttgtacgtggacggacgagcgcgtcgatcggcgtcgaccttgccaccggcttacttagggacatcggttgcctttggctccgtggcgggcttggccgcggcttcgtcggcgtcgctggccttcggcttgacctttcccttgcggccttgcgcgccggcg

SEQ ID NO: 9167 - DNA, 329 bp, Oryza sativa
  Clone ID: uC-osflcyp128c12a1
agggaacccaagactagtttattgcacccagggtcatttacatccacccacacacatagtacaagctaattaacaagcactagctaatgcaccatcagttcaattatagtacaacaggtcaaaaaatatatacccaaccaaaactttttacattaaccgcactagaaggctactttttttggtggttttttttagggaattagtatagtctagtatgagcactagctccctcaagcacaaccaaggcaaatttaatcattctactaattaagcgaacagggacagcatgtcagctaaacactagcacatattggtgcttcgtctttttg

SEQ ID NO: 9168 - DNA, 441 bp, Oryza sativa
  Clone ID: uC-osflcyp128d01a1
aaagaaaggtgcattttatttcttattaaattggaaatatacaaagtcatgacaaatcttggacaaattatcagatataggacatcagggacgatgtgtacaaattgtccaaatcatgctcacctccccaagttatacatatcagatacctggcttccaaaataatagtttcactcctctttgaagagctcgcggccaattatcattcttcttatctcactagtaccggctccaatctcaaacagttttgcatctctcagcaatcggccagttgggtactcatttatgtatccgttgccaccaagacactgtattgcctgaagtgcaacctgggttgccctttcagcagcaaagagaatcacaccagcacaatccttgcggtcaactttaccattgtcacagtccctagcaaccgagtaaacaaatgaccttgatgactgc

SEQ ID NO: 9169 - DNA, 339 bp, Oryza sativa
  Clone ID: uC-osflcyp128d02a1
gggaaaggaaaaaaactggaaaattttaaaaaagccaaaaaaaaggggaatggaaaaaggaaaaaaaaaaaccccgaaacattagggaaaagttttttaaaaaaaaagggggaaaattaaaaggggggggttaatttgacaaagggcctgttttaacaaaatggcccaaaaaaaggttaacccaaaaaaactttccctatgaggaaaaaaatttttagggtttcccaccaccgggggaaaataaagggcctttaacccccctttgggaggaaccccccctgaaggggggttttagaaaatttgcccccccggggcttttgggcttttttaaaaaccggg

SEQ ID NO: 9170 - DNA, 443 bp, Oryza sativa
  Clone ID: uC-osflcyp128d03a1
accataaagttgctgcaggcatacacacataatacattagttaacacagagttggtcgccagcaagaatattgtaacatgcatgatctagctggatggaacttccagtcacgaaagtaaatcatctcagttttttcacagcgccaataagttagaacaagatgtgaaaaaaactgagcaaaagaaaaaaaatcgatgtagtagctaatttccaatgttacacatcagggcgcaggcagtgggttggccaccagttcggtcgttccgcaggaacatcatgaccgtccagtcagtgaagagcaagaaggaagaggaagctgacaagcagcagcagcagcccgctgccaatgccagcggcagcaacagctctgcctttgtgaaggtcagcatggacggggcaccctacctgcgcagggggacctgaagatgtcaacagctacagga

SEQ ID NO: 9171 - DNA, 416 bp, Oryza sativa
  Clone ID: uC-osflcyp128d04a1
acagtgttgatagaattcaatcaagacaacattatcatcatcacaacatactatcttacatacagattatttgccactaacatatgttacaaatacatgctacaagatcttaatattctaacttaaactaccctcatccagtacctgatgccgtgcttcagatgtgaggcacttttctcggactacaagttgtactccggacgctcataatcagcagccagcttttaggatggacctaaagcaagaggcgatgcagtgttgaatgcgctctcggaactgttcattgatgaaccgctgcttgcgtctccaatgagtgatggaaatgaggggatggatttcagtatcagcttccggccaccttttcggcttggtgaaacactgagtgcattatgaggtggcgagactctctttccatt

SEQ ID NO: 9172 - DNA, 383 bp, Oryza sativa
  Clone ID: uC-osflcyp128d07a1
aaacccaagcggggatggggattacccccccaaagggaaaaaaaccccgaaaggggggaaacccccgggagtttttcccccgggaaaagggttccccccaaacccccttttttgggggggccccagcccctgaaagggccccgcaggttagctgaccccgcccgggctttggggggcccaacaaaaaccggaggctccttggacccggggccccagaaaagatcgcccccccccaaaaaattaattccccattaaaaaaccccaggggcccccaaacatggggggacaaaaaaaacccccccccccccaacaaggggaatattcaatccaacgggggggggccccgggcccggccctggaccccccagcctaaaagggggggg

SEQ ID NO: 9173 - DNA, 454 bp, Oryza sativa
  Clone ID: uC-osflcyp128d09a1
atacacaagctgagaagctttcagtgtgacagcaatccgcggataaaatgaggagaatgataacgatcaccaagaagatagccaagcaaaaattacatcaatcaaggaaaaaacaatttggggataaatggactccaggaaaaggtaactgcagttcgagagggccgaactgatcaataaacatcatgcagcatacattaattcccaccagaatttattcagcaggtagcttttctttgagatacttcagaattgctttcgttcctcgctccagcagagtccgccgtatgctcctgaggggatttccatcaagtttcaagacttgcaggttaggctcaagcaaacccagctcaggtgggagtgttgttatattgttgtccgacagatcaagctcaatcaaagaagttaaatctttgataccctctggcacagatgtaagataattctgactcag

SEQ ID NO: 9174 - DNA, 417 bp, Oryza sativa
  Clone ID: uC-osflcyp128d10a1
aacgcaaaagccacggcttttggaagcccagcaagaactttatataaaggggatcactaataacaatgatgataaaaccccatgtggaaaggaggaccatgatccacaggatgggacaagtaccgtaggtacggccattattgggggattacacaagagcccccaaacgcactcacccaaaagaccaagaaaaaggggctaatttaaatggcaaatgagcaatgtagtagtagtggtagcatgcaaccaaatcgaaatggaatgagaattttttttggcgggattttcttttttttctctttcctttttttttttacttctcccagcacaaatgcaattcaccagatcgttcgatcaatggagcaacccgagcgacacggtaagctggggaggaccattaccaggatgtcctggcgt

SEQ ID NO: 9175 - DNA, 177 bp, Oryza sativa
  Clone ID: uC-osflcyp128d11a1
gcagttgtgcttgtttttcttataattcatttcttgcaagctccaattttgaaaggcccacttccaccgccaaaaaggagaaaggatccaaccaaccggaactgggccaggggaaaaccgaccccaaggccccccgcaggccaaacagaaagcccccccccgcgcgagtcccgaaag

SEQ ID NO: 9176 - DNA, 94 bp, Oryza sativa
  Clone ID: uC-osflcyp128d12a1
gtgtgaaggatcaaccagccggggttggtgggatcagacggtcacgctctgttcatgctgaaactgttcttgcctgttttacgcgccacgccca

SEQ ID NO: 9177 - DNA, 405 bp, Oryza sativa
  Clone ID: uC-osflcyp128e02a1
caagaggaacagatcaaaacttcattacagatctagacagatagtatatgatatatctgatccctgtgctgaatgctgactaaagatgggcaactcttcgggaggcttttgaaatgcaaccaatttacaaatttacatcaattttctgtacagtgttgcagatgtgctgcttgagaggggtggcacacagatattcttcagactatgacaataattggacgatttggatggatggaatcttttttgggagctttttactcacggcaatccgaacagtcctaacaactgcagcagggcctgtgagccgaactttcacaatggggcccttgatcatgagaaactggaggccaccacctcccgtgccagcaaggtatggcctgatttcattgagaaccttctaaacat

SEQ ID NO: 9178 - DNA, 373 bp, Oryza sativa
  Clone ID: uC-osflcyp128e03a1
gggaagcccactttcacttaattcactgcacttttcctggcccttcattaccccctaattaccaagccccctggacacccccccaacacaaaacaggtttaccggcccaaattatctgcaagaaccggttaatctcttcaaccgggggggcaacaaagcgggggccccaactggagggccccctcaccccttcctaaataacagccctaattaaataaatcccctatggaaaaaaaaagggggggcccctttgaccccttggaaacgagaactcccaagctcaccccttccgggggggcttttccggccgccgccgccgccgaaaccggtggaaaaagcggggctgacagagacccccccccatgctgaccca

SEQ ID NO: 9179 - DNA, 459 bp, Oryza sativa
  Clone ID: uC-osflcyp128e04a1
aaaacacaacacactttgttaaaccacagcgtttaggggaattgaattccccaatacatcgcccaggataaacataagagttggaccatatttaacaagagagaggtcaactggaaaaaagaagcaaactttataatgaaactaagcagcaatgaaggagcaaatcgatagggtactgtggcagggccgcgacaattgcatccaagggcctctattgatatgtactccgcttgacgaactggtaaaccccttcggctgcctccacggaaacgacacatatgagaggtttggtgcgaagccgtagattttggtgtgaacatcaccggactccacaaaagatttccacggggttcatcattgactctgacaagcttggactgcaaacctgcaaaccaaagttgcaaatccaatctgggctcaacccgaacgataaatcctgcatggttattgctgccaaga

SEQ ID NO: 9180 - DNA, 131 bp, Oryza sativa
  Clone ID: uC-osflcyp128e05a1
aataattaatttttcaatcgaaaaaatcaataacatgggaaatgcccaaccaaaagatgataaaggacaaccagtgcaaaacaattgagaaaaaacacttcaacaaaagggcgaagtgccaaaagagacaa

SEQ ID NO: 9181 - DNA, 407 bp, Oryza sativa
  Clone ID: uC-osflcyp128e06a1
gacagcaactcaataatctttcgatatttcaccgagggtaatgtatggtaggaaaatcgccagacataacagagccggccagactcaactcaaactcaaccctatgatggtaaactgtttgcgattaacgcctccgcctatgacaatgtttggagataaacgcttccaccaaaaaacgaatgtcggggagtgttctcccctacaagaattattattgttttcaatgttaaaaaggcaaaattcaccagatcccgttagtgcaggaccaggaataaacacttgttcgtcatcattttctgccagtttaggcaccgcccgagccgtacttctttccaaagaagaggatctgcagctggtcatagcctgagagcacaccagcaccagcaatggcacgtaggatgttggca

SEQ ID NO: 9182 - DNA, 467 bp, Oryza sativa
  Clone ID: uC-osflcyp128e07a1
gataacataataattatgcagcattcattgataaaagcagtatcacagtaccatgatccaaaacttgacaggaaatagaaacatccagacgcagcacaatccaaggatgacaaccggttcttaactattgtaaaacaaagtgcatcagacaagtccgagctagcaaagactctctttactccgccatcctaagcctctacgttctcgacaggtgcatcaatcataagagccttagtcggcttggccaagaggtcggtgtactcctggaatggagacttgacgaacttggtgtccctccagaagtcaggagtaaggaatccataagtcttcatcaggcagtcaaaggtggccttgacgaagttgccaagggtcttggtggatccacgggacgaggtgaagacatcctcaatgccggcgaactgcagcaccttcttgggcacgcgggcggggacaatacccgaacccct

SEQ ID NO: 9183 - DNA, 303 bp, Oryza sativa
  Clone ID: uC-osflcyp128e08a1
tttttttgttttttttttttttttttttttttccttttttttttttttttttttttttttttgggaaggccacttttccttaatgcactgaactcttcctgaccattgattaccccctaaaagcccagcccactggacccacacacaaaacaaaacaggtttaccggtccatattactccgaaaggaccggcttaatacctttctcccgggggggcaaccacaagcgggggcccccacaatggaggggccaccctaaccccttacctaaataaacagccctaattaaataaacacccctccgg

SEQ ID NO: 9184 - DNA, 78 bp, Oryza sativa
  Clone ID: uC-osflcyp128e09a1
tttttggtttaaagaaaggttctttttacttttttcttttttctttttttttttttttcaactcgggagcacaaattt

SEQ ID NO: 9185 - DNA, 450 bp, Oryza sativa
  unsure (1)..(450): unsure at all n locations
  Clone ID: uC-osflcyp128e10a1
gggatgaaagcagaggtagattatattaagaagcctggcacgcatgaggagatggagcaggagtacatgatgagatcaccatgatgatagatgatccatccaagctagctagggatccatccaacattgatcgacacacgcacacactgacaacgacgacgacggttttatttaggcgtcagagcaaaaggcaaggcctgcctacatataagctgggtactaatgcaagcaaattaaggcctcgatcaaagctctgatcgacagtagcagcatccatacgataaatcctcatgcagccgggcgacgacgacgatagattcagttgcaggagcagcaggagcagccgctgcagctggtgccacacttgcaggtgttgcagccgcagccgccgtttttgccgctcttcaccggcatttccatttctccagagctcgccttgntggatggagc

SEQ ID NO: 9186 - DNA, 118 bp, Oryza sativa
  Clone ID: uC-osflcyp128e12a1
gttcagggacggtagaattcaaaacagacagcattatcatcaggggcaacagactagtcttagaaaaccagattgatttgccacataacatagggttacatcaaaccatggcctacaa

SEQ ID NO: 9187 - DNA, 426 bp, Oryza sativa
  Clone ID: uC-osflcyp128f02a1
agtctaaacaagtttgatggtaaattcaacggtgtaataacacgacaattttgatctcctatcgcagaggcagtaggcaatttcccaccaacaacacaacacatgacatcttcagagattattattcatttcccaccaacaacacatgacatcttcagagattattattctggacagaccgtcttgcggcaaaagttagaagacgtcaggattgaagtgcccggggatggagttgttctgctgagcctgcttcagatgcatcgtcagcgcatagttgtttatctctagggtcctcagttgctcctggtactgcacaacaagttgcttcaaactctgaacctcctggctcctctcgtcgaactccttttggcgctcatgttgaatggcgaccgctcgcttgaggacagcgttctctcgcagcacgac

SEQ ID NO: 9188 - DNA, 453 bp, Oryza sativa
  Clone ID: uC-osflcyp128f04a1
aacaaaaacatcaggggtttaataagataaaacggaagaaaagctgccatacaattatttaaagcgtaaccaatacttaggctagataatctttctgatagaaagagcactgctacagaccaaaggatgaactgccccgaaagggcatagcatgagtacagcagacccattacatataacgttaaataacaaatacataaatgaccgtcttcccattttactgccaaatgatgccttcgaaggctcatagatgaaggaagggttatataggcctcagtcctcagaagtacctttccatgaacccgagttaaatataatagaggttaccaacatcagttaaaagaaacacatgtagtagagagaataaactttatgcaatggaaattatgaactaatgctcacggaatcagtgtcagctaaaaaaaagggtcgctatgtattaatgggaactaa

SEQ ID NO: 9189 - DNA, 298 bp, Oryza sativa
  Clone ID: uC-osflcyp128f05a1
ggccaaaaaaaaaaatttatttttaaaggtggcccaaaaaaaaacccttttaaaaccaggggggaaaaaaaaacaaagtggaaaatttattggggggggcaatttataaagggaaacaaatttattaagggggggaaaatttttaaaaagggaaaaaatttacttaggtggaaaaaaagttaaggggaggggttttggaaaaaaaaatattaaaaaaatcttgggggaatccaaacccttaaaggggaaacaaaagggggggcttagggaaaaagacccccaaaaaataaaaatgggg

SEQ ID NO: 9190 - DNA, 361 bp, Oryza sativa
  unsure (1)..(361): unsure at all n locations
  Clone ID: uC-osflcyp128f07a1
gagcacactaagattcattcattcattcatttgatcaaagcaaacgagacgagctttcttcttgcgatcaaaaacacagatgggcaaccacacagttaacacaaactagatagttccacacaaaactaacgatgataacgatcggatgatgatgatggtagctcgattagatagatagataacttggccatgagggccccaccgctcagttcctccagttcccgtcggagttgccgccgccgcggctgccgtagccgccgccgtagccgccgccaccacggccgccaccgtagccaccgccaccgccgtagccgccttcacggcgctggccgtagccaccgncgncgccaccaccaccgta

SEQ ID NO: 9191 - DNA, 176 bp, Oryza sativa
  Clone ID: uC-osflcyp128f08a1
aaggtgggggcacccaaaagagggatttaagggctgaaaaaatccaccaacataccggaccaaaacctcgtgcattacaaaaccgagcactgacacaaataaggccaggccagaggtttttaagagcaggaggtaccataagggtaattcagcaacgttataatatcttgcacagg

SEQ ID NO: 9192 - DNA, 458 bp, Oryza sativa
  Clone ID: uC-osflcyp128f09a1
gatattaatttcatggtatatttgatcatcgatcgatacattttctatagatttgtgtccaccatggccacctccttgggcctgagcacctcgccgccttcgccgccgcctctgccgccgacgtcgacgacgcgggacacctcggcgttgtagacgtagaggcggcagacgaggaagaagaagacgaggttgacgcagttgaggacggcgaagaaggcgtagtagtggtcgagccgcgacgcgttgaggttgttctggatccacccgccgccgccgccatggcggcgcgtgacgtgcgccaccgtcgacagcagcaggctgctgaggaagttgccgacgccgaggctggtcatggcgtacgacgtgcccaggctcttcatcccctcgggcgcctggtcgtagaagaactcgatcttgccacctccaggacgcgtcggcgacgcccatgagcacgaact

SEQ ID NO: 9193 - DNA, 463 bp, Oryza sativa
  Clone ID: uC-osflcyp128f10a1
agaataaccaaaacataggaggtttcatttcttcttctcaaagtagtgtagcatctttccttctttcaccattacataagcttaagcaataacagataacaaatcctcctcctcctctaggtaaaatattcaaacacaatacccttataagtacttattattaggaaagtagcgtgcatgggcataaatggcagcggggggcaggttaagaatcacaatgctgagcagcgaggaaacaaaacaccataatgggacagagcaaaagcctccgaaagggagcttttaggcagaaggcttctcccacttgaggggcttcaccacctcccaggtgaagtctgggtcgtcccttccgaagtgaccgtaagccgccgtcttgaggtagcgtccgttgccgcctttcttgaggtcaaggttgatgatgatcatgccaggcctgaagtcgaagttctccttcacaatcttg

SEQ ID NO: 9194 - DNA, 296 bp, Oryza sativa
  Clone ID: uC-osflcyp128f11a1
attattagggaaaaaaaattgataaaaaagggaacaaaaccgggcaccacagtcacccaagggaccaccaagggccaaaaaaagctaaaaaaagggcacggcgggggggaaaaaaatgacgaaaacaaggggaaaaaaaaagactggccagggacggagaacgcccgaaaaaagaccggggccggaaaaaacctaaactggggccgcagcgccccaataaaaaacctctaaaaaacccaggggaactcccaggaaacgcccgggcatactccagggtctaccccaggaactgaaag

SEQ ID NO: 9195 - DNA, 436 bp, Oryza sativa
  Clone ID: uC-osflcyp128f12a1
aaaacacaacacactttgttaaaccacagcgtttaggggaattgaattccccaatacatcgcccaggataaacataagagttggaccatatttaacaagagagaggtcaactgaaaaaaagaagcaaactttataatgaaactaagcagcaatgaaggagcaaatcgatagggtcctgtggcagggccgcgacaattgcatccaagggcctctattgatatgtcctccgcttgacgaactggtaaaccccttcggctgcctccacggaaacgacccatatgagaggttgggtgcgaagccgcaaatttgggggggaacatcaccggactccacaaagattcccacggggttcatcattgactttgaaaagtttggactgcaaacctgaaacccaaagttgcaaatccaatctgggcttaacccgaacgaaaatcct

SEQ ID NO: 9196 - DNA, 341 bp, Oryza sativa
  Clone ID: uC-osflcyp128g01a1
aaggagttgaggagaattacaacagcgtacatccgcaagaggatcaaatcagagccctatacaaaaaggaaggatatgcagcgcacacatccgtccgtacagtcaagctaaccaaaagccactgtggattcattcacttgtcgaagtagccctcggtcctgcccttgaacccgatctggccgaaggtgagcgccaggaacagcccaaggtgccacgtcaccaaccacagccagaacggcgagtcgagcgccggcggcgaggggaagtgggagagctcctggccgatgctggagaagaagagccccgtgaggctgttgccgttgatcgccgggacgcttgac

SEQ ID NO: 9197 - DNA, 377 bp, Oryza sativa
  Clone ID: uC-osflcyp128g02a1
ggactacaaaaggggattctttaagccttaatctcgaaataatccatggacaagtcttgccattgtaatacgtctcgtacgctaacgaagcggcctttccttgtcacaatgtcacatgtaagatggatgtatacttggaaaattacatcaacgaatccgggagtaattcggcctgaaaaaccgtatatccaatcctgactaatacaagcaagtatggcagttccctatacagttatcgtgaagaaatagagtttcagcaaaacagccaatcccaactgcaacaagaatatccctgcaacgatcaagaaccatcgctctccagaatttacaatgtgagcgcgcaaattcatagcaacgaaggtagcagacataaaccc

SEQ ID NO: 9198 - DNA, 428 bp, Oryza sativa
  Clone ID: uC-osflcyp128g03a1
gacacaaatatattttattcagcgctgatgcggctgctaccccaaaattacaaaatttattacacaaaagacattgcggaaagctttgtacagtttcactacatgctctcgatcatctggatagggtaagacttttgctaccaagcgtctaagctaagtaattaagcgatacctttcttccaaaatatggcgactcccaaaaagagatctaccgggacctttagctgacagaagtgcaaattgactgctgggaatagagaccatgtatgggatgcacaaagtgctgcttgcttcttctacgttttgaaactactgtaaatccttctgtatccttctcactcttaggtaccacggtggccttctgctgtttgtcaagctctttgcgacctgacggactcttgtttatgttgctgctgctctgtgcatta

SEQ ID NO: 9199 - DNA, 139 bp, Oryza sativa
  Clone ID: uC-osflcyp128g04a1
gtggggcagaaatcaaacggattgattattggcaaatacttgacattccatgattccaaaaggcaccacttcctataaattagaaaacaagaggaggaaccccccccccatgggggattgaaggttggcaaccccaacc

SEQ ID NO: 9200 - DNA, 388 bp, Oryza sativa
  Clone ID: uC-osflcyp128g05a1
ctaacaccacaaaaaatattttcaaacggaagattggacaaccaaaactacaaaagtataatgctgggaatatacttttcaagctacaaaatataaaaatgagtacctgggcattcaggtatgattaaggcaaccatgcaaaaaatttgagataaacttcaacaaatgtgcggcttcaaaatcacatgagagatttttggggcaattattgccagtttttgcatctagcttgttttcaggttcactgataatctttagccgttcaaaaaaacttgggaggtttctcatggtctcctcctggacattctgtggagccttctctttggaaccagaaacttgcattttttgtgacagtgcgtggcggagcttttgaagaacttctgtcttt

SEQ ID NO: 9201 - DNA, 371 bp, Oryza sativa
  Clone ID: uC-osflcyp128g06a1
ggccagcagaaatcaaattccatatatggggcataaacaaatgagctaggagtacagtaggcgtgatcaacagtcaacactgagcattcttttacgcaagcgcacaatcccaccgcagcaaccaaaacgatacaaatggcccaagggggtccaagcagcgcaatggtgaattggacccatcccaccttccgattttactcagcaccgtcgcctggatgcctccaagaagtcgtcagattgcgagctttccggtctagctggacgttttctagagcacttgatgcttgcaacactttttcagagatatcatcagcatcatatctccagttgtattcatcctttcttgcattggaagccgaagaccccccttt

SEQ ID NO: 9202 - DNA, 317 bp, Oryza sativa
  Clone ID: uC-osflcyp128g07a1
agaaacaatttaatttaacatacgcaaactgatattatcacaatgttagccggtgacaatggaaagagttatttaggtacaagcggatcattgacgggggagacaagacattgggtggaccacaacacccaccagtggcgccaacaaggggcgctatccgttttaggacgagagaaaaagtaaaacatcaccatgtgaagtgaaactgaataattctagtagacgatgatgatgatggataggctccttaggacgcccgccgcccttagggtgttgctgctcccatcttgtccactggaaggctcactcgggatcgg

SEQ ID NO: 9203 - DNA, 436 bp, Oryza sativa
  Clone ID: uC-osflcyp128g12a1
gtatgtatgcttttaatattaatcgttaatcgcattgttttttggctcacatgaagaaagacttacaatgttttaaaagatacaacccctgccactgattattttcctacagacagggtggcaccaatctaaacttagcacacatatggaacaattttgctctgcccaaacacctacagggggaccttcgagacactagctgggccaacataagaatgatcgaacggccattgcggaggcactggtaggtatctgcatcctgacggacagtaatggaaccgcaacaacaggggccgctgcaaaccagactgtccactgaaaaactgagagtcgcacttgcgggtatgcacgactgcaaccattaggccgcgttcagagtgcataccccctaaccacctgggatggcgacccactgaaactggggcgaaattccccc

SEQ ID NO: 9204 - DNA, 357 bp, Oryza sativa
  Clone ID: uC-osflcyp128h01a1
aatgggaacaaaacatttttattaccacaactttttaaggatggaattgagtagcaatactttcaccccaaaatacagtttagcggccatatcttaaaaaagccgcttgctttgcccccatggctggcaagctgggcaaagcagctaacacaaagaacacgagatcactttaaaccaaacgggaacgaacgaaaaaaataccggggcttttttgtctgaagatacacgaagcggtccggttccttttatttttaggctcctctcctcccccaagatgggggtctggcaatggcaatggcgaagggaacttggcttaactgatgggaaggggcccgccgatccactccttgaggccgg

SEQ ID NO: 9205 - DNA, 299 bp, Oryza sativa
  Clone ID: uC-osflcyp128h02a1
ttgggggtttttaaatttttttttttttggctagcaaaagaaaatccccaaagaagaccccagggggcatcagaggtgagcatcacaaacacgaggaaagggccaaaccaggaaaaagggggccccccccaacgacaaggacgggtccctccgggtggccaccctaacaggttaccaagacactccacatttctgcatgggggatggtaaaagaaggggacgggggcaagggcaggggggaaaccggcaacgggcccaaggaacgagaacgggaggggacccccctaagtatacccccg

SEQ ID NO: 9206 - DNA, 378 bp, Oryza sativa
  Clone ID: uC-osflcyp128h03a1
ctccttggtttctatttcatttaattccgatagatagcaacaagcagtttaaacaccataaccaaagcgaactcaattcatggaaacatcacggacaaagaacacctaacactggatggatggatagagggcttttcgactcgagagagccactggacacaataacgactcgactagatgataagatgattttgccacggatagctaaggataactggccacgatgggccccaccaataagttcctccagttcccgccggggtcgccgcctgaggcgccgccacggttgccaccgtagccgccgccgccggcggcacggacgacgagagaaccgtcggcgcccccgaaaccgccctcacggagcccgtagacggcggc

SEQ ID NO: 9207 - DNA, 429 bp, Oryza sativa
  Clone ID: uC-osflcyp128h04a1
acatgaaaaattactttaagtgctttattgaattattactgatcaaacaaacaatatatatacgtttacacttattattgtttttctactgagctggccttggcactctcaaggcctcagccagtatgtagcagcatcagatggcatgatctgcagtgtcgccattatcaggagcagtgatgaagcaatcacttgatcaggatgcacctgattggtgagccctcggatccaaccagcctcagaggtaagcaatgcagcatgtagattccagccttgacatcgtctagcttcaggccttcgactaggatgatattcgggattttgaaaaagaccacatgggcagtgatcaagtgatcatatgctgcaactgatagatagtcaataccaactagcttgatgtcagtgttatcgactaaccactgtgcacca

SEQ ID NO: 9208 - DNA, 455 bp, Oryza sativa
  Clone ID: uC-osflcyp128h05a1
gtaccgcatgaacaatttgattaatcagctggtcctgagtcctgacaagcaagccgaccagataaaaattaacaggagactaataatattacattgtcaaccttcatccagcctctaaaacatcctaaactggctgagaatgcggaatgctcaactagtcagaagacgcattacaagacgcccagcgcttttgttcttgcgccgtatccaggacatgcggacactttgggtttaccaagcaagcagaggagcatacaattcctaatcgcccagcctttctacattacacgccagccctccctacgctctcgattccaaggcaagcatgatcttcttccggggacccatcggaatgcccaaagctttaagatcactgtcagtcatgtgtcttagggctgccatgtcaacctcttctgcctggaaggtaatcgagtacttctcaagtccaagagatt

SEQ ID NO: 9209 - DNA, 415 bp, Oryza sativa
  Clone ID: uC-osflcyp128h06a1
agagctcccaacgcagttcttcaattcaaaaagactgcccaaacagaccaagggtatcatcatagcagcaaagttttttaacacgcaacatcaaagagacactaatgcaataagataacttgaagcgcggatcactagcaaatttcgcgcttagtcgacctcctcgatcttggggccagcaccgctgccgcctgccgggggagcatcgtcctcgtccatgccgccggccatgtccgcgccagcgccctggtacatcttggcgatgatggggttgcagatgccctccagctccttcatcttgtcatcgaactcatcagcctcggcgagctggttgccggccagccactggatggcctgatcgatggcatcctcgatcttcttcttgtccgctgccggagcttcaggcgatcttctc

SEQ ID NO: 9210 - DNA, 330 bp, Oryza sativa
  Clone ID: uC-osflcyp128h07a1
ggctagctaataaagatccccaaagatgaccacaggtagcagcagaggtgagcatcagttacactaagaaaatggctaaagataaaaacgagtacaaacacatacaagtgtggataggacattaggaattgctacgagcgtacaagcaaccacccagctccatacacacctgggggctgggcaaagctttcatcctttttctggccttgggatcaatcccctccagcatccatgacatcgacggtgaactcgtactcctgatcgcagcccagataagaatcggacatcaggtagatcatgtactcctttctcccagcttctgaagcagcg

SEQ ID NO: 9211 - DNA, 174 bp, Oryza sativa
  Clone ID: uC-osflcyp128h08a1
cccaatgatgtccccaggttgctatcagggtgtgcattcgttacactaatgaaaatggctaaagaaaaaaacggggacaaacacctacactttgtggataggacatgggggattgggtacccgcgtccaaggaaaacacccatgttccaaacaaacactgggggcgtgggcaaa

SEQ ID NO: 9212 - DNA, 411 bp, Oryza sativa
  Clone ID: uC-osflcyp128h09a1
actcgtgaaatcacataaatatataatttctgaaggggcagaattcacgtctgttgatattctgtgatcgtctccatgttttttcgttatccacttagtttacatacataacaacagatgcctaacactgttacaggagaacgttaaatgctctgtttcttcaacagtatcatgctggcacaccattcaactcttgtgggatctctttgctcagcactggaaggtgccccttctcctggaggctcttcaccgtctcgtaaagcgagtcgctcacaggtatgaagtggaggccaagatcctgcagcttcttgttggacatcttgtacggctgcttccgtgggttcacctcgtcagagcaccttgtgggcacaggatactcggggaaaagcttgccccggatgtggacgacgt

SEQ ID NO: 9213 - DNA, 447 bp, Oryza sativa
  Clone ID: uC-osflcyp128h11a1
aaatcaagaaagaatgccagttttcttgccagtcgaatctcgcgacaaagcctacgaaaacattcctgatactttttccactactaaattatggcagcttatacaaagtcaagtaaggctacaaagagagagaatccttaggcaaagaaagatatcagcacatatgcttgctaagggtggaaggcggaggggatgataaattacatatcggatgtcatctgacatggaaaaaaagggagggaaaacttcttttccgggtaaggagtaacaccgtaccatcaaggatggtggcagatgcaaggcaaggctctaatccttttaactctatctttcagtaagacaactgaagcaggcagcaaaatgccatagttgcacaatacacaagcagctaaacgaacagttacaacatacagttgacagggctcagatgctttgctgtcgcgaatg

SEQ ID NO: 9214 - DNA, 284 bp, Oryza sativa
  Clone ID: uC-osflcyp128h12a1
gaaagactactaaatattttataaattcaaaacaacaactactccgtagtagggtactactccacaagcgattgaaagccaaaaaaaagatactactaattgattgattggttgattgattgattaaggggatatatgtgaatgaagaatcaggcccagactctttttttggggataagggcgaccggcttgaccttggctatgcgagccgggacgatgaagtcattggcggggaggccccccgcggagggcgtcttgaggtcggccctgacctggttgggggc

SEQ ID NO: 9215 - DNA, 523 bp, Oryza sativa
  Clone ID: uC-osflcyp151a03b1
cgtgcggtaaactctagccagatctcgctcgctcgccgctcgccgccgccgccgcgttccaccgagcggagagtagagggaatggcgtccgagggcgtgctcctggggatgggcaaccccctcctcgacatctccgccgtcgtcgacgacgccttcctcaccaagtatgacgtcaagctgaacaatgcaattctcgctgaggaaaagcacttgcctatgtatgatgagttggccagcaagggcaatgttgaatatattgccggaggagccacccagaactctatcagggttgctcaatggatgcttcaaactcctggtgcaacaagttacatgggttgcattggaaaggataagtttggtgaggagatgaagaagaatgcccaagctgctggtgttactgctcattactacgaggatgaggctgctcccacgggcccatgtgctgtttgtgttgttgggggtgaaagatcactggttgaaaacttatcagcagcaaactgctcaaatctgagcatttgaagaa

SEQ ID NO: 9216 - DNA, 288 bp, Oryza sativa
  Clone ID: uC-osflcyp151a04b1
cctatctttaatctcgcccttcctcctcctccgagcgatggagtcctagacctgtcccggccgtagacgcgcgcgcgaaggagagagagagagggagagagggagggagatcgcctagccgcctcggcgtagggacccggatgtgtgagaacgaggatgttcttctgaattttgtatagcgggcgtgcgcgcttgtgcagatctcgtcctacaactcgtacgccatcggcatagccgccttcatcggtgcattcgtcctctgcgccgactgggggatctttatcaagg

SEQ ID NO: 9217 - DNA, 421 bp, Oryza sativa
  Clone ID: uC-osflcyp151a06b1
tataattttttaaaaaaaaaaaaaaaaaaaaaaaaagaaaaaattaaaaaaaaaataaaaaaaatataataaaaaaaaaaaaaaataaaaaaaaaaataaaaataaattgggggggccttttttaggggttctagtttttcattggggcggctgcctttttgttattttttttttggggccccttatattaatttttttggccttttttttttcccccccttgtttgaaaaaccctgggggtttcccaatttattctttttgaaaaatccccctttttccccgtttttgtttttttcaaagggccccttccttttgccttttccaaaattttgcaaaccttaattgggaattggtccccccctttggggggccttttaggggggtgggtttgtgggtttttcccgttgtttacctttcctt

SEQ ID NO: 9218 - DNA, 156 bp, Oryza sativa
  Clone ID: uC-osflcyp151a12b1
tatatatgttccctggttaagtttatctgtgtggcctctgtatagccgtggatatgatctgcttccgtaaaccatacatgctgagcagttgcatcaggctcagaactgtaaaacaattaaatttatgtgtctcaatgtaacaacacctgtttggat

SEQ ID NO: 9219 - DNA, 301 bp, Oryza sativa
  Clone ID: uC-osflcyp151b01b1
cttcttgatagattttctagggttgtaaagtcctatgcaaatgcagtcttaagttcatttgaagaccctgaaaagatcctagaccaggctgttttggaaatgaatgatgatttgacaaagatgcggcaagccactgcacaggtcttggcttctcaaaagcggcttgagaacaaatacaaatccgctgaacaagcttctgatgattggtatcggagggctcaacttgctcttcagaagggtgatgaggatcttgctcgtgaagcccttaagcggcgtaaatcatatgctgacaatgcaagct

SEQ ID NO: 9220 - DNA, 344 bp, Oryza sativa
  Clone ID: uC-osflcyp151b04b1
gtgttatttaagattggggttatcgaatcccttggggagagatgtgttatacttcttctaggcggtgttatgatcttcacattttacaaggcacaaggactatccgcaggttattacccggttgtggaagacaaacttgagcttgcaacatctctccttgcaaaggcaaaagaaaaggcgagctgccctcctgttgccatgtgacgttattattgctgataagcttgctcctgatgctaacagccaggttgttccagcatctgttttttcccgatggttggaagggtccggatattggaccagattcaatcgcgctatgtagctctacccctgagaacaacaca

SEQ ID NO: 9221 - DNA, 512 bp, Oryza sativa
  unsure (1)..(512): unsure at all n locations
  Clone ID: uC-osflcyp151b05b1
ggatgccgtcgcctacaactccatgatgtcaggctacattgacggtgggcgcaacaatgaggcgttaagcctcgtttggacgatgttggaggcaggcgtcaggcctagcggcttcaccttctccattattttgtcagctgttcgggttgctcgtcatggggtgcaggtccacgcagctgctgtccgccactgttttgcacatcagaattctgtagtcggcaatgcactcatcaatatgtatcggcgtgtcggcctcttggaatatgcagtgcaggtgttttggagtatgaatggacatgatattgtttcttggaattccgtcatgtcagtgtacagggatgatggccagagacgtcaggtttttgagtgtttccggatgattaggagccatggattatnttttgacgagtgcagtttgtccacagtgctcagtgcatgcatagatgctgaggattcgtctaagggtgaccagttgttgacccactgtgtcaaattggggctccttagaaatt

SEQ ID NO: 9222 - DNA, 422 bp, Oryza sativa
  Clone ID: uC-osflcyp151b07b1
gttactggacatactctactactactagccagtaagctagctaactaactacgtggctatggcccccaccgtgatggcctcctcggccacctccgtggctccattccaagggctcaagtccaccgccggcctccccgtcagccgccgctccaccaactcgggcttcggcaacgtcagcaatggcggaaggatcaagtgcatgcaggtgtggccaattgagggcatcaagaagttcgagaccctatcgtacctgccaccactcaccgtggaggatcttttgaagcagatcgagtacctgcttcgatccaagtgggtgccttgtctcgagttcagcaaggttgggttcgtctaccgtgagaaccacaggtctcccggatactacgatggcaggtattggaccatgtggaagctgcccatgttcg

SEQ ID NO: 9223 - DNA, 442 bp, Oryza sativa
  Clone ID: uC-osflcyp151b10b1
tctgcttattaacacaaagattagaagaaagcaggcaacaatggcgtcagctccggccgcctcttccgcagtgcttctcgtcgtggtcctggtggcgagcctcgccgccggcggagccaacgcggtgaccttcaccatcaccaaccgttgctcgttcacggtgtggccggcggcgacgccggtgggcggcggcacgcagctgaacccggggcagacgtggaccattaacgtgcccgccgggaccagctccggcagggtgtggggccggaccgggtgcagcttcgacggtgccggccgcggcaggtgcgccaccggcgactgcggcggcgcgctgtcgtgcaggctgtccgggcagccgccgctgacgctggcggagttcactctggggacgcccggtggtaaccgggacttctacaacctgtcggtgatcgaccggtacaac

SEQ ID NO: 9224 - DNA, 410 bp, Oryza sativa
  Clone ID: uC-osflcyp151c03b1
atttggcgatcaaataccactactattaccgctggttttggtgcacgttctgtcagtcgtccgctaaatcgaccgacaaagcatacatcgtggaatgacatgctacgaaccattgtacgagcctttgaagtcttcgtttgagtttatggtagaacatgaagcttaacatgatgcaaaagaatactcgagcgagtactagggcaacgtaaatggaagagagactgcaagagaggctgcactgcacgttgatcaaatcatgtgtcatataaacgaacagtaatacgaagagggatatgttggctgtattttgaggcttacgctgccgcatacgtctttatgtattttttatggcggcagttatggttatagttggctatattcccggttagtttgcatgtatatcagaaggg

SEQ ID NO: 9225 - DNA, 460 bp, Oryza sativa
  Clone ID: uC-osflcyp151c06b1
cattattgtagcaatggcatcctcctcccttctactcgcctgtgttgtggtggcggctatggtgtccgccgtctcctgcgggccacccaaggtgccaccgggccccaacatcacgacaagctacggcgacaagtggctggaagccaaggccacctggtatggtgcgcccaagggtgctggccccaaggacaacggcggcgcctgcgggtacaaggatgtcgacaaggctcccttcctcggcatgaactcctgcggcaacgaccccatcttcaaggacggcaagggctgcggctcatgcttcgagatcaagtgctccaagccggaggcctgcttcgacaagcccgcccttattcacgtcaccgacatgaacgacgagcccatcgctgcctaccactttgacctctcccggcctgccttcggcgccatggctaaggatggcaaggacgaaaagctccgtaag

SEQ ID NO: 9226 - DNA, 525 bp, Oryza sativa
  Clone ID: uC-osflcyp151c09b1
tcgtttctttccggccccttcccttccatccccggcggcttcccagccgtcggcaagggggtagggggggggtaataataaactatattataaataaaataaaatataaaaaaataaaaaaaaattaagatatttataatattaaataaaataaaaattattttaaaataaaaaaaaaaatttttttaaaaatattattaaatatatacaaatatgataactaaaattttttaataaaataatattttaataaataattttatttaaataataacataaaatatttcatatataaaataaatttaaattataaaaatactttaattaaaaatttatatatttaaataaaaaataaaaaattttaaatacataaactattaatataaaaatattaaaaaattatttataatataacaatttatttatccttaataaaatttataataaaaattataaaatattctatacatttaaaatattttaaatactttaataaaataattaattataaaatttttaataaaa

SEQ ID NO: 9227 - DNA, 497 bp, Oryza sativa
  Clone ID: uC-osflcyp151c12b1
gataggcgtcttcgtactcgcctctctccgcgcctccgcgcttttcctcctcctctcccctctctcccttctccgccgccgtcgcagcatcaacccaatccgccgccatgagggagtgcatctcgatccacatcggccaggccggtatccaggtcgggaacgcgtgctgggagctctactgcctcgagcatggcatccaggctgatggtcagatgcccagtgacaggactgttggtggaggtgatgatgctttcaacaccttcttcagtgagactggtgctgggaagcatgttccccgtgctgtatttgttgatcttgagcctactgtgattgatgaggtgaggactggttgctaccgccagctcttccaccctgagcagctcatcaatggcaaggaggatgcagttaacaactttgcccgtggtcactacaccattgggaaggagattggtgatctgtgccttgaccgcatcaggaagcttgctgacaactgcact

SEQ ID NO: 9228 - DNA, 441 bp, Oryza sativa
  Clone ID: uC-osflcyp151d07b1
tatacattcatgagcaggagtgttgttttcaatgaatctgttatgtttaatgatagcttgcccacaaatgtcataccaggtggttctgatgaggagcagcaatatgttagcgtgcaggtggagcacgtggatgatcagaaaactgaaattgttggtaatgatgctaatgatactgatcaacactcacctgctgttttgcagccacaagatgaacctattgcaaacagtagaacaaagaggagttgaggagctacagtccgccttattgaggaatgtgatatggattattatgcttttagttgtgctgcacaggtggagaatactcttgagccagccacatacactgaagctgttgtttctggagaccgtgagaagcgaatgtcacctatgcccgaggagatgcagtttcttgagaagaatggaacatgggagctagtgcac

SEQ ID NO: 9229 - DNA, 546 bp, Oryza sativa
  Clone ID: uC-osflcyp151d09b1
gtaagctctatcgggaaagaaataggaggaagaaggattaaggaaggaaagcaaagcaagcattaattaaaggaaattaggaaggatgtcagactgggggccggtggtgatcgcggtggtgctgttcgtgctgctctcgccggggctgctcatccagctccccgggaggcaccacttcgtcgagttcggcaacctgcacaccagcgccatgtccatcgtcgtccactccatcatctacttcgccctcatcaccctctttgtcatcgtcatcggagtacacatcaccaccgattaatttttacttcttctttagtttcttcatttctgcagttcgtctgccctgccctctgtaatctctatcttcttctttcttgctcatcctgtcttctcccctcctccatatatatcctacctcatattaattctactatctacatggtgcttccttgatgttcagcacatcaaaccatgcataaaccaagactgtttaaattattactgttttctactagtattatatatgcatgggcagttggcactgctatc

SEQ ID NO: 9230 - DNA, 292 bp, Oryza sativa
  Clone ID: uC-osflcyp151d10b1
ctattctttctttgtttcttcttccccctttcgccttccccctctttcctgattccccacctcctccctcgccgccgccgccgccgctgactcccaccgcgaccgcctcccccgccggcgcggtttcggaggaggcccggcgcctgcaggaggaggagggagggagggaaggagggcctggcccgcctccgtcgccgctgcctagtgcggctcccgacgccggccgtactgcgcagcgttcgcccacgccgcgcgcgccgaggtggggcatgggggtgaggtgggaggaagt

SEQ ID NO: 9231 - DNA, 478 bp, Oryza sativa
  Clone ID: uC-osflcyp151e01b1
cacgggacagtttgcatggcatgatcatattttgctaaggttctattagagtgtcattcaatggcccatttcatggatttacgggctttcatcctgcgtgcacgtgttttaaagctttataggcaggccttgcgcatgactcgccgagctcctgtgcatgcatgcgatgagttgaggcaaactgtaagagctgagattgaaaaaaatcgccgttgcgacgataaacagaagattaagttcttgatcagtgaaggtctgcaacgattaaaaggccttgatgagatgcttgacatgacaggaaatagttaacctgagtttcatgtcggatatgaggttcaatttacacggaagctgggtttgcatgagctcctgcaaaacattcattgctctgtgacctcctacacctgatatttccagaacccataaggcatcaagccacatgaacttgtggcctccttgattaagagttggtagaacg

SEQ ID NO: 9232 - DNA, 131 bp, Oryza sativa
  Clone ID: uC-osflcyp151e03b1
gtgacgaccagaatgacttggggcaagataaagaatccacgtgtctatctacagaaaggtcctgaacctcttataacatgaatttcgttacatcttaatggactgtaaaacattgttatgacccacctatc

SEQ ID NO: 9233 - DNA, 481 bp, Oryza sativa
  Clone ID: uC-osflcyp151e04b1
gtttaattcacctgaacagaagaagggtgctgggaaagacaagaaggcaatgaggagagctgagaaggagcgtctaaaggaaggtgaggctgctgatgaggagatgaagaagctaaagaaggaagcaaagaagaaaggtgcatccaaggaaagtacctcctctaaaagtggtgctgggaagaagaaggctgctgctggctctgatgaggatcattcaaattcaccaactcgcagccatgatggtgacaatgtggctgcagatgaggatgatgatgatgatgtccagtggcagactgacacttcgttggaggctgcaaaacagcgcatgcaggaacaactgagcgctgcaactgctgagatggtaatgctgtccactgaagaacctgagaagaagaagaagcatgaggcctcacacaaggagggtgccttcaacggaagtacataacatgtggttgaagaggctaaaagcggccttatgatg

SEQ ID NO: 9234 - DNA, 487 bp, Oryza sativa
  unsure (1)..(487): unsure at all n locations
  Clone ID: uC-osflcyp151e11b1
taatcctacagttttaccaagtgttgctgttacagctgatgcacaaatatgtgcaaaggaagaagcaaatgctgatagtagtgatgatgaacaagctgtacactacaagcgtggctctagtgcaaataacagaaagagaagagcagtctttgatctttcagatgatgatgaagatgacaatgttgtagccattgcatctcctgagccaccggaacagtgcattacaaatcctattgatgaggttgctcaagaaagtaaccccaaacaagaaaacttggaaaataaacaagaggttgagaaggatgtgaaatgttgcataggaaggacagagtctcctgagtgtaaaaccaaaagtagcaacactgtcagccattctgggatcaccttaaaagaaaagaacaatggtccaccacctaatgacaatangcaggatcatgctgctgagactgctttcaactcacctaaaaagaggaaagttttgaagaca

SEQ ID NO: 9235 - DNA, 525 bp, Oryza sativa
  Clone ID: uC-osflcyp151e12b1
tcgaacaatttgatcaatgagctattattgaaaggcattcatgtctaatcttcactgtttagtttcaagttcagtggctagatgcaacttgtggaaaccattagctccatcccttggcactggaagataaatacaacggatttcttagccctaatatcataaatgactataaggactatgctgaaatctgcttcaaagagtttggtgaccgagtgaaacattggatcaccttcaatgagccttggatcttctgctctaaggcctatgcatctggcacctatgccccgggccggtgttcaccctgggagatgggaaaatgcagcgttggagattcaggaagggagccttacactgcatgccatcaccaactacttgcccacgcagaaactgttcggttgtacagagagaaatatcagttcactgaagaagttgtcaggcagtcgcagttcatccatgataatgatttacatcgaagatccgcaaaggccttacaaaaggggaagattggaataattgtgaactcac

SEQ ID NO: 9236 - DNA, 571 bp, Oryza sativa
  Clone ID: uC-osflcyp151f03b1
gtttgttattgtttcaaatggtgttgtacctagcggcagggatccaattttcagtgagaaggtgtgtggcttgcaaaaatccatcaagcaagatgacaaaacggtgaaagaacttcctataagcgagaacaatatagtatcaggacttgaacgagtcaacgccagaaaacagactagctctgaagtttccatgaaggtagctgcagctgattcgtgcaatagcaacacacctaaaagggtggatttgaagtcaaagaaacttgtgagatatccagtcatgaacatgtggcttgtgcccagacaagttatgctaggttcactaaaggtacaaaagataaagacatgcaatagaactagaagactgcttgtagtttgtgaggacatggccaatgccatttgttcaggttacaacataagtgagcagcaggcatcaacatcaacacaaccgcttctgaaactgtgcaatgtactcccagagggcggtaacgtgcctttgatagtgacagccctaaaatataaccagaatcaaaccagctagacgttttcgagcccatcctgtagtggtgactta

SEQ ID NO: 9237 - DNA, 565 bp, Oryza sativa
  Clone ID: uC-osflcyp151f05b1
ggtatttcttatttccctacaattgctccgacgcttgttggcccagcaggtgcattacctgctcagcatactcgacaatatgcaataaacctccctgaaggaagcagcactgttggacatgacaataatcggaaatggggaagacagggtcttgatcttaattctggccctggaagtgtggatgtagaagtgaaggacgatagagtaactttaccagttagacaaaattttattgcgccaccacatgcctttgtggacgagcatacgagaatgtatcaaatgcctccaggtgttggaataaagaggaaggaaccagagggcagttgggatgccgaacgatcttcatacaaacaattgtcatggcaatgagcttttgctggtatcatttctcagcgacttcggcatccaatgagcttaggcagctgcatgtggtacttgggttcgtggactgcaccctcgctggaatatacaattcatacatggttactttccttgtgatgatgtgaatgtgagaggcacgacgcttgaagaaattgctgaaatgtcatatttatactttcctgga

SEQ ID NO: 9238 - DNA, 117 bp, Oryza sativa
  Clone ID: uC-osflcyp151g06b1
tttttatttaaaaaaaaaaaaaaaaaaaaaaaaaaaaaaagaaaaaaaaaaaaaaaaaaaaaaaaagggcggcccttttaaaggaatccacgccttcgaccccctgcatgccccccc

SEQ ID NO: 9239 - DNA, 567 bp, Oryza sativa
  Clone ID: uC-osflcyp151h06b1
cttgcctcgacgactttctctctccttttctccgttcatctcgagcagaggagaggaatggattcctcctccacctccgggaggaagggaggaggactcctcctctcgccgccgccggcggcggtagttgtggcggtggcggtgctcctgtcggcggcagaggcggcgacggaggagccgtgctacccgcggctgttcagctttggggactcgctgacggacacgggcaacttcgccttcatctacggcaacgactcccgcgagccggcgctccgcccgccctacggcgagaccttcttccaccgcgccaccggaagattctccgacggccgcctcgtcgtcgatttcatcgcggacgccctggggctgccgttcgtgcggccggacttgagcgggcggaccgcgggggactctgcatgcggggccaactttgcggtggggcggtgccacggagctcagcccgtcttttttccggcgagaggggtgcccatggctgacatcgtgcccctcgcctgaagatgagtgcttcccgatctgttgaaactgtctgccccgcgacctgcccgt

SEQ ID NO: 9240 - DNA, 470 bp, Oryza sativa
  Clone ID: uC-osflcyp151h09b1
tcgggtgccatcgcctcctccctcctcccgccgccggcgccgccgcctcgcctcgcctctcctcgctcatcggcgctagccatggccgggaagaagcgcaagtccgcctcctccgacaagcagccgaagcagcagcagcagcggctcccactcggcgccgacgccgacgcggtcgccgacgcggcgaagcgccgccgctcgggggcgtcgaagaagcaccaggcggaggaggaggcctccataccttcctccctcagcgccaagatcctccgcgaggcgctcacccagcaacaggaggagtccctcgccgaccagcgccccgccgacgtcgtcaccgtcgatccgtccccatccttctccttccccgtgcccaagaaagatggcgaggaggacgaagacgatgatgacgtcgacgagttcgatggcttccacgcgcaaagcgagtccaaccgagcgtgcccgagattgat

SEQ ID NO: 9241 - DNA, 512 bp, Oryza sativa
  Clone ID: uC-osflcyp151h10b1
tcgcttctcctcctctcttccatcgccgctgctcgcttcctccccctctcccacgaaagatggcgtctcacattgttgggtacccccgcatgggccccaagagggagctcaagtttgccctggagtctttctgggatgggaagagcagcgctgaggatttggagaaggttgcgaccgacctcagggccagcatctggaagcaaatggctgacgctgggatcaagtacatccccagcaacaccttctcgtactatgatcaggttcttgacacggctgccatgcttggtgctgtcccagagcgctactcatggactggtggagagattgggttcagcacctacttctcgatggctaggggcaatgccactgtccctgccatggagatgaccaagtggtttgacaccaactaccactttatcgtccctgaacttggtcccaacaccaagttctcctactctttccacaaggctgtgaatgaatacaaggaggctaaggcgctcggcgttgacacc

SEQ ID NO: 9242 - DNA, 521 bp, Oryza sativa
  Clone ID: uC-osflcyp151h11b1
tttagtccatcgaaaataaatatttgggtcttgaaaatggtattctggatccatcagctattttgctctcacggtatggctatctcaccttcatggactgcaagaccgccacacattcctacgtctacttctcagtgttgagtaaaagtcagcaatgtcaaggagaactaccattcaagattttgttagccttttcagggctgcaacataacctaccgaagaagagtggatataatacgcgagtttttgagtgcaaagaggctgcccgtgctcttttatgtgcttcaggctgtgaagatgcatcaagtattcttcgtaatgttaacccagccatatacgaggctcagaagtgtatattagaagaaaatctcgctaggagagctgagcactacttctctgagatgaagcgagttgtcaagggatgagatgcgtgggctcgtggagatcttcgtgagtttgccagctgatctctgcatctggtcgcagcttcttactgaactatgaatgcgggagcaagagat

SEQ ID NO: 9243 - DNA, 390 bp, Oryza sativa
  Clone ID: uC-osflcyp011a05b1
ttcgtctcgccgcgcccattccaccacctttccgaaccttccactcccttccagactccacccccacgtcacccctatttaaacccctcctcccaccgagcaatcaagcgacaagatcgagaagccacaaaccccagcgcgatccgaggtagaagaagaagaagaagaagaagaagaagaggcgatcgagagatggagagcgccatgttcgggctggagacgccgctgatgacggcgctgcagcacctgctcgacatccccgacggcgagggcggcgccgccgggaagcagggcgcgaccggtggcccgacgcgtgcgtacgtgcgcgacgcccgggccatggcggcgacccccgccgacgtgaaggatcttgccggggcgtacgcgttc

SEQ ID NO: 9244 - DNA, 484 bp, Oryza sativa
  Clone ID: uC-osflcyp011a07b1
ttgttcggggaagcccgatgccacctggtgcggggtagatctccggcgagacggccgttggaagcagccgagccggccccgatccgatgggtggcgaggtgccggagccgcggaggctcaaccgggcgctcagcttctacgactgggtccccgacgaggcgctgcacctcgtgatgggccacgtggaggacccgcgggacagggaggcggctactcgggtgcgccgtcgatggcaccgaatggacgcgctcacgcgcaagcacgtaaccgaggacttctgctacgccgcgcgccccgagcgccttcgggagcggatcccgaggctcgagtcgctctcgctgaagggcaagccgcgcgccgacatgcacggagtcatccccgacgactggggcacctacgccatgccatggatcgactagctcgtcgtgccaatcgagtgccttaaggcgctccaccgtcggcgtatgaccgtcaccgacgccga

SEQ ID NO: 9245 - DNA, 460 bp, Oryza sativa
  Clone ID: uC-osflcyp011a10b1
ttcccgagctctcctcgccgccgccgccatgtccgggttcgcgcggcgcctcggcgggatcccgtggagggagatcgccggggaagccttctcccgcgtcttcctcgtcgcgcaggccgtctgcgccgtccacgtcgtcaacgcccacgtctgctccttcgcgctggtgatgggcccgagcatgctgccggcgatgaacctggcgggggacgtggtggtggtggacctggtgagcgcgcggctcgggcgggtggcgagcggcgacgccgtgctcctcgtctcgccggagaacccgcgcaaggcggtcgtcaagcgcgtcgtcgggatggagggcgacgccgtcacgttcctcgtcgaccccggcaacagcgacgcctccaagaccgtcgtggtaccaaaaggccatgtctgggtgcagggtgataatatttatgcttctagagattcaagacagtttgga

SEQ ID NO: 9246 - DNA, 508 bp, Oryza sativa
  unsure (1)..(508): unsure at all n locations
  Clone ID: uC-osflcyp011b01b1
tttctttcccaacccagtggctgatgaagttttgaaccttttttctaatatccgttgaaaatttgtgtgtttctgtttgagccgtacgagatgaaattctcatatacggttctcggaggggggttcgggttagttacctatctcaataaagtatatgattggtttgaggaacgtcttgagattcaggcaattgcagatgatataactagtaaatatgttcctcctcatgtcaacatattttattgtttagggggaattacacttacttgttttctagtacaagttgctaccggttttgctatgactttttactatcgcccaaccgttacagaggctttttcctcggttcaatacataatgaccgaggccaactttggttggttaatccgatcagttcatcgatggtcagcaagtatgatggttctaatgatgatcctgcacgtatttcgtgtgtatctcacaggtgggtntaaaaaaccccgcgaattaacttgggtcactggtgtgg

SEQ ID NO: 9247 - DNA, 330 bp, Oryza sativa
  Clone ID: uC-osflcyp011b07b1
ttcttatcttcttgttagccagctccaatctttgggtgctcgtgtatagtgctgctgtatgtcagtatgtagcttcggctgccatccattttttttttagcatcgcgctaatctactaagccccatacagcagatctgaagcttggcgtgtttcttcgaaattcaagccgtgacaaataccgaaagttcatagccataccagtgtgaaaatattcgtttttgtacatcttgaagcacatgtctttttggacagttgagcacccttgtttaatttagtaggttactctgctgtatactagtttggatagctctacggcttttaaaaaacaa

SEQ ID NO: 9248 - DNA, 429 bp, Oryza sativa
  Clone ID: uC-osflcyp011b12b1
tatcttcgcagtcgtgaggaaaataaggaatcatccaatatgctaataccagagttcagcgattacttcagtgctgaagagccccagcaccaagattctgttgcaaaagaatcgtcccttgatgacatatgcaacgcattcagcgggatgcacctcagaggagatgcatatcttgatcctactgagtccatgacttgtccggggaatagattgatcattgctaggaggaggagaacaccggaagaggaggaatatttgagaggttttaacccaagggctccaaattttgttcctcttgaactggacccagaatcagaaaaggtggacctcaagcatcagatgatggatgagcgcaagaatgctgaagaatggatgattgactatgcacttcggcgagctgtgaataatttatgccctgctcgaaagaag

SEQ ID NO: 9249 - DNA, 233 bp, Oryza sativa
  Clone ID: uC-osflcyp011c06b1
tgaacttgccttcttcagcgggctgtttttgaaatataaacctctcgcgcgtctggtttaaggaaaattcttctctgcctgttagcgaatctgccctctgcttctgtctgcatatgcatccaaactagtttcactcactgctcttatctagaatcatttggcctgaatttctcaattttactaatggtactattgcacccctatgttgaagaagtgcttgtgcctgaatttta

SEQ ID NO: 9250 - DNA, 499 bp, Oryza sativa
  Clone ID: uC-osflcyp011c07b1
tcgtcggtttgcgcgccctctgcagggcccagattgtctctgttctggatcttgcacggtgcaccattgtgtccgagctgtccaacaaggactttgactcctatgtcctctctgagtccagcctgtctatctattctgataagatcgtgattaagacctgtgggactacaaagctcctgctcacaattccaaggattcttgagcttgctgaagggctttctatgccacttgctgctgtgaagtactcccgcgggatgttcatcttccccagtgcacagcctgctccccacaggagcttctctgaggaagttgctgacctcaaccgctactttggccatctgaaatctggtggtaatgcttatgtgattggagatccagcaaagcctggccagaagtggcatatctactatgctactcagcacccggagcaacctatggctacccttgaaatgtgcatgaccggaccggacaaggagaaagctatagtctctttcaagac

SEQ ID NO: 9251 - DNA, 274 bp, Oryza sativa
  Clone ID: uC-osflcyp011e09b1
tttctttcaaacggcgcttccctaattccggcaccgaatattgacctgctcgggcctcgacaccgcgccctgtacctcgcgatctgacgcgctcatcgccatcggggacctcgcgcgcgcgccgtcggcgctgggggggccaaacaacatcccagccccacagtgaggcattacagcatccccatgcataccaagaccacaaaagtgaagagatcacatcaagacctgggacctcaacagggcctgagtatctatggggtagtccaaaacctaa

SEQ ID NO: 9252 - DNA, 500 bp, Oryza sativa
  Clone ID: uC-osflcyp011e12b1
tttcttcaaagcatgctggagcatactggctcgatagtccgaattatggagtttttacctgggatgacaagcttccaggagctcaggttcttctgagcaggttgcggcttttcctaagtcctggatatccttacgaagaaatactgagaacatttcacatccaaacagacaatgttatgtgctcgtatctgccgatgtacaattcattcaactttaccaaaggaggaatgatacagctcaaccacggaaggcctcagccacttcagtatgttgtcaatgcggctttccttgcctttttatacagcgattacctggatgctgcagatacacctgggtggtattgtggacctactttttacactacagaagtcctccgcaaatttgcaaggtcacagctcgattatgtcctaggtaagaacccactgaagatgagccacgttgtgggttttgaaacaagtaccccaagcgcgctcatacagaggtgcatcaatccctataat

SEQ ID NO: 9253 - DNA, 499 bp, Oryza sativa
  Clone ID: uC-osflcyp011f03b1
tagctcaaggctggcacggggcccggctcctccaagccatcctccgcatccacctcctccgctctcagcatcgggagggcggggagggcggctggcgcaggggggaggaggttcgggatggtgcggggctcgcggctcccgtcgcagctcacgtccatgtcggcgatctcgccgccgccgccgtgccgcccgtgggaccgcgccgacctcatgcggcgtctcgcgaccttcaaggccatgacctggttcgccaaacccaaggttattagcccagttaactgcgcaaggagaggatggattaatattgagcccgatgttataacgtgtgaggcatgtgaggcacggcttctgttctccactcctttctcatgggcaccgcagcaagttgaaaaggctgctgctgtttttagcttgaagctggacaatggacataaactactgttgccatggattgacaacatatgtgatgaatcacttgccctatttccaccaacaccac

SEQ ID NO: 9254 - DNA, 491 bp, Oryza sativa
  Clone ID: uC-osflcyp011g02b1
gctatagacactctatctgggctcttgtttgctagctttgcaccgctatcgtgcaccttgactacaacttttaagttcctcaacgacaatcctgaagtttttgacaagctcaaggaggagcacgaaatgatactgaagaaacgagagggtgcgaattctgggttcacatgggaggaatacaagtccttgaaattcagtactcaggttgtgaatgaaattaatcgaatcactacggttatacctggtggtttcaggaaagcactaacagacgtgcaagtaaacggatatacaattccgtctgggtggctagtcatgattagccccatgggagtgcatctaaacccaaaattgttcgaggatccactcaaatttgatccatggagatggacggaggagaagagaatctcgatgcaaaggaatttcatgccatttggaggaggaatcatgatgtgtcctgcggaaaatttaacaagcttttatcacactttttt

SEQ ID NO: 9255 - DNA, 481 bp, Oryza sativa
  Clone ID: uC-osflcyp011g07b1
ttcgtgcctaaaattctactcgcgttttcatgactgccctatagatcagctcctgattggaaggactgtagttccatgagatagaagggcatattgaagtacaattcggcctttggtgaatctaaatggacagtggcttgggaagaagttcagagacatccttgaaagccttgccatcaatggcaagtaatgcaacaaggaatactgatcctgaccaacagggtgttcgattcagttccatggaccagcctccatgttttgcaagacctggtcaatcgttccctgcttttccttcactctttggaggtcagccttccagcttgtatttacctgatgacattgaagctaaaatcggtaaccagttcgaatcaaatgcttccccgaataatcctacaatggattgtgaccctcaggcaatgctgagcaacttatccttccttgagcagaagatcaagcaggttaaagacatcgtgcagtctat

SEQ ID NO: 9256 - DNA, 406 bp, Oryza sativa
  Clone ID: uC-osflcyp011h02b1
tagcgcctttgctctgtaccgggatgaccaccggcaccaccggttcactttgcaccaccaccaccgacaccggccagaagaagggcatcatggacaagatcaaggagaagctgcccggccagcactgagctcgacacaccaccacaccatgtgtctgcgccgccggcgacggtcgtcacgtcaccttactgaataataagatgagctagccgagcgcaataaaaggaaaaaaaaatgttactgtcgtgtgatgagtgtgaatgtgtgatggcgttctccagtacggaccgtgtctgcgtgttgtttgtactgagaaagtaccctgtgtatagacgtcgtatgtgtacaattccgctttgatgaatacgtataaatatactactgtgtgtacattatacggtgtctt

SEQ ID NO: 9257 - DNA, 509 bp, Oryza sativa
  Clone ID: uC-osflcyp011h05b1
ctccttcggagtatatgacatattgaagatgggctacctgcattcccccgaagggaagaggagggtatcaacgatgaaacaacaaggtcaagaggcaaatgcattagatcagcttgagttgggcacagttaggaccttactatatggtgctattgctggttgctgtgctgaagcagccacatacccatttgaagtagttaggagacagctacagatgcaagtcaaagcaacaaggatgaatgcttttgcaacatgccttaaaattgttgatcaaggtggagtaccagcactctatgctggcttgatccccagcttgctacaggtacactctctcatgtcagatagtctgcttgcatgtatatttaggagcaaaatctataaatccatcatttgattgacacgtgcatacaacagatactaggtttgtgctttatctcatcgttgcccatttaaaatccaggagttttttcagggaatcggaaattacttagttgatattgatatattca

SEQ ID NO: 9258 - DNA, 516 bp, Oryza sativa
  Clone ID: uC-osflcyp011h08b1
tcgtcgcgcgctgctcgtccgtcgtcgccgctgcatccgcctcctcctcgtcctccctacggccgtagggtgcggcggcggagggggcgacgatgccacgctgcggagccggaggtccctgcgtgtggatccgggccctatcccagccgcaacgccacgggaggaagccatggcggggcgtgagggtcgtcgtgctgctgctgcacgcgctgttcatcggcgccgtcttcctgctcgatccgacgctccagaggcaaatccacgaggccaagtggtacataattctatatgggttgctggttttacttaccttggtacaatacctatatacagccacttcttctccaggatatttacctgatatgttgacagctggctcaaggatgcatgcaacctttattaatacaacaactctcttaaagcaggccaattccaaaagtggaagcttaaaccctgccatgagtcgcagcacaatagatcaacaaatccacaattcactacagctttgttactaca

SEQ ID NO: 9259 - DNA, 68 bp, Oryza sativa
  Clone ID: uC-osflcyp011h09b1
tttttgttctttcccagaagaaacgaacgaggggggggtttatttgaaaaaaggatccggacagcgcg

SEQ ID NO: 9260 - DNA, 233 bp, Oryza sativa
  Clone ID: uC-osflcyp011h10b1
tcgttctccctcgcaaggggtctcccacgcatcgtcgtccgccgctgacgcgtgggacccaccccttccaagatatacgaggccttctacaagaatctcaagcttggcatccattatgactccaccaacaggaccaatattgctgagctcctgaggtataactccaccaagagtaatgatgagatgaccagacacaaagactacacaacccaaaagaaagagggccagattga

SEQ ID NO: 9261 - DNA, 495 bp, Oryza sativa
  Clone ID: uC-osflcyp012a04b1
tggatgtcaaccagctctggttactgtgggcaacactcgccgtgtcactgctctactacatcagcaaccggagacgccgcgtgggcggccggcgacgatgtccacctggtcccatgccgctcccgctcgtcggcaacctgctcaacctgcgcggccacctcccacccgcgctcgcgaggctagcgcgcacgtacggccccgtgatgatgctaaagatgggcctcaccaccaccgtcgtcatctcctccggcgacgcggcgagggaggccttcacgaagcacgaccggcacctcgccgcgcgcaccgtcctggacgtcactcgttctctcgacttcgccgaccggtccatgatatggctgccgagctccgataccgtctggaagacgctccgcggcgtcacggcggcgagcatcttctcgccgcgtggcctcgccgccctgcgcggcgtccgcgagagcaaggtgcgggacctggtgggctacttccgtgggcgcg

SEQ ID NO: 9262 - DNA, 519 bp, Oryza sativa
  Clone ID: uC-osflcyp012a09b1
tgcatcaataaagttgtctcacgatggcctatgatggagatgaggaacaaagccaggattatctattcaagattgttctacttggtgactcttctgtcggtaaatcaaatttgctggcaagatttgcaaggaacgagttctatccaaactctaaatctactattggagtggagttccagacacaaaagttggtaattgatggcaaggaaatcaaagctcagatatgggacactgctggacaagagcgcttcagagcagtcacatctgcctactatagaggagctgttggagccctacttgtttatgatattagcaggcgtcagacttttgatagtgttggtcgatggctgaatgaactgcacactcattccgatatgaatgtcgtcacaattcttgttggcaacaagaccgatctcaagcatgcgcgtgaggtgagcaccgcagaaggcaaagctctggctgagtcacagggcctcttcttcatggagacctcagccttggactcatcaaatgtcgcgg

SEQ ID NO: 9263 - DNA, 495 bp, Oryza sativa
  unsure (1)..(495): unsure at all n locations
  Clone ID: uC-osflcyp012b04b1
taccaccaccgccgcagccatggcgaccgggtactaccgcggcggcggcggcgccagggaccacgccgacgagcccgacgacttcgacgagtacgaccccacgccgtacggcggcggctacgacctcttcatcaccttcggccgcccgctcccgccctccgacgagacctgctacccttgctccgctccctccacctcctacgacgccccgcactactccgccgacgagccctccccctacgcccaccactccaagccgcagcccgcctacggcttccgcccccagcacgagcagcagcagcagccgtcctacgcctcctccggctaccgcccccagcacgagcagcagcaatcctacggctcctctggctacggatctaagccccagcccgcctatggcttccgcccccaggccgaggaggagaacacctacggctccggctatggatctgggtacggtggtggaggaaggaagcagcangaagaggagagcta

SEQ ID NO: 9264 - DNA, 516 bp, Oryza sativa
  Clone ID: uC-osflcyp012b05b1
aagccacatcttattgtcacttccatctcattctcctaattgtcatcactagcttctagctagcttaattaattaattagccatggcggaggagaagcaccaccaccacctgttccaccacaagaaggacgacgagccggccaccggagtagactcctacggcgagggcgtctacacgtcggagacggtgaccaccgaggtggtcgccggcggccaggacgagtacgagaggtacaagaaggaggagaagcagcacaagcacaagcagcacctcagcgaggccggcgccctcgccgccggcgccttcgccctgtatgagaagcacgaggcgaagaaggacccggagaacgcgcacaggcacaagatcacggaggagatcgcggccacggcggcggtcggcgccggcggctacgccttccacgagcaccacgagaagaagaaggaccacaagagcgccgaggagtccaccggcgagaagaagcaccacctctttcgctgatcgacctcatcacaaac

SEQ ID NO: 9265 - DNA, 522 bp, Oryza sativa
  Clone ID: uC-osflcyp012b07b1
tttgaatttgctgttacctaagaataatatggctgaggaactatgctggtttctagtgtacatagttcatattgggttaaatggccacagtgcatatacacataagcagataatgtagtcatttatagaagacaatacaagtgacacaccaatgtatatgtattttcatccacaagatcagggttgtggaacctaccagcactaacagattcggcattttaagatttgagtggtatttcctcttgtctcttccatgccctctctcctctgtcccctactcccctttgttgaactggacttgactcgtgaggatggtcatagtcaatggtaaatattggttcaataagttacacctgtgatgttacctggattttttattttgcgctggtcaattttcattctgtttaattgctttgctcatttgaagtgtaagtgtcctttctaacacagacgtgtctggtaactgataaaggttctagatgaagctgatcgaatgctggatatgggttttgaacctgaagt

SEQ ID NO: 9266 - DNA, 520 bp, Oryza sativa
  Clone ID: uC-osflcyp012b12b1
tcggacgcgtgggggcaaaattgaattcccccatgaaggttacatccttgcctctgtattttttgtagcaaagttacttgagacgctcactgctcggcagtggtacttgggcgtggatgtcatggggatccatgtcaagtctgggctgacggccatggtgtacaggaagggccttaggctgtcgaattcctcgcggcagagccacaccagtggtgagattgtgaattacatggcggttgatgtacagcgtgtgggggactatgcatggtactttcatgacatctggatgcttccactgcagatcatcctcgccctcgccatcctgtacaagaatgttggaatcgccatggtttcaacattggtagctactgtattatcaattgctgcctcagttcctgtggcgaagctgcaggagcactaccaagataagcttatggcctcaaaggatgagcgcatgcgcaagacatcagagtgcctgaagatatgagggatttgaagcttcaaagcgtggaggatcgat

SEQ ID NO: 9267 - DNA, 396 bp, Oryza sativa
  Clone ID: uC-osflcyp012c01b1
tgtttcgatcctgccgatgacgctcaagaacgccgattagctgggcctgcttgagacgctgccctccgacgccgacgccggaggaggggggaaggtggcgctgctgacgcccgcggaggtggacgacaagctgccgtccaaggcgaaccccgcggcggccgacatggaggaccgcatgctccgcctgctcgccttctacaacgtttgtaggtgcgagatggaggagggcgccgacggcaagctcttccgacgttacgccgccgtgccggtgtgcaagtggttgacgcccaacgaggacggcgtttccatggccgacctcgccctcatgaaccaggacaaggtccttatggagagctggtactaccttaaggacgcattcctggcggcggcatcccg

SEQ ID NO: 9268 - DNA, 507 bp, Oryza sativa
  Clone ID: uC-osflcyp012c03b1
tttattgtcacttccatctcattctcctaattgtcatcactagcttctagctagcttaattaattaattagccatggcggaggagaagcaccaccaccacctgttccaccacaagaaggacgacgagccggccaccggagtagactcctacggcgagggcgtctacacgtcggagacggtgaccaccgaggtggtcgccggcggccaggacgagtacgagaggtacaagaaggaggagaagcagcacaagcacaagcagcacctcggcgaggccggcgccctcgccgccggcgccttcgccctgtatgagaagcacgaggcgaagaaggacccggagaacgcgcacaggcacaagatcacggaggagatcgcggccacggcggcggtcggcgccggcggctacgccttccacgagcaccacgagaagaagaaggaccacaagagcgccgaggagtccaccggcgagaagaagcaccaccttttcggctgatcgacctcatcacaacg

SEQ ID NO: 9269 - DNA, 381 bp, Oryza sativa
  Clone ID: uC-osflcyp012c04b1
tattttgagagactgctctccttctgcgaagacgggcaatcgataccgcgggggtgaggctccgcacgaggcatttctagaacatgaccatggcgacacttaccgtgccgtggatcgtgacgacacgtgtacgacgactgacgagcagctgcacagggcctaacaagggtgcgctacgaacggaggactaaggataggcatcgagggccacggcgatgcggtgcagggggaggacattcgaccggccgacaccgacacctatgggccggagctgctacttaacatcaccgacgagatctgcagggacttcgataggcccctgaacgtgtggacactgggcgcggcagatcgcgacccgaagcctcggcatgctgtccatga

SEQ ID NO: 9270 - DNA, 531 bp, Oryza sativa
  Clone ID: uC-osflcyp012c06b1
ttatggacaacgttcttctggatcgccggtcttccgggagcttcgagttcccgaggagaggcggcggattccggccggggcacctcggcggcggcgcgacgccggcgatggcgccacgccagcaatacaaaggtggcgcgtggagccatgcatcactacccgcgctcccgtacgcgaggcctccgctgtactcgtcgccgtctctgcctctcctgccgtccaaccagccacctctcctgccgctcccacccgccgccaccaagtacgccactttcccgtacccgcctccgccgcagcagccgccgcgcagcggcagagctagtactccgtcgacgcgccagagggacaggaggaggaagccgtcgaggccgccgccgtcgacggagacgacgaagggaggaacacagaagaagaagccgctggagcgggcaacgccgctgccgccggcgccggcggtggcggaggccctggacgacctggagcaggaggtggcccgcaacttcgtccaggacctgctgcacgtgctcgcgc

SEQ ID NO: 9271 - DNA, 514 bp, Oryza sativa
  Clone ID: uC-osflcyp012c09b1
gcagaaacaaacccctctcactcccactaccatggatccttgcaagttccggccgtcgagctcgttcgacacgaagacgacgacgacgaacgcgggagctccggtgtggaacgacaacgaggcgctgacagtggggcccagggggccgatcctcctcgaggactaccacctgatcgagaaggtggcgcacttcgcccgggagcgcatcccggagcgcgtggtccacgcccgcggcgcctccgccaagggcttcttcgagtgcacccacgacgtcaccgacatcacctgcgccgacttcctccggtccccgggcgcccagacccccgtcatcgtccgcttctccaccgtcatccacgagcgcggcagcccggagacgatccgcgacccgcgcgggttcgccgtcaagttctacacccgcgagggcaactgggacctcctcggcaacaacttccccgtcttcttcatccgcgacggcatcaagttccccgacgtcatccacgccttcaagcccaac

SEQ ID NO: 9272 - DNA, 451 bp, Oryza sativa
  Clone ID: uC-osflcyp012c11b1
tttggctgtcccacccatgctaactttctacccaccgcgagtctccgcggggggtgtttctggagatctctctctgtcccctcgcctcgcccaaatcagaagcctatgatggaggcgctcaggtcgtgagagggagcggaatcctctgagagagggaggcggcggttggtggttgcaggaaggctgtatcaaggataggcagtgggatagtaacaacaagaacccattcactgctgagattggaaccgcctcatttctggatcaatgccattatcaaccatggccgttgacaccactgtttcggagtactggctcaattggcggttcatgctctgagaggtctgggtctactcctgcatggtcctggcatgcttcttgatctggaagttccaggggccgagctcacaggacggaaatggctatggctgttaggacagtgaggatgcgcggc

SEQ ID NO: 9273 - DNA, 518 bp, Oryza sativa
  unsure (1)..(518): unsure at all n locations
  Clone ID: uC-osflcyp012d05b1
tgcgatggtgaggcagggcgtcgtcgtcggcggcggcggcgagattacgcaggccggcagcggcagcggcagcattgccgggtcggcgaccgcgccggcggcgagcccccaccaggtggcagttgaaatagatgagcaaatttactccccagcatttggcaatattgttgtccctgatagtcgtggttgctgcagtggtttcacatccagtgtcacaagagtggtgtttatcttacacctccttgctttcattgccctcacaatcttccttggtgtccaggcctcttcccgacagaatcctacctacaagcctttcgccaactttgttcctcttgcctcctctgtcatagtatccataattgcaggttgcttttgggtcatccttgcagtcattaaccctccaaaagccatcaagacctcactctgggcagcccctgttcttgcactggcctgcgatgtagtcatactccttgttggcaatggngctgcacttggtatggnagtgctcatagttgtag

SEQ ID NO: 9274 - DNA, 516 bp, Oryza sativa
  Clone ID: uC-osflcyp012d08b1
tccaatttcgttcgccattttctccttccattttctcggcgaggaggagggggaagagctaggatgccggcgtggtggaagagggggaaggggaagaaggggaaagggggatcggcggcggcgggggaggaggaggaggggaggaggaaggcggggagcttcgacgaggtgctcctagccggtaagcatactcgttaggagacgttgggggaggtgatgatgcttttaacaccttcttcagtgagactggtgctgggaagcatgtcccccgtgctgtcttcgtcgatcttgagcctaccgtgattgataggtcaggactggagactaccatcagttcttttatcctggacattttattattatgtaatgatgcttttgccattctctccttgagcgctctacatctatttcgactaatctgttgatctgtgccttgaccgcatcaggaagcttgccgacaactgcactggtcttcagggctttcttgtgttcaacgctgtttggagaagaacgggc

SEQ ID NO: 9275 - DNA, 519 bp, Oryza sativa
  Clone ID: uC-osflcyp012d09b1
tatcgacgcgcgagcgctttgcttagattccttcgtcgccggcgaatccgtccccttcgcgccgcccgcaatggcgaatgcagcatctgggatggctgtggacgatgagtgcaagctcaagttcctggagctgaaggcaaagaggacctaccgcttcatcatttacaagatagacgagaagaagaagatggttgtcgtggagaaggttggcgagcccgtactgaactacgacgattttgccgctagcctccctgccaacgaatgcagatacgccatattcgactacgatttcgtgaccgaggagaactgccagaagagcaagatattcttcattgcatggtctcctgatacatcgcgcgtgagaagcaagatgatctacgcgagctccaaggacaggttcaagagggagctcgacggcattcaggtggagctccaggcgaccgatccaactgaggttggcctcgacgtgatcagaggccgtgcaaactgagcattgttttgatgctgctacctataaag

SEQ ID NO: 9276 - DNA, 520 bp, Oryza sativa
  Clone ID: uC-osflcyp012d10b1
tttcttgctacaggagctcaatgccgtacaatgagagatattgaacatcattttctagattcaagggaaaaagggggacccgatggaattagaatgctgagtgtgctccaagaaactaacatattacatgatgaatacaatgtcatgacccctaaaagaagttcatgcagaagatatcaaatctggggtcctgaatccacccctacttctccccgggttggttatggtcggagtttgagtctcccagtacgacggtcactagttggctcctttgaggagtcccttctatctggccggctttcttatggaaaagaacaatcagataattgatggattcttagctgttctaaatattactggtggaaacttctctcctccaactcagaagctgccgttcgcagtaacaagcattgacgaggatagctccttattgcactattcttctattgatcttgctgggaggtcgtcagcaactaactgtagaaacccaaaactcgaaagaagcttaagccattaatga

SEQ ID NO: 9277 - DNA, 525 bp, Oryza sativa
  Clone ID: uC-osflcyp012e01b1
aggacgcccgccggcccgacccggaacggaatggccggcccacgcgtcctaaatcttttagcttctcagccttttgcctctctttctactctctttcttggccgactctcttatatccctcaatttaaccatcgagggcggccaaaaaaaagagagaaaggaagagcaaaataacacattacaccatggcgcgattcgtcatcatctccgtcgacatcgacgccgacttcgccgctgccgctgtcgttgaggcccgggttggacctatcgacgtcgctccgaccaacctgatcaccaacccactcggtgccatcatcgacaatggccacaagatcacaggcagtgaaacgtgccatcagaaacgcaagatgctcctaaggcgaggttcgaggcgccagctagggcgtctgataaggggacgccgatggagttcatcctggacacctgcaaggaaaggtacgacagcaccgtgtcggcgctgcaggaagtgcaacgctgcatcgacgccaacgacagcaaggcgag

SEQ ID NO: 9278 - DNA, 526 bp, Oryza sativa
  Clone ID: uC-osflcyp012e02b1
gtttttagcagcagcagtacagtagttggctgggtgctaccactacacgagctcggcaggaaggaaggaaggaaggaaggaatcgcacggcgaacagtcggatctggcggaggaggaggtgctcgcgatggggtccgagggatccgccggggtcgtcgtcgttcccagaaactttagactgcttgaagagcttgagcgaggtgagaagggcattggtgatgggacagtgagctatggaatggatgatgctgatgacatatatatgcgttcctggacaggaactatcattggccctcctaatactgttcatgagggacgaatctatcagttgaagttgttctgtgatacagactatccagacagaccacctactgttcgattccagactcgaatcaatatgtcatgtgtgaatcaagaaactggaatggttgaaccaagtctattccccatgcttggtaactggcaaagagaacataccatgcaagacatcctgatcggcttaaaaaaggagatgtctgctcctcag

SEQ ID NO: 9279 - DNA, 519 bp, Oryza sativa
  Clone ID: uC-osflcyp012e04b1
ttgatgtggcaaccctgagactgaggtcctaatctccaagacccagatgattacactgaagtgtgctgcctgtggttttgtgtcagatgttgacatgagggacaagctcacaacttttatcctgaagaatccacctgaacagaagaagggtgctgggaaagacaagaaggcaatgaggagagctgagaaggagcgtctaaaggaaggtgaggctgctgatgaggagatgaagaagctaaagaaggaagcaaagaagaaaggtgcatccaaggaaagtacctcctctaaaagtggtgctgggaagaagaaggctgctgctggctctgatgaggatcattcaaattcaccaactcgcagccatgatggtgacaatgtggctgcagatgaggatgatgatgatgatgtccagtggcagactgacacttcgttggaggctgcaaaacagcgcatgcaggaacaactgagcgctgcaactgctgagatggtaatgctgtccacttgagaacctgagaagaagaa

SEQ ID NO: 9280 - DNA, 494 bp, Oryza sativa
  Clone ID: uC-osflcyp012e06b1
ttccatttttcctctcctcgcttctcgccgcagccgccgccgcctcctcctcctctcgccatggccgccgctgctccccccgcgggccccgggctctactccgacatcggcaagaaggctagagatctcctgtatagggattaccacacggaccagaagttcacgctcaccacctacgccgcgaacggagctgcaatcactgttgctggcacgaagaaaaatgagtccatcttctctgaaatccagagccaggtgaagaacaacaatgtgtccgtggatgtgaaagcaacttcagactcaaaattgataactacattcacagttcatgatctgggcactccaggcctgaagggaattctatccattccttttccctaccagaagtctgcaaaggctgaagtccagtacttgcatccacatgctggcctgaatgctattgttggcctgaatgcaaatcctcttgttaggctttctggtgtgtttggaactggggc

SEQ ID NO: 9281 - DNA, 521 bp, Oryza sativa
  unsure (1)..(521): unsure at all n locations
  Clone ID: uC-osflcyp012e09b1
ttcaaaatctcaattccagacattggtatcaaaagcagtttctgaaggatggctcgactcttcgtttgtacatgtaggtgccaatggggatgtccaagatgatgaacatgagaagctgaggaggtacaagaaagaggctgtttctatgattcatgagtactttctctctgatgatgtacctgagattattcgcagcctcaaagagcttggttctccagagtacaaccccgtctttattaagaagcttataacaattgctatggaccgcaaaaacagggagaaagagatggcttcaattcttctatcctcattaagcatggaattgttctcaacagaagacattgtcaagggtttcataatgcttcttgaatctgcagaagataccgcacttgatatattggatgcctcagatgagctgggactgttcctagccagagcagtgattgatgatgtgcttgcgcctctgaacttagatgagataagcggcaagcttccaccaaactgtagcggngctgaaacat

SEQ ID NO: 9282 - DNA, 499 bp, Oryza sativa
  unsure (1)..(499): unsure at all n locations
  Clone ID: uC-osflcyp012e10b1
gggggccaagagcggcgcccatttttagtcagccacggcgagggaagaggagccaatcttggccaagccaccctctccaagaatcctcgctgatctctctgcgtgaggcgctcaattcgatttcttggggggtcgattcggatttcttgggatgcagtgggcggcgctgagctcgccgccggcaccggcggcgccggcggcggtgtggatggggcggagggcaagaaccgcgaggttgccgtcgccggggccgcgccgggtggtgctggccgccgcggcgtcgtcgtcgtcgccgtcgccggatgcgaactcgagctcgaactcgaactcgccgnggaagtggtggcggcggcgaggaggtggaggaggaaaggganaggacncgncgcggatggagaaggcngcggccttcctgatgcggagccagaagtacgccatgctcaagcagcagctcgccgtggccgnccagttcgaggattacaaggaggcggcgaggctg

SEQ ID NO: 9283 - DNA, 512 bp, Oryza sativa
  Clone ID: uC-osflcyp012e11b1
tctcgcgccgccgccgccgccgagcgcctggagcagcgtcagccatggccgtaggtaagaacaagcgcatctccaaggggaagaagggatccaagaagaagaccgtcgatccctttgctaagaaggactggtatgatatcaaggccccgtcggtgttcaatgtgcggaacatcggcaagaccctcgtgtccaggacacagggtacaaagattgcttctgagggcctaaagcatagagtgtttgaggtctccttagctgatctccagaacgatgaggatcaggcgtacaggaagatcagacttcgtgctgaggatgtgcaagggaagaacgtgctcaccaacttttggggcatgtcgtttactaccgataagctcagatcacttgttaagaagtggcagacactgattgaggctcatgtggatgtcaaaaccacagacggctacatgctgcgtctgttctgtatcggcttcaccaagcggcggcctaaccaggtgaagaggacttgctatgct

SEQ ID NO: 9284 - DNA, 521 bp, Oryza sativa
  Clone ID: uC-osflcyp012f08b1
gtgcaacatgggtacttgttcaagaatcgtcgcaggttgcgcagattcgttattccaggcagtcaagccctatctttgctgagtcgagatctacgtgaagcccatttgcaggtgcttctgggaggtgggggacataggtcaaacaacagcagcaacacaacaaatatttcagctgaccctcttctgtcatcgtttggccttagctttccaacatcagacacagaggaaacatcaaaaccacctatttccattccagatgatgcatctgtgataaaagagacacctgctcagccatgggattcaagtattgactcatccctcacaagggaagaaagggaacagaaacggaagcaagcgagtgtcagagcaacatttgtgcaagacctgctgctcactactttatttggagattaataaatcaagatgagcctaagtagtcgatagatgcatgggtaaatcctggtgcatatttgcatagataagtgcccggtcaaattgctgaggtaatatccatggcagat

SEQ ID NO: 9285 - DNA, 520 bp, Oryza sativa
  Clone ID: uC-osflcyp012f10b1
ggccaccatggcgctctcctccccggtgatggcccgcgcggcgccgtcgacctcctccgcgctcttcggcgaggcgcggatcaccatgcgcaagaccgccgcgaagcccaagccggcggcgtcgtcggggagcccgtggtacggcgccgaccgcgtcctctacctcggcccgctctccggcgagccgccgagctacctcaccggcgagttcccgggcgactacgggtgggacaccgcggggctctccgccgacccggagacgttcgccaagaaccgggagctggagggtgatccactcccggtgggcgatgctgggcgcgctcggctgcgtcttcccggagctcctcgcccggaacggcgtcaagttcggcgaggccgtgtggttcaaggcgggctcgcagatcttcagcgagggcgggctcgactacctcggcaacccgagcctgatccacgcgcagagcatcctcgccatctgggcggtgcaggtggtgctcatgggcgccgtcgaggggtaccgcat

SEQ ID NO: 9286 - DNA, 377 bp, Oryza sativa
  unsure (1)..(377): unsure at all n locations
  Clone ID: uC-osflcyp012f12b1
ttatcctctgattagactgaggtcctgatctccaagatccagatgattacactgaagtgtgctgcctgtggttttgtgtcagatgttgacatgagggacaagctcacattttttattctgaagaatccacctgaacagaagaagggtgctgggaaagacaagatctctttgtggagagttgagaaggagcgtctaaaggaaggtgaggctgctgatgaggagatgaagactcttcctacggaagcaattaataaaggttcatccaaggaaagtacctcctctaaaagtggtgctgggaagaagaaggctgctgctggctctgatgaggatcattcaaatttccctnctttcttccctttctttctttcttctttctt

SEQ ID NO: 9287 - DNA, 524 bp, Oryza sativa
  Clone ID: uC-osflcyp012g04b1
gccgtgaactccggaaccgaacgccacacgcgccttcctcttacttaatccgccatgcttcctcctagggttgccccctcctctctggccgccgccgccgccgccgcgcctacctatctcgccgccgcggtctcgacccctgcttccgtctggctgcctgtgccgcgtggagccggagccgtggcagtgtgcagggccgccgggaaagggaaggaggtgctcagcggcgtggtcttccagccattcgaggagctcaagggggagctctccctcgtcccccaggccaaggaccagtctcttgctaggcaaaagttcgtcgacgagtgcgaggccgccatcaacgagcagatcaatgtggagttcaatgcatcgtacgcgtaccactcccttttcgcctactttgaccgtgacaacgttgctctcaagggattcgccaaattcttcaaagaatccagcgatgaggagagggatcacgcagagaaactcatgaagtaccagaacatgcgtggaggcagggtgcggct

SEQ ID NO: 9288 - DNA, 520 bp, Oryza sativa
  Clone ID: uC-osflcyp012g11b1
gtaccttgcaccatgacgttatatgtttccattactacatccagtaccatctatatatgcaattatcagaggcagctgcctatgcaaggaagaaaaaggttattctgaaaggagatttacctattggtgttgataggaatagtgtggatacttgggtataccccactttatttcgcatgaatacagctactggtgcacctccagattatttcgacaaaaatggacaaaattggggttttcctacatataactgggaggaaatgtcaaaggataatctatgggtggtggcgagctcgtctgacacagatggcaaaatacttcactgcatataggatagaccatatcttgggtttctttaggatatgggagcttccagatcatgcagccacaggtctagttgggaaatttaggccttcaattgctctcagtcaggaggagcttcttagtgaaggcctatgggatttcgatagaatgagccgcccttatattcttcaggaaacactggaggagaagttgggtc

SEQ ID NO: 9289 - DNA, 435 bp, Oryza sativa
  Clone ID: uC-osflcyp012h04b1
tttttcttctcctccccctctttaccttttcctcctcggttcggttccgtggttcgtctagggtttagtgggttgagatggcggcgccggatgtcgagtaccgctgcttcgtcggcggcctcgcctgggccaccgacgaccgctccctcgaggccgccttctccacctacggcgagatcctcgactccaagatcatcaacgacagggagacggggaggtcacgtgggtttggcttcgtcaccttctcctccgagcagtcgatgcgcgacgccatcgagggcatgaacggcaaggagctcgacggccgcaacatcaccgtcaatgaggcccagtcccgccgctccggcggcggaggcgggggctacggcggcggcggttgcggctacggcggcggtcgtggaggcggtggctacagaggaggtggcggcggcggtt

SEQ ID NO: 9290 - DNA, 500 bp, Oryza sativa
  Clone ID: uC-osflcyp012h12b1
gttgagccatacaacagcgtcctctccacccactccctccttgagcacaccgatgtcgctgtcctgctcgacaatgaggccatctatgacatctgccgccgctccctcgacattgagcgcccaacctacaccaacctgaacaggcttgtgtgccagggcatctcctcactgactgcctgcctgaggttcgatggtgctctgaatgtggatgtcaacgagttccagaccaacctggtgccctacccgaggatccacttcatgctttcctcctacgccccggcgatctcggccgagaaggcctaccacgagcagctctccgtggcggagatcaccaacagcgccttcgagccgtgctgcatgatggacaagtgcgacccgcgccacggcaagtacatggcgagctgcctgacgtaccgcggcgacgtggtccccaggacgtgaacccgcggtggccaccatcaagacgaagcgcaccatccagttcgtggactggtgcccca

SEQ ID NO: 9291 - DNA, 504 bp, Oryza sativa
  unsure (1)..(504): unsure at all n locations
  Clone ID: uC-osflcyp013a08b1
taaaaaaagaaaagaaaaacaaaccctagccgcaccgatcgaagccagtgagacgccgccgacggctatgcgtgaggcgatcgtcggtgaccacgatcgccgccgccgccgcacccgcatccagtgaaaccctgcactgtcgtctcgttcggttgtgaggagatgagggcggcggcggcggcggcggggcagatcgatccgtcccctggggcgccggcgaagtcgcggctgaagaggctgttcgagaggcagctgctgcgggtgtcgccggcggagaggctcccgtcggtcgcgggtgtcggggagaaggatgagtcgtcggagccgagctccgtgtgcctggacggcatggtgcggagcttcttggaggacggtgtcggcgtctagcggccggcgggcgccgcgcgctgctgcaattgcttccacggcggngaggcgtctgacgacgacgacgacggtcccgctgctgccgggcggggtcaccttcgacgccgcagagaccat

SEQ ID NO: 9292 - DNA, 252 bp, Oryza sativa
  Clone ID: uC-osflcyp013a10b1
ttttacgacagagcgtcaacagtggggggtcgtgacatcagtttcgacatggacaagatattgacgctgaagccaactcttgataagaactggccgtccttctactgctcatcctctttcacttggtccagaggcatggggcccttccgggctcatgagtgccagaaacatggaacatgcatcaaacccagcccctgaactaccatggatggcaacgcttccgggggctctcgacctctactccaaatacac

SEQ ID NO: 9293 - DNA, 499 bp, Oryza sativa
  Clone ID: uC-osflcyp013b04b1
tgctgagctttcttctgctgatagtcgcaggatggtatctggtcccaacgggtataattctgcttcaactgcaagagaggaacctggctcgagaattcctgatcgctctggaagaatagcaccaaatacacagtttgctggaccatcgaacaggcctgccagccaagagggccgttcagggaataaattatactctgaggatgatttaagagagaaatctatttccgccatccgggaatattacagtgcaaaagatgagaaagaggttgctttgtgtattgaggagttgaatgctccaagtttctatccctctgtcgtatcactgtgggtaaatgattcttttgagaggaaagatatggaaagaagtctgttgacaaagcttttcgttagtctttgcaacagtcgaaataatttattgagcaagtctcatctcactgcaggacttgcgactgtccttggctcattggaagatgctctaagtgatgctcccagagctgca

SEQ ID NO: 9294 - DNA, 449 bp, Oryza sativa
  Clone ID: uC-osflcyp013b10b1
tcgtttatctttctttctcttcccatcccactcccttccccacacgctctccttccttccttccttcttcgcttcttccgacgccacttcacctctccttcctccctccctcgccgccgcgggctgcttcctccctccctcccgccgcgtcccgccattcccggctgattactcgagccgccgcggggcagatccgtgccgggataggcctctcgctcgcgcttcggtcccccgtctcttaccggcggataaaccctaaccggagaggaggaggagggggaggctcatccgggggaagaagccgcacaaggagctcaagctctgcgtgcctgcgcaggagacgcccgtggacaagttcctgaccgcgagtggcacattcaaggatggcgaactgcggcttaatcaaagaggtgtgcagggtatattccaggaaactgcagatgaacctc

SEQ ID NO: 9295 - DNA, 407 bp, Oryza sativa
  Clone ID: uC-osflcyp013b12b1
tattagctagcgagggatcgatcgagagcttctccttccgggcttccggccagccggcggggaatagctagaatcagaatggcggcggaggcggatgcacggaaggtgtgcgggttgccggagcgggtgcagctccatggggcgatgctggcgctgcagttcggctacgcggggttccatgtggtgtctcggtttgccctcaacatgggcatcagcaagctcgtcttccccgtctaccgcaacatcatcgccctcatcctcctcgtccccttcgcctatttcctcgagaagaaggatcggccgcagctgacgctgagcttcgtggtgcagttcttcctgctggcgctgtgcggcatcaccgccaaccagggcttctacctactgggactcgacaacacctgcccgac

SEQ ID NO: 9296 - DNA, 446 bp, Oryza sativa
  Clone ID: uC-osflcyp013c01b1
tacattgtgagtggagactcgttaattgaatgtgctactattgctaatgggtgttcgaaggttggtgcagttggaataaattgcacacctccaagatttatccatggcctgatactctccattcgaaaggtcacagataagccaattctgatatatcccaacagcggagaaagatatgatgctgagaaaaaggagtgggtggaatcaactggcgtgtcagacggtgattttgtttcctacgtaaacgaatggtgcaaagatggggctgtcctcattggcggctgctgcaggacaactccaaacaccatcaaggccataagtagatcacttaaccaacgccactcttcgctgcatttacctgtggcatagagttgcacgctccttcaggtgtgctactcatgctggtacctgaacctgatgaacattatctggaggtccttactagc

SEQ ID NO: 9297 - DNA, 507 bp, Oryza sativa
  Clone ID: uC-osflcyp013c03b1
ttgattaggcgcgtccgctgccggcgtccgccgccgccgccgccgccgtcgggaagggcaagaaggcggcggccggcgaggaggatgaggatgcggaggaggaggacaagaaggtcgccgccgcgccgcaggcgcctgctgccaaggctcaggtggttggatggccaccaattcgcagctaccgcaagaacacgatggctactaaccagctgaagagcagcaaggaggatgctgaagcgaagcagggccaggggttcctgtacgtcaaggtcagcatggatggtgccccctacctcaggaaggtggacctcaagacctacaagaactacaaggacctgtcaactgcgcttgagaagatgttcattggcttcacaactggcaaggatggcttatctgagagccgcaaggatggtgaatatgtgctgacttatgaagacaaggatggagactggatgcttgctggcgatgttccatgggagatgtttgccaactcttgtcgcagactca

SEQ ID NO: 9298 - DNA, 499 bp, Oryza sativa
  Clone ID: uC-osflcyp013c06b1
tagttgagggagagcaccaaggacacgcgactagcagaagccgagcgaccgcctcctcgatccatatcttccggtcgagttcttggtcgatctcttccctcctccacctcctcctcacaggttcttggtgtagcttgccactttcaccagcaaagtttcatgtctgatctcgacattcagatcccaactgccttcgatccctttgctgaggccaatgctggagactctggtgcggctgcaggatcaaaggactacgttcatgtacgcatccagcagcgtaatggccgtaagagcctgaccactgtccagggattgaagaaggaattcagctacaacaagatcctcaaagatctcaagaaagagttttgctgcaatggtactgttgtccaggacccagagcttggccaggtcattcaacttcagggtgatcagaggaagaacgtatcaaatctctcttgttcaggcccgcattgtgaagaaggaacacatcaagattcat

SEQ ID NO: 9299 - DNA, 503 bp, Oryza sativa
  Clone ID: uC-osflcyp013c08b1
tcgaagaacacacacacaaacacaaacagaaaaacacaacacattaagctagctagaagaagagagaaattaaagaagctaggagctaacgatcaggatggctgctggcatggtggcgacaatggtgctactgacgtgccttgctgcaggagggctggtcgtcggagctgaggaagacggtggcggcggcggtcttggccggctggggtcgccggactacggcgacgcgctggcgaaggccatcctgttcttcgagggacagcggtcggggcggctgccggcgaaccagcgagcgacgtggcgcggggactcggcgctcaccgatggccgtgaagaaaacgtgaacctgaccggcggctactacgacgccggcgacaacgtcaagttcgggtacccgatggcgttcacggtgaccctgctgggctggagcgccgtcgagtacggggccgccgtcgcggcggcgggggagctcggcaacctccggcggcgatccggtggggcgc

SEQ ID NO: 9300 - DNA, 379 bp, Oryza sativa
  Clone ID: uC-osflcyp013c10b1
tttttatccattcttctccagcttccacttccgtggatgcttccacgtagcagtcacagaacgcgatcgacatgggaaggtttgccacgacctagaagacccatgcctacttcaagcgtttgcacagtaagttcaagagacaggaggcagggcacgactgactacagggcacaggattaggctgagcaaccaagataagaacaaggccaacacaccggcgtaccgctttgttgcgagatgtacacacaaagatcttacatttgagattgtatatgctaccattgaggatgatatcgtgatggctgctgcctactgccatgagcagcctcgttatggtctggaagttggtctcaccaactatgcgagagcttactgcact

SEQ ID NO: 9301 - DNA, 477 bp, Oryza sativa
  Clone ID: uC-osflcyp013c11b1
taattttagttttttttgtggctttagatatattcccaatccccaacctcccaataatccgatctctcccagttctgttcggatcaaggctgtgtcgatcgcaaaaaagaaaaaaaaacaatttccttttggggtggttcatctgttgatcacttctttgtttcccgcgttttgttggggattcgattttcgggttaagattttctacacgatggccttgaacttggctcagagcgccgcggtggcaccgtgcttcgtgaccgccggtgatgcgcggcgagctgcttcggtggtcgccatgccgtcgtcgtcgtcgtcggccacgacgagactgaggatgaagaggcaggcggcgtgcgagccggtggcgtgccgggcggtggccaggcacgtggcggcggcggcggcgagcatcaagaggaacggcgtgccggtgttcgtgatgatgccgctggacacggtgagcaagtgcgggag

SEQ ID NO: 9302 - DNA, 497 bp, Oryza sativa
  Clone ID: uC-osflcyp013d05b1
ggctcagcaaatatagctgagaagaaccaggataatgagatgtctacagatgctggtgagcctgaagaagtagcagatatatttatttatagagaagatgttgtcagcttgaagtcaaaagaggacacccgtgggttggttttggaggtagcaggagaatatgattctgaaggtagcatcactgatgatgatactgatactgaggagcatgaacacaaaagttctcataggactgaaaatggtggtgctgatggtgataatgtcagtaatggagcttgatgttgatagtcagagttcattgcctgataacaaggttagggttctatggattgatggtgtcgagaagacggaagatattgacagcgtggttgtcatggacagaagtttccttcatggagatatagtggcttctgccacagatccaactggtcagatgggacttgttgctgatgcaagcttgtggctgatttgaaggacctcacgggaaataataaggt

SEQ ID NO: 9303 - DNA, 498 bp, Oryza sativa
  Clone ID: uC-osflcyp013d06b1
tatcaaatcaactgtctgctccgccaccgcctcctccaagcttctcaaagaacaatggcagtattgcgcctccgccagcacctcctggtggtaatgctaaattgcctggtatgagggggcgtggacctgcacctccttcaggtccaatgtctaggagccttcaatctggtcaggctgcatccagaaggtccaacttgaagcccctacactgggttaaagtaacaagagcaatgcagggaagtctctgggaggagtcacagaaaactgacgaagcttcaaaacctccagtgtttgacatgtcagaactagaacatcttttctcagctgtcctgccaagttcagatgggaagcgttcagataagtcaggaagtcgtgcatctggatcaaaaccagaaaagattcaccttattgaccttcgccgagctaataattgcggaatcatgctaacaaaagtcaaaatgcccttgcctgacctaatgagcgcaattcttactttag

SEQ ID NO: 9304 - DNA, 496 bp, Oryza sativa
  Clone ID: uC-osflcyp013d08b1
tgaaaaatttctccccaatctcgcgaggctctcgtcgtcgaatcgaatcctctcgcgtcctcaagatgcagatctttgtgaagacattgaccggcaagactatcaccctcgaggtggagtcctctgacaccatcgataatgtcaaggctaagatccaagataaggagggcatccccccggaccagcagcgtctcatcttcgctggcaagcagctggaggatggcaggacccttgctgactacaacatccagaaggagtcgacccttcaccttgtcctccgcctccgtggtggcatgcagatctttgtcaagactctgaccggcaagactatcacccttgaggtggagtcttctgacaccatcgacaacgtcaaggccaagatccaggacaaagagggcatccccccagaccagcagcgtctcatcttcgccggcaagcagctggaggatggcaggacccttgctgactacaacatccagaaggagttcaccctcca

SEQ ID NO: 9305 - DNA, 501 bp, Oryza sativa
  Clone ID: uC-osflcyp013d11b1
tctttttttttttgtcggcttcaggtaaacctgggacaatgacattcacaccattgccatgggatggacgtctaaaaatcatgcacggggttgcaaaggggctatctttcttgcatgaatttagccctaaaaagtatatccatggggacttaaggccaaataatgtcctccttggatcaaacctggaggcatacatatcagattttgggctgggacggcttgcaaatattgctggaggatcacctttcacacaatcagatcatgctggtatagagaaagctcagagccagcagtccgatgcctcggtgagccctcttgtgggcaaaggatcatgctgttaagaacgggaagcactgaaaacactgaaaccatctcagaaatgggatgaatactcatatggtgtgctcttgctggaaatgatcaccggcagatcgccggttgttctttcggaaactatgcaaatggaccttgtgcaatgggtgcagttttgttttgaagaaa

SEQ ID NO: 9306 - DNA, 501 bp, Oryza sativa
  Clone ID: uC-osflcyp013e04b1
tattgctcatcatcacaatcatcaacagctcagttcatccgtgccgtgttaatttagctagctagcaatcgagctcagttttcctaattaattgctagctcgatttgctcggtgatctcttcaattcgccggagcttggaatcaatcgagagattagagtgtacgtgagagctagcgggagatcgtcggcggcgatggtgaacacggcggcggtggcggcggcgaagggcagcaggggcagcgggctgccgctggcgtcgctgaaccacatcagcatcgtgtgcaggtcgttgcaggagtcgctcaccttctacaccgacgtgctcggcttcttccccgtccgtcgccccggatccttcgacttcgacggcgcatggctgtttaattatgggattggtatccatctgcttcaggctgaagatcctgacagcctgccagggaaaacagagatcaatcctaaagataatcacatctccttccagtgtgagagcatggtggcag

SEQ ID NO: 9307 - DNA, 201 bp, Oryza sativa
  Clone ID: uC-osflcyp013e07b1
tgttttttaagacagaagcgaccaccagaagggggcggcgattaaaaatgactggagggttacagaaagaacaaaagaggcgggaactagcgaaggccgtcataagaatatgacgatggttagtgcaataaagcacgctcgttggcgtaaagcaccgtgtccgtgaagaataatcgcaaagactcactgcttttacaagaa

SEQ ID NO: 9308 - DNA, 508 bp, Oryza sativa
  Clone ID: uC-osflcyp013f02b1
cgcgttgtatcagtccacaaatcttgtatttactactactttttataagcctgaaaatatagtattttactacttttcaaagcagggagatgattcttttctcccccaaaactcatgattcttcagatttgatattatcttactaatttgtcacatacctattgggtacatacatagattcagagttctctgaaactgctaacattatgtctgaactcaaattgcaatttcagttctactgctgggcacaagagtggcagcatcagccgcagcgatctcccctgcatcggagaagaaagcctggctgatcctggcctgggtgagcacggtggccggcaacctgaccctcctcggctcagccgcgaacctgatcgtctgcgagcaggcgaggcgcgcgcagttcttcgggtacaaccttaccttctggagccaccttcgcttcggcgtgccgtcgacgatcatcgtcaccgccatcggccttctcatcgtcatgagctactgatgaaca

SEQ ID NO: 9309 - DNA, 512 bp, Oryza sativa
  unsure (1)..(512): unsure at all n locations
  Clone ID: uC-osflcyp013f03b1
acgcgtgaggtcttcttccccactctctccctcccacgccgccgcccccgcaaaccctagcgaacgcagcggagagaggagagagcgccatggccgtggaggtggcgacgcataagatcaggtggggagagctcgaggaggacgacgagggggacctcgacttcctgctcccgccgcgcgtggtctccgggcccgacgagaatgggttcaagaaggtggtcgagtatcgcttcnacnacaangggaacatggtgaaggtcaccaggaccttccgcgtccgcaagatcgcccgcgcccgcctctccaagagcgccatcgagcgccgctcgtggcccaagttcggcgacgccgtgcaggaggacgtcggcgnncngctaccatggtgtccaccgaggagatcgtccttgagcgcccacncnccccagggagcaaagctgaagaaccaagtgcttctggtgatccactggcacgccagagtggtgcagctctcatggctggcagaacctgtggga

SEQ ID NO: 9310 - DNA, 504 bp, Oryza sativa
  Clone ID: uC-osflcyp013f05b1
tactaactaccttatccaatatgcattagccctggttttgaaggagagcttcaagatctactgtgcaatcaatgatggtatcatcaatcttgttgatatgttctttgatatgccaaagtatgatgctatcaaggctcttgttgtctataaacgagctggccagcaggctgaagatctttctgacttctacgattcctgcaaacaacttgagcttgccaggacattccagtttcctactctaaggcagccaccatcatcattcattgcaacaatggaagagtacatccgagaagcaccccgtccctcgattaacagcgtggagaatggtgagaggaagctagtgacctacgaccaagaagctacagaggagtctgaaaaaccagcagaagaggagaaagatgagcctgcagagtctgaacaagaacatgagcctaaacaagaaccaaagccaccagaaaccactggagatctactaaacttggatgcagaggtgagtccattggt

SEQ ID NO: 9311 - DNA, 373 bp, Oryza sativa
  unsure (1)..(373): unsure at all n locations
  Clone ID: uC-osflcyp013f06b1
tgcttgacgccatcagcggacagcagcaaactgcgcgaggcggttgcggcctagaaagctgaaactacctcaaataagcaagaacattgcatcttgcaactgtaaaatggttctttcagagagagaaccaatggtatatgtgtatactactggtcgcaaggcctaaacatttgggtttgattggaagcgcattctggtgtgatttgtatgtgccctatcatctggtaatgctacattggaagctcatcatgttgttggtgttaataaggatgagcctttgtgtgctctgctagatatgtacatatacaatgtggtggtatttatatnaaaaaaaaaaaaatcatatattactacaacaatcatcttactaatc

SEQ ID NO: 9312 - DNA, 470 bp, Oryza sativa
  Clone ID: uC-osflcyp013f11b1
ttccacttcaaattggtcggagaagaagagggcgttcgcgcatggggaaggcggcgagcatgagggtggcgctggtgtccgtggtgctcgtgggcctgatcctggtttccacggaccacgccgcgcggcccgagaagctgcccgccgtcgtctccccctccatcgcccccgccgtcggcgaggtcgtcgatgccgccatcaacgccgtcgatctcctgggggtctcgaagatgcaggaggccaacccgtacactcgcggttgcagcaggatcaaccggtgccgcggctgacggacggcacgcgcgcgtcgcaattatacatgtgtatttgagtattgatcatcgacgacgacgatgagctagctggtggacgattgatttcgcgtggtggcgattggatctaattacccgtgtgtgtgtactactccgctccttcgattttaaatatactccacaattattaacttggtt

SEQ ID NO: 9313 - DNA, 118 bp, Oryza sativa
  Clone ID: uC-osflcyp091a01b1
gaatagaagcactataagctgatgcgcaaggctggtgtagaggtatcctacaacgtatttgagtacacctactttggatttacatttttccatagggaggagtcattatcaaattata

SEQ ID NO: 9314 - DNA, 483 bp, Oryza sativa
  Clone ID: uC-osflcyp091a04b1
tttagattggtgatataatggaagcggcacacaacgacaataatgtaacaatccattatgaagaatttattgctgcaactctacctcttaacaagatagaacgtgaggagcacctgctggcagcttttacatattttgacaaagatgggagtggttatatcacagttgacaagcttcaacgagcttgtggagaacataacatggaggattcactccttgaagagattatttcagaggttgatcaaaacaatgacggccaaattgactacgccgaatttgtagccatgatgcaaggcagcaacgttggactagggtggcaaacaatggaaagcagtttgaatgtagcattaagagacgcacctcaagtacattgatgcacgaatgtatagattttgttctcttcttttgtccattcattcttcacctacccaattcggggttgtgacttgtttgaaaagagatcatgtcaattaatttagttgg

SEQ ID NO: 9315 - DNA, 203 bp, Oryza sativa
  Clone ID: uC-osflcyp091a07b1
tcggtaccatccaatgacgcacaagggtgggctgtgaatgatctaggcgtctaatatacattcgggccagacaaagtgtctgaatttcttgagaagcatgaattagaccttcatttgtggagcccatcatgttgtctaagatgggtaccagttctttgcttaccgtcaacttgtaacacatatttcggctcctaattactgtg

SEQ ID NO: 9316 - DNA, 105 bp, Oryza sativa
  Clone ID: uC-osflcyp091a09b1
ttgatgacaagtacccagtggagaaaagttcaagaacgtcttgtggatgatgaacgctgttcccgactcgaaaagatcgatcgactggagattctccaagagtat

SEQ ID NO: 9317 - DNA, 230 bp, Oryza sativa
  Clone ID: uC-osflcyp091b01b1
gtattagctcagccgccgccgatggcgttcacgatcatggccccaacctcccgcgtcctcgccgccaagaccccctttcttggccatccccgcccctccaatgcccccctccgtgacatcgccgccgacgtcaccggccgcatcaccatgagcaaggagctgtggtacgggcctgacagggtgaagttcctggggccatactcggagcatatgccgtcttacctgagggg

SEQ ID NO: 9318 - DNA, 477 bp, Oryza sativa
  Clone ID: uC-osflcyp091b02b1
gtgttggagatctccaagatcgcctcgtcgctcctgccgttcgggcccggagaggacgacgacgacgatgccgaggctgtgggcgtgaccgaggaggtggtggagttcgtgaggcacatctcgacccatcccgagacgtggctcgacttccccttgtttgtcaacgaccggcacgcggatgattttgaactgtcagacacacaatatggacatgcattggttatagagcgtgttgttccaagcttgtcatatcttaggaccgagctttgctctaccaatatgagtgaagcatgcttttggaagatctattttgtgcttcttcactcaaaactcagcaagcaagatgctgaactttttttaacgccacagatccttaaagcaagagaagtattattgcaaagttcaccgacaaagaaaaggctgggacctgatgatggttcattacaaaactggaatgttgcatttacaaaggtgtca

SEQ ID NO: 9319 - DNA, 90 bp, Oryza sativa
  Clone ID: uC-osflcyp091b04b1
gagtgatgcatcatagctacactagagcacggtaagcatacacctatacaacctaagcctgaaaggcgagctcttattgatgagaatgct

SEQ ID NO: 9320 - DNA, 125 bp, Oryza sativa
  Clone ID: uC-osflcyp091b07b1
gtagaatacagcgatgaaggtaaaaagatgggggagtatttatgcctaaagagcggtggagggctggccattggtggattgctataacgtggtagatgagcaacagagagataaggatggagcaa

SEQ ID NO: 9321 - DNA, 299 bp, Oryza sativa
  unsure (1)..(299): unsure at all n locations
  Clone ID: uC-osflcyp091b09b1
tcgtanaatttaatatctcttttcatcatcatgtcgctctcgatctcctacagaagctacaatagccagcaaatcaatcgatcgatcgatacgtgcaatggcggccatgaaggtgaacaagattgccgtggtggcgctgttcctcgtcgccgtggtggtggtttccttttacactcttatatttttctacttccttgccttcttaatttatattttcattatttctaatcattatttctttcttctttttttcatataatttacttattttattttctccttttttactctcatttttt

SEQ ID NO: 9322 - DNA, 235 bp, Oryza sativa
  Clone ID: uC-osflcyp091b10b1
tctatatgctgctgcttctgcttgcgattgcgagctctctcctctctctctctctgtctttcttttctttcggctcgcaaagcttttgctttgttttaggtgcttcttttccactcctttactgttcccccactttttcttgctttgtcacgcacacgaaaagctcctgcctttaccttatctccgctcgtcttccctcacccccgtcgtagtgggatttggtggctgctcctct

SEQ ID NO: 9323 - DNA, 270 bp, Oryza sativa
  Clone ID: uC-osflcyp091c01b1
tatgtttgctccggccagccagccaccgtcgtcatcaccgacgagtgccccgggggcatctgcctcgccggcgccgcgcacttcgacatgagcggcacttccatgggcgccatggccaagcccggcatggccgacaagctccgcgccgccggtatcctccaggtccagtacagaagggtgccatgcaagtacagcggcgtgaacatcgcgttcagggttgaccagggggcaaacccgttctacttcgaggtgctcatcgagttcgaggac

SEQ ID NO: 9324 - DNA, 76 bp, Oryza sativa
  Clone ID: uC-osflcyp091c07b1
ttcgtagaataaaacgatcaatatctaactatcggagaatacttatcctaatagatctgatgatagccgtcctatt

SEQ ID NO: 9325 - DNA, 364 bp, Oryza sativa
  Clone ID: uC-osflcyp091c09b1
tcgatagtgcttggaagctaccttgctctgatgaccgttattttcttctgggccatgcacaagacagactttttcacggacaaattaggtgttagattaattaggatcacgttacatgagttgatgtttgtactgaccaacaagtttgatttgagagtcattttctttttttttttattttttctattttatattttttatttgtatactctattaaatttttggttatttatttatttttaattttatttctattattcatttttatactttcattttttattttttttttatcctaaattttttttttttttttttgtctaatcttttttttttatttaacattttatttttaatacttttt

SEQ ID NO: 9326 - DNA, 102 bp, Oryza sativa
  Clone ID: uC-osflcyp091c11b1
tctttcatttccgcttccctattccgtcccccttgctccgatcccaaccgagtccccggtgccgtcgtcggctacatactcgacctgcgtcgagggccacgg

SEQ ID NO: 9327 - DNA, 104 bp, Oryza sativa
  Clone ID: uC-osflcyp091d04b1
ttatttgaggaggaaaaaactgaagcttggcatgaggacgaattatcgttggtatgaacgagacctggtatcagcttccaacttaacagtattttgtcatgtaa

SEQ ID NO: 9328 - DNA, 88 bp, Oryza sativa
  Clone ID: uC-osflcyp091d05b1
gctgtatctagcgaataacacttaccgcacgggggggatttatatcacaagatcagcagaacaactatctattaataaagaaataaag

SEQ ID NO: 9329 - DNA, 452 bp, Oryza sativa
  Clone ID: uC-osflcyp091d11b1
ttgttcggagcggctatggacggactgtgttctagcgcttttttaaataatctattttcattcaatactaatttataataaattttttatttttatttaaaattaaatttttattaattttataaataattatatttaataattttattaattataataattaatattattttatttattaattttaaatatttaatattttaaaatattatttcattttaaaaatatttattaatatatacatctatataatttaaatatatatttttttctatataatatataattaataaatatatattaatatttaaatataaatatatatatttttattttttttttaaataacattttaataatatatttattttatataatattataaatatatctaataattttactttacttattaattattatatatatatattatatttattatttaatta

SEQ ID NO: 9330 - DNA, 302 bp, Oryza sativa
  Clone ID: uC-osflcyp091e03b1
ttctttgcgagcaccatagcctagcccaccatgtgcggcggcgccatcctctccgacctcatcccgccgccgcggcgggtcaccgccggcgacctctggctggagaagaccaagaagcagcagcagcagaagaagaagaacaagggcgcgaggaggctgccactgcgccaagaggaggaggatgatttcgaggccgacttcgaggagttcgaggtggattccggcgagtgggaggtggagtacgacgccgtcgaggccaatgccgcttgccgcgccccgtagcggtttcgctaaaggcggct

SEQ ID NO: 9331 - DNA, 72 bp, Oryza sativa
  Clone ID: uC-osflcyp091e08b1
tcggtagaaaacaacgatgtctttcaatctctcggttaatcattaaagcattcagatccatagatagctatc

SEQ ID NO: 9332 - DNA, 408 bp, Oryza sativa
  Clone ID: uC-osflcyp091f01b1
ttatgtagattgtggcgtcaaggggtaaaaaaggcacatggtggattgagcgtgttgagcagctaacctttttgacccgtgtggcgaaaacacctgctcagaagcttgaaattctctttcatgtgatttctgcccaatcagatgtgcacgataggttacttggtcacatgccagtcaacatgtggaagaagtgtgttaataacatgcttcttgtgcttgatatactgcaacagtatcccaatattgtagtagacacatctgttgagccatggtgagaaggtaactcaaaaagggtgctgacttttgatggacaaattccatgtgactgggtatgcttgtttgcgttcctggataagaatgggtgttttagagctttatgaaatggaatatgagaaatccaacaatttt

SEQ ID NO: 9333 - DNA, 389 bp, Oryza sativa
  unsure (1)..(389): unsure at all n locations
  Clone ID: uC-osflcyp091f07b1
tctaacgggtcccagttcttcatctgcaccgtgccctgcagctggctggacgggaagcacgtcgtgttcggccgcgtcgtcgagggcatggacgtcgtcaaggccatcgagaaggtgggatcccgcggcgggagcaccgccaagccggtcgtcatcgccgactgcggccagctttcctagatctgtgctgttccccttcgcctttcccagtatcagtcgtcttgagtcgtcgagtccctaaataaggaggaggtggnggntggtgttttttttttttttcgttctattattctacctattttatcataactttctactcttttttttttcattatcacctactcttttttattctctcttctttacattatttttttaatatttttttt

SEQ ID NO: 9334 - DNA, 289 bp, Oryza sativa
  Clone ID: uC-osflcyp091f10b1
ttctgtgggacgccggcggattcgtattatgaggtccgctcggattgcacggatgacgtgcccaagagcaagttcaagatcaaggcaggaaaaacattgagtgtccggaaatggcaggctgcatttagcactgatggttgtcttgatattgcctcagtcctaagccggatacaaaaaggaggtgtgcatccaacagtaaggggagaggcttgtcatgtttttatttctttctttatttccatttttttttattttttttttattattcttttatctttttttttttttt

SEQ ID NO: 9335 - DNA, 165 bp, Oryza sativa
  Clone ID: uC-osflcyp091f12b1
tttatcgcgtctcgactccactactgtggttgcatatactactacacttgcagttgcatccagagcccgccccgcgtctctactcgctccgtcgtgccgttattttttatcgacttaggtttacaagttatttatttttttccactctcgtttttgttctttttt

SEQ ID NO: 9336 - DNA, 127 bp, Oryza sativa
  Clone ID: uC-osflcyp091g05b1
actaatcaaacattttttgcgaaagcatttgctggataatctatctaattggtttatttgaaaaacaaaacttccattcattggaaatttctatttaggaaaatgagcttatgttttcctccaacag

SEQ ID NO: 9337 - DNA, 253 bp, Oryza sativa
  Clone ID: uC-osflcyp091g06b1
tgttttcctcctctccgaaaactctcccctctctctgctgctgtggccgcatcatctcctcctcatcttcttctccacagcctccagctaggccatggcgttcaccgtctccttctcctcggacaacgtgcagatgcttcagggcaggagctgccaccgtcacgcggcgttcgggggctgcttcgccgtgccaagaaccggtccaaggatgcgttccgtcggccgtttgggccatcactctagcctcgtcgcc

SEQ ID NO: 9338 - DNA, 176 bp, Oryza sativa
  Clone ID: uC-osflcyp091g07b1
ctcggaggccttcgcggagctcaaggtgaaggagatcaagaacggccgcctcgccatgttctccatgttcggcttcttcgtccaggccatcgtcaccggcaagggccccctcgagaacctcgccgaccacctcgccgaccttttttttttcaatcgccatgggcctacgccatcct

SEQ ID NO: 9339 - DNA, 519 bp, Oryza sativa
  Clone ID: uC-osflcyp091g09b1
ttggtcaagtacgccgacgtgatcaactccgtcgtgctgcaggatgattttttgccaagaacgccaacaccgttggagtacatttttgggtctatattctgcttgccctgcttgttgtttatcatgtgcctgagagatacatttaagcaagacaagagaaaatttaaagatccaagaagactctatgctcctggtcgaatgtatcatatagtcgagaggaaattttgcagatgtggaagattccctcctgaggtgagaactgctattccagtggaaggccgatttgagcatattgtgttgtcatgcagtactacttctgatcatgcgattgtatggattgaacgagaatcagaaaaggctttagagcttatgaaaggaaatgagaaaccaacaacttcgcctgcgcaacaaaagatggaaagactgcagagttttgaggaagaacacaagaatgcccttgagagagcaaagaccttagatgttcctcacgcagttgacttgtttgaagtggagatccag

SEQ ID NO: 9340 - DNA, 82 bp, Oryza sativa
  Clone ID: uC-osflcyp091h01b1
aacaccgcgacacgaagacgaccatggcgatggctcgctcccagcttgccgtcgtgttcctcgccgtcctagtataggtgga

SEQ ID NO: 9341 - DNA, 171 bp, Oryza sativa
  Clone ID: uC-osflcyp091h03b1
gtggtcaccgagatcaacaagatgcacaagaagatcctctcctctccagagatggttgataaacaggttgatgctacgttgattcggcttcgtgctttatatacacgtgccaaagaactttgtgagagtgaagtcagtgcatttgtctgctttggttggactattggatgg

SEQ ID NO: 9342 - DNA, 149 bp, Oryza sativa
  Clone ID: uC-osflcyp091h07b1
tcgtgagaatgatgagcagaaggttggagctgaaatttgtaatgagagcgctgagctacccgcttaaattgattgctaagaatgctggggctaatggaagcgttgttacctaagaatgttctctttaacgataactttaagtttgttta

SEQ ID NO: 9343 - DNA, 66 bp, Oryza sativa
  Clone ID: uC-osflcyp091h09b1
tcggttggcttctcctccccctcccggttcggtgcggattatttaaaatacaaaaatatttaaata

SEQ ID NO: 9344 - DNA, 266 bp, Oryza sativa
  Clone ID: uC-osflcyp091h10b1
taacgagcgatcgaggtgcccgtcgatcatctgtgaagctagctatattagctcggatcgccatggcgaaagctagggtgaacctgaccttctttttcatttttttccattatataatacttatatttatcttttttttattttttcttaatttatttattttatattatatttttttttcttattttatttttttttaatttatttttatattattaaattatatttttttctttattttttatttttttttttatttttttctt

SEQ ID NO: 9345 - DNA, 458 bp, Oryza sativa
  Clone ID: uC-osflcyp139a07b1
tccagagtccacccgtttgagtacttgggttgtatccattaaggggccatgaggacgtgcttacagtaaagttcagatcaactgcgcattccatacggtgcagttctagagctgtagctgtatctcaggctaatcagatacataggtctgatgctgcaacactggagagagaatgcacaatcctgaccagtcatatagttccaccaatttcaaggtatggaccacttgcactgggtcctagatggattgcatattctgggaatccagtcccagttccggatacaggccgtgttacccctcagcttcttaatctatctcccctagttccacaacctggttcaaatggcattgttgtggcatactatgcaaaagaatcaagcaagcaactggcttctggcattataacacttggtgatgttggatataagaagttgtccaagtattgttcagacttaatt

SEQ ID NO: 9346 - DNA, 266 bp, Oryza sativa
  unsure (1)..(266): unsure at all n locations
  Clone ID: uC-osflcyp139a08b1
atcaaatgcaaaaccccaccnngaaacaacgaaaggagcaatagattccggagcaacatccacgcctaacannagcanccanggccnnngaaagacnggacagcgcggggaagccaccgaacggcccaacccaacgagggagagaagaaccaaacgnccnccagangcnganacaaaaacaagcancacgcaaccggaaagcacaaacgggcaagaagaaaagggcaaagcaanccccgaaccgacggccgctgaaggagcgaagc

SEQ ID NO: 9347 - DNA, 468 bp, Oryza sativa
  Clone ID: uC-osflcyp139b01b1
tttccacttcgtccggattagatcatgatgaggctctggatgatcctgctctagagaaacttcgtcaacaaaggcttgtggtagaagctgactttaagtcaactacggaactttttggaaagaaggacggcagtgaaaagtccctagataccttcatcccaaagtctgagagtgactttgcggaatatgcagagcttattgcaaacaaactgcgtccctatgagaaaagcttccactatatgggtctactcaagaatgtcatgagactttccatggcatcattgaaaggtgcggatgcgaaagatatatcgtcctccattgcagcaattgctaatgaaaagatcaaggctgagaaagaagctgcagcaggcaaaaagaaacaaggggcaaaaaagaagcagctacacattgagaataaagacgatgatttcatccctggaaagggtaattttgatgatccggatgagt

SEQ ID NO: 9348 - DNA, 456 bp, Oryza sativa
  Clone ID: uC-osflcyp139b03b1
ttcgtccggattggatgtaactcagaattcttcttctttctgtgatgattttctgagtgtgtatttttctcttgaatcttctcatctttggtagatttctgcagccttcttgttgtaattttaatagattttctaggtgttttcagagtccaggccaaagaaagatttggttcttgagatgttcagttggacaatttgttttgctaagcaaccatagtgaggaaattaaagcttataattacaatgtattatcaaaaaaaaaaaaaaaaaaaaaaaaaaaaaaaaaaaaaaaaaaaaaaacaaaaaaaaaaaaaaaaaaaaaaaaaaaaaaccccccccaaaaaaaaaaaaaaaaaaaaaaaaaaaaaaaaaaacaaaaaccggggggccccctttatggagaccacattttccccccgggggtcggcaagccaaatctttttttttgggcccccc

SEQ ID NO: 9349 - DNA, 438 bp, Oryza sativa
  Clone ID: uC-osflcyp139b05b1
gaactggaaactggactatattatatatatagagagagagagagaggggcaaacaagaagaaaagatgaagaagatggtggtgatggtgaggcagcggcagcaaaggcagccggtgatggtggtggtgatggtgtgctgggcgctgctggcgacggtggcgcgcggaaactgccgcgactagtgcctttcctggtgccaaggttgggccattatctgtcacctgttctggtggagctcctgcctcggctaattctgcatctccaccatgagcacaagcagaccacattccattactgatcatgatcagcactttccatgacattagttatagtaaggtccacattcggtctccgtgcttaaggttctcgactctgccatgacttgatccctattgaccccttgcttccattcatttctaaatcccattatacataccc

SEQ ID NO: 9350 - DNA, 325 bp, Oryza sativa
  Clone ID: uC-osflcyp139b07b1
ttgaataattcgcttcgcgagattggttgattcatctcgcgattgatcgagctcgagcggcggtgaggtgaggtggaggaggaggaggaggaggagatcgggatggggagagggagggaggagctgaagaggatcgagaacaagaacaacaggctggtgacgttcgagaagcggaggaatggtctgcacaagaaggcgaacgagttttacgtgctatgcgacgccgaagtctgcctaatcatctacagcaactagtggtaaagctatacgagattttagatacggccaaagcatggatccagtaactttggaaagattccaaaaa

SEQ ID NO: 9351 - DNA, 119 bp, Oryza sativa
  Clone ID: uC-osflcyp139c01b1
gcagcgccccacgaaaggcagggataaaaaaaaaagaacccgaacccagcacccccccccccaaaacaaaaaaaacaaaaaccccaagacccgggggaaaaaaaaacaacgcccccaaa

SEQ ID NO: 9352 - DNA, 174 bp, Oryza sativa
  unsure (1)..(174): unsure at all n locations
  Clone ID: uC-osflcyp139c07b1
aataaaaatacaaccccaccanggancaccgccggggccggcaagaaaagaaaacaccgaaccaacccagcggccagacgacgaaaaagagcggaggaggaaggagcccgaagaaaccggcaaggaggacgagaggacggcgacgacaaacaaagccggaagcagaaccgcgga

SEQ ID NO: 9353 - DNA, 473 bp, Oryza sativa
  unsure (1)..(473): unsure at all n locations
  Clone ID: uC-osflcyp139c11b1
tatacggtaaatgaaaggagcctgatgttgaaaagcaaaaggttaccatttttagaacacgtcacatcggcattagttaaccgttatcatctcaattttacaccaaaagatgtttcttccctctggttcctttgcaagcaggaagcatctttaatgaatataaccaatcaagcttgtcaactttttaatgaagctgaggtttattttctagagtggacagatgatctggagggctttgtgctaaaaggttatggtgagtcaataaactatcggatgggactgccattgctcaaggacgttgtccagtcaatggaagaagcaatcgttgctaaagaagaaaaccaccctgatggtacatatgagaaggcaaggctccgatttgcacatgctgaaactgntgtccctttctcatgtcttcttgggctttttcttgaaggatcagattttgcgaagatacaacgggaggaatcatt

SEQ ID NO: 9354 - DNA, 455 bp, Oryza sativa
  Clone ID: uC-osflcyp139c12b1
tcggttagattgcctgccagctaacgaggcactcgccgaggaaaaagagaatcccgctcgtgctcttgctggtgtcgatgtcgccggcgtggtcgctgtcgctgtacccgacgaagtgtgccttgccaggacacctcgggtagtagagaccgtggtcgagagtccccgcaacgtagcggatgatcctcttcacagcctgctggtgctccgtcgtcggtcgctgcatgaaccgactgacgtagccgacggagaaggccaagcccggccgtgtgtgggtgaggtagcgaaggctccccacaagacgtcggtactgtgtagcatccacctcctccgctgtgctgtcgcggctcagctttagtctctcctccatcggagtgagagctgggttgcaatcggtgagcccagccagctcaaccacgcgcttggcgtaggcggtctgtcgaagcgtgatcccg

SEQ ID NO: 9355 - DNA, 389 bp, Oryza sativa
  unsure (1)..(389): unsure at all n locations
  Clone ID: uC-osflcyp139d02b1
cattccnataagcttctcagccttttgcctctctttctactctctttcttggccgtctctcttatatccctcaatttaaccatcgagggcggccaaaaaaaagagagaaaggaagagcaaaataacacattacaccatggcgcgattcgtcatcatctccgtcgtcgtcgtcgccgccttcgccgctgccgctgtcgttgaggcccgggttggacctatcgacgtcgctccgaccaacctgatcaccaacccactcggtgccatcatcgacaatggccgcaagatcaccggcgccgtcgtcgacgagtgcgcctggacctgcgatcatgtcgcggcgggtaacaagaagatgtgcaacacgctgaggaagctgccgggggtgagctcgc

SEQ ID NO: 9356 - DNA, 427 bp, Oryza sativa
  unsure (1)..(427): unsure at all n locations
  Clone ID: uC-osflcyp139e06b1
cgaccggccggaatcccgggcatccactcgccggttagttcaccacccaaaggccgcgcgccgaagacgggtccgggagagaccgagcaaagtgaaccangcaaggcggaaaagcacacgagcgagcaaccagcccaagccgagaacacagcaaggaccgggagggacnacaggggagccaaaagcaacaccaaggacacaccaagacaacgnggagacagcagcagaaggaggggggcacacggacagccggagaggcgaagaggaagcaaggccgacaaaccaggacnggaggaggggcccacggcgnggccaagcccccagaccgaaaggagcaaccaaggaaccgggagaaggcccccngaacagcccaggccccgcaaagcccgcacaggacgcaaaggagaccacgcccgggacgggaccc

SEQ ID NO: 9357 - DNA, 430 bp, Oryza sativa
  unsure (1)..(430): unsure at all n locations
  Clone ID: uC-osflcyp139e07b1
tcggatactcaatatgactgcgcttgaatggtnnntgggcagactcaactgatgatggaacaagtggaggaacttcgcagaaaggtacattatcaatccaaagtttctcaagcatacatacagtatcagcattgccatgggcgggtgacttcaggagtgctagctactagtgataatctaaattaaaccacgaaatgacttggctagctttgacaatgcatctatattgccagcaaggctgctagggtataccgcatgcaagttaattagggtagatcgtgtagcctttgactgtataactaaagaaatggtagcttcgttcttgcgagagatttctttcatgagagttgttacatattatactatcttcaatatatttttcttgtgccacaggagcgtcagctgggtgaaattaataggcaactcaagc

SEQ ID NO: 9358 - DNA, 391 bp, Oryza sativa
  Clone ID: uC-osflcyp139f04b1
aatgcagtactctcagctctcacagctcactgcatcaatggccgtttcaccatggcgctctcctccccggcgatggcccgcgcggcgccgtcgacctcctccgcgctcttcggcgaggcgcggatcaccatgcgcaagaccgccgcgaagcccaagccggcggcgtcgtcggggagcccgtggtacggcgccgaccgcgtcctctacctcggcccgctctccggcgagccgccgagctacctcaccggcgagttcccgggcgactacgggtgggacaccgcggggctctccgccgacccggagacgttcgccaagaaccgggagctggagggtgatccactcccggtgggcgatgctgggcgcgctcggctgcgtctttccggagctcctc

SEQ ID NO: 9359 - DNA, 453 bp, Oryza sativa
  unsure (1)..(453): unsure at all n locations
  Clone ID: uC-osflcyp139f05b1
ttccattcgcccgcgtgangtgcttgcctcaaagatggctccaccagagacgaggaggtaagaattcaagagcttgctcatggaagctgccaggccggtcctccttggccaaacggagcggtttgacgctgaggcagagctctcatgggtgtgacatatgaacattgacgcatatagcaggctgcgtgttcagagactgaaggagtgcacttggcatgtggcaagagagcaagatgtgctgccacaggatcggtctctggaggaccactacttgcactttctaggtgatgaaacagattgcactgacaagacagggcgacgtggcaagcaatatcagcgatctcctgtaggcgatggcacagatggtcaagcggagctctggccacggagtacccattgctggatgcgtaggtgaccaggacagattgcacaccaggacggatacatatcata

SEQ ID NO: 9360 - DNA, 458 bp, Oryza sativa
  Clone ID: uC-osflcyp139f07b1
ttcactaatacccccaccatggatcaccgcctcctcctcctcggttctcctcctcctctccccggcggcggccgccgcctcagtccccggcgaggaggagccgctgatccggcaggtggtcggcggcggcgacgacaacgagctggagctgaacgcggagcgccacttcgccagcttcgtccagaggttcgggaagtgctaccgtgacgccgacgagcacgcgtaccggctctccgggttcaaggccaacctccgccgcgcgcgccgccaccagctgctcgacccctccgcggagcacggcgtcaccaagttctccgacctcaccccggccgagttccgccgggcctacctcggcctgcgcacggcgcgccgcgccttgctgcgggggctcggacgggtccgcccacgaggcgcccgtactctacaccgacggcctccccgacgacctcgactggaga

SEQ ID NO: 9361 - DNA, 385 bp, Oryza sativa
  unsure (1)..(385): unsure at all n locations
  Clone ID: uC-osflcyp139f08b1
tcgcatgctctcccttatnnnngncggcatgcacgcaagtacaagtttatgttaagcttcctttttaacaatattttgctttagtgatattcagtgcagtgcaaaaatcgtatatactgcatgtttccttggagagggtatatgctgctttatttcctataggggtatatagtgatttttttaaatacacaaacaatggaaaggtttgttttccattttcagttaatacaaagctatacattatactaactatttaagagaatatttctattatcatgtgatatattataccatgtgcccaaatatccaaatttgggtgaatatattagcttgctttagtaaggcccataaagatgaacagagctttaggggggatgaatttgat

SEQ ID NO: 9362 - DNA, 380 bp, Oryza sativa
  Clone ID: uC-osflcyp139f12b1
tcgatattcggcagttagggcgctggagaagtcgattgatgctataagcaccgcaagagaaagcccagtcgacaagaacaagggcaacggagatggcctgcacgaagcagaccaacggtaagttcaccgggggatgggacccgaggacgcatctagtgacccaggcggataggaaaagtgatccgaccacggggggggtgaagaagccacggccatgcaagccgaggaccgtagcgctgaccgagatgcgcaggaacgagacgagtcacggacctgctgatgcggaggatcacgtacaacgcatcatccgccagaacgggcatgactagaagaccgagctgggacaccagaggcatgccgcgatcgcccttcgggaggag

SEQ ID NO: 9363 - DNA, 457 bp, Oryza sativa
  Clone ID: uC-osflcyp139g04b1
ttcatttgcccgcgtttatttattaaccccccagggaggcagggaaaccgggtccggtttctgagccgctccccccggctctccttgcctcccttgctcctccgatcgaggctgaagcggcttcaggatatacatttttgtgggaatggggaattcttgccaaaatggaacctatgggaacaattaccagaacagcaaccggtttcagaatgaccgttttgcttctcggtacgttgatgggaatgatactgaggattgctactcgggctcgtcaagggccagcttagcgggtgctctgcggcaagggctgaacctaaagtcccctgtccttggatacaagactccaaatgtaagggagctctatactcttggccgggagcttggacagggaccagtcgggaaaacatacctctgcactgagattagcacagggtgtcaatatgcatgcaagactatc

SEQ ID NO: 9364 - DNA, 447 bp, Oryza sativa
  Clone ID: uC-osflcyp139g06b1
gatagggtatcgcctcctccgccaccgccgccgccgccgcatcagttgccggggacgcgacgcgcgatgcagcagcctcccccgccgacgatgaacggcggccaccacgcggcccctgctgcgtcgcaggtctccggggcgcccccgccgccgcatggccactaccagcagcagccgccgcctcagccgtactaccagcagcagcagccgttgccgccgcactactaccaggcggggcccccgcacgcgcctccgccgcagcagccgccgtcgatgtggggccagccggcgccgccgccgccgcagtacgcgccacctccgcccagcagttccagctcccgcaccagcagtacgcgccttcccctcagcattacgcgccgccgccgccgcagcaacagtacggggcgcaaatggctggcgggcccgctccgggaggcgacgagatca

SEQ ID NO: 9365 - DNA, 408 bp, Oryza sativa
  Clone ID: uC-osflcyp139g12b1
atcgtatgcgtttgcactcctctcgatctccattcgtttttgagttcctcgtttgctccgcctctctttcactcatgggcaagattaagatcggaatcaatgggttcggccgcatcggcaggctggtggccagggtggcgctgcagagcgaggatgtcgagctcgttgccgtcaacgatcccttcatcaccaccgagtacatgacatacatgttcaagtatgacaccgtccacggccagtggaagcatcatgaggtcaaggtcaaggactccaagaccctcatctttggcacgaaagaggttgccggtgttcggctgcaggaaccctgaggaggatcccatgggctgcggctggtgctgaatacgttgttgagtctactgggtgttttcaccgacaaggacaaggcag

SEQ ID NO: 9366 - DNA, 385 bp, Oryza sativa
  Clone ID: uC-osflcyp139h01b1
gagtagctttcgttcttcgcctcgcctctctcgcctcacgggttgagaggaggagggcgattcttaggagggcggttgcctttgatcccattcccctcccccatcttctcccccgggttcggattcggtcggtcggttggttgatccgcaaccgatcgatcgagggggggtggcactcgcggatcctctcgtgttcttcctccagtgcgctgatctggacacggcgcgatttatagtctatcggccagatcacaaagtttttcctcgccgtacattcaaaagctttctctgaagactttctacattctgaagattatattgggaataacattttaacatgaaggccgatcggttaatgttgtccaatctcgaccatgatttggga

SEQ ID NO: 9367 - DNA, 89 bp, Oryza sativa
  Clone ID: uC-osflcyp139h03b1
gccggtccggaatcgcatttcgagtcccagtgacccgttttagttctcattgaaaaaaaaaaaaaaaaaaaaaaaaaaaaaaaataaaa

SEQ ID NO: 9368 - DNA, 421 bp, Oryza sativa
  Clone ID: uC-osflcyp139h05b1
ggtaccattatcaccatcgacgaggacgggtggctgcacactggagacatcggcttcgtcgacgacgacgacgagatcttcatcgtggacaggctcaaggagatcatcaagtacatggggttacaggcgccacgggcacgagctggaggcgctgctcatcactcacccggagatcaaggacgccgccgtcgtctcgatgaaggatgatcttgccggtgaagtgccagtcgccttcattgtccggacagaaggctcagatgtcaccgaggatgagatcaagaaatgcgttgcacaagaggtggtgttctacaagaggatcaacaaggtgttctttaccgattccatccccaagaacccttccggcaagatcctcacgaaggacttgagagccaggcttgccgacggcatacccgacgccgtc

SEQ ID NO: 9369 - DNA, 298 bp, Oryza sativa
  unsure (1)..(298): unsure at all n locations
  Clone ID: uC-osflcyp140a03b1
aaataatatacccaacccagccacananggaaancaggcgggttatggtaagagcagcctgacttcaactagggccaacccagccacatattgaggaacaattattcgcacatccaacctactagtggtttggtgtgttctacctgtaccatctcgaggctttccatatgatccggccaatatttttttgccgagatatttgtttcactgctgcaaaccttactttattctcggtataaggcacaatcgccaatcggagtgtcgttctggtcaccccaaccggcaaccccccgtagag

SEQ ID NO: 9370 - DNA, 512 bp, Oryza sativa
  Clone ID: uC-osflcyp140a07b1
ttgtagaaaacaaaattggtcgtgatgtgcaaaaccaggccctttttagtccacaagttgactcttcatccctcctgtacaacatggttcctaatctgacttcgaatgtttcggatggcaacttatcaacgatcccttctggatcaacttatctgcagaatgcaatgtatggttgcttggacgactcttctggtttattgcaaaatacaggagagaacgatccagcaaccagaacatttgtgaaggtttacaagtcaggttcggttgggaggtcgttggacataacccggttctctaattatgctgaacttcgagaagaactgggtcagatgttcggcattaagggtcaattggacgaccctgatagatcaggctggcagcttgtattcgtcgacagggagaatgatgtgcttctccttggagacgacccttgggagtcctttgtgaatagtgtatggtacatcaagatactttcacctgaggatgtgcataagatgggaaagcaagggaat

SEQ ID NO: 9371 - DNA, 538 bp, Oryza sativa
  Clone ID: uC-osflcyp140a08b1
aataagataccttcttcccaccgattccaatctccagaatgctgctttgatatggccgtcaagatctacatagtgtactactccatgtatggccatgttgcaaagctagcagaggagatcgagaaaggtgcttcttcagttgaaggagttgaggtcaagctatggcaggtcccagagactctttctgatgatgtgctcaccaagatgggtgctccttcaaagaaagatgttcccataatcacacccgcagagcttgccgaggctgatggtgtcatctttgggttcccaactagatttggaatgatggctgctcaattcaaagcattcatggatgctaccggtgggctgtggaggacacagcagctcgcaggcaagcccgcgggaattttctactctactggttcccagggtggtggccaagaaactactccgttgacagcaattactcagctagtgcatcatggcatgatctttgttccagtagggtacacctttggtgctgggatgtttgagatggagcaagtgaagggcggaagcc

SEQ ID NO: 9372 - DNA, 492 bp, Oryza sativa
  Clone ID: uC-osflcyp140a11b1
atggcattaatggaaaacctaactacctgcatggtatgggcttaggttctgaatgaattgaatgaaggaatttcacgttcaagaagacttaatcttaagaatcctcaagatagtctgcttggtcaaatccctcgacgcacacgagatgaacttatggatcactgggcagctatccaggaattattgcagcatttttggtcatcatatccaataacaacttcagttctttataataaggttcaaagaattaaggatgcaatgacccagatatatcaaaagttgcaggatataaaggaatcagcacaacctgatgtgagacacgaaatatctcaactagtaaagcccatgacccaggctttggatgctgccttcaaccatgacttggagcagcagcaaaaatcatcgaaatccgggaataagcccaatgggttttaactttagccgagaagactagctttcgcgacggattagggattgatttactgctagagc

SEQ ID NO: 9373 - DNA, 394 bp, Oryza sativa
  unsure (1)..(394): unsure at all n locations
  Clone ID: uC-osflcyp140b01b1
gacttcaataacaaggcgngggccgcgngccacagggggggggtgcgcatagacggaggcggcggggttcccgcgaagctccgggcccgggcctcgccggagcggctattccccgacgaccggagttgcgcgtcggcggtcaatggtcgccgactcggaccgaacacaccatgtctctccgaccgccgcctgcggtggagaagaagaccgccaagaagaagaagaagaagcgttacgctcccaaccgcctatataagcagcgccccagccgccgagtacccccctaactcctacaccccgaccaccacctaaaagctctccactcgaaccccacctcaccctgcccctcccaccaccatcactcaacaccggctccgttccgatccccatggcg

SEQ ID NO: 9374 - DNA, 246 bp, Oryza sativa
  Clone ID: uC-osflcyp140b07b1
ttgaatattgaacgggggaacgcgtacttacccacaagatatgggcatgccatggcaccatttatggggtgcgcctggccaccggaactcacgctggccgtgctagcgtcgggcggtgcccttctcgacagctgcatgctccgggctcgagcaactgaaggcagctgcttgaacgtaggctacacggtgaggatggacagggaacaagcttggcaggaagctcacatccgaccgtacccgagcgca

SEQ ID NO: 9375 - DNA, 433 bp, Oryza sativa
  Clone ID: uC-osflcyp140b09b1
gctggaataagcaacgcttctaccaactgaagtggcaatcatactccaccgaaatggaaggactatgcaattcgccgtagcgccagaatcttctaccacacctcatccagaacaagggcaatagaatttgctggcaacaggcatatcttgtgagtgcatacaagataccttgagccttctacaccttgactctgtgtgcactgcaagccggttgcaccagccactttcaatggccaaattgcagcaaaaaagtgttgcgtgtctatctctcgatttgcataaactttgcagctaggcttgaatgcttttgtgattggctttcagcttcttctgtacataaagagattcctttcaataaatgaatataagctaaattaacaggaaataaaaattaaaaaaaaaaaaaaaaaaaaaaactataaaaaaatatttt

SEQ ID NO: 9376 - DNA, 325 bp, Oryza sativa
  unsure (1)..(325): unsure at all n locations
  Clone ID: uC-osflcyp140b11b1
atgatgttacgcgctcaagacggcgtacctggacaagcagaacatcatgatggacatggacaggttcaagaagacattgcaggaggcgctcgacaggttgccgccagcatgagagcttgatgaactgatgaaagctcaagcccacgaggtggtggtggtggtggtggtagatanataggttggtgtatctatttgtgccttttnttgcttaaattagttttttcttttgaaagtctttttacgccttcttcttcctttagcaaccatccatttgacctgtagctttgtgatagaaaaaaagaggatgaactacaacatcttgttt

SEQ ID NO: 9377 - DNA, 437 bp, Oryza sativa
  unsure (1)..(437): unsure at all n locations
  Clone ID: uC-osflcyp140c05b1
cttatcctttgcggcgatgcggagcagcagccatggaggtgcttagctccagccgcttctctagggttttccccagcagcctcctcagccccgtctccaagccgctcaagcccccgcgccaccgccgccgccgcgtccagacgctatcctcctcgtcctccgatgccgcggcggcgccgtccacgccgccgccagtgtggccgcccgcctcgctctcccggctcctcgccgcggcgctgcggggagggcgcgcgggaggggagctcccggacctagccgtgggggcgggggcggcggcgacggcggcggggggaggggcngaggatagggaccgctgctgatgagcacgacggcggcggcggtgaccaaggcgcgggagaacccgtacatcctggcgctcggggcgaacccgacgttcgtgtcggggctcgtggccg

SEQ ID NO: 9378 - DNA, 449 bp, Oryza sativa
  unsure (1)..(449): unsure at all n locations
  Clone ID: uC-osflcyp140c08b1
cacccaanccaacccaanccgcgcgggatacattaagnnctgcgttcatgtccttccgctgctcctccctcgccaccgccgtctcctcctcctccgccaagcccctcgccggcatcccccccgccgcgccgcactccctctccctcccccgcgctcccgccgacaggcccctccgcctctccgacttctcatccagatccgcccgggccagcagcttcgtcgcccgcgccggcggtgtggacgatgcgccgctggtcgggaacaaggcgcccgacttcgatgcggaggcagtcttcgaccaggagttcatcaacgcgaagctgtccgactacatcgggaagaagtacgccattctcttcttctacccgtaggacttcaccttcgtctggccgaccgagattaccgctttcagtgacagatacgatgagttcgagaagttgaacactgag

SEQ ID NO: 9379 - DNA, 410 bp, Oryza sativa
  unsure (1)..(410): unsure at all n locations
  Clone ID: uC-osflcyp140c09b1
ttgnattaggcgacaacaaatcgaaaatcgaacgggagagattctctctgattctctctcgcgggcggcggaagcaatcgtagttagcagaggccggcgagcgagccgccaccggcgatgggcgacagccagtactccttctccctcaccaccttcagcccgtcggggaagctggtgcagatcgagcacgcgctgacggcggtcgggtccggccagacctccctcgggatcaaagctgctaatggagtagttattgccaccgagaagaagttgccttctattttagtggatgaaacatctgtgcaaaagattcagtcgttgactccaaatattggtgtcgtctacagtggcatggggccagactttcgtgtttaagtgaggaaaagtcgaaagcaagcacaacagtatta

SEQ ID NO: 9380 - DNA, 585 bp, Oryza sativa
  Clone ID: uC-osflcyp140c12b1
atgggatatcgggtcggggaacttcggggtggcgcgggtgatgcgtaaccgcgagacccgcgagctcgtcgccgtcaagtgcatcgagcgcggccaccggatagatgagaatgtgtacagggagatcatcaaccaccgctcgctgcgccaccccaacatcattcgcttcaaggaggtgatactgacgccaacgcatcttatgattgtcatggagttcgcagcaggcggggagctgttcgatcgaatctgtgatcgtggacggttcagtgaggatgaggccaggtatttctttcagcagctgatctgtggagtgagctactgccatcacatgcaaatatgccatagagatttgaagttggagaatgttctcttggatggcagcccagctccacggcttaagatatgtgattttggctactccaagtcatcagtattgcattcaagacccaaatcagcagtggggacgccagcatatatcgcaccagaggtgctatcccgccgtgagtatgatggaaagcttgcagatgtatgggcctgtggtgtgactctttacgtcatgcttgtgggagcctacccatttgaaga

SEQ ID NO: 9381 - DNA, 320 bp, Oryza sativa
  unsure (1)..(320): unsure at all n locations
  Clone ID: uC-osflcyp140d03b1
tttcgatttacgtgaccgtattcatagcggccgccctcnngnanagcgactgcaaagagtttgagggnnatgaggaggccagaactcccccangacangannggagcagacccagngaagaagcaaancgccgacacaagggcccagacaaagcaagngcgcaaaccanagcccancaccaagcagggggaagaccngcnnnnggcnngnacagangannanganaangggaaaanagcancnngcaggcgcagnggacaaacngcanaccccgcaaangacccacnccnnnncagacacaacagannggngcacaccaa

SEQ ID NO: 9382 - DNA, 496 bp, Oryza sativa
  unsure (1)..(496): unsure at all n locations
  Clone ID: uC-osflcyp140d05b1
cttttgatttccccctccctggccagccgggcgagggcaaaacaatggggacagggctcttggctctcgcgccatggctggtgctgatcctactgcagctcgccagcgcgtcccatgtagaccaccggagcctcgaggccgagcaggcaccgagctcggtgccgggctccattgtcagacccctgctcaggacaggataccacttccagcccccgatgaactggatcaacgatccgaacgggccactgtattacaagggatgggaccacctattctaccagtacaaccccaagggagctgtgtggggcaatatcgtgagagctcacttcggatcacaggacctcatcaactggatagcccttgagccggcaatcaagcccgacataccctccgaccagaacggntgaaggactggctttgccaccatacttaccgatggcacgccggcgatcctctacactgggatcgaccgccccaacatcaactaccaggtgca

SEQ ID NO: 9383 - DNA, 420 bp, Oryza sativa
  Clone ID: uC-osflcyp140d06b1
cccgtacgttataaaaaaaaagaaaagaaaaacagagcgcgcgtttcgcgcacagcacacaggacgtcggcgcggcggcggcgagcggcgagcggccgatggcggacggcggggagatggacgaggaggccatgcgggccttcttcccgatgtccttcggcaaggcgcccacgcgcgccggcgctgccgcctccgcgcacgcctccaccctccgcaagccgccccaaaaccctagcgccaagccctccacctcctccgctgccgccgccgccgccgcgggcggcgacgacgacgacgacgacgacgacgggcccatggtcgggccccctcggcccccgccccagcccgctggcggcggcgagggggaggaccacgaggagggcggcggggtgatgattgggccaccttggccgccgccgg

SEQ ID NO: 9384 - DNA, 451 bp, Oryza sativa
  unsure (1)..(451): unsure at all n locations
  Clone ID: uC-osflcyp140d07b1
ttcnatacctcccgcatctcatccctcctctcgcttagttcagatcttaatcgcaaatggcgaagattaagatcgggatcaatgggttcgggaggatcgggaggctcgtggccagggtggccctgcagagcgacgacgtcgagctcgtcgccgtcaacgaccccttcatcaccaccgactacatgacatacatgttcaagtatgacactgtgcacggccagtggaagcatcatgaggttaaggtgaaggactccaagacccttctcttcggtgagaaggaggtcaccgtgttcggctgcaggaaccctgaggagatcccatggggtgagactggcgctgagtttgttgtggagtccactggtgttttcactgacaaggacaaggccgctgctcacctgaagggtggtgctaagaaggtcgtcatctctgctcccagcaaggatgcccccca

SEQ ID NO: 9385 - DNA, 490 bp, Oryza sativa
  unsure (1)..(490): unsure at all n locations
  Clone ID: uC-osflcyp140e03b1
tgattattttggtccacaaaatagcaggcctccaagatgaagttcttacattacaaagttctcttgatgaagctaagtttgagaaagggaagttggaagggctgattcaatcattgtctgaagaatgtgaagaactaaaggcacaaaaggggatgttaacagacaaggtctcatgtatgcaggacactttgaatgctgccaatgaaggaaaacaaattgaaatctctgcacaaacaaagcttgtgatgctaggagatgaaccaccagttaaggaaacatcagatgtacttgaagctgagctaaaaagtgaactaagtattatcaggggagctaacagtgaataccaacaaaaaatatattctcttcaagaggaaaatgaggatctcacaaggagaaatcagcttatggagaaggagcttgacctgaagacaagccaaaacaaagatgaaaataccaataaacaggtgagcctncaagatgaagttcttat

SEQ ID NO: 9386 - DNA, 577 bp, Oryza sativa
  unsure (1)..(577): unsure at all n locations
  Clone ID: uC-osflcyp140e06b1
ngatttcaatgttaatgatcactggncgcagccacaattcaaggtgctggatcttgagtttgatgtccctcttagagagcttggattccatggtgttccatataaagcttcagctttcatcattccaacttcgacttgtttggttgaactaatagagacacccttcctggtggtgaccctgagtgagatagagattgttaatttggagagggtgggctttgggacaaagaactttgacatggctatcgtgttcaaggatttcaagaaggatgttcttcgcattgattccataccatcaacatcacttgatgcaataaaggagtggcttgacacgactgacctcaagtactatgagagcaggctgaaccttaactggcgtnctattctgaaaactatcatcgatgatcctcagaaattcattgatgacggtggctgggaattcttgaatatggaagcaagtgattcagacacagaggaaacagaggaatctgatcaaggctacgagccttctgatgctgagcctgagtctgaatcagaagatgaagattctgacagcgagttcttggtggaatcagat

SEQ ID NO: 9387 - DNA, 501 bp, Oryza sativa
  Clone ID: uC-osflcyp140f02b1
cgcttacatatatacacaggagtgagggagaagaagataagggaagagagagcgagagagagagatagaggggggtagcaaagcaacttagctagctttgctagccatggcgaggagctctccttgcctcgccgtcgctgtgctcctccttggagtggtggtggcggcgattggagcctttgctgatgaagaagcgtcgagcggttggggactagggcatggcgcccgtttcctcagcaggcgaggccgtgctgcgtatgagaagtcgtcggagccagaggcaaagcctgcgtcgcagcaggagccgaagtcggattcttactcgcaggcaaagcctgggccaaaagatgagcccaagccggagccagaggcaatgtctgcgtcgcagccggagtcgaaagccgcaacttactcggagtctaagcccgaatcaaaggcagagccttgatcaaaaccagagcccaaggcagagtccacgccacaaccagaacaaagtcagag

SEQ ID NO: 9388 - DNA, 540 bp, Oryza sativa
  unsure (1)..(540): unsure at all n locations
  Clone ID: uC-osflcyp140f06b1
ctttttggtagcgatgttgntctccatgctgatgctattcacagaggtggtggccaggtcattctcacggccaggagggtcatctatgcttctcagctcacagcaaagcccaggcttcttgagcccgtctacctggtggagatccaggcccctgagaatgcccttggtggtatctatggtgttctgaaccagaagagaggacatgtgttcgaggagatgcacaggcctggtacccctctgtacaacatcaaggcttacctccctgtcatcgagtcctttgggttctcaagccagcttagggctgcgacatctggccaggccttcccccagtgtgtgttcgaccattgggacatgatgacctctgatcctcttgaagctggctcgcaggcttcaaccctggtgcaggatatccgcaagaggaagggtctcaaggagcagatgactcccctctccgatttcgaggacaagctctaaatttttggccgccgcatgtgttgtgcccgtacccttacatnngtctagtggtctactgctaagaga

SEQ ID NO: 9389 - DNA, 450 bp, Oryza sativa
  Clone ID: uC-osflcyp140f08b1
attatttagagtcgccttctccccttcttctcctcctcctcctcgattcggagctccacccgcagccatggctaagaactaccccgtcgtgagcgccgagtaccaggaggccgtcgagaaggccaggcagaagctgcgcgccctcatcgccgagaagagctgcgcccctctcatgctccgcctcgcgtggcactcggcggggacgttcgacgtgtcgtcgaagaccgggggcccgttcgggacgatgaagaccccggcggagctgtcgcacgccgccaacgcggggctggacatcgcggtgcggatgctcgagcccatcaaggaggagatacccaccatcttctacgccgatttctaccagcttgccggagttggggccgtcgaggtgtccggtggacctgcgcgcccctttcacccaagaagggaggacaaacctgcaccccacctgag

SEQ ID NO: 9390 - DNA, 437 bp, Oryza sativa
  unsure (1)..(437): unsure at all n locations
  Clone ID: uC-osflcyp140g03b1
gcatacattatgtagctagcttactctaattaaccttggttgtaatccatggcgagctgcagcaagtggctggccgggctgatgctgctggcggcggcgctggcgtgctcgctgccggcggcgagccgggcgcagctgcaggtggggttctacaacacgagctgccccaccgccgaggcgctggtccggcaggccgtcgtggccgccgtcgccaacaactccggcctcgccgccggcctcatccgcctccatttccacgactgcttcgtcagggggtgtgatgcatcagtgctgatcttctcgccgaacggcacggcggagcgcgacgcggcgccgaacaaccccagcctccggggtttcgaggtgatcgacgccgccaaggccgccgtcgaggcggcgtgcccgcgcaccgtctnctgcgccgacatcctcgcctt

SEQ ID NO: 9391 - DNA, 461 bp, Oryza sativa
  unsure (1)..(461): unsure at all n locations
  Clone ID: uC-osflcyp140g07b1
tgngttagtgcccatccgcccactccactccactccactcccctctcccgcacttccatccccaaccccgcccccgccgcggcgccaccttccccctctcctcttctctctctctctctctcatatgggctgccgcggcgcgccccgctactgtccatcctagcgcggagccgcagcttccccacacgtccatggccgccgccgccgccgccccccggttcttgcccgtccgcccgctctttctcctcctcctcctcctcgtcctggccggcgtcgcaagcggcaagacggtcaagagggacgtgaaagcattgaatgagatcaaatcttcgttaggatggagagttgtctactcatgggttggtgatgacccttgcgggcatggtgatctgcccccctggtctggtgtgacctggtctcagcaaggagattacagagttgtcaccgaacttngagtctat

SEQ ID NO: 9392 - DNA, 230 bp, Oryza sativa
  Clone ID: uC-osflcyp140g12b1
caaaaggcgacaggaggtgttactatacggaagatgatgttcatggcaacggactccgaatccaccggctccttctccgcccgcccgtccgccgcgagcgcggtccggccgagcgccgccgcggggagggcgagggcgcgggcggcggcgggggagagcggtaagtggtgggcgccgatgctggggtggacggggaaggccgactacatcgaggccccggcgccggcggt

SEQ ID NO: 9393 - DNA, 300 bp, Oryza sativa
  Clone ID: uC-osflcyp140h02b1
gttttaggtactatgacgggaagctgaactgctacaagctcaacactgattaaaaccccgacatagcgacccaacttgggataagaaggatttccacaatgatgagattcaagaacggtgagaagaaagatgcggagattggagctgtgcccgagagcacactggctagcactatcgacaaatacatcggcaggtaaaacgacagggtgaatatccaataggcaggagggctataaccttcacgcccagagggatatattgtcatctatgaactccataccttgacgagaataggcacga

SEQ ID NO: 9394 - DNA, 396 bp, Oryza sativa
  unsure (1)..(396): unsure at all n locations
  Clone ID: uC-osflcyp140h03b1
ngattatattatgcaccgnncagaagcatatactncagggaggttccaagcggctacctttcactgtgccatccttagtattctctgctctcaagttggtccgaagattacaaggtcaagatggtgatgtaataggggaggaagttcctgcaacgcctaagaaaatatttcagatcttgcatcagaccattgaagctctctcatgtgttccttctcctgaactggctctcagattatatctgcagtgtgcagaggcggccaatgattgtgatctggaaccggttgcttatgagttctttactcaagcattcatcttatatgaagaagaaattgcggattcaaaggctcaaatcactgcaattcatcttataattggaacccttcacggatgaatta

SEQ ID NO: 9395 - DNA, 465 bp, Oryza sativa
  Clone ID: uC-osflcyp140h08b1
tatacttgcgcgactacctccgcctccactgctacccgctttaccgctacctccctgattggccatccaaccccccttccttcagggagatcataagcacatactgcaaagaagttcgggagctcggattcagactgtacggagcgatatccgagagcctgggcttggaacaggactacatcaagaaggttcttggtgagcaggagcagcatatggcggtgaacttctaccccaagtgcccggagccagagctgacgttcggactgccggcgcacaccgacccgaacgccctcaccatcctcctcatggaccagcaggtggccggcctgcaagttctcaaggaaggcaggtggatcgccgtgaatccacagcccaacgcgctggtgatcaacattggtgatcagctacaggcgctaagcaacggaagatacaagagcgtgtggcaccgtgctgtcgtcaactctg

SEQ ID NO: 9396 - DNA, 557 bp, Oryza sativa
  Clone ID: uC-osflcyp140h11b1
ttccgtggtgtgctgcggcgtcgggaggaacaacgggcaggtgacgtgcctgccgtacgaggcgccgtgcagcaacagggaccagcacatcttctgggacgcgttccacccgtcggaggcggccaacatcatcgtcggccggcgatcctaccgcgccgagtcgcccaacgacgcctacccgatggacatcgccacgctcgcctccgtctgagatcgatcggatcggtagctgctcgcggctcagtatatacatacatacatacgcacgcagcctcaagattcccagcgcccacaagctaaagggtgtaactctctctttttttcccctttttttgaggtggttatattacttcggtttgtaccgggtaggcaataattgttgtcataaggattggtgtcttcctagtcgttttcaacctactgcgtgcctggaatcttgatgggtgagagaggagagaacaggcattcggttcttcggtttatagatgtgttcagtgctggagagagcacagataaatatgttcagacaagacatattttagattcggagatttttc

SEQ ID NO: 9397 - DNA, 352 bp, Oryza sativa
  Clone ID: uC-osflcyp149a02a1
ggattaattaactagcatatttaaatttaaaacgtaactgtttgagcaaataccacgaaatgttcaggcgctaagatacggcaataccgatacatccagcatagcaaaaatggcgaagagcacagagtcagataaagctatagagaactagggctccaggagatgggggccgaatgacaaccatggcgcttagtcgacctcctccatcttgctctcgccggcgtcgtcctccagcggcggcatgtcggcgtcagccttagcagactcgtcctcgtcgatgctcaggccgagcttgagcatccggtggatcctggtgccgaaggtgttggggtcctcaaggctgaagccggag

SEQ ID NO: 9398 - DNA, 290 bp, Oryza sativa
  unsure (1)..(290): unsure at all n locations
  Clone ID: uC-osflcyp149a03a1
tttgtttcgcccttttttttttttttttacataatagcctgtgtgaatgcacgtgttggcaaatattgcaaacaaaactcatggaaggactacccaggaaaactgagatgtgtccttgtaacaacccaaaccactgccaataaatcaaacgaaaatatacactttctgtaagtatatgacannccacacaacttgaacaaagagaaccctttgacaagattgaacctgcaacaattgaagaattgaaaaaatataaaaacgttacctggcactgtggacttttcaacgaa

SEQ ID NO: 9399 - DNA, 321 bp, Oryza sativa
  unsure (1)..(321): unsure at all n locations
  Clone ID: uC-osflcyp149a05a1
gagcacacgaaaagattttcttttcctctgaacaaagacatgacacaataaatttcgccaagtagcttgcctcattacacaaattcagaccaaaatatccaccgcaaatccaaggagcttcttattaataataaatagtnaaaaataaaacgccaaaaagtttctcacaccggagagcaacctaactttagcacacccaaannagaccagaccactgaaccacacccccaagcccccttccttctttcccttggtctaaaaaccgaaagcagccaacttaaatttaaattcgaacctcaaaatttccgagggccccccaat

SEQ ID NO: 9400 - DNA, 210 bp, Oryza sativa
  Clone ID: uC-osflcyp149a06a1
gtccttttttttttttttttttttttttaaaagtggacaagcaagaagtatatatattcatccatttctcaaactactacaagaggtcgagaggaacacataatcaggagggattgcgacaatttacagcaacaggagtctggagatcgaggcaagaacaagacaggcagtcagcagagctaccctccttcatttgccacctgaattttt

SEQ ID NO: 9401 - DNA, 90 bp, Oryza sativa
  Clone ID: uC-osflcyp149a07a1
tttttttctttttttttttttttttttttttttttttttttttttttttttttttttttttttttttttttttttttttttttttatttt

SEQ ID NO: 9402 - DNA, 153 bp, Oryza sativa
  Clone ID: uC-osflcyp149a10a1
aaggcaaagctgcgagcgccagatcatcttattactacagcttcttggcgatatgctacaggagcttcttcctcccttgcaaaaagaaacccaaaccttatttacaacgcaacacacacacccgtggcacagaagcgcctcgatcgaatcgaa

SEQ ID NO: 9403 - DNA, 113 bp, Oryza sativa
  Clone ID: uC-osflcyp149b01a1
tttttttttttttttttttttttttttttttttttttttttttttttttttttttttttttttttttttttgtttttttttttttttttccaaaaataaaataagggaagatt

SEQ ID NO: 9404 - DNA, 130 bp, Oryza sativa
  Clone ID: uC-osflcyp149b02a1
gtgaaaaggaagggaaaatttaaaacctaaatagaaaaaggcgatttgatggggtatcacaacaagcaatagtggcattaatagcgccagaacattagattaagaacacacatgttgcaggcgtccattt

SEQ ID NO: 9405 - DNA, 377 bp, Oryza sativa
  Clone ID: uC-osflcyp149b03a1
gggggcataactttcttagtagcaaagaaattgacataaaattgttcagcaggcttctggcccacaaaacaggataaaacagagggttgttctcttgtaaacgaagaatttattttcagagaccattatcaaatgtaaccagacattgagggatgccctttcagccaggcaaaaccaaccgtgcattcttttcgaatccacaaaggccagtttagaatattcagaggggtttgccctcaagaaacattttccattttgctttcggccctagtttttgaatcgacaatattcaacacacccttttgccccaaaattgaataacctagccccttcccatgatggctggtagtcaattctttctgtgtcaatcaaggata

SEQ ID NO: 9406 - DNA, 137 bp, Oryza sativa
  unsure (1)..(137): unsure at all n locations
  Clone ID: uC-osflcyp149b04a1
tttnttttttttgttttgtttatttttatttttttgtttgttttttatttttgttgtttttatttttattttgttntattttttatttatttgttttctattatttcttgtttatgttatttatttatatgtctttt

SEQ ID NO: 9407 - DNA, 116 bp, Oryza sativa
  Clone ID: uC-osflcyp149b06a1
aagaaaaaaactcagcatagtactttccctcgacagaagcaaaatctgatgacaagggatggtttttaccaacacaattttaagttaacaatttagggggggcacttttaaacata

SEQ ID NO: 9408 - DNA, 415 bp, Oryza sativa
  unsure (1)..(415): unsure at all n locations
  Clone ID: uC-osflcyp149b07a1
atgagaaatgctaaaatgacttatattgtgaaacggagaaagtacattttatttttattacacgatataattcaaaatatctactgtgtatatgattttccatgcatctgattaaagatatggngatgtgttcggaaaggccacacttggttgtttttattcttgccgcctttgcggcacttgttgccgtttgtgctgnccgccaaagtcgccagaacccgcaggttcttgttcctcttatttagaacaccgttttggcttttggcctttcacttttgcaagcctggccaaccgttggaccgttgtgtttgcccccgatttttttttttttaagaanaaaaaaacaagggttaaccgtcaaatgttcaaaagaatctcaattttcagttcctttggctgcaaagcgccgccacca

SEQ ID NO: 9409 - DNA, 361 bp, Oryza sativa
  Clone ID: uC-osflcyp149b08a1
gatgaaaaccacttcgagacaatttactcaggtagcaaatatttctcagccacaaatccaaacacttggtccttcctatcagaagatcagaatgaacaggttttcaaattcatctcccaactcgacgataatttacacgtacatttaacacattcttccacccttctcaaactcctcccttcttcttcccgggtaagattaaaattaacttgaggccagccagcgtcgccggcggcgagatgtttacaggctgggcgtcctctcggcggcgccggagatgacggtgagcaggttgttgccgaaggggtcgctgaggtgcttggagaggttctcgacggggccctcgccggtgacgtaggcc

SEQ ID NO: 9410 - DNA, 363 bp, Oryza sativa
  Clone ID: uC-osflcyp149b09a1
aacgcaacatattgattaattaaaaaatcgatggaacatccaaacaatgattgaatccatgttactacaaagatttcatacatgatgtatttacaagagattcacatcaaaacttgaggcctagccaaatctggacatgtatcctggcataaaacaatgatgctgaatctttaagttttttatcagagagcatttgggagtcactagcagcaatattgtccatttccaacatcaagaaaaaaacggagggaaagctaagcaaactagaggacatactgatagcttcatagctaacgaacttaaatcgcctcaggcactgtggaagcatcatcggcgacagaataacacacattcctagagata

SEQ ID NO: 9411 - DNA, 388 bp, Oryza sativa
  Clone ID: uC-osflcyp149b10a1
gggaaacaccagacaagatatttttaaaattgggccaaactcgggaagcaacagtaagctttacattacacaggctacatgaaaagacagcattgggaataacttaaacgtgccgcacattttacaaattccaagaatatgtatgcatttacaggtaaactgatggtctggatggacaactccacaattttgtggaagggagaatttgcgaaataccaggtggtaccacccattagccagaaaaacagaggaatcacccccttgggctggttcagttccttttgtagttttttgggggcaaaaagatttaattgccgttaccgtagttaggttccccaaagccaaagttccctgggcttggtagttggcattctattggcattgacaa

SEQ ID NO: 9412 - DNA, 80 bp, Oryza sativa
  Clone ID: uC-osflcyp149b11a1
agggaaacgggggggacacagagtcaaaaaaggggccagggggggaaccaccctaaaaaggcaaacaaaatttcattaaa

SEQ ID NO: 9413 - DNA, 80 bp, Oryza sativa
  Clone ID: uC-osflcyp149c02a1
gggaagggtcacccatcatgcattcaggagtacccattggttggtgggtcctgaatttttgctaggataatgcaatataa

SEQ ID NO: 9414 - DNA, 56 bp, Oryza sativa
  Clone ID: uC-osflcyp149c06a1
ggaaaccgaatatattatttcgatattcagtcgtaatcacagtatacagattagaa

SEQ ID NO: 9415 - DNA, 359 bp, Oryza sativa
  Clone ID: uC-osflcyp149c08a1
agcgctctcaaagtagcatatattattcaatcttgatgaaagagggacacaagccatcatctatagtgatggtgcctcttacaaacttcaacacacgggtaacaagcatacactcaagagtcaagaggtggctaggttttgtgtgtacaatggaacacgcaggcatgtacacaaccaagtatactccaccccaaactatagtctttgcaatggttttggcagttgctcagaaaccatgaatcttgatgtgttccttcttcacaatgccggcctgaacaagaaaatttgatacgttcttcctctgatcaccctgaagttgaatgacctggccaagctctgggtcctggacaacagtacca

SEQ ID NO: 9416 - DNA, 372 bp, Oryza sativa
  Clone ID: uC-osflcyp149c10a1
atagcaaactatctcatattcatttttataactttatggtatttaaattgttcatctatatgctcgaataattattacaaatcatctcactattcaaccattccggtgaaaaagctagtactactatgcattatttcattgcatctatatgtgctcttctatttacatttcatgacaagtcatatactactacaaagcatttcattcttcccaattctgcatgaacaaaataccatgcaattaattaataactaatcacccaaattaacacttgacaccaaccaacccaaccaatctagcatcatcaccatcatcatctttgcaattcaatttgcaaagaagaaaaatgaagttaatgtggtgaaggcaatg

SEQ ID NO: 9417 - DNA, 191 bp, Oryza sativa
  Clone ID: uC-osflcyp149c11a1
ggaagtaaaatatgtaatcgttcgaccagaccagaaagaaagtgccatcacaaattacagagataaataatagcacatcagggatcaacacttccaagtgagccaggtttgaagtaacaagaagtcctgcttgattactaattacgaaggaaatttcaagggttttgccaaagcatttatttttggaaggg

SEQ ID NO: 9418 - DNA, 396 bp, Oryza sativa
  unsure (1)..(396): unsure at all n locations
  Clone ID: uC-osflcyp149c12a1
agatgaatagatagacccaccagaagttcagagaaccaactgaacacatggcaaagcctgaagattcagttattaatcgtatacggatacagagcagttgttgcaacagggagaaattaggtcggagtgacaaaatggngagagaaaaaaaacagagagggaagaggcctagntgagcgttcttccttccttcgcagttgccttgggtggtacttggcccgggttccaggcaggggcgttccagcttcccgacggggctgtcttcggcttccacctttgattcaatccaccccgtccttcgtacgggctttgagtttaatcagggcccgggtgtcttcaaaagagctttgttcgttaacctcgacgaacctcaccggagatggggggagtttgatg

SEQ ID NO: 9419 - DNA, 110 bp, Oryza sativa
  Clone ID: uC-osflcyp149d01a1
aaaaaccagaaattttatcccgaaaacccaggggacccaacattttgggcgccctgggcctactatcacaacttttaaggaaattctgaaaagaacaggggaaccacaaa

SEQ ID NO: 9420 - DNA, 437 bp, Oryza sativa
  Clone ID: uC-osflcyp149d02a1
tgtttcgccatgttctggatctgcgaccggagcggcgacacgcgcggcgcctggcgggtggagttccgcaccgacgacaccttccccttgttgatgacgtacaccgtgcagaagtccggcgcgcccttggagatggtggtcgggatgtcggccttgaacctgaacccgcccctcgccgttggcgccgacgacgaggcttctcgatggggcggcgaccgccgccagaacctcggttgattgggaccttggcccacgttcgttggttcgttcgagccatgcaacgttccttgcaccttggatgtcctttgccgcggtgccagaagccagcgtgaaaggtgccggttagagatccccttcattgtgcggggtccgttcggcctgctttggaagccggaggcgttccttcaattcccacctgccaccattatcgacaggat

SEQ ID NO: 9421 - DNA, 427 bp, Oryza sativa
  unsure (1)..(427): unsure at all n locations
  Clone ID: uC-osflcyp149d03a1
agtacccatttcctacctgacaccaggatttattcagaatgtattactgcttgttccgaagcaagaaacagaagggtaggatgcacatgatttataactacaactgttctacatgacaatttctgaggagatgcaacttcgctacaattgcaccnnaagttcagaaaccatgcnnatatgtgatatggaatgttcttactgagggaacttacccaaccaaaaggggtaggataaccaaacagatgtaaaccttgagaaacggaatcttacctgggcctctctctttgatttggtgacccttagtattcagttcaagcctggtcattcattgcccttgtcacctatcccctttgccgttggtgccctgttcatcaaccgccttctcgtttgccctgacgaattgcccgaatcaaaactgccggatcag

SEQ ID NO: 9422 - DNA, 391 bp, Oryza sativa
  Clone ID: uC-osflcyp149d04a1
accacaactccacatgcatatatgcatgacacagcaaaatatatgttacacaaatattattatacatcaattaaatgcacaatccaaggctccatgcatgcctccacatctccatgacacaaggtcagagctcatgtatatatgcttaccatatgtccactatattatattttatgatgctatataagcattagcccagggtgattaaaacctattaactttatttaaattattgccagggttaataatgtaaatttttgaataggctttaatttaaattaattccattgcattgcattgcaagagattcaagattgccagtagggtgaattatttaatttaatttagttgatcattaccataattgagggtgaatttatggatgggccac

SEQ ID NO: 9423 - DNA, 55 bp, Oryza sativa
  Clone ID: uC-osflcyp149d06a1
tttttttttttttttttttttttttttttattatttatttttttttttatttaat

SEQ ID NO: 9424 - DNA, 51 bp, Oryza sativa
  Clone ID: uC-osflcyp149d07a1
ccccggggggaaaaataattaaaacggttcccctgaaaaacaaaaaaacaa

SEQ ID NO: 9425 - DNA, 95 bp, Oryza sativa
  Clone ID: uC-osflcyp149d08a1
aaaggaaacccaactcattttttattgatatatgggggatgaatccaaaaaaaccgatacaagtcacgaaaaatcaaactagaatgaaatccttc

SEQ ID NO: 9426 - DNA, 156 bp, Oryza sativa
  Clone ID: uC-osflcyp149d09a1
aaaaataatataaaaaaatatttaaaaaattaaaaaaatataaaaaaataagaaataaacaaagataaataactcttataaaaaaaaaaaaactatactaaataagaaaaaaaataattttaataaaaaaaaaacaataaaaaaaaaaaaataaat

SEQ ID NO: 9427 - DNA, 70 bp, Oryza sativa
  Clone ID: uC-osflcyp149d10a1
acggaaaaccatccattttttttatgggcgacgaatttataagatatgctctaaaaacaaattctggggg

SEQ ID NO: 9428 - DNA, 334 bp, Oryza sativa
  Clone ID: uC-osflcyp149d11a1
agggaaaagggttaattaacaaaggggtcccgcagaaaataacaataaaaagataggatggaaataaagccggtggtccaatttaccatacccagcattttggttaccggaataccaaaaaactatctaccggtggacagggatttaattttttaaaaaaggcccagggttcagaattatgtgggaaaaaaggtttttggaacccgaaagattgggcccctttggatagccaaaccacacttaaaaccctaaaaatgcatacgggggggggccaatcggatttttagcccccaccagagggagatcaatacttggagtccttgaccggaaggct

SEQ ID NO: 9429 - DNA, 168 bp, Oryza sativa
  Clone ID: uC-osflcyp149e02a1
attagggggaatggatcagctgcctatattatacacataattatttgtcccaatttatacaaatttacatgatatgttaataggatagggtgcacagaacctgagaaaggcgtttaacaattcaatcacttggtccctgaaggttttccaagacatgccccaacaaaa

SEQ ID NO: 9430 - DNA, 154 bp, Oryza sativa
  Clone ID: uC-osflcyp149e03a1
aaaggagcataactactatttctccataataacaatgatggggttccttatccaccaagatagtcaatagccagggtaaatacaccacagtaccaaactataccaaatcttgcgaacctaccacaacttacacactaggcatttaggcagcgac

SEQ ID NO: 9431 - DNA, 143 bp, Oryza sativa
  Clone ID: uC-osflcyp149e04a1
caggcaaatgcatgcacagttttacagaagcaaagcaacgggttcccaaaggtccacacttacagtacgttcaacgtacaactgatccaagcaaatgaaacaggttctgatgattgcatctgatgcgaagaaactaaaacggt

SEQ ID NO: 9432 - DNA, 133 bp, Oryza sativa
  Clone ID: uC-osflcyp149e05a1
agggatgcctccagtttgtccgcccgtccttttttttttttttttggtttttgaattgatcatgggtttttttttttgttcttgcttttttttatgtgttcatgtaagtggtagaacaatcacacattgttta

SEQ ID NO: 9433 - DNA, 424 bp, Oryza sativa
  Clone ID: uC-osflcyp149e06a1
tttgtttcgcccttttttttttttttttcaattcaatctacagcggcggcaattctccttggattcagattattgttgttcttacattacagcttgaaaatgagggtaagggggaagacatgccagtgcattattgtgacggacggattgcaaatacaacactttctgtcaagttcctgaaagtacacttacaatgaactggggcaacgccattgtgcgggcctaaaatctagaatcacacccgcagcgcttggcctgtccacgggcgaatccacatccttaaagtgtccggccacaaccataactttccaacagaagtgcctgggttggcctgcaattgtttcatcaggcccatccgttttccttctgcgaaggcccgcaacttgctgctggtgaaaccatcaagcaacaagcttattgacag

SEQ ID NO: 9434 - DNA, 354 bp, Oryza sativa
  Clone ID: uC-osflcyp149e07a1
catgtaaatttgatttattccaacctgatttggtctacaagatgacagtcaccaccagttcaccacggcagctaatcccgtgcgtaagactgaaatctggtgaagattcaccggttctgggtgaatgcatgatcgctgttttgaattatttttttgcaccgctaagaaaccagcgtttattaactggttcttctgaagtagaggtttttctggacaagaccgaggggatttatttactcctgttacattcccaccaaagaaacacccattcacccattcattcattcattcgccttgccagccatttattcatccgttcatccgttcgttcttcgtggcagtttgcaaagaatg

SEQ ID NO: 9435 - DNA, 396 bp, Oryza sativa
  unsure (1)..(396): unsure at all n locations
  Clone ID: uC-osflcyp149e10a1
acgtattgaattgatcatggaaaagcatgaaagtacttgggttggagaaataattatttaagtggtccaccggtacacatgtttactcatctttcgatcccgcgatcctaacattttatttcttattacacatttatancttactccgccctaagaatagagttaacatccgaatangaaaggatcacttttttagtaccttaaactctttttgaccgtcactttaagctttccaagcattggtacgttaccgttgnncacgtatgcaattgtacgttacgcaccaaaacgtttttatttcatttatttatttactctgttcattatttcaagtcgatcaccgatgaggccgagccagcgtgtgcatgcaactcaacagtagaggttgccccccgg

SEQ ID NO: 9436 - DNA, 204 bp, Oryza sativa
  unsure (1)..(204): unsure at all n locations
  Clone ID: uC-osflcyp149e11a1
cagcatgaaccacacaagtacactgaccgagcaccatgtgtccatgtatatatagaacaatcaaatattgacaatccatagtagttacaaccaatatacatntcggatgcccatatattttggaaaagggcccttgtaggtagaaaattgattatgaacagtacttggnncagccagctaattttaggagaacccccaaaggca

SEQ ID NO: 9437 - DNA, 181 bp, Oryza sativa
  Clone ID: uC-osflcyp149e12a1
gcagaaagagctgtgattaataagtgaagcatatggcatgacccaactccccctggaaattggatgctaaagcctttacacttttacagttaccacccatgcatttccattttccaccatcatgcacgttcatccatttctacgtggcctcgttttcctaattcattctgaaaccaattcg

SEQ ID NO: 9438 - DNA, 107 bp, Oryza sativa
  Clone ID: uC-osflcyp149f01a1
aagcctattaccggcaatgtaatcgaggggacctttaaaaaactggagtcataggagagacatcaaaaaccaatcatttcaataacataaatttaccagggagcaaa

SEQ ID NO: 9439 - DNA, 196 bp, Oryza sativa
  Clone ID: uC-osflcyp149f02a1
atagattaattcacaacaccatatttcattgatcaggttcagaacctgcacagaaatacacactaccggtacagatctcaccttctctccaatactcgtacatccatccacgctggtccacacgaatacgtacattctataccggtacactgttacgtacattctactgcgaccgctgtaacaccacacgcaacac

SEQ ID NO: 9440 - DNA, 246 bp, Oryza sativa
  Clone ID: uC-osflcyp149f04a1
caatcttgtattgatttggccctaaatgacatatatgtacacaagagaggggaacacaagagaggggaaagtactctaatacccttgacatactactacacttaacacccccactcaaattgcaatgtgttatgcaattaacatttgcatttttgaaggtgtaatactataacaccttaggaccacaaaactaaaatatttagccctaatctcccaaaagtctttaaatgattgttcgttcaaaag

SEQ ID NO: 9441 - DNA, 60 bp, Oryza sativa
  Clone ID: uC-osflcyp149f07a1
cttctaaattttaaaaggagaaaaaaaggaaaaagaaagaaaaaaaaaaaaaaagttaaa

SEQ ID NO: 9442 - DNA, 197 bp, Oryza sativa
  Clone ID: uC-osflcyp149f08a1
agggaatgacaatgtttcagacaacaaggtttacatacagcaagagctgacaaatcttttctgacaattagcctctttgcccgccacaaacactacagttgcatatcagcctatcagctattgcatcgcccagtacaacgacaaccaatccatgtgcaacttacaactttagcgagtaaaattacattgacaacaaa

SEQ ID NO: 9443 - DNA, 112 bp, Oryza sativa
  Clone ID: uC-osflcyp149f09a1
aattccgatagatagcaacaagcagtttcaaacaccataaccaaagcgaactcaattcatggtaacactcacggaccgaagaaacaccctaacacttggattggcatggtat

SEQ ID NO: 9444 - DNA, 74 bp, Oryza sativa
  Clone ID: uC-osflcyp149f10a1
cgaacaccgggggcccgacccgcgaaaacaccggaaccggaaacccgagaggggaacaaaccttcgcccaaaaa

SEQ ID NO: 9445 - DNA, 394 bp, Oryza sativa
  unsure (1)..(394): unsure at all n locations
  Clone ID: uC-osflcyp149f11a1
gagaaaagaagatagatggttacacttgctgagcaacttaaatcctcagccccctgaacgaagcagcagatttcccaagcaagcaaatgaaatgcaaccatgcgctggcttggaatagctcgatcagtacccaaccccaactcaatgaactgngacccagctccgatcaaggggcgtgaagctccatcttcgaacctcaatcaaatcgccaacccattcattgaaatggcgaccccaaatgatcaatcacccnnttcttgccgttccttccgttcgcctctgcttgaagttgctttgcatggggcttcacctcgaacttccacatgngacaagtctgcatcgacttgaggtgcaggcctctggaagccgatcagctggctcgccggcctgccgc

SEQ ID NO: 9446 - DNA, 152 bp, Oryza sativa
  Clone ID: uC-osflcyp149g02a1
accatcaggtgagaaaatacactcaatttgggcgagatacaacacaagtgtgggaaaactgccaatcaattacctccacttaagagggggatgcaatacattttgggcatgtggaacatacttgtgtttaaaaaacaagggatatccctata

SEQ ID NO: 9447 - DNA, 89 bp, Oryza sativa
  Clone ID: uC-osflcyp149g03a1
aaccggagatcatagcatttcgctaaatatcaatacaaagacaaatatagtagtagggacgcgttatagtacaggaggatatcgccatt

SEQ ID NO: 9448 - DNA, 131 bp, Oryza sativa
  Clone ID: uC-osflcyp149g04a1
atatagggggatataaaaaaatttgaggggaaataacaaaaaaaaaaatataaataatttaaataaaaaaaaaaaaaacaaaaaaaaaacaaaaacaaaaaaaaacagaaaaaaaaaacaaaaacaaaaac

SEQ ID NO: 9449 - DNA, 69 bp, Oryza sativa
  Clone ID: uC-osflcyp149g05a1
ttaaattaggggggaaaaaaaagataaggggggaaaaaaaaaaaaacacaaaaacaaaacaacaacaac

SEQ ID NO: 9450 - DNA, 183 bp, Oryza sativa
  Clone ID: uC-osflcyp149g06a1
tttttcgcggtggaggtggtgacagtggaggtgccggaggtgcccgtgcgcgagctgaacgagatcaccaactccttctcgaacgagaacctcatcgggcagggctcctacgcgaaggtgtacagggttcctcatgccgcggcgacgagggccctgcctgtcgtcaaagaagcttcgagtaag

SEQ ID NO: 9451 - DNA, 118 bp, Oryza sativa
  Clone ID: uC-osflcyp149g07a1
gaagaaaaatatgttcagatttagcacaaactgtatgtgtcaacattttgtttgattgatacaagcacactagagctaggggcgcgccgttgtcgcgccgcctggactcaagcagggg

SEQ ID NO: 9452 - DNA, 144 bp, Oryza sativa
  Clone ID: uC-osflcyp149g08a1
gttaagaaccgacatacacgagagcatttcgacgttcacaaggcattccagtttcatggcagcaaaataaccagcttatttactactactacacaagaaacctatctatattccatggtacatacaggactgcgacaatttggc

SEQ ID NO: 9453 - DNA, 428 bp, Oryza sativa
  Clone ID: uC-osflcyp149h01a1
gaggaatatttatatttcttctatagtttaatcttcagcaaaatacaagatgttacattcactagtgtagtgtagttgctaagcttcctaggggaaacatgtattgccaagcatattcagcttgtactactaaatgacagcttgcctctttaggttccacttgtccacctttgcatcttttccctgtggccctcattcccaataatgaccctcgtcaaatttgaggttcctttgtaagaattaatttttttcgatccttccaaaaacccggtgctttgggcgaattcacttattcgaagcttccaatcctttctatttccatttcaagtgggatccttaaaccaaatagcatttcttttcatcccccattccttcttcaaaagcatttttatcgcttgaacctcttaaaattgaaaggcctgttcaac

SEQ ID NO: 9454 - DNA, 127 bp, Oryza sativa
  Clone ID: uC-osflcyp149h02a1
aatcgggaattactacaacctaaggtgattagttgctgcctgctgtaggaacatacatatcaatataaaataaggaaaggcatcttctttccaaacagaaaagattacattagagggttctctagac

SEQ ID NO: 9455 - DNA, 413 bp, Oryza sativa
  Clone ID: uC-osflcyp149h03a1
agactcaaaaacattcatttctcatcagaaagcaaatatgcagctggcaagtaatcccaacaaactattcagaatatctgccattgacacaggctaggatgttcacgatccacaactagatagctgcttacttgttgtctaaataaacgggcagccaaaataaggggataaatcttttactttcggcagcgagtcgaccttcctgtcccggcccatgggccctcattcttcctgcagggccttatcaagccttcggtacccgatggtccctccttggcattaagtcacccatgcaccctcccatgagccttccccaggttcaaaattttcgggggccttttagaattcttcacttttgcggacaaacacatttctgaagggggaaaatactggatgtcgccttcttaatttcc

SEQ ID NO: 9456 - DNA, 98 bp, Oryza sativa
  Clone ID: uC-osflcyp149h06a1
ttttttttttttttttttttttttttttttttttttttttttttttttttttttttttttttttttttttttttttttttttttatttttttttttat

SEQ ID NO: 9457 - DNA, 215 bp, Oryza sativa
  Clone ID: uC-osflcyp149h08a1
gggtaaaatatgtactgggtattatatggtatgaaacggtcattacaacgcaacgacacttttaggtagcatctaagatcccactaagacggttttaacaattttatgaaaaaacattcttgttacaggtgcatatgcttacatgacttttagccagtacagcatttcaccgacaataaccatttttcttctataagcctccaggttcttttaaa

SEQ ID NO: 9458 - DNA, 195 bp, Oryza sativa
  Clone ID: uC-osflcyp149h09a1
acactagtgagtgatgtttttattggatgttcaactctggataaaacgtcttagttgaacacaatgtgttggcagatgcgcattgtatttgagttctatgatctaagatacataggtcgcttttgtaattacattccatggtggtgataattttctgaatttcttgcctttttggattgcatttcagatgggtgg

SEQ ID NO: 9459 - DNA, 402 bp, Oryza sativa
  unsure (1)..(402): unsure at all n locations
  Clone ID: uC-osflcyp149h10a1
ggaaggaaaccgacatcacatacacatcagaagagatgcacattcatcaacatgattgttcacgcagataatatggcattattgcctacagacttgtgctttgttcttgccagtttcgtcaaattcatctagtctatggaaaggtcactgttagccaccagataangtaactatttacccaaacattcagttggntgttcaaaaatcttgttctaaggtttacccccacaatcnnatacgttggttctacccacaaaatactattattatatatannnaatcattannaaattgttttggatttcaatctgttgtattaatcccccgtcgttggatcaaacccaatttttgcaaagnngagggtcaaagcctttgagctgcttccactgactcgtccaactt

SEQ ID NO: 9460 - DNA, 529 bp, Oryza sativa
  Clone ID: uC-osflcyp109g03a1
tgcgggcgccctgtcctttttttttttttttttttttggaataaaacccactgctgaatttcataccgctatcatctatattcttgttttctgatctccaacataggatcatccaggggaaatttagtacacaataatcgccagctaattatcataaaaactacccctttccagctgagtgaatcttgttcttgtaccatcacgtacatgtcttgctgacttgtagaaccctatagctccaatagccaaccttcatttttccatttccgatgtcttcccgacgtcctactcaagaggccggtgccacctcggttgggttaccttcaaacacatcagagcctgatgattctgactcttccgggaactcctgtgtttggaccgattccttgtaggaaggagtttctctgaagtctgtcgctccttcgttatacgttgccacagcgaacccacatgcaaccaggccgaagaagacgccgaacgcccacatgtactgcacgaaagaagctcagggcgttccactggggcccct

SEQ ID NO: 9461 - DNA, 149 bp, Oryza sativa
  Clone ID: uC-osflcyp112a09a1
tttggggtttttttttttttttgttttttttttttttttttttttttttttttttcccaaccaacaatctcaacaaaaaatccaccttttaaaaccccggggccattggccctcatttgccggacaaaggccctttaaatagcatgaac

SEQ ID NO: 9462 - DNA, 88 bp, Oryza sativa
  Clone ID: uC-osflcyp112a10a1
tttttgggtttttgttttgatggggttttaatattttttaggcacagggaagccctacaaaaaaccaccccgggagcagaacagcctc

SEQ ID NO: 9463 - DNA, 89 bp, Oryza sativa
  unsure (1)..(89): unsure at all n locations
  Clone ID: uC-osflcyp112a11a1
gggttcataaagtccgcgcatagaatttgaatnnnnnnagcagtannnnaaaagcatggataaagtgtgacaacaggctcaaggcaaac

SEQ ID NO: 9464 - DNA, 284 bp, Oryza sativa
  Clone ID: uC-osflcyp112b01a1
ggaagcattagacatttgcctttatttgattaaagaccttttttcatgttgggatactacatcattacatgccagtttctattggtagtactaactgatcgaacgatcatgcaataggataacaatttcgatggatcgatcgatcactctagctagctagcttggcgatagctgcgctggttgtagtcagtccgaggttggctgacctgtagcctgcgccgagctatgtctcagttatgcgcttgtgagtatacctaatgccggttcgacgtttggaagttttt

SEQ ID NO: 9465 - DNA, 90 bp, Oryza sativa
  Clone ID: uC-osflcyp112b02a1
ggggccacaaaccaaaaatgcttgtgctcctattgaagtttccaaaatgtaacgcggtagggctaaacaggcaaaaacaaagtttttgac

SEQ ID NO: 9466 - DNA, 289 bp, Oryza sativa
  Clone ID: uC-osflcyp112b04a1
tttttggacaagttacagcacaagcagttttcatatgcttgaacatctaatgtcagcggttgcacattaaccaaaagtaaagtaaaaatcacatcttgggagcaagccccgtatcatgcttgggaacatcagctaatatcagtcttaaatcacatctcaggaaactgaccggcaagtcatcctttcctactcgctgatcctacagcagctgcttgcagtgacagtcatggtgtggccttgtcagcaagtgagtgggcagtcgagcttctttgccgccgtggtgaggaag

SEQ ID NO: 9467 - DNA, 277 bp, Oryza sativa
  Clone ID: uC-osflcyp112b05a1
aaaccaggaaaccccaactaaacggtaaccaactaagtgggcaaccttttgattcgaaagggtaactttcgggaaggggagtggacccccggccaggggaaaccacaaaatgggcgcgcatcaaattaaggcttatgacaaaatacaattaggggggggccccaaaaacacaaagggcccaaagaggagaggaaagggaaatgggggaaagaaaatttaaacgggggggtaactctagggggaagacccccgggggaaggacaccttatttcccccc

SEQ ID NO: 9468 - DNA, 91 bp, Oryza sativa
  Clone ID: uC-osflcyp112b06a1
tttttgggggttttttacttttaagaggtgaaaacttattccattcttccaaaggtaaaccaagtcatccaagatccattcgtccaccata

SEQ ID NO: 9469 - DNA, 450 bp, Oryza sativa
  Clone ID: uC-osflcyp112b07a1
tttttggttagccacaacacatatatttgtcctttaaagttttaaggagttgaggagaattacaacagcgtacatccgcaagaggatcaaatcagatccctatacaaaaaggaaggatatgcagtgcacacatcccgtccgtacagtcaagctaaccaaaagccactgtggattcattcacttgtcgaagttagccctcggtcctgcccttgaacccgatctggccgaaggtgagcgccaggaacagtcccaaggggccacgttaccaaccacagccagaacggcgagtcgagcgccggcggcgaggggaagtgggagagctcctggtcgatgctggagaagaagagccccgtgaggctgttgccgttgatcgtcgggacgcttgacggtgcgatccacccgatcagcccgaaaccccatcacgttcaggtaccttctaagccagtcccg

SEQ ID NO: 9470 - DNA, 326 bp, Oryza sativa
  Clone ID: uC-osflcyp112b09a1
ttttggtttttttattttttttggttttttttttttttttttagaacctaaaaacactcaagctggtttcaacgttaatgaatacaattacacaacattatattcagcagctttacaagaacataaaacatttgaccttacacgtacaaggaaaaaaaagaaggaagggaaacacaaacacagccgaattgagcttttaaggagtttttctgtggcaaagttttttaaacgcaaaaaccggggaatcggaaaacctttatacgggggaaaaggggccccaacttggctttgtaagcacaaggaaaatttgaaccccgggggggacc

SEQ ID NO: 9471 - DNA, 76 bp, Oryza sativa
  Clone ID: uC-osflcyp112b10a1
tttggggtttttaaaatttttgggttttttattttttactacatttttcactaattgttaactcatatatcaaaaa

SEQ ID NO: 9472 - DNA, 361 bp, Oryza sativa
  Clone ID: uC-osflcyp112b11a1
ttttgggattgtatcaaatgatcgggttatacattagtgcattacagccttttttttaatactcattacaaacttaggatacaagctaaaagatcattgtatccactggggatgtacagggggtgcatctcttattgttactaccatatagtattacaaccatgccatgagatgcacacaccagaaacacttgcattacactaccttattagttaggccggtacactacacaagactaaaggtgtttcattgtgccagagccagccccgggtccatggaagctggattgtttggcttggtacaacctgaagaacaccttggttgcttcttgagctctttgacctgttggggagttagtttt

SEQ ID NO: 9473 - DNA, 110 bp, Oryza sativa
  Clone ID: uC-osflcyp112b12a1
ttttggttttttttctttttttggtcttttgtttttttctttttttgttttttttgttttattttttttatatttttttttttttttttttgtgggaaaaaaaaaaacaa

SEQ ID NO: 9474 - DNA, 404 bp, Oryza sativa
  Clone ID: uC-osflcyp112c01a1
cgatgtcaaaatctggatacaactaaataatggaataaataacaaaacgatttattgactacaaagggtatctgatacaaacatttggctatacgatggacgtcgaacaaaatatacatacatatgagctcgccagtttggccaaaatcaccatatctaagatcttgactaagaatgtgtcattaagcttcacaatgccgttggaaccatctatacctatgggctttacagagtatccacggaaattgccgaacattatcttgaacttgtagttcatctttggacgaataacctcgagctcggttggaagaaccgccaagaactcagcataacctgaggacccatgggcgacgcgacaagatccatccggaagaacttccctcaccacaccaggaccattatcg

SEQ ID NO: 9475 - DNA, 411 bp, Oryza sativa
  Clone ID: uC-osflcyp112c02a1
gaaaccaaacattgtaaagctctggtttcttgcatagcttcccaacatggtccggtgaacagaaaatattggaaactagacttcagaaaaccacagcactgtcgcatggtgctaacatgagtttcctcgtcaaaatcattacacttgaaaaaggaaactacagggcgagctcaacggcggggggcgaatataatttaggacatccgctgggcgggctccttagcgagaagcttttccctggccttggttttcacctgagacttggaaccaatgactccgcctccccactttttcctgacctcgcagacttgtcgatgaagttcgccttgatggccttcaagaccttgctgaacttaagcttgtcctcgttttgacagtgttaacgacagaacgagcagtctcttgtgaaca

SEQ ID NO: 9476 - DNA, 375 bp, Oryza sativa
  Clone ID: uC-osflcyp112c03a1
aaagggtatggaacagatacacataggctgtccattgcatatagctacgaccaaaataactgataacagcactggaaaagttgtccgaccctggtgtctagtgagaggcacacatgctagcttgggtgcaatatttacaaggtaattagatgtctatagaaaggctataaagggcgctaataataaacatagaaacaggctggagatatttagaaagccctggcagagtcacttggcgataacaggaggatgacaggttgtagccgatgcatattgccttcacaagacatctgccgatgcttccaggcgatctgttttgtaaaagtggaatatgcaaattgatccaatctggaaactgttgattgcacaaaacgg

SEQ ID NO: 9477 - DNA, 411 bp, Oryza sativa
  Clone ID: uC-osflcyp112c05a1
cagtaaagaggttacaattaataattagcatacaagcaattcatggttcatgtcagttaaagcaataaccaaagttacaatagctaggaacatattatttggtggatcaatcaataacagaaagatgatataaatagatggtacagatcctgaagttgatgcttgaatgtataattaaacttatggaagcacttcattgttgcactcctaatgtgggctgcacatttcgccaaccaaccattaagtatttgcaggattgcccagtgacctgcatatagcaactaaataaaatccggttgaaggtgcacatggagcccaggaaattcagaaacaagaaatggtgcatttttgtcaggaaattttccagcatgttcccgccattagcggaacttccagccccgtacatttttt

SEQ ID NO: 9478 - DNA, 225 bp, Oryza sativa
  Clone ID: uC-osflcyp112c06a1
caacagatgccaactgttgttttcagaaaaaaaaaacggtttttcacagtttacaagaacccatcatttttttttcagggttaatatgaggggccaaggttactaataaacattttaaatccaacattaaaggacagcccctttgtactgaaaagcatccccactttaataaacttggccaaatttaaaaaagggttctggggggaggggaaataagaaataaaa

SEQ ID NO: 9479 - DNA, 148 bp, Oryza sativa
  Clone ID: uC-osflcyp112c07a1
ttttgggtttattaatgttaatactttcatttcacatcagtttaagggaaataataaggctcagaacaagtttaatccgaacagaaaaaaatagagtatttaattacacagtgcacacagtcgagcatatgatcaataacaggggaat

SEQ ID NO: 9480 - DNA, 440 bp, Oryza sativa
  Clone ID: uC-osflcyp112c08a1
gcacaataattctctgatctatagcctgtataaatacacgggaacattgcttgtacaatttcgcaatttgaacagatgaaaaaaaaaaaagaactctcgaatcagtaactgccttcgaatggcaattgatcattgggcctgggggtctgcacccatagcaccaaaccttgctccagcgccaagcccagtattgggtggccttgccacaacaacattgtcatcagcaaatagcgccttgatgaacgaaggagtcttcaggggacgcctcccagtcatccgcgggtatacattttccaggaagtagtacacatgcccagcaatcatacccagcaaatcaacccatgttctgcttcccacaagaatagagaacctcagtaggacccaaggtaaataagcagtagtaaaggtgaacaaacccaagtagctcatttgatgaaggg

SEQ ID NO: 9481 - DNA, 118 bp, Oryza sativa
  Clone ID: uC-osflcyp112c09a1
tttttggtttttttttttttttttttttttttattaatttacttaaagatatgacggacttctatattaaaaaatgaaaggaaaaaataaaagggctaaataaaccggcgacggaaaa

SEQ ID NO: 9482 - DNA, 463 bp, Oryza sativa
  Clone ID: uC-osflcyp112c11a1
ctaaaatcatgaacatctttcaggtagtcatctacttctcgtgatgctactgtaaggttcacaagattaatccccgcttgataaaacagacaaaaaaataggataggtgacacacgagtataacgctctcggtgaaaaaccggagcagagtagtagtagtaatacagcagccgtgattttatttagaagactaagtatatcaattaagagggtagttaaccttaaaccccgcaagaaacccgcgccaccctcacttggccttgccgttgacggcggtctccttgccgttggccgctgttgcggcggcggggaccttgcccttgccatcgtcctccttggcgaaggcgtcgacggggtaggtcctcccgaggccggtgggggtcttgaaggtgatcttggaggcgtcatccttgtcgatgaacatgtcggagagggagacccaaatgaggagctccttggtctt

SEQ ID NO: 9483 - DNA, 382 bp, Oryza sativa
  Clone ID: uC-osflcyp112d01a1
gcacagttcagaacataaagatttatgaactttagcagttatgtttgaagcttgctggtaccattcaggtaacattgacaaaaattgcaagtgctcccatgaagaaaatgctttagcagcagaggaagaaaacagaaaattctaggcatgggaaaccccagtggcagaatgtacatcatactcattatttgaaatgcttccgcttaaatgctcaaaacattttaatgaaagtaagaaacagtggtcccttagttgacatcatcaaggaccagcttgcgtgacttcaggacggaccaccttatgcgacagtagaatgcggattggagaagtgcaagtgacagtgggaagatccatttcactcccatcagctttctttctttca

SEQ ID NO: 9484 - DNA, 317 bp, Oryza sativa
  Clone ID: uC-osflcyp112d02a1
gggaggccttcaaaggggaagggtttaaaaaagatgggggggtattttggattgggggggaaaaaattttcccggggaaaaagaaacaagggtaaaacccccaaattttaataatattctaaaaatttgggaaaaaaaaaaagacttcaaataaaaaaaggaagggtcaaaagggcaagaccacggggggcccagaataaaagcttggcccggggaaaaattttttttggaaaaaattggccaaaaaaaaccaacccgtgggggtttaaaattaagacaaacgggaatgggggtaattggttgggaacccgggggaa

SEQ ID NO: 9485 - DNA, 443 bp, Oryza sativa
  Clone ID: uC-osflcyp112d03a1
atccagaacctccatggtgctcaactctcaccgaagaaatttataatgatacatttggcaattagtccaaacaaggttggcaccccagactttaaagctgcaacagcttaatccagcataccggaaagtcggtccaacaataaccatgaaaattgatgagcaccaacaattaccaacattagacaagtcattcctgaagcaccatgtaatgagcacaggtgatcacaggaaaacatcatcatcttgcttcagatgtcaagcttcagatgtcaagatcccagacggccaccttaaccaagtttgattcgcaagaatactcctttcttcgggtgacttcaggttgaacttgtcttcagggtaccttaaaacgaccagagaatgctacaatttcttggttgttgcgctgtagctccacgtttagattcacgcgcgaacgttgaacg

SEQ ID NO: 9486 - DNA, 142 bp, Oryza sativa
  Clone ID: uC-osflcyp112d04a1
ggaggagtaatgacaatgcaacaattcttctggaccatgaggactgtacattaacaggaggggggccacaaactgaaactttaatggcccaaaggcagaaatctatttaaagttcacaaacagcaccttttaacaaagtttc

SEQ ID NO: 9487 - DNA, 453 bp, Oryza sativa
  unsure (1)..(453): unsure at all n locations
  Clone ID: uC-osflcyp112d06a1
cttataaaagaaatgttacacgaccaaattccatccagctatgagtagtcaccagttggcaagaaccaaaacaaaaccatgagtgcagtgtaccatacataaaatagtattgacagctaataaaatccaggatccaactggctggattagattggggcagttgtttgtttctttccctctactgtgcagtcacaatgaccagaaggcagaagcatccaccactcattgtacccaatcaaattatggaaacaaatatactgctaactgatcagatggatggatggttcatccaagcttactggcatcccaattttgcctcattaccaaatacaacgaaaaggttattgttgctggtatcaagccaggaaaaacataccatggncaaaatttatttttatgactattgttgtggttacctggtccagcaaaaggcacacgaataggttgagcaaa

SEQ ID NO: 9488 - DNA, 127 bp, Oryza sativa
  Clone ID: uC-osflcyp112d09a1
tttttgggtttttttttttttttgtgtttttttttttttttttgtttttttttttttttttacccaagaaaaaaacatttaaaaatgaacaattttttaaggatatatacaagtggaatgctttaat

SEQ ID NO: 9489 - DNA, 365 bp, Oryza sativa
  Clone ID: uC-osflcyp112d10a1
tttttgtttttttttttttttttttttttttttaagaaaaaggaaagcaactgatttcagaaactttgattactgccgcctgaattttcacatgttctttcaggggctttttgggaccctaatttcgggcttttgtttctggcaccatctgaatttgtacactaatctgaggtagtatgttacaaatttcgagtccttaacaaagctaaaaaaaattgcaaacactgaaaacagctggttttttttgggaaaaccagcgaaaaacccgtccagccctgagacgatcagggtggttcgggttttttaaaaaccattaccccacttgagccttcataatcccccgttcattttttagttttaaccca

SEQ ID NO: 9490 - DNA, 459 bp, Oryza sativa
  Clone ID: uC-osflcyp112d11a1
aacaaccagacatatgaacagcatttaactaacaaattaaactagaaataacattaagtttccataggaggtttactggctggacggacatacatgtataaaccagttccaagttccagccattttgcaactaatgcaaaacctatatgagaaagacctatagaattaccgggttcacaggagacgcttccaccatggaagcagagggatgaccatggtgaactttaaaagcttaaggtgctctttctttaaacgctacaagtttattcttcagtactctcagtagtaccaattcgagccgtcattcttctgctggccctgcattgcgccggggtattcgacggcacctgacatgttgaaaccagagccgaacctgaactccgatgcaccattgatgtcgcccatctggttaccgaatggagtatcgtcgcggatgaagaactgctgctgtgccggggt

SEQ ID NO: 9491 - DNA, 138 bp, Oryza sativa
  Clone ID: uC-osflcyp112d12a1
atagagttctaaagcttatacctggaacacaatatactaagtatttattggatctatattttgactactagtatttataaaactttaggagctcaaggaaacgttcagagtagaaaatcaatgtctgaacaaattcct

SEQ ID NO: 9492 - DNA, 422 bp, Oryza sativa
  Clone ID: uC-osflcyp112e01a1
aaaagggggtttatcattccggcatcatgaagaggtaacttatgcaggatttctccattacaaaggatactcggaagataatagggaagtccgccatgaaagggggctgatttttacttatcaagttcacaaaaattggaatcacatggattctatacaatggtttattccatgcgacaatatagaaaaatagcaatcattgcactaggaaagcctatagcaagattgggcaggtagcaacgacttcatagacctcataaaatgaccagttttactgcctgaaatgaacatcattgccacgagaattcctccattgctccgatagctcctccctcacttttttagctttggacgatagattctcaagagacttggtggtcctcacagcaaatctctggaaggtacggttgatggggagcccc

SEQ ID NO: 9493 - DNA, 80 bp, Oryza sativa
  Clone ID: uC-osflcyp112e02a1
gatgcggaaggagaacaagacggcaacagggagccgacaagacgaggcgcaaaacaaacgagaaaagtaggggggaaaaa

SEQ ID NO: 9494 - DNA, 382 bp, Oryza sativa
  Clone ID: uC-osflcyp112e03a1
tttttttttttttttttttttttttttttttttttttttttttttttttttttttttttttttttttttttttgggggaaaaggggaacccaaaaccccattttatacccacccatttagaaagggggttaagggggtgcaacattggaggggggcaaaaaaaccccccgggacattggcaacgtaccgggggggggcataggccgaacaaattttattacaggggggacctaaaaggggaggctggggggtaaaaccgggccttgccttggtggaaaaaaaggggcccccgggccaaggtctaaccggtggggacctgaaaccttttaaggcttagggaacccccatttggaaagcttggggggggcctccctgggagctt

SEQ ID NO: 9495 - DNA, 319 bp, Oryza sativa
  Clone ID: uC-osflcyp112e07a1
aaacaataagtaccacagtagaattataactggctagctcagatcacaagatcaaagcaaaggtacatcaacatgtctcctcaacttgcatagcaactactccaacattggaacctcaaattagtagattgtgttacaacatttaactgaagagacaagggtaccggaaattttactgatcatcagcactacttgatctgaaacgacgggagttcatcttcgcgttggtttggacctgagggggtaacaatgctttaggatcatgttcatccattccgaattgtttagattcatcagaggtacctgccggcagaccaat

SEQ ID NO: 9496 - DNA, 405 bp, Oryza sativa
  Clone ID: uC-osflcyp112e09a1
acttcaaaattcttaacttcatcatcaagaccaaacaaagcaaacgcatagactcaaaaacattcatttctcatcagaaagcaaatatgcagctggcaagtaatacccaacaaactattcagaatatctgccattgacacaggctaggatgttcacgatccacaactagatagctgtttacttgttgtctaaataaacgggcagcaaaataagtgataatctctactcggcagcagcgacctcctgcccggccatggcctcatcttctgcaggcctatcaagcttcgaaccgatgtcctccttggcatagtcaccatgcacctccatgagctttcccaggtaaaatttcggggcctttagaatcttcactttgcggacaaacacattctgaagggggaaaatact

SEQ ID NO: 9497 - DNA, 304 bp, Oryza sativa
  Clone ID: uC-osflcyp112e10a1
gtatatgcattatatattgtctccatatatcaattgctatcttacattgcaataaccaaagttacggatcgcatcaatcaccatatttagcactgacaaaacaaagctaaaaataatttagttttacataatcaatcagtcctgacatttgggttaactaaaaaaactattgatacaacacctaacaggcccgtaggatggtagttaatatgtaaacctccacaattgcagcttgagaccgatcttggcaatgaatacgcgtagaccgattggagctcggtcttcagggagtttcaacaccctt

SEQ ID NO: 9498 - DNA, 460 bp, Oryza sativa
  Clone ID: uC-osflcyp112e11a1
gctcgaaaaccgttgatttttttctttccggatttcccagaatgtctaatacttatatgtatcaggtctcgtatatgaatgttagacctaataccacagaagtacaaggcctgatacgtatggataccaacctgatacacattaatccacaagaaaaatggaggagcctcaatgaagcctaaacatccccaaacaaattacaactacgacaccatggatagaaaaatattgtggcggatttctgttgattgagctcagtgagagagaagctgttgttcaactgatcatctaaaagggggaagatgcctcgagcatatccaccagcaggcagcgatgggattctaactgatgaaatttcaagtgttagtttcaaatgtcacctttttaaataaatcaaaatagcaacaatacttctctgtcaagttttagtttgtcggctctgacggtcactgtaggtagg

SEQ ID NO: 9499 - DNA, 326 bp, Oryza sativa
  Clone ID: uC-osflcyp112f01a1
aatatatattttttttttattattttatttttttttggggggaaaaaaacgggggaaattaaaaaagggagaggggtaaaaaaaaaaaccctttttggggggggggcaagcccctggggggggcaagaagggaaggggaaacggcccgggctcggggggggccaaaagagacaggggggtattagggaaaggcgaaaaaggaaagaaacccaaaccccgaaaaaaaaaaaaccccagaaaaaaaccccagggcccaacaaaaagggggggaaaaaaaaaacccccacccccccaaaaaagggaaaaataagggaaggggggggggg

SEQ ID NO: 9500 - DNA, 462 bp, Oryza sativa
  Clone ID: uC-osflcyp112f03a1
aagcgtcagaaggtatttaattaattattagcaagccatattgtcactgagccacatactagagtaccaaattatagaggaaggatgggagcagcaactgagcaaagctccatcctgcttagatacattcgagaggctttttttaggcttttaaccagccaagcgcaagcacttcagttaaagcctaaacagagtttcagcatgatcagatcatgcgcattacttccacttcttgaacttgccaccaccgaacatgccgtgcccatgcttgccatgcttgaacttgccatggtggccgtgcttgccatgcttgaacttgccgccgtggtgaccgccgtagccatggccgtaaccaccaaagcctccatggcctccatagcccatgtgtccaccatggccatgagaagagatcttgtgtgccccataggctgcagaagccgcagcggtgtcttcagccagcat

SEQ ID NO: 9501 - DNA, 272 bp, Oryza sativa
  Clone ID: uC-osflcyp112f04a1
gccagtaagaaaggtagtaacaaccattgaaacctgggacttggatggtagttaccttcccacacccagaatgaaacatcgacaaattcccattcaagtttttatttcaagattacacttgaccacagttcatagcctctggagttcagtttgcactaacaaggaacaagaaacgagcaacatagaccattattattatgacctcatatcaaaacctaacccccctatatctacaagataagttgcacaagcaaaattggcctcagtgcttg

SEQ ID NO: 9502 - DNA, 145 bp, Oryza sativa
  Clone ID: uC-osflcyp112f05a1
tttttttttttttttttttttttttttttttttttttttttttttttttttattttttttttttttttttttttttttttttttttttttttttttttttttttttttttttggggaaaaaaaagggaaaaaaaaaattttttat

SEQ ID NO: 9503 - DNA, 309 bp, Oryza sativa
  Clone ID: uC-osflcyp112f06a1
agctgtaagcagcatatatgatattaatccaccagcgaatagtccttccaacttccacgttcaattattgaagtttaaatatggtacgcttgcaaatggatgctgcatgcaagatatattaggccctaccacaccacagttgaaatgctaagccagctagggggaatcattttctagaggtatttgtaaatggcctgtgccacgccgctttcgttgttgctcgcgccgttgacgtcggttaccacctttgtcaccttacaggcattgcttagggcgacaccaaggccggccagttggagcatctcttta

SEQ ID NO: 9504 - DNA, 56 bp, Oryza sativa
  Clone ID: uC-osflcyp112f07a1
cgccgcccttttttttattttttgggattttataaaattattcgctattttatctg

SEQ ID NO: 9505 - DNA, 64 bp, Oryza sativa
  Clone ID: uC-osflcyp112f08a1
tttggggttttttttccacaatgtgcttatggatggaattgctttccatttcttttacccaaaa

SEQ ID NO: 9506 - DNA, 397 bp, Oryza sativa
  Clone ID: uC-osflcyp112f09a1
aaaggccccaaacaagagcagctgcaggctgcatttccattatccatataacataatggcctagcaaagggtccataacagaggatgcccccttttagatgaacataagggcaaaccgacccacggtttagacttaagccacccggggattgtttacaaaaaaagggcacacttgccacaaccatataaagggcctcaacggatgagggtacattattccaacccagttctgcacccaagctacacaagagtagtagtagggccccaccactgacatggaccgatcaaataaacaggacggggtacaaaccgccccagagcataagggcaggccctaacgcattaagttgggggcccatccacatcaggtggtccttgctccttaaatttgtgaaag

SEQ ID NO: 9507 - DNA, 400 bp, Oryza sativa
  Clone ID: uC-osflcyp112f11a1
ggcaaacagtatcaattccaggatctagtaatttaagtccacagttaaagctagtatcacaattcgcatcgacaacacaccattaatcaacacaaggaaaaaaaagagtaactagagcatcaaatcacctaaaataaacatcttacgacccagatcgacagttgcaatacagtactaggtaataataacacaagggagcacatcctcaatcatcatctacgatggatgacgagagcgagaggaatggcaggcaggtaggtggcttaggcagcaacctcgtcttcctcctcgtcgccgtagtcctcttcctcgtcgtcggctgtcgcgtcctggtactgctggtactcggccaccaggtcgttcatgttgctctcggccttggtgaactccatctcgtcca

SEQ ID NO: 9508 - DNA, 145 bp, Oryza sativa
  Clone ID: uC-osflcyp112f12a1
tttttgttttttttttttttttttttttttttttttttttttttttttttattttttttttttttttttttttcattttttttttattaaatatggttttatttttttatgggagggggccctaaaaaaaaaaataggggcaaaa

SEQ ID NO: 9509 - DNA, 118 bp, Oryza sativa
  Clone ID: uC-osflcyp112g02a1
tttttgtgttgttttttttatattggcttttatttttttttataataatatttttatttttgttttattataattattttatttaatatattaaaattttaaagagttaaaaatatag

SEQ ID NO: 9510 - DNA, 426 bp, Oryza sativa
  Clone ID: uC-osflcyp112g03a1
gctgcaatcctaacgaattaacccgtagtatttatgtagctacatgttgcgtaaacaaggcaagctagttaaaaagtactagaccctttcaccgctttaattgaaaagcggtatcatatcataattcatctacacattcttcactcaaatattagtttataaataatacagatcgagattaataatcttactatatacaaagtacatcatacttttatacatacttaactggggctaactgtccagtaaccatagatccaattccaaattatgtcatttcagataagatcataatccaagtgaccagagttcatcaacgtacatctgaattgtgatgtcacgatgccttttctctttgtctttcttcattccatggcttttaaggttattatatgcccaagccctggacggcattccggcattttt

SEQ ID NO: 9511 - DNA, 446 bp, Oryza sativa
  Clone ID: uC-osflcyp112g04a1
ctgaacagttgctgtcttattgatcacaccacacaatcaagaagaggaggcatgcaattaagctgaaacattgaaacaaattaaaaaaaaaacacagcaatacgaacatcaatctatcgttagcagattgatccgttcctctagctagctagcagacgacatcctctcatgtttccacacactaacaaattaaaaccaacaataaattaatacacctcgtactcatcattaacacatcaataagccgagatcgagtagccaacaaacaagagcttgagcttgggcgccatccatggcgaggcaggggaatggcggctgaactagatggagcaggtgtagccggggggagggttcttgccgcaggtgaggaggagctggagcgcgaggggcaggtagatgttgatgttgaggagcttgagcctgatggtggtgcagaggcacacggc

SEQ ID NO: 9512 - DNA, 358 bp, Oryza sativa
  Clone ID: uC-osflcyp112g05a1
ggaagggtcacccattatgcattcaggagtaccgattgattgttgggtcctgaatttttgctagtatatgcatataaggagatactactccactacaggacaaaggagaggattgacattgactagctaggccacttaaccggctccttactactatcagaagaagctaatttaattaaggggggtaaaagcaaaatgaggggtgggctgggctcattggtcgtcgttgtcctcggggacgaacttgccggttccggggttgatggcggcgaataataagaagaggatgttgaaaaggaggagcggctcgatctcgttgatggggaccccggtctcgagttgagctgggcagcgcgcc

SEQ ID NO: 9513 - DNA, 322 bp, Oryza sativa
  Clone ID: uC-osflcyp112g07a1
aaaaacggaaacattgggcaccctggctcgctcatttgccaaacttacggggaagcaaaattaccaaccccttgttttcccccagattggttgccttattgcaaaatgggaatcacctatttacaaaacctaactttgggcctatacatgctagagaacatactgaactatggagtatccatagcaggctttgggggtaaaattgagaagcaaaattgaatatagcaaaactgggtgaatttggtgcggagcggtttcgtttccaacagggggaaaaagctgggcaggttaccaccggggccgccgccccaccaccgggggc

SEQ ID NO: 9514 - DNA, 334 bp, Oryza sativa
  Clone ID: uC-osflcyp112g09a1
aaaattaaaataaaaaaaattgaataaagggaaaaaaaaattaaaataaaaaaaatttaaaaagggggaaaaaaaaaaaaaaaatttaaacccaaaaaaacaataaagggaaaaaatttaaaaaaagcccatggtttggcccccggggggggaaaggggaacaaagaatttaaaaaaaaaaacacgaaaacataaaaaacaaaacggaaacaaacgaaaaaaatccggggttctacccggggggaaaaaaaaaaaaggggaacggtaatttaatttaaaagcccccaaccgccaaaaaaaagggaaaaagggaaaggaaaaggaaagggaaaat

SEQ ID NO: 9515 - DNA, 446 bp, Oryza sativa
  Clone ID: uC-osflcyp112g10a1
cagcctaagagtgttcataaaacttgttgggtttcacacgcttacagttgagcccagcaaaagcaaaagtagggaagcaacaagtaaagcaagcctcttcggtttcaaatatgtatggaaccggggttttcctctctgtttctaaagaacaagtaaattaagctggcatcgacatactaaagacacaactctgtgttctcatcataaagaaatctactccatgctaacatctagaaggaccataaccttaacttcaagaacttgtttttctgtcaggactccttgggcacttagattttgcagcttggcaaagggccaggcccttgatgacctgcaaatccccctaacagtttcggcgaaacaaacggtttccagttttattgttgtgaaaatgtatttgtttccgtcgttctgcccggtcgcaccagaagtcccgaaaataaaaa

SEQ ID NO: 9516 - DNA, 422 bp, Oryza sativa
  Clone ID: uC-osflcyp112g11a1
ctaagttccattccacaggtaaattcatggttcagattttaggacttcagatgagaaactactagatacacatccatcagatggatggatgaaatcaacagtcgagacaacttactagcaaaatatccagttctagaacacagaaacagagtacttcactaacaatctactactacatgtgagtagtattagcaccattcacgacaccaaataagagttcagcagcaaaagcaggaagtagtcacagatgaaacaccagagcccctcccagagatgagaaagcctaagccctctcaccacggatcctcctagccagctgaatgtccttgggcatgatggtcacacgcttggcatggatggcgcacaggttggtgttctcgaagagacccaccaggtacgcctcggcagcttcctgaagggca

SEQ ID NO: 9517 - DNA, 292 bp, Oryza sativa
  Clone ID: uC-osflcyp112g12a1
ctgtcatcgatcgttccaattaccaagtctcccatcgatccacaactccagttggtactgcctatgctgatggcgacgatagcctacaggcgaaggatcagctgcgagttcgagaggcggcggcggcggagcaggaggccggagcgcgttacgatcgcgaccacaggacgcgacgccgccaggaggttcgccaccgccgccgccgccgcggcggctcctcctagcagggagcgcgtccgccgccgcgtcgtcctcccgccggcgtcgtcgttgtaccgcccgggccacgcca

SEQ ID NO: 9518 - DNA, 89 bp, Oryza sativa
  Clone ID: uC-osflcyp112h01a1
aatattattagataattatagttaacaattgaacttattagatgaaaaaagtaaattaaaaaaattaagaaaaaggcgaccattgagaa

SEQ ID NO: 9519 - DNA, 196 bp, Oryza sativa
  Clone ID: uC-osflcyp112h03a1
aattataattaattattttttatttttatatcaaaaaaaaaaaaaaaaaaaaaaaaaaaaaaaaaaacataaaaaaaaaaattatataaataaaaaaaaaaaaattttttataaaaaaaaaaaaaaaaaaaattgaaatatataaataaaaaaagaaaaaaaaaaactaaaaaaccttaaaaaaaaaaaattttgg

SEQ ID NO: 9520 - DNA, 430 bp, Oryza sativa
  Clone ID: uC-osflcyp112h04a1
acagatgccaaaatttgcgcagcaacaagtatgacaaaactcgcgcagcgattagtccactaaatttcgtacgctaaaagaaaaaagaatacagcaaggctacccaaggaacaatagccatttgacagcattaacccatattagttgctataactccatatcagcagacatttttatgctgctagctgtttggatctcttaacaaacttcgatgtatggcatttcacatcttgggtgaagacaaaagaatgggatgcctgtcgcaagtgccaaaagttgagatgtgccaggacggcatggatcatgtaccgtatatatgtctatgaactggtgcgccaaacctttaactacattcatccatctcttttttacccttagaacagagttgtctgatggtggccaacaaatagcactggatctttaaagcaag

SEQ ID NO: 9521 - DNA, 394 bp, Oryza sativa
  Clone ID: uC-osflcyp112h05a1
acattaaaacaaatcacatagtactttcattatttcaaacgaacataatgatacataaacacatgaaagaaattaagggagatgttgcaaacatatccgcaagaaacacgacacaatgtgcgtttgcactactggacatgaacacagcttgcctcttaatcacttcttaattaatccttctgcagttcttcctgatctccccgtttgatcccgtcaacggtgtgatgtcccccatcttgatcatgcccgtcacaaaatccgcaaagaatgtgctctggctacttatgtaagactgaacaagagcatcagtggctccgccattgaagagctcctgatcagaatgcaggagccccttcttgacgacgagggtcttgaagtagttgttctcgaacac

SEQ ID NO: 9522 - DNA, 376 bp, Oryza sativa
  Clone ID: uC-osflcyp112h06a1
gggaagcgaccggggcagttttattcaacttggccagaaccacttttttaccgactaccacttttggaggggtaaaaataaccaggtcccacgggttgattggacagaatttttaaaggggacacaaacatgccgaaacataaactatttccccctaaatttcactactttccatttaaccggttttaaaaacctgggcaaaatctggcgttggagctgtaaaacagggaagccgtcaggccccgtctcctccatgggtacagccacaagcatccatgccctttcctactaacttgttaagagctcatccttgagaggctcgggtggcgccgactttgccttttccttcgcctggccgggggtgaccttgttcttt

SEQ ID NO: 9523 - DNA, 408 bp, Oryza sativa
  Clone ID: uC-osflcyp112h07a1
tttttggtttttttttttttttttttttttttttttttttttttttgtttttttttttttttttttgtttttgggaacagaaaagcccccggcttagcaaaaaccagcctaaacacggggaacccttaacaaaagggaccccttggccctttggaaaaaaaaaggggggaaaaacaggccaggaccgggttaaaacccagggggaacatctattacggggaacaggcaatatttttttggaggggaagactgaatacgggggtaataaagtacccggggaccgggggggaaacggcaaggggaaaggggggcccctttcaactcacctggccaaaggggggggccccggtattggggggggggaaccattggacccaccggctgggacaatcgggggtttgggggggc

SEQ ID NO: 9524 - DNA, 495 bp, Oryza sativa
  Clone ID: uC-osflcyp112h08a1
ccaccatcatattttgctggctcatgtgacatacatggtacagtaactgcattttgtttctacttaaaaaagttttcatcagtccatcaaaattcaccagcttctgagggcattaaataaacatccacataaaggtttaaacaaatcaggggagctgcatttcgtatacagagatgagctccatcagtttgcattatttctgtgaaagaaatcaggaaactagtgcaggatcgtcattgacagtgtcctaagccgaagctgccagtagctccctttcggctcgctcacggattctcctttccagttctggcctgaagtgcctgataagtccctgcacaggccatgcagcagcatccccaagggcacaaatagtatgcccttcaatctgcttagtgacctcctgaagcatatcaatctcctcaagcttcgcgttacctactttgagcctcttcatgaacattcacagccaccctgttccttccttgcagtgtgcac

SEQ ID NO: 9525 - DNA, 459 bp, Oryza sativa
  Clone ID: uC-osflcyp112h11a1
gataaatacggtctacatttgtttaataaacagagtacaataaagtataagtagtccttgtgaatccattaggtggcttaatagaagacaacacaccaacaaagatgaacaataaaaaagtgaattgggctataattttcatcaacaaaaaggacaaacactttcaaatgggtcatttagtggatgctatgattggcattcttctccaccataaaggactacaagtggaaagagctcattacaaaccacaattctgtctgcaaacatcttcaaaccagttcagcgcagctgcaagatgcaaatggttcgctattcaagcgtgtaaacatgttttatctttcagaaggtcactgcatgctcagtattcaacatgtcttcccaagcacttttacattttgtcaagaaatcaccagtttcggctgaccatttctgccaccagtagttgtgacaattatgtgg

SEQ ID NO: 9526 - DNA, 443 bp, Oryza sativa
  Clone ID: uC-osflcyp112h12a1
agccaagcaacatgtactgtactgtatataaatattttttatccactcttataagatgccgagataatcacaacatccaaatttacatgcatataacattctaagataataaatatttcctcttttcgatttttcaggcattcatgaatgcgcagacttgcgaatttaactatgatccaccagcacctccactttgatcgaaaagacgagacgaccatttgattgtccgtctctccctgacgaagaactcgcaatatattcaccaaatataacacagcatcttgatatatattgacctgcagcattagtaatcattccaaatgaatatatataatggttatcgatcgaccggccggctgccgcgcgccgcttgtggtggatccctttgcctgcatcaggagagatcgatgagctaatatatataaatcatctgtaagtaacac

SEQ ID NO: 9527 - DNA, 348 bp, Oryza sativa
  Clone ID: uC-osflcyp115a01a1
attaacaacacttcaacagttatgatgaaccacgctgcaatggatatggggtttccaggcgaacccaaacagggcttgacaaagcaccccacacgggccaaaaataagcccagcgcatagaccggaaaccatttttgtataaaaaggggaagaccttactattatatacattggagctgtgtctccaaatacagaacggggtccagcctcttatcacaaaagcgagggccatcaggaagtttgactggagaaccaaaacgaagttgcgggtcatcaaccaaaaggaatgtggcaccctttgggtaaaggcaagggggaggacctgggtggcgcccaaggttgggacct

SEQ ID NO: 9528 - DNA, 73 bp, Oryza sativa
  Clone ID: uC-osflcyp120a03b1
attttaataaaaaaaaaaaaaaaaacgccccccgggcggtattatataaaattgcgggggggtacatacaaca

SEQ ID NO: 9529 - DNA, 67 bp, Oryza sativa
  Clone ID: uC-osflcyp120a04b1
cttaccttagccgacgccgcagccgcatcctcgggcgggcgtcgtctactccgcgcgggagctcctc

SEQ ID NO: 9530 - DNA, 441 bp, Oryza sativa
  Clone ID: uC-osflcyp120a10b1
tttgcttttatagttttggtgagccgtttctggcacggttgccaatttcctacgggggaaaaagagctctataccaaattgctgagttcttgaagtatgaagatgaaaattctcagtatatctgcattggtgctgcacagaaggcattatccatgttgtgctgttggattgaaaatcccaattcagatgcattcaagcgtcatttggctagagtagctgattttctatgggttggcgaagatggcatgaaagttcgggtctgtgcgggtcaattatgggatgttgctttcgcagtccaagcgatattagcgtgtagcatcgcagaagaatttggaagtacccttaagaaagcacatggtttcataaaaacttcccagattatggacaatccttctggtgacttcagcagaaagtaccgtcacatatctaaaggaggatggg

SEQ ID NO: 9531 - DNA, 371 bp, Oryza sativa
  unsure (1)..(371): unsure at all n locations
  Clone ID: uC-osflcyp120a11b1
tcgttagcagagcaagcaaccaatcancagggggggttgcaatgcaaccggggggggctaccacctgctcctgctctcccgccagcaggcggcggcctcgctccaatgcggcctctccttccggaggcagcccggcaggctcgccggtgggtcgtcggccccgagcgtgcggtgcatggcggccgtcgacacggcctcggtgcccgccgcgacggaggctagcaagaagagcagctacgagatcaccacgctgacgacgtggctgctgaagcaggagcaagcctggaccatcgacggcgagatgaccatcgtgctggccagcatctccacggcgtgcaagcagatcgcctcgctggtgcaacgcgcgccca

SEQ ID NO: 9532 - DNA, 428 bp, Oryza sativa
  Clone ID: uC-osflcyp120b01b1
gattgttgtcgcgagaactcgattccggatcggggggggtgcattctgtgtccgcaggggtgccccctgcgctcgtggaatgcaataataagcgccgcttctgtgctcgttgataacctgctgcgaccggtggctgacagagggatgcatatgtggcgcgggcgtgtcagacctaccggcggtgatggaggccgtaccacaggttcatggccgtccccggctgggcgagctgccgcagctaagcgcctgcaaggggctgctgcacctggacgcgcgggagatatgccggctcgcgcggttgatccgagcgatccgcggcgccgacggggccgacttactaggggaagcgaaactgccggagaattacagtgattttctggactttggctatggcgccatagatggctttggaagatgaagacagagga

SEQ ID NO: 9533 - DNA, 452 bp, Oryza sativa
  unsure (1)..(452): unsure at all n locations
  Clone ID: uC-osflcyp120b03b1
gatttgtttatggtcttaaagagtgcaacatggggtaggttgtcatctaccggtgccggcaaggggaggagtaagcagtcaagcaacaaagtgactcatggattccacttggtggaagggaaatctgggcatgacatggaggactaccatgtggcagagtacaagtatgacaagagccatgagcttggtctctttgccatttttgatggtcacttgggagacagtgttccaagttacttgaaagctaaccttttctgcaacatactgaaagagcctatcttctggactaaccctcaggaagcaattaagaatgcataccgctctacaaacaaatatattttggagaatgccaaacaacttggacctggtggttcaacagcagttactgctattgtcgttgatggaaaggatatgtgggtagcaaatgtaggtgattcaagagcntgtgtgtg

SEQ ID NO: 9534 - DNA, 162 bp, Oryza sativa
  Clone ID: uC-osflcyp120b04b1
ttttgttttaagagtggaaggtaccgaataagggggcaggtgttttgtgtgatggagaccagtgtaacatgtcatgaattcgtcgaatgttctgaagatgctgtgggttttgtggtcctgggatgtccacttcggtaaagatcgataagattcatcgtgggc

SEQ ID NO: 9535 - DNA, 452 bp, Oryza sativa
  unsure (1)..(452): unsure at all n locations
  Clone ID: uC-osflcyp120b07b1
tcgcttcgaggagaaagaaaccacctgatcgagccggtatctttgcagccgcaggagaggaggacgagtcgttcgttgtgcagcaggaggcggcggcgaagatgtcgtggcagacgtacgtcgacgatcacctgatgtgcgagatcgagggccaccacctcacctccgccgccatcgtcggccacgacggcaccgtctgggcacagagcgccgccttcccgcagttcaaaccggaggagatgaccaacatcatgaaggacttcgacgagccggggttcctcgccccgaccggactgtttcttggaccaaccaagtacatggtcatccaaggtgaacctggcgctgtcattcgtggcaagaagggatcaggaggcatcacggtgaagaagaccgggcaggcgctggtggtcggcatctacgatgagccgatgaccccanggcagtgcaacatg

SEQ ID NO: 9536 - DNA, 530 bp, Oryza sativa
  unsure (1)..(530): unsure at all n locations
  Clone ID: uC-osflcyp120c02b1
tgtcgtttaccactcctcaccaagtcaaagtttgttggggtgctactcgacagctagcgggggcggcagccatgtctgggagaggcaagggctgcaaggggctcgggaagggcggcgcgaagaggcacaggaaggtgctgcgcgacaacatacaggggatcacgaagccggcgatccggaggctggcgaggaggggcggcgtgaaccgcatctccgggctgatctacgaggagacccgcggcgtgctcaagatcttcctcgagaacgtcatccgcgacgccgtcacctacacggagcacgcccgccgcaagaccgtcaccgccatggacgtcgtctacgcgctcaagcgccagggccgcaccctctacggattctgcggctaggcgaggcgatgcgaggccacacgattggatagggattcgattagagccatgttcttcagatcgtcgtagtagcctagcctttactcctgcagctgatgcttcatctcgtctcctgtaccttcattaatganggatgtatgaactact

SEQ ID NO: 9537 - DNA, 463 bp, Oryza sativa
  Clone ID: uC-osflcyp120c11b1
gtccccccggcacccttatcaccaccaccaccgggaccatgctctccctctcggagcccccacccccaccccgactacaccacggcggcggcggcggtgcgccaccaccaccggcggaacgcccccttcgcgccgcaccaccgccgacgccgccgattcgcgcacctgacgacctccgccgtcatcctgggccccgacgggcggcccatcggcggggggccgcgcgacaacaagctccccttcacccctgcccccaccgagccgaccgaccagctctaccagccggtccatacgccgccgtcgccgctccccgacacgtacaaggacctcgacctcggccagcgcctcgctgggctccgggaccgtctcgggctttggcacgagtacgcgccgctcatctccgcgctgtcgagggacgggttcacgccgacatctatcgaggaggccacggggatctccggcg

SEQ ID NO: 9538 - DNA, 523 bp, Oryza sativa
  Clone ID: uC-osflcyp120e03b1
tataaattctcaaggtaatttacctattttgagccaagctgtatgcacaattcctctgggtacctgggttccaaaaattggtgatcctaatggccgtccattggctatgttgcggcctaacacatctcttagcgctgccctgaatttgctggttcaagctggtgtgagctcaataccaattgtggatgacaatgactcactgcttgacacatattccagaagtgacatcacagctcttgcaaaagacaaggtgtacacacacattcgcctagatgagatgaccattcatcaggctctgcagcttggacaggatgcaaattcgccctttggattctttaacgggcaaagatgtcagatgtgtctacggtctgacactgtgttgaaagtgatggagcgattagctaatcctggggtgcgccgtgttttcattgtggaagctggtagcaaacgtgtggagggcataatatcactgagtgatattttcaagttcttgctgagctaagtgaaaatgcccgagccatct

SEQ ID NO: 9539 - DNA, 451 bp, Oryza sativa
  Clone ID: uC-osflcyp120e04b1
cggcggtgctcgccgagaggttccgcgacgcgcgccccggtgccgtcaccgtcgccctcggccccggcggcgccaactccctcgcctactcctcccacggccagagccccctcctccccaggttgttcgcggcgacggacgagatattctgcctgttccaaggcacgatcgagaacatcgcggtgctgaagcagcagtacgggttgcacaacaagggctccaccgagatcaacatcatcatcgaggcttacaggacattgagagacaggggaccttaccctgcggatcaagtcgtcagagacatcaacggcaagttcgcgttcgtgctctacgattgctccaacaactccgtcttcatggccaccgatgctgatggtagcgttccattttattggggagttgatcctgacagccgtcttgtggtttctgatgatgacgaaattgtgaataa

SEQ ID NO: 9540 - DNA, 521 bp, Oryza sativa
  unsure (1)..(521): unsure at all n locations
  Clone ID: uC-osflcyp120e05b1
gctactggacatactctactactactagccagtgagctagctaactaactacgtggctatggcccccaccgtgatggcctcctcggccacctccgtggctccattccaagggctcaagtccaccgccggcctccccgtcagccgccgctccaccaactcgggcttcggcaacgtcagcaatggcggaaggatcaagtgcatgcaggtgtggccaattgagggcatcaagaagttcgagaccctatcgtacctgccaccactcaccgtggaggatcttttgaagcagatcgagtacctgcttcgatccaagtgggtgccttgtctcgagttcagcaaggttgggttcgtctaccgtgagaaccacaggtctcccggatactacgatggcaggtattggaccatgtggaagctgcccatgttcggctgcaccgatgccacccaggtgctcaaggagctcgaggaggccaagaaggcctaccccgatgcctttgtccgtatcatcngcttcgacaacgtcaggc

SEQ ID NO: 9541 - DNA, 535 bp, Oryza sativa
  unsure (1)..(535): unsure at all n locations
  Clone ID: uC-osflcyp120f03b1
gttgagagctcggacaccatcgacaacgtcaaggccaagatccaggacaaggagggcatccccccagaccagcagcgtctcatcttcgccggcaagcagctcgaggatggccgcacccttgccgactacaacatccagaaggagtctaccctccacctggtgcttcgtctccgtggtggtatgcagatcttcgtgaagaccttgactgggaagaccatcactttggaggttgagagctccgacaccattgataatgtgaaggccaagatccaggacaaggaggggattcccccagaccagcagcgtctgatcttcgctggcaagcagctggaggatggacgcacccttgccgactacaacatccagaaggagtccaccctccacctggtgctccgnctccgtggtggtcagtaatcagccagtttggtggagctgccgatgtgcctggtcatcccgagcctctgttcgtcaagtatttgtggggctgatgtctacttgtngtctggttaatggaccatcgagtccgtatgatatg

SEQ ID NO: 9542 - DNA, 525 bp, Oryza sativa
  unsure (1)..(525): unsure at all n locations
  Clone ID: uC-osflcyp120f04b1
ggttattgcctgcataggggagctgttggaagagagggatgcagggaaaacttttgacgtgtgttttaagcagatgaaggcttttgcagacagtattacaaactgggcggatgtagtaattgcatatgagcctgtttgggctattggaaccgggaaagttgctactcctgagcaagctcaggaagttcatgctgctgttcgtgattggttgaaaaccaacgtgtcacctgaggttgcttgcggcattcgaattatatatggaggttctgtaaatgcagccaattgtgccgagctagcaaagaacgacgatattgacggcttccttgttggtggtgcctctttgaagggtccggattttgccactattatcaactcggtgacttccaagaaagttgcagcctgatgtaacccttctgtagaaataaatgacccagaggcagcgagacggctaccacaccatattgcttgatagagatacttcgtgttcaatcaccgngcttgttttggcacacgaggggataatgc

SEQ ID NO: 9543 - DNA, 421 bp, Oryza sativa
  Clone ID: uC-osflcyp120f06b1
atccctttctcttcccgccgccgtccgtcgcgcgcgggctcttgtcaacatggggaggagacctgcaaggtgctatcgccagatcaagaacatgccgtaccccaagtcaaggtactgccgtggtgtccctgaccccaagatcaggatctacgatgtcgggatgaagaagaagggtgtggatgagttctcccactgtgtgcatctcgtctcttgggagaaggagaatgtctccagtgaggctcttgaggctgcgcgtatcgcgtgcaacaagtacatgaccaagtctgcaggaaaggatgccttccacctcagggttcgggttcacccgttccatgtgctccgtatcaacaagatgctttcgtgtgtccgggcaaataggctccagactggaatgaggggtgcttttgggaagccacaggga

SEQ ID NO: 9544 - DNA, 359 bp, Oryza sativa
  Clone ID: uC-osflcyp120f07b1
tcggctttcttgatcaatggctttatggtggtggaggggaagacaccccactcccttggcaagtcctgatgatcatgcttcttggaactcctaaaggcccggcctatatctatgatgggctctctccgaaggctgcgcatggctacatgctgactaccagttgccttcttgaccaccaatgaaaggttccagcgtggaatcttggtgctgtgaagccatcgggctaagaaagcagtgatgttactacccgtgatacttgcaacctgaggttacatggcacctgagtaccccagcacggtgatgttaaatgagaggaggatggccaatagacgtggaggtctgattagggctactatagc

SEQ ID NO: 9545 - DNA, 375 bp, Oryza sativa
  Clone ID: uC-osflcyp120g01b1
tcttgttatggagcagctgccccctctgttgggtcggttgttgatgaaaagggggaggctgcaaacatggataatacaccaccaatggtagaagtgaagcctaaatacaggcacgacttctacaacagtgctacagaagttgtattgacaatttttgcaaacggtgttcctgctgcgaacgatggtggtgattttggataacaaatgttaagtgtgtcgattcgagtccctggaaaggagccgcaccattttcagcctcgtctgttttctaagatcatccctgagaaaagcagataccaagtgctatccacgaaggttgaaataagactggctaaagctgaacaaattacatggacctatatggattgtcaaaaa

SEQ ID NO: 9546 - DNA, 511 bp, Oryza sativa
  Clone ID: uC-osflcyp120g03b1
ggttatgttcagtgacacaagcaggcgggatcatgccgccatggccgtgcgggaggtcctcgccggcgacaggaaggtgggcaccgtgtccaggtcggcgaggaggaggaggcttgagctccggaggctcgctcggacagagtcggcagtggcggaggatgaccccgccaagagggtgcggtcggcgtgcgacagtttctacgactcgtcggagtcagctcacgtagctcccgagcccaccgcggaggtggcgagatggccggcgtgcgtgtcgcacggggcggtgtcggtgatcgggcgccggagggagatggaagacgccatcttcgtcgcggcgccgttcttggccgcctctaaggaagcggcggtggaggggagcggcgtctcggaagaggaaggcaaggaggaggatgaggggttcttcgcggtgtacgacgggcacggcgggtcctgcgtggcggaggcgtgccgggagccgatgcacgtggtgctcgccgaagaagtgcgggtg

SEQ ID NO: 9547 - DNA, 533 bp, Oryza sativa
  unsure (1)..(533): unsure at all n locations
  Clone ID: uC-osflcyp120g04b1
cgtaatgcgtggattatatctaagcattgaatgcatgaacaccttgaatgaaggtcttgtgttgcatcatgcatcggttgggtgtccaaaaccacaatggtcaaaatatctgagtttccttaagagcagacggttttcagagcttacaaaaccaaagcattggaacggtcaaacgattgaaaatagaaatattgtgcaacatgttgcatccttgaaagaagatcacaagctaccaaaaatacatacccttttctctactgaatgtacgccatattttgactggcaaactgttggactcatgcacagccttcgtgtaagcagacaacctggtaatattacacgcttattgagttgtagcgatgaggacttgaagaactataagggccacgaccttgctcccacacattatgttccatccatgaacagacatccattgacaggggactggtaccctgcaatcaataaaccagcagcagttctccattggattagccatgtagagaccgatgcttgaantcattgtatcttggatg

SEQ ID NO: 9548 - DNA, 524 bp, Oryza sativa
  unsure (1)..(524): unsure at all n locations
  Clone ID: uC-osflcyp120h05b1
gttataatcgttgacattgagaatgggggcctggatccggataagcttctcatcgnggacaattctcttccattcccagatcaccctgcatgatgttgataatttccacatcttctctgatcatcatcttcagaatcagaaaagattgttcttggatgcttgtatacatgcacagatgaagagtataagaggactctacacgcaatagttacatatccagatgaccacatagccgaataatccaatgtatttgagctgtttactccactagacactgtcagattccaataaaccagtataggtaacttaatctcctgagctctgtgttgttcccagcatggtgttggatgtgcagagatgcaaccatgctcgattctgtagagatgtagtatctaattgctctgcatttgtatattgtatactagctgtgtattatcggtgagatttctgtgaaattccttcagagtttgccttgctttgcttgctaagcaatggcatgattcatgtatgatgatggaatctgt

SEQ ID NO: 9549 - DNA, 98 bp, Oryza sativa
  unsure (1)..(98): unsure at all n locations
  Clone ID: uC-osflcyp120h07b1
ttttctacccaccccccccatctggtttttaaaccacaatcaaattccccccccgggtctatttaaaacaacnacggggggggaacaaaaaatctcca

SEQ ID NO: 9550 - DNA, 183 bp, Oryza sativa
  Clone ID: uC-osflcyp120h08b1
aaagatttgaagaccaacaataaggcaagccactctatcctcatattgctcctaggttctacaatgcgtggattgctcatttgcatgtcagttgcattatttgccggaggagacttgctgaacttaacccttggttggtacaccacagcagtacctcgatacttgcgcttttatgggcgtatg

SEQ ID NO: 9551 - DNA, 448 bp, Oryza sativa
  Clone ID: uC-osflcyp121a11b1
ttgctttcgcgtgggccgccgccgccgccttgtacggggacatggaggacgcggcgccgccgtcgtccggccccgggggaggcggcgccatggcggcgtacgacccgagctacgtgccggactcggtgaagacgttcgtgtcgcacctctaccgccacatccgcgaccgcaacgtgtacgagacgcaccagatgtacgagggcgggttcacccgcctgtgcgaccgccacttacgcgacacgccgtggccgccggcggaggccgtggcggcgcactgggacggcgaccacgtatttctcctcctataccgggagctctggttccgtcacgcccacgcccgcgtccagggcctcaccccggcgcagcgcgccgagtcgtgggacaactactgctccctcttcagcgtagtcctccagggcgttcttcaacatgcagcttcccaaccagt

SEQ ID NO: 9552 - DNA, 490 bp, Oryza sativa
  Clone ID: uC-osflcyp121b03b1
catggatacaatcatgaagatccttaatcgggctattgaggtcaaggcaatgataaagtcaggagacaggagcttccaacctttcaaagggaaatcaatggcaatgatatttgccaagccgtcaatgagaacccgtgtttcatttgagacaggattctttttgcttggtggccatgctatctacctgggtcctgatgatatccagatgggcaagcgtgaagagacccgtgatgttgctcgtgtgctttctggatataatgacatcattatggccagggtttttgctcaccaagacattttggacttggcaaagtatgcagctgtacctgtcataaatggccttacggactacaaccatccatgccagataatggctgatgcacttactatgctcgaacacattggtcgtattgaaaacactaaggttgtctatgttggagacgggaacaatattgtccactcatggcttcgattggctgctttatttcct

SEQ ID NO: 9553 - DNA, 419 bp, Oryza sativa
  Clone ID: uC-osflcyp121b05b1
atcatcgttaagcccacctcggagatctcgagtttgatggtcgtcgtcgtagctgtagaggtagttaattatctcgttttagatgagctcactgacggcggcgcagttccggtcgctgtttgagatggcaggaggggaggatatctcgtttctgtttggtgatgatgaggcggcggcggtggcggcggtggcggcgccggtggagttgcacgggaagagggggtgggggaggttggatcacggataagtccaatgtcgccgttgagggtacttggccccgctagctaccctaagtgcttccccgatacttctagacaagttcccagatgaacaaagaaactcggatgacctgtcgaccaaagcgaggtccaaagtcagcatattggcttcgggggttaagcttagcccatgtcactaag

SEQ ID NO: 9554 - DNA, 486 bp, Oryza sativa
  Clone ID: uC-osflcyp121b06b1
gatcgctccccccctaattcccgccttgccccctcctgggcatgtcgccgccggtggccggcgccgcctcctccggcgacgggccgccggggcgcccgccgcgcgagctctacaccatccctgcctcctcgggttggctccagtgggatgagatccacgagacggagcggcgggcgctgccggagttcttcggcggcgccggggggagcgggttcgggacggcgtcgcggaacccgcggatctacagggagtaccgcgactacatcatcagcaggtaccgcgaggacacctaccgccgcctcaccttcaccgaggtccgcaaggcgctcgtcggcgacgtcacgctcctccggaagctattcgccttcctcgactccttgggcctcatcaacttcttccgctccccctcccgccccgaggcgcagcagcagcagcggcagacggaggcggaggcccgtctggaggcgcccggggggctgcaggtga

SEQ ID NO: 9555 - DNA, 451 bp, Oryza sativa
  Clone ID: uC-osflcyp121b07b1
tggttccccaacggcgtcggagcctacgcagacctcatggcggagctcatcccgggcatgacggacggcacggtgcgcacggcgctggacacgggatgcggcgtagccagctggggaggcgacctgctggggcgcgggcggggcatcctgacgctgtcgctggcgcccagggacaaccacgaggcgcaggtgcagttcgcgctggagcggggcatcccggccatcctggggatcatctccacgcagcgcctgcccttcccgtccgcggcattcgacatggcgcactgctccaggtgcctcatcccgtggacagagttcggcggcctctacctgctggaggtgcaccgcgtgctccgccccgggggcttctgggcgctctccggcccgcccgtcaactacgagaaccgctggcacggctggaacaccaccgtcgtcgcgcagaaggccgacc

SEQ ID NO: 9556 - DNA, 195 bp, Oryza sativa
  Clone ID: uC-osflcyp121b08b1
accgacccgtaacgaacggctcgacccacgcatgcgtttttatcattactgaatatcctcaataccgcggggattttaatgcaatgtgggggttaagaaacatgcacttccaacctttcaaagggaaatcaatggcaatgatatttgctcaagccgtcaatgagaacccgtgtttcatttgagacaggactcttt

SEQ ID NO: 9557 - DNA, 466 bp, Oryza sativa
  Clone ID: uC-osflcyp121c02b1
tattcctttattcttccctcgcatcccttcctccgccgcagcgccggcgtcccgtagattggaaatccatccggacttggggatcgatttcgttccctccggttaacccatccggtttcttctcgattttcttgatatctatggagttggtagggactttcatagagggcgaagtatacggggcagtgtgaagttccctgttcgttcagccattcatacttacatttctcaagtcttcaacaagatttcacagctgtgtgacctgtattgtgtatttaggtttacaatgatgagtgcgaaattgctccggagcatgagcgtgaggaggctcctaggacagcaaagaaactcagttggtgggcacttagttttagcctttctaatgtttggtgtaaggtgctcatcttgtgtatataagtataactgagagtttggtgtctgttgcttttagagttttacagaaaat

SEQ ID NO: 9558 - DNA, 250 bp, Oryza sativa
  Clone ID: uC-osflcyp121c04b1
catgcacttacgtatgatacaatatcaacatggaggggggtttgctggatctatatgggggaacataaaaacaccgaaacccaatatggccattatgccgcacctagcctagcttgctgaggacatgggcaagagcagatctggccaacgtgaagaacttctccacattttcggcgcacttgatcttggctgcatggtcttccccactaatcgtggccaacagctcgccggtgaggtcttcgaggccctt

SEQ ID NO: 9559 - DNA, 403 bp, Oryza sativa
  Clone ID: uC-osflcyp121c05b1
cgcgccttcttcctcctcagctttgccgagacctggttgcctcaagccgtgttgcgtgctgcatgctctgaattgaagaactctcttgagcctgaccaggtatatcagaagtggagaagaagattggaagcatgagggaaatgggagagaagaggaggcgtggacaccttaaccctgctggttttgcaggagggttgcatgatcatgaggagaagaagaacgaggagcataagctagacatgagtggcatgtccatggatgccctcccacacctcaccatgtctcttggtcaagtcaccatcttggatctctctaacaacaatcttgagagcatcccggagtcaataatcgctcggctgctgaacgtggtggtgctggacgtgcggtccaaccagctgaaatc

SEQ ID NO: 9560 - DNA, 389 bp, Oryza sativa
  Clone ID: uC-osflcyp121c11b1
ttggttcttagcagcagtcgttgtgcagaggagagtgtcttttgcttcccaagttgccatccatggccgacaaggtgtacatgccggccgtcgaggtcaatctcggcccggacagcgacgagttctacatcagccctaacgtcaaagctcctggggtagcagggctgctggtgaagatcttcgtgtggattcttgagatgccgatcatcggctcaatggtgctttacatcctcaagaaggataatctcatcaacaagcttgtccaagatgctgaaatcccagagccttcactgttcacttccacacacagctgggaagacattccagagcagaatgtgtgcctgacgaagccggacctgtcaacgtcggagcgtgttcaggaagccgtc

SEQ ID NO: 9561 - DNA, 448 bp, Oryza sativa
  Clone ID: uC-osflcyp121d04b1
gggtgcgtttggcggtggcggtgtccagccgtgccacgggcttgcggtgttccacgtgggggtgaaccatcaggtgagcctggtgccggatgcggcggcggcggaggcggccggggtcggtaacggcgcggtggtggacgtgggcgacgactaggggggcgagggggcgaggcggatgctgatagtggtgacgacgacgcggggggagcggcggcggcggcgcggcgagctgttgcggttggcgcacacgctgaggctggtgaggccttcggtggtgtgggtggtggttggagcccgctgcggacgcggcagcgacggcggatgtgctgcgcggtacgggggtgatgtaccggcaccttgcgttccggcccgaggagaactttaccaccgtcgacgccgaggcgcacgcgcagtgcaacgccgagctcgcccacgttgagaagcaccg

SEQ ID NO: 9562 - DNA, 454 bp, Oryza sativa
  Clone ID: uC-osflcyp121d07b1
cggacgcgtgggagccaagccgcactcctggagtccaccactccgccgcgcaccactccccacctcccgacgagatggccaccctccgcctcacctccgtcaccctccgccccgccgcctccccctcgtccgccgccgggccgcggtccgccaacttcgcccgcgccgcggcgcgcgggttcccctcgctccgcctcgcgccgccgcgccgccgcggggacctcgccaggcgcagggccgccgccgacgccgtggcggaggggtacgcgacggcgctgtccgaggtggccttggagaacggcacgctcgaggcgaccgtgtcggacctggagaagctggagaagatctccgcggaggaggccatcgccgagtgctttgacaacccgacggggccgcgcgacgagacggcccagctcatcgacgagatcgccaagtcgtcggagctccaagcgca

SEQ ID NO: 9563 - DNA, 456 bp, Oryza sativa
  Clone ID: uC-osflcyp121e09b1
tcgagaccaagccctattccaggcaagaaaaagggaagattacaccaacaaacaaactagctagccaatggcctctttgtcctctttccggctcgccgtggcggtggcggcactgttggttgctggctcctgtgccactgagctcaccttcaaggtcgctgagggctctagcgccaaaagtctacagcttgtcactaatgttgccatctctgaggtggaggtcaaggagaagggcggcaaggactgggtggcgctcaaggagtcctcgtctaacacctggacgctcaaaagtgagtcgccgctcaagggccccttctctgcccgcttgcttgacaagaatggcggctaccgtgtcgtcgacgatgtcatccctgaaagctttacagctggctctgagtacaagagtggaatccaactctaagtaacagacatgtgtactctagttgggtcacatgc

SEQ ID NO: 9564 - DNA, 490 bp, Oryza sativa
  Clone ID: uC-osflcyp121f01b1
aactaagctcacattcactgatctcctgaaggctgcaaaaaattttgacaaggagaacatcatcggttgtggaggatatgggctagtctacaaagctgagttatctgatggatcgatggttgccataaagaagctcaatagagacatgtgtctgatggagagggaattcagtgcagaagttgacgcactctctacagcacagcatgacaatcttgtgccactgtggggttactgcatccagggaaactcaatgttgctcatatattcctacatggagaatggcagcctggatgattggcttcataacaggaatgatgatgccagctcgtttcttaactggccaatgcgactcaaaattgcacaaggagcaagccagggtatatcttacatccatgatgtctgcaagccctaaatagtccaccgtgacataaagtgcaacaatattttacttgacaaagaattcaaagctcacattgcagattttgggcta

SEQ ID NO: 9565 - DNA, 492 bp, Oryza sativa
  Clone ID: uC-osflcyp121f07b1
ctgccttccaccctgaaattgaggagcttgtctacagtgaagtcgagaacgatgaacacaagtttgtattgaaggacaagaacaagccaatcatcttctccatggctcgtcttgaccgagtgaagaacatgacaggtctggttgagatgtatggtaagaatgcacatctcagggatttggcaaaccttgtgattgtttgtggtgaccacggcaatcagtccaaggacagggaggagcaggctgagttcaagaagatgtacggtctcattgaccagtacaagttgaaggggcatatccgctggatctcagctcagatgaaccgtgttcgtaacggggagttgtaccgatacatttgtgacaccaagggagtctttgtccagcctgcattctatgaagcgtttggtctgactgtcatcgaagccatgacatgtggtttgccaacaatcgcaacatgccatggtggccctgctgagattattgttgatggggtgt

SEQ ID NO: 9566 - DNA, 479 bp, Oryza sativa
  Clone ID: uC-osflcyp121f11b1
gccccgtggtcaagccgtgccgcgtcgtcgtctccctcgcctttcccctccgctccgcttcgccgatcaagcttgcattgagacaaagaaatcagctttcatctgtttgagaccaatcaaactcaactagcaaatttcatgtctgatctcgacgtccagcttccatcagcttttgatccgtttgcggaagccaatgctgaggactccagcgttggtgctggatcaaaggactatgtacacgtgcgcattcagcagcgcaacggaagaaagagtctgactactgttcagggcttgaagaaagagtacagttacaacaaaatcctcaaggatctgaaaaaggaattctgttgtaatggtactgtagtccaagatccagagttaggccaggtcattcaacttcaaggtgatcagcgtaaaaatgttgcgacgttcctagttcaggctggaattgtaaagaaagagagcatcaaaatacacgg

SEQ ID NO: 9567 - DNA, 422 bp, Oryza sativa
  Clone ID: uC-osflcyp121g02b1
gcctatctcagtcggtcagtagttttcacagcttgttacttttgagcagcgattgcaacttccacagggtggcattcagtcgtccaccaactctgcttctcgcggcggcaacggaggaggtcgcggccatggtcagccaaaccagggtcaaaatctgaaccgtggtcgcggcggccaaggccgcggccctggtggcttcaccaacaaccaaggacgagatcaccccaagtgtcagctgtgtgacaaattgggccatacggtggtcaagtgctacaagaggttcgatgcttccttcactggcaaagagcagagtgctgctgctgatacctcctcctacggcgttggtaccaattggtatattgacaccggggcgacggaccacatcaccagcgatcttgacaagctgacggtgctggagaagt

SEQ ID NO: 9568 - DNA, 424 bp, Oryza sativa
  Clone ID: uC-osflcyp121g07b1
gccgccgccgaacacaccccccccaccccccctgcccacacgcctccgcctcctcgcaccgaaccgcctcggcgcgagcgcgagggagagagctcctcttctcctccacggcggctgcgcggcgtcgtcccgctccaccgggccgtcgtctggatctgatctaggagcggtcgcttcttcctcttccggaagccctttttatcagtcatgtacggacgcatgccaaagaagagtaacaataccaagtattatgaggtgcttggtgtatctaagacagcaacccaggatgagctgaagaaagcgtaccgtaaagctgccattaaaaaccaccctgataggggggggaccctgagaagttaaagaattggctcaagcttacgaggtcttaatgatcctgaaaagagggaaatctatgaccaatatg

SEQ ID NO: 9569 - DNA, 473 bp, Oryza sativa
  Clone ID: uC-osflcyp121g08b1
gctccggcggtcaataattaaaaaaaaaagaaaaaaatggctttcagaaaccatgacgctgccatggtcctcttcttcttcctcctcatggtgactacctacgccaacgcgcacggacacagcaagaagcccgaggagatcactcagggcgtttacggggcggcggcggcggtggcggccggccccggcggcacgttcgacatcaccaacctcggcgccgtcggcaacggcagggcggacagcaccggcgcggtgatggcggcgtggaggtcggcgtgcgccggcgccgggaagcagacgatcctgatccccaagggagatttcatgacgggggcgatggagctcaggggcccctgcaatggcgccgtgaccatccagctcgacggcaacctgctgggctccaacgacctcagcaagtacccgggcaagaagatgcccaactgggtcgaggtccgtcatgtcgacaacttcgt

SEQ ID NO: 9570 - DNA, 482 bp, Oryza sativa
  Clone ID: uC-osflcyp121g12b1
ccgtagcagcagcatcaggggaagggtctagagggttctagaagcttcttccgggatgaaggtgatcgagaagatccaggaggcggcggcggatgggcggacggtgttctcgttcgagtacttcccgcccaagacggaggaggggctcgacaacctgttcgagcggatggatcgcatggtggcgcacgggcccaacttctgcgacatcacctggggcgccgggggatccaccgtcgacctcaccctcgagatcgccaaccggatgcagaacatggtgtgtgtggaaacaatgatgcacctgacatgcaccaatatgccagttgagaagattgatgatgccttaacaacaataaagtctaatgggattcaaaatgttctggctcttaggggtgatcctccacatggtcaggacaaatttgttcaagttgctggtggattcgcttgtgctcttgatttggtacaacacattagagccaagtatg

SEQ ID NO: 9571 - DNA, 457 bp, Oryza sativa
  unsure (1)..(457): unsure at all n locations
  Clone ID: uC-osflcyp121h06b1
ggctactggatcgagtaggcggtggaggagatggagagggcgcggcgcgggaatcggcacccatcgtagagatgcgccccaccggcggcgagtgaagccggaaagcgggaggaggaggaggcgggacggtgacggttgcaaggtcgacggtctggtcgccgtcgacgaagacgatgggcagcacggccgtgggcggcgggggcggtggggggaggcacgtggacgcgcccgcgcagaccttcgcctgcgaggacgcaaggacgcaagcggccgtgactggcggcgccggtcgggagtagggtggcggcggcgtgcggggctacagggcgctagcgttgggcagcgcgaggaggggcgtcggcggcgcgcggggccccagggcgcaagcgaaggatgccgncgcccccatctctagtcttctacgccggcgcccccaactcgccaccgaggcagcctc

SEQ ID NO: 9572 - DNA, 465 bp, Oryza sativa
  Clone ID: uC-osflcyp121h08b1
tgttgctgtagtggtcagtggcaatagtggggacataggtcacactattgtgacaactgttggtggaagaaatgggcagccaaagcagacaattagttacatcgcagagcgtgctgttgggcgtggttcatttggagttgtcttccaggctaagtgtctagaaactggtgagagagttgctgtaaagaaagttcttcaagatgcgagatacaagaaccgggagctgcaaacgatgcaaggtctcgatcacccaaatgttgcatgcttgaagcattacttttgctcgactactgcgaaggaggagctatacctcaacttggttcttgaatatgtgccagaaactgttcatcgtgttattagacattacaataagatgagccaacgcatgccattgatttatggtaaactttatatgtaccagatttgtagggctttggcatacattcataactgtgtgggagtatg

SEQ ID NO: 9573 - DNA, 327 bp, Oryza sativa
  Clone ID: uC-osflcyp121h09b1
gcttaaacaaacccctctcactcccactaccatggatccttgcaagttccggccgtcgagctcgttcgacacgaagacgacgacgacgaacgcgggagctccggtgtggaacgacaacgaggcgctgacagtggggcccagggggccgatcctcctcgaggactaccacctgatcgagaaggtggcgcacttcgcccgggagcgcatcccggagcgcgtggtccacgcccgcggcgcctccggcaagggcttcttcgagtgcacccacgacgtcaccgacatcacctgcgccgactttcttcggtccccgggcgcccagacccccgt

SEQ ID NO: 9574 - DNA, 508 bp, Oryza sativa
  Clone ID: uC-osflcyp122a01b1
cccttttgtcaccaaggagagaagatgtttcataggtctgaggataatgagttccgtgttacaaggccccgttactcgatgcggcaaccacgtgtacccccacccccagctgtggccagaagtacggttggtccttccactcaacatgcgaattcttcttttgtggaaagtgggttgagagagagttctagtagggaagagcatactatgcagaccgaatatggacgtgtataccaagaggcatctcaccagcatgggacatcagctgaaggcattggtctcgatgaacagcaaaatggggatagggaaaaccctatattgggctcacaatcttctctgtctgtttcgagccctcctagttcacctccacatgtttcacatgatgagatggatgtttctggtgattcacctgcgttgccaacttctgctgatggtgatcgaactgtgatgtctgacattgaccatgcggcttcaaccttagatgcagccaacacaagcagaatcaata

SEQ ID NO: 9575 - DNA, 372 bp, Oryza sativa
  unsure (1)..(372): unsure at all n locations
  Clone ID: uC-osflcyp122a02b1
gggaatcgcgtttcgaggttttccttctaaaagcgtgggcgggcggatggccaccggggagctccactccgccggcgcgccagcgggcgtggcggcggcggatgagggggagggggaggcggcncangggttctcgttcagcatctggccgccgacgcagcggacgcgggacgcggtggtgcggcggctggtggacaccctgggcggggacaccatcctctgcaagcgctactgcgcggtgccggccgccgacgccgagccggacgcgcggggcatcgaggccgaggccttcgacgccgcggcggccagcggcgaggccgcggcgaccgcgtccgtggaggagggcaataaggcgctgcagctctactccaa

SEQ ID NO: 9576 - DNA, 415 bp, Oryza sativa
  Clone ID: uC-osflcyp122a05b1
cttgtttttgcaattctaggccttctttcagcacgcgtagatttatgaagatgcagaggggccccttcctcctaccaacactaccgttttaaggcgggacgtggattctttgctggaacctcccttagatgtccttctcgaccgccctggtgaaagtctttttgagaggctcatatgtgttttccatgcattacttggcaatggcaaaccaagttggctgaagtcaaagtcagtttctaagtcgaccactagaactccaagagatttccctgcatttgatagtgaagcagctgagggcttacagtctgcactagatcacctggagatgcctggaataatcaggcgaagaatccaagcagctatgccagttctcccaccttctcgccacccttgtatatcatgcccaccacctcag

SEQ ID NO: 9577 - DNA, 462 bp, Oryza sativa
  Clone ID: uC-osflcyp122a08b1
tcgttcctccgaaacccccacctccgcgagctgcgagtctctctccggcggcagaggcggcggcgacgaccagatggtgaagggacgcaccgggcagcgcgtgcggctctacgtccgcggcaccatcctcggatacaagaggtcgaagtcgaaccagtacgagaacacgtcgctggtgcagatcgagggggtgaacaccaaggaggaggtggcgtggtactgcgggaagaggatggcgtacgtgtacaaggccaagaccaagagcggcggcacgaactaccgctgcatctggggcaaggtcacccgcccccatggcaactccggcgtcgtccgcgccaagttcaagtccaacctgccccccgcttccatggggcgcaaagtcagagtcttcatgtaccctagcagcatctaaagactcttgaagtgtggaggatgttgcttatctctcttagattttacttc

SEQ ID NO: 9578 - DNA, 449 bp, Oryza sativa
  Clone ID: uC-osflcyp122b05b1
cacgtcttcgtcttcccgtggctcgcgttcggccaccggctccctgccctcgagctcgccggccgcctggcctcgcgcggcctccgcgtgtccttcgtctccaccccgcgcaacatcgctcgcctccgccgcccgtgcccgtccgtcgagttcgtcgagctgccgctcccgcgcgtcgacggcctccccgacggcgccgaggccaccaccgacgtccccgatcacatgtcatccgctctctggaaggcctccgatgggctcaccgcgcccttctccgccttcctcgacgccgccgccgccgcggggaacaaggtcgactggctcatcctcgacggcatgctttcctgggccgccgcctccgccgccgaccgcaaggttccctgcgtcctcatgatgccgtacacggcgacggcgtgcgcgcatttcggcgtgccggatgaggcgcggga

SEQ ID NO: 9579 - DNA, 466 bp, Oryza sativa
  unsure (1)..(466): unsure at all n locations
  Clone ID: uC-osflcyp122b07b1
tatttaccgaaaacgccgctacgctaccacgggcgcgctcccctcctcttcgccgtcgccgcctccgccgccgcgggctcgcatcgccgcccgtccccagtagcacggtttttgttctgctcttcactggtgtggttgctactctttgctcaacaatatggtttccttcgagatgaatgacctcaagaagattgggctaggcttgacaggctttggagtattcttctcattcctgggaatcattttcttctttgacaaggggcttattgcaatgggcaatattctcttcctgtcaggtttgggtttgacaattggtctgaaatcaaccatgcaattcttcaccaagcctaagaattacaagggtaccatctcatttggtgctggctntntcctggttctcattgggtggcccttcttcggcatgcttttagaggcatatnggctttgtgtactcttcagtggattc

SEQ ID NO: 9580 - DNA, 485 bp, Oryza sativa
  unsure (1)..(485): unsure at all n locations
  Clone ID: uC-osflcyp122c02b1
atcatactcgcgttttaaccatggccccctccgggcggctccatagcgtcgttctggctcgccacggctcttctcctgctggctttcgccagcggccagaccaccaatgccccacccccaccaccgcctccgaacacgcagtgccccggaggagtcatatcagatctcgcgaactacacgaggtgcatcactgcgatattgttcggacgccccaatcccgagcagttctgctgcccggcgatctcggagctccccaacaacgtcgccgccagatgcgtgtgcgccgctctcagggccaccggactatcaatcggtataaccgcgagcaataatgtcacaggtagcatcctcaagatctgcaacaaagctcccctggacctcttgactgtcaactgcagcagagcctagctgatcgcgatctggctctagctaataaagcatgcatgcactacgcgcgtactctacccttanatcgtaattatata

SEQ ID NO: 9581 - DNA, 342 bp, Oryza sativa
  Clone ID: uC-osflcyp122c04b1
aaaaataataaaaaaaaaaaaaaaaaaaaaaaaaagaagagttttaaaaaaaaaaagggggggtaacccccacaaaaaaaaaaccaaacggccccccccctacaaaacacaccttccctcccctcacctgcacccaaatacatttcctctacccaccccaaacacatttctcactccgcaaccctacacctctcccacttttaaaaccctcccgctcccccccctttttcccctttaccacacccccccttatccccctcccgttacaacacaaaacccccccccaatctccctttcaaaaacaatccccccttccattgtgcattagccccccccccttta

SEQ ID NO: 9582 - DNA, 532 bp, Oryza sativa
  unsure (1)..(532): unsure at all n locations
  Clone ID: uC-osflcyp122c08b1
tatttatgctgattattatggtgctgcgttgaatatattccttgccccactccagtttggtttcactgtcccgctgaactcgtgttgtggaagtgatgctccatacaattgttctccgtcaatattgtgcgggcaccctgggtctgtggtctgctctgacccatcaaagtacacttcatgggatggtctccacttcaccgaggcaacctacaagattatcattcaaggggtgctagggtcatatgccaaccctcctctttcagaaacttgtcggggtggagcatacaaagtctcacaacttcatcaatgtacagataacccaacaaacactgtaacgtatgattctatgagctcttttatttgatcctctgagctctagggcatgtagagtattaaggagcaatatagatataacaggccccatccccttggacacttctaaaggtgagaagagcattggttggngatctttgtacttctcaaatccatttttctgctacaggtagaaaagagaatttgagagcagaaattg

SEQ ID NO: 9583 - DNA, 418 bp, Oryza sativa
  Clone ID: uC-osflcyp122c11b1
tagttacttcgttggaggctgcaaaacagcggatgcatgaacaactgagcgctggaactgctgagatggtaatgctgtccactgaagaacctgagaagaagaagaagcatgaggcctcacacaaggagggtgcctccaacggaagtacaaaacatgtggttgaagaggctaaaagcagtccttatgatgatctggtcaaggagatgaaggataacttgagcaagggtgccaatgctgttcagctcaagggtctgatgacttcctcagcgctgccaccccaggatgctatgaatgctctttttgatgcactctatggcggcctcggcaaaagattcgccaaggaggttgtgaagaagaagaaatttctcgctgctgctgtgcctgatgaagcctcccagatggtcctgctgcaagcgct

SEQ ID NO: 9584 - DNA, 355 bp, Oryza sativa
  Clone ID: uC-osflcyp122d03b1
ctcgtcgtgagatggcgatgaggcgatgagatcatgggcttttcggtcgaatctagcagagcggcgagcaacccccacccactttgactccgatcctccccgcccccagcgcgatagcccatccgatcccaaattccggcgagatggcggtcagcctgtggcgcgcggtgatgggcgcggccggcggcggcggctcctcatcgtcgtccgcggccggcggcgacacggggggcggcgtggagttctggcacggcggggagcgcacggggtggctgaacaagcagggggagtacatcaagacgtggcggcggcggtggttcgtgctcaagcaggggcggctgttctggttcaagga

SEQ ID NO: 9585 - DNA, 422 bp, Oryza sativa
  Clone ID: uC-osflcyp122d05b1
cgcttcctccccctctcccacgaaagagggcgtcttacattgttgggggcccccgcatgggccccaagagggagctcaagtttgccctggagtctttctgggatgggaagagcagcgctgaggatttggagaaggttgcgaccgacctcagggccagcatctggaagcaaatggctgacgctgggatcaagtacatccccagcaacaccttctcgtactatgatcaggttcttgacacggctgccatgcttggtgctgtcccagagcgctactcatggactggtggagagattgggttcagcacctacttctcgatggctaggggcaatgccactgtccctgccatggagatgaccaagtggtttgacaccaactaccactttatcgtccctgaacttggtcccaacaccaagttctcctac

SEQ ID NO: 9586 - DNA, 475 bp, Oryza sativa
  unsure (1)..(475): unsure at all n locations
  Clone ID: uC-osflcyp122d08b1
caccactccatttctgagctcttctagtttgagtgagagagcagcagaagggagtagtgcaagatgccgatccgcaatatcgccgtggggagccaccaggaggtgtaccacccgggtgcactcaaggcggcgttggccgagttcatctccaccctcatcttcgtcttcgccggccagggctccggcatggccttcagcaagctgaccggcggcggagcgacgacccccgccgggctgatcgcggcggcggtggcccacgccttcgccctgttcgtggcggtgtccgtcggcgccaacatctccggcggccacgtgaacccggccgtgaccttcggcgccttcgtcggcggcaacatcaccctgttccgcggcctcctctactggatcgcccagctcctgggctccaccgtggcgtgcttncttctccgcttctccaccggcgggctcgccaccggcaccttcggcctgaccggcg

SEQ ID NO: 9587 - DNA, 453 bp, Oryza sativa
  Clone ID: uC-osflcyp122e03b1
gtttgtcgtcaccattcctatccttattggctatcaggtcgagtttcacatacatcatgtgaaggaggctgcgagggttacgaaaatcgtggcattgcttgacaaggctggcaaaccaagcaaaactgcacctcgatttcttaagtcaaagcagaatgcagttgtgcaggttaccttagacgctccggtctgtgttgaagaattctccaaatgccgagctcttggcagggcattcttaaggtcttgtggaagcacaatcgctgttggagtcgtaacgcgggtactcgggcaagatgagaactgaaagacctccgcccaacatctgaaaatttgaacgtatctgcagccgtgccctgctttggggtccataatattgtagttgactcaaaacggtattgccgatgagaagaagtttggcgacggcatttttcactgtgtgttcgtcgccatttc

SEQ ID NO: 9588 - DNA, 473 bp, Oryza sativa
  Clone ID: uC-osflcyp122e05b1
gattcctgacaaggagatcctcaagattgtgaaggagaacttcgacttcaggcctggcatgatcatcatcaaccttgacctcaagaaaggcggcaacggacgctacctcaagacggcggcttacggtcacttcggaagggacgacccagacttcacctgggaggtggtgaagcccctcaagtgggagaagccttctgcctaaaagctccctttcggaggcttttgctctgtcccattatggtgttttgtttcctcgctgctcagcattgtgattcttaacctgccccccgctgccatttatgcccatgcacgctactttcctaataataagtacttataagggtattgtgtttgaatattttacctaaaggaggaggaggatttggtatctgttattgcttaagcttatgtaatggtgaaaggaggaaagatgctacactactttgagaagagaaatgaaacccctatgtttg

SEQ ID NO: 9589 - DNA, 413 bp, Oryza sativa
  Clone ID: uC-osflcyp122e06b1
ccctctcgaggcttgcgctccggtccactccgatccggggccttcttatcgaccctatgaaacgagaacccatcccggcgtgccgttgtaggctacctgctccaccatccatccatacaagcgcggcgcgtattacagagaagagaagggggggagggcaaagcgacggctccgatgaatctgtacgggtctaccctatcttggaacgtgacaaggtgcgtaccagagctggaggaggccgggtcctacaacgagatcgcactcgctcgattactgcaaaggagagcacatagcccccgaccacctagacaggaacccctgtagttaggtgccggctctgcaaagaagagacttgtgtctctaggaatcacgtgccatcgcaagtgaggatgccgcgagaacaaaacagagct

SEQ ID NO: 9590 - DNA, 390 bp, Oryza sativa
  unsure (1)..(390): unsure at all n locations
  Clone ID: uC-osflcyp122e10b1
ttcttcatgctcttcatctgcatatgctttccggttgcagctgtgccttcattgaaacaaaataaatggttctattattttttttttgggggacgggaatatgaatttcgcatttgcattcgctgctacgttcttggaagaaatattttatcgcgtgtatgttcttccattggactggtggtttccgttgctctgagcctcggtccaagccgaccgcgatgtaatgttgtcatgttgcattcggtggtagcaacgttccgtttggtttttttctcctggacctggtaactactttctcagtccaaaatatttgttttttatttttttctaatactatttgcattgaaggtggnnnnaanaacatnaaaaaaaaaataaaaaaaaaaataa

SEQ ID NO: 9591 - DNA, 429 bp, Oryza sativa
  unsure (1)..(429): unsure at all n locations
  Clone ID: uC-osflcyp122e12b1
tcttgtttgagctcggccatggaggagtcactgggatctctgggctggcggtgctagaacagtacacatggtcgcgttgccgagggagctggacggccttttcagggatttgtgggatgcaagcaacancagnaacaanaaccgggcacgnntgattccagctatgttcagcatcatgtatgggaaggtggtgtctcnnnnccgacacccccagttctacctccgattctttcttcagtgatagtcttaatagctcttgtgggcagtcattgataggcatggtgtgtacttaactgcttattgaaatgatcaggtttactttccattcctaccggttcatacattggtctgctctaaaattttcttttattcaggggataggcagattgttttacaggcatggggcagaccggtttcctttttattttg

SEQ ID NO: 9592 - DNA, 457 bp, Oryza sativa
  unsure (1)..(457): unsure at all n locations
  Clone ID: uC-osflcyp122f09b1
cggacgcgtgggtcttctcattcccaactcatcgatccatcagtagctagctagctagctagctgcattgtccggcgagagagatagctgctgcagggggcggccatggggaggggcaagatcgagatcaagcggatcgagaacgcgaccaacaggcaggtgacctactcgaagcgccgcacggggatcatgaagaaggccagggagctcaccgtgctctgcgacgcccaggtcgccatcatcatgttctcctccaccggcaagtaccacgagttctgcagcccttccaccgacatncaaggggatctttgaccgctaccagcaagccatcggcaccagcctttggatcgagcagtatgagaatatgcagcgcacgctgagccatctcaaggacatcaaccgcaacctgcgcaccgagatcaggcaaaggatgggagaagatctggacgggctggag

SEQ ID NO: 9593 - DNA, 438 bp, Oryza sativa
  Clone ID: uC-osflcyp122f10b1
tagtcagtaagctagctaactaactacgtggcgtatggcccccaccgtgatggcctcctcggccacctccgtggctccattccaagggctcaagtccaccgccggcctccccgtcagccgccgctccaccaactcgggcttcggcaacgtcagcaatggcggaaggatcaagtgcatgcaggtgtggccaattgagggcatcaagaagttcgagaccctatcgtacctgccaccactcaccgtggaggatcttttgaagcagatcgagtacctgcttcgatccaagtgggtgccttgtctcgagttcagcaaggttgggttcgtctaccgtgagaaccacaggtctcccggatactacgatggcaggtattggaccatgtggaagctgcccatgttcggctgcaccgatgccacccaggtgctcaaggagctcgagga

SEQ ID NO: 9594 - DNA, 502 bp, Oryza sativa
  Clone ID: uC-osflcyp122g03b1
attttgtattattctaaagaaagaatcacagtcatggtttctcagtttcttggaagatgctcttgaagctggattcaagttcgagggccaaaacaagaacaccagagaacgagtaagagggcactccaagggcggagacgggcaaatcgcggttcggttgtcgcaactgaaggagacgagtaactggctcgaccagttgcatagtgaggttgataaatctcaagatgctttggttgaaaccattgagcagctgaagcagaaggtgtacacctgcttacttgggactgtcgagactgcggcatcagcacttgaagccaggtagatgctgtcacaggagctcagggctggttgtgtttattttttggcttggaaccagctgaagggagtactctgctgtaacagaactgcaacacacaatatgatcgatcctgatgccaaggagagtgaaggaatcgatcatctaagttatttattccacttgtacaagatgacgtatggagtg

SEQ ID NO: 9595 - DNA, 69 bp, Oryza sativa
  Clone ID: uC-osflcyp122g09b1
aataataaaaaaaaaaaaaaaaaaaaaaaaagagggaaaaatataaaaaaaaaaacgaaaaaaaaaaca

SEQ ID NO: 9596 - DNA, 303 bp, Oryza sativa
  Clone ID: uC-osflcyp122g12b1
tattatcgtcaacagacgtctcttgccaccggggggtttatcggcacgcagggcaagggcaccgcttgcgacaagaccgtccacttcatcgaccttctcaccgacaacggctgtccgtaccacaagacctgcttcaagtgcagccactgcaaatggattctctgcatgtgcaactactcgtccatggacggtgttctctactgcaagacccactttgagcagctcttcaaggagacggggagctacttcaataagttcgcgccagggtgcagatctacagaccatgaactggtcagggccccc

SEQ ID NO: 9597 - DNA, 489 bp, Oryza sativa
  unsure (1)..(489): unsure at all n locations
  Clone ID: uC-osflcyp122h01b1
gatttgttacagcacaaaaactcaaacaaaacggggggtattccccatctgtggagtcgcaaaaccctagcgcggcggcgatgtcgaacacgagggtgttcttcgacatgactcgctgcttgatctccttcttcctccctccatcttcgcttgtgagctcctccgcgcgtcgcgagccttactgaaacttctgatccctccgaaaccgagaaaagaggggaatctgtgaagagattttagcagcagtgcaatggaggtatttggaaaatccgtgattgctgagcccagcaatgtgatttacttgtccagtattcttaacacagaagggccaatccctagtcacaagtgtgacaagaattgccagaacgagcacgtctttggcaacatgtaccgttgcaaactgaccgggaccacgcacatctgcgacagaaactgtaaccagaggatcctttacgacaaccacagttngctcttgcgggtcagcgggca

SEQ ID NO: 9598 - DNA, 517 bp, Oryza sativa
  unsure (1)..(517): unsure at all n locations
  Clone ID: uC-osflcyp122h05b1
gctgtaggagatctcaatcaagttccaacaagaacgaaagtcaattctagatacatcagataaatcaaggaaagggggaacatggctccaaggtgctgtgcttaatattgctgaatgttgtctgttaccttggccttcccaaaacaggacagatgacagcacagctattgtttggagggatgagggtcttgacaatcacccagtgaaccgtatgtcactgaaggagcttcacaatcaagtgattacagttgctactgcgcttgataccatgttccaaaagggggatcgaattgcaatagacatgcctatgacatgcaatgcagtcatcatatatttggctattgtccttggtggttttgttgttgtgtcgatagcagacagttttgcacctcaggagattggtacacgcatgagtgtgtcaaaggcgaaagctatttttactcaggatttcataattagaggagggaagaaggttccactatacagccgtgtngtgcaagggacttcatctaaagct

SEQ ID NO: 9599 - DNA, 503 bp, Oryza sativa
  Clone ID: uC-osflcyp122h07b1
ttcttgagtgctccgctcggctcgctgcgagggtggtgctccgcgggtccacgcggcgttgccagagtgagagagagaggacgaggtcctcctccttccgcgtcccccgctcgctgcttcatccgcttcttcctccctccatcttcgcttgtgagctcctccgcgcgtcgcgagccttactgaaacttctgatccctccgaaaccgagaaaagaggggaatctgtgaagagattttagcagcagtgcaatggaggtatttggaaaatccgtgattgctgagcccagcaatgtgatttacttgtccagtattcttaacacagaagggccaatccctagtcacaagtgtgacaagaattgccagaacgagcacgtctttggcaacatgtaccgttgcaaactgaccgggaccacgcacatctgcgacaaaaactgtaaccagaggatcctttacgacaaccacagcttgctctgccgggtcagcgggcagctgttcccgctctcg

SEQ ID NO: 9600 - DNA, 525 bp, Oryza sativa
  Clone ID: uC-osflcyp122h08b1
tattacaaacccctctcactcccactaccatggagccttgcaagttccggccggcgagctcgttcgacacgaagacgacgacgacgaacgcgggagctccggtgtggaacgacaacgaggcgctgacagtggggcccagggggccgatcctcctcgaggactaccacctgatcgagaaggtggcgcacttcgcccgggagcgcatcccggagcgcgtggtccacgcccgcggcgcctccgccaagggcttcttcgagtgcacccacgacgtcaccgacatcacctgcgccgacttcctccggtccccgggcgcccagacccccgtcatcgtccgcttctccaccgtcatccacgagcgcggcagcccggagacgatccgcgacccgcgcgggttcgccgtcaagttctacacccgcgagggcaactgggacctcctcggcaacaacttccccgtcttcttcatccgcgacggcatcaagttcctcgacgtcatccacgccttcaagcccaacccgcgctcccatg

SEQ ID NO: 9601 - DNA, 391 bp, Oryza sativa
  Clone ID: uC-osflcyp123a02b1
cgtttgctttggctcgagcccaacacgatctttggggggggttactttaaaaaggggggggctagcgacagcatcacaggcaggaatggcggcgctcaccgtgtcggcttacccagctccggcgcccgcgttcttccggccggcagctgcggcctatcgcttctgcccgtatgcacaggttgcaggacctgctgccaattttagaacacgagtttgtggactgagatgtttgatcgctgcaaagctgaagttccggaagaccttgcagaggcatggatggcatcttcgaaggaatctagaagtccgagccaatgataaagtgcctgattgggtggaggctacaccactgactgagaatataatgtcttgggacgtacaactcgcgtatgat

SEQ ID NO: 9602 - DNA, 423 bp, Oryza sativa
  unsure (1)..(423): unsure at all n locations
  Clone ID: uC-osflcyp123a03b1
cttttacttgttcgccatttgaagagctcacattggtgggccaaacaatatggcgagtggggatctgtcaaaaccatgctgccatcggatttcaactccattttggatccctgagtgtagacagggtggagaggatttgcgctccagacaactgttttgtcggccgagttggtgaaccagatagagaaggtgcaggaattgggggagatcttgtagaggccgcatgcgaaatcgccatccggcgaatagagcacatcgtcttcagatagagatgcgcctggcgagaagaaatcatgtgctgatattcacagaagaggatgaatcatgagaatgagcatagaggcagagcttgcaaccatttttgctggagctggagagcangtgtttcgtctttcaagcgtctgctgttacttattataagaa

SEQ ID NO: 9603 - DNA, 327 bp, Oryza sativa
  Clone ID: uC-osflcyp123a04b1
aattctttcttaaatcctcctttgctatatatgggtggtttattttcttctatatggggagggattctttcccacgtagacttgttttatataaaaaagattcctctaaaacgcatacatgatgagatgaggacgagccctgcaaacaaccttgacggaatgcgattcatattacattcatcgacaaatctatctgacttgagtaaaacaacctatggcataaaaactgtcactgacaaacgagaagaaatcattgcccatattcttctgtcaactacaggtcgcacaccaaactcccataggttgaacttagaatctgctcgcgtt

SEQ ID NO: 9604 - DNA, 278 bp, Oryza sativa
  Clone ID: uC-osflcyp123a09b1
ttgggtcatctacacgggcggcatcaaccctcgctggtgtcattcgatagccggggcgggctcattcaacctgcccacctacgacatctagctcaccccattcctccgcctcctggtctacagcaacgcccactagatctggctcatcgtgttctacgggatcacctagtggcctcgctacaccaacctggacctttggctggaccccagcacggcggacatgcacgccacgctcggcgcgtaccagacacctggccttgaaatctaacgccactact

SEQ ID NO: 9605 - DNA, 148 bp, Oryza sativa
  Clone ID: uC-osflcyp123a11b1
ccacaaccaccaccaacaccttctgacctacatggtaatcaaacaaggcgaacacttgaggaacacacatcgcggtacatagcgcccaaaacaccccctgcagctcatacacctctaatgagagcaccagctgcagcaaatactcctg

SEQ ID NO: 9606 - DNA, 302 bp, Oryza sativa
  Clone ID: uC-osflcyp123b07b1
tcctaaaggcttacaagagaagcaaccatcgggaggatgatggccatggcgacgggcttcgcatccaccgtctccttctccgcccgcccgtccgccgcgagcgcggtccggccgtgcgccgccgcggggagggcgagggcgcgggcggcggcgggggagagcggcaagtggtgggcgccgctgctggggtggtcggggaaggccgactacatcgaggccccggcgccggcggggggggttactttatttttttacaaagggctttattgtatgggcaataatacttttctgacagggcgggg

SEQ ID NO: 9607 - DNA, 333 bp, Oryza sativa
  unsure (1)..(333): unsure at all n locations
  Clone ID: uC-osflcyp123b08b1
acccgctctctttgtccccccctctccaccaaaaanggagggctttatatatctgggggccttacaacctcaacatgtagacatccatactcctttccctcaccacctcagcccgtcagggaagcttgtgcagatcgatcacactctcaccggggtcggatccggccagacgtccctcgggatcaaacctgctaatggtgtatttatcgccactgagaagaaattgccttctattttagccgttgaaacatctactgcataagattcagctcattgactcctaacattggatctggtctacagtgggatgggtcctgatctccctgtcctttg

SEQ ID NO: 9608 - DNA, 428 bp, Oryza sativa
  Clone ID: uC-osflcyp123c01b1
gttttccttagattcagattgatgatgattctgagcggattgatgaagacagccgggggactgaagacgacttgaagaaaccagaacttccagttgttggggattgtgaggtgggagccacaaggaaggcatgcaagaactgtacttgtggccgggctgaggctgaggagaaggtggagaagctaaatctcacatcagaacagatcaataaccctcagtcagcttgtggcaattgtgggttgggcgatgcatttcgatgtggtacttgcccatacagaggtctaccagcattcaagccgggcgagaagattgccctgcctggcaacttccttgcggctgacttgtgatgatagaaaggaacatcggcgacagcagcagataggaattggcttctttaattcgttcgtttgtaggatgttaagttgctg

SEQ ID NO: 9609 - DNA, 354 bp, Oryza sativa
  unsure (1)..(354): unsure at all n locations
  Clone ID: uC-osflcyp123c06b1
ggctatgttgatgatatatcaatatataatatgctgtggatttttattttacaatttgggtatgtaccatctcaatggcctctgctcttaacacatatgtaataatctcttccctccctctccgaccggttttattgtaagagtactacaattatcgttgggtgaggatatgtgaaaacaaagctccggctatatacacacaagatatgtatctagagcatatctgataaattcgtcgacaatgnattaaaataaaagaacaactaaaatggggaaaggaaaaaccctaaattggctgaaaaatgtatacagaatttattcaagcccatataaaaaaactgcaacttatttcac

SEQ ID NO: 9610 - DNA, 202 bp, Oryza sativa
  Clone ID: uC-osflcyp123c09b1
tgactacgtcatctccaagtcgtacatctcctgcggtggtggctggctcatggacgtgttccatgtgacagaccagatggggcggaagctgacggacccgtcgctgccggagttcatccagcgggcgctcgtcccgtgccagcgccccggcggcaacgggccgtcgcccaggttcacgacgtgcctcggcagcgtgggcggg

SEQ ID NO: 9611 - DNA, 510 bp, Oryza sativa
  Clone ID: uC-osflcyp123c11b1
tatagctctgaggataatgagttcccttttacgagggcccgttactctatgcgggggccacgtgtacccccacccccagctgtggccagaagtacgggtggtccttccactcaacatgcgaattcttcttttgtggaaagtgggttgagagagagttctagtagggaagagcatactatgcagaccgaatatggacgtgtataccaggagggatctcaccagcatgggacatcagctgaaggcattgggctcgatgaacagcaaaatggggatagggaaaaccctatattgggctcacaatcttctctgtctgtttcgagccctcctagttcacctccacatgtttcacatgatgagatggatgtttctggtgattcacctgcgttgccaacttctgctgatggtgatcgaactgtgatgtctgacattgaccatgcgggtttaaccttagatgcaggcaacacaagcagaatcaatacctcatgcacaggttctcacttgggagatgat

SEQ ID NO: 9612 - DNA, 344 bp, Oryza sativa
  Clone ID: uC-osflcyp123c12b1
tgatttaactactaaggactgcagaaccgcgggagggttactatacaattagggtggcgagaacaagactaactccaaccatattaatggataacaggccctctaccaattacggaaaaccaagcgtcctggcaacactcagaagaaacacactgatcctgatgctattatgaatacagctgcacctgggattttacctacctcacgaaatgcaccagttagaaaagtggcagaatgtgatgtactatctgccaaacaagagtctgttcctgttgcagagcctgccaagcaagaggttcatagtcccaaacaagagagtatcccaaaattcaatactggatctt

SEQ ID NO: 9613 - DNA, 281 bp, Oryza sativa
  Clone ID: uC-osflcyp123d03b1
cgttatttcacggctattaagacctccaaatccgggggggatgaataccaaatcctggagcggtctcagcaactccttcccaatccttctactcatcttcctcgcggcggcagcatccgttccccagatcgccatgtgggacgagcagtctgagcaggcggaccccgcggcgcatgaggcgaccgggcagatcgtctacctggaccgccccgcgggcgccgaccccgaggagttccacatccgcaccctcgcccccgtcctcggcagtgaggaaaaggtta

SEQ ID NO: 9614 - DNA, 343 bp, Oryza sativa
  Clone ID: uC-osflcyp123d08b1
tatcttggatcccccagggagttacagagaagggagcttgctgtgtctgagaaaataactggacttgagaaaaagttacattacttgaatgttgaagagaataatctcagggagaagctacgcagattggaatctgagaagagtaatatagaggaagagatcgatcgtcttgagccagtaaaggaggagttggagacccgtattggtaaaaaggaacgggaagtgagagttcttgagaaaaaaataaatgagattgtgggccgtatttacaaagattttagcatgtttgtttctgtgaattaacatcttttatatgatatagaggtttttttctcctttcttt

SEQ ID NO: 9615 - DNA, 87 bp, Oryza sativa
  Clone ID: uC-osflcyp123d09b1
ttacttcgtcatctccaagtcgtacatctcgggcggtgtcgaatgactcatgggcgagctcaatcaaacagaccataccaggccttc

SEQ ID NO: 9616 - DNA, 259 bp, Oryza sativa
  Clone ID: uC-osflcyp123d10b1
ttagctactgaggtaccactccaccaagagcgggggggtgctgaccagcctcaaggattacgtgacgaggatgaaggaaggccagaacgacatatactacatcaccggcgagagcaagaaggccgtggagaactcccccttcttggagaagctgaagaagaagggttacgaggtcctctacatggttgacgccatcgacgagaatgccgttggtcagttcaaggaggtccagggcacgatgtttctctttgccacctag

SEQ ID NO: 9617 - DNA, 172 bp, Oryza sativa
  Clone ID: uC-osflcyp123d11b1
tactacaccgtaaccgccactttggattccagggtgggtacatccaatgccgaggggaatccatctccccgtctcggactagcgctcctcttcctccctcgcggtgtctcggatcggaaatggctatcttggtgcatcctttctatgggatgtgtaacctatgtgatgtcta

SEQ ID NO: 9618 - DNA, 279 bp, Oryza sativa
  Clone ID: uC-osflcyp123e06b1
agcccgcactcctctaccaccattccccgcatctcggaggggggggcttttttaaatacccaggggggtaatacaattagaaacacataaaccctaccctttatcctgaccctcatatttctgccttcgccctgcaggttccacatccccccacgaccatgatgacctgcgaatcccaacttcattcccgatgaaattacaccaacccgagccactcacggattccaccgctgccataaccaatcctagcaggcttcctcctgtcccgatccaccaacc

SEQ ID NO: 9619 - DNA, 534 bp, Oryza sativa
  Clone ID: uC-osflcyp123e10b1
tgttttctgcagaaggcatcagaaaaatcagggcaggcaaaaaaatgggctgagccacatgtggagactgctaaaatgaaatgggttccagtgaaggaaaaattggttgtcctcaagaaaaacacagaaccttatgtacaaaaggtctcatcaaaatccgtggaggtctatgaggcatcaagggatgctgttaaacctcatgttgcaaaggttaaagagtttgctgatccctacttccaggaagccaagaagttctccaaaccctacattgatcaagttgctgaggttacaaagccacatgttgagaaagttagaactactcttaagccgtatactaaaagagcagttcgtgtgtatgggtcatttcttgaatcagcaaccacataccatcggcaggcgcaatcaaccatcttagattacctacaccaacatgaggtatccaaatcacttgcgacgaaggagttggttaggttcctggcttctgctttgctggctatccctgtctatattatatacagggcttctatggaagca

SEQ ID NO: 9620 - DNA, 416 bp, Oryza sativa
  Clone ID: uC-osflcyp123f03b1
tccacgcgtccgtgctgttattcttggtgtctcgtcgtctgtctggggggtggtgtttttatgctagagggtcgatctgattcaaaggaggtgctaaaagcttcaatacctgaaaatttagtttgtgaattttaatttcgttgaaatgctgatacaaattttatatttattgtatgtatacctataattttttattgtttattaaattaaattacttactatatttttaatctattatattacttcatatatatactagttaatattttttaaatctattttatttttttattaataatatttatcttttataacataatttaattttcttatattttaattttataatttattttatttttttaagaatatttttaaaaaattttactttacctctaaatttttatatattatat

SEQ ID NO: 9621 - DNA, 254 bp, Oryza sativa
  Clone ID: uC-osflcyp123f07b1
ttattagcataggctcatctagcatgctagagagatcatctgaactacatggcgggggctgcaagaactcccaaataatccattatctgctcccaccatcttagaggactcaggccattgatccctttcctctctcgatatatcttcttgaaggtggtccctcataccacttcattgaccgtgactagacaaattcttttcagcattaatttgggatccaatattaagctcaagctagcttagcttagcttctc

SEQ ID NO: 9622 - DNA, 361 bp, Oryza sativa
  unsure (1)..(361): unsure at all n locations
  Clone ID: uC-osflcyp123f08b1
tcttttcagaagctttcaaaccctaggcgagggagagtggtgagacgccatggacgcggacactgtgtnaaagttttcccatttctttattcaagaactgattgtgtttgttgattgattttttttttttcttgataaaactttttgtgtttttgcatgcatgcaacttaagtgagcattcttgataaatttttttgagcttttaatttgggatctatattttaatatatctatcttttcttatcttttcatatgctactattatctaacttgatcatatgtttgcttataacttattttattagttatttttaaaattactagctttatggcttttaagatcatttaacatgcttttaat

SEQ ID NO: 9623 - DNA, 507 bp, Oryza sativa
  Clone ID: uC-osflcyp123f10b1
tgtgtaataccaagagagaaaaaaaagagagaataatttcccccttttctctcttccgtgccggagaatcgatggagattagggcacaactattccttgagatgttggcacatagtctagcaatcaatccttcaagggctgctcaatgtccggttacttcgagggcgtcgagtgcacccttgggacttgtctcttcgttggccttcagcaggggacgtaaggaaagtgttaaacttttcatcaatgtggatagatacacaaagtatagtactcctttctgttatgcaccgcgaaacaccagaatcacaccacttgctactgcatcatttggtgacacagttgactcgtcaactcccatctttcctagaatccatgtgaaggatccctatcagcgacttggaaatagcagggaagcatctgaagaagatattcgagctgccaggaattttctgaataacaagtatgcagggcataagccaagtgttgatgcaattgagtctggccatg

SEQ ID NO: 9624 - DNA, 450 bp, Oryza sativa
  Clone ID: uC-osflcyp123g01b1
ccgtctttttgaaagaaaccacctgatcgagcccggatcttttcagccgcatgagaggaggacgagtcgttcgttgtgcagcaggaggcggcggcgaaaatgtcttggcatacttacttttactatcacctgttttgctagatcgagggcctccacctatctttcgcgtctttgtttgccatttcttgttcccttctctgtttcattttttcacctcttttttttttattctttttcctttcttactttttatctctttttcttctgctctttttcctttatctacttcctttttttcttttatatttttctttttcttttcttttctgtctaattttttgttcttcttttttacctttttatttttatatttttctttttttttcctatcttccttgtgtgtatagatgttatttctcattttctttctctcatgacttttcttttttt

SEQ ID NO: 9625 - DNA, 146 bp, Oryza sativa
  Clone ID: uC-osflcyp123g05b1
ccggccttcccggctggacccacccacgcgtcctgactcatcagcttcaaacgcccacatcacagggagggtttcatatcaacagggggccatggcgtccacgctgaccaacgtcggcctgtctaccccggcggcggcggcgtttc

SEQ ID NO: 9626 - DNA, 161 bp, Oryza sativa
  unsure (1)..(161): unsure at all n locations
  Clone ID: uC-osflcyp123g06b1
ccctanttaaaaagaaagaaattaaaaagaaaatcacggggcgtgagcttgcagagacagcattggtgagagttgaagccaatcacgcctcgcgggggcgccgcaccctggaggagatcctgcagatgagagccccctaaaggatgcagttccactacaac

SEQ ID NO: 9627 - DNA, 258 bp, Oryza sativa
  Clone ID: uC-osflcyp123g10b1
ctcacacaagagtcattccctattgcattatgtggtgttacaatacttggttctcataatgtgttggtagctttagatgagaccaggtcagatctatttcttattgagctcaagggtgagagcatcagctacaacaaggtccatattttagatcttgttcaagacttatctggaacagtcaaacttctacctttaatgttcaatggtgtcatagcttttgcaagctccttattctgttttcctttttgtattttaatg

SEQ ID NO: 9628 - DNA, 201 bp, Oryza sativa
  Clone ID: uC-osflcyp123g11b1
gtcgcatacagctacaaacgcccacatcacaggcggaatttcgcatcaacaggcagccatggcgtccacgctgaccaacgtcggcctgtctaccccggcggcggcggcgttcttcttcgttaggccgatctcccgttttggcccgtgatttattttctttttgtcttcttttttttgtttctttttttcttattcctattt

SEQ ID NO: 9629 - DNA, 150 bp, Oryza sativa
  Clone ID: uC-osflcyp123h02b1
accgacccggaactgtaccggctggacccacgcacgcgttctgactctaagttcaacattggcgatgctggaggtgacatgagtgtctacttggggtacaccaaggctgacaagaggctcactgccttgcaccctgaaatttgaggagct

SEQ ID NO: 9630 - DNA, 177 bp, Oryza sativa
  Clone ID: uC-osflcyp123h08b1
tcttattctaaatcaacaaaaaaaaaacaaaagggtggttttaaaataaaaaggggggtcaagcatcccatctgtgaagatcatacttgggcgccccctctagaggacataggcttatcttcgcccttagtacaaatgaggaatttttgacccgcctcccctaaaacttaaattatg

SEQ ID NO: 9631 - DNA, 388 bp, Oryza sativa
  unsure (1)..(388): unsure at all n locations
  Clone ID: uC-osflcyp124a04b1
cagttatttttttctttttcatgtttgcattntcagtttagttttatatatataacggtgtgggtaaaacaatgattttttaaaatgaaactctaatatcctttttgcatacttctgttaaaaaaacaaaagattattgtgcaatcctctctttatatttagtaacttctcctttttgaattcccgtatgattgtaatgctacatttaattctgcaaatcatacaacctactggcaccaggctacttatctatagggaatcaatcaccacaagcttatctatttgtactgcatagatccagcacaatccttcagaaaaatgtttcagttaaaagttttgccttacaagggacaatattgacatatcccacatggctgcagaaactacc

SEQ ID NO: 9632 - DNA, 516 bp, Oryza sativa
  unsure (1)..(516): unsure at all n locations
  Clone ID: uC-osflcyp124a06b1
ccaaaattcccttttctacccacacctccnntcctactttacacacacaaacactcttcaacaagaggcgggtgttaatataaactaaccatcgcgaaacctaactacccattcaacaaaagatgacctccctaattagaccaaacaccggagctgcacacattgtatttccactttttacctcgactacttcgcggctgtgagggctaactttcctactactcctccctacatctctgacaatatgtcctatagcatcaacaaagccaaagaggcttgcacgtatgacacctcaagcggccagtgcactgcatcgtgcaacaatgtggaggatcttaacacttctgcaagccacgcgcccgacaaactcaaggatacctcctacccgctcgaggcctacttcaatgacaacccctataccgactaatgccctacctacgacaacttattcttaccattatatgtttgctaatccctctgtaattaattataagttacctgctttaaaagattatt

SEQ ID NO: 9633 - DNA, 392 bp, Oryza sativa
  Clone ID: uC-osflcyp124a10b1
tttccttttctaatctcaagtctctatctcggggtccgcgtatatccactcggggtgggcgtaattaaaatcggaatcaacggtttccgaaggatcgggaggctcgtggccagggtggccctccatagcgaggatgtctagctcgtcgccgtcaacgaccccttcatcaccaccgactacatgacctacatgttcaagtactataccgtgcacggccaatggaagcacagccacatcaagatcaaggactccaagactctgctcttgggcgagaagccggtcaccgttttcggcatcaggaaccctgacgagattccgtgggctgaggctggtgctgagcatgtcgtgcagtccaccggtgtcttcactgaccaggagatagctgctgctca

SEQ ID NO: 9634 - DNA, 206 bp, Oryza sativa
  unsure (1)..(206): unsure at all n locations
  Clone ID: uC-osflcyp124a12b1
ttgcttccccatccatccattctcgcacaagattccgtcttttcatacaccaatctggcgaaatctccgtctaattcaagaaaagatgagctgaggaatgagaggagaatattggtgttgcgaattgtggattgggaatttggagtttggattacgaggagggggaggaggatctntttnngctactcccttcaagaacggggtcc

SEQ ID NO: 9635 - DNA, 368 bp, Oryza sativa
  unsure (1)..(368): unsure at all n locations
  Clone ID: uC-osflcyp124b02b1
aacctaacgtcctccccaaacagacccaaaacccggagnaggcatatttgaaataacaggggggtcaaaaaacacgcactagacgctcctttacccagcaacaacccaaggccacgcctacggcactcgccataccgcgcagcaccgcaatgcacatggacacaagaccgacacaccccacgctcgtggcgcactagcgaagaacccccagcatatccaagagcacgcacacacaaccggatgcccaacaacactaccaagagagaatgagcccgagcttctacgagctgctgccctgggcgccgccgccgcaaagacgcccccaggcgtccccgacccactgaatgcactgcacgcggccgggaagg

SEQ ID NO: 9636 - DNA, 447 bp, Oryza sativa
  Clone ID: uC-osflcyp124b03b1
ggattatttcacggtggaacgcgtacttacccacagggtagttgcattccatggggcgatgggtggcgtgcacctcgccaccggtactcacgctggccctgctcgcgtcgtgcggtgcccttctcgccacctccatgctcccggcgcgtgcgacggcgggcagctgcttggacgtcggcgacatggtgatgatggacaggttccgcgcttggcagggagctcacaaccgatcgtacccgagcgcagaagaggcgctgcagcggttcgatgtgtaccgccgcaacgcggagttcatcgacgccgtcaacctgcgcggcgacctcacttaccagctcgccgagaacgagttcgcagacctcaccgaggaggagttcctggccacgtacaccgggtactacgccggcgatggccccgtggacgactccgttatcacgacgggtgccggag

SEQ ID NO: 9637 - DNA, 415 bp, Oryza sativa
  Clone ID: uC-osflcyp124b06b1
catcttgatctcatataacttcaagccagctgatagggagagggtccagtctatagggagtgttgctaagcaaaatgccatagaaaagcctcaaagtgaaattagtgcaactgaggcttcctttaaagatcataaatatgttgagtgccttcaggagagcattgatggcgggaatagcccaggagttgatccatgtaatagctgtcctaaccatgaccagcaaatagccataagtgaatctgatttaatccaaaggggcagcaaaacacctctccacagcagcgtcagtattaatgtggagtctgttccactggaatctgatattgtagctcgacgcaccctttcagaaggacagtttcccaggttatgggatggttctaatgcgcttgatgccaaatggacaggtgaaaatgat

SEQ ID NO: 9638 - DNA, 392 bp, Oryza sativa
  Clone ID: uC-osflcyp124b07b1
tatctatccctagctagctagctagctaagcgaggaggcacccttgacgtcggctgggagctcaagctcgctcgccgtggcagcgatggtggccgtcgtcctcctcctcctgggtgccaccggcacgtccacccaggcggggcgcctcctcgacgaagaactccccaccggcggcatcccggggatccccggcgtccccggagtgccggcgggcgggcccgggatcccggggatccccggcgtgcccggagtgccggtggttggccccgggatcccgttcgtgccggtgatccccggcgtgccggtgatcgtgccgatcatccccggcgtgccgatgatcgccggcatgacaaccctgccagtgccgccatttgtgccgccgattgatcccg

SEQ ID NO: 9639 - DNA, 513 bp, Oryza sativa
  Clone ID: uC-osflcyp124b10b1
tctccaatccaagctccaacaatggctaaacggtccgtgctcctccttcttcctctgctcatcttctccatcggcgcggctctcgcccgcgccgatctcatgctggacaggttcgagcagtggatgatcaggcatggccgcgcctacaccgacgccggtgagaagcagaggaggttcgaggtgtacaggaggaacgtcgagctcgttgagacgttcaactccatgagcaatggctacaagctggctgacaacaagttcgccgacctgacgaacgaggagttcagagccaagatgctggggttcagacctcatgtcacgattcctcagatttcaaatatctgctccgctgacatagcaatgcctggagagagcagtgatgatattctgccgaagagcgtaaattggaggaagaaaggggcagtggtggaagtgaagaaccaaggagactggggttcttgctgggcgttctccgggtggcggcgatagagggatcaccagatcaagacggcgagc

SEQ ID NO: 9640 - DNA, 302 bp, Oryza sativa
  Clone ID: uC-osflcyp124c09b1
gatctctgtaaatatgaataaccgcgactggtatcgtcaagttgcttttgggttgcagtagttctaatcttgatgttctgctgggaatcggaagatgttatgcagtatgcgtattgttggggtgtaaccgtgtaagcgcatctgaaatgaagttacgggcgatggtaactgggaagcaacttacgtgtgatttgctacaggagttcttttttccctaatttcatggatataccggatgcctttggcatgggggtgagactgttaatgtcttcttcaatggtggcttatttccgccttgtttt

SEQ ID NO: 9641 - DNA, 311 bp, Oryza sativa
  Clone ID: uC-osflcyp124c10b1
tttcttcttgctgatgataaaactgccaaggggacagcattgatagtggctgagtgctccatctcgtgcttgctctgaggggtggtcagtagatgtagtttccatgcccgcattatctctaaagggagaagcatatttgctattctatttctatctgtagttgctgcagacttatagctatatttggtaggtttattgaagtcctatgcgattggcgcattgtgtattggaatcaattgtcatctgtactggaaaggaaatattggaactaagttaagcagtagtttatcaaaaaaaataaaaaaacaaac

SEQ ID NO: 9642 - DNA, 472 bp, Oryza sativa
  unsure (1)..(472): unsure at all n locations
  Clone ID: uC-osflcyp124c11b1
taatctcccacatcacacgcagaaatcctcatgaacggccagccatggcgtgcgcgctgaccaacgtcggcctgtctaccccggcgggggcggcgtcgtccctcgttaggccggtcaccggagctggacgcgtggtgtttccccgtgttggccgcggcgggttcgcggcggtgagggcgagcgggccggcgactcctccggacatctcggacaagatgtcggagagcatcgacaaggcgaaggaggcgtgcgcggaggacactgcgagcggcgagtgcgcggcggcgtgggacgaggtnggagtagctgagcgcggcggcgagccacgcgcgcgacaagctcaaggagacctccgacccgctcgaggcctactgcaaggacaacccggagaccgacgagtgccggacctacgacaactgattcttaccattatatgggtgctaatctctctgaattaattataagttactgg

SEQ ID NO: 9643 - DNA, 377 bp, Oryza sativa
  unsure (1)..(377): unsure at all n locations
  Clone ID: uC-osflcyp124c12b1
ttccatcctcgtccattgtcccgccggaccagccaggatcgatgtgtccctctcactggggcantcagttccggtggcgccgttgcaatgggatcggctggtgtacactgcacttattgacagcaaggacaactccaccggtgtgtttgcaaaggggatgaacttccgtccgggtcgtctaggtgtgccatcacggtacgagtgtgtctttggccgagacttttcgaagccaaagcttggtggcacctccccaggggcttctgctgctcaggagaattccgngtggtgacaccagtctcgattcgaccgtacgctctgatgactaccggcggcaaaaacagcgcaaacaatgatgacacgcctatgtgtggtctcca

SEQ ID NO: 9644 - DNA, 361 bp, Oryza sativa
  Clone ID: uC-osflcyp124d02b1
tcccggtcacccacgcgtcgcagtattttaatctttttcatgtttgcatggtcagttagttgttatatgttgaacggtgtctaggacaatatttttaaaagaaactctaattccttttgcatacttctgttaaaaacaaaagatattgtgcaaccttctttatatttagtaacttctcttttgatttcctatgattttatcgttcattaattctcaaatttactcctattttccagtctctttttttttttattcacttcctcattctttttttttttacaccatttatctttacttttccctatttactttttctcctttttatgcttttttttgttatattctctttctttttcatttc

SEQ ID NO: 9645 - DNA, 464 bp, Oryza sativa
  unsure (1)..(464): unsure at all n locations
  Clone ID: uC-osflcyp124d06b1
gagtcccttaaggccggcatcatcgacacgcagtggctgcgtgtatgtgcaagggtgctgcctacaccaagatcaccttccacatcgagaagggctccaaccccaactaccttgcgctgctagtcaagtacgtcgctggtgatggtgacgtcgtggaggtggaaatcaaggagaagggctccnaggagtggaaggcgctcaaggagtcatggggtgccatttggaggatagacacccccaagccgctcaagggccccttctccgtccgcgtcaccaccgagggtggggagaagatcatcgccgaggacgccatccctgatggctggaagggccacagcgtgtacaattccaacgtccaggccaagtggagcattttaagcaaggaagaaaccagcgtacgtacgatccagcgctggctggctatatatatatatatatatatatatatacatatacttatatac

SEQ ID NO: 9646 - DNA, 140 bp, Oryza sativa
  Clone ID: uC-osflcyp124d07b1
gtgtgctaatcctacccctaccggatcggggcgggtctgaatttaaacggggggagggttaaaaaaaacataaaacagaaaaaaaaagggaaacaattatttacgaataacatccaacaacattaaaaaaaaaaataaaa

SEQ ID NO: 9647 - DNA, 325 bp, Oryza sativa
  Clone ID: uC-osflcyp124d08b1
aactaatccttcctcccagccaagatctttgttcctcctcctcgtcttcaggactcaattcgtcttctgatagcttagcttgattggggtgggtgacaatgggaggtggcaaggacaagcatgacgagagcgacaaggggctcttctctaacatgatgcacggcgttgccggcggccatgggtatcctcctcaccagggataccctcctcagggctacccgccgccgccgggagcgtacccgcctactccgggggcttattcccctcctactgggagtaactctccacctcttgggtcataccctccaacagcatgagtaactct

SEQ ID NO: 9648 - DNA, 202 bp, Oryza sativa
  Clone ID: uC-osflcyp124d09b1
tgaattcgagagaagagaactcggtgcaatgcgtagagattgttagacactggatgcaggcaaccctgacagagaacgtaggcacggtaagtgccctctcacaccagaagagggtgggctcatgctccgagcattgggatttgggaagggtgtgcacatatatgttgcatcatgggaggggtatggtggacagtcgattttt

SEQ ID NO: 9649 - DNA, 323 bp, Oryza sativa
  unsure (1)..(323): unsure at all n locations
  Clone ID: uC-osflcyp124d11b1
tgggtggcgcagtgggcgacggcgcagagggcgctggacgggctcaaccagtcgtccaccagctccgacctcttcaacgacaagaccggctaccgcgagctctccgagatcgccgagcaggccgcaaagcgagccgaggtcgccagactgagggagttgcacacgctcaaggggcacgtagagtcggtggtgaagctcaaggggctcgacatcgacacaatccaacagagctacaccgtgtaacatacagcatgccatcgatgtgttgttgtntgttgntcatacctgtgttttacttcttcccatctgcnagttatttggag

SEQ ID NO: 9650 - DNA, 535 bp, Oryza sativa
  unsure (1)..(535): unsure at all n locations
  Clone ID: uC-osflcyp124e03b1
aggtcaagttcaagccaatcatcttctccatggctcgtcttgaccgagtgaagaacatgacaggtctggttgagatgtatggtaagaatgcacatctcagggatttggcatacctagtgattgcttgtgttgaccactgcattcagtccaaggacagggaggagcaggctgagctcaataagatgtacggtctcattgaccagtacatgttgaaggggcatatccgctggaactctgctgatatgaaccgcgttcgtaacggggagttgtaccgatgcttttgtgacaccactggtgtctctgttcagcctgcattctatgaagcgtttgaaccgactgtgatggtagccatgacatgtggcttgccaacaatcgcaacatgccatggtggccctgctgagattattgttgatggcgtgtctggtctgcacattgatccttaccacagtgacaaggctgctgatatctnggtcaagctctttgagacatgcatgcaggattcaacctactggngacatatttcacagggaggtct

SEQ ID NO: 9651 - DNA, 468 bp, Oryza sativa
  Clone ID: uC-osflcyp124f07b1
cgcttctctcctcctctaatctcaagtctgtgtctcgtcgtcctcgcatctccactcgccatgggcaagattaagatcggaatcaacggtttcggaaggatcgggaggctcgtggccagggtggccctccagagcgaggatgtcgagctcgtcgccgtcaacgaccccttcatcaccaccgactacatgacctacatgttcaagtacgataccgtgcacggccaatggatgcacagcgacatcaagatcaaggactccaagactctgctcttgggcgagaagccggtcaccgttttcggcatcaggaaccctgacgagatcccgtgggctgaggctggtgctgagtatgtcgtggagtcaccggtagtcttactgcctaggaaaaggttgctgttcacattgaacagtgtcgccaacaatgcaacatgataccctctcttgccttaccattcgtttttggcttttttt

SEQ ID NO: 9652 - DNA, 285 bp, Oryza sativa
  Clone ID: uC-osflcyp124f08b1
tggagtaagaaagacttactttcgttgatgaggtccagtgtaccgtgctggaagtcaaggttgttgaaggtcatggtactacagttgatgttgtgttgctcaacggtctactccatgaaggatatcaaatatttgcgtgtaggatgcactgacctattgaacaacatatagtgccttgttgacaccataccctttgatgtttcttcattaaatgttctcattccaatatctttagatgattttagtttttcatggattcaatatttcatcttagtggctttgtat

SEQ ID NO: 9653 - DNA, 252 bp, Oryza sativa
  Clone ID: uC-osflcyp124g01b1
agcctttcgatgcgtcttctccccttcttctcctggggctggtggattttgagctgcacccggagccatggctaagaactaccccgtcgtgagcgccgagtaccaggaggccgtcgagaaggccaggcagaagctgcgcgccctcatcgccgagaagagctgcgcccctctcatgctccgcctcgcgtggcactcggcggggacgttcgacgtgtcgctaagaccgggggcccgatcgggacaatgaatacc

SEQ ID NO: 9654 - DNA, 137 bp, Oryza sativa
  unsure (1)..(137): unsure at all n locations
  Clone ID: uC-osflcyp124g04b1
ctgttcgctcncgccagctctgctcttctagacactgtgagctgtctacatctcatgtggcatggacactccaatccttgctgtgccaaaaatccgcccatagtcacccgtaccaccctcacaacccctccattctc

SEQ ID NO: 9655 - DNA, 190 bp, Oryza sativa
  Clone ID: uC-osflcyp124g11b1
tgcgtactctccacgcctccacaaataaagctggtcccgtggaagggcggtgacccaccccccccaatcgccaaaaccctaactccgatccgatcgagctctgcttcccatggcgactgccgcgagccaggcgagcctcctgctccagaagcagctcaaagatctcgcgaagaaccccgtggatgggttc

SEQ ID NO: 9656 - DNA, 416 bp, Oryza sativa
  Clone ID: uC-osflcyp124g12b1
tagatgaggcacctccagtaatcaaagagacggctggattggtcgaagacacggaaaagattaactcactgacagcagaggttgaacaactgaaggctttgctgcaaacagaaaggcaagcaacagaaactgcaaagaaagaatatgctgaagctgaacggagaaatgaagaactaatcaagaaatttgaaggtgcagagaaaaagattgagcaacttcaggatactgtccagaggctggaagagaaagcaactaacatggagtctgagaacaaagtgctacgtcaacaggctgttgctatttctcctacggcaaaatcattagctgcatatcctaagtctcccttccaacttaaaactccggagaatggtgtagctccgtatggggaagtggaaaccgttaccttatatcacccc

SEQ ID NO: 9657 - DNA, 172 bp, Oryza sativa
  Clone ID: uC-osflcyp124h05b1
gcgattagtctgcttgagagggaggaccgctttccggacggtcttaacttcaacaaggggcccgtcctcaaacggggcgccgctaaggatgttaattttgttttacttacactatactcctcttactttctttttttttcttcatccttatcctatcttttcttatactccc

SEQ ID NO: 9658 - DNA, 112 bp, Oryza sativa
  unsure (1)..(112): unsure at all n locations
  Clone ID: uC-osflcyp124h08b1
tctcaatactaatatttatgtttgtatgattggtgngggttcattttaaaagctcattgggtttcctaaaccattatcatatacataatgctccaccccctccaaaggtccc

SEQ ID NO: 9659 - DNA, 112 bp, Oryza sativa
  Clone ID: uC-osflcyp124h09b1
gcgggagctcgcggcactgaacgggacaatgagggacgattattataaataggactgggggttataaaaatcaccatcagtactcttgccctaacatgacggaaacattcaa

SEQ ID NO: 9660 - DNA, 477 bp, Oryza sativa
  Clone ID: uC-osflcyp125a01b1
gcttagttttgaagaatggagcgtgcagcttctggcgatccagttactgttcctgggggcgtcaaccgtgatcgtgatgcgggtcgtaagcaaatccggcggcaaggagtacccgccgcacgtacctgtcaaggcaaccagactcctgctcatggaagtgacggactacaagctggacgggctggacagcaacgcgatgccgtcgcacctcgccctgaccgtccgcgggtctctgtacccacggcccgaggggaggaagagcctgaggggccacgtctagatgagcgtcggcttcaacctgccgccggtgctcgcgcttgtgccagagggcgtcatcagaggcgtcagcgagacggcgagcatttttcagcaccttcgctggttttgtgcaagcagaaagagatggtatcatggtaactggaaagatcctctacacgactctgtcctctgatttaaatgactgggtatgggtcccac

SEQ ID NO: 9661 - DNA, 462 bp, Oryza sativa
  Clone ID: uC-osflcyp125a03b1
aaataagtgagagagatggcagcaacagcctcccggaagggcagcctactgctaccgagggctatctctgacttcagtagtgcagcactctccatctcaacccaggctaggaggaggtcatggcagccaaggggggcaaggatgcaggtagcagcagctgcagactccaagaacattcttgtgatggggggaaccaggttcattggtgtcttcttgtccaggctccttgtcaaggaggggcaccaggtcacattgttcactagaggaaaggcccccattacccagcagttgccaggagagtcagatgcagagtatgcagagttctcttcaaaggtgttgcacttgaaaggtgacaggcaagactttgatttcgttaagacaagccttgcggcaaagggcttcgatgttgtttacgacataaacgggagagaagctgttgaggtagccccaatcctagacgca

SEQ ID NO: 9662 - DNA, 448 bp, Oryza sativa
  unsure (1)..(448): unsure at all n locations
  Clone ID: uC-osflcyp125a09b1
tattctgccacctgcttttctcagcatggaggaagggagtctttacgagtctggaaaggggatgcaagttgtacagattgcagaaaagagctatctttcagcaccccaccatgcagagttgcttgaacggcgatggggtggttcaactcgcaccacagtagacgctgtaaagttgaggattactgatcttcttaaggaatatattaagaatggtgacacagctgaggcgtgtaggtgcatcagagaattggcagtgccattttttcaccatgaggttgtcaagcgagctctcactcttggaatggagagtccaactgcagaagctcttattgtcaagcttctgatggaagcatctgaggaattgctgataagctctagtcagatgatgaagggattntctcgtgttggagatagacttgatgacctatctcttgatataccatctgca

SEQ ID NO: 9663 - DNA, 467 bp, Oryza sativa
  unsure (1)..(467): unsure at all n locations
  Clone ID: uC-osflcyp125a11b1
tccctcgccgtcgccgccgccgccgcctccggcgcggactcgaccacctctggcggggggatactcaaggggtttctgatccgaggagcggccgatgtcccactccgatgagcaccacttcgagtggaaggccgacgccggtgccttcaagacctacccgcagcaggctgagaccatccgcaaaaatgggtacatagtcatcaataaccgcccctgcaaggttgttgaggtttcaacctctaaaactgcgaagcacggtcacaccaagagccactttggtgcaattgacatctttactgccaagaagctccaacatattgtgccatcttctcacaactgtgatgtcccgcatgtgaaccgtaccgagtaccaactcattgatatatctgaagatggatttgtcagtctgttaactgaaaactgccacaccaaggctgacctcangctccctactgatgataacctgc

SEQ ID NO: 9664 - DNA, 456 bp, Oryza sativa
  Clone ID: uC-osflcyp125a12b1
ttaattgaagttcatggctgacatgctctccggaggaggaatggtacaaagttgctggagtcagacgccctgatattatgtgatgcagtacattgaaattttaaattagattaggcggttaaggtgtgggatgtgaaaacagatgtcatccaacaagaatacccgtccgctgatcattattggaggtaaaagctcagcgaagttattatttactgatgagctagattaaagcatgaaccatcaaaggactctgcatgatgtctgaatcagagctagcaaggttatacatttattggagcaatggatattcctcgcatcatttccacgtcagatcttggtagacattgctggaatatagttcggtaggatacacatttgtttagtaaccttgacgacggatcgactgacgttcaaacattatcagcactaacaggagggggttcccagagataacat

SEQ ID NO: 9665 - DNA, 476 bp, Oryza sativa
  Clone ID: uC-osflcyp125b08b1
tactaacaaaagaacagagactagagttgaatgcccgtcgtagggttgcaaggcaatctatgccagatgtggaaatccatgatatgaatgcttgccgtagatcaagacgacaaaatgttactcctggggaaagatctgctcatctggcacgacgtaacgcactctatgcagctaggcgtgacaaaccatgcgctgaatccattgcactagagtgccctgagggatctatcccattgttgctaaatccaacgccttgcttggaaacaaccggtgatgtgccatctacatcgagcctgcaaactgagcatgctgtagatcatcaagcgcgatcatgcacattcaatgatggtatcatctatatatgttttcattcgtactcgcaatttgggggaatttaactatattccacttttagatttggcaactatccaaatgcccttcttaagtttgctcttaattttttgcccctcttagat

SEQ ID NO: 9666 - DNA, 409 bp, Oryza sativa
  Clone ID: uC-osflcyp125c06b1
ttttttttgttttttttaaattttttttgtggttttttaatttttttttttttatttttttttatttttcattatctttttaaaaaaacccccaaaaactgtccaacgtataatcaaaccgaaaacacccgttttttatcctcaaaaaatggggtccctttttcccttaaaaaaaaaaaaaaacaaatttgggggggaaaaaaaaaccttttttcttaaataaaaaaaaaactttttttttttaacccgaaccactgaatcaattaaaaaacccctgataatccttaaaaaaacccccttaactttaggaaaagttcccccttaaaaaaaatccccatttatcccattcgtttgaggggaaaacttccaatttaaaaaggggtcttttttttttgccaaaccccaaggg

SEQ ID NO: 9667 - DNA, 482 bp, Oryza sativa
  unsure (1)..(482): unsure at all n locations
  Clone ID: uC-osflcyp125d02b1
gtgctgttaaggggcttgagttcctgcacgagaaggcggagcctcgtgtcgtccaccgtgacatcaaatccagcaacattatgctctttgacaacgatgttgcgaaagtaggagacttcgatgtatccaatcagtccccggacatggcggctcgcctccactccacccgtgttcttggcaccttcggttatcatgctcctgagtacgcgatgacagggcagcttagcacgaagagcgatgtctatagcttcggagtcgtgttgctggagcttttaactggtcgcaaaccggtcgatcatacgctgccccgtggccagcagagtcttgtgacatgggctactccaaggctaagtgaagacaaggtgaagcaatgcgtggatccaaggcttgaaggggattatcctcccaggctgttgccaagatggctgccgtagctgcgctgtgcgtgcagtacgaggcggacttcangcccaacatgagca

SEQ ID NO: 9668 - DNA, 497 bp, Oryza sativa
  Clone ID: uC-osflcyp125d09b1
ttattttgttgccaaccaaatccacccgccggggcgccttccccctcctcggcggcggcggcgaccccgcggcggcggagagatgatgatgctgatcgactgctcgggctgccggacgccgctgcagctgccgcacggggcgccctgcatccgctgcgccatctgcggggccgtcacctacgacgccgacgccgcgccgccaccggcccacggtgaccccgtccgcggcgccgcggggccggtggcggtggcgccccagcaccaggcgccggggtgggggctcgtctcccccgcccgcgcacgggcggaagcgcgccgtgatctgcgggatcttctacaagttctcgcgccacgagctcaagggttgcatcaacgacgccaagtgcatgcgctaccttctcacgacgagcttccacttccccgacgactccatcattatgctcaccgaatacaaactgacccttacaagatttcaacaaagcacaacataaggttgg

SEQ ID NO: 9669 - DNA, 490 bp, Oryza sativa
  Clone ID: uC-osflcyp125e06b1
cgtttctttaggagaggggaggagagagcgcacggaagagtccgtaatacgttcgcgggggggaggaagaggtgggcccagcgatgcaggcgcacagatcgccggcgatggtggagggcggcggcgcgggggccgtctggccgccgtcgccggcgacggtgccggtgaggcggcgctgcgagggcacggccatgggggccatcacgctcgacctccggcccggcaacggcgtcgggcccttcaccctcgggatgccgatttccgatgcgttcgcgcatatagagggccagccaacactctacgacgttgtccacgtgaagtacttcgatgaggagcctctaaagttggattttgtcataagctttcctgaccatgggttccacctgcgcttcgatccttggtcacagaggcttcgtctcattgagatctatgacgtgaaaagactgcaactgcgatatgcaaagtccttaattggtggcccatcaacatt

SEQ ID NO: 9670 - DNA, 499 bp, Oryza sativa
  Clone ID: uC-osflcyp125e07b1
taataaaaacaaaacacaccaagccaaatagaggcgacaatgggatcgctcaccaccaacatcgtcctcgccgtcgccgtggtggcagcgctggtcggcggcgggtcgtgcggcccgcccaaggtgccacccggcccgaacatcacgaccaactacaacgccccgtggctccccgccagggccacctggtacggccagccctacggctccggctccaccgacaatggtggcgcgtgcgggatcaagaacgtcaacctgcctccctacaacggcatgatctcctgcggcaacgtcccaatcttcaaggacggcaggggatgcggctcatgctacgaggtgaagtgtgagcagccggcggcgtgctcgaagcagccggtgacggtgttcatcacggacatgaactacgagcccatctcggcgtaccacttcgacttctccggcaaggcgttcggcgccatggcttgcccggtgaaggagaccgagctcctgcaggccggca

SEQ ID NO: 9671 - DNA, 487 bp, Oryza sativa
  Clone ID: uC-osflcyp125e08b1
tcattatggagctggtactacccattctatgttgctcctttcgtatctgacctcaaaagtcattgtcggttcgagatatctttcaccgtagacaaaccactgcgaccatttgatcagctcatggcagttttaccactacgaagttcgtgtgctctcccagaatgttacagaaaagtaatgggccgtaaagaatttgaccatccgaagttgcaggctgacacaattggaaaacgtttcttgtggaaatgtatctctgaggaagaactgcttcaggccaccaaagagttagataaagagctgtcgatgcatgagatgagacggaatactccccggcagagaagatctttctgcagaggaactcaaatgctcaggcacttgccaaagttattgtgcaactgcaaacatcgtcatgttcgccggagcaaaagcttccaatagattcagctataagtggacttggaggctggttatcgcctgatggcttgag

SEQ ID NO: 9672 - DNA, 485 bp, Oryza sativa
  Clone ID: uC-osflcyp125e11b1
gatgtgagttgagttggggattgattgattgattcggattgggaagaagaagaagcaggggagcatgggcagcaagtcgtacccgacggtgagcgatgagtacctggcggccgtgggcaaggcgaagcgcaagctccgcggcctcatcgccgagaagaactgcgccccactcatgctccgcctcgcgtggcactctgctggcaccttcgatgtgtcgtcgaggaccggcgggcccttcggcaccatgaagaaccccggcgagcagtcccacgccgccaacgccggcctcgacatcgccgtcaggcttctcgaccccatcaaggaccaacttcccatcctctcctacgccgacttctaccagcttgctggcgttgtggccgtcgaggtcaccggcggacctgaggtccccttccatccgggcaggcaagacaagcctgagcctcctctgaagccgtctcctgatgccacacaggttctgaccacct

SEQ ID NO: 9673 - DNA, 356 bp, Oryza sativa
  unsure (1)..(356): unsure at all n locations
  Clone ID: uC-osflcyp125e12b1
tggttatcctcggcacctgcgtcagcgtcggctgcgccgtggacagcaaggaccggggggacctacancaggagatctccgacggcgaggtcgagatcccctcaccttaagcaggtttggcattggggtggttgttatgtgaggctgctgaagtagtttttctacctagatggttcctggtgcagtgcagagaatggaagcttgatctgttcttggtctgctcttgctcaagaagtaaacttttgtcatgcttaaagtgggaccatgtgagactttttttgccatgctatattgtttaccttgcgaaatcaatgttgttaatgcagctagatttataatattgagttttctttgcg

SEQ ID NO: 9674 - DNA, 372 bp, Oryza sativa
  Clone ID: uC-osflcyp125f03b1
cacttcgtgagccgacaccgacgcgccgacgctggcgttccccaccgagccgggcgcggcggtaaaggattccacggtctgcctccgcctctcgtacctcctcgccctgacatggcgctacttatactcattttagtgtccccgactcgccaatggcgcgacctgcataaaatgctgcacccccaacttaaacgcctgtgccagcatggcctttatgtcttgcgcgacaacagggaggacgcacgtggcgaacggcgttcccaccagctgcgtagactgactcgcgaatgcgaccgtgcctgtaccggactattaagcccgcggcttccgtgagcttcactgcatggctaccgctataattagcaccgacct

SEQ ID NO: 9675 - DNA, 490 bp, Oryza sativa
  unsure (1)..(490): unsure at all n locations
  Clone ID: uC-osflcyp125f10b1
aaaccccctccaaaccctaaccctactacgacctccccttcctccgccgccgccgccaccgccaccgccaccgccacgtccagcctccggtcgcctgttcggatcgaagcgatgtcgtcggacgatgaggtcagagaggagaaggagctcgacctctcctcctccgacgtcgtcaccaagtacaaggacgccgccgatatcatcaacaatgctcttaagttggtagtgtctttgtgcaagccgaaagccaagattgttgacatctgtgagaagggcgattcttacataagagagcaaactggcaacatctacaagaatgtgaagaggaagattgaagaggtgttgcttttcaacatgtgtatctgtgaacaacacagtctgccatttctctccgctgccactgataggcagtcctggggaaaatgatatggtcaaaattgattgngatgtcatatgatggttttaatgcgcgggtggctcatacacatgt

SEQ ID NO: 9676 - DNA, 397 bp, Oryza sativa
  Clone ID: uC-osflcyp125f11b1
cgtttcctgtaaacccggaaccctaaccatagcgggctttctaacggtcaccgggggggttcgacggcggatcatctcgatggcctcctggaccacgacgacaaaagacgcactgcgccggatcgatgctagaaagggaagaggacgtggacacgcatgcgctggcagcactgtcgctgatggtggggttggaaactgaggtcaacgcctaggtggatgccgtggtcgaggtgctcaaggcgctcaaggtggaggcaagagccgccacacggaggcttgaggcggccatcggggctaccgggctagaaggcagagacctgctggaggacatgcgccagacgcgggggaacacgctggagaggaagctgatctacatatgttgctgaagatctacgag

SEQ ID NO: 9677 - DNA, 488 bp, Oryza sativa
  unsure (1)..(488): unsure at all n locations
  Clone ID: uC-osflcyp125g03b1
cgattccccactcctctcgcgggtcgcggccacttcgccgccggcgctcgcatcggtcaactcgacgccacggccacacacgcaccggccatggccgcggcggcggagcagcagcagcagcagcagcagcagggcttccgcccgctcgacgaggcgtccctggtggcctacatcaaggccacgcccgccctcgccgcgcgcctcggcggcagcctcgacgccctcaccatcaaggaggtcggcgacggcaacctcaacttcgtctacatcgtcctctccgacgccggctccgtcgtcatcaagcaggcgctgccgtacatccgctgcgtgggggattcgtggccgatgacgagggagcgcgcctacttcgaggcctccgcgctgcagaagcaccgcggcctctgcccggaccatgntcccgaggtctaccacttcgaccgggccatgtcgctgatcgggatgcgctacatcgagccgncgcacattat

SEQ ID NO: 9678 - DNA, 491 bp, Oryza sativa
  unsure (1)..(491): unsure at all n locations
  Clone ID: uC-osflcyp125g11b1
gggtatgaaccggccaatgggcatgggaatgggaatgaaccaacaaatgggtatgggaatggggatgaaccaacaggccatgggaatggggatgaaccaacaggccatgggaatggggatgaaccaacaaccaatgggaatgaacatgggcatggggatgaaccagggtatgggaatgaacatgcggcctcctatgggaatgggtccaggtagtggatataatccaatgggtaccggatacggagggcagcaaccatatggtgggtacaggtgagattatactgtacaatgcgatactcagtgaggggttgagaaacagtttaggaggcgtttggattttggtcacctggattttctttatgtatggtttcttttggtttgggtggggggggtttataaaatttttcatcactattcttttcctatccatgttggatattgnatctactaaatatatgacatgtgaacggnggcaatgctacaactactgt

SEQ ID NO: 9679 - DNA, 507 bp, Oryza sativa
  Clone ID: uC-osflcyp125h01b1
gtgacgttctcgagcgagcaggccatgcgcgacggggtcgaggggatgaacggcagggagctcgacggccgcaacatcaccgtcaacgaggcccagtcgcgccgctcctgaggcggaggcggcggtggctactgccagcgcggcagaggcggaggctacggtggcggcggctacggtggtggtggcggcggcggtggctacagccagcgccgtgaaggcggctacagcggtggcggtggctacagtggcggccgtggtggcggcggctactgcggcggctacggcagccgcggcggcggcaactccgacaggaactggaggaactgagcggtggggccctcatggccaagttatctatctatctaatcgagctaccatcatcatcatcccgatcgttatcatcggtagttgttgtgtggaactatctagtttggtgttactgtgtgggtgccccatctgtgttttgatcgcaagaagaaagctcgtctcgtttgctttgatcaaatg

SEQ ID NO: 9680 - DNA, 506 bp, Oryza sativa
  Clone ID: uC-osflcyp125h03b1
agtcactatgatgtcaaatcatccaagacaatatgtgtgaaggactttgcattatccatgattgcttctgcagatatgaatcacataaacaagctacttgacagagctgatgattatgatgattatcctgatctcaaggatttgcgcattacctttgaggagttcaaggcttttgctgatctgcggcgaaaattagaaccatttgcaatggcaatcttcagctatggcaaagaaaacggcttgctgaccaagcaggatctaaaacgtgcagcaactcatgtttgtgaagtggacttgactgataaagtggtggacgtcattttccttgtgttcgatgcaaaccgggatgggagccttagcgcagatgagttcttgagggcattgcaaagacgagaaagtgatattcgccagccagcttcttcaggtttaatgggagtatttacctgtttgttgaactgtacaaagtgttctcttcagcagactgtgatctagtgctggggagcgaa

SEQ ID NO: 9681 - DNA, 415 bp, Oryza sativa
  Clone ID: uC-osflcyp125h07b1
ctccaccattccaccaactagctagctagcgagccacgccatccctttctcctcctccttcttcttcttcttcttcttcttcttggtccggagagagtagagaggagggcgcgcagcgagatggcttgcccggcgcagtcgatgctgtcggcgagcaccaccagctgctgcgcgttcctgaggagcagcgccgccgccaagccacaggccgcggcgtcggcggcggcgagcctcgcgcgagggagggaggctgttcctgctgtcctgcaacgcctcgtcgacgtcgtccacgccgtcgccttctcacctccgccgacggcgccggcggaggaggactgcaacgaagaggagtgcgcgccggaaaggaggtgcggagcctgagcgcggagtggctggcggaggagcggaccaggtg

SEQ ID NO: 9682 - DNA, 242 bp, Oryza sativa
  Clone ID: uC-osflcyp125h09b1
tgacttatttcatgaaactcgtgctgaggagaacatagattgttctgaaatgaaatttcgggattaggtgatggggaaagtattacaagctatggggggtgctgcctactgggcactactggacataccatttatgaccaatgttaggtgcggaatggttaggactaacattcctgatgataggtgtttagggcttgatatgatggcaaacatgcctgccaggttatcgtgactctgttgat

SEQ ID NO: 9683 - DNA, 554 bp, Oryza sativa
  Clone ID: uC-osflcyp126a08b1
ctttgctcgtcgtcttctagctagggttcgtagggtctagggtttgcgatgatcggccaactcctcctccctctagtatttcgagcgaattctccaacactttcacccagccgcgcgcgagaggagaaggaagatagatagatagatcgctccgcacatactatggtgctcaccccatcgccgtctccaccgccgatgctccccaagaagctccgcgcgctcggtccaggcttgaatccctttgctcccttcggcatgggtaactactattcctcctctcgctaatatatttctcctcgctcgatccatcttcccccacctccccccttctcaaacaattaatccccttcccgattcgattcgattcggttcggttcgctttcggactcggtttcaatttcgattctccctccgtcgtcgcggccctattctagccgccccctcccctccgctcgattgcctgcctccggatggtgcaattccgcagctctctcagcatgagccgggcacggacccgccacggcgatggcgacgaccgcgggtggaaccagctc

SEQ ID NO: 9684 - DNA, 513 bp, Oryza sativa
  Clone ID: uC-osflcyp126a11b1
ttttaatgtaccagtgcccgtggttccccagagggaaaggtttattttccaacgggtttgtacaaggggttatcacatgttccgctgtattgcaaggtacggctacaaagataagaaccaggagagccaaagcacatttgagcgccttctgattgaaggcctcgagaagttcatacagcgggaggcagcagagctatccctacaaagtggagacgacatctactctgacaaggagcctccaaccccatctaggacaatcgtagcgccaaatggtagcctctactcgcttgacgtccctctcctggcagactttgtgccttcggcagaagttattcctgaggccagttgctcaacgcctcagcacgatcctgtggtggattacacacagaaccttgagctggagctcgcattcatcaggcaggccaagcaatctggagccgtctatctcattgacaacctcatcgtcaaagccaggaagaattcctggttctttcagaagctgatcataaacta

SEQ ID NO: 9685 - DNA, 406 bp, Oryza sativa
  Clone ID: uC-osflcyp126b05b1
aggagatcaaccgcaaggcggagtgggcgtactcggactacccgtgcggccacaactacccgctgatgaaaaagctgcgcaacgtgctcgtggagcgcgccctcgccaacggcgcggccgagttcaacgccgacacctcggtgttcgccaaggtcgcgcagttcgaggaggagctgcgcgcgactctgccaggtgcgatcgaggccgcacgtgcggctgtggagaacggcacggcggcgattcccagcagaatcaccgagtgcaggtcgtatccgctctaccggttcgtgcgcgaggagctcggaacaaagtacctgaccggcgagaagacacgatcgccttgcgaggagctgaacaaggttcttgtggctatcaacgaaggcaagcacatcgacccgttgctcga

SEQ ID NO: 9686 - DNA, 477 bp, Oryza sativa
  Clone ID: uC-osflcyp126b09b1
gcttgcttagctgccatggccgcctccaccgtggggggcctcgccggcgccaccctcgcccgccggccggccttctccaccggcttcacgacgggcgcccgggtgtcggcgaggaacccgctgctgacgaggaacctggagaggaacggcaggatcacctgcatgacgtttccgcgggactggcttaggagggacctgaacgtgatcgggttcgggctgatcgggtggatcgcgccgtcgagcgtcccggcgatcaacggcaacagcctcacggggctcttcttctccagcatcggccaggagctctcccacttcccctcgccgccggcgctcgactcgccgttctggctgtggttggtgacgtggcaccttgggctgttcctggcgctcaccttcggccagatcgggttcaagggcaggaccgagggctacttcgacaagtgaatgaatccacagtggcttttggttagcttgact

SEQ ID NO: 9687 - DNA, 81 bp, Oryza sativa
  unsure (1)..(81): unsure at all n locations
  Clone ID: uC-osflcyp126b11b1
ctcgtcttttcctctgcacttctacaggcgacggcngcggctaaaacttgctacgccagctacagcctcgcttggaggagg

SEQ ID NO: 9688 - DNA, 443 bp, Oryza sativa
  Clone ID: uC-osflcyp126b12b1
ttttactagaggagagagatggccactgcttatgctcccatggcgagccagctgatgaagagcagcttggtgtgctccaagccgagggggctgtctggtgcttcgctgacaaggaggccccgcttcacagtcaaggccatccagtctgagaagccaacgtaccaggtggtgcagcccatcaatggcgaccccttcatcggcagcctggagacgccggtgacctacagcccgctggtcgactggtacctctccaacctcccggcgtaccgaaccgacgtcagcccgctgctccgcggcatcgaggtcgggctcgcccacggctacctcctcgtcgggcccttcgcgctcaccggcccgctccgcaacacgccggtgcacgggcaggccggcgccctcggcgccgccggcctcgtcggcatactcagcgactgccttaccatgta

SEQ ID NO: 9689 - DNA, 489 bp, Oryza sativa
  Clone ID: uC-osflcyp126c07b1
aattggtgctttcagatttttcaggctcttgcatacatgcaccagaggggttactttcatcgtgacctgaaacctgagaatctgttggttagcaaagatgtcataaagctggcggactttggtcttgcaagggaagttacatccgtgccaccatacacagaatatgtgtcaactcgctggtaccgagcacctgaagtattgctccagtcatctatctatgattctgcagttgatatgtgggctatgggtgccataatggccgagctgttgacacttcatcctctttttcctggcacaagtgaggctgatgagattctgaagatttgcaatgttatcggtagccctgatgaacaatcatggccacaaggattgtctcttgcagagaccatgaagtttcagttccctcaggtcagtggcaatcaactggcagaggtaatgacatcagtcagtagtgaggcagtcgacctgatttcatcactgtgctcatgg

SEQ ID NO: 9690 - DNA, 441 bp, Oryza sativa
  Clone ID: uC-osflcyp126c09b1
gggcaagaagaaggtacaagaggatgagagtgatggcgatagtgacagtgaaatggatgatgatgagggtgcagatacaaaatccataattcttgatgatgggaattcctcgcatggatccaaaagtgaggacgagaaggttgatctgggttcaattactgaatcaccttcagaaggagagacctcaggtgagaagtctggacgctctgaatcagaggagaatggaaacggtgttcaggagtccagggaacctacaattaggtcagaaggtgaatgcggtgattttatatcagatggtgtggtggagcatgagattgagtgggtggatgagcacacacctgagaatggtgttagtgctctttcagaagaagtgttgaaaccagatgtaaaagcagaggataacactgcttctgcttcagccacatcacatcttaatgacct

SEQ ID NO: 9691 - DNA, 521 bp, Oryza sativa
  Clone ID: uC-osflcyp126d05b1
atccatccctctaccagtcaagaaacaaggaagatggcaccaacaaataaactagctggccaatggcttcgttgtcctctttccggcttgccgtggcggtggcagcactgttggttgttggctcatgtgccactgagctcaccttcaaggtcgctgagggctctagcgccagtagtctagagcttgtcaccaacgtcgccatctctgaggtggagatcaaggagaagggtggcaaggactgggtggcgctcaaggagtcatcatctaacacctggacgatcaaaagtgaggcgccgctcaagggccccttctctgtccgcttccttgtcaagaatggcggctaccgcgtcgtcgatgatgtcatccccgaaagcttcactgctggctctgaatataagagtggcatccaactctaagtaagaggcatgcatactcttgtgttgggtcacatgagaattatgaacctctaaataattatctcttaaaagagatcacgccacgtttgagcgagcgaataatta

SEQ ID NO: 9692 - DNA, 488 bp, Oryza sativa
  Clone ID: uC-osflcyp126d11b1
gttaacgcaatggcagccagaaaaggatgcacacggtcacagctcgcattggcctgggtccatcatcagggaagcgatgtatgccccatacctgggacaacaaaaatcgagaatttaaaccaaaacattggagcactatctgtgaagctcacacctgaggaaatggctgaactcgagtcttacgcaagcacagatgatgttcgaggcgaccggtatcctcaggcgatggccaacactacttggcaaaattctgagacccctcccttgtcatcttggaaagctcagtaattgttttcatctgttcaaatacaaagtcctggtccaaaatagctgaatggcagaccgcacacaagattttgtagaacgtattcatcagtcgctggacgctgcttgctcctgttatacatcacgtatatttggaatgagatgtcctgtctgtctgtattgggttatgttctatgctttcgtcatgtttgtgcctacaacct

SEQ ID NO: 9693 - DNA, 507 bp, Oryza sativa
  Clone ID: uC-osflcyp126d12b1
tgtttttttcttgcaaggccggttcatttttgggcgagatgtgagatctttgggggtcactatattcctcattcttgcaccagtattagtcttctgtatatttgtggctagacatctgatcaatgacttccctgatcactggggagtttcagttatggtcgtagtggtcgtcttcacaatatatgatttgacattgctgcttcttacctctggtagagatcctggtatagtaccacgtaatactcacccacctgagcctgaatcgattgatggaggcagtgatatgggaaatggacagactccacaacaactacgtttaccacgcacgaaggatgttttcgttaatggagtaattgtgaaggtcaaatactgtgatacctgcatgctgtaccggccacctcgatgctctcactgttctatatgtaataactgtgtggagcgttttgatcatcactgccctcgggttgggcaatgcattggaaggcgaaattaccgattcttctacat

SEQ ID NO: 9694 - DNA, 505 bp, Oryza sativa
  Clone ID: uC-osflcyp126e04b1
ggatctagaaggtgcaggatcttcttctccttgaggtgactccactgtctcttgggctcgagacagcgggaggtgtgatgacagtgctcatcccaaggaacaccaccattcctaccaagaaggagcaggtcttctccacctactccgataaccagcctggtgtgttgattcaggtctatgagggtgagaggacacggaccagggacaacaatctccttggcaaatttgagctgtctggaatccctcctgcccctaggggagtccctcagatcactgtctgctttgacattgatgccaacggtatcctgaatgtgtctgccgaagacaagacaactggccagaagaacaagataaccatcacaaatgacaagggaaggctgagcaaagaggagatagagaagatggttcaagacgccgagaagtacaagtccgaggatgaagagcacaaaaagaaagttgacgccaagaattccctggagaactatgcttacaacatgagggacac

SEQ ID NO: 9695 - DNA, 346 bp, Oryza sativa
  Clone ID: uC-osflcyp126e09b1
atggaagagctgcacctggggtgccccgccccagtattccgggcgacgccaccacgcgtgctgtttgggactcatacaaaccggacatctccggtggacaaactaagctaaacctcgcgcgttgcgtctattccaacactcaccaacggcaagccgctacccatggcggctgctggctgctgtcgcacgagctcagcctgaggggggatggtggctctcaagatcatactcatatgctacgcccaataatgctcttcatattttatatcgaggccaaggcgaaggccgtcaccgactggctgaagctcaacgactaggagtttaacgcctggacgcatacaagtga

SEQ ID NO: 9696 - DNA, 484 bp, Oryza sativa
  unsure (1)..(484): unsure at all n locations
  Clone ID: uC-osflcyp126f01b1
gagccctcctcctccgccgccgccgccgccgcctgcgcctcgccgccggcgcagagtcgcaggaacgatgagccgacgcaacagccgcaccatctatgtgggcaatctccccggagacattcgcgagagggaagtggaggatctcttctataagtatggccgtattgtggatattgacttgaaaattcctccaaggcctcctggttatgcttttgttgagggaaaggaataggcaaatctctaaaatggataagctggcaagcacaggtttataaacaggagttaggtatgggttgtgtgatttgaacgatcaagtaacggatacaagacatagaccccctccagtttgaagaccctcgtgatgcacaagatgcaatttatggccgtcatggatatgactntgatggccacaggttgcgggtggagttagctcatggtggcagaggcccttcttttgatcgatcaagtagctatagcagtgctg

SEQ ID NO: 9697 - DNA, 490 bp, Oryza sativa
  unsure (1)..(490): unsure at all n locations
  Clone ID: uC-osflcyp126f03b1
tgaaattggagtgaaatttgatgatattggggcactggaggatgttaagaggacgctggatgagcttgttactcttccaatgaggagacctgaacttttctcccatgggaatttgttaaggccctgcaaaggtgttttgctctttgggcctcctggaacaggaaaaacactcctggcaaaggcacttgcaacagaagctggagcaaatttcatcagcataactggttctacactcacatcaaagtggtttggagatgctgagaagttgacaaaggcccttttctcctttgctagccgattagctcccgttatcatatttgtggatgaggttgacagcttattaggtgcaagaggtggtgcatttgagcatgaagcaacaagaaggatgcggaacgaatttatggcagcttgggatggtctaaagtccaaagagagccagcgaatccttattcttggtgcgacaaatcgtccattngatctagatgatgct

SEQ ID NO: 9698 - DNA, 516 bp, Oryza sativa
  unsure (1)..(516): unsure at all n locations
  Clone ID: uC-osflcyp126f07b1
aatggcggctctgcttgtggtcgtgttggttgccatgtcggccatggtggcgacggccaactttaaccaggagttcgacatcacctggggcgatggccgtggcaagatcctcgaggatggccagctgctgacgctcacgctggacaggacgtccggctcagggttccagtccaagcacgagtacctctacggcaagatcgacatgcagctcaagctcgtccccggcaactccgccggcaccgtcaccgcctactacttgtcgtcgcaggggccgacgcatgatgagatcgacttcgagttcctggggaatgtgaccggggagccgtacacgctgcacaccaacgtgttcacgcaggggcagggccagcgcgagatgcagttccgcctctggtacgaccccaccaaggacttccacacctactccatcctctggaaccccaagcacatcatattcatggtggacgacatgccgatcagggacttcaggaacctggnaggggaaggggatcgcgtccc

SEQ ID NO: 9699 - DNA, 497 bp, Oryza sativa
  Clone ID: uC-osflcyp126f08b1
gtcgcttgtgagacctgcaccaagacaaacatggtcatggtctttggtgagatcaccaccaaggctaacgttgactatgagaagattgtcagggagacatgccgtaacatcggttttgtgtcagctgatgtcggtctcgatgctgaccactgcaaggtgcttgtgaacatcgagcagcagtcccctgacattgcacagggtgtgcacggccacttcaccaagcgccctgaggagattggtgctggtgaccagggacacatgtttggatatgcaactgatgagacccctgagttgatgcccctcagccatgtccttgctaccaagcttggcgctcgtcttacggaggttcgcaagaatgggacctgcgcatggctcaggcctgacgggaagacccaagtgactgttgagtaccgcaatgagagcggtgccagggtccctgtccgtgtccacaccgtcctcatctctacccagcatgatgagacagtcaccaacgatga

SEQ ID NO: 9700 - DNA, 490 bp, Oryza sativa
  unsure (1)..(490): unsure at all n locations
  Clone ID: uC-osflcyp126f09b1
gtcgtggtggtggtggtgagatctagcttggttggttggttgcagctggagatcgatcgggatggggaggggtcgggtggagctgaagaggatcgagaacaagatcaaccggcaggtgacgttcgccaagcgcaggaatggcctgctcaagaaggcgtacgagctctccgtcctctgcgacgccgaggtcgccctcatcatcttctccaaccgcggcaagctctacgagttctgcagcacccagagcatgactaaaacgcttgagaagtatcagaaatgcagttacgcaggacccgaaacagctgtccaaaatagagaaagtgagcaattgaaagctagccgcaatgaatacctcaaactgaaggcaagggttgaaaatttacaacggactcaaagaaatttgctgggtgaagatcttgattcattaggcataaaagagctcgagagcctagagaagcagcttgattcatccntgaagcacgtcagaact

SEQ ID NO: 9701 - DNA, 530 bp, Oryza sativa
  Clone ID: uC-osflcyp126f11b1
gtctcccacctgactcgttctaatcggcgaagagaaacccacacaagaggaagatggcggcgccggcgaccggcggcgggatctccgccgacgtccccatcctccactcggagaacctcaccagcaacgtcaaatccatctactacagtcggacattcttgtcaattatcagtggagttgttgccggaatctggggattcacaggcttgatgggattcgtgttctaccttcttgtaatgatggtggcatcccttgggcttttgctgaaggccaaattttcaattcatacatactttgacagctggaacaggattttgattgaaggagtttttggtggccttatgtcttttgtgctgttttggacatttgcgtatgatattgtgcacatcttctgatgcacggcataaagaactcaactctgaagacttgaagggagcttgggggtttctccttgaacttgaataacgtgtaaccgcaccaaccctggaggactacattcgttggactgctgccctgtttggtcctttttt

SEQ ID NO: 9702 - DNA, 418 bp, Oryza sativa
  Clone ID: uC-osflcyp126g04b1
gttcatgagttcgatggctcaaccttcagagagtgctgctccctctcatggaggaacccttatgtccttaggctcgccttctccgccggcatcggtggcctcctcttcggctacgacaccggtgtgatttcaggagctctgctttacatccgtgacgatttcccttcagttgacaagaacacatggcttcaggagatgatcgtgagcatggcggtggccggcgcgatcatcggggcggcgatcggcgggtgggcgaacgaccggtacggccgccggacgtcgatcctggtggccgacgcgctcttcttcgccggcgcggcggtgatggcgtcggcgacggggccggcgcagctggtggtggggcgggtgttcgtcgggctcggcgtcgggacggcgtccatgacgtcgccgctgtaca

SEQ ID NO: 9703 - DNA, 143 bp, Oryza sativa
  Clone ID: uC-osflcyp126g05b1
attttgagaccttgattaagctcatccgaactccggagcatggaatggatcgtgtgtagcataattagaatggacatgtgacatttctgcattccaagtattctgaatggtagacaaacaaataatatctgattttgatcccc

SEQ ID NO: 9704 - DNA, 478 bp, Oryza sativa
  Clone ID: uC-osflcyp126g08b1
ctgttactggacactcttggcgaggagtcttacaaggacagcaccttgatcatgcaacttcttcgtgacaatctgactctctggacctctgacaatgcggaggatggtggtgacgagatcaaggaagcagcgaagcctgaaggagagggccactaatctgtcctgaagtctatttctgagtccatttactcagctacctgctgtattactggatcataagatgtactaggatcaattgctatgtggaatcataagattagggctgcgtatgtcaaaatgtgtcgagctgaagtacccagtggacacagtttatgtgcactacattgcttccgtgacttatttactagttaattagcaactttcaaccacttcctgtatttgcagcacattattagtatcgctgtattagcgttttccatgggctggttatgattgagaatacaggccaggcattgcatgtcctttatttgtaagctcg

SEQ ID NO: 9705 - DNA, 459 bp, Oryza sativa
  Clone ID: uC-osflcyp126g12b1
gttccgcgccgcgccgcgcggcgagggtggtggggggtgagcggagagccgagcggggccacgggcggcgccgcgggaggcgtcccggcgagcggaggggaggggggcatccgagcgctgggggaggtagctcagcgggaacgggaacggggcgatcccccccggcgttctcctccccggtctctcctgtagctagctagctagccatggcggcgaatggcgagggtggcggctacccggcggcgcggaggcggtgggatctgacgaacaagggtgccgagagcattccaatggtgaaagaggctgtggaaatgtccacagacgaagaatcagacggtgtcgttatatgtccaccagatggcaacaatgatgatcgagaggaagccattagtagtaataatcatgataattgccaggaaggcgaagtcacttgtgttaaagacccggttatagacagtg

SEQ ID NO: 9706 - DNA, 483 bp, Oryza sativa
  Clone ID: uC-osflcyp126h04b1
gaaggaaacaccttagggaatgcagaaagatgtgggggcatgctagagagctaccgggtgagggaattggcagggtagcaagccatatttctccttccacaactcttcatgacattggaacacaagagtatatacagcgcttgctccatgtgctctcgcactatggggttcgacgtggcaactcaaccatcttcttagatcaccatcttggtggagacggttgaagtcacctatcatttctaggctcctggttaccacactttgagctttgggattactgctttctttggcgtgatggcggagcagagaggaaatatgttgatgaaaaagtatgagatggggaaattactcgggcaaggaacctttgccaaggtttaccatgcccgtaacaccgagacttctgagagtgttgctatcaagatgattgataaagagaaggttttgaaaggcgggctcatggatcagatcaaacgtgagaattct

SEQ ID NO: 9707 - DNA, 482 bp, Oryza sativa
  Clone ID: uC-osflcyp126h05b1
cacactcgggtgcctcttttgtgctttctgtaaaaggtggtccaaaagttggagttggcattgagtacacaagtcttaatgtggaaactgtagaagttcaaaattctactggcaagctgtctgcaaagactgttggaaactctactatgcgtgcagttgctttttcaaatgaaggcaccttcatctgtgaagcttttggaagagttgaagtggatatccctgtggctatgatattgagtactcaaagtgaccgtctttgtgttggttgcagcatgcccatctacccttctctgcccaagggagatctattttccttttatgaaacttgccaaagttacacttgggttatagaagatgacaaggtggctatgtttcaattagctagatcttggcagtatggacttgatcaagggctatattcggaaggaaagaactatccatggttttcgaatggaagtagcaatgcttttattaatcatgtg

SEQ ID NO: 9708 - DNA, 563 bp, Oryza sativa
  unsure (1)..(563): unsure at all n locations
  Clone ID: uC-osflcyp127a01a1
atagtcaataaactttaccgcaaattatgaaatgtacaggcactgcactgtaccatacgtagtttttgtgcagcatataaccataggctgtcacgtacggccttttataccacatactagtccttgaacgcttaataataattaaaagtgcgtgcatcacatcagaaaagtttcaacacgctagcacacaaacacggaattactagtctcactcttgtaggagaagatcaatctaatggtgcgacttgatctgtgtcgtcacatccgtttttattggttgtcgcatcggccttcaggagttcagggtagccatgtcggcatgaaggcagtcacgcatgagttgttcatctgctctggagtaaacccgatctgcaaggtgggctcggcggcagcttccagggaatggaagaatccgttgccaccgtgcggtggcacctgctggacggcatgaggcgactgccgctcgtagccgagtagggtggcgccgtgctcccacacttgtccatgcaactggttgctctcctncagttttcttctgaggcacttatttgcttcacacaaca

SEQ ID NO: 9709 - DNA, 399 bp, Oryza sativa
  Clone ID: uC-osflcyp139a03a1
gatagaaagggagcgtgcaccaacaccatttttgacctgatacttaaagaaagtgtcggtgtataactgtgcaattcccttctgttcatactttcctgtaatatacagctataacatttgcacaaatgattgcattcaagagggcgggaacctagttagacttctgatgccttctttatttgattacactcattgcagttaattaccaaactatttgctgtatccaaaatgctcattaaatgacactattatatctattggacaactcttaactacttaaaagttttgaaaaaagatggtttggccctttggtttttaagagtttcctttgggcaggaattcttggcacaaactttggaaagagacttacttccccaataaaaatcttttttttttttt

SEQ ID NO: 9710 - DNA, 301 bp, Oryza sativa
  Clone ID: uC-osflcyp139a04a1
aacctgaaacggaggtaatattatcgatgaacaatgttctgatagctttagggtacatttcttagatacggttggagtaaaagggccggaacaaatacagacattaggacaagaaattatactgcttggcacgctcaaagtaatcccagcctcttggcacattccacgctggtgtccaacgtttccttcaccgtaaaacttgttccttgaaccccaaaattccccaaagctttgtttgtattccgcttttcacccttacatccttcccaaattacccctttaaagctttattgcgatctcc

SEQ ID NO: 9711 - DNA, 240 bp, Oryza sativa
  Clone ID: uC-osflcyp139a05a1
gtagtaacagggacttttattgcaatattagtagttaatacaccttgcaatcattcttacttagtactaatacacattgaaatatgccataggtaaaatctttaatagctatatattcaagccatattattcgtgtgagatccttaatatccaaagccatattatcatgtggataaattaacattgtccaatatgctatattccaccaccatatttattcccccattcttttttgattaa

SEQ ID NO: 9712 - DNA, 286 bp, Oryza sativa
  Clone ID: uC-osflcyp139a06a1
gacagcaaattagttcggtaactttgaaacttcacagtacaaaacggcgttttagaggtccagacaaagagcattaaagcaagaatgatgagaaagacatttggaattacataaaaagatggtctaaagcacactaaattttattacaaccgccacgaacctgtttttattcgtactgactttaaggtgcaaaatacaaaatgggcatttaatcttttgcggatattccgctctttaaagggctttttattccttagcaaatcccagtttcaaaaagcttgaggtg

SEQ ID NO: 9713 - DNA, 384 bp, Oryza sativa
  Clone ID: uC-osflcyp139a07a1
atgagtaaatttatcatgaatgcttataaatagagctatagaagagaggtcaagaactccaggaggagaaatgaaagaatagcagctacacacgcacaatgaagacttgcgattcaagaagctcctccatcaccagtgatcgtctttgatcacagttgctatcacaaatctgggagttgctctctgtcttcacaattcctctttgttttttacaaatccgagctgggcctctgtgttaaggctctgagtattatttacaagctcggaacgggggttaacatttgggttcttatttacagcaccaccactatcttctactaaacattgaccaaaaccattatcatcagtgctaattgggccttcagacatgcagtccaaagagct

SEQ ID NO: 9714 - DNA, 82 bp, Oryza sativa
  Clone ID: uC-osflcyp139a08a1
ggagctgcaaaaaacccaaagaaaaacccccaccattaacaataaatatcccattagacaaacacccctgccaagtgtaccc

SEQ ID NO: 9715 - DNA, 193 bp, Oryza sativa
  Clone ID: uC-osflcyp139a11a1
cgaacaaaagccatattatttttcctcgcctatattatgtaacttgttcttacagccataggagcgtactatgcgtaagaaacagcaataagcttttgctccgtcctttattagctactccatatagcagtaagtaagttgtaagcagtactccagttactagtcctttaaatttaacaagggcgatggatgg

SEQ ID NO: 9716 - DNA, 89 bp, Oryza sativa
  Clone ID: uC-osflcyp139a12a1
acatcattcagccggttcaattgatagatgaatattccaacaatgatgtcaagcattacaagcttgtgagatgccaatacatagctaac

SEQ ID NO: 9717 - DNA, 381 bp, Oryza sativa
  Clone ID: uC-osflcyp139b01a1
tttttttttttttttttttttttttttttttttttttttttttttttttttttttttttttttttttttttttttttttttttcccaaaaaaaccccaaaccccattttcccccggggggaaaaaaaaattaaacccccccccaggaacggcccaaaaacacaagggggttaaaaaaaaaaaaaaaccccctatggggggggccagacccccaaggggccttccccaattgggggggggcaaaaataaacgcgcaaaaaaggggaatggcccccaggcaaaggtttaagggggtcggggccccttgaaggaaaaccccccctgtccgccaacacctaaaactctgcttgcgcaggggtcccagaaaaaggggggggccccc

SEQ ID NO: 9718 - DNA, 190 bp, Oryza sativa
  Clone ID: uC-osflcyp139b02a1
ataggaccaccataacacaaggggcgatcataaattagccatcactcatgaagcacaagccatgagcacttgttgcctcacttgtactagagtgtctactacagtaggtcttattgtattcaaatagagtgaactctggatatttaaacttgtcacaacatactaggagcgagccattcatcttatcctg

SEQ ID NO: 9719 - DNA, 93 bp, Oryza sativa
  Clone ID: uC-osflcyp139b04a1
gagcgcgggtcgccggtaagatgactggcgttggcgccggggttgtagaacggaggcgattggacatgcttgtttgtcgttgtgggcgcgttg

SEQ ID NO: 9720 - DNA, 66 bp, Oryza sativa
  Clone ID: uC-osflcyp139b05a1
agagcctaaagacctgtttattttctcacaatcttttctctcctatgataacatgggagggggggg

SEQ ID NO: 9721 - DNA, 280 bp, Oryza sativa
  Clone ID: uC-osflcyp139b07a1
gacacactggatatatagtcaataaactttaccgtaaattatgaaatgtacaggcactgcactgtaccatacgtagtttttgcgcagcatataaccataggcttgttacgtacggtccttttataccacatactagttccttgaacgcttaataataattaaaagtgtcgtgcatcatattcacaaaagttttcaacactgctagcatcacaaaccacggaatttacttagtctcaactcttgtatggagaaagattcaatcctaactggtgctgacttg

SEQ ID NO: 9722 - DNA, 333 bp, Oryza sativa
  Clone ID: uC-osflcyp139b08a1
gatcaaagcaaacgagacgagctttcttcttgcgatcaaaaacacagatgggcaaccacacagttaacacaaactagatagttccacacaaaactaacgatgataacgatcggatgatgatgatggtagctcgattagatagatagataacttggccatgagggccccaccggtcagttcctccagttcccgtcggagttgccgccgccgcggttgtcgtagccgccgccgtagccgccgacaccacggtcgtcaccgtagccaccggcaccgctgtagcccgcttcacggcgctggccgtagccaccgccgacgccatcaccaccgtagccg

SEQ ID NO: 9723 - DNA, 345 bp, Oryza sativa
  Clone ID: uC-osflcyp139b10a1
cctcaagtaagttacatgacaagtcagttaattacatccacaaatcaccatccaaaacatgttcaattacataacaggttcactgaccaggtcaatacatcactagtacaagtcactgaccaccaaatccagccaaatgccaaatagtcgttcacacattgacctgagggttgaggccaatcaaacgacaaaggacatatgcttccttggtgcttccgattcatgatgaatccaagattttccttcagctatcactttttattttgccgctgcaaaattctaaataagttaccgaagctagccatttaataataaaaatccaagctcgttgccccattgggtggg

SEQ ID NO: 9724 - DNA, 260 bp, Oryza sativa
  Clone ID: uC-osflcyp139b12a1
cagaaaagcactcgacttagcattaaccagcctaaacacggtgaacgctttacagaatgcaaccctttgcccttttggaattaaaagtttggaattacaggccatgacacgggtcaaacccagactgaacatctattacaggtaacaagcattattttttttgattgcaagactgtatacaggcgtaatcacgttaccagcgaccgttggcgtagcggctgatggtttaagagaggcttcattcaacttactaaccaaat

SEQ ID NO: 9725 - DNA, 84 bp, Oryza sativa
  Clone ID: uC-osflcyp139c03a1
gttactcggatccaaattgttttcattgtttgatagagatttcatacaagatgccactcgcataaagattgaaaaccaccccaa

SEQ ID NO: 9726 - DNA, 197 bp, Oryza sativa
  Clone ID: uC-osflcyp139c04a1
gtccattctcattacaacctcaagcaggatatgcggacaggattacactagcagaccatttgcagcgcacgagattaaccagtgttgacgttccaaccatgtagagttgctttgctagctccgatcatacttattcatcagctagtgcaggtgtatagctatggcacaactttaagcaacagttatttattggagta

SEQ ID NO: 9727 - DNA, 77 bp, Oryza sativa
  Clone ID: uC-osflcyp139c05a1
ggaacagaattggacagcatagatgatgcacacacatatatattattaattataaacactttgaagtataaaagaat

SEQ ID NO: 9728 - DNA, 283 bp, Oryza sativa
  Clone ID: uC-osflcyp139c06a1
ggagcataattacttgatgcaaatgttggcagagccatcatgtttgtaaacagcaagagcaagctacatcagagctcagaataacagtaacaaacagtactggcttcatttggggcatgcacaagttctttattgacagagccatgtcagatatatacaagctggctttgatatgcttgaagataggacgcatgtaaccacttaataagttttacaacaactaccaggaggtttgtgtcttccacaacggtttcaggcattttccaagaagccttgagtttaa

SEQ ID NO: 9729 - DNA, 96 bp, Oryza sativa
  Clone ID: uC-osflcyp139c11a1
catctcgaattggggatctcccaaatctggattgattgagctgaaagcttgaaacggattgtccaagtaagtagtacatgatcataaaccctacca

SEQ ID NO: 9730 - DNA, 365 bp, Oryza sativa
  Clone ID: uC-osflcyp139c12a1
acgctgcgcgtgctgcgcaccgacaacggcggtgaattcacggcagctgaattcgcgtcgtactgcgctgatgagggcattcagcgccactacaccgcgccgtacagcccacagcagaacggcgtcgtcgagcggcgcaaccagacggttgtggggatggctcgggccctcctcaagcagagggggatgccggccatcttctggggggaggcggaggtgacggccgtctacatcctcaaccggctcgcctaccaaggcccttttatggctaggacacctttccgaggctttggcatgggccgcaagccggcggtttcccacctgtggatttttaggctgccttcgtgttcgccaaggaagcttgg

SEQ ID NO: 9731 - DNA, 76 bp, Oryza sativa
  Clone ID: uC-osflcyp139d04a1
gatcattattcattgtttttgttatttttaaatattttggggaaaagggaatagggaaaaaaagagactactaaaa

SEQ ID NO: 9732 - DNA, 186 bp, Oryza sativa
  Clone ID: uC-osflcyp139d05a1
atttagagcttgacgcgatgctcgccctccgtcagctggtatgcctcctgttgtccgccctcctttttttttttttttttttttttttttttttttatgtctctctaggcccacgtttttgcttcaacacaagttgcgagaacccgcatgaagagtgccaggaacatccagatgattacaaaagcc

SEQ ID NO: 9733 - DNA, 184 bp, Oryza sativa
  Clone ID: uC-osflcyp139d09a1
aaaagtaacatgcattaaggacatcaggtattctcattcagcttttacagcgtcatggaggaaagccgatgcaagcaagcaagcagcccttcttaccatatgagacgcgagttctcacagacacaaccgcccactggctaaaactcggcaataagttccaagctaaatgggagatacctaccat

SEQ ID NO: 9734 - DNA, 164 bp, Oryza sativa
  Clone ID: uC-osflcyp139e01a1
gttgtaaatcaggatatttggagacaaaaaactcaaaagcacatgcagttatgcacttaagacaggaagggtttattgccaaaggaaggaacaaaaaaaaagttggagagatttactaccaaaattgggtttcaaactctgacaaaactaatagaagtcagaaa

SEQ ID NO: 9735 - DNA, 255 bp, Oryza sativa
  Clone ID: uC-osflcyp139e03a1
gtatgggaaagatgtgacaatttgacaattgattgcaactgaaacttgatctaagttcaacaacgccactggccaaagctacattacaaccgttgaaaacgccaattggcacctctgcattgctttgcatatatgttacgaaaggcatgtagacctgtgaaatgtcaagctactgcatctcttgataatacttattgattcgctagcagtttgttctagtaagaggatggtaacctagcccccctaatggctgaa

SEQ ID NO: 9736 - DNA, 129 bp, Oryza sativa
  Clone ID: uC-osflcyp139e04a1
aggcacaagttatatcatcagaatacatagcaactgccagtgctcaaaaattgggccataccatcattttgtccacagaaacctgtaccaattaccagttcaaaaactagcagaaccatgtctatccat

SEQ ID NO: 9737 - DNA, 157 bp, Oryza sativa
  Clone ID: uC-osflcyp139e06a1
gacctaaaaaaaccaccagtttgatactatttgaaattactgcaatgagggagggacacaagggagcaacaccaagagtgcactggaaagccggaaaagaacctaacaccaaacaaggtgagagggagacacacccggggataatcgggggtacaac

SEQ ID NO: 9738 - DNA, 76 bp, Oryza sativa
  Clone ID: uC-osflcyp139e08a1
acaaaaattaacaaacttaaacatagataactaagcatacaaacaaaacataacacctacatattacaaacaaaca

SEQ ID NO: 9739 - DNA, 400 bp, Oryza sativa
  Clone ID: uC-osflcyp139e09a1
acggttaatatgagtagccaaagttactaataaacattatcaatacaacattaaatgacagaacctctgtactgcaaagcatcctcactttcatcaactatgccaaatctagagaagggttctgaggctaggcgaaaaaagaaaaataaaattaccggcccaggtaggatacacaaagctcctcctagatgagataaacaaagtaataacagtaggccataggctacattcatatttcttcttcacttgagaaaaaggaaatccaggactttttccagggatgtatttcgcgaaggtgatacaaaatgaaacttaggagtggtcatgccatggacatggcctctatggcttcttactttcttcactctgctggtgtatggcacaaagctcttttttagct

SEQ ID NO: 9740 - DNA, 106 bp, Oryza sativa
  Clone ID: uC-osflcyp139f01a1
aaacgatccaatgagatgtaatccaaaatccaacatttatgttcacatcattttggcaatttaatatatgatggggtaaaatgtcaaaagcttggttactataaaa

SEQ ID NO: 9741 - DNA, 344 bp, Oryza sativa
  Clone ID: uC-osflcyp139f02a1
ctgttgcacggtctccgcgcacgccagcaacgcgtgcaccagccggatcccagcctcctgcgtgtcaaccaccacaaccggcacggcgggcgcattcgccgtcgcggccccttgcatcgccggcggagcagcctccaccacagacccccgcgaggccccaccgtccagagaggaagacgacgatgaggacgacgacgtgctgccgtcgccagtgcgcatccgcttggtgtccctcgccgagtcagcagccgacgggtcagccgtcgccaccaccggtaaggagatcggcctgagggcgtaggtgctactcgacgagtttgtagcggcggggagtttcaaagaag

SEQ ID NO: 9742 - DNA, 132 bp, Oryza sativa
  Clone ID: uC-osflcyp139f04a1
gatctgtggatgagaaaaatattgtacagtgaatgacttattcgaacacaaggcggggaactttcaagagacaaggtgacacaaagctaaggagccaaatacatacctactaaacatgtgaacaagggaaca

SEQ ID NO: 9743 - DNA, 101 bp, Oryza sativa
  Clone ID: uC-osflcyp139f07a1
cttattgtgtttttttattttatttagtaaaaacacaaggacgtgaagggcaaaccatacaaacgacacgacccaaaagcgccttaacacacgcagtacac

SEQ ID NO: 9744 - DNA, 71 bp, Oryza sativa
  Clone ID: uC-osflcyp139f08a1
atacagtagctaattatttatcctccaaaatttaaaaacataactttagaatctaaggcactccaaacaaa

SEQ ID NO: 9745 - DNA, 280 bp, Oryza sativa
  Clone ID: uC-osflcyp139f09a1
aaccaaaaatttgaatcgttttattttgtgacggaagattccatccagtacatctaacaagtaccttgttccagaccaaatacatatatattagcatacagcaaaagagggttgtgttttccagcgcacttcaaagtgccagcttcactcgttgctgggtcctcccagctccagcttacaaccggaagcaagtgtatattcaccgtggatttgttatctaatccttattattgcataatagtagcgtgcatctttgatgagacttcggctttggtgcatc

SEQ ID NO: 9746 - DNA, 102 bp, Oryza sativa
  Clone ID: uC-osflcyp139f11a1
actattatttttgtttattatttaaagagttttcatttttatttttttataaaacacaataccaaatattacaaccctaaaaaaaaatataacactctatac

SEQ ID NO: 9747 - DNA, 113 bp, Oryza sativa
  Clone ID: uC-osflcyp139g01a1
aatggcactgaatcatttttatttcctcatcctttttattcattcctcccagagagacggttccatggaagttttcttgccctcatcaggcaagcagagtcaaccatacacgg

SEQ ID NO: 9748 - DNA, 452 bp, Oryza sativa
  Clone ID: uC-osflcyp139g04a1
ggtgaaccaagaggggttctttgggtattattgatattattattagatagcagggtagaaaaccaaccaacctaacgaacgaacgaacgaacttatgaggttcatacatatacgatgattttagaccacacatttatatgctgttaggtactaagagagtcttcttccaccactgctatagggtgattactgataaaccactctagttcttggctactcttctgtcaaaaccacaacttatgtgtttgtgataaaacagatgaaaggtttaggtagaacaaaacctgaattttttgggggttgcctggccgacaggagttttagtattcttggggcgccttcccttagggcttcatttcaggctgttttacaccggttgccaccccaagtccaaaagttgttgctttgcattattgggacaaattcagccataattgatttgaccattattt

SEQ ID NO: 9749 - DNA, 379 bp, Oryza sativa
  Clone ID: uC-osflcyp139g05a1
cctcatcctttttattcattcctcccagagagacggatccatggaagttttcttgccctcatcaggcaagcagagcacacacacacggtggcagtggaattgctatgaacaagacgctaatcaacatccagagctaaaacaaacaaggggatcaaagcaaatcccgaaaaaaaaaacacaggggaaagtccacatcttcttctcgtccccaacgcctccgtgtcaccaccacgtcttgcggatttttttttaccctggtctattcgctcaggcctccacgatctcgccgtcgtccttcgacgccaggatcagtttcgggtgcgccgtcgtcgtcgcccccttcttgatcgggccgttaatggcgtttggccggccgagc

SEQ ID NO: 9750 - DNA, 312 bp, Oryza sativa
  Clone ID: uC-osflcyp139g06a1
tttttgttttttttttttttttttttttttttttttttacgaagcaacactttgatttagattaagcgcaagaaaattagacacaaaatatgagccatgaccagggccaaccaaccaccatgaaacaaccaagtttaggtttagggttcgactggcataaaaccatacataatttaaaatttattttcggaagagggttcatttacttttttttgggggaaaaaacaactccccctggattcggagggcttcatggggggggcgtgactaggtggggctgggcatgggacggaacaggttgaccacacgggg

SEQ ID NO: 9751 - DNA, 273 bp, Oryza sativa
  Clone ID: uC-osflcyp139g07a1
aaaaaacaaaatagcttccatcatttcatttatttcgaccaactttatatatattagaaaccatataattcacatgataaagaactacatacaaaaccatacacgggcaatttctcaatcttgtaccattagaagtctttccttgtggaaatccaaaatcttggagattggccttgcggggtgaaattctagctgacaagctgcccttaggttggggaaaccagcaccaggcttcacccacaagtagaaccacacccgaccgcggctggtttc

SEQ ID NO: 9752 - DNA, 263 bp, Oryza sativa
  Clone ID: uC-osflcyp139g09a1
atgaaaaaaccatcactaggttaaagtgcttatgtctgccaaatttagtacgggccaatacaccggtccatccccaggttatggggctcacaaactagacaaacggccgcgactgaaaattgaattactggagccggacaggatgtttaattttcaacgctgaatgtatgtgcaagactaggactggatagtcgggccgtactgatcgtatggggcagtctggtcgaagcatgtgactaagattgcctttgaaaagaaacccg

SEQ ID NO: 9753 - DNA, 244 bp, Oryza sativa
  Clone ID: uC-osflcyp139g11a1
ccaggcaaaagcccaaacaaaccatccataaataacattagcggccttagtaacttttaaggcataaaattggaggatgattccacccgggggggcccaaaaaacgaaacactggctacgggaaaaggggttcgatcagttgttaaacaacggggggtacgcggtgttagaacacgaccttatccacacaaggggcatttacaaataacttagggggggcgcccgtttggggtttccccccaaa

SEQ ID NO: 9754 - DNA, 187 bp, Oryza sativa
  Clone ID: uC-osflcyp139g12a1
gcaaaaacattatcttcttcttcatcttcttagtgtacacaacaccaactcgatcatcatctcgtagcactaaacccattttccccaacccaaagacaactaacttcgctggccacaaattccatctcaaccacacattaacgcgactgttacagctatcggatcccccacctttcacttgtccggg

SEQ ID NO: 9755 - DNA, 143 bp, Oryza sativa
  Clone ID: uC-osflcyp139h01a1
aggacgacgatgctcgcacgccgtcaggaagggaggatccagattggttgccctccttttttttttttaactggacatgtttcagattttttgatgtatattcatacggaaaaacccacctaatggtcatgacggtgatgctt

SEQ ID NO: 9756 - DNA, 53 bp, Oryza sativa
  Clone ID: uC-osflcyp139h02a1
gactgctagaataaaaatcacccatcacatgcaaggccaaaacattaaaaagc

SEQ ID NO: 9757 - DNA, 59 bp, Oryza sativa
  Clone ID: uC-osflcyp139h03a1
aaacagccaaagagaacagggaccggggaaacaacccgggagtattcggaccggcaacc

SEQ ID NO: 9758 - DNA, 56 bp, Oryza sativa
  Clone ID: uC-osflcyp139h04a1
tttttttttgtttgtttttttcatttttctgtattttttttcactattttttgttt

SEQ ID NO: 9759 - DNA, 380 bp, Oryza sativa
  Clone ID: uC-osflcyp139h07a1
aggaaaaaaaccagttcgggaatggcgataatacttaaagctacctccaaaaagcgggtagcattgggtggcaaaccaagcatttaacttagggcaaacattcagttggaggttcacatcatcgggggttatcataactgcaataacagcgcagatggggcataaactaagtatattttggagggctagcttatttataatgtcagaatccccaattgggaaccatccacaggatggtcgggggactaccgggcagaagctacccctttgaggggtggaaggcaaacacgggggggaccatagaatccaccccacatttgttgcggacgtcggagcccctgcagaatttgtgggccccatggtttttcccaattttttgc

SEQ ID NO: 9760 - DNA, 77 bp, Oryza sativa
  Clone ID: uC-osflcyp139h08a1
aaacagccaaagagatcattgatattttaataaacatcatgcataaacccccccggtaataaggccagcattaaggt

SEQ ID NO: 9761 - DNA, 411 bp, Oryza sativa
  Clone ID: uC-osflcyp139h10a1
aaaaattcatcaacattgctataattgatttaggcgagtacacaggctacaaacaaaagtataaagagttctccaaaagcggtaatgatacaaatagcccagccccgtatgacgattctagtaacacaatatttcaggtgaacaacaaaggtgtatcagaatttattggaacccaaattccacaatgaactgcgacacaaataatggtgaaacccaactattaagtatgctccagtgacatctttcgccaaatgcgatgcagcagcttaggcctggttcttcttgggcacttggaggcgctcccggaaatcatcttccatgagcaccaagccattacgcaaaacgatcttgggctcccaccccaaaacttcctttgcctttgtaatgtctggcttcctctgaccaggatca

SEQ ID NO: 9762 - DNA, 374 bp, Oryza sativa
  Clone ID: uC-osflcyp139h11a1
ggatgaacataacacgtgcattgactcatccgttttaaacacaaacaggtagaccacacaaccataagaatcacaaaaaatgcaactaaactatgaaaaattaggggcatctttccatgatgagatataaaccacatgccctgtcacactaacaaaagcagatataccaaaaacatttgccgggacacaatgatttctgcaggactacagccgtgaagaacaaaagccattaaaacatttattggtggcttagtacaaggatggcccagggatggatacagggcggtaacaagcctattgactaactggttaataccggtaagatgacccattttcaccgagacctgaagacgaatattcacccccatccatgc

SEQ ID NO: 9763 - DNA, 403 bp, Oryza sativa
  Clone ID: uC-osflcyp139h12a1
agatccaacagctactattatttgacaaataaaaattaaaaatacatagataaacaataacaaataggtttggaagcccattttcgaagggctcaaatacaactcgacccaatcaaatagtccagattgagcccaaatacaaaatttacatcaaatgaaagcccaaattaacactgtagtcaatttaaaggcccaaaacaaaagaactgactcaaatttagcccagcaacttaactaacaatatatacaaaacccaaaacactaacaaagatagataacccaaaacactattcaagaagaaaaagaatcttctgaatctggttgatgcatcaaatctatttaacaaatctttttcttctgaatccagtgacttgttcatttgtttcttgatcttcaaattgca

SEQ ID NO: 9764 - DNA, 452 bp, Oryza sativa
  Clone ID: uC-osflcyp140a03a1
gccgccgccaccgaagcggatccgtctgtgccgccattggcatccgccttctccttggcaccggtggcactagaattagagctagcatcagcagtggtggcgatcccgttgatggcggcgaggtcttgggcgaaggaagggtcggtgcggacgaatcgggcgaaggcgcgatggaaggcgcgctcgcggccgtggcggcggcgcttgctggaggcgccgatgccgtcggcatgctggaggaggtccttgagcttgtagtcctgcttcttcttgccggggcagaaggggcagcggaaggtgccgtccgggttgcgcacgcggtggttgccggagcggaggaggccgtaggacctctcctcgtagtcgctctcggcctcggagtcgtcctcggagtcgccctcgtcggaggagtcctccgccgctgccgcggacgtcagcccggcggttttcgc

SEQ ID NO: 9765 - DNA, 53 bp, Oryza sativa
  Clone ID: uC-osflcyp140a05a1
tgttttgcgcccttttttttttttttttttgaagtgataatttaaatatctta

SEQ ID NO: 9766 - DNA, 251 bp, Oryza sativa
  Clone ID: uC-osflcyp140a09a1
tctataagagctactgacacggcatgcgcacgcgcgcaagctcgggtcccctatattttgcgccctcttttttttttttttttggtaaactaattaaatcattattgcaaaaacattatcttcttcttcatcttcttagcgcacacaacaccaactctatcatcatctggtcgcactaaacaccatctttccctacccaaatacaacgaactttctggccaacaaattccattccaacgcacaatctaacc

SEQ ID NO: 9767 - DNA, 318 bp, Oryza sativa
  Clone ID: uC-osflcyp140a11a1
ggacgggaaaggaacccaaacaaaacgcgggccaaattttttcccttctttacaaaggggacacaaaatttgggttttacccggaactgggaaaaaaacaaaccatcccaaagaatgccgggaaaaaaaaaggccccgaaaaagtggggcgttaagaaagaaccttaagcccaccactaaaaaatcaagggaaatatccccgaaaaacaagggacagggggggaacccctccaaaacttaaaggacccctgtggcctttagcgaaaaaaaacccctaatccgcccccaaaaataggactttcggctaaaggaaaaacc

SEQ ID NO: 9768 - DNA, 356 bp, Oryza sativa
  Clone ID: uC-osflcyp140a12a1
ggggggaggagccccccaaaggagggaaaaaaaaaccagggaacccccggaaaaaatcccggcccaaggataagaaggaggggaaaaggttaaaacggggcctattcaaaagagcgggcccccccccgtaaaaatccccggaaaaaaaaattccctggggggtgcccctgccacgggggggggggttttctcgccggggggggcaaccttttttccccccgcccccaagggggagaaaaaccccgggacagccacctcggtggttttttacggcgggggactcctttttatgtgccccccacgggaaccggaacgggaaaaaaaactctaaaacaacggggggggccaccccccaa

SEQ ID NO: 9769 - DNA, 52 bp, Oryza sativa
  Clone ID: uC-osflcyp140b01a1
aagtggaccccccccaaaaggaattaatttagggacggaccaaaaacaaaac

SEQ ID NO: 9770 - DNA, 214 bp, Oryza sativa
  Clone ID: uC-osflcyp140b04a1
tattttgtggcgccctttttttttttttttatgtcaaacgctctagaaaagatttatgtgatgaaatacatgatgaaccacgtatgttctcaaggtaaaattaattaatgcattatagttttaactttgtccatcgatctcaacctgtaactgtgacgacacactggctacagtgccctcgaggtacttagcagtattagctagtagtcttgtt

SEQ ID NO: 9771 - DNA, 97 bp, Oryza sativa
  Clone ID: uC-osflcyp140b05a1
ggaactattatgatcagaacttgttaagtaaatgtgattgatgagcatagtcacatcatgttggcataagaaaaacaaatatggaaattggcctaca

SEQ ID NO: 9772 - DNA, 459 bp, Oryza sativa
  Clone ID: uC-osflcyp140b10a1
gaacagaaactgcttgattttgaaattcacaatatatttggaagatatcagtactggcataatggttctagtttttacagtacaattagcaagcaggctccaagagattttgcacatatcagaacttgctaaagaacccgcaaatatggtcggagacctcatcaggcttctcctggttgatgaaatgggcaacaccctccatgataaccacatcttcgagatttggcacacatgcctttagaccacccttgtggatgtaatcttttacacctggaatgttgtacgtaaggtcctgatctccaacgatgaattttgtcggaacttttattggaactccagtccatggtgcagtcagctcccagttcaagtctatgcatctgtagtagttcaatcctccagtaaatccagtcttttcaaattttttcggatagtaggaaatgtcttcttttgacagccatg

SEQ ID NO: 9773 - DNA, 298 bp, Oryza sativa
  Clone ID: uC-osflcyp140b11a1
aggcatatgtaacatgatggtcttgttcatcctctttttttcttttccaaaacaacagatcaaatgaatgttgctaaaggaagaagaaggcgtaaaaagaatttcaaaaggaaaaataagttaagcaagaaaaggcccagattgataccccaacctatctatttaccaccaccaccaccaccaccttgggggcttgagcctttatcagttcatcaagctctcatgctggggggaacctggcgagcgcctcctggaatgtctttttgaacctggccatgtccattttgaagttctgctt

SEQ ID NO: 9774 - DNA, 397 bp, Oryza sativa
  Clone ID: uC-osflcyp140b12a1
catgaacaagggtttatcatgttttatcacggatttctacaggcagtttaagtagcaaaaacgtagcattcagtcacgttaagatattttagatccaggcttaaagatagaaggaacatgacctggcatcactgaagcacacagcagcaaagccagaaaaccacccatcaagcagaacgaacattcagttgctaccgtcagtaggacccgacccagttgggcccacctgaaaactcgaaaacccgacaaaagaccccacccttccaaatggagtccccttgcgcaacttattctagttctttttgggcttaaccgggcccctgggtatttggctaaaaaccttgggattcagcaccttaaagggcttgcaggcctaagagtgagcccttccagaaaa

SEQ ID NO: 9775 - DNA, 110 bp, Oryza sativa
  Clone ID: uC-osflcyp140c05a1
cttaaatctcaactatgaattgagattatcaaatttcgtggctattcctgctattgagttacatatcttttacaggcaataccaggccagtgaaataataattagtctat

SEQ ID NO: 9776 - DNA, 228 bp, Oryza sativa
  Clone ID: uC-osflcyp140c06a1
tgtttgccgccgtcgccgacgccgacgacgccgcccggacctgctcgaagaagaggacctgcacgacgacgcggagcgggaggcgctcgttctgcacggcgtgcatgctcgcctccggcgacagctttttgctgtccatcagctccgcacagcctctttcttcttcccccttcgttaaacccttgatgctcctttgagatacattgtcgatggccgcggtataagccc

SEQ ID NO: 9777 - DNA, 446 bp, Oryza sativa
  Clone ID: uC-osflcyp140c08a1
acgatgaatcagcttttagtcagttccttgctttaaagaggacatgagttagattgggagatggcagtccagaattacggctcagatggtacaccagacagcgatttaccaccaccagtgtaacagctgcaacaactgggtgggcttccaagtcctaacaatccagggagcaaactacacttgcaagagcaaaagatggcatgtgcttcatttggcaagaagtaaaacagactacaaaagtaaggagacgccaaatagttgtagcactggccgaggagactaggatgggcacaagaggatacagaagacaccgtgccaaatcaaatacgttcctaaaaacacattttcattcatgagaatctgaataaacatttgtctcgtgtcactggtgccaatcagtttatgaatgaaaggggatataactttgaggcagctgctcaggtgtc

SEQ ID NO: 9778 - DNA, 332 bp, Oryza sativa
  Clone ID: uC-osflcyp140c10a1
gaggtaaaccaactccaatttatatacaaacacaaacaacgtacccaatttttactgttaaaatacaggcacaatgcctggtatcacacgttattaagtagacagactcgattaaccatgacacggacagggacttattgccactggtttacgcacggttaatattacagaccacacatagagagacggcttagctatttgcaaataagcttgacaagatagatgatgctccaaaaggatgcgatctcagcagttgagtacttacgctggttcatctagaattcctctatcgggtaagaggagtggggtgacaagggaccaaattacagacc

SEQ ID NO: 9779 - DNA, 102 bp, Oryza sativa
  Clone ID: uC-osflcyp140d01a1
atagcaaatagagtatctgctttgctcttcaacagttccaatggaggggaacattcacatctgtgaggtgatatgtatgaatttttcggacagaaactagaa

SEQ ID NO: 9780 - DNA, 132 bp, Oryza sativa
  Clone ID: uC-osflcyp140d02a1
tttttcgccctttttttttttttttatagaacaacaccaatcatgtcttatctgaaaaagagcctggtcatttacaaaattatgcagcatccgttccactgtcaccctcgtacagactcataatccttccca

SEQ ID NO: 9781 - DNA, 399 bp, Oryza sativa
  Clone ID: uC-osflcyp140d04a1
ggcacaaagatcctttcacaccccctttgttatgttccgaaaaattccccataattaattactttaatacaggtagggatgaagctacaagcagggcaatattacactagacatttgatccatggtgctgcctggattggtttcatctaaaacaatatgcttcggcttgcggccaactgatcatgtagaggaccaccacactggaatccttgatcttgcaatcccatcccgtaacccgccatcccaagggtccggcttggctaattgaaggacacattcgtgggattttgtggcttgacatcggccgtcgatgagaagggggcaaccgttgcggtcagagttgatgggttggaatgattgctgaacaaggaggactgtgatggcgagggaggccttttt

SEQ ID NO: 9782 - DNA, 82 bp, Oryza sativa
  Clone ID: uC-osflcyp140d05a1
atcatgtacattttaatatggaagaaccccagattggttactgaacaagcaacagtgttaagttggagttcctgattgaaag

SEQ ID NO: 9783 - DNA, 372 bp, Oryza sativa
  Clone ID: uC-osflcyp140d06a1
gtctgcaaacaggctacagcttcaccatggacaatatatgatggaagaacgcgagattgtatactgatcaagatacaaaataagctggagttactactgtcagtaggtacaaataatgtccacatcagttgccagccaacgacataattgtacaccggtcgtattattgtgagctgctgcgcacaaacaggactggaagcctgatggatggagaacgtgttggtggtaatggtatacatcaaagccacatcgtgccggactgctacatgggccacaactttttcacaatagtttttctaaacagattgtttccaatgttatctttgtcaacaaattgtgttaccaggctcattatgcatgtaacttaatatt

SEQ ID NO: 9784 - DNA, 193 bp, Oryza sativa
  Clone ID: uC-osflcyp140d07a1
tcttttcgcccttttttttttttttttatatcaaagagagcatctgcttcgctcttcaacagttccaatggaggggaacattcacatttgtgaggtgaaatgtatgtatataacggacagaaactagaaaacaaatgaaattgtccaatggctatattctagctgtgatgaactatgcgggtaaaaaattgac

SEQ ID NO: 9785 - DNA, 60 bp, Oryza sativa
  Clone ID: uC-osflcyp140d10a1
aaatatgtacattcattttacaaacatcttcatcggggaaccaacaatatgttagaaatc

SEQ ID NO: 9786 - DNA, 424 bp, Oryza sativa
  Clone ID: uC-osflcyp140d11a1
gtctgcaaacaggctacagcttcaccatggacaatatatgatggaagaacgcgagattgtatactgatcaagatacaaaataagctggagttactactgtcagtaggtacaaataatgtccacatcagttgccagccaacgacataattgtacaccggtcgtattattgtgagctgctgcgcacaaacaggactggaagcctgatggatggagaacgtgttggtggtaatggtatacatcaaagccacatcgtgccggactgctacatgggccacaactctttcacaatagttttctaaacagattgtctccaatgttatctttgtcaacaaattgtgttaccaggctcatcatgcatgtaacttaatattgtcactgcaattattttttcttttcgcctttagaatccgactttgcaaataca

SEQ ID NO: 9787 - DNA, 165 bp, Oryza sativa
  Clone ID: uC-osflcyp140d12a1
atgattggaagaatttttgattgtttactgtcaagtattcatactaagtctggagtactacatttcagtaggtacaaataagtgtccacataagatcgccagccaacgacatgaacagcacaaccggtcgtaaaaaattgagaggctgctgcagcacaacacagg

SEQ ID NO: 9788 - DNA, 456 bp, Oryza sativa
  Clone ID: uC-osflcyp140e02a1
acttgagcacaagaacaagaaaattggtagcttttattcagtcgctatatccttggccagaagatcagtaattgctggaacaaagaatcgagtgtgtatatatacgtgaaaaaaacattagcctacaaagtgtggagtgagatgaactatatgctacctacttgttacacataattcacccaaaaaaaagctacacttattaacagttcggatattaggttggacctgcataaaggccagggtgattcccgtggtcatatgaaccaataattttactctaacttacagtgattggtcaaaaatgagttatttcttaaccttgcagtgagaatcttccctgttcaccaaggcctcagccaaatttacaggcctttactttttggggtagaacctttagtaccagccggggacatcatttagttttgcacttgcttgaattattcagctttttgcatt

SEQ ID NO: 9789 - DNA, 76 bp, Oryza sativa
  Clone ID: uC-osflcyp140e03a1
atcttttttagttttttattactttacgtttttttttttctagcttccaacgatttctaacattttcaaatattac

SEQ ID NO: 9790 - DNA, 410 bp, Oryza sativa
  Clone ID: uC-osflcyp140e05a1
agactgtaaccggggggcgcgcccgcattatttaatttccaaagggcaaaaataattttatttatacatcatgcctataaagggcaagaagttttttttttccttcaataaattgggttacagattgttgcaccaaaaaatttgcctttcgattgattgcttaattaattaattaacagggccttttaattttaactggtcgatcagccaccctgggggaaaatcttttttttttctcctggggtagaggtcattttggtttcatttcacatccgggagaagccatcctactgaaccatgaaagggttgctgaactttttgaagctggtcatgatggcaggcatttcctcctcaaatggaaagatggttatccttagggggaacaccccttttttttttccaaaacctta

SEQ ID NO: 9791 - DNA, 55 bp, Oryza sativa
  Clone ID: uC-osflcyp140e09a1
gattgtagaacttgagattgtatactgaaaaagatacacaaaaaacagaaataac

SEQ ID NO: 9792 - DNA, 70 bp, Oryza sativa
  Clone ID: uC-osflcyp140e10a1
attgaaagataaggctttattaatctgtgagcatccagacaatacaaaatctttcccatcctcttattat

SEQ ID NO: 9793 - DNA, 435 bp, Oryza sativa
  Clone ID: uC-osflcyp140e11a1
acgtccgccaacataaatattatacattctggaggtcaacattctacccaggaaacaaaacattacatcaatgaggatacaactaatgaattaacttgggttttccctagatggcaagagtctttacagttcatttcatcaactatggagttcaccaaagtccgaccgccctttcagctaactgcagtacgctactacggaaacaaagtgtcgtaatgatctagagaaacagctaggagcgcttctgtttacagccaagcacaccatgcccctcaaaaagggcgcgcatttcaggaagcagccaggcctggagaagcaccgctagatttacctgaacttcggcttttttgagggtcctcccttgaagctgctgcgctccggtggcggacgggaacttgctgaaggtctttacctttgcgccgccttccttttttt

SEQ ID NO: 9794 - DNA, 371 bp, Oryza sativa
  Clone ID: uC-osflcyp140f01a1
ggcatagatatagatacataagaaataagtgaattacaccagctggcgcagtggcacatccggaaaaaaacatgaaagaatgagggaaataaagcaaagaataaagcttggtcgtcacttatttattccagaaatggccaatggccatttcctagtgcctccgacctttagcaaaacaatctcatcagtagcctaaattcgtgcagcaagcaagaatgccctcgatctccatggatcctccatcatgggtaggcccgacgaagggcgtttccttctttggggctgactcgggttttggctcgggcttagactctggctgacgttcctgcttttggttttggcttggattctggttctggttttgactttga

SEQ ID NO: 9795 - DNA, 451 bp, Oryza sativa
  Clone ID: uC-osflcyp140f02a1
agccatcactcaggaagcacaagccatgagcacttgttgcctcacttgtactagagtgtctactacagtagtatatagtatacaaaagaggaacttggaatttaaatagtagaaatacaggaggagcatcatctatctggcagtagaaatccccagaacaaatcaccagcatggcctactcttcgcctaaagactctcacttgtactaacaacgatgcacacacgctaggcctggccaggggtactctggattctagtccttactacttattatcctgcctagtgtatcatcgttactgtagttgccttgccagggtgctgcgccatgacacaactccattggcttctctcaaactcctagcttttctgtactcgatctctgcatccgagcatgactgtccacccccaacttttttcctcacttctatgggttttagagatatttcatccc

SEQ ID NO: 9796 - DNA, 441 bp, Oryza sativa
  Clone ID: uC-osflcyp140f04a1
ggagataatggcatgatggatacatttttttaccagttttgagtttatttacacatgagatgcaccaacgacccttcaaaaagttgctgctgctacttcactcggggcagcttattagttatttagtacacacattttaacgagcgaagaactgctagtactacacaatctttctcgatcatccgtcttcctgggatcttccctcgagttctctgccatgtggaatcaacgagcttgcatgtcctaacccctcaagaaaagacgcactgcactgcatttgcaggttcagggttcagagatctgtggcatcagcgagctctcctatatgaccttcccgtccttgatggtcgcgttcttcaggatcaccacgattcccgaccttatgtagtacccttccttaggccgatcacttttttggacaccctcgctgtttgtgatgac

SEQ ID NO: 9797 - DNA, 369 bp, Oryza sativa
  Clone ID: uC-osflcyp140f05a1
agtggcaaaacagaaatgcgaatttacctttatatgcaactgtttacaccaaaaggggaaaaaaacgggtaccttgcaaaaaggagtataactttgcagtttcaagttccacttaaactacaacccaatctgcattacaggatgggagtctaaaacgactgcagtttcagcgtttttgaggcctgtagagacactgggctcgcgttgcagaaaaagattaggcggcggagcccactgtggagccggcggtgagcctcgatgagccgtagagagtctcctcgaaccggatgatcttgtttttggaaccgttggtccacttgggtccgctcgactaggttgttgatcactttgaccagcaccgatttgttt

SEQ ID NO: 9798 - DNA, 432 bp, Oryza sativa
  Clone ID: uC-osflcyp140f06a1
ccccataccataccgaagtattaatagcagatccatgacccgcacaataatagcaagagtttaatccaaagaagcatccacccatataacattattagattcatatagcaaaaacctttaaatccgcacagcagcatcaactgctcaaaaggcccgatctaagaaagaactattactaaagtcactactaaagcggtagtaaaggggagcagatcgatcgcatttagggcttgaaggcgatcgtcagatcagaccgggctgaggagctgggcgagggagggcctcggttcggatctaatgccgacgacgatgatgagcgggatgaagccgtagtgcgccgccaccttggtctttttcatggcccacgtggtccactctttgacgaaccgaaccgccgccgaagccgtggactgttccttgtcggccgccggg

SEQ ID NO: 9799 - DNA, 57 bp, Oryza sativa
  Clone ID: uC-osflcyp140f09a1
aaatcacaacaccataattaattgaaaagggtcaaaaccggcaaaaaaaaacccact

SEQ ID NO: 9800 - DNA, 407 bp, Oryza sativa
  Clone ID: uC-osflcyp140g02a1
attaccagctgccggccatcttaattatatacttgtatacgtgcatcgttcatggcagagtcactacacacatcaagtaggtgcaaacaaagctcttattaaccaaccacacttgccctggccgtacaacacacagtgcaagtgcgtgtcatgcattattaattttacattatcatcatatatatgacgtatattacatggtcagaaagggtatagcttagctggaggcgaccttaccgccggcgccggggaagacggccttgaggatccttacgttctgaagagaatgacgacgactaggacgggttgacggctctgcagatgagcccggtctccccccgggcgccggtgagaacgtcgatgtggcccattttgaacatggcggcgacgaactttttctttccaca

SEQ ID NO: 9801 - DNA, 202 bp, Oryza sativa
  Clone ID: uC-osflcyp140g05a1
agacgaaaaactggtcaatattcattgaacggagaggaatgaacccaactaaatcatagcactatactaaaaaactgactacaacaaacatgcaagagaactagtcatacataaaaggagaaccgctgagcggtaactgacacgatgagaaccctagcaaaggagtggaacataacaacgcgtatgtggctgacgatttaca

SEQ ID NO: 9802 - DNA, 396 bp, Oryza sativa
  Clone ID: uC-osflcyp140g07a1
agctcaaaaagctcattcatgcaactcaagagcagtctgcattctgcaatctgcattgcacagaacagaaccaacaccatggatccagcatttttttctcatttcctacactggtaggtagagctccttatggtttatggactatacaacaacagcaatttctttttctgccatatgccacacgcagtttctcaccctcaccccctaaactctaaaatttcaactgaaatctccttctccttatggcgatttgcgcaacccgaaaaagggaccataattcttcagagattcaggtgaattatatcatgctctgagcttggcgaagaggttgccgaaggagaagaagctggtcctggacagggcgccggaggcaggctgccccggcgacttgccgtt

SEQ ID NO: 9803 - DNA, 456 bp, Oryza sativa
  Clone ID: uC-osflcyp140g08a1
tacggcggtgaccgcggttacggcggcggcggcggcggctacggcgggggcgaccgcggctacggaggcggcggcgggtacggcggcggcggcggaggcagccgcgcgtgctacaagtgcggcgaggagggccacatggccagggactgctcccagggaggaggcggcggcggtggctacggtggtggtggcggcggctaccgcggcggtggtggtggcggcggcggcggcgggtgctacaactgcggcgagaccggccacatcgctcgcgagtgccccagcaagacctactaggcgctgctcgcggcgttagatccagctcccttccatgatgcgttttgttacccccttccttcactgaatcaaccgacaacgggtgaacagtttctatcctattagtagtcggagattctcgttaggaaagctatggatctatcggtttcgtggcgtcttcct

SEQ ID NO: 9804 - DNA, 436 bp, Oryza sativa
  Clone ID: uC-osflcyp140g09a1
gatcagctatagagtaattcattccatccaaaatatcagatgacgagcacatgaaacttttaccagttacaggcattgaatgttacatacagcacaaggagaaggtgaaaatggggtaggaaatgtacaatgtttttcttttggacaacatacagggggttttgacagttttgggttgcctgttgcttccatgaaccaggagtaatctaatcatagaggagctgcagctacaagaacacaaagagaaaaattgctgactagcagctgctgatacaacttggaaagctgacaagctaaggccgtaagttcgacgaagagtttcacagatcactccctaaaagatgtatgatcatgagagcttcgtcaaagcaaattaaaatggcaacctttgcgttggagatcaaaaccattaaatatggaaactcctgagatgctt

SEQ ID NO: 9805 - DNA, 73 bp, Oryza sativa
  Clone ID: uC-osflcyp140g11a1
cgcccacccaaatagcttattaagatctatttactttgtaagcctgaaacaaccaactattttggggctcaac

SEQ ID NO: 9806 - DNA, 328 bp, Oryza sativa
  Clone ID: uC-osflcyp140h01a1
gtgggcagagagttccctggaaacataaaagttgaaatgctcactcccttcgcaggcattatcctgttcaggttcaaagggactttttaagcccaatttacaacaatgcaggccaagaggccttcaaatcgttgagaatacaggcacccctggtgccacttttattactaacaacccacagtgatgcaaagagtagaaaatttgacccgggaggaacacatttagagtttaattttattacaagccaggacagatttaacaaactgcgcttatcaacaccagctttattcaaggcacttatactgcttaccacctactaacatatgat

SEQ ID NO: 9807 - DNA, 447 bp, Oryza sativa
  Clone ID: uC-osflcyp140h04a1
gggaaacgaataaaatcattattgcaaaaacatcatcttcttcttcatcttcttagtgtacacaacaccaactcgatcatcatctcgtcgcactaaacccatcttccccaacccaaagacaacgaactcgctggccacaaatccatccaaccacaattaaccactgctaagctacggtcccccacttcacttgccggggacgaagttggtggcgtacgcccaggcgttgttgttgacggggtcggcgaggtggtcggcgaggttctcgagggggcccttgccggtgacgatggcctggacgaagaagccgaacatggagaacatggcgaggcggccgttcttgatctccttcaccttgagctccgcgaacgcctcggggtcatcggcgaggccgagcgggtcgaaggcgccgccggggtagagcgggtcgactacctctccgagcgg

SEQ ID NO: 9808 - DNA, 64 bp, Oryza sativa
  Clone ID: uC-osflcyp140h05a1
tttttttttgttttttttttttttttttttttttttttttttttttttttctttcttttctttt

SEQ ID NO: 9809 - DNA, 350 bp, Oryza sativa
  Clone ID: uC-osflcyp140h06a1
ataaggatccataacgattccattgctagccacaaattaccataaacaagacatcagacaccggagaagttgtctagttcaagcagatgcataaccaaaaccaagtcaaatttcgcatgaaacaccaaatctaaaattatagctgctaaattactggtgctttcaccaaacttacattcatcataggggacagtttcagttcaaatacagcctagtcttgccactgttcggtcaaaccttcaaatggtcattctgcttccatagttaaagcagcaacaaccggcgaaggatgagccaaatgacgaggctgatcaataagtttgcaaatctgtgtgagctgattggttatg

SEQ ID NO: 9810 - DNA, 202 bp, Oryza sativa
  Clone ID: uC-osflcyp140h07a1
aaggacaaaggggtcgcccccaaggggttggttgaaaacccattccaacgggtcgggccaagacccccacaaacggggactaaaaaaaactttaaccgaaaaaccccgggggggtttgggaaaacctcttacaaaaaaaaaaggggggctttttcccaaacaccaccccgcgtcccaaacccccccttaacccaaaagcggg

SEQ ID NO: 9811 - DNA, 454 bp, Oryza sativa
  Clone ID: uC-osflcyp140h09a1
gcaagtggccttttgtgtgtgtgaacttgtcctcgaacagtgctgtgagaaacagtgtctgtactactgatacatatatcgtatatatcctaaaaacatgcatacatttttgttggtgcatgctgaggagatgtagaacggtagccgctctgctatcgtcacagaataaacagttgttaaactaagatgtcagcatcaggtaattcaagcaccttgtgcgttccttttgatttgcttcctggtctaaattggtttccttcaatgtacagctccttcaaaaatggatgtttgtataatccttcaggaatcctcccaatgaagttgttattgtccaagtataaataggtcaatcttggaatatgaactagctttggtgatatcgatccaatcagcctattattagacaagtgcagtatcttgaggtttgtcaaatttgcaatctggtctggcagaa

SEQ ID NO: 9812 - DNA, 203 bp, Oryza sativa
  Clone ID: uC-osflcyp140h10a1
gggaaacgaataaaatcattattgcaaaaacattattttcttcttcatcttcttagtgtacacaacaccaactcgatcatcactctcgtcgcactaaacccattcttccccaacccaaagacaaccgaatcttgctggcacacaaatccattccaaccaccaattaacccactgctacagctacggtcccccccactttcact

SEQ ID NO: 9813 - DNA, 337 bp, Oryza sativa
  Clone ID: uC-osflcyp140h12a1
gctacagcaaagttacttttttttaccagcgtaagtcacacctgaacacagaagttcgaataccagcaattgcaattttaacgtaaaggaggcacgaggataggtcacaagaaaggcaaaggataaaagttacaagcgttgtatgaaactatgaccactattttatcttccatccgacaacataacacttacgatccacaggaatgcagatttctgcaaagttggggccttagcataaccctttggtttgttgaacttgatcgcgcgattccttagttttggaatcagcccccgtaaggcttttggttaaaatcccttgctattgaaaagaaaaccc

SEQ ID NO: 9814 - DNA, 405 bp, Oryza sativa
  Clone ID: uC-osflcyp141a01a1
agagggaaagatgagctatgcacatattttggcaaagaaaaacaaagaggaaatggcctacatcacccgaccgagaagggggggaagatagttttactttacacaaggaaacaacaaagaagaaggcaaaaaaaaaaaaaagaaagatcaagagaaacatggaacaagaaaagatgtacatatccactgatcaaactcagttcaaaaatttgttagcattggtacagggggaagctcctgtttttccacagggagctcaaagtccctcctagcttcctcgatttaaacttgcacagctgttttgagtcgggggggcacaccatggggccgttaccggtctttcccccctgctgctggtgctgctgctgctgctgctgagcttgctgcggcacaagttgtgcccca

SEQ ID NO: 9815 - DNA, 222 bp, Oryza sativa
  Clone ID: uC-osflcyp141a03a1
aataactcacgacaaaaggagctaaacattattggtatggtagtatgttcagtggtgtgcattattagcattgctcaagctgcaggtagcttcagggaagtgaaggggaggaaaaagagtagctgttccagcacaaaactactagcattacataagcacagaaaaaggtatgatcctcttcagacatcttcccacgccgaaggagaatggggtgaagatctt

SEQ ID NO: 9816 - DNA, 367 bp, Oryza sativa
  Clone ID: uC-osflcyp141a06a1
gccaaagcaaaggtctataatttaaatgcccaaaactttaacattgttcaagtcgatttgtcgtctcaaagtaacaaatacccaagtaccaactttggcatcaaaactatgatttctggaatacattgggaacaatccaaggaatgcatcttcaagcagtttcagtcatagggtactcaaaggcaacatctttcccacaaagcctgcggtagaccgcggagaaggtctcgagcttgtattcggtattggtgcgctcctttgggtccaagaaaatcttgatgaccttggcaccatccagacggtatttgatgcgcttgccaacaatctcagctgggtagactacatccttcaagattcccatatgaac

SEQ ID NO: 9817 - DNA, 435 bp, Oryza sativa
  Clone ID: uC-osflcyp141a08a1
actcatgataacagcaagtgaggatgctatatatattgccatagctagcaagataatcagtttcggagttttcacaggaacatatttgttcccgtatactcaaacaccaggtagataatggcatcaagaaatccaagggaaggctacagactgcagacagaagaatgggactgagggtgagctgaaagcctttcaaggaaaggctacagagtgcctgaatgtcagtccttacaaggttgatatcgatttattcgaccagatgctcctaggtaaatactttcttgtggaaaaaaaaaaaaaggcggtcactcaccgggccgatcaatcatcccatcctgttgcagggatttttgaaacattacaccattcaggaggaaaggagtacttcgttgcatacgcattttggagtttgttggccttggctggacattgctt

SEQ ID NO: 9818 - DNA, 466 bp, Oryza sativa
  Clone ID: uC-osflcyp141a09a1
aaaatggaagtacttttcttcaatatagagatacctcctgacgttaaacatgtgtatgagtatctctatctattaaagctagaagatacctattaaagaagtgcaaaagaattctttccaaggagatccttctcggaaacaatatgtaatttaccaacttcttgaaaaacaacaataaatcgtaaacaatggatagaagccatgagtgacactagtcggctgggcgaatacggagtactccgatcgataggaggctgtgactcgctagttcttttccttctccttgttcttggaagggacgcggccgtcggtcccggcgagtatgctgtacttctccttgcgcgttatggcggtgcactcgaagccgagctggccgctgagcgtcttctggatgtagttggccacctcgatgggcgacttgccgccgctgcaagtgagctccttgggcagctggttcaggaaggtg

SEQ ID NO: 9819 - DNA, 450 bp, Oryza sativa
  Clone ID: uC-osflcyp141a10a1
atggaagttgcaatagttattgaaaataatcgagttacatatcattctcccttaaagagcatcggcaacagataagaattctactacaatctgaattgctcactatggcagacgcagcaaaccatctagagcacttatttgggcagacagatataaaagaacaatgaacaagtaacatatgctttgccggtagcccagccagctgcttaaccgaaactgcaagagcagaaccaaataaggcgtctcagaaacttcagatgaatcaaacttgcaacttgaggttgaagaactgccgatttctcaggcatctgcatctttcttcttcgccgccttctctccttcccagcagacactaatctctttgttcttcgcaaccatttttgcttcatcgctgttccagccatccagggtcgaccctcggggacaccagcaccaggagtaacaagccgt

SEQ ID NO: 9820 - DNA, 254 bp, Oryza sativa
  Clone ID: uC-osflcyp141a11a1
atcaagcggatctacaagcaaaatgcgagaaactagcacacgttatacaacacaccaccggttggctctgcggcgacataagggcagcagcaatcaaagaccgggggcggctgggcagaaccaggcacgaggccggcaacacaaagggggcaaacggacaccaccatcaattgggggcttcctaaaaacctaggggcaatcaaaacaggcaggtaccccaagaccgagaaggggaaacaataaatggggaagaa

SEQ ID NO: 9821 - DNA, 455 bp, Oryza sativa
  Clone ID: uC-osflcyp141b01a1
aaagctcctaatatcatatatatattacatgataaataagatacacaattacatacacaatacaattcttccttccgttcatcggttatacagaacattccttcacaaaatcacattagcagacagtcgatgctatactgcgaaagtcaaataccacccacctcagttttgtgcgcttatgctacaatttcagatgacttctttgcccagtgattacgcctatgatcgcaattcccttgtgaatgggccggtcttcagattttgtcacaccagagcacgagagaatgtactacacttttcacaataaaaggtactgtttacatctagtttaatgttgaaccaatctaccacgaatgctcagtaccaccatcacctgtaacgttttttttttacatgcatgaacagggttgaattcgataaacacaatgtttgcgagcttggtacggaacaatgag

SEQ ID NO: 9822 - DNA, 418 bp, Oryza sativa
  Clone ID: uC-osflcyp141b02a1
ggacacaaaagggatcgggtcatatacataaaaaggtttttacattatagactcgtatacaattacactgccacgggaatttttgaacaagaaaacatagccggggagaccctggctccctggatctaaatgctgccgccaaaggattggccggttgaattggtgtccagggggaaaaagacccacagatccgggccaaggtgggtaaccgaaacggggactgggacctttttacggggactcgtccctggaggggggaaaataacacgattttttcccccgtaaaggagcttaagggccctacatggtgggtaaggccaacaagcttgtgggccccagacccaaaagtttagcaatttaacccaaggggccagaatttgaagatttcacaaaggaacccccgatggcgaagcttttt

SEQ ID NO: 9823 - DNA, 71 bp, Oryza sativa
  Clone ID: uC-osflcyp141b04a1
aggaaaaacaatccttgcatgcaggggaaaccgccggatccccccctctccttaacttggtcctaaatcct

SEQ ID NO: 9824 - DNA, 358 bp, Oryza sativa
  Clone ID: uC-osflcyp141b05a1
tcgttcgctcgacggcctcgtcggggtcggagccgacgatcaccgccgccgcgccgtcgccgaacagcgcctgcccgaccatggagtcgaggtgggactcggagggcccccggaacgtcaccgccgtgatctcggagcacacggcgaggacgcgcgcgccgcggttgttctcggcgaggtccttggcgacgcggagcaccgttgccgccggagaagcacccctgctggtacatcatgaggcggttcacgttgggccttaggccgagcatcttggcgagctggtagtcggagccgggcatgtcgacgccggaggtggtgccaaagacgaggtgggctgattgtgggagcactgtttgcc

SEQ ID NO: 9825 - DNA, 329 bp, Oryza sativa
  Clone ID: uC-osflcyp141b06a1
aaacaggagcaacgtttgcaacaccagactcagcaacataggaatacaaaggatgaaacggggggatgcagtgtaacggggaagggaaacagattacaaatgggggcaccaaacatagcaacgattcaacgaatggaccaccaccacaccaaaaccaaagctaaaagaggcgatgatgatttgggtttgcagaaaaaatctgaactggaaagggacgagccggggatgatgagcgggagatttggcattggtttttttataggaaagggtccatttggagccccttgggggccttatcctgggtgttcaacttggccacctcaatgggg

SEQ ID NO: 9826 - DNA, 66 bp, Oryza sativa
  Clone ID: uC-osflcyp141b07a1
tttttttttttttttttttttttttttttttttttttttttttttatttttttttttttttttatt

SEQ ID NO: 9827 - DNA, 371 bp, Oryza sativa
  Clone ID: uC-osflcyp141b10a1
ggggccagaatcacatatggttccttcatattgaaagagacagtattacaaatgcggttacacaacaacctggaaaaaaaaaagaacaagacaaactgattgagcaaactgcaaagcttttttgcagtttcagctgactcaaaaaaaatgaaaaaggggtaaaacgccgaaaatatttgaacactaaaactttggctggtaccccgatatcactagcaacttcgcaaggggatttcaaccctttcatcattttcccatctttttttttttccatggagcaaccagtcactactggtcaaagacacatcaagttggcggcggtggctccaacaacgggcggaaatggagggagattaccaaagaaaaccccc

SEQ ID NO: 9828 - DNA, 491 bp, Oryza sativa
  Clone ID: uC-osflcyp141b11a1
tttttgtttttttttttttttttttttttttttttttttttttattgtttctcttttttttttttttttttttttttttttttttcaggaaaaaccaaacccccaaccgttccattttgggagggagccccccccacggccaaaccaggggcccaaggggcccaaagagggggggacctcccccccccacaaaagggccccgggcaaagggggggataggggcccaggggggggggggcccttaaagaaccacgaaaggggggcgggaacaaagggggcccgggggggggggtgcccaaagaggggtggggcccaggccccccgggcaattggccacaggcaaaggggggggcccccaacacccccaggggaaaccccccccgccccttccccagggggggcgggggaaacccccccccgggggggaaatacctccccccccccctgggagggggggaccccacggcccccaggggggggacgattccccc

SEQ ID NO: 9829 - DNA, 324 bp, Oryza sativa
  Clone ID: uC-osflcyp141b12a1
gcataagcgtcagaaggtatttaattaattattagcaagccatattgtcactgagccacatactagagtcccaaatcataaaggaaggatgggagcagcaactgagcaaagctccatcctgcttagatacattcgagaggctttttttaggcttttaaccagccaagcgcaagcactttagttaaagcctaaacagagttccagcatgatcagatcatgcgcattacttccactttttgaacttgccaccaccgaacatgccgggcccatgcttgccatgcttgaacttgccatgggggccccgcttgccatgcttgaacttgc

SEQ ID NO: 9830 - DNA, 484 bp, Oryza sativa
  Clone ID: uC-osflcyp141c06a1
tttgtttcgccctttttttttttttttggatataacttcaaaatatctggggaaataacatcagattaaccaaggttcaaaaagtggctgctcggtggacacgctattaataaagtactttggagttccttgttcgacagctcaagctacatactggaagcgcaaacagctgcagatgatctctcacttgagagggataaaccgtgaggagtgggtagcaccaataccaggcctaccgtgcttgactggcttgtacgagatggagaactctgcgaggtagtggccaatcatctcaggcttgatctcaacctggttgaaggttttgccgttgtagacaccgacgatgcttccgatcatttcaggcacaatgatcatgttcctgaggtgggtcctcacaggctctggcttctcaccagcaggtgcattctttttcgccttgcggagcttcttgatgagctccatgggctttctttttcaagcccct

SEQ ID NO: 9831 - DNA, 68 bp, Oryza sativa
  Clone ID: uC-osflcyp141c07a1
aaaaaccggggcaaggaacaatcacacgcaacaacaaaagaaacccacaaataacacaacaaggaaac

SEQ ID NO: 9832 - DNA, 68 bp, Oryza sativa
  Clone ID: uC-osflcyp141c08a1
tttttgatggtttttatttttttttttcttttaatttttatatgataaagatacatttctataaataa

SEQ ID NO: 9833 - DNA, 257 bp, Oryza sativa
  Clone ID: uC-osflcyp141c10a1
cggatacaaattaaaacactagaacacagtacgtacgtacgtagtagaactcattacgcacatttttttttgttgtctacgtacatagcacagcacgtacgtataatagtacgtataatacgagactaattaatcaagatacgtaggtaattaattaacacggatcgatagcataacacatttggtggtacgtaattaattaatctgattaattaattacgcggcgaagagagaggggcacacgcgataataatata

SEQ ID NO: 9834 - DNA, 394 bp, Oryza sativa
  Clone ID: uC-osflcyp141c11a1
tttttttttttttttttttttttttttttttttttttttttttttttttttattatttaattaataaaaaaaaataaaaaataaaaaaaaataaaaaaaaaaaaaaaaaaaaaaaaaaaaaaaaaaaaaaaaaaaaaaaaaaaaaaaaaaaaaaaaaaataaaaaaaaaaaaaaaaaaaacaacaaataaaaaaaaatgaaaaaaaacataaataaaaataaaaaaaaaaaaaaaaaaaaaaaaaaaaagaaaaaaaaaataaaaaaattaaaaaatataaaaaaaaaaaacaaaacaaaaaaaaaaaaaaaaaaaaaaaaaaaaaaaaaaaaaaaaaaaaaaacaaaaaaataaaaaaacacaaaaaaaaataaacaaaaaaaaacaacacct

SEQ ID NO: 9835 - DNA, 357 bp, Oryza sativa
  Clone ID: uC-osflcyp141d01a1
agttgacatgcaaaaaacgaggggatgtctacacgggggattacaatccctttttgttttgccaggcttgctgattttgtcagcaaaattaaaaaagggggggttcatactaaaatcaaattgggggtacatcctaaagttcaaaaaaagcccttacttttaaaaaaaaagaggtggcataaattttaagacattacatcattcccagtcccaattatacccccctgaaacttgggttttaaaacatagccagatcaaaggggggcaatgagaatggaaggagtaagaactgatttttttgcccagaattgggtaactccccttgtaactgggacaacctgtgtttggttcactaaa

SEQ ID NO: 9836 - DNA, 451 bp, Oryza sativa
  Clone ID: uC-osflcyp141d02a1
aatccacggatcccaaatgttctcattgattgatagcgatatcatagaagcagcgacacgaattaagatttaaaaccaaccccaagaaggatcgcagatccaactccaccgaatcgatccaagaactccgcctaatccaaccaaaccatgggcgatctcatctcaccaacacgacacgaactcataaaaagactaacaccaccaccaccttcttcttatttagggacttgacgactcaagacgactgatactggcgaaaggcgaaggggaacagcacagatctaggagagctggccgcagtcggcgatgacgaccggtttggcggtgctcccgccgcgggatcccaccttttcgatggccttgacgacgtacatgcccttgacaacgcggccgaacacgacgtgctttccgtccagccagctgcagggcacggtgcaaatgaagaactggg

SEQ ID NO: 9837 - DNA, 242 bp, Oryza sativa
  Clone ID: uC-osflcyp141d05a1
tctgttcgcggcggcgaacacggacgccatggcgaacgctgggatgttcccctccccgaacagctcgtcccagggcccggcgccgagggcgatggccatctgcggcacgacgatggagatgttgaggacgccggtgcagaggccctgcccgccgccgtggctcgccgcgagctgcgccgtgacggcgaacgggacgctgcagaggacggcgaaggggaggccgaggaagactaagagcgcca

SEQ ID NO: 9838 - DNA, 146 bp, Oryza sativa
  Clone ID: uC-osflcyp141d06a1
ggtgggccaatggatagcataacaaatgaaagcaagctgatgaacacatttattttttcatccatccatatttactttgttttcccaattggcaacctaggattacatttatttcgcaatactatttagtctgctggcgattgaca

SEQ ID NO: 9839 - DNA, 71 bp, Oryza sativa
  Clone ID: uC-osflcyp141d07a1
aggccttccctgaaatccttggcagggtccatgcaaaaaaacccccaccccccatgccaaggccctccggc

SEQ ID NO: 9840 - DNA, 425 bp, Oryza sativa
  Clone ID: uC-osflcyp141d10a1
acacagaaaaatatattcatgttctgaacaaaagcctcaggtacacttgtatagtccacaaacaagtttgcagtgcacacttcttgtttttgcacctgctgatcgagaagcggatcagtgggaagacaggatgcataacttccacatcctaactcaaaagtgtcaaaactttataagccagcttgaagcataagttgaggctttttaagagcccagtacactgaatgacaagaatgctataggttattactgctactgctacatcatttgcaaagttgcaaaacataccatggtaaattaaaacggatcacagcctcacatacattatgacattattaatacatataagagccaggggccaagaccttcctttggggaggtttattgcccttgaaacaagtcgtgcgcacgcctgagttcgtcaa

SEQ ID NO: 9841 - DNA, 447 bp, Oryza sativa
  Clone ID: uC-osflcyp141d11a1
gaagataataatattgcaaattatatccaaaaccacgaattgtattacgccatagcagctggttattattgactagctagtattaccattgggttcccatctcttagccccaaccttgaaacgcatactaacgaaagacaacattcaaaaccaccatcaaagtccgatttaattgagagttgagacaactggtacacacgatggaccttgccgacgacattgagagttttttgcctcttggcagaaaattttcaagaaaaagcaccttagtaaaggtctccttccttgggagtatggatgacgcagtcggacttagggtaggagacacatgtcagcacatagccttcttcctgctgcgcatcatcaaggaatgatccatccgactggtcgacggagccagcctcgatcttaccggcacaggtagagcatgctccagcacggcatgag

SEQ ID NO: 9842 - DNA, 61 bp, Oryza sativa
  Clone ID: uC-osflcyp141d12a1
tttcgggggtgttttttgttttttatttgttttacttccttacccttttatttttcactta

SEQ ID NO: 9843 - DNA, 420 bp, Oryza sativa
  Clone ID: uC-osflcyp141e01a1
aaactgaagttcatatttgagggaaactttacaacggtggctgcaaaaatttactagctaaaatctaggccccaggccatcaaataaggaacctgtgggcatcaaataaggaacctgtctggtacatttgtatcaggaaaaaaatgtatttcgtctataatagaattacaatggcaacaaattacttgggcacgacaaaatatcatctgataagaaaataaggatcaaaactttcagttgctgaactccctacttgatcccattgcttctttggggaattgaacgtctcgtgggattcttttaccaacgaataaaggttagagatcaaaggattttttaggaatggtgtgataaccccattaaggtctgaaaagttcttcaaatattctgtgggtctgcccttcagctgttccaaagatt

SEQ ID NO: 9844 - DNA, 399 bp, Oryza sativa
  Clone ID: uC-osflcyp141e02a1
gaaaaaaaagtagattcattgataaagtaaaaaaactatctacaataaccttcccaatgtacatactttacatattagtgtgcaaggcatacttacagaaaggggaagaatgcacactccaatctgcttcaacaaactaatggtacaacaatatggcaagtagctgattctctgcaaaaaaaactgccatggcctccaagatgttgctctaaggggaaaatccccccaaaaaatgctatttacattgtattcctgcgcctctccatctactatgtgttaaattaacacaggttaaactgttttccgtccaattgattttccagtgccatcagcactcatgacactggtctattttgcaatgtaagatcagaaacagatgaaaggtcctcctccaaaagt

SEQ ID NO: 9845 - DNA, 164 bp, Oryza sativa
  Clone ID: uC-osflcyp141e03a1
ataaaaactaaaatcagattggcatagcattcttcatttactcgccctatttgcaactttcgactctgaagaaaaacactgaaaatgcaggttgcttagcctgctacattttggatctctttttcataacccggctgtttatgcgaccaccaaaaggttcatgg

SEQ ID NO: 9846 - DNA, 393 bp, Oryza sativa
  Clone ID: uC-osflcyp141e06a1
cgacaaacgattttaaattaccgacagatcggcaaaccacataaattccacgaaatctaagctcttgatgatagctatgtaccactaacaaaatctgtaaaacatttaaagcaagtgcagtgggtggtgtaaacatcatctctgaggccaaaattagagaacacggcacatgtacatccacggaggcgcctaattatgaccaccaaaccaaacactgggttctgtccattttcaacttataaaatataaactttgcagtgaatacctgcatgggtcaaaccaccttgcctatgcaatcacctttatttttggatcaccttttttgccatgattgcttaagactggttcccggattgagatgcccgacttgtatcccttggcaaacttgttgga

SEQ ID NO: 9847 - DNA, 282 bp, Oryza sativa
  Clone ID: uC-osflcyp141e08a1
attatcacaaacaaaagtttgatattcaaaatttctatggttatccgatatcaccttttgtatatgagataaaaaaaattgtaaactactccaaggcttccaccaggatagcggtttctagtttacattttttggaggaatatctcaatgaaaatccattgatataaattgaaaacccgaaactgaatatttttttcttaaattttatggacaaatcttacttagacgataacgtatcaggcgctgatctaccattttttcacccaaatcttcaagtttcaa

SEQ ID NO: 9848 - DNA, 454 bp, Oryza sativa
  Clone ID: uC-osflcyp141e11a1
attacgagcagcgatctcacagtatatttatattagaatcaaaccaggctggagatgtagactgttctgtacaagaggggccgctaccaaatccagctagtaaacagggaggatttccaaaagtacaaccacacataataaataagttcacaccagtagcaattgcatgtttgctaaaatgttaattatggttacatatatttatgtgcatatatttatagagcgatgcattaaccgtttcagttaagggcgtgcaagcgatcgcacaatatcgatgcaaaacgaagattggtgccagcaggactgaagaagaatggggattaagcacccacgcaattttcccaacaaccatagtttcgactgaaactgccttcaccagtttgttgagcatactcagcaattactttggggtcacacgcgtccacgtccttgtaatttctttttagtgacatgg

SEQ ID NO: 9849 - DNA, 463 bp, Oryza sativa
  Clone ID: uC-osflcyp141f01a1
aagatcaaaatcaaacggactcgactgtttcctctttttagttaaacaaccaaatttgtttgtttcaggaccagtacacgcgagtcaaaccctagtacatgcgagtcaaaaatgactatcgatttcagtaggaatacatgcatataacaactattcccggtaagcaatgaacttcgcaatatcatcaagtccagcttctctgtaacatccagcaattcgatcaacaacatcgtcccaattaccatccaccgatgccaaatccattagaaatgctgcctcgtcaagaaccacctgttctggagcttttcctttcttcagatcctcacgcttgccctcctcactaaccttctctcgtataaactcaatctgctcatcctcccacccagctaattcagcagcctcctgtcatatgaaaacggtgggtatatattgatccggttttctgggaggatgggaaaagaaa

SEQ ID NO: 9850 - DNA, 71 bp, Oryza sativa
  Clone ID: uC-osflcyp141f02a1
aacggacaaaaagcaattcataaaacgcataggaatacaccctagttcacacagtacggctcccatccctg

SEQ ID NO: 9851 - DNA, 470 bp, Oryza sativa
  Clone ID: uC-osflcyp141f03a1
gaataaaacatgttttcaattaaatggtcaatacaattatcgtttcatactgaacacatgataatgaaaaatcaaatgacaaatttttttagaaaagtacattattgattactaatagcacatacaacacatcaacacattgccacaatctctactgtcatttcacttgtcaaaatatttaacattaagactgttcgttcaatgattgtggttgtggctgctcaccttgccaagcccatacaatatcctttagtgctggtctcatctcttgtttgaccttttgatactcaagtgtatcaccatttatcttcgtaaattccactaaatgaaaatctggtgtgatctgaaatatttcagcattgatggacattacacctttccttcctggttttgatccttccatctttaacaaaccaccatttttcttcaagaattttaatcgtaaattcttcgcaacatcctcaagcttt

SEQ ID NO: 9852 - DNA, 279 bp, Oryza sativa
  Clone ID: uC-osflcyp141f05a1
atgaataagaagctggcatatacttcggctagtagcattgcaacgcaaacagtatgacaaggtaccacgcattgtttaagagctaagacaaagacaaaactgatgcatccaacgtaccaaaaagaaagcgaacagcagcagtcagatagctatgagaagagaactaggagagggataactagaagggacagaatggcatccatgggtccatgacgtttagtcgacctactccatcttgctcttgccggtgtcgtcctccagcggcggaatgttggcgtc

SEQ ID NO: 9853 - DNA, 378 bp, Oryza sativa
  Clone ID: uC-osflcyp141f06a1
catccatggaaacatgctgatttgaaaagttacggttacaatatcccaggtaaggcactaggcccatacaattacacacgcatataactgtttttgagtttttgatgataagccggtataacatcacgtcttcaggtgtttatttaggtgcgggaatgaactgcctactaacaaaccaatcagccattacactattacagacgtggctgaaggtggcagtcaatagcaccagtgcaggtacggatacataaggcatttttgcgttgctcatgctccgtcgtcgtcttcgacattgttgacacgcttgcacttataaatccattcgctatatatgtcgattggtttaatcagtgcattgacaggggtgctgaagttttt

SEQ ID NO: 9854 - DNA, 325 bp, Oryza sativa
  Clone ID: uC-osflcyp141f07a1
ttttactctacccctttctctgttaaaagttctattttgtggatagtgtaatagccaatctaaataaccttttaactttgtgccaatcacattgtcattttgcttattctttcttttctttcttgcagatcaaatcgtgagctgcgtgagcaagattttacctctagaaagcttaggttgttcattattgttgcagagtttgtgtttccgtttgttttatggtaccagtgacatttggtatataatcaagaagaattagtggaggacttgttgtatgaattgccttgggttctttttaatatgagaattccataattgttctgtg

SEQ ID NO: 9855 - DNA, 414 bp, Oryza sativa
  Clone ID: uC-osflcyp141f09a1
accggcagaaaaaagatttgcataacagcaaatcatgttaataagagcgtatgtgcttctgattgcagcaacatcccattgttacagtccattaggacaacgtcatgcagagcaacatgacacattgacatgtatgccaattgctagatttcatctgctaccccattttctggctaaggcagcatcaatacaccagcatcctcctgctctacctctagcaatgaaattagtcaaccactaacttagtcacatatgctgccaccgggagcggtttccttgactgttctctcacagcttgcttcttagttcttacccgcgtcactgttacctaggtgcagagcgaagtcttcatgatcgtcacaaaatgttttccggagtctcagtgcaatcatgttgtggattactcaggaaggc

SEQ ID NO: 9856 - DNA, 423 bp, Oryza sativa
  Clone ID: uC-osflcyp141f10a1
agcagaaggcaaaggaaatttcccgcaaatacttattcatatgttttgacaacatttctcccgacgcatgctcattgtggcagacgcagctgaccacctagagcttttagttcaccattattatttagaccaagcatacgtcccaagatcagaacacatgcttacaagcgaaaatactaatagcctggctggctgcttcacagaataaccaaacgacaacctcaacagataaaaatgccacggaatgaaaacaaagcagcgaatcgtcaccagaagtcccattcttactcatcaaacactccatcaattctcctccaacgcatcctctccccaggggagaagattgcccagtttaccttccttaacaggagcagggttcaccatattctcagcctcgaagcagtgcagaacagatttgggcga

SEQ ID NO: 9857 - DNA, 204 bp, Oryza sativa
  Clone ID: uC-osflcyp141g01a1
aagcttaaaccctttttactaatttagccttaacacaaggttaatacgtacagagagacggtcaatgcccgcataagtgagacgagtatggtatatcgtggcaatgtgaaggagactaagaccagctgagtcaaacccacacgggcaagataaccattgcttattgcatgttgccaaatttatacacttaaccgacagtggttc

SEQ ID NO: 9858 - DNA, 387 bp, Oryza sativa
  Clone ID: uC-osflcyp141g02a1
gggtgtaatatatgccatcatcattaaataaaagttctaacaccagctgcataaaacaattacaagatactatgaagttaaatagacagttccattaaagaagaaagccttgagttaattggggcaacggtagcatttgagaaagttatggtaaaatctatcataccaacctgttttccatgggtaaatacagatacatcatagtacttccaactggaatgtggttttcaactactgggacatgaacttctgcaatttgtaacaataagctgacttttgcttacataaacccacccaagaaaggaacaccctaccttgtttcatatggacctatttagaaatgaactttcagatggaaaaccaaacatttcttaactcacataaaat

SEQ ID NO: 9859 - DNA, 316 bp, Oryza sativa
  Clone ID: uC-osflcyp141g03a1
aaatgtgcattcctaacaaacagaaattcaatagaaacacccgccaataaaatcaccaccttgtgtatgtataggtttctaacaattaataacaaatgagctttatccatcaattagaattgtatatacgtattaaccgagtacttttgaattcttattctgatcttttacccgaagttgtgacatctccaaggactcaactaaaaccccactagtattctttctagaacaattccgacagaatttcattgacattgtttacacctggttattgaaatcaccaccaaaaacttctttgcttaaccttattttcggt

SEQ ID NO: 9860 - DNA, 384 bp, Oryza sativa
  Clone ID: uC-osflcyp141g05a1
gataaaaatgcagagatatcgatttcaacatgcaagaatgggttagcttcttttatggaaaaaggcccacaaggccggcatccggtaatacaacatttttttacagttgcaaaataccgaaacttctaatgctccctagcccaatgatcatgcgaatcctcttccatctccagatctcctcatctctcgaatggcaatcgcttcaacttcaatggaaggcagccagccagccacaccgtcaacagacggttcgcccgaagcagatcgatgctatgtacagatttttcgcccatttatccttgacatgattactggggaaggcagaggtccggagagtttcttgtgtctcggctactggcttccgtttcggtatgctcaagataa

SEQ ID NO: 9861 - DNA, 383 bp, Oryza sativa
  Clone ID: uC-osflcyp141g06a1
gatgtaaacagaaaatataaaggctatcgttcccatccaaatcttttgccagacaaataaataaaacacgaattttacaaaaagagaacggtcacacacgtttatgaataccgaccatttcaagggtcacaaacgaccagcgattttaatttacaacaccacgtctgtgaaacaaataataataaataccagttaacctgcttcagacttgagcacaggttgtgcaacaatggcgtgctccggcctgccaacacgcagttggtgttttgagatttgagattatatggccacactttttttcatcccaacaacggtttggtctggtttgcatccctttgacgggtatagctgctctttcaaaacatggtatggttcaaaatttt

SEQ ID NO: 9862 - DNA, 470 bp, Oryza sativa
  Clone ID: uC-osflcyp141g09a1
aactacacaatctcaacattaaaccagcagagtaaaatgcatacagacgagacgagttgcaatgcgacgacatgaccagatctcgagagcaaaagatatgtaatgtaatcaaaacttatttttctttccataacagagacgacagccccaaatacttgacttgtccactatgattttcttgacaaacttaggtaccagataacattgagaaaagaaaaagaaaaacataacataccacctataacttaccatacttttaacctaacaaaattactctccgaatgctaaatgtgcgttggagttcttatgggcggaactgaaatctcaagggcacgagcagattgattttgctcggggaaaaaacccaagaaatctcctcccaagcacccacactcacaggcccatcacaccaacatgaataactttagcaagctcttaattcacacgcagaaatccacctgccggaacat

SEQ ID NO: 9863 - DNA, 451 bp, Oryza sativa
  Clone ID: uC-osflcyp141g10a1
gtataatataactccaccattacaatggtttttagagggcatatcgaaattacatccagctgacgacgacggcgctcagcttcttcctaggacgtacgtttcagtttccactcctcttttgttcttcttttcgcggggacatgcaataagcacgagcccaaattaagttgattatttcgccagattaagcaaaagatcacaaaaaatgtcaagaacaagagaagaatgtcatcgggttcagtacatatatgcatcgatcgatgaattaggccgggaggtaggacggcggcagcggcaggccgacgaccttgccgcagcggagggcgttctccggcatgttgtactcgtcccggagcgaccttcccggcgagacgacgctgatgtagagctgctcgccgaggtagtgcctttcccagatgttggacctcacgttccacatcccggcgttgtc

SEQ ID NO: 9864 - DNA, 52 bp, Oryza sativa
  Clone ID: uC-osflcyp141h01a1
atattattaattttttattttttttattaatttaaaaatataattctaacaa

SEQ ID NO: 9865 - DNA, 334 bp, Oryza sativa
  Clone ID: uC-osflcyp141h02a1
ggaaaacaaattattggtatctatgaagcaatgatacaacagggccggagccccatgaaattatgggatgctcctggggaactgttgacaaataggggaaaatcctggcatttacagagtcgcaaacagcggttcttcctttttctttccggtggggagattcctttttcttttgccatattatttcctcttaccgcccccaagggacagcagctccaggctgcgggggaaaggctcgtcgggggacccttttgcaacggttgctcgggagagaaaaggggcccttggctttccaaccgagggattaaccctttgcgtgctggaaggaccgttt

SEQ ID NO: 9866 - DNA, 107 bp, Oryza sativa
  Clone ID: uC-osflcyp141h05a1
tttttttttgggtttttttttttttttttttttttttttaattttttttcttttgttgagtgggaccccgaggacacgacgggacaaccacgatgaaagaacacacc

SEQ ID NO: 9867 - DNA, 416 bp, Oryza sativa
  Clone ID: uC-osflcyp141h06a1
acgaacaaatctccatatagtaaacgaatattaatagtcttcaacactgttttgcttccaaagaacgggaataacatttgatttcgagtctttaaccgaaccctgtttttacactaattaaccgaccaaaccctattacaaagctgctaatgaaaacgagatctaaaacgcggaagcgagaggggaatcaacaaggtgaccacgtcacgtcgtcgtcgttgatccccccagatcggtttggggctacgcaacgcaaccgggttgaaggcgggggtttacgcgcgctcgccgtggatgcggggggcgagctggatgtccttgggcatgatggggacccgcttggcgtggatggcgcaaaggttggtgtcctcgaagagcccgacgagggaggcctcgggggccttctggagggcgag

SEQ ID NO: 9868 - DNA, 366 bp, Oryza sativa
  Clone ID: uC-osflcyp141h07a1
cccaaaaaggggaacactgggccccaaaaaggggaaaagggaaccgggaaaaagaaaacaaaaatttggtaaccaggaaaaagggggggaaaatgggacaaaccccccccaaagggggaaaaatgggccccccaattgggaccaaaacccaacccccggaaaaaacaaaaatttcccccccaatttggtaaaaaaaaaagggggtaactttaaccaagcaacaggggaaaaggaaaaaaaggggaggaaaaaaggccaaaaaagggggcccgaccgggggggccccccccgggggccaggggttaacaccaaaggggggccccttgtccccggaaaaaaaaaaatggggggcccccgaccccccca

SEQ ID NO: 9869 - DNA, 444 bp, Oryza sativa
  Clone ID: uC-osflcyp141h09a1
catcaggcaaaacatccaattcatgtgcaagcacaacggtccagaaaagttttagccaacacaaacaacaaacgacatactactgtacatatagaccccattttgtacaaaccgttccatattaacttgaaggagcacaaccctcccgataacgaaaactcagcaccaaatcattttctcaaaacataacttgaaactttgggggctgaacagatccgacacatggcattgataggcttgcattgttgttacatggggggatgctttaattgaggtaaatctgtagagcggttcatgatctacacgatggaagagaaaggcctccacagaaagcagcgatgatcaagtaaagtagaagtcctatgacagttgtcaacacagcaagaagcttggcatttttcatccaaagagctttcctgagcctcccggattgcttgcggaagt

SEQ ID NO: 9870 - DNA, 354 bp, Oryza sativa
  Clone ID: uC-osflcyp141h10a1
catgttcataagcttatattattgttgagaaaggatccaattctatacacatgcataaagcaaaatattttaaatcaaagatgtgtagggaaattttatagactccaatgctaccagaagtaccttaaatcacggatgcattagtgagtctttttgcaataatctccacattcttcagcagagcactatcacgaaccttagcacactgataatttagatgtatagcccttggttccaatattgctatactgtcccgtggccactctagatccgctccaccgctgatgtgggcagctcgctgttgaggttgcctcccccttttttcaatttgccaccccacctcattgacggttc

SEQ ID NO: 9871 - DNA, 463 bp, Oryza sativa
  Clone ID: uC-osflcyp141h11a1
aaaccagaacttgcacaccaccttttttttctttcaaggttggcaacaatccacggtttcaggacgaacaggtgaaaagacaaaaattaaaccggtatatattccatgcctatttccctttgatttgttcatacaagggaattcctcaacctgaacggtaataatttttccattcctgtatcatcattacactgatattacatgttctacaactgtaccagcaaagaaaagaaaggttatgtgactgcttctggagctgagttgcagtagggagtgtgcaagcaaatgaatctggtcgacatcaggcatacagaggcaaaggcgaaacctatcaaaagcccacagatgctcttccgcatgtccaaccttagcgagcgtttgaagactcggccaaagcttggaatcaaagcaccacaggcaatgaccatccagtagtctagtccactgtagtcaatcttcgcga

SEQ ID NO: 9872 - DNA, 468 bp, Oryza sativa
  Clone ID: uC-osflcyp141h12a1
caagaccaattaaattaacttattacagcaatgtacagaaataaaactgcccaagacctgggaccttgttatcttctgctatgtttatgcccgagtctttctggataaaagagagcccattagtgggaagaaagatttcttcctccgcagcttccgattcggaacaaggtcctcataactattacctgagaactctttgtagaaagaatccttctgttcaacaattctcttaggtgagctactcaaagggttaactgcccgtttcgcggcttcttgagctttcctgcgctgctcatgatcagctctccatttcctcagttcctgctcagcagttagtttcccttggtttgctctctcagctctctctaatgctctttcaagagcttccttcttctcattcatcctcttggatgcttcacatagtctctctaggctatttgattcagacgcctttgccgactccacctg

SEQ ID NO: 9873 - DNA, 192 bp, Oryza sativa
  Clone ID: uC-osflcyp142a02b1
gtctgcatcttctaggaccatagaactgctttgttttaattggacagtctgattccccttgtccgtaccagctctgagtcggctgttcgacgcccggggaaggcccccgagggggccgttcccggtccgtcccccggccggcacgcggaggtcagctgctcctccaccagcaactagagtagcctcgcccac

SEQ ID NO: 9874 - DNA, 442 bp, Oryza sativa
  unsure (1)..(442): unsure at all n locations
  Clone ID: uC-osflcyp142a06b1
gttttctcattctatcctcgggttatggattaccttgataattctacaacaaaagttatggctcttgtaataattcaaagcataatgaagaacacgacttgcatatctacttctgacaagattgaagctctttttgatttaattaaaggtcttataaaagatatggatggggctcaaaatgatgagcttgatgatgaggattttaaggaggaacagaattctgtggcgcgtcttattcacatgttgcacaatgatgaccatgaagagatgttgaagatattatgcaccgttcagaagcatatacttcagggaggtcccaagcggctacctttcactgtgccatccttagtattctctgctctcaaggtggtccgaagattacaaggtcaagatggtgatgtaatangggagaaggtttcctgaacccctaaaaaaatatttc

SEQ ID NO: 9875 - DNA, 322 bp, Oryza sativa
  Clone ID: uC-osflcyp142a10b1
cgttatgaggccagcgtcgtcccccgtgccggccgtcctcacggccccggctaccgctgccactgccgccatcgccgtaaagccaacgccgcctcaacgcgcgcttcaagccagcaggcgcgagttggtggtggcggcgggaggggtggcggcggcggcggtggcgctgtggccgtgcgggggagcggcgcgggcggcgtcggacgacgagtacgtgagcgagacgaaggacgtgatcgggaaggtgcggtcgacgatcaacatggacagggcggaccccggggtggcggacgccgtggcggaactccgcgagctggccaac

SEQ ID NO: 9876 - DNA, 483 bp, Oryza sativa
  Clone ID: uC-osflcyp142b01b1
ctatccttttttgaaacaagaaagataacaccaacagactagctagctcgccaatggcctcgttgtcctccttccggctctctgtggcagtggcggcattgttggtcgtccgctcgtgcgccactgaggtcaccttcaaggtcggtgagggttctagcggaaaaagtctagagctcgtcaccaacgtccccatctttgaggtggagatcaaggagaagggcggcaaggactgggtggcactcaaggagtcatcgactaacacctggtcgctcaagagtgaggcggcgctcaagggccccttttccgttcgcttccttgtcaagaacggcggctaccgggtcgtcgactactttcatccccgaaagcttttacgcccggttctgaattcaagagtggtatcaaccgcctattaattgacactgagtattcttgccttggggctgcatgataattattaacctctaaataaatttgccttgaaag

SEQ ID NO: 9877 - DNA, 539 bp, Oryza sativa
  Clone ID: uC-osflcyp142b05b1
gcccatacaagttttcaggctctcggtcccttctcgtgccgtctccccgccgccgccgtcgcccagcgccgcgcctccccgcccgccgttgccggcgacaagcccccgcagggagcgggctacctggagtccaagctgcagcctcgccctcccgctccgtgcgccgggcagcagcaagcgccgccccaagccctagcctcgctgcctgccaggtgcctgaagccccctcggcccgtgctccccttcctgtctgcttgtcggattcaccgattgtagcccgcaggcattttcaggatgggcagtgaggacacaaaagatatgctgaagaatgtggactggaaaacagttggtggtggttcagtgactactgacccaagccaaccagttgttaaaaagcgtcttccaaagaaaattagacaagttcctgaatgctattttctgcctcggcgatctttgccttctgcattggcaaactatggcgctgtgtgtgcctgctgagttggcgcacggatgctgcttgaggtttgaataaccaaaag

SEQ ID NO: 9878 - DNA, 477 bp, Oryza sativa
  Clone ID: uC-osflcyp142b06b1
gatgaatccatgaacgaaccattagcagctagctaggtcgcgggctgagggctgactaatcatggagcaagcagcgaaggccaccatctcactgtcgccgccgagttacgctggatgttgcatggcagcatgtccctaccgatcaacgcggcacctgcgcagaggaggcggctgctctgctcgctccatctcctccctccggcatgccccttctgctcgtgtttacgccgcagccgcagccgcagccgcagccacgccggagcccaagtcgacgaaagagaatgacctcgtcttcatcgcgggagccaccggaaaggtgggatcccgagctgtaagggagttcatcaagcttggcttccgggtccgcgccggcgttagaagtgcacagagagcatcgtcccttgtgcagagtgttgagcaactgaaagtcgatgacgatgcaacttcgcccgcagaaaggctcgagatcgtagaatg

SEQ ID NO: 9879 - DNA, 463 bp, Oryza sativa
  Clone ID: uC-osflcyp142b07b1
cagttgtgccgcctcttgcttcctcctcctcatcgtccgccatggcttctctcaccgatctcgtcaacctcaacctctccgacaccacggagaagatcatcgccgagtacatatggatcggtggatctggcatggatctcaggagcaaggctaggactctctccggccctgtgactgatcccagcaagctgcccaagtggaactacgatggctccagcaccggccaggcccccggcgaggacagtgaggtcatcctgtacccacaggctatcttcaaggacccattcaggaagggaaacaacatccttgtcatgtgcgattgctacacgccagccggagaaccgatccccaccaacaagaggcacaatgctgccaagatcttcagctcccctgaggttgcttctgaggagccctggtacggtattgagcaagagtacaccctcctccagaaggacatcaactg

SEQ ID NO: 9880 - DNA, 453 bp, Oryza sativa
  Clone ID: uC-osflcyp142b10b1
tttcggagttccactgccagatcaagaagaagctggagagagagcacaggagcaagcagatcaagaagaagaagacgaggaagatgcacgccaagacggactcggaggtgacgagcctggcgccatcgtcgccgccgcggtccccgacgtcgcgcggcgggcggtcggtgtactacgtgcagagcccgacgagggactcgcatgacggggagaagacggagacgtcggtgcactcgacgccggcgctgagccccatggggacgccgcggcactcggtgggcagggacttctagttcagccgcttcttcggccaccccaagcgcaagggcgacaagtccaggttcggccgcaagggcgccccggtcgggaaggggtcggaggagatctgcgtgatcgatgaggagggccttcttgacaactaggaccagcgcatgggcattcccaagcgctgta

SEQ ID NO: 9881 - DNA, 248 bp, Oryza sativa
  Clone ID: uC-osflcyp142c03b1
cgttgagtttgatgaagcctgcaaatggttcactgcgaactttgggggtctagcagctcatcgtccggcttgattcgaagaatcgagctgtcccaataatacccggggctgtctcaatcaaaaactgagaggtaactgcttgaatgaattgctactaacttcggtgccttgggtataccggcctcgtggtagcctgctgtgctacattgccctcattgcctcacggaatcttaactagaacttttatt

SEQ ID NO: 9882 - DNA, 465 bp, Oryza sativa
  Clone ID: uC-osflcyp142c06b1
tgttcgtcgtgctcctccgggccggcttcccgttcggcaacgcgctgaccaaggagatcctggacctgccggcgtacgagaagtggttcacgtcgcgcttcacggtggccacgttcgagaacgagatgaagtggtacagcaacgagtgggcccagaacaacgaggactaccgcgtcgccgacgccatgctcaagctcgcccaaaagtacaacatcaagattaggggacacaacgtattctgggacgaccagaactcgcagatgaagtgggtgacgccgctgaacctggaccagctgaaggcggcgatgcagaagcggctcaagtcggtggtgacgcggtacgccgggaaggtgatccactgggacgtggtgaacgagaacctgcacttcaactttttcgagaccaagctggggccgaacgcgtcgccgatgatctacaaccaggtgggcgcgctggacaagaacg

SEQ ID NO: 9883 - DNA, 455 bp, Oryza sativa
  Clone ID: uC-osflcyp142d02b1
gtttcgtgttttggagagcccatgaggctaagcagaagggacgtcactctggctatggtaagcgtaggggtacaagggaggctaggctccccaccaagatcctgtggatgaggaggatgcgtgtgctcaggcgtttgctgcgcaagtatcgtgaggccaagaagattgacaagcacatgtatcatgacatgtacatgaaggtcaagggtaacatgttcaagaacaagcgtgttcttatggaaagtatccacaagtctaaggctgagaaggcaagagagaagacactctctgaccagtttgaggctaagcgtgccaagagcaaggcaagccgtgagaggaagattgctaggagggaggagaggttggctcaaggcccaagagagccagcagcttctgcagcggcagcttctgcttaaactggagtggcacctaataaggctaagaagtgaacaccc

SEQ ID NO: 9884 - DNA, 335 bp, Oryza sativa
  Clone ID: uC-osflcyp142d04b1
atccatctttatctcatctcgccacccaaaaccctaaacctgcctcccatttccgccgccgccgccatgcagtcgcttgccctcacctccccctcccttccggcgccggagaccgaatccggccgccgacgacgtcgcctggagcgcatccgcgccaccgaggtgttcgacgagccgaagctgaacaagtacagtgcgcgcatcacggagcccaagtcgcacggggctgtcataggcggggctctacggcgtggggctcaccgacgccgaccttcgcaagctgcaggtgggcgcttcctccgtctgggacgagggcaacacctgtaacaagcacc

SEQ ID NO: 9885 - DNA, 331 bp, Oryza sativa
  Clone ID: uC-osflcyp142d09b1
tcggctattcttgagctcaatcagcaacaacatctatctccttcttgcttagttaagtccttcgccctcccaagaagaagaagatgtcttgctgcggcggcaactgcggctgcggcagcggctgccagtgcggcggcggctgcggcggatgcaagatgttccctgatgtggaggccacagccaccaccaagaccttcgtcctcgctgctccatccaacaaggcgagctctggaggaatggagatggcggtggacagcgtctagaaccgcggttgtggctgcaacacctgcatgtgtgggaccagctgcagcggttgctcttgctgcttctg

SEQ ID NO: 9886 - DNA, 459 bp, Oryza sativa
  Clone ID: uC-osflcyp142e07b1
cgttttcagctatcttttgaaatccggtggccttgagagtgagaaggattacccctacactgggagggatggcacctgcaaatttgacaagtcgaagattgttacttcagttcagaacttcagtgttgtctctgtcgatgaggatcagattgctgccaaccttgtcaaacatgggccacttgcaattggcatcaatgctgcgtacatgcaaacatacattggtggtgtttcgtgcccgtacatctgtggcaggcaccttgatcacggtgttcttctcgttggctacggcgcatctggttttgctccaatccgcctaaggataaggcctactggatcatcaagaactcctggggcgagaactggggagagcatgggtactacaagatcttgaagggctccaacgtccgcaacaaatgtggcgtggattctatggtctccaccgtgttgcattcacacctt

SEQ ID NO: 9887 - DNA, 388 bp, Oryza sativa
  Clone ID: uC-osflcyp142e09b1
gattgtcaagaaaggaaggattcacttggcaataacagttgaagatatatcagaggagaaggggttggaagaatcatcaaggaaagttgatgctgaactaccaatatcaacatccgtcaacaagtttaatgctgatgaactgcctgatgaaaagcaagtcttagtagatgaagtggagcacattaacattgatgggcaagaacaacctggaggattatatgtgcatcgccctggcactggagttcccaagacatgggaatcacggaaagggcgagcacgtaatccttgacacggagatttacaaagaagttgacaaatcaaaggatgcgccttaccccaaaaagcagtgtaccaggtggtttttttgcctcttttttcctgaagagct

SEQ ID NO: 9888 - DNA, 553 bp, Oryza sativa
  Clone ID: uC-osflcyp142e10b1
tcgtatttttctgagaagtgtgtggttagtactaacatagtaattgtaatggagacaatgcgtaaattcttcccagcaatcgccgtcctcctacttcttgttgttgccactgaggcgttggcgccagcgcaatcatcagtcaggccgtgcgagacgaagagcctccgattcgaggggttttgcatggtggaagataattgcgcaaacgtgtgtcggacggaggggttcgtcgacggcaggtgcagcaccttcgtgcgaaactgtatctgcatcaagccatgctaaggttgtccatcattatctcatgtggtcacttggcaactaattaattgaccatgcaaacaagggtctgcatggagctattaatttctttctttttttactttctttcttttctttttttttttgcaagcagatgtacgattctgcatgcatggcaaattcagctagaataaaacaccagcctgcttaatgcatggcgtttttttgctaggtcgacttaataattgtacaacaaagccagcctgcatatgggttcctctctggttttact

SEQ ID NO: 9889 - DNA, 550 bp, Oryza sativa
  Clone ID: uC-osflcyp142f05b1
ggttaaatgcgggcttgatgttaaaataatctacagtggtggccaagaccttgacatattacctcagggcgctgggaagggtcaagcacttgcatatttgcttaagaagttaagctcctgtggaaaaccaccaaacaatactcttgtttgtggggactctggtaatgatgcagaattatttagcatccctggtgtacatggtgtcatggttagcaatgcccaagaggaattgcttcagtggtatgcagaaaatgcgaagggtaaccctaaaattattcatgcaactgagaggtgcgccgctggtattatcgaagctattggacacttcaaactaggacctagtgtttctccaagagatgtggggtttccttatgttaaggaggaccatatcaaacctacagatgctgttgtaaagttttacgttctctatgagaagtggcgcagggctgaggttccaaaatcagattcagttgtacagtactttaaaaatatcactcatgcaaatggtgttatcattcacacttctgggcttgaatggtctctccatgcc

SEQ ID NO: 9890 - DNA, 554 bp, Oryza sativa
  Clone ID: uC-osflcyp142f06b1
catttatatttatgcaatattgtacagtactctacgagtagcagcctgatagtatgtgatatcgtgatccatataaataaaatactctgatatgtcatttatttttcataaattagcacgtgatacaaatggtttctcacattattcatcattttgtaaacatgtctgttgttcataattgtagctaatgcataactaaccattgtttctaataacacttattagctttatttagctctacctctggtagcaagttacccttttcatcattatttctttgtcttctaggcaatctatagatcattctaggacattgtttcctttcaatgaaaaatgcagggatcattgctccagttaaaggtggagtaggacttaaaactaccataactttcaaagagaaccctatctaaacacacccctaacatctgagtcagtcagctttctgggaccagtcctatcttgtaatgtggttgccagcttcctgacctattgctactttcattttgccaggccctgcttcgtacaacctgtaaatggcaaactaattagtaatg

SEQ ID NO: 9891 - DNA, 511 bp, Oryza sativa
  Clone ID: uC-osflcyp142f11b1
catgaatccaaatgttctgcagatgccactcatggtgctgcagaaaatgggaagccagattctgaggaaatatctgctccaatggatactgatgccaaggttgagccattgataaagaatgtgaagaaaattgatgttccagtttctggattggtttatggtgcactggggtctgaagaattggtgaaagcttctgagaatgagtatgaaatggctcttcaggacagagtaatggaagaaaccaaggagaaaaagaatgctgtcgaggcttatgtttatgacatgcgtaacaagctctatgacaagtacaacgattttgtcatgtctgagtacaaggaagggtttattgccaagcttcaggaggttgaggattggctgtacgaagatggtgaagatgagacaaaaggggtttatattgcaaagctggaagaacttaaaaaggttggtgatcctattgagatccgctacaaagagtgggctgaaagaagctcttctattaaccagctggtac

SEQ ID NO: 9892 - DNA, 503 bp, Oryza sativa
  Clone ID: uC-osflcyp142g11b1
cctttcctctctctcccctctcctccaaggtcatggcaaaggagaaataacagctagcgggcttggggaagggaaaacagcaagtgggagatcggcagcgagaggtgaattactacttgagtagaagtggtacaagaagagtcgtcgtctacctgtgagcgaattatttcgaggttgtgcgttgcgatgatgggaggtggtctggtgatggaccagggcatgatgttccccggcgtgcacaacttcgtggatctcctgcagcagaacggcggcgacaagaacctcggcttcggcgcgctcgtgccgcagacgtcgtcgggggagcagtgcgtgatgggggagggcgacctcgtggacccgccgccggagagcttcccggacgccggtgaggacgacagcgacgacgacgtggaggacatcgaggagctggagcgccgcatgtggcgcgaccgatgaagctgaaacgggtaaggagctgcagctgagccggtgaaggaccccgc

SEQ ID NO: 9893 - DNA, 392 bp, Oryza sativa
  Clone ID: uC-osflcyp142h02b1
cccacggcatgcgaattactaaaccgaggagagaaaaaaaaagggttcgcagcacaaagcaaagagctgatcggcgaagcgggtaaaggaggacactatatggttaaagagcgccagcgattgagccgactagctcacggttttacacagggatgattgggatcgaaccctggtaacctacatgtctggggcgccacgctccaaccttggacttgttcccagggatatgcatggtagtatccctattagcactacaaattaatctgggccaagcattggtgttagctctttggtgacggatgctaactcatcgctctccggaggtgcccagttgcagccaagtacgagcatgaatgctgattcattcatgcgccttcctgctttcccaatgt

SEQ ID NO: 9894 - DNA, 336 bp, Oryza sativa
  unsure (1)..(336): unsure at all n locations
  Clone ID: uC-osflcyp142h03b1
gcttagccgttttgcggcgacgcggcggcggccgtggtggcggcgcggaaggggatggagacgccgctgacagacgtggcagaggcgttcgaggagctggcccggaggatggaggccgacggcggngagctccgcctcgggcccttcggcgacacgtgcgcgctcgtctccgtgctcttcagctgcctcggcatggccttcaggttcgccgagatcgagtacgtcgccaaggtgaacgacctcatcggagcggcgaagtcgtacggcacgctgaacgacattctggacaaagacgtcgagaacgactgcgttaagaagcaaggcagccacttcccg

SEQ ID NO: 9895 - DNA, 478 bp, Oryza sativa
  Clone ID: uC-osflcyp142h04b1
cattttcattttaaggacgaggtcctcccccttatgctggtggtggcatgggcggagccggtggtccgaggggcggtggtggcagtggctatggtgttggcggaccaaattatcaacagggtggaccttatggtgcatctggtccaggtcgaggcccgaactataatcaaggtggttctcgcaatcaacaacagtatggaaactggcaatagcacggcggtatcatgagcagcaaatgcccttccggtaggactctgtatgttgaaagaacctctgatgttgtatttgagatatactttttgcatggtgtattcagatccaggcatctctcggaagtatgatgtttatgactagctgtatagtatggcactgatgtgattcccaatgtttgatgtactagtattattattactgcaagaatgtggaaagacatgaaaagttgttattaggatcaaaactttgtgtaaaaaatataatt

SEQ ID NO: 9896 - DNA, 439 bp, Oryza sativa
  Clone ID: uC-osflcyp142h11b1
tcgccttgccctagcgccgccgccgccgccgccatgaagttcaacatcgccaacccgaccaccgggtgccagaagaagctcgagatcgatgacgaccagaagctccgggcattttatgacaagaggatctcccaggaagtcagtggtgatgctcttggcgaagaattcaagggctatgtattcaagatcatgggaggctgtgacaagcaaggtttccccatgaagcagggtgtgcttacttctggacgtgtccgccttcttctccacaggggtaccccctgcttccgtggatatggcaggcgtgatggtgagcgcagaaggaagtcagtccgtggttgcattgtcagccaagatctctctgttatcaacttgggtgatgtaaagaagggtgataatgaccttcctggcttgactgacactgagaagcccaggatgaggg

SEQ ID NO: 9897 - DNA, 313 bp, Oryza sativa
  Clone ID: uC-osflcyp143a02b1
ctcttcctttgtgctttgccatgggttgtggaaaatacacgaccacaggagaaggctacggcaaagaattcaggaaatcagacaggaaggaacaacaaattcagacacgttgtaacagatcatgagatggtagctagctagcaccgcttttcttgaatggcaaaatgggatgatcagatcagatcacagaaccatgtacaagacacagctgacaatttttgatgatccttaggtaggtatgtacttgtacgtagaagatagaaagattaagtcaacatgtacatagacagtatatttgttgtatatcctcagc

SEQ ID NO: 9898 - DNA, 334 bp, Oryza sativa
  Clone ID: uC-osflcyp143a05b1
cgtttggtttagctgaacgccgccgcgctcccgctgctcgacctgccggagcttgcgctggagcgcgtcctcgaggagctggagccgccgtcgctcgcggcgatggcgtgcgtgtgcgtcgcgctcagggaccgatgctctgcggacaccctgtgggggcgccacgtcaaccggaagtgggggcgcgtgctcggcgccgccgtgcgcaaggagtgggaggcggagctggccgcacggcggagctccggcgcgctgccgcggccggccaggcggaggagcttggcggactcgctggcctgcgcgtggcccttttcttggatcacctggcgctggg

SEQ ID NO: 9899 - DNA, 474 bp, Oryza sativa
  Clone ID: uC-osflcyp143a07b1
gcccttcttctctaccagcggcagcggcggctggtagggaggaggagatcgccaccagatcgccatggagacgctggcgagcgccatgcggcgggagaaccgccgcttcaagcccccctcctcctcctccgcctccgcctccgccgccctctcctcggggagggtccccctcgtcatggccttcctctcctgcctcgcgtggctctacgtcgccggccggctgtggcaggacgcgcagacgcggatgatcctgtctggtctcctcgagaagagctccggcaatcttccgaaggtgctgtcggcggaggacaagctgaggaatctaggatgcattggaattgggaggaagattgcggaggcagaaatggaccttacaaaggcgaagagcgaggggtatctgtgggggaatggaactgctactggtagttctgacaagaagaagctccttgctgttattggagtttacactggttt

SEQ ID NO: 9900 - DNA, 472 bp, Oryza sativa
  Clone ID: uC-osflcyp143a08b1
tatcttctctcccacaaactcatcatcgtgtagttttaggccatctgagggcctttgaatggctctcggcctccttcatttttcatagcatttgtgtagtgtgtgcaaatccatcatcgcatcttcatatctgaagaaatgaaggtgaccactcagctcaagcccatggcctcctcgtcgacgtcgccgtcgccgtcgcggctgccgcggagcgcgagcggcaaggcgcccacctcgccgccgtccagctccaacgcctcgcgccgtcaccaccagcagccgccgcgggcctcggcgtcgacgcccgccaccccggcgccgtcgcgccaccacctcaggtcgctgtccatcagctgcatgacgatcaggaccgacgacgactcgccgtcgtcggtcgtcacccacaaggacatggcggcgacggccaagccgctgttctactactcgtcgatgctgtcgccgaggaagctca

SEQ ID NO: 9901 - DNA, 505 bp, Oryza sativa
  Clone ID: uC-osflcyp143c02b1
ccacgcgtccggccgtttgtgacggagctcatgctcgccgagtacctctacctacagaacgacgactccgagaagcccatgtacctgtacatcaactccaccggcacaaccaagaatggcgagaaattgggctatgagacagaagcttttgcaatatatgatgctatgaggtatgtcaaagttgcaattttcaccttgtgtgttggcaatgcatggggagaagctgctttactcttggctgctggtgctaaaggtaaccgtgctgcgcttccatcgtcgacgataatgataaagcagccaattggtcgctttcaaggacaggcgacagatgttgacatagcaagaaaagaaatccgaaatgtgaaaatagaaatgattaagctgctgtcaaggcatatcggtaaatcaggagaagagattgctcaggacatcaaacggcccaaatatttcagtccaagtgaagctgtggattatgggatcattgacaaggtgctgtacaatgaga

SEQ ID NO: 9902 - DNA, 306 bp, Oryza sativa
  Clone ID: uC-osflcyp143c03b1
tgatcacatacgctgtaaagctgatggaatccacatcaccggatgggttcgtttaacgtgggcgtattcttgatacactcatcaagtctaatagagatgatgcatggtggagcgaatttcatgggcagagtatgcagatatacaatatgattggatctgtatcctacagtgccatactccacaacttaattcagacgctggatttgaaaagtgcatatgatggagagatcaggtcgggagccgcaaggattgttgagcactttgctggtgaggtccgtttagacaaaatcctgcaagggattcgat

SEQ ID NO: 9903 - DNA, 508 bp, Oryza sativa
  unsure (1)..(508): unsure at all n locations
  Clone ID: uC-osflcyp143c04b1
cgctggtcacaacacacacccacacccactcccccactctctctccggttcatgtcctgctgctccccatgtcgcccccactcgagctcgactacataggcctctcgccgccggtgcccgccgccgccgatgccgccgccgacaacgacctgaagggcaccgagctccgcctcggcctgcccggctcccactcgccggaccgctccccgcccgccgtcacgctcgaccttctccccgctgccaagggcgccaagcgcgggttctccgacgaggcgcgtccgctgccggcgtccgccgccgccgccgccgccgccgggaagggcaagaaggcggcggccggcgaggaggatgaggatgcggaggaggaggacaagaaggtcgccgccgcgccgcaggcgcctgctgccaaggctcaggtggttggatggccaccaattcgcagctaccgcatgaacacgatggctactaaccagctgaagagcagcanggaggatgctgaagcgaagca

SEQ ID NO: 9904 - DNA, 109 bp, Oryza sativa
  Clone ID: uC-osflcyp143c05b1
gctttgcttttgatggcggaatatatggcggcgagcgcgcagacgtgggtggaggtggcggcgctgactcatgcgaagctgccgcagctgccagcgatggagggggcgg

SEQ ID NO: 9905 - DNA, 517 bp, Oryza sativa
  Clone ID: uC-osflcyp143c09b1
ctctacccttcaagaaacaagaaagacaacaccaacaaactagctagctcaccaatggcctcgttgtcctccttccggctcgccgtggcagtggcggcattgttggtcgtcggctcatgcgccactgaggtcaccttcaaggtcggtgagggctctagcggaaaaagtctagagctcgtcaccaacgtcgccatctctgaggtggagatcaaggagaagggcggcaaggactgggtggcgctcaaggagtcgtcgactaacacctggtcgctcaagagtgaggcggcgctcaagggccccttctccgtccgcttccttgtcaagaacggtggctaccgtgtcgtcgacgacgtcatccccgaaagctttacggccggctctgaatacaagagtggtatcaacgtctaattaatagacatgcgtactcttgcattgggttgcatgataattattaacctctaaataattttgtcttgaaaaagatcacgctacgcgtgagcatgcaacaattaatttc

SEQ ID NO: 9906 - DNA, 274 bp, Oryza sativa
  Clone ID: uC-osflcyp143c12b1
gactatgaatgacgaattttagtatttactttcaaaattctgtattttgctattcgaacaaaacccaacctatgaggctattaatctgtgatgtattgatgtcaccagagaggtttgccatccttattacatttcgtcactggtcacgtgaacctgtcatggtttttccaacgtttcgacctgtttaaccgaatccgcctgttttttcttaagggtttcaggtttttcaaagctgaaagggggcggaagttccaagggttttccgtggcccgaa

SEQ ID NO: 9907 - DNA, 436 bp, Oryza sativa
  Clone ID: uC-osflcyp143d01b1
gaccttatttgctttccccccaccacctccaagatattttcccacctccgccgtcgacggcgccatggagtccggcctcgtggcaagccaccgcctccgcgtccgcttagccgccggccaccaccgtcaccacccggccgagccgtcgcacctcctccgccagcggcggggcagcgttgccgccaccccactccggctcgggctccacctccccacgccgaccccgctccgcctccccgctcgagctcccgctccgcccttccctcccgcctctccgcgccgtcgtcgggtaggcggcggcaccggagccggtggggtcggcctcgcccaagttcctgggcgtggagacgaagacgctgaagaagatcgtgccgctggggctcaatgttttttgcattcttttcaactacaccattctgtgggacaccaaagacgt

SEQ ID NO: 9908 - DNA, 290 bp, Oryza sativa
  Clone ID: uC-osflcyp143e04b1
accgttccctttcctttcgaccccacttttttttttttatctctaccaaaatttgtccttggcggggattcttttttgcctggtggggggcacacacgcgtcggagaagatgagggacatcttgcacatccagggcgggcagtgcgggaaccagatcgtgtccaagttctgggaggtggtgtgcgaccagcatggcatccacccgacggggaggtacgccggcacttcggacctgcagctggagcgcgtgaacgtctactacaacgaggcgttttgcggtcggttcgtgc

SEQ ID NO: 9909 - DNA, 311 bp, Oryza sativa
  Clone ID: uC-osflcyp143e05b1
gcgacggtgagggagctgcgagatccggccgtgagatggtggtgatccgaaggagtcatcgtcatcgtcgtcgggttggagcctcttcgtccaagaacctgccttgatcttgcagccttgttcaagcttccgagtcttttgctgatccagggtgcagtttcttagcatgtgagtaatggcagctgctgaaacaagggctgcttggcagcgtgctgctaaccgctgccgggttcaagaggacgcatagagagctccgaaacttggttgctgcccgccatctgggcaacagcatgagaccaacaatggaaatc

SEQ ID NO: 9910 - DNA, 452 bp, Oryza sativa
  Clone ID: uC-osflcyp143e08b1
gctgtcttcgacgagctccagcccgtagacctcgccggatctccccgatggccgtgaccttcaccgacctccacaccgtcgacgggctcaaagccctcgagcagcacctctccggcaagacctacgtctccggaaacgcgatcagcaaggacgacatcaaggtgttcgccgccgtgccatcaaagcctggagctgagttcccgaacgctgctcgctggtatgataccgtcgctgcggccctcgcttcaaggttccctggcaaggcagctggagtgaatctgcctggaggaggtgcggcatcgtctgctgcagcggctgcgccagctgctaaggatgctgatgaagatgatgatgacccggatctttttggtgatgagaaccgggaagacaagaaagcagcagatgagcgggcagcttccaaggccctttcaaagaagaaagacagcggaaat

SEQ ID NO: 9911 - DNA, 402 bp, Oryza sativa
  Clone ID: uC-osflcyp143e09b1
agcccgtcagtgttgcaattgaagccggtggcagagcattccagctctactcatcgggtatcttcacgggtaaatgtggaacagcactagaccacggcgtcgctgctgttgggtacggcacagagaatggcaaggactactggatcgtgaggaactcgtggggcaagagctggggtgagtccggctacgtccgtatggagcgcaacatcaaggcgagcagtggcaagtgcggcattgccgttgagccatcctaccctctgaagaaggggaggaaccccccgaaccccggccctactccgtcgttcccaaccccgcctcccaccgtctgcgacaactactacacttgccccgatagcaccacctgctgctgcatctacgagtatggcaaatactgctacgcct

SEQ ID NO: 9912 - DNA, 470 bp, Oryza sativa
  Clone ID: uC-osflcyp143e11b1
gcttaatctgcactatatccatgacaaagtcgcagatgtgctccgcgaggcggggtgcaccttcatggtcagtggcccgtggttcctcaacatgaacttcttgattacctgtgacccagccacggtcaaccattgcttcaatgccaacttcaaaaactacccgaaaggcagtgagtttgctgaaatgtttgacattctaggtgatggactccttgtggcagactctgaatcatgggagtatcagcgacgcatggcaatgtacatatttgctgcccgtacctttcggtcctttgcgatgtccaccatcgcgaggaagactggcagtgtcttgttaccctaccttgatcacatggctaagtttggctcagaggttgagctggagggtgtcttcatgaggttctcactagatgtgacatactctactgtgtttgcagctgaccttgactgcttgtcagtgtcttccccaatcc

SEQ ID NO: 9913 - DNA, 518 bp, Oryza sativa
  Clone ID: uC-osflcyp143f01b1
ggttgatgttctctccagggacatcagatgaacatatttcaggcgttcagtaccttcaagccacaggaattgatggtgcaataattgtgaccactccccagcaggtctctctaatcgatgtgcggaaggaaataaatttctgcaagaaggttggtgtgccgatcttaggtgttgtggagaacatgagtggcttgcggcaggttctctcagatttcagattcgtgaagcaaggtgagggaggcgagacggatgctacagaatgggcgctgaactatatcaaggagaaagctcctgagcttttgacaatggttgcatgcagcgaggtgtttgatagcagcaagggtggcgcggagaaaatgtgcaacgaaatgggagtacctttccttggcaaggtgcccatggatccacagcttttcaaggcggctgatgaagggaggtcatgcttcgtcgatcaaaagtgcagtgctagtgcaccaactcttaaaagcatagtcaagaagctgatcgaaaatcaagat

SEQ ID NO: 9914 - DNA, 487 bp, Oryza sativa
  Clone ID: uC-osflcyp143f03b1
gcgagggccgccctttttttttttgttaatgatctgcatgctttgattagtcctcctgccaaaggaactccactacccctgatcttacttggaaagtcgaagaatgcactgctatcaactttcctctttctggaccaaattgtatgggctggaaggacaggaatatacaagaacaaggagcgagcagaattcctcagcaagatagcattttattgcttcctgggttctaacacatgtactagtattattgaggtagccgagcttcagcggctatccaagtcgatgaagaaactagagaaggagcttaaacaccaggagctgttaaagaacgagcaataccagatgaaactgcagaagtgcaacgagaggcgtctcgctctcatcaaatcgagcctcgacatagttggtgctatagggctgcttcaactggctcccaagaaagtgactccgcgtgtgacaggggcgtttggatttgctagctcactca

SEQ ID NO: 9915 - DNA, 499 bp, Oryza sativa
  Clone ID: uC-osflcyp143f04b1
cccgtcttcttcctccattccttcggcggttgaaccttctagaagctttcctcctcctcccatggcggcgacgatcgtgtccgtcaaggcgcgccagatcttcgacagcaggggcaaccccaccgtcgaggtcgatgtgtgctgctcagatggaacctttgcaagggctgcagttcccagaggtgcatcaaatggggtgtataaaacgctcgaattgggggggacgggggatctgatcactggaaagggggtgttcccagggctgtcgacagtgagaactgggttattgccccagctctgattggcaaggaccctacgtcacaggctgagcttgataacttcatggttcagcagcttgatggaaccaaaaatgagtgggggtggtgcaagcagaagcttggtgctaatgcaatcctggctgtgtcactggccatctgcaaagctggagctatcatcaagaagattcctctgtaccagcacattgccaaccttgctgaaa

SEQ ID NO: 9916 - DNA, 519 bp, Oryza sativa
  Clone ID: uC-osflcyp143f08b1
gatgaaacctttaacaactttggagacaaactagaccgcagaactgtggtgcataactggcttggaggtggagttgcagagaaagttgttgctgctggtttgagatgcattgtgagcaaccaggataagtggtacctagatcacttggaagttacatgggatggattttatatgaatgaaccactgagaaatatcaagaacccggcacagcagaagttggttcttggtggtgaggtatgcatgtgggctgaacacatagatgcgtctgacattcagcaaaccatttggccacgtgctgcagcagctgcagagcggttgtggactccgtttgagaagctttcaaaggagtgggaaatagcagcgctcagcgcaagactggcacgcttcaggtgcttgctgaatcatagagggatcgctgctggaccggtaactggttatgggcgtttcgcgccaagagagccaagctcctgtttaaaggcataggatttccaaagcagataaatattatattataatatt

SEQ ID NO: 9917 - DNA, 477 bp, Oryza sativa
  Clone ID: uC-osflcyp143f09b1
cgcgccgtcgccagcagccgccgccgctgcctctcctcctcctcccctcgccgccgatccaatccggtcactttcagtcttttttcttgagggggagatggcggtttctttcaccaacgttagctcagaggcaggcctcaaaaagctcgatgagtaccttctcactcgcagctacatctctgggtaccaagcctccaatgatgacttggctgtgtactctgcattttcaactgcgccctcttcaagctataccaatgttgctaggtggtttactcacattgatgcactcctacgtctgagtggagttactgctgatggtcaaggcgtaaaggtcgagtcgacagctgttccttcagcttcaacccctgatgttgctgatgcaaaggctcctgcagctgatgatgacgatgatgacgatgttgacctttttggtgaggagactgaagaggagaagaaggcaactgaggagcgtgctgc

SEQ ID NO: 9918 - DNA, 404 bp, Oryza sativa
  Clone ID: uC-osflcyp143g01b1
ggtttatttttcggcgaagctgaagcagagcaagcgggaggtgcggctggagcagtggctttcgcacgatcaagatcggacagaggtgaaagctgtggtatcccctggagcagcggtaggagccaactccgggtcgccgatcctcgcatccccgcaccctccactccctcgccggcgggtgtagattaggcccagggaaggccatccagaggatttcaaggaggattcatttggcgctagccaggatgttggtagcagtgatcatgagtctccgttgcacagtcctgttttctacaaccctgctattggctgcttgcagcagaagcactggtcgggcaatggtggtggccgtagcttcagcgcgggagcagtgcttggtccagctctcggagtgtgactgattc

SEQ ID NO: 9919 - DNA, 440 bp, Oryza sativa
  Clone ID: uC-osflcyp143g04b1
tggctcggcccgcctgcacgggccggtccttactggctggacccacccacgcgaagatatatcggttttcttcaaactctatgatcctgaaaaggaacaactgcggtatgttggtaggctctttgttaaggcttcgggaaaacctcaggacattctgccaaaactgaggaaaatggctggtttttcacaggatgaggaaattgaactttatgaggaaatcaagtttgagcccaatgcaatgtgtgaatatattgacaataggcttctatttcgagcttgccagcttgaagatggtgacatcgtttgttttcaaaaatctccaaagccagatactgctgaccaatatagataccctgatgtcccatcctttctggtgtatatacggaaccggcagggagtccattttcgttcattggagaagcccaaaaaagatgattttt

SEQ ID NO: 9920 - DNA, 261 bp, Oryza sativa
  Clone ID: uC-osflcyp143g11b1
tttcttgacatgatcggggaggtcctaaacagctggggattgtttaataatcataagggtgccaaggacctgaccagatctggtcaaggcccactccctggatgagaagcccacggtccaaaattgctcatccaccatgatggtcttactgacttggatgatgatgacaataacctgtgggctccctctaacccataccggcacctagtggagcatcctccttatagacccaaggcacacgtgaaaaatcaattgttgcac

SEQ ID NO: 9921 - DNA, 411 bp, Oryza sativa
  Clone ID: uC-osflcyp143h01b1
gcgtaatttgttgggcagcgggtgcggtagcagtagaggaggagaggtagatggatggagcaatcaagccctgctccggccgccgccgccgccgccgccgctgccgccgggcgatccccttaccctcgctctgtgcacccgcaccccgcacttaccccctccatggcgtgatccgatgatagcaacgagagcggtgcttcccctttccctgacggcgtcggcctccggcctgtacggcgcgcgcaccaagaagaggaggaagctgctgctgctgccgcgggtgccatgtcgcccaatctggagagccacatcaagagccaggtgccggcgctgctgctgaggcgcttcttcggcggggcggggcggcggcgggtgttcgtgcagacagagactgggtgcgtgctgggcatg

SEQ ID NO: 9922 - DNA, 324 bp, Oryza sativa
  Clone ID: uC-osflcyp143h06b1
caaaccctaacgtcgtcatgggagccctcgtgggcgggccgttccagaatgacactttcgtcgactctcgggacaatgctgttcagacagagtcaagcacttacaacagcggcaccctcgttggtcttctttctggtctggtcacaacttcctctgtggcgcagtcgttcacctagagctctctcagagtttgggcaatggctttgaccaaccgggaggatatacatgtagccatgtacaatgagagatttttggcgtgaccaaaggcaatgtgccatcagcgaaacgccctcacggggttctttcgtggtcatcctttgggtg

SEQ ID NO: 9923 - DNA, 234 bp, Oryza sativa
  Clone ID: uC-osflcyp143h11b1
acgaattaattacctacgtatatcgattaattagtgtcggattatacgtactattatacgtacgtgctgtgctatgtacgtagacaacaaaaaaaaatgtgcgtgatgagttctactacgtacgtacgtactgtgttctagtgttttaatttgtatccgaaccaaggagttgtttaattaactgcatgcacatgcactggacttgaaaaaaaaaaaaaaaaaaaaaaaaaaaca

SEQ ID NO: 9924 - DNA, 370 bp, Oryza sativa
  unsure (1)..(370): unsure at all n locations
  Clone ID: uC-osflcyp143h12b1
tcgtgctgcgacgggaggctcctatgcgagccatgcagatgcatgctacaaggttacaatggaactagtcctaatcaagaaaagtaccaatactgaagattcataggatcatatcatatactattgctgggaaactaaagccagaaatggcggacatgaggcgccattcggtagatgttccactgtcaagaacattggtgcagctgaagagagtgaggtcgctgcgggatccagcaacaaactctttgagcaagtatgcatctccttctgcaatatgatctgggagaccgcttttagcaatggggttgcaatgganctangcaggtcagcacatcatcagttgatcgaagaaatggagatttggaagctg

SEQ ID NO: 9925 - DNA, 278 bp, Oryza sativa
  Clone ID: uC-osflcyp144a02b1
tagttttttatttctgaccgcagagcacaggtacttgtgaggacatgggaaggattctgcattttaccggtagcaagtgcttgatcgttgcttatgacagtccaccagtagtatgacccatgcatggaaaaactactcctaatgagttcatttcatgaagtatactgtcatgctggacatattgactggcacctggaagttaagtcacatttgcatactgacacaacttaatgaagtggacccattcctttattaagtactgcagaaccacatgtatg

SEQ ID NO: 9926 - DNA, 278 bp, Oryza sativa
  Clone ID: uC-osflcyp144a04b1
ttggcacatgctgctctagcttgctacaggctttagtggtgagtatagtgatcagatgcgactagctagcttggttgattatatcgtcagagactgctccggcctgcgtctccgaccagcaccccgtggtggtgtccgcggagatgctgagggacgtggtcatggacgccgtcagtgtgtccatggcctagtccggctggttcgtcaaggctgccggcggagcccacgccaatgcgggctccatctacaccatgaagcttaacccttccgccggtgtg

SEQ ID NO: 9927 - DNA, 275 bp, Oryza sativa
  unsure (1)..(275): unsure at all n locations
  Clone ID: uC-osflcyp144a11b1
ctcttcttcttcttcaattttcctcgcaccgtcggcgaaggcgaagcggaagaggcggcggagcagtagctagtctactagctagtagtagtagctcgccggcgagcggagaggaggagccgaggaggaggaggagcttcgtggccggccgggccgccatggagagccgcaaggaggaggagcagcatgggggaggaggggcggtggggtggatnactgtgccggcgttcggtgtgtgggacatgaagaacggcgcggtgccggacttctccatg

SEQ ID NO: 9928 - DNA, 335 bp, Oryza sativa
  Clone ID: uC-osflcyp144a12b1
tggcaataaataaacgatggatcgtcccaacctcgccgtggccgtggtggggctactggcggtggtggcggctacgctgccggcgccgtcatggcagttcttcgacctattcctccccgccggtcccagccaccgtttcttcggcggagggtttggcatgcgggtgctgatcaaccacgaggagtccgttccgaagaagtcgctgtacgctatgatggccgccggccacaatctgtgggaagaccatttactcgagccttttcgttggttggaggaggcctaatgcgacctgggttggttgactccaagggtaccccgggcgacatcacctttac

SEQ ID NO: 9929 - DNA, 484 bp, Oryza sativa
  Clone ID: uC-osflcyp144b04b1
gcgtggagcctgcgtggctcgtggacatcacccagtgagaggctgggacggcggatcaccacaattagctgagctaataaaaccttttgttaaactggttacaccaagcaacaacaacccatctaatgggcatgctgatggttcctgcagctcctcaactggtttgccccaaacacaggttgatcccaaaactaatgacgagcccaaaatagacacaagtttggggtcgcaacccttggacacgcagaactccaaatcatctggtgctagaggtcttaagactctgtcagttgaggctcctgctacatcgggtgttaaatcttctcaaggtcaacaggcatcattatacccttccattgaggagttgctgttctccccctttttaccgaactcaggtgatgacaaatctgccagcaagggaattagtgatgctcaaagcaagggaaaatctgttatgacctttgctacaccacctaccccttct

SEQ ID NO: 9930 - DNA, 355 bp, Oryza sativa
  Clone ID: uC-osflcyp144b05b1
ctgctgcacctgccggtaccgaatcgcaggttcgggctagacccacgcgttggggttggacgcgaacgatggtggctactacaacgggacgagttgttgcactcggcgcgggggccgtggtggaggcgctgacattcctcgccggcggcgcggacgccgactgctacgacttctgcttcaaggactgcatggccagggagaacaacatggacgactactgcagatacgcctgcgacaagacgtgccagccggacaagcccacgctgtactcgtcgtcgtcgtcgtcccgcctcgccggcgacatggagtgccaactatcctgcgccttgggctcctgacaccgtctatttccgga

SEQ ID NO: 9931 - DNA, 473 bp, Oryza sativa
  Clone ID: uC-osflcyp144b06b1
ctacgcggggaaggttaggggggtaaagcctcgggagttgctccttagccgctgctgctcctcccgtgccgccgccggatcgcgccagcgcgtgtcttcctcgcgcggcgatcatggcggagcacactgagagggcattgctgaagcatgctaaggttgttgtctgtgctaagaaaaccaccaaggggaagaagcctggcaagggcgggaataggttctggaagaacattggccttgggttcaagacacccagggaagccatcgaaggaacctacattgacaagaaatgcccattcactggtactgtatcaattaggggtcgcatcatagctggaacatgtcatagtgctaagatgaacaggaccattattgttcggaggaattatctgcactttgtcaagaagtaccagaggtacgaggagaggcactccaatattcctgctcacatttcaccgtgcttccgtgttaaggag

SEQ ID NO: 9932 - DNA, 523 bp, Oryza sativa
  Clone ID: uC-osflcyp144b09b1
tactttcttgcgccacaagccgaagccgccggaatcctcgacgagacgccccgccgccgccgccgccgccggcgacgccccccctcaccccccgcaggcatcggagaaatataatataaatacagttaaggggttgaagcaacttcacaatgagtagcatagggactggttatgatctttccgtcaccaccttctccccagatggccgtgtcttccaggttgagtatgctggcaaggccgtcgacaacagcgggactgttgttggcatcaaatgcaaagatgggatttgtccttggtgtggagatgctggtaacatcaaagatgattttgaaggggtcgaatcggagactccactctgtgcaccgacactctggcttggctgttgctggtttagctgcggatggtaggcagatagtctctagggcaaagtcagaggcagccagttatgaaaaggtgtatggagaacccatgcctgtaaaggaattggctgatcgtgtagctagctatgtacatttatgtaccc

SEQ ID NO: 9933 - DNA, 527 bp, Oryza sativa
  Clone ID: uC-osflcyp144b11b1
ggctcttgggggcggtaaaactgctgatgtactattatggaaagacaagaagacatccgctgtagtgattggtggtgcaactgtcatatggatcttgtttgaagtgcttgattaccatctcttgactctgctttcccatgtgatgattggtgccttggccatcttgttcctgtggtcaaaagctaccacatttatcaagaagagtccaccagatattcctgtagtacagatacctgaagatgtcgccgtgaacgtgtcacgagcattacgcagtgacataaacagagcacttcacctgtttcgggagatcgcgttggggcatgacctaaagaagtttctgggcgtgattgttgctctctgggttctctcagaagtaggaagctgctgcgacttcctcaccttgatatatgatgccgtcctgatgctccacacggtgccgatcttgtatgacaggtaccaggatacggtcgaccactttgctggacgggctcactctgaggcctgcacgcactatgaggtgctggatg

SEQ ID NO: 9934 - DNA, 481 bp, Oryza sativa
  Clone ID: uC-osflcyp144c08b1
cttgaaggaacttgttcgtagatcgattgcagcaacagaggtttgtgttgattttcaattctcagtgaacctcagtagatattactgatcactcaatgacactcctgcattgactgtttacattggttatcttggatgccacaggagttgaagcgtttcccaacacttcagacagatatagctgctgcagcaaatgaaagcctggaaagatttcgtgaggatggtcgaaagacagttattcgtcttgttgagatggaggccagctacctaactgtagaatttttcagaaaactccctacagaaccagataagggggctaataataacactccagccaatgacagatatcaggacaaccatttaagaagaatcggtaacaattcaacattctattttgtttctttaatggcaattgattgagtcaactgttctaagacctcaacacagaggtcacacgaagtacttaacaaactgacttaat

SEQ ID NO: 9935 - DNA, 417 bp, Oryza sativa
  Clone ID: uC-osflcyp144c09b1
ggaagagaagaggaggggtctctgcttcatctttcttcctgagctggcttctttactacagccatggctaaagagtatcctgcctcccccaaagctcagcagctgcaagaatccaagaagcagcggctcacctacatcctcgtggtgagcgcgctctgcgtcgccttctacgtcctcggtgcgtggcagaacaccacagtgcccaagccggcggcgagctcggcgatcaccaaggttggctgcgacccggcggcggcggggcagtcctccgccgtgccgtcgttcgggtcggcctcgcaggagtcactcgacttcgaggcgcaccaccagctcagccttgacgacacggacgccgaggcgggcggtgcagccgttccccggcgtgcccgctcaacttcagcgagtacacgccgtgcg

SEQ ID NO: 9936 - DNA, 296 bp, Oryza sativa
  Clone ID: uC-osflcyp144d01b1
aggacctactgtgccgagattgcccacaacgtatctacgaagaagcgcaaggagatcgttgagcgtgctgcgcagctcgacatcgtggtcaccaacaagcttgcaaggctccgtagccaggaggacgagtaggctgttttatcagtataatgttttggtctggtttgattgtaggaaactgtcgcgcctccaagtattctcctttcaatcgatgtggtactgtgaaagataactattatgtcaacctttttgctaccagcagctactctaatgtggccaaattactatcgcaaaaa

SEQ ID NO: 9937 - DNA, 513 bp, Oryza sativa
  Clone ID: uC-osflcyp144d03b1
gtgtttcattatcaattgccacactcaactgatgtttacatccacagaagtggaaggacagcgcggaaatcaatggcaggttgcagcattgcattaatctctcctgcagacaaggacaagttttactcactttgcaagtcactgtcaaaggagaacctccagcagttttctgttgaccatgcttacatgcctgcagtaatgaataggctcacccttgctcggcagattgacaagattacacgtaaaaatttcccaggaaaatgccaacaaatcatggctttagaggaatgctgagtccatgggattattattggagaacaagggacagtgaggaggaaaccgtacaggggcataagccaaggaaaggcaccttctgcgaaccctccaaaggcttcacaggatttgggtgagcttttgcaaccccccttggagcctaaaattttttttcggcgctatttatatgggggtgggggttttacccgttctttaaaagtaactggaagagtttttcca

SEQ ID NO: 9938 - DNA, 257 bp, Oryza sativa
  Clone ID: uC-osflcyp144d05b1
gtatcgtgagaaccacctattggaaacatctgacatatcccaagctccctccgggagcagataacgcttgaaccattttcaatccttcctgctcctaaagtcctgaagcatgaccgagcacgcgggtatgttttggctctgaacttgtgacagcaacacatttgtcctaactgcattatctattgcaatggtgttgcaaccgtgcatgtttaaccaggtaaaaaaaaaaaaaaaaaaaaaaaaaaaaataaaatata

SEQ ID NO: 9939 - DNA, 337 bp, Oryza sativa
  Clone ID: uC-osflcyp144d08b1
tttgtggtttggcatttcctccccctttttaccttgtcctggtcggttcggctccgtggatcgtctagggtttagtgggttgagatggcagagccggatgtctagtaccgctgcttcgttggctgtctttcctgggccaccgacgaccgctttctcgagggcgtctttttcaccttcggcgagatcctcgactccaagatcattatcgacagggagacggggaggttacgtgggtttggccttttcactttctactccgagcagtcgatgcgcgacgccattgagggtttgaacggcaaggagctcgacggccgtaacatatacgtcaatgaggcct

SEQ ID NO: 9940 - DNA, 52 bp, Oryza sativa
  Clone ID: uC-osflcyp144e02b1
aaaaaaaaataaaaaaaaaaaaaaaaaaaaaaaaaaaaaaaaaaaaaaaaaa

SEQ ID NO: 9941 - DNA, 484 bp, Oryza sativa
  Clone ID: uC-osflcyp144e03b1
aaaggctgttgtgcaggtctttgaaggcacttcaggaatagacaacaaatataccactgtgcagttcacaggagaggtcctgaaaactcctgtctcacttgatatgcttgggcgcatttttaatggatctggaaaacccattgataatggcccacctattttgccagaggcctacttggatatctctggaagttcaattaatcccagtgaaagaacctatccagaagagatgatccaaacagggatatcaaccattgatgtcatgaactccattgctcgaggccaaaagattcccctcttttctgctgctgggcttcctcataatgaaattgctgcccaaatttgtcgtcaggctggccttgtgaaaagcttggagaaaggcaagcatgcatagggtgggtgaagatgacaactttgctatcgtgtttgctgcttgggagtgaatatggaaacagcccaattcttcaaacgggattttgaagag

SEQ ID NO: 9942 - DNA, 331 bp, Oryza sativa
  Clone ID: uC-osflcyp144e05b1
ccagaggtgagaatggttttcacaaataaccagctaaaaatactgtcaacaaacatcaagctcataaagaaacaaagatcgcgctgattcatcgctgttgtaaaaagaaacatacaaaatctgactaaaaccctgttttcctcaaatacatctgatctctctccttttcttttcatgctgttaatgcacagcatgccctccctcagtgtcaaggacatgtcaaaatcttacattaggtttgtacagccttggtacatcaagccttatggaatattttctttgacatgccaaacacaagctaaaccaaatcgttgggcatttctgctcactt

SEQ ID NO: 9943 - DNA, 502 bp, Oryza sativa
  Clone ID: uC-osflcyp144e08b1
aagccatgcaaatcttgatgagaagcacaatgcgtttgttaaattctcagagaaacacagaagattgttgaacgcatttatccgccaaaaccctgggctattggagaagtcattctctctgatgttgaaaatccctcgcttgattgaatttgacaacaagcgtgcatatttccggtctaaaattaagcaccagcatgatcatcatcatagccctgttagaatttctgtgcgccgggcatatattttggaggattcatataaccagcttaggatgcgttcaccacaggatttgaagggtagactgactgttcatttccaaggtgaagaaggcattgatgctggtggactaacaagggaatggtatcagctgctatcacgagtgatttttgataagggtgcccttctattcacaactgttgggaaatgacttgacattttaaccaaaccctaacttggtgtattagactgaacacctctcatatttaaaatttgttgggcgagt

SEQ ID NO: 9944 - DNA, 528 bp, Oryza sativa
  Clone ID: uC-osflcyp144e11b1
cactgctttgcgcctttgcctatcaatcgccttggcccccagagtagtacagcgtcgatctctgcagccgtgggtagcaacagcaagcgaaggcgagtgaaagaaactcgatcgatcatcagtggcggtgaaagaaacaaaccaggacgttcgaacgatacaggagagatgaagatggagcaggtttcgcagaggaaggcgccgctcctggttctagtaatcttgtgtggccttcttcttcttcttcccctggtttcatctgtgcctctgtccagaagcgtgtccttgaggaaccaccaagcatcagtctctgctctggaggcgcctgttcaggttgtggcggcggcggctgaagagcgagaccttgacgaagtggcggcgaggatggtgatcgaggtcaacgactaccctggcttcggcgccaacaaccgccatgatcctaaaagccctggaagagcatgacacgatctctgatctgatctgatctgcaaggcccttgtgatcgatacatataggaatattcagtat

SEQ ID NO: 9945 - DNA, 377 bp, Oryza sativa
  Clone ID: uC-osflcyp144e12b1
ggatcgggaggctcgtggccagggtggccctccagagcgaggatgtcgagctcgtcgccgtcaacgaccccttcatcaccaccgactacatgacctacatgttcaagtacgataccgtgcacggccaatggaagcacagcgacatcaagatcaaggactccaagactctgctcttgggcgagaagccggtcaccgttttcggcatcaggaaccctgacgagattccgtgggctgaggctggtgctgagtatgtcgtggagtccaccggtgtcttcactgacaaggagaaggctgctgctcacttgaagggggtgccagaaggttgtcatctctgccccgagcaaagatgctccgatggttgtctgccgcgtcaacga

SEQ ID NO: 9946 - DNA, 363 bp, Oryza sativa
  Clone ID: uC-osflcyp144f01b1
ctctttttcctcccctcccacggcgactcgccgccgccgccgacgccgacgccgatccggtctccgctccaactccggtgagattggatttgggggcggagccgatccgatcggggtccatcgcacggaggaggaggaggagggggtgactcgccgtcgcgcggccagatctgcggcggctgcgcggcgggaggcgccatggagggccaacagggacgacgcggtcaagtgcctacgcatcgggaaggccgaggaggacgccggtgacagcgcccgtgccgtgaagttccttttcaaggccaagcgcctggacccgtgcctcgctatcgaccacctgctggatcctcttctaaaccaggacga

SEQ ID NO: 9947 - DNA, 458 bp, Oryza sativa
  Clone ID: uC-osflcyp144f07b1
tggtccttcaagtacgcgtgggtgctcgacaagctcaaggccgagcgtgagagaggtatcaccatcgatattgccctgtggaagttcgagaccaccaagtactactgcactgtcatcgatgcccctggtcaccgtgacttcatcaagaacatgatcacgggtacctcccaggctgactgtgccgtgctcatcattgactccaccactggtggttttgaggctggtatctccaaggatggccagacccgtgagcacgctcttcttgctttcactcttggagtgaagcagatgatctgctgctgcaacaagatggatgccaccactcccaagtactccaaggcccgttatgatgaaatcgtgaaggaagtctcatcctacctgaagaaggtcggctacaatcctgacaagattcccttcgttcccatctctgggtttgagggtgacaacatgattgagag

SEQ ID NO: 9948 - DNA, 475 bp, Oryza sativa
  Clone ID: uC-osflcyp144f08b1
ttgcgttgagctgcctagctatcgagatcttcgtacgtaaatacgtctccctcgtctccggcgagccaccggcttgggcgtacgtgagagatggcgccgccgtcagccatgaacacgtttagggcggaaggcaaaggccatcaccaatggcttcccaataactacttccgcaaaggccagggggggtactccggttttcacaacgtcaccgccatggtcggcgccggcgtcctcagccttcccttcgccatgtccgagctcggttggggtcctggggtggcggcgatgatcatgtcgtgggtgatcacgctgtacacgctgtggcagatggtggagatgcacgagtgcgtgccggggcggcggttcgaccggtaccacgagctcgggcagcacgcgttcggggacaagctggggctggggatcgtggtgccgtagcagctcatcgtttaggtcggcgtctgcaatcgtctacatg

SEQ ID NO: 9949 - DNA, 443 bp, Oryza sativa
  Clone ID: uC-osflcyp144f12b1
atcccttctcttcctttcccttgcccttgcgccgccgccgctttgccttctcctcgccggcgacgacggcttgcccctcgagcttttttgccgtccatcacgcgagggtggacgggggagttaacttttggctgccctctactgccatccaaaaaccctagccgcaccgaagtcgccgcctcctcacaaactcctctgcgcgttctccttcgtccaggcgctgctgtggtcgttggtgaatcgtcgacgccgtggtgaacctgcggagggaccagaccacgtggggctcggggcgaggtttggccgtgacgcctgtcgtcgcttcgtcgccctccccctgcccaatctctccatctcttttcccaggtaagcaggaggagtggtcataatgcaaaacgagggcgagagggttcgatctgctggccctgccactcgatccgttc

SEQ ID NO: 9950 - DNA, 426 bp, Oryza sativa
  Clone ID: uC-osflcyp144g09b1
atgattcctaccaggtatgttatgtaacatggtatattggtgctacgtcaaattggcaggtgggagtctggtttttctgtttggtgcatgcagcatgtagtaaaatacataatcccagtcaaataaatgcgatttgcctgttgtctacttcatattaatgatgtgtgtacatgatttattataaaccgatgtttgtgataatgtgttagtgttttcttgaagccctttgcatatgcgcattaaatatttgtctgtttctctgggaccaattttttcatgctataactacgctcagcaacatgttgtttggtgtggggacttggtgttaagtttgcatttatttatttctggtccattgatgtgctggggtcttcgttcatttttagtttggggttttgcttttgcagaaaacgaactagaagaaag

SEQ ID NO: 9951 - DNA, 511 bp, Oryza sativa
  Clone ID: uC-osflcyp144h01b1
gcggtttctgtttttaggagggacctgaacgtgatcgggttcggggtgattcgggtggatcgcgccgttcagcgtcctggcgatcaacggcaacagcctcacggggctttttttactcagtattcatgccaggagctcttccacttcccctcgccgccggcgcttgactccgccgtttctggctgtggttggcgacgtggcaccttgggctgatcctggcgctcaccttcggccagatcggtttcaagggcaggaccgagggcctcttcgacaagtgaatgaatccacagtggccttttggctatgcttgactgtacggaccgatgggtgcgctgcttatccttcctttttgatacaggctctgattgatctcctctggggctcgaccctggtggaaatttttctcaactcctaaaacttttaagggccctttcattctctataacactttcttatctgggggcgccccccctactattcttaattattcttatttctttcttcttatcta

SEQ ID NO: 9952 - DNA, 401 bp, Oryza sativa
  Clone ID: uC-osflcyp144h07b1
ttagttcacagtgatacaatggcctgcatcaacacattgcagagctgctccgtcctcaagggagcaaagatcaatggtaccaagatcggaggagggaggggatcaccaaccttccggtgccgggcatcgacgttcatggacgggagcctccggctagagatcgacgagaaccctgaagccatcatctccggtgagtggccggagaacttctccctgctcagctacgacgatctccgcgcctacctccagtcacaggaggccgctgctcaagccgacaaccagcgtgtggcgctcctgagtgaagccatgtcggcgcctgtgctggtagccactgccgagcagacgctggaggaggtttgagtgccactttgagacggtctcaggtcttccagttatagatg

SEQ ID NO: 9953 - DNA, 337 bp, Oryza sativa
  unsure (1)..(337): unsure at all n locations
  Clone ID: uC-osflcyp149a01a1
gcccaaacttcacttattcataatttgtaagtatgaaaccacatgcaaattgatacacagctggagggtaaaggaaatcatagccagccccatagcactccatttttgtgaacaaagntctctacttccagttttgccagttggccacaaattacacatattttccacgattaaaagatccgggttagcaacttctaacttgccttcaaggcttttgcaaggattattattttgcgccattaccagggttcccattgggagtacttgaaatggccgttcaccgaggcaagtgtttggtcagggcaaagaattgcatttaaccagccaacccttcctt

SEQ ID NO: 9954 - DNA, 325 bp, Oryza sativa
  Clone ID: uC-osflcyp151a02a1
aaattaaccttgccaagccatttagatacaattatcagataatactaggttttatacaatttttgcaggtacaccaatgctttcgtacaaaatcaaggggtagggtaggggcacaggaattgatatacacactaaatactttggttaattacacactaattgcaaattaaggggtaattaatcactcaaagctaaggcagggggcatgtaatcgcttcagctggacgagctttggagcttggacaccaagctggaggcggtaaaagcggtggagccaccgacgacgcaggggagcgcgaccacgggctggacggggaccttccat

SEQ ID NO: 9955 - DNA, 328 bp, Oryza sativa
  Clone ID: uC-osflcyp151a03a1
ggcaattgggccttataccgagaataaagtaaggtttgcagcagtgaaacaaatatcacgggaaaaaaatattggccggatcatatggaaagcctcgagatggtacaggtagaacacaccaaaccactagtaggttggatgtgcgaataattggtcctcaatatggggctgggttggccctagttgaaatcaggctttttagggtaagggcagccagaacgctggatgataacatttgcgggatataaaccagcctttacagagtcctcaatgcttttttgttgaaccaattgggagaggaagcctccaacaaaggcattaccagcgc

SEQ ID NO: 9956 - DNA, 281 bp, Oryza sativa
  Clone ID: uC-osflcyp151a05a1
tttttgtggagtctataacgtccgggggtagcatttgcatgagctgatcagaagtcctcaagcatgtatcaagggtaacaacagcctcgaggcaaacaaaaatcaagggaaatggagaaaaaatgaaacaaaaacttaaccatgtataacactacttattccttacaatccagtaaacatcctggtaaaatatatccatagccgaagtcttaagagagacttagaaagaattttaaggggagcttatttaccgaccgcttatttcgactgggtaggggagc

SEQ ID NO: 9957 - DNA, 92 bp, Oryza sativa
  Clone ID: uC-osflcyp151a07a1
tttttggttttttaaaatttttttgtttttaaatttttttttttttttaatttttttttaatttaattaatattataaaatatatatataac

SEQ ID NO: 9958 - DNA, 410 bp, Oryza sativa
  Clone ID: uC-osflcyp151a08a1
atcaggaaagggccgataagttataagcaactacaaagtcttatcacaatgaaatattggtcagaagccacgggaggcatcaagctgtgaacctagaattctccctactcccaacaaacattggttagaaagacttctcccccctgtgatcacaaaaaaataaccctgatactcgctacggccgactcgaaatgggactaactattggcaacaaacatcgaggacaattccataatttaccatcagaaccaactttgaacaggatgaagaaaattcacacagcatgagctcctggaagaattaatgagtgcatgccaagtaggggcagcatctgatgggcctttccagttgtcaataaaaaaaaggctggtctgatgccaaaaactccatggggccaacacccatgaatt

SEQ ID NO: 9959 - DNA, 263 bp, Oryza sativa
  Clone ID: uC-osflcyp151a09a1
tttttggttttttttattttttttgtttttttttttttttttttttttttttttttttttttttttttttttttttgaaaaaaattttttttcccccttttttttttttttttaaaaaggcattaaaaggtttggcaaaaaatttactggggacggttttttaaagccaaaatatccccccttttttttaacctttaaaggggccctagggaaaaaaaaagtcccagggggggggtttaaaagtgaaaaaaggggggcccccg

SEQ ID NO: 9960 - DNA, 358 bp, Oryza sativa
  Clone ID: uC-osflcyp151a10a1
ttttgggttttttataaattttttgggttttaaaatttttttttttaatatataatataatttttttttaaaattcaatataataaataaattaacaccacaaaaaattcatacaaaaacccaaaaacaacaaaacaaaaaacaacaaatacaaaaacaaaaaaaaaaaaaaacaaccacaaacaacacaaaaaaaaaaaaaaacaaaaaaacaaacaataaacaaaaaaacaaaacaaacaaaaaaacccaaaaaaaaaaaacacaaaaaaaaaaaaacacaacaaacaacacacaaaaacaaaacataaaaaaacacaaaaaaaacacaaaatccaaagcaaaaaaaaacaaacaa

SEQ ID NO: 9961 - DNA, 116 bp, Oryza sativa
  Clone ID: uC-osflcyp151a11a1
ctttgtgtttttttgaaagggggggggttccaattctactaacagtgccaaattttggtcatacttaacgagtagcttttcagtgtgcaatggaacaactgcaacaacgaaattac

SEQ ID NO: 9962 - DNA, 172 bp, Oryza sativa
  Clone ID: uC-osflcyp151a12a1
aaccaaacagggggtgttacattgggacacataaatttaattggtttacaggtttgagcctgatgcaactggtcaaaatggttgggttacgggaggaaaatatttccacgggttttcagggggcccacaaataaacttaaccgggggacattttttccggccccggggtttc

SEQ ID NO: 9963 - DNA, 391 bp, Oryza sativa
  Clone ID: uC-osflcyp151b01a1
ggacggaattttttggctttccactaaaatatgcagagtcagctctagaaagagcaatatgacttttacataactatgtagctaaactgtacagtcaatgtcaatcacactgcaaaatgtagaattttttttacgcatcaattatactcttggggggaaaaaaggctgcactggtggttcaacaaaggggcattggagaaacctgaagaccatcctatatcttcccggggttcttcagtctaaaggattcgtcaagcctggtgcagggacaaggaaactgcataatctaatattcattggccttcttccgcaacttatttagcttattctcaatctcgatgtctaggaaagggcgcgctgctcctgaattgctgactgccgttcttcctgg

SEQ ID NO: 9964 - DNA, 116 bp, Oryza sativa
  Clone ID: uC-osflcyp151b04a1
aaataattaggggtatcagaggtaaggtatatacaacaaacacaaaatgctgggaagtcattaaaacgatttccagcatctttataaaacattggtcttttacattttagagtggt

SEQ ID NO: 9965 - DNA, 325 bp, Oryza sativa
  Clone ID: uC-osflcyp151b05a1
tttttgggtttttctgatagaaatgagtatagtcagtcactgtttttttcatgcaaattatgtgtaaaaggattgagaacaaacagtatcaagacctaaaaaggtttaaatggatacaaaattcaagaaataagaaaaacttttttgcatcttggaatatactgcttttgttattgatccagccactgatcttttcatttgtccatcagaatccagttactaacatgagccactgatccacctgattgagtaaaggatatatatgcttcctctctacaaaatgatgggcaaatctcctacgtaatcgagaacaaaaaagggattt

SEQ ID NO: 9966 - DNA, 344 bp, Oryza sativa
  Clone ID: uC-osflcyp151b07a1
aacaaacataattacgtaataccatccattttttttattggcgacgaatttatcagatatgctctagatacatatcttggggggatatagccggggctttgttttcacatatcctcacccaacgataattggggtactcttacaataaaaccggtcggagagggagggaagagattattacatatgggttaagagcagaggccattgagatgggacataaccaaatgggaaaataaaaatatttagcaaattatttatggggatattaacaaaatagcccaaaaaaaaggggggtactattattatagggagcaattcaccagcgggaagcttgatcttaggtt

SEQ ID NO: 9967 - DNA, 421 bp, Oryza sativa
  Clone ID: uC-osflcyp151b08a1
gctgaaacagggaaacctgctaccactttattttctgtagaaaattacaagaacgtgttgcctccttttgacatattcgttcgatattcttttattctttccctctctgtgtacagaattacatgtgacaactgccttctgctttgcgtttcccacacctacggaagaatgggtgcccatcttgaattttatatacatgtcgcgccttgttaaaatgaacaattcgtatacacgaaccgaaaaccacaacacaacggccactgccattttgcactttcatcattccaaaatgtgcagcccccatttcgctagttctctacttccttgtaccctttattatgggggcgggcctgaggagcaagtgcaatgcctagaatgtttggactcacaggggaaactctttctgaagaacgtcaaggtt

SEQ ID NO: 9968 - DNA, 345 bp, Oryza sativa
  Clone ID: uC-osflcyp151b09a1
tttttggtttttttttttttttttgttttttttttttttttttttttttttttttttttttttttttttttttttttttttttttttttttttttttttttttttggcaaaattttgggccccccaaaaaaagaaaaaatttcaacccccccccaaaaaaaacaaaaaaaaaaggggggggccccccaaaaaaaaaaaggaacaaaaaaggaaaggggccccccaaaaaccccaaaagattaaaggaaaagggcccacaaagggaatccaaaaggggaaaagggggcaggggaaaggttttaaaaaaaaaaccccccaagggggaaaccaaggaaaacccccccc

SEQ ID NO: 9969 - DNA, 514 bp, Oryza sativa
  Clone ID: uC-osflcyp151b12a1
tttttggttttttataaattttttgttttttatatttttttattatatttttttttattaattataaatatatataaaaaaaaaaaaaaaaaaataaaaaaaaaaaaatactaaaaaaataaaaaaaaaaaaaaataaacttaaattaaaaaacaaaaaaatataataaaaataaaaataaaaacataaatataaataaaaaaaaaaaaaaaaaaataaaaaaaaaattataaaaaaaacattaacataaaaaaaaaaaaaaaaataaacaaaattaaaaataaaaaataaaaaaattaaaataataaaaaaaataaaaaaaaaaaaataaaaaatcaaaaaaaaaaaataaaacataaaaaaaaaaaaaaatattatatataaaaaaaatataaaaaataaaataacaaaataaaaaataacaaaaaaaaaaaaaaaaacaatttaaaaaaaaaaaaaaaaaaaaaaaaatataaattaaaaaaaaaataaacaaaattaaaaaaaaaaacaa

SEQ ID NO: 9970 - DNA, 375 bp, Oryza sativa
  Clone ID: uC-osflcyp151c02a1
gtgagaattactatatattctgtactgttggtgtgtttgccctcatgtagacaaatactgatgggtatgcacaaggtacatattctcagtacttctactgccaagtttgcatcacatagtctgaatacctcggaagattgggggtacaaacataaccgggaaatacgttgctggaggcacttctattgctgagagaacagggtggaaaatcttgcattgcaaacttagcagcgcagttagaataataatgaaaatgacaaccttagaattagctctaaggcgctgtcatcttggaaaatgtagagagtgaagccactgcgtttcccagtggttaagtacagactatctgatttgaaatgaccatgagcattattc

SEQ ID NO: 9971 - DNA, 286 bp, Oryza sativa
  Clone ID: uC-osflcyp151c03a1
ttttttttgtttttttttttttttttttttttttttttttttttttattttttttttttttaaataaaaaaaaaaaaaaaaaaaaaaaaaaaaaaaaaaaaaaaaaaaaaaaaaaaaaaaaaaaaaaaaaaaaaaaaaaaaaaaaaaaaaaaaaaaaaaaaaaaacaaaaaaaaaaaaaaagacaaatacaaaaaaaaacaaaaaaaaaaaaaaaaacaaaaggggaaaaaaaaaaaaaaaaaaaaggaaaaaaaaaggccaaaaaaaaaaaaaaaacaacacaag

SEQ ID NO: 9972 - DNA, 369 bp, Oryza sativa
  Clone ID: uC-osflcyp151c04a1
acgacaaaccacgaacttggatattaaagatgccacaaagaaggttcacataaacaacacaggtcacagcagcgaaagctacaagcaaaccctgcataatcgaaaagcaaatgtttttcaaaaccagacacacaaactgatagatagaagcccacacggacagatcataggatagcagcagtaatcaagcattgccaaggcaccaggcaagaaccctgaacctctttagtactcgtcacccttattacccttgtcaccatcgtcgaactcggagccgaccttctcgtagtccttttccagcgcggcgagggcctcgcgggccttggagaactcccccttcttcatgcccttggcgacgtaccagtggac

SEQ ID NO: 9973 - DNA, 420 bp, Oryza sativa
  Clone ID: uC-osflcyp151c07a1
acacaaagctgcatgggattcatttattacacagaattccacacgtgatatatatgattaccgcgcacagtgaaacccaacatatatacgtgaaacccaacgtacggagtgtctactaacgtacctgattcacctcaataatttcttgaatgatcctctttagtgcaaaatcataaatggcaatcgtggaatggttagcattagctatcttgacggatttgaatcgcttctcctgtcctggctgccgacccatctccgtgtcaaacgccaacatgctgatcaggtttatctcgccgtctccgtcaccatacgctgccaccttcggtgacgcgtctaataagtcatcgtcgtcgtcgtcccacaacaccagttgcagcggcgtcttgttgcccaccgggttgatgcacgtcatgggcacca

SEQ ID NO: 9974 - DNA, 113 bp, Oryza sativa
  Clone ID: uC-osflcyp151c08a1
agcaccgggggtttttgatccacgatggaacaataaagtaacaaaatacaggggggtattacagtttatggggggaaaatttggcaccatggcaaaaggcctctcagccaggg

SEQ ID NO: 9975 - DNA, 101 bp, Oryza sativa
  Clone ID: uC-osflcyp151c09a1
aaaaaaaaaaggggggtacagcctcaaattaaaaatttattaaacaaggggggaggacaacaaggttttaaagggggaacccctgaacaagagggccaaaa

SEQ ID NO: 9976 - DNA, 298 bp, Oryza sativa
  Clone ID: uC-osflcyp151c10a1
gccattcctaaataagctttgcatataacttagcttcgattcgagataactttgttctaacaggtccatgcacataaaattaggtgcagtgatacatgggccagtaaaactcacatccaaggacaacattactcctctctggcaaatctaatttccatgttatgtgacaaaaaagaaaagaaaaaaatttcctatggggtgcacagattcttcaggtcttcctccttggcataggtgtttgggatgagccttgaagcatagggatacagatccttgtatgaatttctggatgggacct

SEQ ID NO: 9977 - DNA, 478 bp, Oryza sativa
  Clone ID: uC-osflcyp151c11a1
aattattaaaaaatataaaaaaaaaaatacaatataaaagaacaaaaaaaaaaagaaaagaaaaaaaacaaaaaaaaaaagaacaaagaaacaaagaaaaaaaaaaaaataaaaaaaacacaaaagaagaaaaaaaacaaacgagaacaaaaaaaaaagaatgaaaaaaaagaaaaaaaacataaagaaaaatcaagacaaaaaacaataaccaaaaaacaaaaaggaacacacgggaaaaccaagaaacaaaaaaaaaaaaaacaaaacaataaaaaaagcacaaaaataaaaaaacttcaacaaaacaagaaagaggaaaaaaaacaaattataaaaaacaaaaaaaacacacaaaaaaaaaacaaaaaaacacaccaaaaaaaaaaacaaaaaacaaaaaaacaaccacaaagacagaaaaaaaaaaaaaaaaaaataaagacaaaagagagcacacaaaaaccaataaaacaaa

SEQ ID NO: 9978 - DNA, 340 bp, Oryza sativa
  Clone ID: uC-osflcyp151c12a1
ggtgaacaaacgcgcatattataagtgacgaagcggtctcacataaaacagggcacacaggttacaacaacgagggttgtaagcccattaagccccaaacatcagatcaccacaagcaaatgtctcgaagacacacgcacacgggaacaggataactccacactggcagatcatgggatagcagcagttatcaatcaggccttgacacacagaacatcaagcccccagacgacgacgactcctctagtacttgttaccatcatcgccatcctcattctcgtcggactcagcgccaacctcctcgtagtccttctccaacgcggggagatcctcacgggcc

SEQ ID NO: 9979 - DNA, 418 bp, Oryza sativa
  Clone ID: uC-osflcyp151d01a1
gggacaaaaattaaacacgatatatgaacttggtcgtaatacaaaaagtacagcagcctggtgtctcctagatcctcaagcacaaggaacaaaagcacaaaccaaatgacacctcacagctgcgttgatctatgaatgacctagaacggggtaaaatcagctatatatgccccaagataggggaggatcaccaactgggagtaaaggagaaatatgagtttgataagtagatgatcaggactatttggaccatgcaaccgcatcaatttctgcttgagcactccgatatagctccagcctcttcgcaagattagtcctccgttccatgacggccgggtctttatcaagaagcttagaaagttggttaatctcttttgctcccaattcagtaaagaagtgatcgagcagtgagcgcttt

SEQ ID NO: 9980 - DNA, 363 bp, Oryza sativa
  Clone ID: uC-osflcyp151d04a1
gaaagaaaacggcaaagttcatttcatgagttagatggaagcgcctcacatttccagagacctaaccattttttacactacaccatcaagggatacatacgaagttggcctactcaagataactttctaaatagggagacatagcacgaggctagcctttgtacagaatcctaaacaccaaccatttccaaccaagaggggaccttacatagctatcaaccaaacttcccaactcaagctgcaggtgccttgcgggtcttttttatggccggcgaccggccggtcttgggcttggccttcgccgccggagactttttgggcttggcgaccaccttttttttttcggggccttgcgcttggtgc

SEQ ID NO: 9981 - DNA, 72 bp, Oryza sativa
  Clone ID: uC-osflcyp151d05a1
ggaagggaattatgccatatatttttgatcaccctgtcgattgaactcaatgtacacttttcccattataac

SEQ ID NO: 9982 - DNA, 349 bp, Oryza sativa
  Clone ID: uC-osflcyp151d06a1
gacgtcactactcactaggcatgaagtcaaggtgtacacaactacacaagcatgggagaccatggacttaattacacagtggcacagagcaacagatagctttattggtatagaggacactatacgcttatacgtacatacataccatatacgaggtgtacacatactgagcccatacgtacaaaaaccccggctcttattcagctgcacacgcccatggccacaccttacgcgtgcgcgcggacgccggtcatggcgccgccgccgccgaatgcatggcgcgatcgatcgatggatcatcaggcgaagagggggggcttttttttcccctcggcgccgagggcgccgg

SEQ ID NO: 9983 - DNA, 371 bp, Oryza sativa
  Clone ID: uC-osflcyp151d07a1
aagggcaaatgaatttggatcacaactcaacaaactccaccttgggacaaattcctttttggagcatgaaacaatccttcaccctgaacccaaaaagacaaaaacactttcggggccaaatagccttttggactaaaccactataccaactaagcttgggcaaagctcaaacttagcaataggaacaggctttggcatcatttcagcgggattatcatggggacttatcttggataccttcagcttaccttgggggactacattgggaacataaggggacttgaaatcaatgggctttggcctctcatgaaacatctgatctttaggggggcatatagcactttgactggcacaaaacaaggtaatgcaag

SEQ ID NO: 9984 - DNA, 200 bp, Oryza sativa
  Clone ID: uC-osflcyp151d08a1
atatggagggaaaaattatattattggaaatcattttgaggagctagactagcgggccttattaacaaggggatatggaccattacatggatgattaacatattaaatcctggtagctcccatggaaattaaaggtgaggggcagcagcaggaggcaaggcatgataagacagacctcccaattctcccatgggatggga

SEQ ID NO: 9985 - DNA, 215 bp, Oryza sativa
  Clone ID: uC-osflcyp151d09a1
ggaaagcagggccaactgcccatgcatatataatactaggagaaaacaggaataatttaaaacaggctgggtttatgcatggtttgaggggccgaacatcaaggaagccccatggaaaaaggagaattaatatgggggaggaaatatagggggggggggaaaagccagggccggccctgaaagaagtaagaaagaaatcccacagggaagggcaa

SEQ ID NO: 9986 - DNA, 330 bp, Oryza sativa
  Clone ID: uC-osflcyp151d12a1
cagggatcacattctttttttgggaacaagaaagatccatgcttgtattggggtcgaacacgccttctctgactgctgctgcttgctcattcattcgtaggggttcctgaagcttttgaggagatcggggattgtctgtaggcgagcatggtcctagacgccctgcaccatgtttgggcttaagcctttccaacttgtcgaagttgtaggcgctcaatgcctccctgtactcatccacgctggggaagccgccggccggcaagtgcagttccttttgaaccttggagaactgttcgacgagggggtggagcagccgctgctgcgccttgg

SEQ ID NO: 9987 - DNA, 378 bp, Oryza sativa
  Clone ID: uC-osflcyp151e01a1
atataccagcacggcaggaccagcatatattaccaagtatctttattgtggcatataatgaaatagttggaaagaaagtacatgtttaatgacctcatcataccagctaagaaattgcaacgaagaaatggtaagaacatcaggactgaaacatgaggtcagtatctcaaatatgaaaagtaagccatcgggtctgaaaaagttgaacatcatcgcctcaaagcagacgtacctaaacgacaagtcagatacctttcttcagcttaatccatctctagctgctattttctcagatgtaacacctggaaattcagggtctcaagatagcatctaaagaaattccaaatgcttctaaagctcgctagcatatttttgact

SEQ ID NO: 9988 - DNA, 128 bp, Oryza sativa
  Clone ID: uC-osflcyp151e02a1
ggagtgaatgttctaggtattatggggacttgttaccatcgaaattacatataaaccacagcaagcatagagtcttagttacagccgaatacactaggattgaatcaacaccctgatgtgtattgcaa

SEQ ID NO: 9989 - DNA, 328 bp, Oryza sativa
  Clone ID: uC-osflcyp151e05a1
cgaatgactagagctttgttttattaatttcgtccctgagcagtccaataaagaattcatcaatgcaaatggtaaatgaagattatagcaagcacggtaacagcgactccgatcgatcttttcattttctgagctagctaatgtcaccccagcggacgttgtggttggcggcgaggtagtgcgctccgacgggtccccggctgccgtacgggtagagctcgggtgccaccttgttggcctctaggtcggcgaggacgggggtgaagatggcccaggcggagtcgagctcgtcgctgtggttgaagaggcggtgctcgcccttgatggc

SEQ ID NO: 9990 - DNA, 143 bp, Oryza sativa
  Clone ID: uC-osflcyp151e07a1
tttttgtggtgttggtcataaacaggacggggaacaccttgagtaatattacagtacctattgtggttttttccacttagatcttttattttgtttagttttagactggtaaacaaattcactattcacaataatcaaagctc

SEQ ID NO: 9991 - DNA, 86 bp, Oryza sativa
  Clone ID: uC-osflcyp151e09a1
ttttttgtttttttttttttttttttttttttttttttttttttttttttttttttttttttttttttttaattttttttatattt

SEQ ID NO: 9992 - DNA, 410 bp, Oryza sativa
  Clone ID: uC-osflcyp151e10a1
gtaatcaacagcatgaacaagagcataagtttttgagtacaagatcgatacagattttcttacctccataataagagccaaaattttacctggtactgtcctaggaccagtactaataattaagcaagagaacagatagtcacatgagctttttaaggtttagtaggatatctgtaaaacattcctgccactgccaatatttaacatgccgaggattcgctgatcatatgcttccgagttgtgcgacggtgccagagtcatcattcatcaccctcttgtgacggcgttcccctccgacgcagttccttcatcttgcggaattcatcatagtgagccttccgttgctcttcgaaatctgtgccttgtttgatggccacttcttcttcttcttcttcttcttcttcttcttc

SEQ ID NO: 9993 - DNA, 414 bp, Oryza sativa
  Clone ID: uC-osflcyp151e11a1
tttttttttttttttttttttttttttttttttttttttttttttttttttttttttttttttttattataaaataaaaaaaaaaaaaaaaaaaaaaaaaaaaaaaaaaaaaaaaaaaaaaacgaaaacaaaaaaccaaaaaaaaaagaaaaaaaaaaaaaaagaaaaaaaaaaaaaaaaagagaaacaaaaagaaaaaaaaaaaaaaacccaaaaagaaaaaaaaaacaaaaaggcagcaaaaaacaaaaaaaaaaaaacaaaagaagacaacaaaaaaaaaaaaaacaaaaaaaaaacaaaaaaaaaacaaaaaaagaacaaaaaataaaaaaaaaaaaaaaaaaaaaaaaaaaaaaaaaaaaaaaaacacaaaaaaaaaaacatcaaaaaaaaaccaaaaaaagagacaac

SEQ ID NO: 9994 - DNA, 426 bp, Oryza sativa
  Clone ID: uC-osflcyp151e12a1
agagaaaatgtgaatcacttgtcatctgttgcttctaataatttgtgtggttttattgtaacttggacaacaaaacgtgtagttttgtgaagtttactcttgtatagcctaaacaaagaagcacatctcaaactcatttcatctgtgacactcaatttcgatgttcaatgaaaaaaaagaaggcaatgcgtgcgactcttttcatccctgtttcatttctcggaggaacttcttgaaccaatgggctgaattcttggggtgtctcttcatcccatcatcgtaatccacaaagtttagcccaaaccggagtgtgtagccatccgcccactcaaagttgtcaagcagagaccatgcaaagtcccccttcacgtttgctccatccctcatagcatttcgcagggcgagaaggtgcttgtgataatattc

SEQ ID NO: 9995 - DNA, 369 bp, Oryza sativa
  Clone ID: uC-osflcyp151f01a1
gccacgccagctcgtgcggcggtatcaccacgccgccgacgccggccaccttgccgtactcgtagtcgtcgtcgccgtcgccctggagctcccactccgcagcagcggcctggtgatccctgtactcgaccccaagaatcttctgccagtccggtatgttcaccggcagcgagccggcggcccgatccagcggggccttccggccggcgcgggcggacgggatcgcgcggccccgggcgcctagctcggcggggctggactccacgccggccgcgccgtacgagccccacacgtccgactcgctgaactcgtccgccccggggcttccggggcaccttgacggtgcgcccctggacggcgcgaacattc

SEQ ID NO: 9996 - DNA, 402 bp, Oryza sativa
  Clone ID: uC-osflcyp151f06a1
acaaagcttattgacctttcaatagattggaatagcaattcttggaaatctatttactcaccgcgcataatattacaatgcattcacttggcaacggactataaattgagtgctttgcagagaagcacctgcagcttatttggaagataagagtgcaatacaacagacctaccaagtaggcaagtcctactgataatcaacttgctaaaatatgggtaacaagaaaaatgctgtgataactccactgaactaaaaaacaacactaggtaatgactagaaactggagggtgttggtgtttcattccttgaaatcgtctttgtcatttgctggaagccctctgttccttccaaaaactgcaagagcacttccttcaagcgccatgcatacaacactgacagcag

SEQ ID NO: 9997 - DNA, 429 bp, Oryza sativa
  Clone ID: uC-osflcyp151f09a1
gcaaacttccaggcaattcttgagtcaagatcacaagatacatgatcaaaggacagctacaaggcagcacatagccaaaccaagaaacattaaaaagcaggggagtgaggagactaaaggaatgaacaaaaaggatcacttggatgttctgcttccgtcaagcttgagatttcacacaagctaccctatcttccatcagcagaggtgaatgattctgcaaatcctggaggcctcgtcggtatgcttgtctgagtattatccaagctagcaaggaatgaagacgtcgcgccatcaaaatggctgctatcctcaaaggcctgccatttcttcaatgcttgcggcagtgtcatgtctagatcgataccatagctgtcatctgaatctggatcagacggttttcaaacattcgaaagaattgagagcacattt

SEQ ID NO: 9998 - DNA, 451 bp, Oryza sativa
  Clone ID: uC-osflcyp151f11a1
ttttttttttttttttttttttttttttttttttttttttttttttttttttttttttttttttttatttttaaaaaaaaaaaaaaaaaaaaaaaaaaaaaaaaaataaaaaaaaaaaaaaaaaaaaaaaaaaaaaaaaaaaaaaaaaaaaaaaaaaaaaaaaaaaaaaaaaaaacaaaaaaggaaaagagaaaaaaaaaaaaaatgaaaaaaaaaaacaacggaattaaaaaaaaaaaacgaaatataaaaaaccaaaaagaacagtactccattaacaaaaaaaacaaacaaaaaaaaagaaaaaaaaagaaaggaaaaaaaaacacaaaaaacagcaaaaaaaaaaaggaaaaacaacaccccataaaaaagtaaaaaagaaaacatcttaaaaaaaaaaaaagcaagaaaaaaaaaaaaaaaactgtaaaaaatagaaagacaacac

SEQ ID NO: 9999 - DNA, 422 bp, Oryza sativa
  Clone ID: uC-osflcyp151f12a1
cacagacaataatttggcatgttttcaactaggaaaactcgtcttgctcgatcccccaacaaaaaaggcataagcatctgccaccgattttacacactcagaaacctcacctgacgcctaataacatgtaaacggtgtccatacgttaaatttatttaaacgcaacagcatccgaaagcacctaatatgtccatagttccccactgcttatcatcatcatctagtcttagccaccaccagaaccgtacttcttaccaaagacgaccacctgcagcttgtcatatccagcaagcacaccagcaccagcaacagcacgcagaatgttagcaccagcgcccttgaagagtgacttcgcaccctccttcgcaacaatctgcttgaacgcatccaaggagctgttgtacttgacagcctcaccagat

SEQ ID NO: 10000 - DNA, 443 bp, Oryza sativa
  Clone ID: uC-osflcyp151g03a1
aaaaaaaaaaaaaaaaaaaaaaaaaaaaaaaaaaaaaaaaaaaaaaaaaaaataaaaaaaaaaaacaaaaatcaaaaacaaaaaaaaacaaaaataaaaaaaaacaaaaaacaacaaaaaaaacaaaaaaaaaaaaatcaacaacacacaaaaacaaaaaaaaaaaaaaaaccccaaaaaaaaaaaaaaaaaaaaaaacaaaaaaaaagaaacaaaaagaacaacaaaaaaaacagagaaaaaaaaaacaaataaaaaaaaaaaaaaaaaaaactaaaataaaaaaaaacaaaaaaaaccaaaaaaaaaaaaaaaaaaaaaaacaaaaaaaaaataaaaaaaaaaacaatacaataaacccacaacaaaaaaaaaaataaaaaaaaaaccaacatcaaaaccaaacacaaacaaaaaaaaaaaaaaaaaacaataataaacaa

SEQ ID NO: 10001 - DNA, 160 bp, Oryza sativa
  Clone ID: uC-osflcyp151g07a1
aattattcacaaaacttacataataattattcttcccaaccgaggttggtgcaggaccccaaacatctgaatgaataagctctaaaggagcactagaacgacttaaagacttagaataaggaagttgatgactctttcccttttctgacaagcattaaca

SEQ ID NO: 10002 - DNA, 333 bp, Oryza sativa
  Clone ID: uC-osflcyp151g08a1
gggcttcacctcaaacacttatatattttcaggggaccaaaaattatataacactaccatgtagtagaaagctggagcaggagggacaaagattacagcaattcggttcaagtacacgtaggtgattgcagaattgcagtcaagttaaagcgaaacaggaaaatctggaaaaaaaataatcctcttttttctttctttatggacaggctggatcacacggtgtaagactgctggatggtctcaatgtcgaggcctttgagctttacaaccgattctacatgccccttgagcgtatggagcttccttagcctggcaaatttcgcccttcttttt

SEQ ID NO: 10003 - DNA, 404 bp, Oryza sativa
  Clone ID: uC-osflcyp151g09a1
gcacaagccaagggtttctacagtaaatatcttttgcagatatacagtttccagtcaaagctacagcctctttctacagtacctttttggcatgggttccaccctctgatgagcatatcagttggggtggttgaatggagaaataggtaacaaatgtaaggtaagcgcagcttaataatacatagaccttgaaccacacagacgaaaaaagagataggtacaagaagaagcctgtcgagctgactattgcaatgaaattagcaaggcactccggtgtggatacatccccttcagttccttcatcggggaagtggccttgcatgaaaaaatctgacagaagctggtccttttgcctgaacctttttttcatccaatcggttacttcatcttctgacgttggaatg

SEQ ID NO: 10004 - DNA, 402 bp, Oryza sativa
  Clone ID: uC-osflcyp151g11a1
ccaagcaagagcagctgcaggctgcatctccattattcatataacatattgtactagcaaaggttccattacagtatatgcactctcttagttgaacataaggccaaaccgacccacggtttcgacttaagccagcaggagatagttcatagaaaaagtgcacacttgcaacaaccatatcaaggtactcaacggatgaggctacattattccaacccaatcatgcacccaagctacacaagagtagtagtagtgcccaccactgacatggaccgatcagataaacagcatggtgtccaagcagcaccagagcataagggcaggctcttacgcattcacttttggtgcccatccagcaatcaggtgctccttagctgccttcgtcttgatgaaagattcccg

SEQ ID NO: 10005 - DNA, 416 bp, Oryza sativa
  Clone ID: uC-osflcyp151g12a1
ggaccaagcattagaattagcgactattttcatagcatcaagcagcacaatatatgtctgatacagcacaagcattcatcaataataatacgcagttacacatacgtacatagacatacaccgggcttaactgcttatttaagcaggggccaagcgaaggcaccccttcacatgatcacatatatacttactcgggacaggaaaaaatgcagaagcccccaagttgccacctgtggccacttggcccaaattacgtgctgctacttagcttagcttaacctacttgaatccgacgagctgctgctgctgctgctgctgttcatcatagctcgaggaagacgaactcctcgattcgccgggatgtggccgatgtgctcgagggtctccttggcgggctcctcgtcgacgccgatggc

SEQ ID NO: 10006 - DNA, 271 bp, Oryza sativa
  Clone ID: uC-osflcyp151h01a1
gtaacatgatgaaataatcagcatcttaatttatttgtcacacaactcgatcgtggcacaaacaaatgtttgcaaacaactcgtgatacaaacaattgtttacaaacaactcgtgatacaatcaattaattgtacaagaagagtgtaaaattaccctggtctttcgatatctggagacacgaatacaaactccaatcattcttagcaacaagcaatcaaaatatcgtgcagcgtgcaacattggccaagaacaggagatcgatttcaggga

SEQ ID NO: 10007 - DNA, 418 bp, Oryza sativa
  Clone ID: uC-osflcyp151h06a1
aagaaggggtaaatcttaaaaatttacgaagaatcaaacgatccacaaataaaaccttgtggtcgtgactaaaaacagagaaggaataacaagagccagccaatcacttgggcaacagccattctgtgtagaacagttctgcagttctgtaatgaggcaaaaataccacaatcgttacatcttttaatcacacgtattgtctatataataaaaaaaatatagttacagaattacaaatcgtagaggaccttgtattcaacagaagaactgagctcagtaatttgcgggcacgaattagtggtggtagcaaatgaaggttgtgtatatgaaccttgtagcagtccaattgcaatggccttgtatgcagcttctgatggatggaagccatcccatgacccaaacttttgggggtcatcgc

SEQ ID NO: 10008 - DNA, 386 bp, Oryza sativa
  Clone ID: uC-osflcyp151h08a1
tttttggactcagccagccagacaagttactttggaaagcaaaattgctctgtactgtacatgtaggacaggttaatctccaaatacaaggtaggagtatatatcaaaggcaaattgataaaagctgaagaatccgatctctcattcctcctcttagcctaacaaatgaaacatactaccaagtcttatcgtgtcatctggtatcagcgattctgcgcagaggggaagccttcacggggagattttttggagacaaccatcattttgaaagccaggtaataatcaaaaagatggtgcaggccgcgatcactgctgaaaggatgatagtgtcctttgatttcttcctcttgatggcaccaagtagtcctttaataacagggaacttt

SEQ ID NO: 10009 - DNA, 348 bp, Oryza sativa
  Clone ID: uC-osflcyp151h09a1
ggggaattgtgatggtgtatttgaaaactaaagacaatttgtgtacaaaacactacaattctggtgacgtatattacagctacacgctgaatactctgttactatcagatacatttccaaactgatcaaaaatttgcattacaacttcccttgctggcattgatccattgctgcatagaactgaaatacccttttgaaaaggtcatttcgggaaggaaaactaccacactggtacggaaaattgccccttcccaccaggatttagaatcaaacgattacttcttcattgggactttcggaacattccaactgtcttcttcaattggtttcgtgatcacagaaactggg

SEQ ID NO: 10010 - DNA, 428 bp, Oryza sativa
  Clone ID: uC-osflcyp151h10a1
gttaggtagttggaagaccataacatcaagaactctccttgaaaattttgtaatttgatccgcaacgattcagatgcagatgaaacactgctgattcccactcagattacacacaatacaaatacaccgacaaactgcctcaaaaaccaccaaattgattcaaaagtaaaacgggtatgagggatcttcccaccgagactgactaaacctaaccacagacaattggatccactggacccagattattcaaaaacagatggctatgacggcatcgtcctcgcaaccgaagggaacttgcagctatggatatcctcacttcgcgctggcgagctggttgcggatgagcttggcggccgaaaccatgttggtaagggcgggcttgacctcgttgtacttgcgggtcttgagaccgcagtcagggttcaccc

SEQ ID NO: 10011 - DNA, 419 bp, Oryza sativa
  Clone ID: uC-osflcyp151h11a1
atcaaaaattgatcatcaattggttctacacatacacggacaaaagctggcactctgtagtctgtacccgtatacacacggacagttcgtacctataccattaccattacacccactctcaagtctcaactggaactagccaagctccgtacgcgtaaaccgggggagctcgccgcgccgaggcccaagcgaccaccgtccatccttgcacgccggcgtcgccacgacgccaccgccttcgcggcgcgccgggcacggcaatgcgaggctgctccggcgagaccggcagaacggcggtgggcggtgagctatatgacgcgggcgccgtcaccgggcttgcagaccagcacgcggcggcccggcgggatcttgctcaccagctccggctgcgccttttcgtactcggcccggacgaacgc

SEQ ID NO: 10012 - DNA, 248 bp, Oryza sativa
  Clone ID: uC-osflcyp152a01a1
ttttgggttttttttttttttttggttttttttttttttttttttttttttttttttttttttttttttttttttaaaacaaatttaccccaaaaaaaaaaaaaaaccaggggcccccaatgtcacctaaaaaaaaaaaataaaaaggggggggcccttttgggcccacccgggaagcctcccccctttttccccctttataccacaaaaaggggagcgggggcaacaaaaagggggggccggggggg

SEQ ID NO: 10013 - DNA, 60 bp, Oryza sativa
  Clone ID: uC-osflcyp152a02a1
ttttttgtttttttaaatttttcgggttttttattttttttttttttttttttttttttt

SEQ ID NO: 10014 - DNA, 146 bp, Oryza sativa
  Clone ID: uC-osflcyp152a03a1
gtctaaaagggttgtttaacaatccgggaggggccccaaggaggtagggaaaagggaaagaaggggaaaaaaaaaaaagaaacaaaaaaaaggaacatccaccaccacggggaaaaaaaaaaaaaggaataaaaaaaactaagggg

SEQ ID NO: 10015 - DNA, 373 bp, Oryza sativa
  Clone ID: uC-osflcyp152a04a1
acacacccacaattgcactgttttattccacttggatacagtgaacacgttgtggaactaaagtccatgagctcatagcgagctttaatttgaatatatgaatgtttgcaatgaactaaaatgagaacatagaatacaagccaacggggttaagaatagaaacaagccaggttaaccgtggaaagcattctcagatactggttggctatcaacaggaatatccaagctgttatcttcaggttcagtggttacttctcttacatcagatacttcagaagaatgaggattattccactccgtgaccccaattgtagggatatcgacttcatcattatccaaatcaactatgttctcagtaatgggtattggatct

SEQ ID NO: 10016 - DNA, 445 bp, Oryza sativa
  Clone ID: uC-osflcyp152a05a1
aggaaatccatcacatcttttaatattaattaatcggtcgctctgcataaatccaagctattggaaggttcaacttaaagagaaattgttgttacaatttagcaaactggcgcaaaagaaaaacaaaagactagtgttttacatagcgggataatctacgcgtcatattccgcactagcaaacttgttctcagggtagaacactgcaacaactggatttccaccgaacttccttccatgcattgccgtctttgctttggtggcgccgtccacatctgcatactccaagaaaacctttccaactccggcaactggtaatccactaggatcagggcgagggatgacaaccttaatcagattaccatatttgcctgcttccaatctcatgtcctccataatgtcttcatactcctcggcatcttttaattcatcagccgaaaccacct

SEQ ID NO: 10017 - DNA, 371 bp, Oryza sativa
  Clone ID: uC-osflcyp152a06a1
tttttgttttttttattttttggcgtttcatatcagaccttttttctatctaattttatccacttagtctagctatctagtttatctaccggctcgaactcgaatttgatcgctttccatatttcacaagctggggctagttcaggactccatttgcaagctgatcggataatttcattaccttcacgagcaagatcgcgccctttgttaccagcttgtacacagggttctaaagccaccccattaggtgctgcaccaggtgcattacccccagggtggcctaaaggtcctccccccaattggaaaacaaaaatatcttccaagatttcgggcagagctgggatatgcccaacctgaataccccctggagg

SEQ ID NO: 10018 - DNA, 315 bp, Oryza sativa
  Clone ID: uC-osflcyp152a07a1
gggtcgattgctaaatatgaagtaatgcgcagtgctttaatttggcgaagcttcgttttattcaaatttcaaagaacacataatgtacaacacacaattgcacgaataactacgtacaaacccgcatattacaaacttccagcctatcttctcattcttcccctccctaagttgttggtgcacgttgtaacaacatgttcttacttttcctcaaactccacattaataacatcaggccctgagcttcttgaactgctggctcgtccagaggacctattgtttggctgccacactttgttttggcaattcatgcac

SEQ ID NO: 10019 - DNA, 441 bp, Oryza sativa
  Clone ID: uC-osflcyp152a09a1
ggtagcaaaatgggactttcatgacagaagaaacacaacgggatataccgataacagaactgataaagacatacttaggtatcctacatactaggttctgttaagtccccaattcacaatttctatggagtatcaagaggaaaattgagacatgtactttgtaaagtatgcaaacataaggagcacaaatagcttcccctactacaggggctggtttcagtttgtcttggtcttcccggccctcctcttggaatgtcttctaggaatagagttcttcattcccaagaagaaaagcagggcaccaaaaagtgccaaattctgtgagaacttgacgaaaagctgaacaaattgtgaagactccatttcatagttgtagaagtcgtacacaacaggtgttataactgctaagttcaggagcagtaggaatgcttcaaatgagct

SEQ ID NO: 10020 - DNA, 425 bp, Oryza sativa
  Clone ID: uC-osflcyp152a10a1
tttttggggaaacaaacatgggaggacacgatagaattatttgggcacatacacaccagttagaaccaaatttggcaaatattcagatcatcaagcatttccattccatgttgggtccaaacaattacgcccaaacaagacattgcagatcccaatgagtatcttgacaattcgtcggaagtattcggtcttttgtttttgcgaggaagaaattcattctggcgtcatgcatgcatggatcgatgagaggtgatgcactttgcagcatctggtgtttgatcaataatcacaaaataggaacccgcaaccacgaatctgcatgattaaataaggccctgtgattttgtttatgcttaggtgttactatctttcaaaaattaccttcgacgaggaggataggggaggcgaggcgcgtatgcgttggc

SEQ ID NO: 10021 - DNA, 274 bp, Oryza sativa
  Clone ID: uC-osflcyp152a11a1
catacatcttttttttttttttttttttttccttttgtttaatttctagtttttttacccggctcgaactgaaaatgggggggttccaaaattcaaaaggtgggggtagataaagaatccatttcccagctgcataggggggattaattacccctaaaattcagaacagccaacctggttccgaggtggaacactggaaccaccgggattccgacggacttccttccacgcgttggcggccttgcggttggggggagccgcacatctgcatact

SEQ ID NO: 10022 - DNA, 431 bp, Oryza sativa
  unsure (1)..(431): unsure at all n locations
  Clone ID: uC-osflcyp152a12a1
gttaatgctagaagtggggaaacaatcgccagtttcagacacatcgaagtaattagtcgacacaaaagaaactgagtttgcaaagcagggtaagagtatacatgcgatagactccaaaacagacagcaaatagcgttatgctcgtactagactctacatatcatttgttctagcagtgttgttctactggtaattcctccctggctcatccctcttataggccggcgcaccggcattgtagttatcgctgccttgctggtaactagggttgcctccttggccttggtagcctggtgcaccaccagcaaagacagggttgccggcttgataaggaggtgggttgccggcttgataaggaggtgggttgccaccatggtaacctggccctcctccctggtatccagggttgttgccctggtaagcanagggtg

SEQ ID NO: 10023 - DNA, 287 bp, Oryza sativa
  Clone ID: uC-osflcyp152b01a1
aagggcacaactgaatactcgaactgaagcattataaaaggcgagcagctgcggcttgttatcagcaagcaaacatttggggcattttgctaaaatcaaatttgcatacaagccaaacacattgttttagcagcagcagcagcagatactttagaggagaacgctcatagcataaaatcactctcgagtcattcaacagcaatgggccaagaaaactaatatcggatacacataaaacgctgaaaaatccatcaccgatgccaaatcgttacgggccaatttttggt

SEQ ID NO: 10024 - DNA, 429 bp, Oryza sativa
  Clone ID: uC-osflcyp152b03a1
aacaaacaaaacttattgttatagacttgtatagcaaaacaagagttcacagggtagtagtagtacagcagtagtagtagtacacaacataggctcttataacaggctcaggtctgcacaacaactcttgatagcttacaagcttcatcaactttgccgcagattgttttcactcacttgttacttacttagtagaacagttcactatcactgttttctgcttgctaatccttcttggtaggttgtacctccagattgggcaactttaagaactcagacgaaacgcacagttattcgcaagtgtaagtgcagagccatctcatttgcagcagaaaacataatgctgctagtaaggacctccaggatatgttcattaggttaagggtccagcatgagttgcacacctgaggagcgggcaacttttgccac

SEQ ID NO: 10025 - DNA, 361 bp, Oryza sativa
  Clone ID: uC-osflcyp152b05a1
tttttgttttggagaaagtcaaggttcgataaatattgcttcacttgtacaaagtacagataaaaatacattgatacatgacacggagagagccatgcacaccacttatttggacacacagagggcaaggctgcagagaaaatcaagcaacacaagctgaactcacggccccacctgtcagcctctcactggtcgaggccggagactcttgtgaaaaacagcaacaccacgcatgcagaagaagacaaattattacacacacaaatcgacgacacggcggccggcgacgtacggcgaggtcgtcgtcgccgccggcgacgttgtgatgaggtcgatcagccgaaagaggtggtgtttcttt

SEQ ID NO: 10026 - DNA, 148 bp, Oryza sativa
  Clone ID: uC-osflcyp152b06a1
tttttgggtttttttttttttttggtttttttttttttttttttttttttttttttttttttttctttttttactataacaaaaaaaaagggaagggcctcataaaaactccgcaacacataacaaatatcccggccataaaaggggg

SEQ ID NO: 10027 - DNA, 366 bp, Oryza sativa
  Clone ID: uC-osflcyp152b07a1
cccttggatgaagaatcagctgtaccgagagaacagacgttcttttacattaacagcggtcttagaataccaaccaccaccacacctgacccaatatttacagacattccctttctattgaataaagtgcagcggcagcatgtactccactttcttgcagcaaccaagaaagtacccgcatacccgcctgactgatggcatgttcttccccaataatcaaggatagacacacggcagctaaaacaattcaaaggaaaaagaaaaagaaaatcctcaaaaaacattacttatcccgtggcaccttgggtagtctaagctctagcatcctttggttgtcttcatgccattagtacaaatcaggcaaag

SEQ ID NO: 10028 - DNA, 364 bp, Oryza sativa
  Clone ID: uC-osflcyp152b09a1
ggcctgaaaatacaataaatacacaaccatagagtcatttaactcgaattacagatcacatagttatttcctcgtgcatcaacctattcatactaacaaggaatacatatgacttatcttggaccgtttcaaaaaatatgacttatcttggttcaggctctgttattgtcacctcatttagtgacattgccgtcgagtgcttggccatggagtcggttacggggtatggttgggaatacgtgcttgaaccaatattaatattgcccatgatttctgtgaaaaatgctggtctcgatggagctttagctgaaattgtattggccgcaagcataacattgatcattgacatagttggcctatccat

SEQ ID NO: 10029 - DNA, 412 bp, Oryza sativa
  Clone ID: uC-osflcyp152b10a1
ggttaatgaaaacagcaaacataatgtttattcacagttccacacatccaaaatggagattcaaccaggcaaacatttctacgaatttccatgacatatccatctcctggagagtagacaaacaaaagaaaagaaatggaaaacataacctgacaaacccaaccacagatcacacttattgtgctccaaacaacggaaagcacgggcataataactaaaacaactcaactcttattccaaaaaaaaaaaaacaactcaatggtgcaagagagtcacattatactctatgatcgcatcgccgttcacgttgtccagataaacagtctgaagcaaggcgaaaccttgagccatcctgaacaaaccacggccaccaacaatggcgagctccctgccattcccctgcatgaccggg

SEQ ID NO: 10030 - DNA, 336 bp, Oryza sativa
  Clone ID: uC-osflcyp152b11a1
caccccaaatcaatgacaagcaaagctcagctccttcattaactcagatggatttttaatacaaagccaaagagactgacacgaacacataacatatttttgccgttatcgatcgccagctgattataccagcgagagaaagcgtacgtacatacccacgtaggcccagggaagaggggaaaaaaaaaagacaaatccccacgtacgtatagtacacggtccatgtatacacgtatagctagctaaagcttttttttttttttaaagcagagggggcccacgtacacacaggaccaccacacgtacacagacaccgtacacattacatttcgactt

SEQ ID NO: 10031 - DNA, 312 bp, Oryza sativa
  Clone ID: uC-osflcyp152c01a1
tggatcctttatgtgcgggcggcctttttttttttttttttttttttttttttttttttttttgaaaaaaggcacaggcaacaccattattggctccgattaaccgggacaatatgattcaactgggggcaaaatttaagggggacaccagtaaaaacaatgttgggatgcttttagaccgttcacgcacgcggcttcccaccaagggttgggaactgagcctgatcttcaatggatggtgcacatgtagaatatgggccacgttggtaaccaccaccatttccacgaccgccacgatctgcacgccccttt

SEQ ID NO: 10032 - DNA, 404 bp, Oryza sativa
  Clone ID: uC-osflcyp152c03a1
gggcaatgcaaaagagagtttatttcatggataacttatactgattacattcggatgaatggcatttactgtagctcaaccaaaattaccacaacaacaaaagaattacagtcttaatgtacacaaaaatgagggggagacaaactccctgaagagtttgagtacgcaaaatggatgttatacacttggctgtcccctaggaacctctcctcgatttagagtagatcccaaatgctaggaggtaaggaggaacaatgaggaagacatgtatatctggagataagctttgattgcagcacagatgttcccttcaataggcagctgtcgctggcaaaactctacaaactgtaacaagcatggtggcatgcaagtacttgcgaaattttgcttctagggggatagac

SEQ ID NO: 10033 - DNA, 430 bp, Oryza sativa
  Clone ID: uC-osflcyp152c04a1
cagctccaatcagcaagataacggagacttattgtctacaaagtttatttatcttacagtaatcacactatgcacaatgctgaaatttcgctatttaagtcacacatgacaccaatggagatggttggaaacgggaaaatttgttcatgctactcgcatatattacatgggtaaattactggtgggaggaagacggtgctggacgaagccaaaatatacacattgcagcttgctactaatgctgaatttagggctaaaatgctttcctcgtctcgcaaccgcaagatgacaatagtactagtagtaaaccagagcagcaggcgaccggaccgggtcaggttgcaacttgtgattactggtatggatctgaagcctccttagccgttgatgtggctcagcatccatggtggcagccccatgcgaacatgct

SEQ ID NO: 10034 - DNA, 446 bp, Oryza sativa
  Clone ID: uC-osflcyp152c05a1
agcaacgttataatatttcagtaaaccaatatcaacgcaaactgggaattgtcagtatgaggcatcagatgatcacaaagcaaaagaaaaggataccaggatacgatacgagaacctagagagaccgcagcatggacctaccagaacttttcaaaaacaggcttcatatggataagattcatcttaagttctgaactacgactacaccatactggcagatcttacagaacatggaaggcgacttggatcacataaacaagtttggccttgaagctttgaaggttgtcttcagcttcctggtagggggcctgaccttcctgtacaccagtgggaacttgatatctgacttgtggaactgcttagtgttgtcacgcttgcagagtttaaagtggacagtagcagtcttgatgatctgaatgcaagggaatctgacacggtggcgggaa

SEQ ID NO: 10035 - DNA, 423 bp, Oryza sativa
  Clone ID: uC-osflcyp152c06a1
aaagagcaaaggatttagcactgtaagtactcgcattccacaacaaccgaagggcaacaataggactcagaacatccaagtttttaaccgaatagaaataaacgagttttaaacgactaacatagtgcacattgcgagcagatattaacggtccatgcaacgagtaccatggccgtgggcaaaacttaacgaacgctaagatatctcaaatgcagccagcataaccaccacttcaacgatgctcatttcttcttggcggcagccttggtcaccttggcaccggttgggtccttcttctccacgttcttgatgacgccaacagccaccgtttgcctcatgtcacgcacgggaaaacgaccaagaggagggtacttaaagaagggttcccaaccatgggcttgggggaattattttaccatacca

SEQ ID NO: 10036 - DNA, 393 bp, Oryza sativa
  Clone ID: uC-osflcyp152c07a1
ggagatgagcaccacgacgcacttgatgctcttgcacaccgtctggatcaccgtcggcccgggctccgggatcgtcaggttcaggttgtcgccgaacccctccgcgtacggcggctcgccgaccaccacgatcgcgtagtcgtacttgtcgccggtgaccacgctgctgtccgggttctccgagtacaccaccgtcgtgctgggatcaacggtggccttgatcgccgacaggatcgtcgtgccagcagtgatgttgttgccgggctgtccttgccaggtgatggtccatcctccacactgtctgcccaaatcatcagcatggcttcccgcgacgagaattttaccggttttctttgggaggtgaagcacccggaagtaggaggatttttcgtt

SEQ ID NO: 10037 - DNA, 241 bp, Oryza sativa
  Clone ID: uC-osflcyp152c09a1
atcgggtaaatgctagaatttattcctttttttctcacctttacaaacctgcaaactcatttctgcaaagaaaaaaaatgaaaatatgttgcagagtattcctaatttcctactactcccaccgtccaaaaaaatgaatctagtactagatgtgacgtattctagtacaatgaatctatacagagatattccagattcgttttactataatgggtcatatccaaatatgtttagtttcgtt

SEQ ID NO: 10038 - DNA, 96 bp, Oryza sativa
  Clone ID: uC-osflcyp152c10a1
ctgggaattgtcactcatgaggcattaacatcgatcaccaaagcaaaacgaatcttcgcttatttaatgccacacattgacacccacatggaagac

SEQ ID NO: 10039 - DNA, 409 bp, Oryza sativa
  Clone ID: uC-osflcyp152c11a1
gccgatcaaaaaagagatacagtattgatttttattttacaacccaatgagatgtttctcacttaaaacatgcatatacagggtattaataccgacccgtccccttacgttatgtagatatcaaaacgtaaatcaattttgaaattcctcagttcagatatgcatgccaaaaaacaacaaagatttgaatagaatggaataaacgttttgacactccttgttgccaatgtcccttatgcatatgatataataggctacctggacaaatatccactaaggactagctgattgagtcctccgggacacttgaattctgaagaacacgatcaggatccagctgaccactgtaatagctagatgggacagcagacagttccaactttccagtccactcctcaccaggctttaa

SEQ ID NO: 10040 - DNA, 394 bp, Oryza sativa
  Clone ID: uC-osflcyp152c12a1
atggcaggacgcttacctggctctggattgatactcaaaatgttccttaggcaccaaaactatttttagttatggacaatataagctatagctttccaggcacatacaaagaggtttttgcttccaaagaaatgaagcttaaatacggccgtggggaaatagctgcatcctctttttttaagcaccctattacaagcttattaaattgtacaagcaccttacttttaccgggcaaattgccccattgcttctttggtggtttgatacgactacttgggacagattattattacttgcctaataggacggatgttagaaatgcatatgttccaataaaataacaaaaggatgcagtggtttgtttggggttgatggtgaaatttcccgagggttt

SEQ ID NO: 10041 - DNA, 57 bp, Oryza sativa
  Clone ID: uC-osflcyp152d01a1
tttttggttttttttttctttttttttttttcttttttttttttttttttttttttt

SEQ ID NO: 10042 - DNA, 392 bp, Oryza sativa
  Clone ID: uC-osflcyp152d02a1
gcgtattgaatacgtttgtttctttatttgttttttttggtctggccccttatctttctttcatagaaaggaatgaatggctcggctagatagaataaccgagccagaacagaaaaaaacagttgaacaggtataaataagaaaatcttagttaagaggggtcatgtaaagaacaggctccaaatcacgatcgattcccttttcaaatcctgctgcagcagcccgggctcttcctgcatgccacaaatggcccacaaaaaagaagaatcctagaacaaaatgggaagtcgctaaccaacttctaggagaaacataattaactgcattgatctcggtagctacgccccccacagaatttaaagagcctaaaggagcatgggtcatatattttg

SEQ ID NO: 10043 - DNA, 177 bp, Oryza sativa
  Clone ID: uC-osflcyp152d03a1
attgaatacgcttgtttctttatttgttattttcgaattctccccttatctttccttcataaaaaggattgaatggggtggatagatttcatagccgagccatcccagaggaaaaccgtgaatccacactttaaaagagagggttatttaagaggctaaactgtccagagctggctc

SEQ ID NO: 10044 - DNA, 419 bp, Oryza sativa
  Clone ID: uC-osflcyp152d05a1
aaagggtgaaagctaatatcacaaaattataatctcccttataatatttacagaacttacacaccagttttatagcttcacgttattccttaagcaccattaaggttttgactaaacttgagcaaactactaaagagacattggcaaatctttttttttcttgaaacctatgttacatcaatttgttcttcaaaatgcttgtgaagaaacagttttgacaccagcaacaaatctgttgcatcaataccatgaactagccagtagccaccatttttttaggtacgaccatttccaacgacaaaacgatagccaccaacgctttaatggtgaaaggctaaaaaatccacctttcagccctagcctccctcctaaaacccagtcttctgatcctgctctggattagctgaagacagtaactt

SEQ ID NO: 10045 - DNA, 91 bp, Oryza sativa
  Clone ID: uC-osflcyp152d07a1
tttgtgggcgtattgaaaacgtttcgtctcttttttagatatttctgttatgcctatatatgtatcttttatcgaaaggaatgaaaggtcc

SEQ ID NO: 10046 - DNA, 334 bp, Oryza sativa
  Clone ID: uC-osflcyp152d08a1
gcgtattgaatacgtttgtttctttatttgttttttttgctctgcccccttatctttctttcatagaaaggaatgaatggctcggctagatagaataaccgagccagaacagaaaaaaacagtagaacaggtataaataagaaaatcttagttaagaggggtcatgtaaagaacaggctccaaatcacgatcgattcccttttcaaatcctgctgcagcagcccgggctcttcctgcatgccacaaatgggcccacaaaaaagaagaatcctagaacaaaatgggaagtcgctaaccaacttttaggagaaacataattaactgcattgatctc

SEQ ID NO: 10047 - DNA, 290 bp, Oryza sativa
  Clone ID: uC-osflcyp152d09a1
ggcttgcaaaagccacggaaaaagaattgcaagggggggaggctttacattggttggaaccccggcgggacaacctagatacaacaagctcaaaagggcgtttctgaaagaaacaaactagccataggttatccttagtttgtggacaaattcataccatgaaataccacaaccttttttaaaccaacttgaacttcgggggaagcacaaccgggggtgccatttcttttatatacccaccggatgatcttttggggagcccagaaggggctaattcacattggcccgga

SEQ ID NO: 10048 - DNA, 437 bp, Oryza sativa
  Clone ID: uC-osflcyp152d10a1
gaaccaattgcgttccatgtaaaatatcaacataccatgacttttgactactttttattgaaacaacaaagtgtaaaagatgtgtgtgtagcatcctgatgtttgaatcacacggaaactctgaaactgaacagcccactctataataatctgtatccttcggcatatcacccacacaacctgatcttcagcaacaacgcatcatctcgggcaatctctgctgcgatcatttcagcccccatcaatggcaatactggcggtaccagcagcacctggagaacccgacgacgccatcatcggcggtgccgcggctgtgcagccaccagagaaggttggtcagggaattgccatcgtcgtgccccgtcagcgccctcgtcttctgcaatgccgattccttattgtagatcccctccagggcgtacacgaagccctttcac

SEQ ID NO: 10049 - DNA, 71 bp, Oryza sativa
  Clone ID: uC-osflcyp152d11a1
aaagccaaaaccctttttaataaatttgccttaacccagggtaaaaaaggacaaaaagacagggcaatgcc

SEQ ID NO: 10050 - DNA, 322 bp, Oryza sativa
  Clone ID: uC-osflcyp152e01a1
aagaattgggaaaaacgtcacataaatacatcattaaactgaaaactgaattacacaggggggacgttaagcagtaaaatagtatacccatcttggcgacatgctgagagcgacaaacacacagatgcactgatagtagagtgcgtgaaaccagggcatccctgattgcgttgcatgaaaggaggatgcgcagcgcgcggcttggggcttaagatccgggtgttgaatgggatcgacatgatgatcacctggtggtagatggtagccagggcagggccaacgatgggaccaacccattacaaccaatgggcattgcaggtat

SEQ ID NO: 10051 - DNA, 149 bp, Oryza sativa
  Clone ID: uC-osflcyp152e02a1
ggccgcccttttttttttttttggatctttatataattttttgtatacgcacataaaaaagcccaactggctgagtatttgattacaaagagtgtttgctcagggtctaaataggaaaacaccactgtggggactagtattataaggga

SEQ ID NO: 10052 - DNA, 349 bp, Oryza sativa
  Clone ID: uC-osflcyp152e03a1
ggaagtaaagacaattgtattgtttagtagaatttttttcagatccctttgttacatggccttagggggctacgtacttatagccctattacagactcctcccttaaggtttaggctttacaggggaattttcatggttgccgttatgatagggacatcattacgggcatatagtgtcttttgcttgcacgggctcctaatgggtcaagtgacttggcctagtccttggcggatcctccggaaggcgcgatggcccgctgggccttctcccggggaggttcgacactcggcgaaacccatgccctttgtggcaaggctttcgccttgcggccttcgaccgtttgtccct

SEQ ID NO: 10053 - DNA, 385 bp, Oryza sativa
  Clone ID: uC-osflcyp152e04a1
gagatgataaaaccgcaaattttttatacaaccatgatataagctgttacaaaaaaaaaaatgaaataaaacatattctacagcgtttcttacaaacaaactccctgggcccaaaatcccataaataacctctggctggggccattgaatctccgtacatcagatggggaagggcaagcttacaaaaactgcaaggcgcttcggtctccaaaggctcacccgttgaaactacaactgctggggttttcagctaaaagctatagatgaactgatcagtgtgcaatcgggcttgaatattcgggtccactctccgaagaggttatgctggatgaccctgccgatgtcacgttgctgtgtgaaccattccttgtggattttgggtgga

SEQ ID NO: 10054 - DNA, 365 bp, Oryza sativa
  Clone ID: uC-osflcyp152e05a1
gggcccaaaccaaacacctggactcctttgacatatacattattacaacagacttacaatatggcacattatcgggggatcaaaccatttcatttccagcatcgaaatgaagctttggacttttaattattattatggttacaggttagaggatttcttgggcgcctccccgggatttttcacgctttccggcaccggcagattgcaaagaagagtcaccctggattaagagaactgagcccccttttccttgggggggggatccaatttccaaagttttaccgcccacccctggggggaggggcccacctggaacggggcggcccggaccaggacggtgtccccctagggcggggtttcggaag

SEQ ID NO: 10055 - DNA, 93 bp, Oryza sativa
  Clone ID: uC-osflcyp152e06a1
tttttgggtttttttttttttttttcttttttttttttttttttttttattattttcttttttttattaactccttccagacgggcaccccaa

SEQ ID NO: 10056 - DNA, 384 bp, Oryza sativa
  Clone ID: uC-osflcyp152e07a1
aagaattaagatctccatcacataaaaacatacagtgactgagtactggattacacgattgagttgttcagggttcagataggaaaaacatcttggggactagagatagagggaatcgacagatgcgcagcagtagcgcgcgggaaacaggacatcacgattgcgttgcatgtcgtcggctgcgcagcggcggcgcggggcttaagacctgctcttgaatgggatcgccctgatgatcacctggtggtagatggcagccagggcagtgccaacgaagggaccaacccagaagatccaatggtcattccaggcatggtccttgttgtagatgatggcagcgccaaggcttctggctgtgttgatgccagtaccggtgatggggat

SEQ ID NO: 10057 - DNA, 123 bp, Oryza sativa
  Clone ID: uC-osflcyp152e09a1
aatactaatttttttgttcttttaattttttttaaaaccctttttttgactggtcttaaggggaggcaaactttttacccaacatctactcttcccccttaagggcaaggcctccaccgggga

SEQ ID NO: 10058 - DNA, 425 bp, Oryza sativa
  Clone ID: uC-osflcyp152e10a1
aacaagatagatataaatacagtatatggtaaattgttttgattttgcatcaatgcggatacagtaatgcaggtaagtatggagttctgcttgtacaaacaggaagtacagtattaatttggacgcatatcagtcgatcggttgcagtgtcactcacttaggaggtcaataaatttcctgaaattcttgtgcgacgagccaccctcactgacgcaggcgcgcgccgtgtccctgagcagccgcgccctttccctgatctcgccgtcgccgacgacctgctccaccttgctcctcacctcgtccctcgtcacgacgccgtcctcctcgccggccgccacggcgagcccggtgcgccacacggcggtgatgtagcttcggtcgaggaactggtcgcagaagtacggccagcacaggaacggcacgcc

SEQ ID NO: 10059 - DNA, 62 bp, Oryza sativa
  Clone ID: uC-osflcyp152e11a1
ctctaaaaaaagcaagaaggccgggaaacaaaaaaaaaaaaaccccacgggaaacaacgacc

SEQ ID NO: 10060 - DNA, 278 bp, Oryza sativa
  Clone ID: uC-osflcyp152e12a1
cacacacatgcgacattggaaaaaaaactaattgcaacatcgagagcctgttgcggggaacatcaaagaaaaaacattgcacattttatgcaacatctaaccaaaagataatgaaacacccaaataatcaaagggcaacaaacatacacaccaaactgcaacaaaccgagagttgagccctgagcacggagcaacaacacatgcctaggaggagacgatggcgaagctttcaagaggacatgggggccaagctcggagagctccttggtggatgggga

SEQ ID NO: 10061 - DNA, 265 bp, Oryza sativa
  Clone ID: uC-osflcyp152f01a1
aaactaggaagcagagctcccccaatttcattaagaaaaatgagagctacaaaagtctttacatgctacttaaagcagtctaataataaaattttgtactcaacacataacatacttgcccacaatctacagccgaaaagaattaatggtccctctagatcgatatactgtatggtaaatcatttgcttcatcatcctttttgaaaagatgtggaaaaccagaagaggatgtatatatatatatattccctatgcatgctttcac

SEQ ID NO: 10062 - DNA, 379 bp, Oryza sativa
  Clone ID: uC-osflcyp152f02a1
aaatacttaatagtaatagactctttgatggagtattacaacatgcagcagtggcattaatacgccagtacattaattaagttacacatatgcaggctccatttgggtttctttcaatttatcgtattacagaatttctgtagccttgcagatgatcacttggatatcatgtactagtaattaacaataggatgcctacaaaagatggcccaactacaacagaagatgcgtgcttgtgacattgtatggccttatttgttggtagccctccaattaatcaacacgagatgatgcattgttgtgccttagtttcttcacatgcttgggttcacgttgagcctatttggaattttcacccccatcctcttattacactggg

SEQ ID NO: 10063 - DNA, 53 bp, Oryza sativa
  Clone ID: uC-osflcyp152f03a1
ggggactaatgcatgatccattaagcaccataatacataggatttcataacac

SEQ ID NO: 10064 - DNA, 348 bp, Oryza sativa
  Clone ID: uC-osflcyp152f05a1
ggacaagagcatgtttgacgcctcgcattatcgcatatagcggatgaaaaaacgtcaggccagcctgcgcgacaacgtctagttacagataagagcagaactgcaagtcaaatacactcttttctctccatagtagagtttgagcagcgagcgggcaaacataaattattcaattattaaatgatatgatcactcttgatcatctcaacactataggaacaaaacttcgctaccgcgattttactattttagttggccacaacttcaatgagggttggttccgagtcaggaggagccttgaaaccatggaagttcattacggttgcagcaacattggcgagcccaggg

SEQ ID NO: 10065 - DNA, 310 bp, Oryza sativa
  Clone ID: uC-osflcyp152f06a1
cggattgggggaaaagaaaaattcttcacttccatttaattccaacaccatgggatcccataagagtaagacagataaattacatacccaacaccccaactaggccatgacagatctgggatcaaaccccaaccaaggaaccccatcaaatttttacatgggcagactagacacaggaaccccccctagaactcccagggtttcacagccttttgagcaaaacacgcctaggcccttttgccacggatgcggggggcaagctggatgtccttgggcatgatggggacccccttggcggggatggcccaaa

SEQ ID NO: 10066 - DNA, 362 bp, Oryza sativa
  Clone ID: uC-osflcyp152f08a1
cattccgatagatagcaacaagcagttcaaacaccataaccaaagcgaactcaattcatggtaacatcacggacgaagaacacctaacactggatggatggatagagggcttctcgactcgagagagccactggacacgataacgactcgactcgatgataagatgattctgacacggatagctaaggataactggccacgatgggccccaccaatcagttcctccagttcccgccggagtcgccgccgtagccgccgccacggttgccaccgtagccgccgccgccgccgccacggtcgccgtcgtagccgtcggcgccaccgtagccgtcctcacggtgcccgtagccgccgccgtcacc

SEQ ID NO: 10067 - DNA, 360 bp, Oryza sativa
  Clone ID: uC-osflcyp152f09a1
gggtaaaaagccaacggcataatacattaaaatcaaaattaaaatacagagggagtactttatacagcaaaacaatcgaccatcctttccaccatactcgtcctacaaacacagagatcactgctactccagtggctaatgctgggcaccgatcttactagcatttcgtgaggatttctgctcctgtcttggtaatcagtatcgggtgctcgaactgcgcggctaggctgccgtccgtcgggacggccgtccagccgtcgtcccacatgtcgcaatcaatgctttccatggatagggccggttctattgtgaatgtctggcctttaaccattttgacctggcatattattaccgctgggg

SEQ ID NO: 10068 - DNA, 266 bp, Oryza sativa
  Clone ID: uC-osflcyp152f10a1
aacaaaaaacccacggaccccaaaggttttcattgtttgatagcgtttccatagaaccggcgccccgatttaagttttaaacccacccccaagagggatcggagacccacctcccccgaatggacccaagaactccgcctaatccaaccaaaccttgggggatcttttttaaccaacacgacaggaacttataaaaagattaacccccccccccccttttttttttttggggcctccgcgacttaagaaaactgtttctggcaaaa

SEQ ID NO: 10069 - DNA, 264 bp, Oryza sativa
  Clone ID: uC-osflcyp152g01a1
cgggggtaaaccctacctttcaggaaaaatcgaggattgatttcccacttattatatcgtatgcaaatactaacacatgcgaaaattattaagctgaaaagtttccatacaaattcattcagacaaacaagggtgaaaaaccttttttttcccatttcccccttgaactttccgtaaataccaccattccaccaaactcccttttggtttttacgacgaataatttttttcaacccaggtagcttattaattaattcccggggg

SEQ ID NO: 10070 - DNA, 112 bp, Oryza sativa
  Clone ID: uC-osflcyp152g03a1
gcgttggatcctcctatgttcggggcgccctttttttttttttttgtttttttgaactcttgttttttttccttgttttctattttattttatttcttgtacgatagaaaac

SEQ ID NO: 10071 - DNA, 424 bp, Oryza sativa
  Clone ID: uC-osflcyp152g04a1
gtgtgaaggatcaaccggccggggttggtggtatcagacggtcacgcgctgttcatgctgaagctgttctgcctgttcgcgcgcacgcccacgccggcgccgacgttggcgccgacgttggcaccgacgttggcgccgatgcccgcaccagcgccagctccagcgccagcgccgacgccagcgccgacgttggcaccgacgttggccccgatgccggcgcgagcgccgacttccgcaccagcgccagcaccagcaccagcaccagcgccgacgccggcgccgacgttggcaccgacgttagctccgatgccagcgcgagcttcagcgccgactcccgcaccagcgccagcgccagcaccagcaccagcgccgacgccagcgccgacgtttgaccgacgtttggaacgatgccgggcgagcgcca

SEQ ID NO: 10072 - DNA, 134 bp, Oryza sativa
  Clone ID: uC-osflcyp152g05a1
tttttgggttttttttttttttggggtgtttttttttttttttttttttttttttttttgtttgattgctagccattataatggaaaaaaacaaaaacagaaaccgaaataaccatacagggaaagcccacacc

SEQ ID NO: 10073 - DNA, 91 bp, Oryza sativa
  Clone ID: uC-osflcyp152g06a1
aacttgtacaaagcccagatagaataatagtatttatacagaaactgaaaacaacagatagccaattatttgaacaaacaccagggcaatg

SEQ ID NO: 10074 - DNA, 343 bp, Oryza sativa
  Clone ID: uC-osflcyp152g07a1
gggatgaaagcagaggtagattatattaagaagcctggcacgcatgaggagatggagcaggagtacatgatgagatcaccatgatgatagatgatccatccaagctagctagggatccatccaacattgatcgacacacgcacacactgacaacgacgacgacggttttatttaggcgtcagagcaaaaggcaaggcctgcctacatataagctgggtactaatgcaagcaaattaaggcctcgatcaaagctctgatcgacagtagcagcatccatacgataaatccttatgcagccgggcgacgacgacgatagatttagttgcaggaacagaaggagcag

SEQ ID NO: 10075 - DNA, 244 bp, Oryza sativa
  Clone ID: uC-osflcyp152g09a1
aacaagccctaaataccatttaaattctaatttaaaaaccaataatgggggggggttaaaacccaaaattatacgagttttttagggaaaaaaaaacagggggggggaataaaccctaaaaggattcggggggggggaccaaaatcggggggaaagggggcacaaaatggggccgttttgggtgaattggggccaccccttgaatttgggggggggggggggggccccgggggcaaccattttg

SEQ ID NO: 10076 - DNA, 121 bp, Oryza sativa
  Clone ID: uC-osflcyp152g10a1
gacacaagttcgagatgaatggattcctgaatcgaatgtttgtgttcagatagaattcttgccacgcaaaatacaaacatgaaagaaaccagttggttttggggtggatagttggttgtgt

SEQ ID NO: 10077 - DNA, 379 bp, Oryza sativa
  Clone ID: uC-osflcyp152g11a1
aaaagaaaaggtgaggccagggaaacacttccaaatgtgtctgtcaatctggtactttcttttgcagaatagtatttatacagaaactgaaaacaacagataggcaggcagacacagacacaatgcagaggtggctgctacggtgatggacctcacccaatattcgttgggttccccactttcacaacagatcactccagatcaccaacccattcataacttctccatatttatatgcaaatgcaaccaacccccaccaccagtgaatcatcaggtaccttatcgcagccaaacgattgtattgatggtaaacgctaacccaagctcattgacacaggtacatagcggtatggcatgggtaaagagtactatttgacgc

SEQ ID NO: 10078 - DNA, 390 bp, Oryza sativa
  unsure (1)..(390): unsure at all n locations
  Clone ID: uC-osflcyp152g12a1
ggaaagctagccccctgtataccgaatcaatcaccatgtactatgtacatgccactatacacacacactgacatgccacccgatgcaattgcaccatctttctgctgctgcctcgtcgtcgttcagtccaggccagggtccccccaaccacggtctcatcgccgcctttctcgagtcctcatctcctctgtctaatccaatccaatccacttaagacacttcttttaattatctttgagtcaactccggcggctcgcctgagtcaaagttcaccggccatgaagctagctagcctgcacggtgttcagtgacaccattgctgccaatgcggntgttttttttttttttttggtcgtctagaatggcttgccccagtacatgaggatgtcc

SEQ ID NO: 10079 - DNA, 123 bp, Oryza sativa
  Clone ID: uC-osflcyp152h01a1
agaagcatcgggtttccaactcaactaaaaatggcaaaatatccatagtttgggggggttgtataagtaatgcatatgtaaaatggtatgatttgatcattcatggccaaataggggctaaca

SEQ ID NO: 10080 - DNA, 202 bp, Oryza sativa
  Clone ID: uC-osflcyp152h02a1
ggggggtgacaacacaagacagagagaaccaccactttctggaggcttttgttattcaggacggcaccaatcattttctgtaaaggttactacagttcctgaacaaattggaaccacgttggaaggctgggagaggggtgatttagaagcatggtggtcaatatatgagccttaatgacatttgggggttggacgcatatac

SEQ ID NO: 10081 - DNA, 380 bp, Oryza sativa
  Clone ID: uC-osflcyp152h03a1
gataaagccactaggtgaggagtactagtactccaaagtctccaatagtccaattacatttgtagtgtaatttacatcctgaactaagtaaacatactagtggaaaatgcactgatcctccattaggattcatacatactcctcggatataatgtgcagaaaaggaaatgacacgatgcattcaggggctaaagagaagttacatcatcaggtcatcagcttcaattcaacctttttttcttggggggaggcaaaactatgaccgttccaaagttgcttattaggttgcagggttttaggaacagcaccgaaggctcgacgggtgactttaagtcctgagagtgcttgatgcaggtaaactgatgcatcctccaagcttt

SEQ ID NO: 10082 - DNA, 110 bp, Oryza sativa
  Clone ID: uC-osflcyp152h05a1
tttttggttttttttttttttgtgggttttttttttttttttttttttttttttttattatttatttaaaataatataatataaatatataaaaagggggaaggagggat

SEQ ID NO: 10083 - DNA, 425 bp, Oryza sativa
  Clone ID: uC-osflcyp152h06a1
gaaatcagcaatggtatcttcttggagttgctcttccaacttctaattgttcatttcaaagaatacaacagttccaaagaacggcatatgcatctatcagaccatcacccgggatttacatccaaaaaacctttttgattctaacccattctgggtatcttgagatgtataaggggtatctatccccaatctgtaccgatgtctcaaaaattacaggggagccgagcttttaccttataagacctaaagtacatctacaatttgtatggaatgaaagaatggctgggattgcttgcagttcgctggtcaaaatcattctgctgctcttggtgacctaagagggaggccttcagcagcagacctgagggggatgccttcagccgcatagccatcttcatcatgtttcgggatttcgataggtagag

SEQ ID NO: 10084 - DNA, 507 bp, Oryza sativa
  Clone ID: uC-osflcyp152h07a1
atgagagcatacagttttgcaattcagctcagaatggcatatgtaccaagcttgggggggagtatcaagcaatgcacagcaaaatgggaagatatgaacaatcatggccaacgaggggctaacaacagtttagcacagtacaaaaagtaaacacacataacaggaatatgcaatgcaatggaaccggagtatactgacaaaccaatcattaaccagagaactacttattaaccagctactaatagtcttctccatcgtcgttctcgtcgtctgcaccctcggcaccgacttcctcatagtccttctcaagggcagccaagtcctcacgggcttctgagaattcaccttcttccattccctcaccaacgtaccagtgcacaaacgcacgcttagcatacatcaagtcgaacttgtggtcgatgcgcgagaaaacctcagcaacagcagtgttgtttgtgttatgcacactgcacgctgaccttagccaggtcaccacagggacaacag

SEQ ID NO: 10085 - DNA, 411 bp, Oryza sativa
  Clone ID: uC-osflcyp152h08a1
gggggttataatataatacagatagcatgaccgcatacagaaacagatgttacagaacacagcaggaaacattttctgtaaaggtaattacagcaccagagcaaacgacgaacacgttgtaatcctcacacagggcagagttagaaacattctggtcaacatattttgctttatgacagcgagatattggaggtatatacgacaccacggtaaattgacacagacattttcagggggttcttgagtacccaacccagttcacatcgtttcacaacagtaggcaagggatgcatggcccttttttaccgggcaaggtggtttcccggcaaaaaaggcgcaacgaatgatgctacgagggttcccatcctccgacttgatttggtctcaaaaaccatcttgaacttgtccact

SEQ ID NO: 10086 - DNA, 324 bp, Oryza sativa
  Clone ID: uC-osflcyp152h09a1
cccacttatatcatcatatacaaatactaacacatgcgaaaattatcaagcagaaaagttccatacaaattcatccagacaaacaagggtaaaaaaccttttttttcccatttcccccttgaactatccggaaataccaccattccaccaaactcccctttgttttttacgacaaataattttttcaacccagtaacttataattaattccaggggggttagcaaacatataatgggaagaatcagttgtcgtaggggcggcacttgtcggtctccgggttgtccttgcaataggccctgagcgggtcggaggtctccttgggc

SEQ ID NO: 10087 - DNA, 448 bp, Oryza sativa
  Clone ID: uC-osflcyp152h10a1
tcgcgatctagactaggggccgccgcctcctcctgctctcgccttctcccgtcttctccttcgagttagctacctccttattcaaccatgggtaaggagaagacgcacatcaacatcgtggtcattggccacgtcgactccggcaagtcgaccaccacgggccatctgatttacaagcttggaggtatcgacaagcgtgtgatcgagaggttcgagaaggaagccgctgagatgaacaagaggtccttcaagtacgcgtgggtgctcgacaagctcaaggccgagcgtgagagaggtatcaccatcgatattgccctgtggaagttcgagaccaccaagtactactgcactgtcatcgatgcccctggtcaccgtgacttcatcaagaacatgatcacgggtaccttccaggctgactgtgccgtgctaacattgactccaccactgg

SEQ ID NO: 10088 - DNA, 349 bp, Oryza sativa
  Clone ID: uC-osflcyp152h11a1
gggggggaaacccccaaattaaacccccaaaaaaaatgggggtttaaaacccgggcggggggccaaagggggggaaagtttaacgggcaagggaacaacgggaggggccgggaaaaaaactgagggggggctaaaggggggggacctaaagaacggcgacagggggggggccatgtgagaaggggtttttttttttgggggggggcggggggaaacatgggcccggggggggcccttttttcaaggggttggggggccccaccagccccgggggggttaagggcccgggggggaaaacccccaagggggggggccccaaggggggggcccacaaccggggggtgggggg

SEQ ID NO: 10089 - DNA, 445 bp, Oryza sativa
  Clone ID: uC-osflcyp153a02a1
gctctgacctgataaaatatcttgccaacaatgtaatatcatggcagaatgcttacataaacataactaggcagatatgacgctcggatcgtcactagaattgacttgtttagctaaaacaggcatatcaaaacgcagtacatcacagcagagaaaacagatgcgcccagagtatcttcacgcgctcagaagttctgtaatgcaaaatctcagttggtctggttgttgactcagctaaggacagggaatatgcgagttacatgctcgaacggaacagtttcagctgtgttcttcttgagctcagggtgattgaactcgttgcgtggaaggacaatcagctgagatcgtgcacccttctcgatcacccaaccggagtttgcaatatggtgctccaggaacttgtccaatgcaagaccctcaatgttgatggccttcgcagaacagg

SEQ ID NO: 10090 - DNA, 323 bp, Oryza sativa
  unsure (1)..(323): unsure at all n locations
  Clone ID: uC-osflcyp153a04a1
gaccgtcgtcgtcgtggtcttcaccttcgtcttctgcgccggcacggccgccggcgccagcttcttggccgcctcccggagcaagttcttctcgaccttgccgttgccgttcctcgggatggcgtcgtagacgaccaccttcttgggcaccatgaaccgcgccatgtgcttgcggcagaacgcgacgacgtcgttctcgcacaccccggccgncttggtccttgccacgacgaacgcgcacggcgtcttgccccagtgcgggtgcggcatggcgaccacccgcccgttggcgacggcggggtgcttgaacagcaacttcttca

SEQ ID NO: 10091 - DNA, 123 bp, Oryza sativa
  Clone ID: uC-osflcyp153a05a1
cttccttgttttttattttatttcattcccaaaaaaaaagccacacaaattaaacaccataacgggggggaaaaaaataaatggaaaaaaaagggacaaagaactccctaatctctgggaggg

SEQ ID NO: 10092 - DNA, 504 bp, Oryza sativa
  Clone ID: uC-osflcyp153a06a1
gtctgaaagaaggggctggtcaacttctttttcccgctgggtttttgcagcaggcagaagcctccgctcgatgtataacaaataaaccaaaaacgaaaagaagaaaccaacagagaatgctacaattacagacccataccatacagttctatgagccggagcattgcgaagggatcaattagaggaatgcaacaaactgcaaaatcaacagcccgtaagcaatgcaaccaagagttgcaaatacaaactactaatgcaaccaattgaatggcattcctccagatccatactagaaaatccttccaaaatcctttcctgcaaaggaagacggcagtccgcctgctgtaaaagagtgaccaggcctttctccccaaggcattccgtcagccatagtagcaggtggagggtttgccatgccataattaggccatacaggctgaccattgtgatgattccccaattggacgtaggtagctcgcagtcattatgttataccgctgaaat

SEQ ID NO: 10093 - DNA, 340 bp, Oryza sativa
  Clone ID: uC-osflcyp153a07a1
ggggataaaacagattacttcgattgcaattttagaataaccagcagttacattgcaaccatggaaactaagaatctaagactacgacatgacaaagcgacgatctaataataacaccaactggtagaacatgacaagtccctatgaatcaagcaagaaccaaaggtgggctgatggcctaagcgcgctcgccgcggatccggcgcgcgagctggatgtccttgggcatgatggtgacgcgcttggcgtggatggcgcacaggttggtgtccttgaacagcctgactaggtacgcctccggggccttcttgcagggctggtgactgcggagttttggaag

SEQ ID NO: 10094 - DNA, 51 bp, Oryza sativa
  Clone ID: uC-osflcyp153a09a1
acccattcttttaaaaaacttccaagtaatcccaataaactggctcaaaac

SEQ ID NO: 10095 - DNA, 335 bp, Oryza sativa
  Clone ID: uC-osflcyp153a10a1
tttttgtttttttttttttttttttttttttttttttttttttttttggggggccaaccaaggggcacattggattattttggtggaactacatcataaccattattgggcattttatacaaagacaaatgctaatcaattgtcaagaccgggagcaggataccatcgtactacaatggaatcaatgatatatggccggcgcagggggggccctttcatgcccgtacgggtgcattggatatgccccggaacttttgggcccaaaccacgggtggttttacttgaggggaacgggggggctgagcgaaaagaacatggccccgtaaagggggaac

SEQ ID NO: 10096 - DNA, 376 bp, Oryza sativa
  Clone ID: uC-osflcyp153a11a1
aaatacttaatagtaatagactctttgatggagtattacaacatgcagcagtggcattaatacgccagtacattaattaagttacacatatgcaggctccattttggtttcttttaatttatcgtattacagaatttctgtagccttgcagatgatcacttggatatcatgtactagtaattaacaataggatgcatacaaaagatggcccaacgacaacagaagatgcgtgcatctgacattggctggccttatttgttggtagtactccaattaattaacaagagatgatgcattcttgggccttagtttcttcacatgcttggctttacgttgagcctattcgcaatttttacccccaacgacttatcacact

SEQ ID NO: 10097 - DNA, 452 bp, Oryza sativa
  Clone ID: uC-osflcyp153b01a1
attattattatttcaatgactgttttgattaacaaatgaaattttggtacatgtacactgcccaaatacaacactctttacaagatatctatctatatgtacacgttatttacaatatgtacatggcactgcttacggaaggctcaccaaaacgggcaccacccgacgtagttttggcacaagttttcatgcgaagtcgcttgaagtataagcctctgaacctgaaccttcacggataaaccaggttccacctctcgagtgtctcctgaagccagatgctcgttaccatgttgggtggagcttcccgcccccgacaacgatgatccggaagagaaatcgcgccctgtgagcttatgactcattcgtgccatcacagctacggcacgctcattcaaaacctcgttagcatcaccgagttgattgaccgccttgagcagttctctctcccgagc

SEQ ID NO: 10098 - DNA, 417 bp, Oryza sativa
  Clone ID: uC-osflcyp153b02a1
tttttggtttttttttttttttttttttttttctgaattctgcctacttatatttaggttagccaaattaaaacagacaggttttgagatcacagtagcaatatttattgagcatgcactaaaatatatacctacacgcttgggggagataaacccgagctgaaaagctaagggctttccgacttgtccgatcaccatggggggcattatgccgcctttgcgaagccaaccttcaggttgccatagtcaaacacggtatggtaggctcccataaagacatttcccaagatccagagaggaccacgagggggaggaatgtccatagctgggaatccactgatgcactgggtagcagttccctcaccaacctttaggatgtattgttttggtttgagaacaaacttgttgccaccgatt

SEQ ID NO: 10099 - DNA, 406 bp, Oryza sativa
  Clone ID: uC-osflcyp153b03a1
gcagataactacatttatataaatacatgttttttggttggagtgaagtgatggaacaggggcaaaaacatttctgatgctgaaccctatgctgaacggaacaagcaggatgctggcagcataccaattagactaactgaactatcaacaatgaaattttacaacagaaggtgatatacaactggtgtttaaatgccccactacacaaataccaatctaacattttgctatattacaattccttatgacttcagacatggcaattctgtacgaaccttgacttgatttttatcaggatccaggaaacctaaacgaatatataaataataatgtacaggtgctattctttgagaacggacttatggcgtggcaggcgtttaagacttccaataaaacaattcccttt

SEQ ID NO: 10100 - DNA, 377 bp, Oryza sativa
  Clone ID: uC-osflcyp153b05a1
ggggggggacgggacaaaaaacaaaagggcccaaaaaaggcgaaaggggaagaccccaaaaacaaccttggaaaaaggcccatttaacgggggggcccttgaagcccaaaaaaaatccaaaagggggcccggtacccccacttgaaaacttgacccaaaacttacaaccccagggaaccgcccccccctagacgcagtctaggccgaaaaaaccttacgcaaaaaaacacggggcggcctgtacagaccccacgaccctaccggacaaatcccaaaaatctgggacaaggcccccccccccctgattagggaagtccgtaccttaaaaaaggggggccaagggccccccggggacaaccccggggggggacttaaag

SEQ ID NO: 10101 - DNA, 328 bp, Oryza sativa
  Clone ID: uC-osflcyp153b07a1
aatctccaaattcaagtatcaagtgtagtatatcatcatcatgcaagtacagtgttacatagattaatcacaatgcagtttgattaagcagtgggcatcatcacatcgtattccgaggaaggctatcttagattacagatgaatatgcagacacccagcttggtgttacatacatagactggatttgggtgaaatttagccgccgagggccctggtgttgtacaccaggagggcgccgccctcgaggagcccggggagggtcacggcccagatcagaagcccggtggttccaccaacgtaggtgtcccccggcgggagacccttcctt

SEQ ID NO: 10102 - DNA, 363 bp, Oryza sativa
  Clone ID: uC-osflcyp153b08a1
ggcccaaaaaaggggataattttttcagttccaaatgactaaaactgatcccaaattttggttcctacatagtcaaaaaaaagaaggctgcggaagacggatcgatgatggccatgactgttcttgaaacaggacatatcccaccataccggcctgaaaacacacccaaaaccttaaacgagtcccttattttcaaataagtcaggcaacctaaactgactttaagctttccaattacatccataaacagccggccgagaagtactttcttttgcaagaagatccaacttttggcataacaatgtcctcaagcaccggtttcaaaaaccaaagaaacccagctcaggtgcccttttttttttg

SEQ ID NO: 10103 - DNA, 347 bp, Oryza sativa
  Clone ID: uC-osflcyp153b09a1
tttttgtttttttttttttttacaatcaaatatggttcactgacttctcattgagaagcagttatcagaatgggagtaacatacatgctatgtcaacatcttggaaggatcacaattataaagtatttatactgcattaaaagaacttgagtatcccataacataaaaaggattatttcacatgacaatctcagggttcaggatgcttgatttgccctttttgtgcgggagaataacaccgccgctggtttagaccctattacctacatgaacgtcctttcctaggatagtcatattttttattcgtgcccattgtccaacacgtgagtgccatccaataatgctgt

SEQ ID NO: 10104 - DNA, 422 bp, Oryza sativa
  Clone ID: uC-osflcyp153b10a1
gattgatgtaatcgtaccataatttttttataatcaatgttacactaacaatgggtatctcggtgcatagtacaattacaacaacgtgagtaaaataaacaacatttgtatttcaatacctagctgtacccaggaagaccaatggggcgatgattaattagaaggatagtcaatcaaaactgtgtcagcacatcacaggtagtaattgcaacttatattgtacatattttacaatctatactaagacggccatgaaaaaaaaacaaatagaaatcaaggtttacttctccatgatccagaacctatgaatttgtagccagttctgcagatatgagagttcaatattcttgccagcttgtcaataattagcatcaatctactttagccaccaataaaagaaaaagggaaggagatccaccttt

SEQ ID NO: 10105 - DNA, 323 bp, Oryza sativa
  Clone ID: uC-osflcyp153b11a1
tttttggtttttttttttttttttgtttttttttttttttttttttttttttttttttttttttttttttttttttttttttttttttatttctaaatttatcggggggggggaacggcaaaacccccccaaaaaaaaaacgggggggggcaaaacccgggcccccccaacaacccccagggggggggcccccccaaaaaaaaccccaaaccaaaaagggggaaaaaaaggggaaaaaaacagggcccccccccacagaaaaaaaaaatcccggaaaagggggccggggccccacattgggcccccccaggaaagggggcccc

SEQ ID NO: 10106 - DNA, 392 bp, Oryza sativa
  Clone ID: uC-osflcyp153c01a1
tggcgtagagggagaggacggcctggatggcgacgtacatggcgggggcgttgaaggtctcgaacatgatctgggtcatcttctcgcggttggccttggggttgaggggggccttcgtcagcagcaccgggtgctcctcgggggcaacgcggagctcgttgtagaaggtgtggtgccatatcttctccatgtcgccccagttgctgaccatgccgtgctcgatggggtacttgagcgtcaggatgcctctcttcgactgcgcctcgttcccgacctacgcgatcttttgccccattcccaccattacccccgtgtgccgaggtctccccacgaatgctcgggaacaccgcccgtggtgcgttgtcccccgtaacccggcctttaccatcccc

SEQ ID NO: 10107 - DNA, 298 bp, Oryza sativa
  Clone ID: uC-osflcyp153c02a1
ccattcaagctaagaacaaagtggagataacgctgaacaaagagccactttttatgggattttccgcattagtaaaaccgacttcgggttcagtcacctcgcctcttaaatctaaaaccgccactgtttgagcaaaaccctcgaaatggtcaggcgctaagacacggcaaatacccattcattcttgcattcaaaaatggcgaagagcccagagtcagataaagctttttagcacttgggttccacgcaaatgggggccgaatgacaaccatggcgcttagacgacctcctccatctt

SEQ ID NO: 10108 - DNA, 376 bp, Oryza sativa
  Clone ID: uC-osflcyp153c04a1
agaagtccaaactcaagcatcaggtgataataagtctttagttaacagaaagtacgagtagcccaagtggtatgattgccaactgggatttgaaaacaaaaggtgtatgatcaatatttttctcatcacatatacgaaggtgtattgatttagtcgacctcctcaatcttagggccagcaccactcccaccagcagccggagcatcatcgtccattccaccacccatgtcggcaccagcaccctggtacatcttggcaataattgggttgcacaggccctccagctccttcatcttgtcttcgaactcttcaacctcagcgagctggttgttgtccagccactggatcgcctgctcgaccgcgtcctcaatttttt

SEQ ID NO: 10109 - DNA, 427 bp, Oryza sativa
  Clone ID: uC-osflcyp153c05a1
gggaaaaacaatccctcatgataaataacctcaaaacagtatctgttattgttacatgactcaacagtagagggttacatggatcacggatggaccgacacttgtacatacagatacagatacaaatacagaatgggtcatgtgcagtagacatacaccttggggttgtgaatggcctaaatcaataaattaacgcaataatgaaaaacaaaaacaaatgacacgacaagcaacacatggtcaggccaacacctcagcaacacaagaggcgggaaacggggctggctgctacaaaactgacacaggatgaactccagagaactcagaacaatgctgccaccggctttgggtttggttggatttctcgtgttccgcatggccagcactcaaagaataagcggcatgctgggtagaatttaaaccaagc

SEQ ID NO: 10110 - DNA, 400 bp, Oryza sativa
  Clone ID: uC-osflcyp153c06a1
gtcaaaaaggattccaatgagcctttatgtaaatggttgatttctattaggtaaccgttcagcaaactgtcggcttgggcagcatagagttcagtaaaggggtcaggcgcttgggacccgagtatctgacatggcatacatggaaagaaaaggtgctgcttcttgtcttaacatgaatagtagaaggtatatatccccgaagtactggttttagaccatgtatgttaacatatgtcgtactattgatgagaaactgttcagtgaatcatgtaccctctgcagctgatcagctggagatcacttcctcaagctctaaatgatgaaggcgccgtagaggtccattgagtacttgattgcgttgatggcatcttttgctgggagaagctcattgacagcaact

SEQ ID NO: 10111 - DNA, 66 bp, Oryza sativa
  Clone ID: uC-osflcyp153c07a1
ttttttttttttttttttttttttttttttttttttttttttttttttttttttttatcttttttt

SEQ ID NO: 10112 - DNA, 274 bp, Oryza sativa
  Clone ID: uC-osflcyp153c09a1
aaaaagcccaaacccctcgggttttattaaatcatcaattgaaaatttattccatttgccccccgaaatatggggaagaacgccatcccaaatcaattcctgggaggttttaacctttaacaaagggaaacatcttaaaggggaaaggggaaaaacatgacaatttaatgccgggtttgcccttgggtgaaaaccataaaaaagggcccccctcggccatgaaaaaggaacaaagggggggggcccacaaaaaaaaaacatgcttggttcgggg

SEQ ID NO: 10113 - DNA, 65 bp, Oryza sativa
  Clone ID: uC-osflcyp153c10a1
acattactcaacagcaaagggatacatggatcacgggtggaccgacacttgaacatacagataca

SEQ ID NO: 10114 - DNA, 428 bp, Oryza sativa
  Clone ID: uC-osflcyp153c11a1
tgactctcagcgtgccaaagccgctcgtcgatttcgggaacaagcccatgatcctgcatcagatcgaagctctgaaagaagttggagttacagaagttgttctggccatcaattaccagcccgaggtcatgcttaactttctcaaggacttcgagagcaagcttggtatcaagatcacctgctcgcaggagacagagccactcggaaccgccgggccgctggccctggcacgcgacaagctcgctgacggctccggcgaccctttcttcgtcctcaacagcgacgtgatcagcgagtacccattcgccgagctcatccagttccacaagtcccatggcggcgaggccacgatcatggtcaccaaggttgacgagccttccaagtacggcgtggtggtcatggaggatgagaccgacaaggtggagcgc

SEQ ID NO: 10115 - DNA, 314 bp, Oryza sativa
  Clone ID: uC-osflcyp153c12a1
acaagcaaatatgtgtgtccggtgcttattagggttcaagaatgaaaaaaaagaggggtacagtgtcatgcttgctcactttgtgctgggtgaacagcacacagtgactagacgcagacaagtagaaatgtaaacagtggaagaagaaaaaaaggaaaaactaaaaacaggacacagtacggtagcacatgatctacacgacctcattttacaggtacatgctgattgatcaaaatacaagtaacccaaaaaaaatgatacgcacacaaactcatattcttttttttttggtctggttttataaagcacgaatt

SEQ ID NO: 10116 - DNA, 416 bp, Oryza sativa
  Clone ID: uC-osflcyp153d02a1
cagagaacaaggtctgttgatatataattattctgtttttatttgaatacacataaacgatcaaactgtgaaacggtacaggatctgagataattaggaaactacagagcagcagctacaatattaaccatagcagctgcaggataaacacggtgctaaataggcaggctttgttcttctttcacagcctggatatctggaaggggaccatgacttcagtcatctcctccctcatgataatcttcccaacctggaaaaggtcggagatgcctagctgcgtcgacagatgccttcggcaatcctttgcagcaacaatgcctgaagaataagctccatgcacggacccagagtgatcgatgcaggcggcctccccagcgaaaaacaggttgcccaccggagcacagaatcttttatac

SEQ ID NO: 10117 - DNA, 362 bp, Oryza sativa
  Clone ID: uC-osflcyp153d05a1
aaccaaaacataggaggtttcatttcttcttctcaaaggagggtagcatctttccttctttcaccattacataagcttaagcaataacagataacaaagcctcctgctcctttagggaaaatattcaaacacaatacccttataaggacttattattaggaaaggagcgggcatgggcataaaagggagcggggggcaggttaagaatcacaatgctgagcagcgaggaaacaaaacaccataatgggacagagcaaaagcctcccaaagggagcttttaggcagaaggcttttcccacttgaggggcttcaccacctcccaggggaagtctgggtcgtcccttccgaagtggcccgaagcc

SEQ ID NO: 10118 - DNA, 115 bp, Oryza sativa
  Clone ID: uC-osflcyp153d07a1
acataagctggtttataaacaaccgccaagaaaaaggaagctatgttccattaaaaaacaggataatgaggggtttcgcttcatatactaaaccacggacggcatttaaagtaag

SEQ ID NO: 10119 - DNA, 361 bp, Oryza sativa
  Clone ID: uC-osflcyp153d10a1
gacaagcaagaagtatatatattcatccatttctcaaactactacaagaggtcgagaggaacacataatcaggagggattgcgacaatttacagcaacaggagtctggagatcgaggcaagaacaagacaggcagcagcagagctaccctcttcatttccactgaatttttacacatttggaatccatggaaaccgagcctttccttccgtcgtcggggtgtcaccggagtccgatgagaaaaatggtcatggcgtgctcataatccggatcgctcgccggcgtcggtgaaagaggcggggcgattgttcgggcggctgttgaggagtgggttcagagccttgaccacgatgcttatgttg

SEQ ID NO: 10120 - DNA, 307 bp, Oryza sativa
  Clone ID: uC-osflcyp153d11a1
agggaaagaattgagggtcaacacaacagaccgatcagcccagaaaacaacactataaaatagtattcctgttaaaaaaaataaccctatagattggcatggacttaaaacatttccatcactacataacatacaagatcgacctgtacatatatgtatgcacagaactggagcttaatcagataggatttggggggcttttggaaaatttcttccacgggccatttcaattgggccctttgaaaaacctggatactttctgaagaacccaaatgcttacaaggggcttcaagcaaaacaaggcaaa

SEQ ID NO: 10121 - DNA, 300 bp, Oryza sativa
  Clone ID: uC-osflcyp153e02a1
ctccttgatttctatttcatttcattccgatagatagcaacaagcagttcaaacaccataaccaaagcgaactcaattcatggtaacatcacggacgaagaacacctaacactggatggatggatagagggcttctcgactcgagagagccactggacacgataacgactcgactcgatgataagatgattctgacacggatagctaaggataactggccacgatgggccccaccaatcagttccttcagttcccgccggagtcgccgccgaagccgccgccacggctgccaccgtagcc

SEQ ID NO: 10122 - DNA, 431 bp, Oryza sativa
  unsure (1)..(431): unsure at all n locations
  Clone ID: uC-osflcyp153e04a1
gccagccagattgagttggcaacgaattcttaacaagaatgacaaaaaaaaaagggaaaatgaaaagagaaaatatcatcgagcttttggtcgctgttaaaaaaaactcgacacgacattacttgcaaaattaagcctagtaattagcggtagtagtatgctcgtcccttctacaaacaggcgagagagagagtgagaaaatcaaaaacgataaatggcaatgcgcgctcgatcaggccgccgtgcgaacggctcagctagcagcgcggcatcttcttcttcttcttcttcttcttcttcttcttcgnctactgttgcggctggcccgccatgctgaaggattggctcttcatcgccgtcgacttcttcgccggctcgccgccggcgccggcgccggccatgctgaacgattgtccgcccatcgccctcgg

SEQ ID NO: 10123 - DNA, 344 bp, Oryza sativa
  Clone ID: uC-osflcyp153e05a1
ctcacataaataagataaccgatcgctcaaggttgagaatcaaaaaccgaaagaaataggttctttgagcagagtgcagaacataaacaaaaatgcctgttgcaaattgcaagactacaggtaaacttaaatgccataaggagtttgtttggcagcataagatgaaactactgtgataaggctactctctcactcgtcatctccataactcgacatcatcatcagcaccagcctgtgagttgagagcattcaatctttcgacaagactggccttcctctgctcgtaggttagtttcttgaggttgaatctcttgtgggtagccggttccttcttggtcgatttt

SEQ ID NO: 10124 - DNA, 413 bp, Oryza sativa
  Clone ID: uC-osflcyp153e06a1
agcgtcagaaggtatttaattaattattagcaagccatattgtcactgagccacatactagagtaccaaatcatagaggaaggatgggagcagcaactgagcaaagctccatcctgcttagatacattcgagaggctttttttaggcttttaaccagccaagcgcaagcacttcagttaaagcctaaacagagttccagcatgatcagatcatgcgcattacttccacttcttgaacttgccaccaccgaacatgccgtgcccatgcttgccatgcttgaacttgccatggtggccgtgcttgccatgcttgaacttgccgccgtggtgaccgccgtagccatggccgtaaccaccaaagcctccatggcctccatagcccatgtgtccaccatggccatgagaagagatctt

SEQ ID NO: 10125 - DNA, 415 bp, Oryza sativa
  Clone ID: uC-osflcyp153e10a1
actagtagagtagcgcgaaatttgaaaaccagaatgtcagatacatgcgaagaaaaacatccaactagagaaaaaggtgccatggaacactgcactgtagcacatcagggtaaccacccccaaaattcggaatactacaccgaaagatgattaggttgccttgccattgatgatacaaattacaagactatcgatacaagcttacgctacaaaatacaaatagaagttcagtcttgccactagatttcctctgtaaaaatgcctaaaaaggagagggtgaggatggatgggccttttttatcacctgaaaaactcaggcatcgctgcatgagcatgacactttgtttcaggatagcagcatctcttgcattgaccaatggagggtcaagttttacgaagggatctgatgttccct

SEQ ID NO: 10126 - DNA, 342 bp, Oryza sativa
  Clone ID: uC-osflcyp153e11a1
atctgagagcttcttgtactgtacagatgtgagctcctcaacacaagctctctctctctctctctcaaatcaaagcatttggcgcaaatccgccattgattctgtatcaatctctactggaagtttactacgggaccacggcgacctccttgggatcattggcagggaacacgtgctcctccgactgctcgtcgacgtcgtcgccgtcgtttccaagggcggcggcttcttgctgctgctgccgccgcacgacgtggctccacctgacctggaagaggtagacgaactccatggccgacacctccacggcgaggagccccgtacaccaggttacgctcctcc

SEQ ID NO: 10127 - DNA, 321 bp, Oryza sativa
  Clone ID: uC-osflcyp153e12a1
atatagttatggaccaaaaaccacggactcttattaggacctgatcactaactttacaagcttgttggtccggaccgaaaatattaacttttcaaggatgtgtacattgggccgggaaactttacttggaggaaaggttgggccgtaaggcgcgggagggcccacaagtatttaaaggagcaagtagaggaaggcatgatcagggggtcttcaattgacgccgtcgttgacgttgggcgaacgcgccgtctggtgcccctgctggcggagcggtttcgggaggtaggactccaacccccggaggaggttcttcccacccag

SEQ ID NO: 10128 - DNA, 259 bp, Oryza sativa
  Clone ID: uC-osflcyp153f05a1
gtactacagtactagtatctattatctctgggagctcggggaaaaacaaaacttatgtctatgtgagtgatcgcattatttcaccggccttgagtttcttttcattttaccgacccacctctaaaaagcttttatccaactatggagttctctaccactgccaacgttcctgattaccaaccaatatattttaagcaacactaatgcgggcttcgtccgtattcgttagctcccaccttgcttgggactttttgaacat

SEQ ID NO: 10129 - DNA, 132 bp, Oryza sativa
  Clone ID: uC-osflcyp153f06a1
tttttgggtttttttttttttttttttttttttttttttttttttttttttttttttagaataaaactaatttgaaaggggaaaaaaacaaaagggaaaaagggccaaagacaaccccaaaaaagcaccacc

SEQ ID NO: 10130 - DNA, 458 bp, Oryza sativa
  Clone ID: uC-osflcyp153f07a1
gcaagaactaccaacaaccacactgttacttcagagaagaaccaaaggtaagtgcccctagtatttacatcgatgctaacatttgagttcctcctatgaaattcaggagggcatgctaaccacagatcacagaatatgtcattgcaaatggtcaccagaatgctggttgaaattagcagagatcgatcgggactcgctctgggttctgagctctttcttgaccctcagagagcttgacaccaagctggcctttgatccctcccccaaaggtatacagtttaccggattccatgagcgcgaacgtatgcgggtatcccatttctgagttgagccaatatgaagaatttgttgggctaatctgtacgccttatatttaacaccttaagtgattctaccaagcttggggtagaaaaaaatcgatatctgctgcttcctcatcctcctggaacctattttca

SEQ ID NO: 10131 - DNA, 340 bp, Oryza sativa
  Clone ID: uC-osflcyp153f08a1
acaactgcatttttggctttatttattcatacatacatacaaacccaatacagagcagtataaccgtacgcaatacacgggacgatcgaacttgtcgaagcagacacgaaatcaagtaagcgagacacgtacgtacgtccatatatagacggggtttatggcaggggggccatgcgacaggcgcacttacacacgtataaacggcacgcagaactggagtattatggtttggttttagcaggaggggacggggacgtggcaggcggccaagacctttttgccgttgggggagttgacgtaacgctgcaggtttggggtgggcgcgtactggcacaggcac

SEQ ID NO: 10132 - DNA, 452 bp, Oryza sativa
  Clone ID: uC-osflcyp153f10a1
gcacgaaggaattgttctcaagaatcttaagatggtaaatacacacaagagagaggtacggtatacaagacttagtttttcttaagtacaacagatcttccattcctccatgatcctatcagcttctacacccaaaccacacaaatcaccatgcacgagccctcttcctccactgccaaatcaactcacctggggcttgagtagccaagcatccatgtggtgatcagtagccgatgtcagcgtcgtcgacgacgaggttgccggtgatgagctcacggtaggcggcgacgggccagatgaaccccctcgggaggagcttgacggcgagctcgacgtcgatgatgatctccctcatggccggcttcttctcgccgctgatggcgatgaggtagcttctggcgacccagccgatccagcccgcgatgtagaggaagagcaagccccgggtgatg

SEQ ID NO: 10133 - DNA, 418 bp, Oryza sativa
  Clone ID: uC-osflcyp153f11a1
acataatccaaattatatatatcccatccacatttttcattcaccgatctattcaagttctattcagcatgctacatgcaactataattcatatacgttaaacacatctagtttgaaatgtccccatatatccaagcgaccttatgattcaatcttgtcttcggctgtggttttgggataagttcactgaccttagcagaaaagggaaaacacagatgttgaacttcagggagctttgttgctgtcgatgttggggggaagcgctgcagggtggcggctggtgagggagcagcgagagcgactccggcgaggagatgccgtccgcggcgaggctgtggactacggaggccggatccagcgggaccagatctgccgctggcctagagttggggcgcacggcgagattcgggccggagat

SEQ ID NO: 10134 - DNA, 310 bp, Oryza sativa
  Clone ID: uC-osflcyp153g01a1
gcaactagtaacaataaccaaatactatttcaacgagtccagacaatcaggattccacaatcaactcatactgagaaaaaaaagggacagctttatccctgtcgtcatttgcacggggaatcagggattgcctccagaaatatgaggggaacagaagatgaataaccgaacaaggagtaatttacatcgtaaaatggggaatgccccaaagatacatgtagagtagtataaaataaaataattaaatttatgaatatgggggcaaaggaaaaggtacacaacctgtgcgctaaccctttgggttcctaaa

SEQ ID NO: 10135 - DNA, 374 bp, Oryza sativa
  Clone ID: uC-osflcyp153g03a1
gcttctaagtccttgttattgaatatactgcattggtagtttggtacaaagtgatccttcggtattgccctctgatcttggactgaacaaaaaacaaacctgaataagctgccttctagaggagataatcccaatgaaatcaggatagtttatcacgatgaattcaaccacaccagaagaaaaaattatagactcaaatgcttgtattcctcgatgtactctgctcgattctaaaatcagattagagtttgacaccgcaagagatgaggccacaggttggcctccgccggcgcccggagtgcggagtcaggccgcgcgcttcatcccgccgtggcgcccgaatagccccgcctgcaacacccaatcctcgatca

SEQ ID NO: 10136 - DNA, 445 bp, Oryza sativa
  Clone ID: uC-osflcyp153g04a1
agatcagattaaaaagccctaattctcatcgtgctcatttgctcattacatctgcattgcaccatccaagatccatatctgcatatccatagctgatacagctccatcgtgaaaacgtttattcctctacaaggttttgcatgctactactaatgcactatacctttagacattcccaggttacaataccgagtaaacaagctgcctaacaaacattacaatacttgatatgttgtatgatcctgaaggccctagccaagcaattcaagcagactcggcgaacccaatcctgtttttgccaaagtcgaagacagtgtggtatgcagccatgaacacgtctccaagaatccagagtggccgcgtggaggtggcacgtcgaacgccatgaacccgctgatgcaaacagtttgaccttgctgctccagcttcactacgtactgctctg

SEQ ID NO: 10137 - DNA, 211 bp, Oryza sativa
  Clone ID: uC-osflcyp153g06a1
ttttttggttttttttttttttttttttttttttttttttttttttttttttttttttttttttttttttttaaataataaaaaaaaaaaaaaaacaaaaaaaaaaaaaaaaaacaaaacaaaaaaacaggggcagagccccaaaaccccccacaaaaaaacaaaaaacacaggcgccggggtgagaaacaggaccgcaccaacccgccac

SEQ ID NO: 10138 - DNA, 356 bp, Oryza sativa
  Clone ID: uC-osflcyp153g07a1
aaaggcacttggaaacagaccattcctacttcacaatcatatttcattttccataaaaaatatttcctaaaagaaaaagggcttaaattcagtatgtaacagggcctcaccatgaaaaattgggttagcaaaatgatcattacgaagggacatatccctagctttaaagcccccaaaacaacttatttaagggggcccaaaggtggccccaaactagcctcaaggcatttatcatcgatcttggcattattcagagccaacatcaacacctttttttgataggaattcctttgcctccaagaaatcctgctgtagagtacagctttttgggggcaagttgggaagaacataagccc

SEQ ID NO: 10139 - DNA, 346 bp, Oryza sativa
  Clone ID: uC-osflcyp153g09a1
attaaattggtcggttaggataaaccgccaataattcaataaaccatttaattagggacaggggatcaataactcggcaattaacaaaagtacatggcgcagcattatccaaaattttagaactttggattttccaatcttttttttgggaggtactaccttttttttaattcccgggcgaacattccttgggcggaaaaaggtgttgggggggccggccggggatcgatcgacggggacaaggtccccgctgttgttgtttacaagcgaaacgggatgacccccagcttggcggccttggtgaaaacatggttgcgggtgatgtccgcgagggaggggcaccccc

SEQ ID NO: 10140 - DNA, 470 bp, Oryza sativa
  Clone ID: uC-osflcyp153g12a1
attcgtctaatgccacttgaactttcaaattcaaaaaccacgatttataaagtgccggagatgaagtacacaaattaacattacatcgagttttaataaaacatcatgcgaaaagccagcaaaaacaaaaggcagcatacagctaatgaagctctactggagtagctcgcaaaaggtccgacttattttcagtagcactctactccatttcttccgaaagagtgaccatcttctactgggtgttgtacatgtgacggatcaggtcaacaacgcgagagctgtatccccattcgttgtcataccaagacacaagcttaacaaagttgtcattgagagcaataccggcctttgcatcaaagatgcttgacctgttgtcaccctggaagtctgtggaaacaaggtcctcctcaacgtaacccagaatacccttgagtttcccctcagactcctccttgatagctgccttaatc

SEQ ID NO: 10141 - DNA, 358 bp, Oryza sativa
  Clone ID: uC-osflcyp153h02a1
acataagcagcttcatcaaattattccaagaaaaagaaagcaatcttgcaataaaaaaaaggataagtaggggtaacgattcatcgtagaaacaacgggtggcaactcaagtaagccacgtcagttgaatttgcctatcattattgacagctttgttggttttggacaaagaaaacaaggaaaatggtgctcaaaaaaatttcctccacgtcgcacacacaatgtgcatggacgaggccataatatactgatgccaaaagaggcaattatcttgcctttgcagaatgtaaacatagtacattgggtggagagtctagtaacggagcatgtaggtccggcgcctgaaccagttgtagtc

SEQ ID NO: 10142 - DNA, 379 bp, Oryza sativa
  Clone ID: uC-osflcyp153h03a1
gaatcaattgagtgggcttagatcaaaacccgattccattaaggattactttgcaacaactaccaaatcacaagctacaccatacacgccacgcattctggttacatgcttcaaaaactcttccaactcgatcagaagagatcagcacccggagttatttcccatctgcactaccataatcccccctaattaaacacaacacgcgaacaaattaacagcccatagacttgttttttaccaccttcttcttcttcttcttcttcttcttcttcttcttcttcttcttcttcttggtctacgcttctatcttaagattcttaattttaattagcctcctccgagaagcaccttggtctactgtgcttctgctgggcagaga

SEQ ID NO: 10143 - DNA, 349 bp, Oryza sativa
  Clone ID: uC-osflcyp153h05a1
gggaaaccaacgagggttacaatttcccacagaagtccataacagattcagggaatacaacagcagcaatttttttaacaatttagaaaacccaaccttgaaattttttaatagcaccagggttgataccccttatcaagcaagggaccacaggggccaagagtttggttttgcaaccaaatgcacgttgttttgcggcagaacacattgccgaatcaaaagcctttaggttatccttttttcctggtgcctataacgcaatggaacatcagatacagggggggcgtcttttccagcccaagttgttgaaagcctgaaactgaaagcaattttattcagtttttaggcc

SEQ ID NO: 10144 - DNA, 350 bp, Oryza sativa
  Clone ID: uC-osflcyp153h06a1
aagagcagacataccgaaatatcttatggttcaagtagctctaagtacaagcataactacatggtataacagcataaactaaactaataaactatcaccatcgcacgttacaacaacgattgtaaactcacccagccaacaatttttacaagaatcacaagatgcacttcgattgatacaaacctgaaaaatattaatgaacattcaacaattgaaaaaagctttttacagtttaggaggacagtatatcatgttgggtacacgctctgaagaattgatttgtgggtggatgattgcagctaaacactttcacatgttaaatcccaacagtagaatcatccgattgacac

SEQ ID NO: 10145 - DNA, 266 bp, Oryza sativa
  Clone ID: uC-osflcyp153h07a1
aattcccgaggaaagcaacagggggtttaaacaccttacccaaagggaatttaatttttggtaacatcccgggcgaagaacccttaacattggatggatggatagggggttttttgatttgggggggccattggacacaaaaacgatttgattgggggaaaaaaagatttttgacccggatgggtaaggataactggccacgaggggccccacaaataagtttctccagttcccgccggagttcccccctgaagccccccccacgg

SEQ ID NO: 10146 - DNA, 385 bp, Oryza sativa
  Clone ID: uC-osflcyp153h09a1
tttgtttgttttttgtgggcggtttttttttttttttttcattaagtttttttttgtttttattaccaatttttttgttttttttagcacccccgcaattttattaaatgcttggggagcccaaacaaatggccccccccccccaaattaacttggggggtaaaagtttatgcttaaaaaaaaaccttttttttggaaacaaactggcatggcggggaattttttggaaaaaccccaaaggtttttaccaaacaaaccttggggggggggaaattttctttggttaattcgccgggggggtggggggggggaattttgggccaggttggggtttgggctagggcttaagcttaagtttggggggcccgggctttttggggaaggg

SEQ ID NO: 10147 - DNA, 434 bp, Oryza sativa
  Clone ID: uC-osflcyp153h10a1
acgcgcccctcgcatgtttcgcgaaggcgattcaggcgagaagagagagagagagcgcgaggccggcggttctagaagcttccagacccttcggcgcgagcgagctcacctcccccgtaggagctgttcattagatctgaataagggggattgaagcagtgaggagaagatgagcgtggtgggctttgatctagggaatgagagctgcattgtggccgtcgcgcggcagcgcggcattgatgtggtcctcaacgaggagtcgaagcgggagactccggctattgtctgctttggcgacaagcagcggttcatcgggacagcgggcgctgcttcctccacgatgaacccgaagaattcttgttctcagatcaagcggctccttgggcgcaagtactctgatcctgagcttcagcgtgatattgcggccttcccct

SEQ ID NO: 10148 - DNA, 467 bp, Oryza sativa
  Clone ID: uC-osflcyp153h11a1
gccgcgtcggcggcggggagcgcgggcgccgggaagatgacggcgtcggcgccggggttgtagaaggaggcgatggacatgcggttgccgtcggggcgcgtgaggacgcggtgcatgacgctcttgtacctgccgttggtgatcacctccagctggtcgccgatgttggcgacgatggcgtggcgcatgggcggcacgtccacccactccccgtccttgagcagctggaggccgctcacctggtcgtcctggaacagcaggatgatgccaccggcgtcggtgtgggcgcggaggccgtcgacgagatcggggcgcgggcacggcgggtagctgctcaccttggtgccgaacgttgggccgttcgacccggcgaaggccttcttcaggtaacccttttccaggcccagatttttgcacagcaggtccagcaccctcttcgagagcttttcgatctcccgcgcaaattg

SEQ ID NO: 10149 - DNA, 497 bp, Oryza sativa
  unsure (1)..(497): unsure at all n locations
  Clone ID: uC-osflcyp154a01a1
gtcatgttcaccaaactagtaatgcttgcaggaaaaatcatagtggtacatgggatcactatatgtacatcatcatctgtcatcagaaggtgctcaccttcatgttggggagtatggggccaatggcaatgtacaaaactcacagtgcatcatcagcaaacaggggaaaaagaaagaccaaaagagcttctctacctgtacccagacggaaattggggtctggtcattcgtcacgctaagacgagacccggaaaacgaggagggcacaatgcagctccagaacaccaatactgttctggtcacagattgtgatcatcggcgacacaaacttggagcttgctgtgccggatgactctctcatggaggcaactgagcacacaaagcttcgatatgctgactgaaggggtattggcagctaatggattatctacttgggtcttctaacaaaacaagaatcttttnggctcaatagctccactgcaatagcatacctgaat

SEQ ID NO: 10150 - DNA, 447 bp, Oryza sativa
  Clone ID: uC-osflcyp154a02a1
tcctttttttttgtttaatgtcaaaatattacaatcatcagttcatcacatcacaaaccagcacacatgtgctctccaagaattacatcaaatcggattgttctcttccacccttattagcaaggagcactggagatgaacacatctcacataagactagacaagattacaacacacattgcttattaatggtctagattaatgaaaacaacatgaagcaaaccataattaaacataataagcatcatcagacacaaccacagaggctagtactactagttgtaatgcagctgcaaccatgccattgatgccaatggccatggcgtgcgagctctccatggtggctcaaaactggaaggcgtcggccatggcggtggcgacgatgggctgggccgcgaacggcggctgccatgggcggagcagcgggtcgtcggggatcctccggat

SEQ ID NO: 10151 - DNA, 368 bp, Oryza sativa
  Clone ID: uC-osflcyp154a03a1
ggccgggatgtaagcttttatataaaccaaaccgccccgttttaaaaacaaaggaccatcccccccacatagcgctgctatttggatcttagcccgcccactaagctctcgacttacgaaaaacacaaccccccttattccattctaaggcccccctaacaatggaccacgttctaacagctcccatttgaaggtgggggccgcaaaaacctttggacagggggggagaaacaggcccacccaaacccaaatgacggggatgcccatcacgggcagaatcgttggcctgtacaggaaggcccccgccgccaagttggggaacataaaggcctgacggctgcaggcgtttaaccttggggctggggggg

SEQ ID NO: 10152 - DNA, 430 bp, Oryza sativa
  Clone ID: uC-osflcyp154a04a1
ttaaccaaaacataggaggtttcatttcttcttctcaaagtagtgtagcatctttccttctttcaccattacataagcttaagcaataacagataacaaatcctcctcctcctctaggtaaaatattcaaacacaatacccttataagtacttattattaggaaagtagcgtgcatgggcataaatggcagcggggggcaggttaagaatcacaatgctgagcagcgaggaaacaaaacaccataatgggacagagcaaaagcctccgaaagggagcttttaggcagaaggcttctcccacttgaggggcttcaccacctcccaggtgaagtctgggtcgtcccttccgaagtgaccgtaagccgccgtcttgaggtagcgtccgttgccgcctttcttgaggtcacggttgatgatgatcatgccaggc

SEQ ID NO: 10153 - DNA, 315 bp, Oryza sativa
  Clone ID: uC-osflcyp154a05a1
ggacagtaaaatatgtggtgtggtatctacatataaaagaaaggagacaggtttcattcattaaaccttacataagcttgagtatgaccagataagaacaactcctgctgctgtaggataaatctgcaaacacacgacctgattccgacctattatgatggaaagcaggaagcacgggcagaaaaggacgaggggggcacactttgaacgacattaacaatcaccgaggaaccacaataacctactgggtcaacaccatggcccacgcaagggagcacatagggggagggctgaagccagtggagggggttgacc

SEQ ID NO: 10154 - DNA, 462 bp, Oryza sativa
  Clone ID: uC-osflcyp154a06a1
gctcctctttatgcggccgccctttccttttttttggtgttcaagcaaacaagaattgctatgataaaatgaagagaatcacagcgtggcaaacgcctataatacaagatcactcatctaaaccacctctctcagaacataactgcaaacgtccatgcaccatcttcagatttaactgcgggcgatggtaacaaacctattgatacaaaagggccaaagtttttgaaccaaatgacattagcattccaggatttacagtgactgcatgtgtacttgtccatattcatttaaacaactcgttactaccccatgtcgtcactgctggaacgaaatggagtacgagcctgtgtttgggtctttaacagctttgaaattgtcgacgctcatcccaaagcgcccgagcacagaattcccgagatctttgagctttccgatcatctcttccttatcttttccctttct

SEQ ID NO: 10155 - DNA, 493 bp, Oryza sativa
  Clone ID: uC-osflcyp154a07a1
gaacctacactatcctttttctttgtacagtgtaagcactaagtggtacaaaaggaaaacactcattaacactcaccatgctgacaaaaagaagaggttgaaaaaaaaaaggaatacataatcacacaaagagaaaaagaagggcaggagctcgatacacaaggggctttgtttatactatacacatgcacaaacaaatgaaacccaaaaatgcacccctgccaaacaggtattcatacagaacacaaataataacagggcgttgtgttgcacctcaggtcattggttagcatcaatcggagcgccagaccttgcttgtgaaatccggtttgcgtagatagttacaaggcgcagctgcgtgctgttaagcccttccaaatacgggacgaatgccttcccaacatgatgagatatccaccagcagaataaacagtctttcaacatcagggctttgttactaaagcatcaacagtgctggcaaaatgtgggcact

SEQ ID NO: 10156 - DNA, 477 bp, Oryza sativa
  Clone ID: uC-osflcyp154a09a1
aaagaaggataatacatgactttctgtgtccaaaacttctaatgctacaaaactcccaagaattggtaaccgttatagctcacaacgcacaaatacaatagggcttctgaaatgtacaacagcggaagatccttgatgaaagattactcaagctttcttgtcagacctattaagattcaaattgaaccacttctttttacttgatttatctttaccatctatgttaccattcttgggactcttaaggggggatctactactgctgctaccagctccaacagagttcaccatagttcgttcggtcgtgaaggaggagtggatgtcatccctttctctcagcatatcatcaaccgcttctttttcttgggtgtatctgttggtcacttcttgaaaccgcgctaaagcttttctgtactcagtttcaaattggcgcaaatcatttctcttctctagaattttagactctatttcctttag

SEQ ID NO: 10157 - DNA, 437 bp, Oryza sativa
  Clone ID: uC-osflcyp154a10a1
cacttttggttttgtttttttttttttttttgttttttttttttttttttttttttttttttttatatcatgagagggggaattacaagaaaagggcccaaagaaccaagggacgggggggggaacagcgaagacaagggcaaccaaaccaacagaccggcaccccaacacaaaaaatgggcagagcgggcccaaggcaagggaggggcccacaaagggaaaccccctcgagccggcagggaaacaaaccccggaccagaccccccccctggccccccaggggcccccagccgcccaccaaactgaaaccaacggagccctatggaagcccaacaccgggcccacaagggagaaaaaggaccggaaacccaagaacccggggcccggcccaaaaagggcagcgggccccagcaccgccggggaagcaaagcccccaa

SEQ ID NO: 10158 - DNA, 375 bp, Oryza sativa
  Clone ID: uC-osflcyp154a11a1
tgttttgttttttttttttttttttttttttttttaacctgaaacgggggtaatattatcgatgaacaatgttctgatagctttagggtacatttcttagatacggttggagtaaaagggccggaacaaatacagacattaggacaagaaattatactggttggcacgctcaaagtaatcccagccttttggcacattccacgctggtgtccaacgtctcctccaccgtaaacttgtacttgaaccccaaatccccaagcttgtttgtatccgttttcaccctcacattcttcccaatcacccctttaagctttatcgggatctccgggtacttgacagggaaacggtcgacatagtcctgcatgttggggtacc

SEQ ID NO: 10159 - DNA, 385 bp, Oryza sativa
  Clone ID: uC-osflcyp154a12a1
tgttttgtagtgcagaaatttttctgaaacaaaatgagtacatcatcctcctctatcatctccctccttaattaaatcatcacagaataatcatatatttactccgtgatgcagtagtatagtgtgtgacgaaaagtcggagcagtaaataaataaatccaaaaggcgaatttacgaagcaagcaagcattagtggttattaatctccttcaattaaggcctcctcctccttaatcaacggcgagggtggtagtgctgcggcttggcggcggcgccgtcgccggcgggcttggcgtccatgacggtctcgaaggcgccgacgagcgccttcaccctgctgcactgccgcttctccaggagcttgctccgcgcctcctcgatcacg

SEQ ID NO: 10160 - DNA, 460 bp, Oryza sativa
  Clone ID: uC-osflcyp154b01a1
aaatacttaatagtaatagactctttgatggagtattacaacatgcagcagtggcattaatacgccagtacattaattaagttacacatatgcaggctccattttggtttcttttaatttatcgtattacagaatttctgtagccttgcagatgatcacttggatatcatgtactagtaattaacaataggatgcatacaaaagatggcccaacgacaacagaagatgcgtgcatctgacattgtctggccttatttgttggtagtactccaattaattaacaagagatgatgcattcttgtgccttagtttcttcacatgcttggcttcacgttgagcctattcgcaatcttcacccccaacgactcatcacactgggagaggtagttgacccagatggcgcggagctcaggggagaccttggggtgcgcgagctcgccggcgaagcggcggatgaacc

SEQ ID NO: 10161 - DNA, 526 bp, Oryza sativa
  Clone ID: uC-osflcyp154b02a1
gattcagagaacaaggtctgttgatatataattattctgtttttatttgaatacacataaacgatcaaactgtgaaacggtacaggatctgagataattaggaaactacagagcagcagctacaatattaaccatagcagctgcaggataaacacggtgctaaataggcaggctttgttcttctttcacagcctggatatctggaaggggaccatgacttcagtcatctcctccctcatgataatcttcccaacctggaaaaggtcggagatgcctagctgcgtcgacagatgccttcggcaatcctctgcagcaacaatgcctgaagaataagctccatgcacggacccagagtgatcgatgcaggcggcctccccagcgaaaaacaggttgcccaccggagcacagaatctttcatacaagtcagctggcttcccaaacaggtcgcaggaataagaaccaagcgaatcgggtcgttccccaccttgaaaccaatactggaccggttcagtagctctgtagcatt

SEQ ID NO: 10162 - DNA, 490 bp, Oryza sativa
  unsure (1)..(490): unsure at all n locations
  Clone ID: uC-osflcyp154b03a1
cgtcctttnttttttttttttttttttttttttttttttttttttttttttttttttttttttttttttttttttttttaagcgaaatttttcagttaatccgttacaaaactaggaattcggttttactaacataaatcacatcagcatggattacaccatctactctctctttgcctaccaaagaacaagtggccatgatagctgcaattgcctgcaaacagtaacagcaaaaacaccactttctctccacatgggtaatcaccaggtcaaactatccacctgaagatgaatgcttcatgttgtagcctgaagaagcccgaacctgaattttttttgagcttgccagaccagagctttagtcggagcacaaggggttttttcataccagctcctgatccttgaagctcgacagtttcgcattctcccggccacgcttgaacacaaggtacaagggcttgaaaacaggacgcatacgccgaaaggaaca

SEQ ID NO: 10163 - DNA, 222 bp, Oryza sativa
  Clone ID: uC-osflcyp154b05a1
aaggcacttggcttagaccaaatagtattacattccacacatttggaccaactcaagcatacacatgtttggcctgcctacaatagaatagttatctttctttctgcatattctacattctaggcagactcaaaggagactcccgattattgtgtaactacagatattttgtatgatggctcctatctccttccagggaggatgtgctcacagctgcccctt

SEQ ID NO: 10164 - DNA, 413 bp, Oryza sativa
  Clone ID: uC-osflcyp154b07a1
ggccaacttgggggatttttttgaattcgatatacacaatattactttacaggaatgttttacacctttaaaatttggtttttaacatacaacagcactggcacgatcactggacttttgaaaacaggacatgggaatggataaaaataacaggccagccaaatagcaacaaatcgtttaatctggcgcacgctttggtcatcagctacaaagggtcggtatgcaggccccatccgggttcgtttgttttttccagatacgggcgggcaccctcagcttcagctccttcctgtcaccgccggagaagaagagtgccatgttcctttggatgatgaggccgtcatggctgtcccgcacctttcgggggctggcgcggatgctcctaggggtgccttcccacaccatttttcttg

SEQ ID NO: 10165 - DNA, 504 bp, Oryza sativa
  Clone ID: uC-osflcyp154b08a1
caaaaaattgtattctgaataatgagcataatatccaaactgaatctgttgacagtggaattttccagttaatccgttacaaaactaggaattcggtattactaacataaatcacatcagcatggattacaccatctactctctctttgcctaccaaagaacaagtggtcatgatagctgcaattgcctgcaaacagttacagcaaaaacaccactttctctccacatgggtaatcaccaggtcaaactatccacctgaagatgaatgcttcatgttgtagcctgaagaagcccgaacctgaattttctttgagctgccagaccagagctttagtcggagcacaagcggtttcttcataccagctcctgatccttgaagctcgacagtttcgcattctcccggtcacgcttgaacacaaggtacaaggggctgtagaacaggacgcagacgccgaaaggaacaatcatcattgtcagaagtcccctggagagcgcatacgctcc

SEQ ID NO: 10166 - DNA, 399 bp, Oryza sativa
  Clone ID: uC-osflcyp154b09a1
agaacccggaggggaaaagggggaaaacaccaagcattttcattaaaaaattggtacaaaaaaccacgcccaaaaaaggcctcaaaaaacccatggggggtcccgacgattgcctgaaagaaaccccccctttgttcaagagaggaacaaaaaaaatttggttttccgcccgccaaaacggggggggggcgtttcaaaaagaaaaatattggggggtgaaaaatttcaagggaaccgaacccaggaccacgcatgcctttgattaaaagggggccggcgtttttattttcagagcccgttgtgattctttgggaaatgaccttctaccaggcggggaggggggcctttgtgccaaggaatcggacatggaagggctcctttgggggggcccaacttttg

SEQ ID NO: 10167 - DNA, 527 bp, Oryza sativa
  unsure (1)..(527): unsure at all n locations
  Clone ID: uC-osflcyp154b10a1
acgtaataccatccattttttttattgtcgacgaatttatcagatatgctctagatacatatcttgtgtgtatatagccggagctttgttttcacatatcctcacccaacgataattgtagtactcttacaataaaaccggtcggagagggagggaagagattattacatatgtgttaagagcagaggccattgagatggtacataaccaaattgtaaaataaaaatatatagcatattatatattgatatatcatcaacatagcccaaaacaaagctgcatactattattataggcagcaatccaccagcgcgatgcttgatcttagcttagttgccaccagactcctcgcaacctgggggcttgtaggcgatgaagctaatcaactgcacctgcctgacgttgtcgaagccgatgatacggacaaaggcatcggggtaggccttcttggcctcctcgagctccttgagcacctgngtggcatcggtgcagccgaacatgggcagctttcacatggtccaatacct

SEQ ID NO: 10168 - DNA, 373 bp, Oryza sativa
  Clone ID: uC-osflcyp154b11a1
aacctaacaggattgacccatccgccgccaccgcccccgagaagccaaaacaaagtggccccccccgagttcatcttattgaaacagcagaatttccctactcacacgacacacacaggacccagcggaccaacggatagggggcccacgcaacccactaggacccagggaaacgaggagggggcttggggcctcgggggggtccggctctgccgggagaagaagccccggacggcccctccgggactcaagcttcgggtaaaacaggttcaccttcctaaggtccctgatcaccgggtgcagcttcagctggaccaggttctcctcccaaaggacccaaagggacaggcaggttccggacaaccccctcccc

SEQ ID NO: 10169 - DNA, 452 bp, Oryza sativa
  Clone ID: uC-osflcyp154c01a1
aagctgaaccaagtgatccaattattattcactaattaagcaaaaaaggaaataaaaacaagtacaaaattgtttgacaaaaaaaaaaatcgagcacgctagcacgaggacaatgtacgtgtcacactctcctagaccttaatgttgaccaggcgctccgacgccaacgacgcggcgtccaccgtcatggcgcggacggtggcgttcgttcccagggacgggtggctcactgtcaggttgtagtcgccgtgtgggaggtcgagctcgacggcgccgtcggcgccggtcgtcgccgccgtcttgtgcgtcttccactcggcgatcagcttgtcgacgagggtcccaacgggcaggttcttgaagctgttgtccgtcaggcacatcacgtagcaacccttggcgtgccacgccgcccacattatcatcccgttcaccgacgggtgcgcgtaccc

SEQ ID NO: 10170 - DNA, 464 bp, Oryza sativa
  Clone ID: uC-osflcyp154c02a1
cagagaacgaattcttgcgagaatgtatggggcaattttctggggtttttctcattcaactgaatgtaaaccttacaactgaaataaagagctaagacaactacttatactcaacaaacaaatttggaatccgaggctaaaatcgcgccatcccacgatccgctttttctgaactccacgcacacacgcacgccactcccagcgctcgactcggtcacgatcaactgattcgcgacttatttgcatctctaacaaactcctgctagactaattcgtcctcccgatcagctccgagagaatcggcttgcattgggccacagctgaaataaatcaacaccgccggcagagtgctagcacctcatcctgtcctccctttcgcctcagcatcccccgccgtcaccagcagtgtcatcggcgtcgggcatcctccttcctcttctgttgccccgtcgccacccgcgtag

SEQ ID NO: 10171 - DNA, 345 bp, Oryza sativa
  Clone ID: uC-osflcyp154c03a1
gggggcaaaaaaacaaccaaggggacccactggcggccctggccttttggggatccaaaacaaaacaaaacaagggttaatttaaggaaccccctggggtaggttcaagttaaaaactttaaaaaacccccaggcccccccacctgggcaggagcccccaggggggaaattattccaaaaaaccaaaacgggccccctttttaaaggttgacaggaaccaaaaaccggggggggaaacaccaaaaaaaaccggccaagctggcttgaaaatgggaacaaacttcctcaggccccttttggaagcccccaccaccctctttgaattaaccccaaagggggaaccaa

SEQ ID NO: 10172 - DNA, 418 bp, Oryza sativa
  Clone ID: uC-osflcyp154c06a1
acatgcattctgctgttcatttgccttattaccatgcaccaatataatgcatcctcctctctagcttatcataagtactaattaactaattatcccagagcatggcaccaatataattgatccacttgagaccaagcatagtgtacacttgaacacatgcatgcattggcatgcacatagtacggcttgatcacaaacttaatcatcatactagcttgcttggattaatatgatcatatcacatcccttgtaatttgcatgaattcttgcatgctcgatcattctgccttcttctgatcgttgtagatagtagctagccggattatattaattaattaatttaatgaatactagatgttgatcttgccgatgagagggatgccgatggcggtgaccaccagggtggatgggagtccca

SEQ ID NO: 10173 - DNA, 169 bp, Oryza sativa
  Clone ID: uC-osflcyp154c07a1
atgcgggaagaaccgataatttcatatgtatgtacatcaacccaaatagtcaaatacaacacggtaaaaacaaaggcatgacgaccatgtatggagaagttaatggggggggggggaatacttttcttctttactccttattctgcactccttatcttcccctttctac

SEQ ID NO: 10174 - DNA, 55 bp, Oryza sativa
  Clone ID: uC-osflcyp154c09a1
ttttttgtttttttttttttttttttttttttttttttttttttttttttttttt

SEQ ID NO: 10175 - DNA, 478 bp, Oryza sativa
  Clone ID: uC-osflcyp154c10a1
gtcctgaatttttgctagtatatgcatataagtagatactactccactacagtacagaggagaggattgacattgactagctagtccacttaaccgtctccttactactatcagaagaagctaatttaattaagtggagtaaaagcaaaatgaggggtgggctgggctcattggtcgtcgttgtcgtcggtgacgaacttgccggttccggggttgatggcggcgaagaagaagaagaggatgttgaagaggaggagcggctcgatctcgttgatggggacgccggtctcgatgttgagctgcgccagcgcgcccttcccggtgatgatctcgccgatgagggagaaggcgatccccagctgcgcgaggcgacccacgaagagctcgttcgccttggtgaacccgaacagcgggccaccctcgctgagccccagcgccgcgcggaaccccttccccggcgggatccggcgcgctccag

SEQ ID NO: 10176 - DNA, 507 bp, Oryza sativa
  Clone ID: uC-osflcyp154c11a1
ggcggcgctgctcatctgcgggaacgtccaaatggactccccgctgcctcctccgccgccaccgccaccaccggacggcccacctccttgcgtgctgttgctcggcaccatccacacggtgcccggcatttggctctgcgtgtacccggccatctgctgctggtactgttgctgctgctgctgctgctgctgctgttgttgctgttgctgctgctgcatttcctgctcccagcgccgcttcctggagaggtcggcggcggcggcagcggcggaaggcgaaggttgcacatcgagaccgacgctgcccgagtggaagttcaacagaagcggggacggcgacgaggacgacgaggcggggccctcggacgggaacccgaggctgacaacccggtcccacgcgtccgcacgggatccgaaccgggcggcggcggcggggctaggtaacgcgcggaggtgcgccggggcggacagcgacgatcccgaggagcggagggagatattgagcga

SEQ ID NO: 10177 - DNA, 416 bp, Oryza sativa
  unsure (1)..(416): unsure at all n locations
  Clone ID: uC-osflcyp154c12a1
gcgaagagacaaaaaattcaaaaggcaaaccccaagggggattccgggctagcagggggaagaacccccccccacacaagtgggggtgggggccaagtaataatatttttaggagaaaccaccatgggaggggaacctcttgcacaaaaccatttcagaggtatcaaggcagggagcccaacctccgggggggaaataccggggggcaaacttatcaaaaatatgggtgccaaaaaaaggagacccggcctcaaagctgctaaaactgtggacaccccggaagagaagggggncaaggtcctcctcaacgtaacccagaatacccttgagtttcccctcagactcctccttgatagctgccttaatctgatcataggatgctggcttctcaagcctgacagtcaaatcaacgacag

SEQ ID NO: 10178 - DNA, 515 bp, Oryza sativa
  Clone ID: uC-osflcyp154d01a1
acgcgcgcagcatgcattttatttaggcacggtccacaattcatacatgtatagtggatacgtctcgttggcagacactcacggtatagtagggtagttgtgtgtacagtgatatagtcatatctgcgcgtcttttcatgccgttcgttgacttcgttcacagggtcagggtcgggtaggcgatatcgagtgtgacgccacacaggccggggccaccgacgtcgcggagaatccggatgtagccgcgctcgccccatgactggccccatgagttcttgatggtccagtacttggcgccggaagacgcgtcggtgccgtacccgacgacggtgacggcgtgcgctaggcgcgtgccgcacgggcccgtgtaaacgccacccttgtagaactgcatcccactaccgacctcgatggccacagccacgggctgccgagcgacggcggcctgcaacgccgcctcgttccgcggcggcacctttccgaagcccgtgatctttgcggcatggtgcgcggac

SEQ ID NO: 10179 - DNA, 464 bp, Oryza sativa
  Clone ID: uC-osflcyp154d03a1
gcccatgggccggcacgggcccacagcgtacggactacggactacggctgtgaacttgcactggccagtgttatttctcgatctttcagtggagcatcatactacacgcccacacaattgttttgccattttacaacaacacacatcattcgtgtagctcattgactcatgagaatctcagtgctggctcaattattacaggatcacgcacttctggccacgcttgctcgccggcgcggcggagggccctgcactcttcgtcctgctgccgccgtcgtggtccctcttctcctctatcctcttcctcctcttcttggccatcatgcacttgacgaactcctcgtagttgatctgcccgtcgccgtcgacgtcggcctcgctgatcatctcgccgacctcctcgtcggtgagccgctccccgatgttggccatcacgtggcggagctcggtggcagagatgaaac

SEQ ID NO: 10180 - DNA, 549 bp, Oryza sativa
  Clone ID: uC-osflcyp154d05a1
gacgagagcggagcacactaagattcattcattcattcatttgatcaaagcaaacgagacgagctttcttcttgcgatcaaaaacacagatgggcaaccacacagttaacacaaactagatagttccacacaaaactaacgatgataacgatcggatgatgatgatggcagctcgattagatagatagataacttggccatgagggccccaccgctcagttcctccagttcccgtcggagttgccgccgccgcggctgccgtagccgtcgccgtagccgccgccaccacggccgccaccgtagccaccgccaccgccgtagccgccttcacggcgctggccgtagccaccgccgtcgtcaccaccaccgtagccgccgacaccgtagactccgcctccgccgcgctggccgtagccaccgccgcctccgccttcggagcggcgcgactgggcctcgttgaccgtgatgttgcggtcgtagagcttcttgccgattatcccctcgaatgcgtcacgcatggcctgctcgtttgagaacgcaactaacccc

SEQ ID NO: 10181 - DNA, 58 bp, Oryza sativa
  Clone ID: uC-osflcyp154d07a1
gtttttgtttttttattttgtttccacttactttcttactttttcttttttactcttt

SEQ ID NO: 10182 - DNA, 500 bp, Oryza sativa
  Clone ID: uC-osflcyp154d08a1
gaaatgtgatgagatcttacaaatgaaagcatcagtaatgtgattcattcagccaacagtgactggttacaagaagtaactaacattgtaatcaattcatgctggtcaaacttaatcaagcctaatcatacagcctggcttaaaacaattggtcaaccccagccctgtactgttttatccgttggttttgcaaactctacctgtaacttgaacatgtacagtgacagatgatcatctctcgtgacagtttggccaattgcaagatacaaacaatatccaacaaactacgcgttcttacgactttgacaatgtagcatccagtttatctgctatcattgcaatccatgcctgcaaggaaaatcaacaggataatggttgcctctctactgtcatactgattctttttttacagtaaccgtcatactgaatttaaaacagtgcaagtgtgcaacctacaaccaacaggcttttcattacattcggtcttttgtgctctcaaa

SEQ ID NO: 10183 - DNA, 475 bp, Oryza sativa
  Clone ID: uC-osflcyp154d09a1
tccgcctccacctcgccgccgtcggcggtggccggggcgccgttgagccagcgcacctggtacacctcgttggtcatggcgcccttgagcggaatcacctgcagcgcccggcagtcggcaacgtccgcccacgacgccgccatctcgtgcagtagccgccgcgcctccctggggatccgtggctgcgccgccgcctccgccgcccgctggccctggctctggttctcgatcgccaccatccttgctaatcacgtccttttaccgttttttttttctctctccctttttgctcgcgatcaagaaagaagaaaagctgaagcgaagtggctagagatgagaagaggaatggctaatcacgctttctaatttttttttctttttcttcgatttggatatctttccgaagcaagattagagaaagagttgcaagtaacaagcgtactagcgagttttcctccaatctgatccgctatcg

SEQ ID NO: 10184 - DNA, 377 bp, Oryza sativa
  Clone ID: uC-osflcyp154d10a1
tttttgttttttttttttttttttttttttttttttttttttttttttttttttttttttttttttttttttttttttaatttaaaaaactatttaaaaacaccaacacaaggggcccccccccaaagccccaaaagaaaaaaacacacaaaaaggggggggggaaaacccctagacccaagaaaccaaaagaaaaaccccccgaagggggaagagcagagatccccaacaaaaaacaaaactgcaaccccaaaaggagggcggagcccccacggcactacaaaaaaacaaggcactaaccgcccaccaaaaaaggccgggaccccgccccccggcgggggaggcccacccaaaaggggggcccccacaggggggga

SEQ ID NO: 10185 - DNA, 74 bp, Oryza sativa
  Clone ID: uC-osflcyp154d11a1
ttttttttttttttttttttttttttttttttttttttttttttttttttattttttttttaaattttaacaac

SEQ ID NO: 10186 - DNA, 395 bp, Oryza sativa
  Clone ID: uC-osflcyp154e01a1
ggtccgtataacagaaaaatgatacataaactttctgaaggaaattcttggccataagttatacagatacaaagttttaactgtctggtcaataaacaggttaaaacaaaaattttgcaagatgtagtaatgcattggagcagcctagtttcctatcatttcttcagaagcttcctcagcacttcctcagcatgatgctccatctttggtaaagcccagtcatgctggattatatccaggttgtctttctctgcggccaaacccattgtgggattaccgccaaatcccccacccatctgcatcatcttttgtgcatcatcattagcattttctttaccgaggatcagactgaagagacccctcaaaccaaacaaattgagaaagtaccatgaacg

SEQ ID NO: 10187 - DNA, 353 bp, Oryza sativa
  Clone ID: uC-osflcyp154e03a1
gggcgatacgtcattagctttgtggtatacaacaaaaatcgaacatcatacaatatcaccaaatgtgaaacatgtgcatggcaaaatcagttgccaataatcaatctactcgcctacaagaatgaaggggttgtactacatgcagaatgttacaacatgttgtgttcacagatgcacatacattatacatagtggccataatcatatgctgctgtgcgtacaaagaacctgctaattaattttagttagtttttcatgatctaacagcttccaggtgtggatcgactagatttccaccagtgactcctgccctttcttgagctcagtccgaactacccgagccttcttttggc

SEQ ID NO: 10188 - DNA, 516 bp, Oryza sativa
  Clone ID: uC-osflcyp154e04a1
agaacatcagtgaacgatggattttttttaaaaaaaatcaaacagtgcatgtctagataaaaatcaaacagtgcccttgccaatcgaagggtcactcatgttatcatgtatgtacatctcaggttaacaggaaggtttgtattagcgccacacgagcgacgcggccatgctcttcaattccctactgtgcaacaccgcaccaccagtttggatttagcgtgtgaaaaaaaaagaatcacattacgaatctcgcacctaaaacgctacatgtcaaccaatcagaacgtcgaggccaagacgaaacgaaatcctcatagtctagtcatcatcctcatcatcgttattgttgttcgcatggtatatcttttgtgcacggtacatatcagcaacttgctcagatgtggttgcctgttctggatttttatcatcacgaacacgtaacatgcgaggaaatcttagggagatgccccttgtcggatcaactataccatttgcagcacgatgcacaggactaat

SEQ ID NO: 10189 - DNA, 474 bp, Oryza sativa
  Clone ID: uC-osflcyp154e05a1
cgagaaggggaatagtacatttaattgtgtcaaatattcaacgttaacaagatgttgtttgtgcactagccttcaaaaagtgaaggaatgcctattcatcacaatgaactgatatggacagctttacaacttacagctagtatgatttgttgaaggtaaaaacaaatcattcgacatgcatctcgtatctaaacatagactgcacaatgccattctgaactctgccagccatgtcgcctcccaaatcggtggatctccaagcggtaaaccgcataagtttcctccaaagttcgaatggttcatgcactttgttcatctgtttctctgttcctgttctttgatatcctcgaacagaacatgaacatcagcaggactgttgatagcatgaatagtctaaagcaggttcttagctcctgcatccaaggccaaggccttcaagtttcctttatcgggactgtctctcgtgccgactta

SEQ ID NO: 10190 - DNA, 326 bp, Oryza sativa
  Clone ID: uC-osflcyp154e06a1
ccaaaaaaccccaaaaaaaatgggggaaaaattaaaaaggcccccccccttgggaaaggggggaaaaccctaaaaccccccatccggggggcacccaggaccggaacccacccgccctaattaatccctaactggaacccaaacccccaggaaaatttttaattttttttgggccggggggggggcaaaggcaaagcaacccgaagggggggggggggggtttttaacctggggggaggggcccccccctttgggaaaggccccgggggggggtccctcctccgccgaagttggggggggggtttcctaagcgggggggggggccc

SEQ ID NO: 10191 - DNA, 83 bp, Oryza sativa
  Clone ID: uC-osflcyp154e10a1
tttttgttttttttttttttttttttttttttttttttttttttttttttttttttctatctcatggggaacatccaggccca

SEQ ID NO: 10192 - DNA, 447 bp, Oryza sativa
  Clone ID: uC-osflcyp154e11a1
ggggacacaggcagacacagtaataataacctgattggtctttaaacattaaaggaggagaaaacgatctcagtagaagtagagtgctacaatctcaacacaaaacgggctcaagtactagttgacaccacgaacgacacatcaatggtaattcaaacttctagattgaagtatcaacggtaattcaaacttccggatttttctttttatctttgggcaccgatcgccatcacctgactcaaggaagatctagatcttgttgaacgcaacaatgtcgcagctctggatgtactcattcgctggttcggtgtagaagtagtcctcaatcagactatcaaccgacacaagatcatcgacaatggtcatcatgatttgcaatttcttgataccgtaaccaaccgggacaagcttggatgcgccccaaaggaggccttccatcttaacatt

SEQ ID NO: 10193 - DNA, 431 bp, Oryza sativa
  Clone ID: uC-osflcyp154e12a1
aaggcacaagggtgtaagtaacattagatgaatgaagatgtacatttttcatgtttttggacagatatgcttagattctgccttttacggatacatccatgctattttgcaagccatgtaactgatttataattaatgcagcctttccgggggttccatgacgatcatcgcattactcgttatcatcatcagccaggtcgaactggttgagcagcgcgccgcaaatgggcagggggatgtccttgaggtagcccagtgggttggctaagcgcaggttgtcacagatgccgacattcctggtgagcaaaacacgggcacgatccctttcggccttgatttcagagcagtttgcaagggggctgtggacgaggacaacctcgcagatgtcctcctcatggctggccttgagctcaatcttgtatgtcccggtc

SEQ ID NO: 10194 - DNA, 301 bp, Oryza sativa
  Clone ID: uC-osflcyp154f01a1
ttcatgactacggtgaactggagcttctgggtgaggtcgacctcgtcgccggcgacctcgcgccactcgaactccctgacgaggatggtgacaaagtactcgaggtggagcagcgccagcgccatgccggggcacattctctgaccgggaccggacggacttatcactgtctacttgctgaccaagagggacacatgctggccctagccgacagagaggaaccaattatgcctgaacacttacggagagagtgagacgcttgctgattaggacgatttttgcctcctggaacatatacctc

SEQ ID NO: 10195 - DNA, 398 bp, Oryza sativa
  Clone ID: uC-osflcyp154f02a1
attgggaaattctttccaagatccttccatctcgtgcaatctggcgaccagaagtgagcgcagtgaaagatcattcgctcaatatcaatatttctgtgcatttgtgcttcaagcaaaggtgaaacagagaggttcaagtgtacatggaaattctatacgatttaaaggactccaaagaaaggattagtgatagcagaattcagctcggctccagcagtgttcaggacggccttgtcaaccttgtcccttgccaagaacaagaactcgttgccttcaagtttctcaaatccacagagctggagaaactctatgcctccatgcagattgccaaccctctcctgaaatgtagcgttggacagtctgatcttcctgaatttctcctcgtcaggatttttagc

SEQ ID NO: 10196 - DNA, 476 bp, Oryza sativa
  Clone ID: uC-osflcyp154f05a1
gaattctgaacatagccattttgagaggaaaaaacagagacacaaacttaattggaactaaagactagataatgggaactaatgaagaaacttattcgcaattctcagctggaatatcaaagttctccacgtgatgcagaggcaaacaagatcagatagatgaactctcatgatgaggatgcaatcaggtgcttagatcttgtcaagcgcctgaacaacgtcattcttcaaatcctcaaaatcctccactccaatgctgaacctgatcaagttgtccttgattccatagatttctctctgctcctttgaatcccagtaagacatgatggcaggctgatcaataatgctctcacagcccccaaatgatggggcatgatagggcatcttaacagaatcaattaatctcctagtagcatcaaagtcttcaagaacctcaaaactaacgacaccaccaaagccggtcatttgactcttgg

SEQ ID NO: 10197 - DNA, 464 bp, Oryza sativa
  Clone ID: uC-osflcyp154f06a1
gactagctcccggagttttatatgatttcgctcggaattaattaccgagaaaagaatgctgtacatgacaaaactctttgctcccaccacatctctttgctcccgatttctctctcttcctgaatcagacaaggttatgtaattatcttcacttcatcagatgtaaaactccacattaattaatcttccttccttttaatgcttcgacagcatatgctgatcacttgttcttgcagattctgcttccagagtcacctcgccggagattagcattgtccggcgatgatatcgccattgccggtcatcagttgcagatttcacctacggaacggtggcggctccttttggaatgttccgggagcaaacaccgggaaggactcgccgccgtgggcccttgtccccgccgtcccctcagactcatgcttgacagctgccttaatcccctcataaaatgctccccccta

SEQ ID NO: 10198 - DNA, 226 bp, Oryza sativa
  Clone ID: uC-osflcyp154f08a1
ggttttgacccataaaagaactgacagacacacctttattattgcataatggagtttacaaggcgcactcaacacgctgcttccatccaactagaaaactaaaatgtctctacaacctggctctatttacagaacacccttccctttttagtcctactgaagggagtctataaggccatttgtcttgcaatatatgagattccccctatcaccactaggctcgcta

SEQ ID NO: 10199 - DNA, 413 bp, Oryza sativa
  Clone ID: uC-osflcyp154f10a1
gatgccaagagcattccccaactatcaacaatgttcagtctacaaggacaggaatacatataagctgttcattggactatcatctccagcatcatctaagatcagttacactgataggatattacgatcacataacgccaatttctcttacactctagtagttgtagctattactgctacgaaaattcttcagcgtctcatgtaacgccaaagcacaattcactcaacggctttgccctcttagagattagtccagctgatgaggcgtgcagagattcagacaatgatggcatgtaacagccatggccttcctgtaggagcttagctgttgctggggttcaagatctcaccaagattcaactgcaagctgttcctcatggttctccttccagttccaccagcattgccctttc

SEQ ID NO: 10200 - DNA, 112 bp, Oryza sativa
  Clone ID: uC-osflcyp154f11a1
atgacgcacgacctctcggccaaaatcccacgggaaatcacatgaagtatgtatgcttacataaatagaacaccctatgtacattctcgcatatctccccacttcttagttc

SEQ ID NO: 10201 - DNA, 272 bp, Oryza sativa
  Clone ID: uC-osflcyp154g01a1
gaacagaagggagccggcggcatcaatattcttggtgaaaatgtcgatggaggaaaccaaaggcttcacctttgcatggtgcgatttgcagcttgcacaaaccttgttgggacacaaaaaggacatggatgtataccaaggaatggcctgcacatttaaccaacagctaatatgtgcaccgtaaaattgccgggggaaaaaaactgatgacaggaaaaattttctctccctagcgttatattacaaaggctgagggcatctacgagaaccac

SEQ ID NO: 10202 - DNA, 273 bp, Oryza sativa
  Clone ID: uC-osflcyp154g03a1
atacttgattaccgaattacatttccttttctctctcctgcggaaagatccgcgtgaactaacatgcgtaatcgggtaaggagaacctggagcagggggagggcacaccagcggctgcaacaggcggaccgagaggcgctgcataacaccccctgcaacccgggagccaagaccgcggacctctggctcttgaagcacccgcacaatatggctgcaagatggtgggaccaaagccatctgaggatctcagaaggccccatattctgaaaaccc

SEQ ID NO: 10203 - DNA, 212 bp, Oryza sativa
  Clone ID: uC-osflcyp154g04a1
gtatggatgatgcatggctgatattatcgaaaattcatttttcttgtatacagaaatgttgcgattgctacagcttccaaggagaaaaaggctggaccaacaagaggcagacatattcaattactactttacaatgtctctgacaatgaaatgaagacgacgagctttcatgttatgacggcaagcgctgtcaagccaggcaattgtagatc

SEQ ID NO: 10204 - DNA, 558 bp, Oryza sativa
  Clone ID: uC-osflcyp154g05a1
caggatcaactaccgttttcgatgtttattgacatgaaaattccagtggttctcactcccagcaacgaacagaaatgaaaatgaaagtggatgaagctaccaaataccagtagcccaatacgccagtctctcccggtgtgttacaaaactggaccttattctctacaacgctcagttgaaatggtagagcggcagctcggcgttgagcgggtgcgacatcaccgtcagcacgtcggtcaccgacagcatcgagctaatcgccgccttcagaacctcccgcgagcatccaggcttcaccatcgtcctcaccttgctgagacagtctttcagtatctcaatgtcgcccatgtagtcttggttctcaatggtcaatgtgatgggttttgcattgcaacccgggccttcatattgaatgcctcctggagtcctgtagaaatcatcaaggagaaaacttgatgctttctctcgcagcaactcataagccttccctttcaggtcaattgggagaggatgaatggcaggctttcctatcgggattggtccaggaccacgcaaatg

SEQ ID NO: 10205 - DNA, 295 bp, Oryza sativa
  Clone ID: uC-osflcyp154g07a1
caacatagaaagggggactgtcaggttcaaaaaatcttggaacacgggtacagaaggctgggaactatcatcgatgcatgacacggagtgatgccatgcacaccactttatcttgaacacacagagggccaatggctgcaagacaaaatgaatgtaactacaagcttgaactccacggccccatcctgtacaaccttatcatctgctccgaggccaggagacctcttgcgaaaaacagcaaacaccacgctgtgcggaagaagacaaattattacagacacaaatcgacgacacg

SEQ ID NO: 10206 - DNA, 211 bp, Oryza sativa
  Clone ID: uC-osflcyp154g08a1
tgttttgttttttgttagggtaggggcactcaagaaagaagcttgcttcagttgcacttgaagagaatgaatggcaccatgattccgaataccagaagatgtcttagctcaccaggttttcaggactgagcacaggcccagcaggagattacaccttacgacccagggagtattcagccgcttacccagttaatgtgccaccggccttttt

SEQ ID NO: 10207 - DNA, 529 bp, Oryza sativa
  Clone ID: uC-osflcyp154g09a1
gaactagaaacaaacattaacattattgcgtaattacgttacaaacttacagatgtagtttattctaacaatacgatctttctttgttttgttttacaccaacaacagcacacattccctcagagagaaaggcaacacctcacactgacaatttctgaaacaaaatggactcaagctgggaacagcgcaaatagttgtctgaattatgcttcagccatgatgcaatcaatggcttgcttgcagattccagtcattgttgcctctggtccatatacctcaattggaacaccaagttctgcacctagtgtacgcattttggcaaggccagtttggtagtttggaccacctctccgaacgtaaatgttcatccgtgcagccttcaatttggattccttctctcttaaagctcgaatgatgccactgaatgtagcagcgacatcagtgaagttcgctataccacctccaatgagaagagctctcttacggccatcaggatcagcagtgcacaatccaaaccactctagatact

SEQ ID NO: 10208 - DNA, 412 bp, Oryza sativa
  Clone ID: uC-osflcyp154g12a1
acacacaaagggggtggttttttatttttccccccacaaaattaacaacaggggtgggggacatttacaaaacattatacagatcattagttaattaacagggaaattaaaggagggccccaatccagagacaaggatgcatgcagttttttatccagccaaaggggtttcctacttaaagaaaccctgggccattttgaacagcccaccgggggggccgccgttgccggggtttttctccccggcgccctttttttccataagggactgggcccccttaatgacgttggggagaccgaacccttccgaagacgagggggggttgccttccttcttttaaggcggggcaggctccttggggggctcccccgccgctggttttggcgctggggcgtttccggctgccgggggg

SEQ ID NO: 10209 - DNA, 296 bp, Oryza sativa
  Clone ID: uC-osflcyp154h01a1
acatgaaaaattagctccaaatctcacattggaataacagaattgcagtaaattttgagctacattttattcaccaatagaaacgacctaaaatttctccaaagaacatgtataatataaagctaacctcgctcacaagtcagggaatccccaaaatcgaaagtcctcccgcgtggattcggtcgtcgaaggagagcccccggccgctactcgtcgagctgcttgagctcggctttgagctgctccatcttgagccccatggatcggcggagcgagtcggcgtccggcggcgggag

SEQ ID NO: 10210 - DNA, 297 bp, Oryza sativa
  Clone ID: uC-osflcyp154h02a1
gcaaagtctgacctgcaaaatccccacaacagatcgcccaaaacgaactattttttctgtttacatactactaactaatataaccccggttctcaatcaactccggatctcaatcacctccaagttagttcattccaacatcaacatcacattacatttcaccgaagcaagggggggatgctcctgagaccaattaacaatcacacgtaaagggccaaacggccctgcacagacaaaatccattacatcctactactactctccggcgtaaaagacggcgaacggcagccataggtt

SEQ ID NO: 10211 - DNA, 434 bp, Oryza sativa
  Clone ID: uC-osflcyp154h03a1
gtggaaggtaaaaaagaagccatttcattagatatttttctatggtacaaaatgattgcaacgttataaatagctctaaataaaaaagggagacctcctcctgtgactaggcagcctattggtgttacaaatacaacagggttgaagaatcactagtacagatgtgtatacagtatgtcagttgccgaacccaaaaggtgatctcgtcctgctgccaccttcaccatactgttcgttccattttcttaattcgttcatgctcgtcgcatcatacgaaacagacgggcttaccttggcttttgcttgaatgaaatcatcaagtctaaggggtcttagacccgtattttggctacacggaccttccttcttttcttcttctaaaagttcatgaactggcctatatgctgaagctatacataggttctttaaatcac

SEQ ID NO: 10212 - DNA, 367 bp, Oryza sativa
  Clone ID: uC-osflcyp154h04a1
gatcgtacaatgtcctctccgcttgtcgaaatgcaaataacatcatcgggggatatgatcatcagttcacgagaacagaggaagaaacaaaagctaaaaattaaaaccatcaacagcccgatcgagtttggattactagatacacacattgcagccttccttccctctctccatgtattgatatatcaacccgggcacgcacaaaacatttgttcattccctactcgagctgggcgtaccacaccccttggatcttgacatccttgggcaccttggcgccgaggtctgtgtccgacggctgcacgctctttaagacgccaatcacctcgccggtctctggcttgctcttggtgacgctcaacgtgat

SEQ ID NO: 10213 - DNA, 447 bp, Oryza sativa
  unsure (1)..(447): unsure at all n locations
  Clone ID: uC-osflcyp154h05a1
aagcagcaatgcaaatattatacttgggataaattttatgtatactatagagggcaattatctctacttggaaattttaaaatggggaatgctctccacctcagcgggcacctattggagggcatccaacaggaagcggaagatccaagttatcaacaattctgaatgtcctagggaccactcggtcaacatacaatgtaccttaaagatgatcaccattngggctgaaagatacgtgcctgccatcctgaagcttttaccttgatggggcgtccattcctgtccaaccctgaaacctcaacatccaggtgtttttcgacaagggccctgtatccatctaaaacccccttgaaagaacaaggcagtttttttactgggggcttaggtttgggttggtggataccaaaaaaaccgaagggccgggaaccctggccttaatgccttttt

SEQ ID NO: 10214 - DNA, 448 bp, Oryza sativa
  Clone ID: uC-osflcyp154h07a1
ggccgcccttttttttttttttgttttttttttttgatcccaatttcatactatttatgaactgccttgatagagtacaatacaagaccccacccatacatatgagaatgaaatggtgttctgaactcgtgagagtcccatctaaaagctggggacacttgcgtcttatttagacagttaattgggaatcatttctagtactagtaccaacagtaattaatagagctccccattgatgacgtcatcgcaaattgggttggaggaaggatggaggattctagaacgcacctcgcagtcgcagcaggctgggctcgagcggcggcgggagggacgaggaggaggagatgccgtcgtcgtcgcagtcgaagccgcagccgcactgcggggactcgaggaagttgtcgacggtgaaattcggcggaggcgatgcctacggagaacttcgagg

SEQ ID NO: 10215 - DNA, 460 bp, Oryza sativa
  Clone ID: uC-osflcyp154h08a1
gtttttgttttttgatacataagaaataatttaattacactagctagcagtggcacatctgaaaaaacaacgtgaaataaaagggaaaaaaagcaagcagaaagctagctcatcactttattccagaaacggtacagtgtagtgactcgctcgctcctccctctggcgaaataatgtcgtcaatgcctcaatcgtgcagcagcaagtgctcggtctccggtgatcgccgtcactggtcggtcgctggcggtatgtgcggcggcttgtgcttcttcggaggtgcttcaggttttggctcaggcttaggcttaggtttcggttcaggctttggctctgggtatggtttaggctccggctttggttcgggcttaggctctggtttagggtcaggcttcggctctggttttggctcccgctgtggcttgggctctggctttttctctgggtgtggggtgggtct

SEQ ID NO: 10216 - DNA, 391 bp, Oryza sativa
  Clone ID: uC-osflcyp154h09a1
tttttgtttttttttttgttttttattttttttttttttttttttttttttttaacagttgacaaagctatttttgttcttcacacagcacaaatggccatgacagcacaaactgtccacaatgatattggacagttcttcaaacattccattttaggttatatcccataaaatccgatattttctggtgcaataatctgagattttgcaaactactatgcggatgtgcatgatgaatcgggtagtaactttattaggccaatgtcctcaaagcaaagcagggtactgcttggcctgaacacgaacacgcctcttatattctggtttgtgctgtataaaaatgtgataaccgccagtctgtgcaggatcagcaggatttggctgatcaagc

SEQ ID NO: 10217 - DNA, 506 bp, Oryza sativa
  Clone ID: uC-osflcyp154h10a1
gatgcacagttttacagaagcaaagcaacgggttcccaaaggtccacacttacagtacgttcaacgtacaactgatccaagcaaatgaaacaggtttgatgatgcactgatgcgagaaactaaacggttggatcggagtcggagacgaggcgatcatggacaagcggcggcggcggcgatgagcttagtagtcggtggtggggagctgctcgtgggtgtgggagatgaagaggacctcgtagatgacgccggcgaggccaccgccgatgagtgggccaacccagtacacccactgggactcccaggaccagctgacgagggccgggccgaaggagacggccgggttcatggaggcgccgtcgaacgcgccgccgacgaggatgttcgcgccgacgatgaagccgatggcgatgggggcgatggtgccgaggctgcccttcttgggtcaacggcggtggcgtacacggtgtagacgaggccgaaggtcatgacgatctccagcacca

SEQ ID NO: 10218 - DNA, 316 bp, Oryza sativa
  Clone ID: uC-osflcyp154h11a1
aaaaaaaaacgggcaaatttttggcacccttttggcccataatacattggccatacagaataaaaccaacccctttttacattaaaacggctttaaagtggcctagagggcaaagggttttcctggggggaccacaagggggggggctaagggggaaaaacaaatttcctggttgttaacagcaccccgtttttaatcaaaggccccaccagaccggggccttggcaaatcacagggcccaaactaaaccggggccttgccggggctgccaaagagggggggtcccatagcacccttggttgaaacccaatttgct

SEQ ID NO: 10219 - DNA, 549 bp, Oryza sativa
  unsure (1)..(549): unsure at all n locations
  Clone ID: uC-osflcyp155a04b1
cccggctcctcctcctccgccgccgccaccgccgccgcagataggagaagatggccgcacttgataccttcctctttacctcggagtctgtgaacgagggccaccctgacaagctctgcgaccaagtctcagatgctgtgcttgatgcctgcctcgccgaggaccctgacagcaaggtcgcttgtgagacctgcaccaagacaaacatggtcatggtctttggtgagatcaccaccaaggctaacgttgactatgagaagattgtcagggagacatgccgtaacatcggttttgtgtcagctgatgtcggtctcgatgctgaccactgcaaggtgcttgtgaacatcgagcagcagtcccctgacattgcacagggtgtgcacggccacttcaccaagcgccctgaggagattggtgctggtgaccagngacacatgtttggatatgcaactgatgagacccctgagttgatgcccctcagccatgtccttgctaccaagcttggcgctcgtcttacggaggttcgcaagatgggacctgcgcatggct

SEQ ID NO: 10220 - DNA, 293 bp, Oryza sativa
  Clone ID: uC-osflcyp155a07b1
tttttattctcctgaaaaaaaaaaacagattaataaagagggggattttttaaaactgttgttttatttttagaaccacaaagtttaatgaacaaaacgccctcctgggtgtggggtgccttcttgtcttctttcctctctcttgtcctggggggttcccccttcgtgcttttttttcttgcccccttatctgttgcggagcgtcttcctttttgggcccgggctgttgtccttactcttctcgttttgtagctgttttggtgggctactccctgccctttcgcgatttttcc

SEQ ID NO: 10221 - DNA, 454 bp, Oryza sativa
  Clone ID: uC-osflcyp155a08b1
gtattatcgcggcttcgcttccggggagaggagagggggaaaattaaaaccctcatgcacattcttccctccccctagctcctaggcagggtctcggctcgactcccaatcttaaggattcttctccacgctccccgccgcgggcgccatggaggcggcggtcgccgacgcggggcggaagctgctcaaggccgggatcgccttgcccgaccagcccccatcgctggtgatgccgcccaagatgaagttggaggtagaggacggccagatgggcgacggcgccgtggcggaggaggtggcgcagccggtggtgcgtggcttcatgaaggactgggacgccatggaggacctgctcaactacgtcctgtacagcaacattgggtgggagtttggggatgagggccagatcctcttcacagagccgctcttacacccaaggcacttttggagcaac

SEQ ID NO: 10222 - DNA, 162 bp, Oryza sativa
  Clone ID: uC-osflcyp155a11b1
cacgtacgcgcgccgccatccgccatgggtctccacgacgcgcctagccgcggcggcgccgggggcgggaagctgtcgctgctcgccagcgtcggcctcgccggcgccgggggcggggggagcggcggcgtgggaggaggaggcggaggaggaggaggagga

SEQ ID NO: 10223 - DNA, 537 bp, Oryza sativa
  Clone ID: uC-osflcyp155b03b1
ctctttgtcgcccgtcggagcggatcgcttcccgtttgatcctcgggagtattcgccggcgatgagctccgactccagggagctgctcgggatcgatcccccggagctcatcttcccgcttcgatctaaagaagcaaatctcgtgttctctgcacctaacaaacaagacagatgaatatgccacgtttaaggttaagacaactagtccaaagaagtactgcgtccgtccaaataacggcattgtggctccccagtccacatccaatgttcttgtaacaatgcaagctcagcgggaggcgccaccggacatgcaatgcaaggacaaattccttgtgcagagtgccatagtgacacaagagctcacaccgaaggatatcaccggagacatgtttacgaaagaatcaggtaatgtggtggatgaggcgaagttaaaggttgtttatactcaaccctacccgccatctcttaatggcgggtctgaggaaggcctaggaagcttgagttttcaagaagcaaccaaagggtctagagaatcag

SEQ ID NO: 10224 - DNA, 528 bp, Oryza sativa
  Clone ID: uC-osflcyp155b11b1
gtttttcatcccagctgttcgggactgctctagactcgattgtgactgcaactatcagttccctggatgaggcatctaccggacctgttaataccttcttcagatcaatgagagataccctggattttgactttgctgacgatgttgaagatcgatggaaatctgatgaaccaccatcgctatatatcttcatcaattgcagcacacgtgacctttcaactatagagaagtatgtggaacaatttgcctcatctgtcccagcccttctctttaatcttgaactagataccttgcgctctgacttggggcttctgggattcccaccaaaagatttgcattacagatttctttctcagcttaccccagtattttatatcaggcagcgtgactactctaagacaattgcagtcactccatatatcgtgaactacagtggtgctgtattccgtcaatacccagggccctggcaggtcatgcttaagcaagcgatggttcttatgcatgtgtcgcagagagtgcagctcggtt

SEQ ID NO: 10225 - DNA, 564 bp, Oryza sativa
  unsure (1)..(564): unsure at all n locations
  Clone ID: uC-osflcyp155b12b1
tatagtatgccaacctttacagagatgtgctagtgagcagtttggcagaatttccaggtctggttttggcggctctattggttgacagaattggtcggaaagtgtcactggggatcatgcttttgttgccctgtgctttccttgcaccacttgctgtacatttgggacaaggttcagcaactactcttctattctgtgcccggacttgcatcatgggaggctttgctgttctatacgtgtatacccctgagatctatcctgcatcatctggcaacacgggggaaggaatcacatttagctttggccggattggcagtatagcttcacctgtggtgactgaacgtttgtcagaaaactgccgtcagaaagaagcagtgttcttcatggacctcatgctccttctaggagaatgggcatgcgccctcatccctctagagaccaanggccggctaatccactcgaggcagtgatgctcttttcaatttgatgtacaaaatcacattacattttggtatccagcacatatttacacctgccaaaatcactgacttttggattaacaaa

SEQ ID NO: 10226 - DNA, 529 bp, Oryza sativa
  unsure (1)..(529): unsure at all n locations
  Clone ID: uC-osflcyp155c03b1
gcgatttgtctgcttcttggccgtggccgccgcgctagccaccacctgccacgggtggggcgccggcgccggcgatgtcgtgtcgtcgtcgtcggcggcgctctcgttcgtgaacaggctgaggcagatgatgatcccggcggccgtgggcgacggcgactactgcgacagctggcgcgtcggcgtggaggcgaacaacgtgcgggggtggacggcggcgccgcgcaagtgcgacaactacgtcgagaactacatgcgcggccaccactaccgccgcgacagcaaggtcgtcgtcgacgaggccgccgcctacgccgaggccgccgtcctctccggagaccccgccgccgacgccaacgccacctgggtgttcgacgtcgacgagaccgccctctgccacgtcaagttctacaagaagcacggcttcgggtaccacaaaaccgacgagccggcgttcatggagtggctgatcngccgcagagcgttggcgttgccgaacacggtgacgctgtacaagaagctgttcttc

SEQ ID NO: 10227 - DNA, 63 bp, Oryza sativa
  Clone ID: uC-osflcyp155c04b1
ccgttttgtccccgaagaaggagcggcggcgatggcggcgcctgtgacggtgtacggtccgat

SEQ ID NO: 10228 - DNA, 525 bp, Oryza sativa
  Clone ID: uC-osflcyp155c07b1
gtattcacgatctcgcgggggcgaaccgagaggctgggccatagttcggatccttcagatgttgagcctcgtcttctctctggaccacttgagggtgttcttgttgcacagatttctgctgggaattgctatctccttatgttggcctaccagccaactggaatgtcagtgtattctgtaggctgcggtttaggaggcaagcttggtcacggatgcaaaaacaataagggcaccaccaagttgattgaacatttcctgacattgagctttaatccggtttcagttgcggctggcacttggcatgctgcagctctaggtgacgatgggcgtgtctgcacctggggttggggccatactggctgtttgggacatggcgatgaggagtacagggttctccccactgtggttcaaggattgagcaatgtgaaggctgtgcatgtctccaccggtgaatacaccacctttgttgtctccgataacggcgatacatacttctttggatccgctgcatccctgaatataggt

SEQ ID NO: 10229 - DNA, 475 bp, Oryza sativa
  Clone ID: uC-osflcyp155c12b1
aggaaaaaaaaacaaaacacaccaagccaaataaaagcgacaatgggatcgctcaccaccaacatcgtcctcgccgtcgccgtggtggcagcgctggtcggcggcgggtcgtgcggcccgcccaaggtgccacccggcccgaacatcacgaccaactacaacgccccgtggctccccgccagggccacctggtacggccagccctacggctccggctccaccgacaatggtggcgcgtgcgggatcaagaacgtcaacctgcctccctacaacggcatgatctcctgcggcaacgtcccaatcttcaaggacggcaggggatgcggctcatgctacgaggtgaagtgtgagcagccggcggcgtgctcgaagcagccggtgacggtgttcatcacggacatgaactacgagcccatcttggggtaccacttcgacttctccggcaaggcgttcggcgccatggcttgccccggga

SEQ ID NO: 10230 - DNA, 545 bp, Oryza sativa
  Clone ID: uC-osflcyp155d03b1
ctctcctcttctttagatcagttaaaataaatggctgacgcagaggacattcagccccttgtctgtgacaatggaaccggaatggtcaaggctgggtttgctggagatgatgctccccgtgctgttttcccgagtattgttggccgtccgcgacatacaggcgttatggttgggatgggacaaaaagatgcttatgtcggtgatgaggcccaatccaagaggggtatcctaaccttgaaataccccattgagcatggaattgtaagcaactgggatgacatggagaaaatttggcaccacacattctacaatgagcttcgtgtagcaccagaagagcatccaattcttcttacggaggctccacttaaccctaaggccaacagggagaagatgacacaaattatgtttgagacattcagcgttccagccatgtatgtcgctattcaagccgtgctttccctctatgctaggggacgtactactggcattgccttggaatctggagatggtgtcagtcacacagtcccaatctacgagggtatgcc

SEQ ID NO: 10231 - DNA, 564 bp, Oryza sativa
  unsure (1)..(564): unsure at all n locations
  Clone ID: uC-osflcyp155d08b1
ctcttctcttgcatcctcccatctcctctccggcggcggcggcgtcttgtgcgcgtgagaaagagaggagaagaagatggcgacgatcgtgaacacgacggaggaggagccgatgctggccgtggtgcgcttcaccgccgagctggcctgggcggacgccggcgccgacgtcgccgagccggaggtcacccgtctctgcgtcgaggcgcagcagcacatcctcgccgcccgctggctcgacatggcctccctcatgctcgcctccgccgacctcctcctccaatccacgcgcctccccgacaaggacaaagatctcgagtgcatcctcgctatcatctgcaacctcgtcaccaaggcccgatcccaagacgaggccctgcagatcgccgaactcatctgcgccaagctcacccaccagccccaagacaaaccggccctgcgcctcaaagttctcttcagcttgtacaatctgctcgggagcccctatgccaaggccttcgtctacaagaaggcactcgacctcgccgccgctgggaaggctgccgactgcattatncctacttt

SEQ ID NO: 10232 - DNA, 490 bp, Oryza sativa
  Clone ID: uC-osflcyp155d09b1
attgatggttcaaggatattttccaggaggtctatgaagctgggtggaaatccaagtttgaggctgctggaatatggtatgagcatcgtctcatcgatgacatggttgcttatgcacttaagagtgaagggggctatgtgtgggcttgcaagaattacgatggagatgtgcagagtgatttcttagctcaaggctttggttcattgggtttgatgacatcagtattggtgtgccctgatggaaaaacaattgaagctgaagctgcccatggcacggttacccgtcatttccgtgttcaccagaagggaggtgaaaccagcacaaacagcattgcttcaatctttgcttggaccagaggacttgcacacagggcaaagcttgacgacaatgctagacttcttgactttgcactaaaacttgaagctgcttgcgttggaaccgtggaatctgggaagatgaccaaagaccttgctctttttaatcacgggtc

SEQ ID NO: 10233 - DNA, 513 bp, Oryza sativa
  Clone ID: uC-osflcyp155d11b1
attttaaagttgaaatgtttctcaagacatatggcacatccaagcccatgaggtacactttctccgatgttaagaaaataacaagacggttcaagaataaattaggccatggtggatttggaagtgtctacaaaggtgagctaccaaatggagttcctgtggcagtcaagatgctagagaactccttaggagagggagaagagttcatcaatgaagttgcgaccattgggagaattcaccatgcaaacatcgtccgtctcctaggattttgctctgaaggaacacgacgggctttaatatatgaattcatgcccaatgaatcgttggagaaatatatattctcaaatggttctaatatttcaagagaattcctagtaccaaagaaaatgctagatattgctttaggcatcgcccgaggaatggagtacttgcaccaagggtgcaatcagcgcattcttcattttgacatcaagcctcacaacatatttgtggactacagcttcagtccaaaga

SEQ ID NO: 10234 - DNA, 522 bp, Oryza sativa
  Clone ID: uC-osflcyp155e01b1
attcttgtcggtgacgcagaacatgtacctgtgcgccgagcagggcggcggcaccatcctggtggcgaaccggacgagcgcctcggggtgggagaccttcaagctgtggaggatcgacgaggacacgttcgacctcagggtgttcgacaacctgttcgtcaccgtcgccggcgacggggtcaccgtcgtcgcgacggtggcgtcgccggggcccggggaggcgttccagatcgtgcgcaacggcgacaagactcgcgcgcgcatcagggcacccaatggcatgttcctgcaggcgaagacaagcgactcagttacagcagattatgatggggagacaaattggggcgacgatgacccctctgtgtttgtggtcactagggtaggcggtctacaaggggagtaccaaatatgcaatggatatggtaaagcaaaggccacacaagtgctcagggaacactggcgcacatacaatagttgagagcgacttcaagttcatatcaacaagtgggctaaacgcagtga

SEQ ID NO: 10235 - DNA, 546 bp, Oryza sativa
  Clone ID: uC-osflcyp155e05b1
tactgttgcttctatggacaccgcaattcatgaggatgattcagaaatagttgcaatgataaaagagttgctggagactcgcattcgaccagctgttcaagatgatggtggcgacattgaatatcgaggatttgatccagaaacagggatagttaagctaaaaatgcaaggtgcctgcagtggatgtccaagttcgtcagtcacattgaagtctgggatagaaaacatgctcatgcattatgtccctgaggtatctcttctgtgctttatttctgtttcctcaaaacctccactccttttggctcattatataaggcgttttatctgataagtaaaatgttgaaagaagttgcaattcctattagtttgttcagactgcttaaagcagtaatttatcctttgatctagcgaaattttaatatttcacacttctttggcaggtgaaaggagtagagcaagaacttgatggtgacgaggaagctgaactgactggccagttggaatgacttttctttcggccaaatctcaacatcttcacatgtcgag

SEQ ID NO: 10236 - DNA, 499 bp, Oryza sativa
  Clone ID: uC-osflcyp155e06b1
cgcgctttcatgcacggcaaggtttaatccggaccgcgagagagccgcgccaaagaaaagaaaagaaaagaaaaaccacccccacaccgtaccgtacgaacagtcgtcccatccccggaacccacgcagcttcgccaacacaagagatggtaagctagctaggtatagtacgttcaaggaggagaaaggccggacgcgagagatggacgccgtcggcgcagctggcggtggcgccatgctccccgccgccgccaggcgcggccagccgccgcagccaccgtgcatgacgacggcgccggagcagcaggccgccgccggcggcgccgtgatctggccggcggcggcggcggcggaggccaaggagaagatggtcgtcgacgcccggaccatgcagctcttccccacgcgatccgcagacggcgtcgtcgtgtcgccggctccggcgccggcggcggcccaagaacgacgacggccggaagtgcatgtgacgccgtcggtg

SEQ ID NO: 10237 - DNA, 381 bp, Oryza sativa
  Clone ID: uC-osflcyp155e09b1
tagtacatggacgggcgcgccgaaccgcgtaggggggactcgtttaacaccctacaccggatgtttatctggaccagatcaggccccctggagggagatcggccagaaaaaacatgcgcatgccgagggttgcgcaacagggatgcgaacacgcattactctgcacaggagagatacgagatcacggggacatagccctgatgagaccatactcatgtgaacagatcccccatagacagaccctagcatggggggagaaccaacactgagggtgacaaacggagcagccacatgagaagacacctgcgggagcctgactaccggcggacctcaagaagctgctaaatggaggacgactagggtggcgaaggcgccatgcct

SEQ ID NO: 10238 - DNA, 484 bp, Oryza sativa
  Clone ID: uC-osflcyp155e11b1
gcgtgtgacgacgacgacgacgatcgccgccgccatcccgctcccgctcccgcctacggccacgactcagcccctccgccgggtccctacggccaagcgcctcctccggctgatccctacgctcgccacccgccttcccacgactacgctcatcctcctccggcgtatgggggagggggctacggcaacgtcgtccacgtttcccacgaggtctccgaccaccagaggcccacgccgcactacggtggatccgagtacatcagccccgtccaagagacccgcccttaccacggtggcggaggagccccaccggtgacccacaggatctactgcaaggccggggaggacaactacagcctcgccgtcagagatggcaaggtctgcctcgtccgctccgatcgcgacgaccacacgcagcactgggtgaaggacatgaagtacagcacgagagtgaaagacgaggaagggtaccctgccatggcgc

SEQ ID NO: 10239 - DNA, 478 bp, Oryza sativa
  Clone ID: uC-osflcyp155f02b1
ggcttttgtcgacggtgcaccgcgtcgaggagctcaaggcgatcctccgcatgctgcccatctgggcggcgggcatcctgttggtgacctcggcgtcgcacaacagcagctttgcgatccagcaggcgcgcaccatggaccgcgacatcacgccgcacttcaagatcccgccggcctccatgctcatcttcaccaacctcgccatgctgctcaccctcgccttctacgaccgcgtcctcgtccgcgtgctccgccgtttcacgggccacccaaacggcatcacccacctccagcgcgccggcgtgggcatgaccattgccatgctcgccaacgcggtggccgcggtcgtggagagtcgccgcaagtccgtggccgcggcgagcggcatgctcgacgcgcccaagggtagctcgctgcccatcagcgtcttctggctggtgccgcagtacgccatacacggcgtcgccgacgccttatg

SEQ ID NO: 10240 - DNA, 441 bp, Oryza sativa
  Clone ID: uC-osflcyp155f07b1
gcagttcaagaggaaagccacgacgatcttggaggagtacttctccacggacgacgtcgcggcgacggcgaacgagctgagggagctgcgcgtgccgtgctaccactactacttcgtcaagaagctggtctcggtggccatggaccgccacgacagggagaaggagatggcggccgtgctgctgtcctcgctgtacggcgacgtcatcgaccggccgcaggtgtacaaggggttcggcaagctcgccgagtcctgcgacgacctgtccgtcgacacgcccgacgccgtcgacatcctcgccgtgttcgtctgccgcgccatcatcgacgacatactcccgccggcgttcctggcccagcagctgacgtgcctgccggagggatgcaagggcgccgaggttcttcacagggcggagaaaagctacctgtccgggccgcacca

SEQ ID NO: 10241 - DNA, 489 bp, Oryza sativa
  Clone ID: uC-osflcyp155f08b1
aacctgccggatcgatccgatccgatcacgacgggagaatcaaccgggatcgcaatggcgtcgaggagagccgcggcggcggcggcgctgctgctggtcgcggcggtggtggcggcagcggcggtgggcgctggcgcggagggggaggagacgaccggcgacgccggcgagctggactgcttctgcgactgcatgaagaaccagtgcatgacgctgggcgcggcgcccaacaagttcgactgcgcagacgcctgcacccagggctgcacgcagatcggcaagccgggccagcccagcgacaaggacttctgcggcttctgatccgaccgatcgagccccgcctcctcgccccagcccacggtgccgagaaggccggacggtctcggtggtccggcccatctgccgcatcagttttctgttcttctgttttttttttttttttgaacatgttaaaaattgtttacgagatctgagggtttaaaccacaca

SEQ ID NO: 10242 - DNA, 495 bp, Oryza sativa
  Clone ID: uC-osflcyp155g03b1
gcaatttcatatggtggagcaaagggtgggattggatgcgctcctggtgaattaagcacgagtgagctggagcgtttgacacgtgtatttacacagaaaattcatgatcttattggagctcattactgacgtgccagctcctgacatgggaactaattcacagaccatggcttggattttggatgagtactcgaaattccatggtcattcaccggcagttgtcactgggaagccaatagatcttggtggatcattaggtagagatgctgctacaggaagaggtgtgatgtacgctactgaggctcttttggctgaacatggaaagtccatttctggatcaacctttgttatccagggttttggtaatgttggttcatgggctgcacgaatcattcatgagaagggtggcaaggtgattgcacttggagatgtgacaggctcaatcagaaacatgaatgggttagacatacctgctctgatgaagcacagaaatga

SEQ ID NO: 10243 - DNA, 536 bp, Oryza sativa
  Clone ID: uC-osflcyp155g08b1
ccgaagttaccacagggtagaaaagatcaagatggacaccctgttcatttccaacactgaaaacggcgtacgcgtcaagaccttccagggcggctgcggcaccgcccggaaaatgaagttcggtgacatccttatgaagaacgtcaagaacccgatcgtcatcgatcagcagaactcctcgagcaacgaaattccctgcggatcaaagaacggaagcgcggtgacggtgggggagatcagctacacggacatcaccggcacgtcggcgtcggagcgggcggtgacgttcgcgtgcagcgaggcggcgccgtgcagcaagctgtcgctggagaacgtgaacatcaccatggccggcgggcagaacgcgtccgcctactgccaccacgcgttcgggaagagcgtcggcgtcgtcgtcccggactcgtgcctcgggaaggaggactacctccgccggcaagtccccgcctccgccgccgccgccggcggcggaacgcatgagaagggaggagaagatgacgatcggtgaaaccgcggca

SEQ ID NO: 10244 - DNA, 522 bp, Oryza sativa
  Clone ID: uC-osflcyp155g09b1
gttcttctctggtgatcatcatcatcatcaagtcctattaaacatctggagaatggctgaagaaaagaagaccccatgcctgaatgagcggatcctgtcgtcgctctcgaagcgatccgtggctgcgcattcctggcatgatcttgagattggacctggagctcctcaggttttcaatgttgctgctgagatcacaaaggggagcaaagtgaagtatgagcttgacaagaagactggaatgatcaaggctgacagggtgctatactcatcggtggtgtacccgcacaactacggtttcataccgcgaacgctgtgcgaagatggggatccaatggatgtgctggtcctgatgcaggaaccagtgattcctggctgctaccttagagccaaggccattggcctcatgcctatgattgatcaaggtgagaaagatgataagatcatcgcggtttgcgttgatgatcccgagttccgccacttcaatgatctcaaggagctctctcctcaccgacttgctgaaat

SEQ ID NO: 10245 - DNA, 575 bp, Oryza sativa
  Clone ID: uC-osflcyp155h02b1
aaaaaattgagagagagatggcagcaacagcctccctgaagagcagcctcctgctaccatctcctatctctgacttcagtagtgcagcactctccatctcaacccaagctaggagggaggcatggcagccaaggggggcaaggatgcaggtagcagcagctgcagactccaagaacattcttgtgatggggggaaccaggttcattggtgtcttcttgtccaggctccttgtcaaggaggggcaccaggtcacattgctcactagaggaaaggcccccattacccagcagttgccaggagagtcagatgcagagtatgcagagttctcttcaaaggtgttgcacttgaaaggtgacaggcaagactttgatttcgttaagacaagccttgcggcaaagggcttcgatgttgtttacgacataaacgggagagaagctgttgaggtagccccaatcctagacgcattgccaaaccttgaacagtacatctactgctcatcagcaggagtgtacctgaaatcagacctgcttccgcacttcgagaccgacgccgtcgacccgaagaggccgcacaag

SEQ ID NO: 10246 - DNA, 547 bp, Oryza sativa
  Clone ID: uC-osflcyp155h03b1
cggtgccgcgaagttctccgggtgcgacgccatcgcgtcccgaaaagtttttgtgtcaaggagagggtaccagcaccttggggtcctttgccttcagagaaaccggaagcaatggcgtctgctactctcctcaagtcatctttccttcccaagaagtctgaattggggtgcccacccgccaggctgccgcccccaagccggtgactgtctccatggttgtccgcgctggtgcctacgacgatgagcttgtcaagaccgcgaaaaccattgcatcaccaggaaggggtatccttgccatggatgagtcgaacgcgacctgcggtaagaggcttgcgtcaattggccttgagaacaccgaggccaacctgcaggcttaccggaccctccttgtcaccgcaccgggcttgggacagcacatctccggtgctatcctcttcgaggagactctgtaccagtcaactgtagatggcaagaagattgccgacatcctcactgagcagaaaattcgtccaagtatcaaggccgacaaggggcttgtgccccttgc

SEQ ID NO: 10247 - DNA, 495 bp, Oryza sativa
  Clone ID: uC-osflcyp155h10b1
ctttttcctgcagcagctgtcgcaagtcgtggcacgacagctgctgcgagatccatcgcaccaggaaggatccttccgaggaggaaaggcaaacggcgggacgcttgagccaacacacaccattgacaaaaacattaattagatcgtgatagaggaatttaacaatcacagaagccatggcaagcagcggcaaggagcaccggcgaggtgttccacgcccaccgccgttgtcgctctacatcgagagggagcaaggtgaggtcatcatggctggtcaggcactggcgacgacgaggatgctccagcaggtcgccaccagcagcagtggcaagaagaggatactgtccaagcagctgtccatgaaggagacaacccgggaggtcaagtgggagaagcggcgcatgcagatacaccggcagaggagcagcatggcccttcaggatgttgaggaagaagcgagtgccaacatgttcgccggccccactgacagcgaaa

SEQ ID NO: 10248 - DNA, 558 bp, Oryza sativa
  Clone ID: uC-osflcyp155h11b1
tgttttctcacataactcataagggtaaatgggttgagaaggaccttcagttgttactgtgcatgttaccggatttaagaagttccatggggttgctgagaacccaactgagaaaattgtgggcaatcttaaatcattcgtagaaaagaaaggattgccgaaaaaccttgtacttggaagctgcacagtgcttgaaactgcagggcagggggcacttggcacattatataaggttttggaatctgccattgcagaaagagagaatgggtcatcggctcaggggcaagtaatttgggttggtatccaccttccttgattccatattacataatgatgtaatgcagtcagcaccttgcgtattgcaatgctgtcctatcagaaaaagaataaggaagtttctatttgccttcaatgccactcgaatagtcaaactaattatcatttgaaacttgttcagatccattttggagttaatagtggtgcaacaaggtttgctcttgagaatcaggctgttaacgaagccaccttccgttgtccagatgagctagggtggaaacc

SEQ ID NO: 10249 - DNA, 471 bp, Oryza sativa
  Clone ID: uC-osflcyp156a01a1
ttttttggtgttttttttatttttgttggttttttttttttttttttttttttttttttttttttttttttttttttttttttttttttttttttttaaaaaaaaaaacaaaaattttttttataaaaaaaaaaaaaaaaaaaccccaaattaaaaaaaaaacccccaaaaaaaaaaaaacccaaaagggaaaaaaaaaacccccttcccaagggggaaaaaccccagaaaaaaattaaaaaaaacgggacgctaaaaatcaaaaaaaaactttggaaaacccgtaaaaaacttccctttaaaaaaaaacccccaaaaaaacaaaaattttgggggaaatttccaaaattgcccgatactcccaaaaaaagtgaaaaaaaaaaaaaatccccgtggcggacaaaccttgaagaaaaagaagcccaactggaaaccaaaaaaaaaaaaggggggaaaaaaaaagaccccccc

SEQ ID NO: 10250 - DNA, 455 bp, Oryza sativa
  Clone ID: uC-osflcyp156a03a1
ggtgtgttattgagtgcgcggggacgtctcatcgaaataggaattcttatacagctatcttttgacgctacacggaagttcgacgctgggaaagtttgactacaaatggactcaacatatgacaacacaacatagcaagttttaacaaacttggcgcattccagcaagtaggatctctcagccatggttgaaggactggtaaaccggaacctgagaaatcatatgcccaagattgtcatagcaatgggggtatatcattgctggagttggccactgtgggtagacagcagttccagaagaggagcccatagataaatcgggttggccaaagcacacagaaggttggtttcttgacatattaagcagactggattaaaccaacaccatactgcataaactggggcccaacaaaattgaagccccccaggaccccccttgaacccgccccctggccc

SEQ ID NO: 10251 - DNA, 468 bp, Oryza sativa
  Clone ID: uC-osflcyp156a04a1
aagttgaatgcttataataagatatatcacatgttaatacatcttctcaatttaacatacaagcaacgatgagacatcccctcaagagtttaaaatccaatctcatatataatatcgtgggggtggtacagtttcatgtagatatcttttcatggagtgctactgctagctaggggaacttggtcactgataataataactacagcaggtgatcatgcaagtgcaaaccaagataatactccctccgtttcatattataagactttctatcattgcccacattcatatagatgctaatgaatctagacatatatatgaatgtgggcaataatagatagtattataatatgaaacggaggaagtatatcttatgcatgtgcaccggcaacaaaccagctaattacactatacatacatgctatgctggctggatcttgctgtttctcattctccagagcccccagaaga

SEQ ID NO: 10252 - DNA, 413 bp, Oryza sativa
  Clone ID: uC-osflcyp156a07a1
tttttggtttttttttttttttgggtttttttttttttcaaagaactctccttgaaaattttgtaattggacccgcaccgattcagatgcagatgaaacactgttgattcccactcagattccacacaatacaaatcccccgccaaactgcctaaaaaaccaccaaattgtttcaaaagtaaaacgggtttgggggatcttcccaccgggactgactaaacctaaccacagacaatgggatccactggacccagatttttcaaaaacagagggttttgacgggattgtcctcgcaaccgaggggaacttgcagctatggatatcctcactttccgctggcaagctgggtgcggataaacttgggggcccaaaccattttggtaagggcgggcttgacctcgttggacttgggg

SEQ ID NO: 10253 - DNA, 444 bp, Oryza sativa
  Clone ID: uC-osflcyp156a08a1
gattaataatatgtggaattaacaagaagctgcattggaagacaggttccagggtcaaaatccctaaagggtacactcagactcaagacatattctcggctaaaaacttcttttttactcctttggaaggcagtagtactaacaaggtgttctctgtctttccaatcaaaatcaacctactgggtgtattgggtcaacaaaaatgtatggaaatgggataatgcacgctaatccttttgacagattttacatggttgtattcgaaaagggccttgctgtttggagctcggattttagattactccaaatgctgattgcagggtggatgtgatgcgggatgtgatcgcattttgagcatgaccttcaaagtaaccccggatattcttcttggcatctttgttgcatctggtgaacccaacaatgtttgccagggttagagtcaag

SEQ ID NO: 10254 - DNA, 506 bp, Oryza sativa
  unsure (1)..(506): unsure at all n locations
  Clone ID: uC-osflcyp156a09a1
tttgttgtttttttaaattttttgggtttttattttttttttttttaatttttattttttttttttttaaaaaaaataaaatttattatttcaaaaaacaaataaactccctttaaataaaaaaaaaaaaaaattaaaaaaaacaaaaaaaaaaaaaacaaaaacttacacaataaacaaaaaaaatccaaaatagaaaaaaatagttacaaacactaattaataaaaaaacaaaaaaaaaaatattctaataaaaaaaaaaaaggcaaaaaaaaaaatataaaaaaaaaaaaaaatgtcacatcaaaataaaaaaaaaaagaataaaacacaaaaatgtaaaaattaaataaacaacctaaaaaacatattaacaaaaaaaaataaaaaaagagtaaaaaaaaactacaaacaaatctttaaaaaaaaataaaactttaacccccccccccccccccccnnncagcccccnccccncagtccatcccccccccccccctcccagt

SEQ ID NO: 10255 - DNA, 310 bp, Oryza sativa
  Clone ID: uC-osflcyp156a11a1
tttgttgtttaaaaaacataactatcgagttcaaaattcataaatctcaacagtttgatcatccgcagcaccagcagctcagagtagcaaagcatttaaactgggtactcaaaatatctgccacaaaactcaggacaagtacagaaactgggaaagctatcaggtgaggttcgattgaattctgatggcctaggccttgagcttgccgaagaacctctgcttctcgtcggtggtctggaagcgaccgtgcccgaacttggacgaggtgtcgatgaacttgagcttgatctcctccaggggcgagcccgga

SEQ ID NO: 10256 - DNA, 333 bp, Oryza sativa
  Clone ID: uC-osflcyp156a12a1
tttgttgttttttttattttttttgttttttttttttttttttttttttttttttttttttttttttttattatttaattaaaaaataaaaaaaaaaaaaaaaaaaaaaaaaaaaaaaaaaaaaaaaaaaaaaaaaaaaaaaaaaaaaaaaaaaaaaaaaaaaaaaaaaaaaaaaaaaaaacaaccgcgccaaaaaataaaaaaaaaaagaaaaaaaacaaaaaaaaaaagtccaaaaaaaaacaaaagaggagctcaaaaaaaaaaaagggaaaagaaaaaaaaaaaaaagattaaaaaaaaaagcgggggttaaaatccccgatcgaactc

SEQ ID NO: 10257 - DNA, 461 bp, Oryza sativa
  unsure (1)..(461): unsure at all n locations
  Clone ID: uC-osflcyp156b01a1
gtgtatatgcatattgcataatgttaacttgtatcaaagtcccaagagatcacaacctggatgaataaattaggtttaatacaactgtttacaaaattatcctgatgactagctgagtcgacttggagccaacctcggcaaaactttaattatgtattttaatcctatataattgtatttgagcctttttttcaatcctcatcagatcaatctgacttgcttgcatacatcttcagttcttggaatgctttccggcaaccttcatcaaacccacctgcaagctgatgttatgcggaaggcaaagcggacaccttggagaagcagttctttgtcatttgtgaatgggtcggactttagtgcattcacaacgcggttcatgaattcttttgctagcttcaatgaagccatctttagttggctttatgatttcagagtccancattcattcccccggatcctta

SEQ ID NO: 10258 - DNA, 433 bp, Oryza sativa
  Clone ID: uC-osflcyp156b02a1
ataaaatatttaatcatttgcttgtaatcaagcattcaagctaacagatatcaggtgtacaaaatcaacctcgaaataatgaggtgatatgttgatacatgccaaacatttcaacattgaacagagttgtttaggtgtttaaaagtggcacacaactatatcacataacaatagaattaactcatgtaagtttatcagagtgttaatacaaaagaatgatcaaatacaatcaaatagcttgtaaccaaacagatgtctccaactcttcacacatagaactttttttggcttagccctacaaactggaagacttaaatctgatggtcggtgaaacctgatagaggctctggaatgaaatatggctcaagcatacatacgtgttctttcttgcttgatacagcagagggaataaaggtcttaagtcaagggcaga

SEQ ID NO: 10259 - DNA, 344 bp, Oryza sativa
  Clone ID: uC-osflcyp156b03a1
gaatccaataccaaatttcatgtggttgaagcaaaactggcgagttacacacctcttacatgagaaagatccatagcatccgcgcacatataaaagacccagatacactaaaccagttggatgtccgttacacgcatggcaatcggaaccgagattttaagcagcagagaaacaagacaggtaggtctaaggtagggcttgtttggcagcattacacattagcgatcgtcacctcggcctcgaccccaggctcgatggcgatggaggcgatctgcttcacaacatttggggagctgatgagacccatcccccgcttgtggctgcggaacttgaaacgatcccat

SEQ ID NO: 10260 - DNA, 482 bp, Oryza sativa
  Clone ID: uC-osflcyp156b04a1
attgaggacaggtatttattccaacttccaagcagtgatcggacgtgtctagtacaacaaaattttggttccatcaaaagaactaaccataccaagcgtcacctgatttaacatacattgacacatttgtcatatgcaccatccaacttagttccgtggtattttcccttcattgttatgaaagttctactggggtaccacagagctcaccaatctctttctccagaagttcaacaagattagctcctgtccgcctgtatatccaacaatttgttggtgcatcccaatcgaacctagaaggcccactcacaggtgaagatagccaaatttgtctgtttggtgcttgcttgtttacaacatatgtccccaactctcctaaccttagtgttagaacttgattcccatagtctatgtcaaagccatccatttgaagagagtcaccatattcctcaagtttttcaagcggccatggattggctcat

SEQ ID NO: 10261 - DNA, 361 bp, Oryza sativa
  Clone ID: uC-osflcyp156b05a1
ataggcaactgaacaatgctgtgtgatcaaatgtgtagcaatagtagcatagttacgagcaaacaaaaatcttttaatcctgtgagaaaaaggaagaaaagaattgaaagagagagagagagagagatacagctgaggagcaccccagcatgttcagatgacaagaaggaagttgttttagatatattcgaacaacttaactgaaaactttgaataattttatatgacaaaggggcctcaggattaatcctgaaagctgttagaagatgctcctttattcctattgatcatgcaccaacaattccctcctcttttgagtatcaacttggtttaatttggggggcaaataaaatcttctctt

SEQ ID NO: 10262 - DNA, 417 bp, Oryza sativa
  Clone ID: uC-osflcyp156b07a1
tttgttgtttttttttttttttttttttttttttttttttttttttttttttttttttttttttttaaaaaagggaggggggatgcactggaccggcaaaaaccgagcaaggggccccagttctaacttggaagcaaaaaaaagggcaaggtcatttggggcccatgaccaacaaattaaatctgcccttttcctactggaaagacaccaaacgttccagggggcttccgtttcgattagaaggttaaaacccttgacaccatgggtacgggtagccggcccaaagcaggcatgcccacccccaaccctggtaccacggttctcttttgggggggaaatgaaccggaggaggcccccgggggcccccccttgcccctgaagaaacccacgttgacgaacctggcggcccccccccgg

SEQ ID NO: 10263 - DNA, 123 bp, Oryza sativa
  Clone ID: uC-osflcyp156b08a1
tttgttggttttattattttttttttttttttttttttttttttattttttttttttttatttatattataacataaaaaaaaaacaataaatacgggggaaaaaaaaaggggaacttaaaaa

SEQ ID NO: 10264 - DNA, 413 bp, Oryza sativa
  Clone ID: uC-osflcyp156b09a1
gtggacaacatgcaattcataaaacgtataggattacacgtacgcacagatcgtgtacatactgaagaaaattaagatagaacatgcacacagggagcgtgcaacataaagtatacagctgatacagagagagagtggagcgctgcatgtctgccgcagctgttattttaattactttgttcatatatgctgtagcaagtacgtgcttaattactagctgatcaactccgattgagctagcatgttaagctcgatcgatcgatccaagcaggattgatttcactgaccttgttgcagtcggtggagaggctgatggggaagccaacgttgacgccgcacttgccggggacgccggcgacggtgccgaggttgagcgacttgatgctgccggcgaggctcttgaggcagcggca

SEQ ID NO: 10265 - DNA, 465 bp, Oryza sativa
  Clone ID: uC-osflcyp156b10a1
agtcctccgccgtccggccctgcttgatccccagcgacgccagcacggcgcccagctcgtccacggtgatgaacccgtcgccgttccggtcaaacacgtcgaacgcctcgcgcatgctcgcctcatccacgtcgcaggcgccgccgccgccgccgtcgacgcgcatgacggtctcgtacagctgggtgaactcatccatgtcgacgcacccgtcgccgttggcgtcgatgcgggcgatggtggcggcgagctcctccctgtgcacgggcatcccgagcctctcgagcgactccgtcagctcctcccgggtgatccggccgtcgccgtcacggtcgaacagctcgaacacccgccggagctccgcctgctggtcgcacgccatcccctcgccgccggccggcgcccgccgccggtagctggtggtgcagccggctgcacgtacggccacaggggagcgtgtgggag

SEQ ID NO: 10266 - DNA, 459 bp, Oryza sativa
  unsure (1)..(459): unsure at all n locations
  Clone ID: uC-osflcyp156b11a1
cacatgcattggttgatctaaaaaaacaattacaattgtgtacctgtctctctatataaaaaggggaaatttaatacacttttatttgccagccagattgagttggcaacgaattcttaacaagaatgacaaaaaaaaagggaaaatgaaaagagaaaatatcatcgagcttttggtcgctgttaaaaaaaactcgacacgacattacttgcaaaattaagcctagtaattagcggtagtagtatgctcgtcccttctacaaacaggcgagagagagagtgagaaaatcaaaaacgataaatggcaatgcgcgctcgatcaggccgccgtgcgaacggctcagctagcagcgcggcatcttcttcttcttcttcttcttcttcttcttcttcgnctactgttgcggctggcccgccatgctgaaggattggctcttcatcgccgtcgacttcttcgccg

SEQ ID NO: 10267 - DNA, 506 bp, Oryza sativa
  Clone ID: uC-osflcyp156b12a1
tttgttgtttttttttttttttttgttttttttttttttttttttttttttttttttttttttttttttttttttttttttttttttttttttttttttttttttttttttttttttttttttttttccccccaaaaaaagggggggcaaaaaaaaaaaaaattgtggaaaaaaaaattttgaaatttaaaaaaggaaaaacccgggggtttttttaaaaaaaaccgggggaagaaaaaaaaaattttttcccggcctttaaaaaaaaggggggtttaaaaagaaaggaaaggttaaaaaaaaccccaacgaaaaaaccatagaggggggggggtttttaaaaaaaaaaaaaaatttttttggaaaaaaaaaaaacacggggggccccaaaaaaaaaaggggggaaaaattttttttgggggcccccccccccccaaaaaaaaaattgccccccaaggaaaaaaaattatcccccccgccccccaaaaaaaagggtttttttttaa

SEQ ID NO: 10268 - DNA, 552 bp, Oryza sativa
  Clone ID: uC-osflcyp156c01a1
aaattaaataaaaaaaaaaaaaaaaaaaaaaacaaaaaggaaaaaaaaaacaaaaaaacaaaaaaaaaaagaaaaaaaaaaaaaaaagtcaaaaacaacaaaaaccaaaacgaaggaacaaaaaacaaacaacagaaaaggaaaaaaaaaaaacaaaccaacagaagccgtaagcacaaaaaaaacaacaaaaaaaaaaaaaacccacgaaaacaaaaaaaaagagaacaaaaaaaaagagaaacaaccaaagaaaaaaagggagagaaaaaaatcaaaaaaaaaaaacaaagaaactaaaaagaacaaaccacaagacacaaaaaacaaacgaccaaaataaaagaaaaaaaaaacaataaaaaaaaacaaaaaaacaacacaagcagccaaaaaaacaaaaaaaagaaaaagaacgaaccaccaaaaaaagaaaaacaaaaaaagaaaacacacaaaacccaaaaaaaacaaaaaaaaatcaaatcaacgccaggcaaaacacgaccaaaaaaaaacaaaagaaaaccccacaaaaaacaaaaaaaccaa

SEQ ID NO: 10269 - DNA, 439 bp, Oryza sativa
  Clone ID: uC-osflcyp156c03a1
gactggctgaggacacaaatcgactgagctatagccgtccccaaaagaattttagtattttgttaagtacataatggttgaagcgaactttcagtaacttctagtatcatacacgagaatagttgaactttcagtatcattttttcctttgtatgtttcaatcactcgaacgtgtctagctcacaggtgcagctgatgcaatgcttgcctgtcctctatacatattgaacacaacagcagccacggaaataacttaccgtgaacagtagtagtcgactccgattgtgaagcacagctggcagacggacctttacagccggatgtaaagtagacgacaatatacaagaatttaacagttgatgcagtctactttaggaggtccgctgcgcatgtagaaagccacacagaccgccaccagcagcaccaccggaatgagcag

SEQ ID NO: 10270 - DNA, 405 bp, Oryza sativa
  Clone ID: uC-osflcyp156c04a1
aggtgggaaacgaataaaatcattattgcaaaaacatcatcttcttcttcatcttcttaggggacacaacaccaactcgatcatgatttcgtcgcactaaacccattttccccaacccaaagacaacgaactcgctggccacaaatccatccaaccacaattaaccactgctaagctacgggcccccacttcacttgccggggaccaagttggtggcgtacccccaggcgttgttgttgacggggtcggcgagggggcccgcgaggctctcgagggggcccttgccggtgaccatggcctggacgaagaagccgaacatggagaacatggcgaggcggccgcctttgagccccttcaccttgagctccgggaacgccccggggtcattggccaggccgagcgggt

SEQ ID NO: 10271 - DNA, 423 bp, Oryza sativa
  Clone ID: uC-osflcyp156c05a1
gggcgtccctcgctgatatgaaccctattattgactcaaagtcacagttcacttggaaaatattctcaacagcaatcctcacaaagtctcaattctttctacattacatctggatggggatgtcatccttttctttcttttttcactgtaaccacctccaacagaatttaaccaataaataatccgaaaagagtgtaaaatatcgtatcattggtccattgcaaactgaattgcattctccagaacacaaattttcggtgttacaaagcacataggcagccggccgtggctcctatcgcagtatggtgtgttgacagtggacgagctatattaatcttctgctgtggaatggcccagagctggggcttccgagtctgctgcatggtctgcagccaacctttcctcaagaaccctttcggcacg

SEQ ID NO: 10272 - DNA, 92 bp, Oryza sativa
  Clone ID: uC-osflcyp156c06a1
tttttgtggtttttttaatttttttgggtttttttttttaaaacaccatatttttcttcaccaaattaccacacacaaccacaccaacaaac

SEQ ID NO: 10273 - DNA, 527 bp, Oryza sativa
  Clone ID: uC-osflcyp156c07a1
aaagaatactgcataaatttcatactggacaagaagaacaaattttgaacgagttaaaagaagttccaggtaaactgaactgaatgctctatgctctctcccaaacatttcattgagagctccacgaaaaggggggtgtcatttttctgaattacaggtcattatagggggtagctaagcagcagcaagaaatgggtgggttgctaaacaagaggcatatacggattataccgaaagaaatgtaattcagcaccccattattgcgcagttataaacgaatacaccagcacgctccttcaccgagagcacttcccagtcagcaccaccattcccatcttcagggcaccaagaatgcagcaatattacttcaccacggggtactctatggccaccaataacaagcaatctatcaccacatgccttgaaagctaggccccaaccattggaagagtcagctctgactggcaatggcttcactatgttccaggtgttatttccttttgcgacttctttacacatttgttgct

SEQ ID NO: 10274 - DNA, 88 bp, Oryza sativa
  Clone ID: uC-osflcyp156c08a1
ttgggggtttttattattttttttttttctttctttttattttttttttttttttaattatttaaaataacttccagttaaaccgaac

SEQ ID NO: 10275 - DNA, 442 bp, Oryza sativa
  Clone ID: uC-osflcyp156c09a1
tttgtttagaaaaggtagaaaagcagtaagaactctagatgtacgcaagtcgcaccataccatgtacacctcgtgacctcaccctgcctatcaacagggcacccgaccaaactaactcaatccatgaataaaaaggtccttttctctgaacacaagctagtagggttcatcatcaacacaagctagtagggttcaacatcacaactaaacgcagcaggcaaaattgtttgttcctcacaccaagatctccaggtgtggctccttgtctcctgcggctttattttcggtttttttttatttatatggtgaacaaagggaggctgattgtcccaggagaactctcgatgtcggtgcaggctgatcacaacagaggggaggggaaggagaggagcctgtaatgttgctgccatggctgaaaacctgaaatggggggcattttctc

SEQ ID NO: 10276 - DNA, 444 bp, Oryza sativa
  Clone ID: uC-osflcyp156c11a1
gggaaacgaataaaatcattattgcaaaaacatcatcttcttcttcatcttcttagtgtacacaacaccaactcgatcatcatctcgtcgcactaaacccatcttccccaacccaaagacaacgaactcgctggccacaaatccatccaaccacaattaaccactgctaagctacggtcccccacttcacttgccggggacgaagttggtggcgtacgcccaggcgttgttgttgacggggtcggcgaggtggtcggcgaggttctcgagggggcccttgccggtgacgatggcctggacgaagaagccgaacatggagaacatggcgaggcggccgttcttgatctccttcaccttgagctccgcgaacgcctcggggtcatcggcgaggccgagcgggtcgaaggcgccgcccgggtagagcgggtcgacgacctcgccgag

SEQ ID NO: 10277 - DNA, 511 bp, Oryza sativa
  Clone ID: uC-osflcyp156c12a1
aagatcacagaaaatccacggatcccaaatgttctcattgattgatagcgatatcatagaagcagcgacacgaattaagatttaaaaccaaccccaagaaggatcgcagatccaactccaccgaatcgatccaagaactccgcctaatccaaccaaaccatgggcgatctcatctcaccaacacgacacgaactcataaaaagactaacaccaccaccacctcctccttatttagggactcgacgactcaagacgactgatactggcgaaaggcgaaggggaacagcacagatctaggagagctggccgcagtcggcgatgacgaccggcttggcggtgctcccgccgcgggatcccaccttctcgatggccttgacgacgtccatgccctcgacgacgcggccgaacacgacgtgcttcccgtccagccagctgcagggcacggtgcagatgaagaactgggacccgttagtgttgggcccggcgttcgccatgacaggatgccggggct

SEQ ID NO: 10278 - DNA, 110 bp, Oryza sativa
  Clone ID: uC-osflcyp156d01a1
aaaatatattttaataaaaataaaaaaaaaaaaaaaatagatttgaaataaataaaactaatataaaaaaaaaaattaaaaagaaaacaaaaaaacaattaaaaacaaac

SEQ ID NO: 10279 - DNA, 170 bp, Oryza sativa
  Clone ID: uC-osflcyp156d02a1
agggtattaaaaaaaaaaaaaaaaaaaaaaaaaaaaaaaaaaaaaaaaaaacaaaaaaaaaaaaaaaaacataaaaaataaacagaaaaagaaaagaaatgcatggagctaagtaaacaaaaaaaaaacataacaaattaactaggggaaggattaaattaaacagaaaa

SEQ ID NO: 10280 - DNA, 464 bp, Oryza sativa
  Clone ID: uC-osflcyp156d03a1
acatagcaatggattatattcaatactaatatctgtaaaaatcaacagtacagtacgacagttctagtgcaacttatatatacggctattaccatttagcagccaaattacatcattttgtcaaaatatccgacaacagcgtgacgagcacgctggcacctacggatacaaaagttacatgtagctggtatccagattccacccagctatgtaccaaaaaaaggtaggaggagaagaagaggagagaagaaaaattaacccgcgaaaaaagaaaacctcaatgttgctgcagtaagatgatgagccatcagagtgatctgaagctttctattgggtctgattcctcaagcattgaggctgcctggaagcagtcagcagcatcagctagcctgccatcatgcttgtggaccttccctaggtagaaccatgccatccggttcgtcggctcggccttaggcgtccga

SEQ ID NO: 10281 - DNA, 270 bp, Oryza sativa
  Clone ID: uC-osflcyp156d04a1
aaattatcacatatatataactgatttgatcaaaggtggccgacaaaccaaatgtcgatggatacaggttagcttatcttctttacaagccaaaaagtacactcagggccatttcattacgattgttccaacttacaagtcggtagattggaaaacaaaatgcaactcattttcccaactagcatgatcagagggggcgggtcctgcgtgaacccccgtctcgaactatttcacccgaaaaccaacccatgcgcccagtccactgttgat

SEQ ID NO: 10282 - DNA, 354 bp, Oryza sativa
  Clone ID: uC-osflcyp156d05a1
gttccagcaacaaatttccgcgcattacatactcaaaaaagaataagcaacgtatacagtaggaaagaaaggatttgcgagcccagatctctattacaagcctcctacatttctaccatcacgaggtgtactcgaaaggttgtggtggctgctgctcgaattcgacagccatggcagatgaggcctgttggcctgtgccaccacttgaactaccagtggtcgcagccacagttgaggtggcatacctgagtgcgagtacctccgcctcggctggctgcatgtcctggaggaggaagaatccagatggagcaggtttcaccgggacatatcggctgccctcgataaactttgatg

SEQ ID NO: 10283 - DNA, 332 bp, Oryza sativa
  Clone ID: uC-osflcyp156d07a1
tttggtgttttttttttttttgttttttttttgccaaaacaacgaacttaggagaagattaatagcaagtaaatagtaggccaaaccatgcaaacttacataaggtttaagggcagtcataacacaatatacactagtttgataaacaaactttattcagcagcaagtaaataagggaacacaaagcgaatatttgatcctcagtagcgcgccaggctagacaagttcggatcataaagcattgccattgagaactaggccaaacctttaaaacaatggacattggtggcctcacaatgcttgcagtgacccccagttcgagccctggtaaa

SEQ ID NO: 10284 - DNA, 500 bp, Oryza sativa
  Clone ID: uC-osflcyp156d08a1
aagattcattcattcattcatttgatcaaagcaaacgagacgagctttcttcttgcgatcaaaaacacagatgggcaaccacacagttaacacaaactagatagttccacacaaaactaacgatgataacgatcggatgatgatgatggtagctcgattagatagatagataacttggccatgagggccccaccgctcagttcctccagttcccgtcggagttgccgccgccgcggctgccgtagccgccgccgtagccgccgccaccacggccgccaccgtagccaccgccaccgccgtagccgccttcacggcgctggccgtagccaccgccgcctccgcctccggagcggcgcgactgggcctcgttgacggtgatgttgcggccgtcgagcttcttgccggtcatcccctcgatggcgtcgcgcatggcctgctcgctcgagaacgtcacgaacccgaacccgcgcgacctccccgtgtcccgatcgttgatgatc

SEQ ID NO: 10285 - DNA, 478 bp, Oryza sativa
  Clone ID: uC-osflcyp156d09a1
aaaaaggggaaaggcccaaccccacaccttgcccccaattgcccaaaaaaaccggccttttcttaacaaaaccccttacacccttcttcaccctgggggaccaaagttcacgcccccacacccatggccccaaacgggcccgaccaggggcgccccaacctcccccgtggacggccccacccccacacccagcaaacccccaaaagggccgccccggcccaaaccccgcgccccacgcgcccacggggccgcccccccacccgcgggcccccgcccccacagggacccccccgcccgaccccacaccccccccgccaagagcccccccccgagccccccgaccccacacaccccacaaccaacccccccccccccccggacccccctcggccccccccccctcctccgctcgccccccacccccccccccccccccccacatccccccaccccccccccctcccacgcccccccccca

SEQ ID NO: 10286 - DNA, 377 bp, Oryza sativa
  Clone ID: uC-osflcyp156d10a1
atatgcaaccagcataacaaaattacaactgcactggacgggttatattcttcacaagcaaaaaagtagactcaggtccatatcatcagcatcgttacaacttacaaggaggtagattggaaaacaaaatgcaactcattatcccaactagcattaacagagggggggggtcctgatgaacaccgtccacgttttattctcagcatagacaaagcataccggtatttcccggtcgggggccatggaatccctgggaagcaaaaggattctactgggccttggccatgtgggggatcaggtcgatgacacggttgctgtaaccccacttgttgtcgtaccaggcgacaaggttgacaaagttattgttaagagcaatt

SEQ ID NO: 10287 - DNA, 492 bp, Oryza sativa
  Clone ID: uC-osflcyp156d11a1
ccacaacagccgaagggcaataatcaggctcagaacaagtttaaaccgaacagaaaatagagagttttaaacgacacagtgcacacagcgggcatatgataataacggtcaatgcaacgagtgccatggccgtgcacaaaacttaacgaattagtaaaagctagatatcttaaatgcagacacgcaaaccaccacttgaacgaggatcatttcttcttggcggcagccttggtcaccttggcaccggttgggtccttcttctccacgttcttgatgacgccaacagccaccgtttgcctcatgtcacgcaccgcaaaacgaccaagaggagggtactcagagaaggtctccacaaccatgggcttggtgggaatcatcttaaccataccagcatcaccgttcttgaggaacttgggctccttctccagctccttaccagatcgtctgtcaatcttggtcaccagctcagcaaacttgacggcaatgtgggag

SEQ ID NO: 10288 - DNA, 484 bp, Oryza sativa
  Clone ID: uC-osflcyp156d12a1
tttgtggttttttttttttttgggccccaaagagatcgcattcagcagcacggggagatttcgcaaaccaaccaacccatccattgcagtgcagcaacacacacatatattcccttactaataacacatcttaattagacgaacctgccaatccgttttccaaaacaagtgagacttctgcatgataccaaatgcaacatgcattaggccaccaccaccacacaggttccatggatcgacctaccaaacctaaaccttagccaccaccgccaccgacatcgccgtcaccgtcaccgccattgccgccgtctcctagctactactgctactaccacggtgctaccctcctcatgggctacctagctgcctagcttagctatagctaagttaaaccacctagctgccttcctcctcggtgcccttgaggtacttcccggcgccgctttgggcgcccgagttggcccccggacgttgacggacagcg

SEQ ID NO: 10289 - DNA, 317 bp, Oryza sativa
  Clone ID: uC-osflcyp156e01a1
ttttttttttataaattttttttttttttttttttttttttttttttttttttttatttttttttttttttatatatttttttttaaaaaaattttaaaaaaaaaatataaaaaaaaaaaaaaaaaaaagaaaaaaaaaatcccccctaaaaaaaacaacacctcaaaaaagaaaaaaaaaaaaaaaggaacaaaaaatccaaaataaaaaaatgaaaaaaacttttaaaaaaaaaaaaaaaaatggtgataagaccactaccaaaaaaacaaaaaaaaaaaaaaacaatctcaaaaccaaaaacactagacacggc

SEQ ID NO: 10290 - DNA, 383 bp, Oryza sativa
  Clone ID: uC-osflcyp156e03a1
ggactgcaaataccccatcatcagattacaggttggtcttgggtaacttcaatcttcagggacaaataacacattacacatcacaaggggaactgatggaactttggatagctcatttctgaattatgttacaaaagacattctgtcagagggggggagaaacttctcatatgaatggaagcatatggacaaaagcagcttcacaatctgcaatggaagcttccttttttccctaggggctagaacggcgaagtgattaaatgaaagaatacatcaaggccttgttttggcgagacgccacaggtaaacttaatatacataaaaccttggggctccccgtacacagttaggagcaaaaaatggctgaatatttgggggtttca

SEQ ID NO: 10291 - DNA, 431 bp, Oryza sativa
  Clone ID: uC-osflcyp156e07a1
agaaacgcttcttgcatatatataccaagattgggctatctcaatctataaggaaagataaaaagtacttgatcattactgatgatcataaaataaagtacacttcaggaagaaggaatgacctaaaatggctccttcaacagaggaagaatagggctagacaaggtacacaaaggtaggcaaggccattgccgtcatcgttaacgttggcctcgatcagctgtctccgttctgctgcccgaagctgcatgatcctgagggcaagaaggagaagggattctcagagatgtcaaatccaggtcgagtgaagtcatcaagcccaccgaagcaaggatcaaagctcaatggcgagaaatagcgtggatcatcggccatcttcatgtcaagatttgggatgtcgcccgatgagctacccgggaaagtatacccag

SEQ ID NO: 10292 - DNA, 361 bp, Oryza sativa
  Clone ID: uC-osflcyp156e09a1
ggtagtgaatactccacaaagtagcagtgatgtgaaaaatcaaatatggtcaaacaccaatttggtttagagggagcaggatcaaacattgatgatccatatcactggactggtgctacactaacgtggtagaacatagcaagtggtgcactttacattcaaaccattgaaaacaagcaactctagttcagaacagtttaactttcatatacagtttcctggccataaatgcagttcatgaacttcaggtcaggctgcagtgcgaactgtgcaatgttgtcgcgtgcggtatggctttggttgaatgtggttacacaatttcttgcaacatgtagcccgagcgaatgattaattttgcctt

SEQ ID NO: 10293 - DNA, 473 bp, Oryza sativa
  Clone ID: uC-osflcyp156e12a1
ttttttttttttttcttttttttttttttttttttttttttttttttttttttttttttttttttttttttttttttttttttttttttttttttttttttttttttttttttttacggggaaaaccaaacaaaaccccgatggataaattccacggaaaaaagccggggtccttaaaataaaaaaaatttaaccggggaaacaccaaaaggccccaaaacacccaggtgttaaaaaaaaggaaaaccaccgggtttaattaagaaataatgaggacaaaaaaaaacccaatttattgggggggtttttttgggggccaaaaaaaggggggggcccccccggggggaagggttcggttttttaaaaacttaatttgcccaacttgaaattgggcaaaaaaaaattgtgccccaaattgaagcccccttttttcttgcgggggggaactctctaaaagggggttttttgggttt

SEQ ID NO: 10294 - DNA, 516 bp, Oryza sativa
  Clone ID: uC-osflcyp156f01a1
agcaacaaatgtagcctctgatatctgttgacagcgaatctcatgcctgtaagtagcacaatttggtgacacatgattttcagagtccatgttacacaacgctaagtggtgaacaactccacagatgatcaggtctacagttacactagctcataggatgccagtaatcatgccaagcagatgctgctaaactctgcacaatattcggttctatgtgatgactgattcgtctgattaccttgctttatgcaccatgacaaggactggaaccaacgagtgacatttaggaatcatttggagtcgattggtatggcatcagcttcatcaatcagggccctgttgaggcggatacaaccagatcatgtcaatggttggggcttaaatacctaacagagaaaaaagaagacgctaggaatgcatccccagtgaagctgaaaggcaccacatgggatctgcttgcagttgcaggcgttatgtcactggagcttaacagcaaacaacactgcagaaagattt

SEQ ID NO: 10295 - DNA, 53 bp, Oryza sativa
  Clone ID: uC-osflcyp156f03a1
tttttgggtggttttttttttttttgggggttttttctttaattttttgttat

SEQ ID NO: 10296 - DNA, 351 bp, Oryza sativa
  Clone ID: uC-osflcyp156f04a1
ggagaagcgggcgggtggcacccaaacccagatatggaaaaataatttcgtggtacaaaaaccataaactgggagctctttctcatcttcagagggcccttaccttatccctaacaactgggagtaatttagtaggagtataaataaaagaggggggaaaaccacactaggcctagcttatctgcttatcacttggccaggttcctacaaactggactagtttaaaaaaggcagagaaatgacaattatccggggggtttgggcatgtacaggaccatccattccattcttctcgaaatcctattctttgggggcattttaaatttgcagcccaccaaaaccaaacattga

SEQ ID NO: 10297 - DNA, 406 bp, Oryza sativa
  Clone ID: uC-osflcyp156f08a1
aaatcaaactgttgtttatcatagtaaatcttcccggagaatcagatgctcagaattcatagtgttcttcagcatcttacaacttacaagatggcgcagatatacaagcgcaactatcttaaagtaagctgtaggaggaaatggaaccatttctaacaacgggaaaaatataggttatagaaggaaaccatttgaacaaattaatagggaaataaattaggaggatcgtttccgtccgatctcaatagaactggacgtttgatacgtagatggcgtctggcatccagttgaccgggatgacgtctttggcgatgaggctcttgccggactcggtggtgacgcgaatggagaagggtgccttgagtggcgtggcggtgtttatcctccagatggcgccccacgacag

SEQ ID NO: 10298 - DNA, 455 bp, Oryza sativa
  Clone ID: uC-osflcyp156f11a1
gtactagacaggaacattagttccctcttactgtatcccatcaatcagtttgttcaaatgatcagttgtgaaatgaattagtagctgcctccggtaatcccagttcccaaacaaaacactttctgccaccccaaaaccatatattacaccaaggcagacaagcagggccccaatctaacaaaacaatggaactcatcagagacaagagacacacaagacaacacaggcatagggcatagctaaaattgaatataatcatacatccactaacacctacaagctctaagtaggaaaaagaaaagaaaaaaacatttcttcttctttatcttcctttctctctggatctacatgatgaagtatgctcggatcacctcaattatgggtgcacggcacagcgggcatttcccttcgctttgaacccactcattcgcgcattttgaacatgtgcacatgtg

SEQ ID NO: 10299 - DNA, 548 bp, Oryza sativa
  Clone ID: uC-osflcyp156f12a1
atagagatgttgatttacatatgaaggtcgatagatacggtcaaagttccctgaagacaaaatcggaactcctctgcacacaacttaaaagaggagacctcaactcaaaatggaacatagatgaagacgccagaaaaggttccaaaagaaaatgcagggaaagacttcctctccacaccaccactaaaaactcatgtaaattgtctccttgctctcctctctttctctctctcccctcagcacagttactggaaactgctatacaacatggggttaatacattcttaaaaagtgaccaaaatctggaagctctcgctgcgcctttcacctttctcggccttcaggttaatatgataatggtaggttcaggggaaactggaagcaccctctctgtctctctatccatgtttccatcagggacaaaatgttgcagcaatctagccaagtcttcggtaacccgcattcatggaagttaataaatacagattgggggtcataccaaaaaaaccaaagttgggggaaaaagggcggaaacttggaaatggaac

SEQ ID NO: 10300 - DNA, 461 bp, Oryza sativa
  Clone ID: uC-osflcyp156g01a1
tttctaccgcccttccttttttttttgttggtttgaggcaaaagcacagcttcacttcatgcttggaatatcgtctacaaactcttcaataaaagagctcttttgtatgatgtgagggcaaaagaatacggaactcgatttctcggcccatgcagaaaggcacaagcggaaaccaaatctgaaggggtgggtgagaaaacgcccccagaatttcgccgtcagtcagtatagtcgaacttttggtctatgaatgaggcatagcgtgcacatatataatagcatgccatgcgctaccctagctttccgaggcgtgcagcttactcttcactgcatgagccgccgcacggtaccatgctggtgcagcaactgctcctggatccggaactgatgcccaccaggtcgggagccatgtatgacgaccggcctgccttggcttgcatctggttagtggattcagcacc

SEQ ID NO: 10301 - DNA, 361 bp, Oryza sativa
  Clone ID: uC-osflcyp156g03a1
cctcaaaatatgattactgaacggactatgatatttgtcagtgccattacagctatagctaatattgcagcaaagagattagactcaaacaaaaagaatacactttgtactgatacaaaagttcacctatgatttctatataacccaaactctaaatactcaagcttttattttagcgacttccatacttattttataatacatggcacagtgaataaaacatgccttcacataaatggtcaatacaattatcgtttcatactgaacaccatataatgacaaattcaactgacaaatcctttctagaaaagtccattatttgatctactaattgcatattactaaatatcccacccccccc

SEQ ID NO: 10302 - DNA, 167 bp, Oryza sativa
  Clone ID: uC-osflcyp156g05a1
ggcgcacaaggccgaggcgaagaaggccgccgccgccgcggcggcgcccgctgggaaggcggcccaggccgtgtcggccgtcgccaagttccccaccaagcccgctccccccacccaggctgtgctggaggcacggtgtggtggtgcaccctcacgtttctgttttt

SEQ ID NO: 10303 - DNA, 431 bp, Oryza sativa
  Clone ID: uC-osflcyp156g06a1
acatgataaaattattattgtcttgaattatgtaaacgatgataacaaatccttttccagctacaaaagaaccagcataacaccaaagaattataaagttgcttaagtaatctctcccttcatctcaaaaagagctatatctagggggcctaggccacagcaacactttcacttaaagggtactttccatcctgcgacacacaagctcccaggatcaatctacttggccttgccgttctcgacagcagcagccgaggggttcagctcatcccaggcctcgatccaggtgaccatggcatcggcaagcttgacgaagtaggggtcgatcttgccgagcttctccctgacctgctcggcgagggagaggtagcacttttggacggtgtcgcactccttggggatggtggcgttctggaagaaggggatgatgt

SEQ ID NO: 10304 - DNA, 146 bp, Oryza sativa
  Clone ID: uC-osflcyp156g07a1
ttgtttgttttttttattttttttttttttttttttttttttttttttttttttttcaatctagggggaaaacaaaaaggagacaaaaaaacaaaaaaaaaaaaaaaggaaaaaacaaaagaaaaaagggaggaaagaaagaaaca

SEQ ID NO: 10305 - DNA, 85 bp, Oryza sativa
  Clone ID: uC-osflcyp156g11a1
tttgttggtataacaattgctagggatataaaaaaacaatagagcacagtacaaatctcgccctcccccagggcggcaaggggtc

SEQ ID NO: 10306 - DNA, 479 bp, Oryza sativa
  Clone ID: uC-osflcyp156g12a1
ggagaaaagcaataaacaaggagtcaatactgcaatagtttcaagaaaagtaaattactcttagttcccaaagacactcttcaagatacattacgacaaggttccatagctgcaaaatattatcctagggcaaaacatcacccaacgaaacgcttcatcaagtctcgggtggttcttaggcttatcgcttcttggacacaccgacagtcttacccctccttccggttgtcttggtgtgctgcccacgcacacggaggccccagtagtgcctcagaccacggtggttcctgatcttcttgagcctctcaagatcatccctgagcttcatgtcgagcgcgttggagacaacctgggagaacctcccgtccttgtagtccttcttcctggtgaggaaccagtcgggcaccttgaactgccgcgggttcgccaccacggtcaacagccgctccagctcctccggcgtaagctcaccggccctc

SEQ ID NO: 10307 - DNA, 52 bp, Oryza sativa
  Clone ID: uC-osflcyp156h01a1
cccattgatagcggccgcgaacctcgtgggggggttctttaaagaggggggg

SEQ ID NO: 10308 - DNA, 368 bp, Oryza sativa
  Clone ID: uC-osflcyp156h02a1
gaaatgggcacgcttggccattaagcatggcaggtttatccatacaagttaattacataacattacagcaatctcacagcacatgaggttggtaagtcgccgagaggtaaaagcagaaagaaatgaaggaaaatgagttacatggcaaaggaggcccaaggaaaaatggagctacatgagtagaccatagtctttgctgcgatggacctgacccctgaacatttcagctcttcgaattacaccatccatctcgttcttggtactgtcgctacaaaggggcctgttttgaaggaccgtttggcgaaacttttcccagaacatttaaagcctttatccgttgcaggtttttacctttcctccactaataa

SEQ ID NO: 10309 - DNA, 318 bp, Oryza sativa
  Clone ID: uC-osflcyp156h03a1
ggcaaggaacaggcaggtatcagattttcacattggaccgtctcctctcgaaagcatatgtacatggcgcacgcatgcaggggcccgggtgtctgcacaaatatttttcacgcccacataccgtacttcaccggtgtgccggtcggtttgatccatggttcggcgcgcacgaagttcttcagggagaacattgccggcctccctttcgctagaaaaaaaaaagtcccctgaccaccatgaaccggcggggggtaaatggggtaatttcctttttgtggttttctgtgttatatttgggagtttatggccccccccccc

SEQ ID NO: 10310 - DNA, 377 bp, Oryza sativa
  Clone ID: uC-osflcyp156h04a1
aataaaaaactattgaaataattcattaacagaaaagtcagatgctacaaagccacaaatattatgccagttcaactacacgttgtttctaaatatctcccatagtaattgaatctatcacctgctctgctgagaagtaaaaaaaaaaaaaagctgaccatctaatgtacatatcacttggagtagttgacagccctgatcctaaccctcattgacgagatgcaaatttgtgagccacgatgacttcatatgaggcattggcaggtgatgattgtgctattgatgtagcaacatgctcaaaactgtttcttcgcatcttaaaggcactgcaaacaattttgctaatagaaaattggaaagggttagggaatcatttt

SEQ ID NO: 10311 - DNA, 405 bp, Oryza sativa
  Clone ID: uC-osflcyp156h05a1
gttaaaggcaagaatattattcataaatgacgcatgatttttatcaaaacgcttgcaaatgatatcagataagtagagtcaacaagacaaaactgtatctgccaaagcacacctccccaactccacccaattacgccattatttctgggcaaaagcaaacggcttcccattcctccccttcaccagtctcaaaccataaaccccacaacaaatcctcctaagtgacggcatataagatgatgaaaacaaagcaggatactccagagtcgtcatggcgaacttcaagttgacacttctcatgccacagccgctagtcgtgctgggcagcctagtaccggtagtgcgcgggcttgtagggaccctcaactggaacgctgatgtagtcagcctgcgacttggagagct

SEQ ID NO: 10312 - DNA, 417 bp, Oryza sativa
  unsure (1)..(417): unsure at all n locations
  Clone ID: uC-osflcyp156h07a1
gaacctcgtggcgtcgtccctccacagcgccgcccatgcggccatgcctcggcgacgtcatgcctgagctcgaggacggcctcctggaagcggccccagtgcacgttgctgaagacgacgagagggaggtcggcggtggcgcgatggggcgtgtcctaactcctacgggttgaggaaccttggagtacttggacgccgtcaccacgctgaggtcgccatgtcgctggccgatggatcatggaggtggaacacccgccacctcccccaacttcccccgccccacatacaggttcgacagctgcacctgcaccccgctgtggtcggccagccccagctccgccatcatcgccgccacctcctttccgggctcagtgtcgncgcgcgccattcacgcattcagcagcgcccccagcacgc

SEQ ID NO: 10313 - DNA, 341 bp, Oryza sativa
  Clone ID: uC-osflcyp156h08a1
ttggttgttttttatattttttttttatttttttttttttttttttttttttttttttttttttttatttttttttttaatttttctcattgcattttttttaatacgaggaaagggaaaaaaaaaaaagaaaaagaaaaaaacccaaaatactaaaaaggggggaaaaaaaaaccccaggtaaaaaaacagaacggggtgttctttaaccaaaccaaaagcgaaacaaaaaaggaaagcaccccccaaaaaactgggggaaaacccccccacaaaaaaaacggaaaaaaggagccaaacccaaaaaagccaaagaaacccggaaaactcaaaaacaaaaa

SEQ ID NO: 10314 - DNA, 293 bp, Oryza sativa
  Clone ID: uC-osflcyp156h09a1
gggggggaaaaaggtgaaaacccccaaaaaaaaaaaagcctttccccaaagaatttttattctttggccagttacaggaacgggcttccccagcccccagccctttttaggcaaaaagggaaccccccccaacaggtaagggaaaaaaaaacccctggggcccccaaaaggggggggcggcttaaaggggaaaatccaggtttgggatcttttggaacacaacgggaagcttaagggccaaaaaattggggtccccaaatgctgaaaaggcggaggggtttccctttgaaaaa

SEQ ID NO: 10315 - DNA, 297 bp, Oryza sativa
  Clone ID: uC-osflcyp156h10a1
attccgaaaccatgcggatcggactggatttaatcaaaattcggatttcaactggtacactggccggcaacagataaccaaattggaacactgctttgaggcaaaacacacaagctaagactggaccccccggttactagagggtaaatgcaaagagaggaaaccaatcgcttggaggtaaatttccagatgtcaatgcaaggattatgggggatcaaaaaggatcaaccttggccggagcttgttttggagcacaacggagcaggaggggcccctccatcaccgatggcaggggct

SEQ ID NO: 10316 - DNA, 187 bp, Oryza sativa
  Clone ID: uC-osflcyp156h11a1
gtcataactattgctatttatataaaaaaaatatagagcacagtacaaaatcgccctcccccagggcggcaagggggccgcctgcaaaattccatgccccctcgccgcccatttgcaggcggccccccacagtacaaaatcgccctagcggagggcggcaaggggtccgcctgcataattcccattg

SEQ ID NO: 10317 - DNA, 370 bp, Oryza sativa
  Clone ID: uC-osflcyp157a03a1
tttgtttttttaaattttttggttttttttttttttttttttttttttttttttttttttttttttttttttttttttttaaaaaaaaccccaaaaccccaaaaaatccccctttttttaaagtaaaaaaaaaatttaaaggaaaaaagagtttttttttttgggaaaaccctaaaaaaaaaaaacccctcaaaaaacccatttttcccaacccaaccccaaaaaaaaaattcccctttggaaacccacccctttaaaaaattcccccttttaaaaaaacaaaatttaagggtaaaaaaaaacccttattttggcaccccccccaaaaaaaacattttaaacaacaaacatttccaaaaaacccgagccc

SEQ ID NO: 10318 - DNA, 456 bp, Oryza sativa
  Clone ID: uC-osflcyp157a04a1
ttttgtttttttaaatttgggggtttttttttttttttttttttttttttttttttttttggggaaaaaaagttaaaagtttttttttaaaaaaatcttttggaaaagggttaaaaaaaaatttggcccttttggggggggaaaaatgggaaataaaaatttgaaaaaaaaaaaccttaaaaaaaaaaaaaaaacccgttcctggggcaaaaaaaaatttggggaaaccccggggcctgggttaaacctatggggaaaaaaggggggggttccaaaaaaaggtggcccctttggaaaaacctggggggggggaaacccccctgggtttgggctcaacaaaacccttgggggctttaacccgggcccccccccccccgaaaaaattttttgttaaaaaaattttttcaacatggggggaaacaaaagggttcctttttttgaagggggggaaatttt

SEQ ID NO: 10319 - DNA, 391 bp, Oryza sativa
  Clone ID: uC-osflcyp157a05a1
ttgtggaggttcaaatccaaggtattcataaagcatactgctgtcccacaggaaactgtttcataaaactaacatatcatacggactcgatggtccattaaaccagacacaagtagacatcagcaccacaaatacttgacgaacagaggctcgggatgaccaggcacatcggcagctccaccaaactggctgattactgaccaccacggaggcggagcaccaggtggagggtggactccttctggatgttgtagtcggcgagggtgcgtccatcctccagctgcttgccagcgaagatcagacgctgctggtctgggggaatccccttcttggcctggatcttggcctttacattattaatggtgtcggagctcttaacctccaaagtgat

SEQ ID NO: 10320 - DNA, 474 bp, Oryza sativa
  Clone ID: uC-osflcyp157a07a1
gtgttttttttgaagttgggggagttgtccacctttatcttcatatgttttagttagctaagctacattgtcagataagattacttgagcatcacgtacggttgtgacatgaacatcatgattcaggtacaaaaaaaactgtctcaacgatgcatcaaagtatcaaacatgtaaaagaccgaaggaatctgccgtcgcaaggaatcatgcaaaagactgaagttcagtgagttgtccaccttatcttcacacctgccctctcctcatcctattcaccacctgccctcccccccccttctctagatcctcatcctcccgaggtttctttggcacaactggttttgctttgatgttgcgaaaactcagaagtgtcttagcacttatttcttcgattccagcatctcttagcagcttaatctcagatgtcttcaccaaaacaactgtacagagatttttttggtggatatattcatc

SEQ ID NO: 10321 - DNA, 356 bp, Oryza sativa
  Clone ID: uC-osflcyp157a08a1
ttgtttttttaattttttgggttttttttttttttttttttttttttttttttttttttttttttttttttttttttttttttttttttttttttttttttttttaaaaaggggaaaaaaaaaacttaaaaaaaaaaattaaaaaaaaaaaaaatcttcccacttaaatttaaaaaaaaaaaaagataaaaaaaaaaatggaaaaaaaaaaaatacctttttttttttgggggggggttttaaaaaaaaattcaaaaaaccctttggaaaccaaaaaaaaagtttttttccctaaaaaaaaaagaatattccccccctttttgggtgttcaaaaaaaaaaaaaccctttttttttt

SEQ ID NO: 10322 - DNA, 336 bp, Oryza sativa
  Clone ID: uC-osflcyp157a09a1
gtgtttttttaatttttgggggtttttctttttttttttttttttttttttttttattttatcccccctataacaaaaaaaaataaacaaaacaaaaaaaagaagaaaaagaaaaataaaaaaaaaaaaaagaaaaaaaagaaaaaaaaaacccccaaaaaaaaaaaatttctgcatactaaaaaaaaaaacaagggggggggctgctaaaaaaaaaaaaccccgaactaccggggggcaaaacccccccacttttgagaaaaaaaaaacccccgggggcggatataaaaaaagaaattggggcgacggaaaccgtggggggggggaccgaccaaa

SEQ ID NO: 10323 - DNA, 329 bp, Oryza sativa
  Clone ID: uC-osflcyp157a11a1
acaaaaaagggccgaaaggagattaaaaaaaaaaatccgggggggggggattatacaatgggaagcacaggtttttttttacccacaaaaggtccatctaaattaaaacccaaggggataaggacccccacggggaaggggggaaaaagcttatcatacccatggtaaaataacggggggaaggggggggaaaaaatccgggggggggggggaactattttcggggggcgggtttcagaaaaaacccccgaagggttccacgggggcccaagcgggaaccactgcggggccggagggggaagactccgacccaggccttgggggggggg

SEQ ID NO: 10324 - DNA, 73 bp, Oryza sativa
  Clone ID: uC-osflcyp157a12a1
ttgtttttttaaaaaatcggcttttaaactttttttattttcattatatataattttcttccacccaaaaaca

SEQ ID NO: 10325 - DNA, 466 bp, Oryza sativa
  Clone ID: uC-osflcyp157b01a1
ataactaacagggcttattcaaactaatatgaccagttgttcacaagatattaattaattgcttacagcaaaatcaaacatcctcggtgttgaagctgatgaaaagaaaaacgaatcgtttctatgtacaagtggacagctagaagagagttcctccttgcctgctggtaaaattgctcattttgtcagctcaactttctgttctaccctatcaaaagcagactacatttcactgcttggtgcatctggaactttgtctttgcattctctgaatttcggcagctctgctctgctctgctcaagatggtgggaagaacctattgaggttgaatggcagggtgtagaactcttcattcctgctgtcgcctcggaacgtcctgaatcgcgcccaccatggcattccccggtcccttgccgcctttctgacatcgagtgtgttgtcaaggagaaccgccatgatgagggc

SEQ ID NO: 10326 - DNA, 323 bp, Oryza sativa
  Clone ID: uC-osflcyp157b02a1
aaaaaaaaaaaaaaaaaaaaaaattcaaaacctacattccccccaaaaaaaaaaattgaaaacaaaccttaaaaccccaaaaaacctgaataaaaaaacaacaatccttgcttacctaaaaaaaaaacaatgccaaaattaaaccccttaccatgtccaaacagggcccaaaaaacccccctttttcttttgccaagaaaaaaaaaaacggtaaaaattgtgttaaatgcacaaaccccaaaaaccctttttttccacaaaaattttaacgaagtttaaaaaattaacccaaactttggcgccttaaaaaaaaacacccccct

SEQ ID NO: 10327 - DNA, 175 bp, Oryza sativa
  Clone ID: uC-osflcyp157b04a1
ttttgttttttttttttaaggggttattattttttttttttttttttttaaaatttattttttttttattatttcataataccaaattaaagttttctcataaattctaattctacaagaaaactttccttgtaaaattttcttgatcaacaaaaaaaagaaaactttcataaac

SEQ ID NO: 10328 - DNA, 491 bp, Oryza sativa
  Clone ID: uC-osflcyp157b05a1
ttgtgtgttttgggagtatgagggaatgcacagcaaaatgggaagatatgaacaatcatggccaacgaggggctaacaacagtttagcacagtacaaaaagtaaacacacataacaggaatatgcaatgcaatggaaccggagtatactgacaaaccaatcattaaccagagaactacttattaaccagctactaatagtcttctccatcgtcgttctcgtcgtctgcaccctcggcaccgacttcctcatagtccttctcaagggcagccaagtcctcacgggcttctgagaattcaccttcttccattccctcaccaacgtaccagtgcacaaacgcacgcttagcatacatcaagtcgaacttgtggtcgatgcgcgagaaaacctcagcaacagcagtgttgttgctgatcatgcacactggacgctgaaccttagccaggtcaccaccagggacaacagagggtggctggtagttgatgccacact

SEQ ID NO: 10329 - DNA, 133 bp, Oryza sativa
  Clone ID: uC-osflcyp157b07a1
ccccccccccttttttttttttttttttaaaccttcgcgtttcaacccctcattccctatttacacattacaatacacaaccttatttaacacacctacaaacataactaacattacattacccctaatacaa

SEQ ID NO: 10330 - DNA, 351 bp, Oryza sativa
  Clone ID: uC-osflcyp157b08a1
gaccaaaacttgttttactgaacatttggagggctgatacaatatacaaccccatcccctagggggggactaaaactgaattcaatttacaggcctatttgggttttacattttggatgtcacacaaaaacccgatgggcttttttttgccatttcgggattaaaaatgcagggcaaaatgcttaacttttccattgtttactatttccataacacttacacttgacataaaattggtaaaaatacgcagttaaacacagggggcattaaaaaagtgttaaaaaaaggggtttccaccaacttggggcaaatgactttggttgatggggaaactggcattttgcatttgag

SEQ ID NO: 10331 - DNA, 474 bp, Oryza sativa
  Clone ID: uC-osflcyp157b09a1
tggtttttcagaaaaaagggggcacatacaactcagtagtaataatttcaaagcctccaccgattcgattccactcgacaagagcaaagccgacgcccggccccatcgcgacgcgacggtagtatagtagttacaaaaagtgaatgtgccgcgtacgcacgcgcgtgcgtgcgtctcacacgagaaagggagaatcggtggccgtaagcactcggctcaatcaatcatcactcacctcaccggccgcggagcagggccttctcggcggtgtccatctcctcgaggatgcgggcgcggcgcttgttggggatgggggccgtggggccgaagctgatgtagtggcccgacacggcgttgagcgcggagtacatctccctgaaggacgggcggcccagcagcgacttctccctgcggtacttggccacccacgagttggacagctcgcggagctccgtcaccgggtccgtcaccccg

SEQ ID NO: 10332 - DNA, 353 bp, Oryza sativa
  Clone ID: uC-osflcyp157b10a1
ggtttttgtaaagttggggggcattggacagtgattctaattggcgcgaacagtttctgatggcatcagccagtccagtcgtgtaggaacgagctgtacacacggttcatttaatcttaacatcctattgagaactcccaggtggtaacaaaaatttaacgtccctgtaaaacccgtattacatataaatgaacagaaggctctcctttggtggtcagcgtgccaaaatcttcacgacggaatgacgacacagagctgtactaaccagtgcaaaatcttcgtcaggcaatagtgttgggcatgtatggatcagatgaagggggactgggctttgggggtccttggcatggggt

SEQ ID NO: 10333 - DNA, 307 bp, Oryza sativa
  Clone ID: uC-osflcyp157b11a1
aggggaaactaaagaagcattatatgaccccgatgactagaaaaaggcagaaacttcagtctcaagattggaataataggaaagcaatcctaccaaaaaagaaaagaaagaaaaatggatgtctatctacagaagcataagcacatggacaatgcactcttttacctacaagaacactatagggaaacaggagaggtccagaggagacatgtacttatttgtattggagatatatgatgcttcaccggccattagccgaggggaacgattctggaaacccggcaggccgagctgggatgctgccctt

SEQ ID NO: 10334 - DNA, 370 bp, Oryza sativa
  Clone ID: uC-osflcyp157b12a1
gcgcaaactggtccttgttatcaacaacactccaacagtcatgctgatacaggtagcaatgcatagcggatttacagccaaacccagacagtactagcataagcacaacgcatgtgccagaatttattcttgttcatagagcggaaaccgcttctttattacattgcactggcattactacataaggtttgcgctttgcctcctagcacagaacttgggccatctctcatcttcactggagttccttcaggaagtcggcgttttcaaccaaaaccactttccagccattaagggtcagggaagaggcaatctttggggtggggccttgtaagggaaccgggttgccgaaaaatttttccccctagttttt

SEQ ID NO: 10335 - DNA, 473 bp, Oryza sativa
  Clone ID: uC-osflcyp157c01a1
ttgtgtgttttttttttttttgggttttttttttagagcaacaacaacatttggataacaacagcatacgagtacaaagcaaataaaatgggtggacgtccggaccaaacaggtgcttagtgcttgctagctagcacaatcagactaccatgcatagggcacaatgggttcctcaacaaactgaaaacaacaacgggggttatcacagggctacaatgatgatgatgatgatacagggctacaagctccatcatatgcgggataaccactagacgagatgagatatggccttttacttctttcccttttggatgactttgactgcattggtcacaccggccattttctcatttgggatcggcccttcttttggaagatcgaacttcctgcgggtcaacgacctttgcttccctggtggctgagggtccacaatctccagcataccttcaagttcatcaagcatagactttttt

SEQ ID NO: 10336 - DNA, 439 bp, Oryza sativa
  Clone ID: uC-osflcyp157c03a1
accagcaatgaatttggcacacgatttcattctcatttctcaacaatctcgagtgctagactaagtggatacattggacagaataattgggttatagcatgatgcgataatataagttatctatcaaaatttcatagggccaagggtcttttgagactccatgtattgaacatctttagaatcttgcaaactgccttttgtcatcaccgccttttcttccgtagggatttgcagcgctgatgccatgccttcttccaccggacactttcctcatcttcctccgatgtttggatgcagagctctccaaatcgatgtttacctttggggggttcttaaaacagaaagacgctgccacatcctgccagatagaaaggatttagacccatctgtctgaatcaagatttattaatggtgggtttgtcaaacaggaaggtaaaat

SEQ ID NO: 10337 - DNA, 343 bp, Oryza sativa
  Clone ID: uC-osflcyp157c04a1
tttgttttttatatatttttggggtttttattttttttttttttttttttttttttttttttttttttttttttttttttttttttttttttttttttttattttttataataatttttttttattttaatattttattaatatatatttacaaacaacaaaaaaggaaaaaaaagaggaaaaataatttaaaaaaaattattataaaaaaaaaaaaatatcttaaaaaaaaaaaaacattataaaaaaaaaaacatttcttttaaaaaagtgaaaaaaaaaaaaaaaaaacaagcagggaaggtaaaacctttccttaaaaaaaaaaacaaaatttttgggg

SEQ ID NO: 10338 - DNA, 484 bp, Oryza sativa
  Clone ID: uC-osflcyp157c05a1
ttggtgtgtctcagaaatgggaaacagattcttataatactgtcccaaaaagatttatgctctgacagcacaattctatcagaatgtagtgaatatcagaaagttaattctatcagaatgtagttcatgaccttaatgtgtttatcccagcgatttcaatcagagcgagaaaccaggatcacacaatgcataatcttccagtttcagctaagccaagataatcccatccaaaaaataactgagcactacgaagcatgaacaaaaagccttagttcaatccagtgtgagtgaaaggcgtgcttcatctccttcgcctccgaagcttccactgctccaggacgtgctgcaaggcctcctgcatgctggccttcctgtcctccttgttgttccacagctctgacaccacgtagctgccgctggcattgtactcgttgatctccagcagcgccgtggtcacggccttgtagacctcgtcaccgagctg

SEQ ID NO: 10339 - DNA, 421 bp, Oryza sativa
  Clone ID: uC-osflcyp157c06a1
ttggttttttttttttaacgggctaatcgtgctaattaaatctgtaatgagctaatgttttacatattctacatcttctaatgtggcaatccatgacttcatggcacaaaactgaatctaactagtcagttacttcttatcagttcattgttctaacctgctttgatgaagcaggcatgaataataccaaaggaaagctctgaactacacaaattcaaggtctccacaagctgcttcgtccaatacattcctgtccaggcctgcacttgccgcttcttccaattcactatctacatccatgttttcttcctcttccacttcatctgtgccagcttttctcattggttcttcaatttcgtcttttgggtagacttttactctgatgcgtttgcctttgatgcgtcgatattcccattttggg

SEQ ID NO: 10340 - DNA, 472 bp, Oryza sativa
  Clone ID: uC-osflcyp157c07a1
gtgtttttagcaatgtaagggctcgcattccaaaacagccgatggacaataatcggactcagagcatcagttttaaccgaacagaaataaacgagagtattaaacgactgacatagtgcacattgcgagcagatattaacggtccatgaaacgagagccatgcccgtgggcaaaacttaacaaatactagaactagatatctcaactgcagacatgcaaaccaccatttgaacgaggctcacttcttcttggcggcagccttggtcaccttggcaccggttgggtccttcttctccacgttcttgatgacgccaacagccaccgtttgcctcatgtcacgcaccgcaaaacgaccaagaggagggtactcagagaaggtctccacaaccatgggcttggtaggaatcatcttgaccataccagcatcaccgttcttcaagaacttgggctccttctccagctccttgccaga

SEQ ID NO: 10341 - DNA, 436 bp, Oryza sativa
  Clone ID: uC-osflcyp157c08a1
gtgttttttttaaaaggggggcaacttcaaattgcaacctgaactatgaatattgctgccaaatggagtaatatatacagcaaaggaaagtaggagcatgaatggaaaaggaaaaaaaatgtggcaaaggttccaaaaaaaaaaacatcctgactacacaacacacaacccattatgatcatgactgaatgtatctgatatctgggaattctaactgtcgaatgcacaataacaccttgcacagccaaagtaattcccaaggtaatgaaatccagactgaaactcttatttgatggtatatatcatctctaaagccgctaaacctgtaaagccaaatagcttggcaactccttaaagtgcttccctagcacccattggtcagcgaggccttggggtgttggctggtttagatggagaagacggtttgttcttagcg

SEQ ID NO: 10342 - DNA, 456 bp, Oryza sativa
  Clone ID: uC-osflcyp157c09a1
ctaataatacctgtcacaatcttccattgatttctgagttgtaagtacaaagagatgagattgcaacacggtaagtagagcacacacacatgcatgcgtactagctagtagactactagtagatcgcctttttcttattacaccaaccagcaaactacgtcgagatcactcactcactcactcaaagctgactgactgactgactgactgactgactgaacaagataattaatttaagtaagttaactagctgctaatgacacactcttaccacattgtaatccaataattaaccaactaattaaagttcggtagtaatccacactgctaaattctgtccgtcatcgatccggccatcgtcgtcgtcttcttcatcagtagcgagaatctgtcgtcgtcgagatcagtcgtcgtcacacggcggcggtgatctcgatcacctccggcttgttctgc

SEQ ID NO: 10343 - DNA, 422 bp, Oryza sativa
  Clone ID: uC-osflcyp157c11a1
attcaaaatccgggcctcattttattcgggaaaaagaggctcaggccagttccagggcacctgatggcaagctcacaagttcagacaggcacccacacacatacaatactttgggacaaactgtaacaagatgcaagctcccttgggattattttatctcactttacgatgactgccggagctttgggcgcacgaaatcggcgttggcaggcacggagatgtccacggggggccgcaactcaacgcacacctcgattggcccatggacggggtcggacatgaagttgctgatgaggccctggttgatgggagcatccttggccactgtcacgaatgcttgctgggtcaggatgtaatcaaagcgtggcgcccatttccttgatcccagacgagcccgcgttgagcagttgtcaaccatgaag

SEQ ID NO: 10344 - DNA, 393 bp, Oryza sativa
  Clone ID: uC-osflcyp157c12a1
gtgttttttttttagctggaaaggctatattacatacttccatacaaccatagcttatatacaatgctagcaatattacacatccgtcaactaactcattacatataagagagaacatggatagttagctgaaaaggcgacagtacattacttccgtacaaccatagcttctgtagactgctaacgatattacacacccgtcaacttaggcactacaccatcataatagtgagatatctgacgatagtagccagactgccagagagccaaaattttggggacagtttcagcttcctaatccccactggtccataggcatcgtctgcaatttaaccagcaattcctatgcttttccctcactggcattggcgctgtcatcatcgtcaattttga

SEQ ID NO: 10345 - DNA, 448 bp, Oryza sativa
  Clone ID: uC-osflcyp157d01a1
ttgttgttttagacagcaactggataatctttcgatatttcaccgagggtaatgtatggtaggaaaatcgccagacataacagagccggccagactcaactcaaactcaaccctatgatggtaaactgtttgcgattaacgcctccgcctatgacaatgtttggagataaacgcttccaccaaaaaacgaatgtcggggagtgttctcccctacaagaattattattgttttcaatgttaaaaaggcaaaattcaccagatcccgttagtgcaggaccaggaataaacacttgttcgtcatcattttctgccagtttaggcaccgcccgagccgtacttctttccaaagaagaggatctgcagctggtcatagcctgagagcacaccagcaccagcaatggcacgtaggatgttggcaccagcacccttgaacagtgacttggcaccc

SEQ ID NO: 10346 - DNA, 368 bp, Oryza sativa
  Clone ID: uC-osflcyp157d02a1
ttgttgtatgaatttcttttatgcaatatatataaaagattacctagaatctacaagcagaagatagcttcaaagcctaataggatagcctgataccggtatcatatgggccgccgttatgcagttgggctttggcttgaagcgtaccttcacaccttgaaaaagcacaatagcgataccaatataagcatcgcatgagactatgagatggacttctctaaattgctactaataaaattgttaacctatagtattatatgtttcagctttattataaacttcatcgcttgtctccacatatccctcaaattggggacgatctgtttgttattaagaagcaccaacaaaggcttcagtttttcaccaga

SEQ ID NO: 10347 - DNA, 157 bp, Oryza sativa
  Clone ID: uC-osflcyp157d03a1
ttgttttttattaacaacccgggctatatcaatacagtatcaccttcatatatctacaaccactcccgtttccaccaaaagatgaactttcagtaaccaaaccaaccactcctcccaagttgcaagtgcattcactgtcacgctgccctttcctaac

SEQ ID NO: 10348 - DNA, 446 bp, Oryza sativa
  Clone ID: uC-osflcyp157d04a1
ttgtgtttttttaaattttttgggttttatatttttttttttttattaaaatttaaattaaaaaaaaaaaaaaaaaaaaaaaaaaaaaaaaaaaaaaaaaaaaaaaaaaaaaaaaaaaaaaaaaaaaaaaaaataaaaaaaaaaaaaaaaaaaaaaaaatattaaaaaaaaaaaacaaaaaaaaataaaaaaaaaaaaagttgataaaaaaaaaaaaaatttattaaaataaataaaaaaaaaaaaactaatgcttgtgtaaaataaaaattgaaaagaaaaaaaaaggtaaaaaaaaattaaaaccgaaagaaaataaaaaaaaaaaacaaaaaaaaattatgaaacaaaaaaaaaaaaattattcaactaaaaaaaaaaaaaacctaaaaaaaaaaaaaaccaaaaattaaataaaataaaaaataaaaaaaatcaaataaaaa

SEQ ID NO: 10349 - DNA, 433 bp, Oryza sativa
  Clone ID: uC-osflcyp157d05a1
tttgttttttcttgttcaatgggttatcagttctttttcttgtggtgggaaaaatgacactacagagagagctacaaagaccaaattaaagttcctcagcaatgctcatctacagagtactttcttgtcaagtttctgatcacgaaaaagggaacttcataacaatgggagaactagcaaatcctggcatcgtcgcgaaggcggcctccattcttcatcctcaccatcttagagctcatcatgcttctcatcatcagaatccttgccatcctctgcatcagagtcagccttctcatcggccttgtcctcatcctcagcatcctcgtcattcaaatcataattgtcctcaccggccttggcagcttcctcctcttccttctttttctctgcctcgtcaaaagcagccttttcaggatccttgtgcttgccccat

SEQ ID NO: 10350 - DNA, 392 bp, Oryza sativa
  Clone ID: uC-osflcyp157d07a1
ttgttttattcaagcacaggtgcacaccacgcatacataatacaacatcatcagtaactggtacaaaatgtcaagagacaacacacggtttaaccgctggatcatagcacacatcaagtggtttggtaaatgaaatgaagttcttgcgttgatcgataataatgcatgcgcatgcaggtaagtaacacgagcactgcaatttattcgtcggcttgttatctagatcgagcgatgatacggtgtccggcggccggccggccggcgacgagcaggccgccggcggcggcggcggcggcggcgatgatatattaaccgaggcgcaggtcgtggttgccgtcctaggccatgccgtgcaggttgggctggctgggcaccacgcggaaggcgaacat

SEQ ID NO: 10351 - DNA, 363 bp, Oryza sativa
  Clone ID: uC-osflcyp157d08a1
ttgttttttttattttttgtgttttattttttttttttttttttttttttttttttttttttttttttttttaaaaaaaaaaattttttaaaaattccctttaaaaaaaccaaaaaaaacagggagttaaaattttaaaaaatacctttacaccttgctaaagcacaataccctaaacaatatatttttgccctgaaacaaaaaaaaaaaattgaaaaaaaaactttaaattttggcaaagcccaataaaaaaaccctttacaaaaggattccactaaccggccaagaaccaataaacaccccattattgttttaagattaaaccccaattaatattttggccaaaaaaaaaaaaaatggggg

SEQ ID NO: 10352 - DNA, 446 bp, Oryza sativa
  Clone ID: uC-osflcyp157d09a1
ttgtttttttttttttttgggtttttcatccaatggcaacatattctgtcactataaataagtaattaacgaacatgatacatgatacaaacatgctacaattgatgaaaggatcaacgtttaacatatcaacactaggaatttaaggtgaagaggaggctccaaattggggtttcaattacattgcaagcctttgtacacctgaacttgggcttttgggaatagaatcacttgctacacaagaagcataatggcatggaagaagaagaagaaaaaaaacagaatagacatgccaaatctaagattgcaaggtcccaaacaggggggcatgatcatctttaaatgatctgtcagctgaacctgcaagaactgcataccattcactgtgaagaacaattagctccccattttgatgctgttaaatgttggctcaccttgaacctcct

SEQ ID NO: 10353 - DNA, 478 bp, Oryza sativa
  Clone ID: uC-osflcyp157d10a1
gggttttgtttaggtagggggcaaccataactatattggttccatataagtagtagttgttcgaacaacatttcacagcacagaaggtggcaaggaaggtaaacataacattacttatttacaatgataatcatgacctaggggtcatgaacaaaagggcttgcttcttagcctcctctaggcttgcagctaacttgttgcttctacacttctagcttgggtggttcgttctgtacatatacacaaaagacttgctgatggactacatatatccgtctcattcactgtcagtgggtttcttctgggtactatccttgaacaattttttggcaattgtggtggtttctgtaggtctacctctttttttgggtgtgctctttggcgccagtgaaggatctgcctgtggagactcatctggagattcagcggtgacctttgccttatccgaagtatcacggggaacaattgtagttaaaga

SEQ ID NO: 10354 - DNA, 479 bp, Oryza sativa
  Clone ID: uC-osflcyp157d11a1
gtgtttttttcttaaggcaggttttctttcgatgtcaaaatctggatacaactaaataatggaataaataacaaaacgttttattgactacaaagggtatctgttacaaacatttggctatacgatggactcgtacaaaatatacatccatctcaactcgccagtttggccaaaatcaccatatctaagatcttgacttcgtatgtgtcatcaagcttcacaatgccgtcggaaccatctatacctatgagctttccagagtatccacggaaattgccgttcattatcttgatcttgtcgctcttctttggccgaataacctcgagctcggttggaagaaccgtcacgatctcaccattacctgatgacccaagggcgacgcgacaagatccatccgcaagaactttcctcaccacaccaggaccatcatcgcctgccctcaacacattaaccaaaacatctggcaacagccagttacc

SEQ ID NO: 10355 - DNA, 472 bp, Oryza sativa
  Clone ID: uC-osflcyp157d12a1
aaactgggggcatccttgcttgcaaaatctgaagtacaaaaagtagaatactagaagtacaaaatctgaagaagttctcaactagtacaagacatcttattattcatacaaccaaaactagcataacaaaaaagcactccagcagctgccaacagtgataataatccaactcaaacctcactttttatcatcttcctgaaccaacgtgttgagtctttagggtaccgtgtgaaagtgctccggtctacatagacgattccaaattttgaagtgaacccgagccgccactcgaagttgtcaagcagggaccaagcaaaatatccagtgacccttgcaccatccttgatcgccctcttaagctcatggaggtactgatcaaaatattgtatcctgaagaagtcatacagtgcaccaggtagggtctcattgcctggctggtcaatgccattttctccgatgattataatggggt

SEQ ID NO: 10356 - DNA, 349 bp, Oryza sativa
  Clone ID: uC-osflcyp157e01a1
ccgcccttttttttttgtgtattttaatcagggggggatatgcattgtcacatataaatgagagaacatagtggacacttacataaataggctacaaatttcgcaaacaaacacaggtggtacttgggagctattaaaagtaccatgtatacgcttttctttgtttgggaagctagctgtctgtgcctcaaatttacagggaattatccgtctatataacacagattgcttaggagtccaaattctttgaggatggattgaacgccacctggtcagcacaatccaagttatttccagctttgtcactaccaacacccatcaggtcgagataatgttggtagtgggatac

SEQ ID NO: 10357 - DNA, 332 bp, Oryza sativa
  Clone ID: uC-osflcyp157e03a1
tttttgttttttttttttttgggttttttttttttttttaaaaaaagggctcactcttttgtattggcattgttgcatcaaaatccatataatagctaatcatatcagctccaccaagatgaaacaccagctccaagaaagaacccaagatgattgtcctacctccgttttaggttataagactttttagcattacccacattcatacagatgttaatgaatttaggcccacatatatgtctagattcattaacatatatttgaatgtaggcaaatgttaaaaagtcttataatatgaaacatcgggagtagttgcgaggggccgttaattg

SEQ ID NO: 10358 - DNA, 363 bp, Oryza sativa
  Clone ID: uC-osflcyp157e04a1
ttgtgtttttttattttttggggtttttttttttttttttctttttttttttttttttttttttttttttttttttttttttttttttgggtaaaaacaaaaccctaaaaaaaatccaaaggtaaaaaaaacaaggggaacaaaggaaatcccgaaaaaaaaaacccaggggaaaggccaaaattttttttgggccccaacgcctccggggaaccaccacgtttgggggaattttttttaccctggttaatttgctaagggggccacaaacccgccggggacctctgaccccaggaacaggtccgggggccccccccaccacacgtctttttgaaccggcccgcaaaggggtttggccggcca

SEQ ID NO: 10359 - DNA, 155 bp, Oryza sativa
  Clone ID: uC-osflcyp157e05a1
aacgacggggtgatcaaacatgctctagatacatatcttgtgtgtatatagcccggagctttgttttcacatatccctcacccaacgataattctatgtacctcttacaatcaaaacctggtctggagatggcgagggaacgagatctattaccc

SEQ ID NO: 10360 - DNA, 365 bp, Oryza sativa
  Clone ID: uC-osflcyp157e06a1
tttgttgttttaattccacgctttttcctcgcatggttccatcattttattttccattgctaacaaacagacatcagcatctaccaaaaaaaaaaagataatctacagtactgtattgtattattccagtctctgacttgatgaattttgacttacacttcaaccactgggctaattaattaattaattaagctagcaaccctgaagaagaccttataatgggagtaataattaaccaatgaagaaacagaaacaggaaagctagccccctgtataccgaatcaatcaccatgtactatgtacatgcccctatacacacacactgacatgccacccgatgcaattgcaccatctttctgctgctg

SEQ ID NO: 10361 - DNA, 474 bp, Oryza sativa
  Clone ID: uC-osflcyp157e07a1
gtgtttttttttttcagggtgccagagatcattttagaatcaacaaatggaatccgtcctacaaatacaacactcgtagtatcagatagtacaccagcaaaccggatgcaactacgcagcagtatttgtataaacaatagcactatggcacaagaactactactgctaaccacccatcacccaaaagatgaacaacgaagaacaccgtgaaggcgtttcgctgatggcacattgcctttggtcacgccaaaaatctctcattgtacatggctacatgtatatcctcccggttggtcaaagccattgcccaaactctgagagagctctaggtgaacgactgcgccacagaggaagttgtgaccagaccagaaagaagaccaacgagggtgccgctgttgtaagtgcttgactctgtctgaacagcattgtcccgagaggcgaccaaagggtcattttggaacggcccgcccacga

SEQ ID NO: 10362 - DNA, 463 bp, Oryza sativa
  Clone ID: uC-osflcyp157e08a1
gtgttttttttttttttggggtttttttttttcagggaaatgctgacgatttatatttaccttttcccgacatacattatgacattgctggcctgcagttaacaagtttttagagccaattaaacttgggaatgaatcaaatcaaataattgatgattaatttgacatcgactacatgaatgacctaacaacatgaatgaccattttgaaggggaaacttttcacatgtacaacaatcggttccactcatatgaaagtacagttagagccgttgagccgccggacatgccttttttccctatcagcagaaactgtcaccgaataagaattgtttgcaacaaccaagcataaaatttgtatgatggatcatgttgcccaagaataccagcaccacgaattcgtcagtggctggagttcataactttcagcagatgtatatggccagaaataattgaattgccta

SEQ ID NO: 10363 - DNA, 339 bp, Oryza sativa
  Clone ID: uC-osflcyp157e09a1
gtgtttttttacagaagcggggcaacgggttcccaaaggtccacacttacagtacgttcaacgtacaactgatccaagcaaatgaaacaggtttgatgatgcactgatgcgagaaactaaacggttggatcagagtcggagacgaggcgatcatggacaagcggcggcggcggcgatgagcttagtagtcggtggtggggagctgctcgtgggtgtgggagatgaagaggaccctctagatgacgccgattaggccaccgccgttgagtggggaaacccaatacacccactgggactcccaggaccagatgacgagggccggtcctaaggagacggccg

SEQ ID NO: 10364 - DNA, 473 bp, Oryza sativa
  Clone ID: uC-osflcyp157e11a1
gtgttttggaataccataaggataagtcacatattgatagcacttagtaccaacagcttccaggggcggaagttgagttaaacatgagtttgaaaacaggatatagatagagcatgctggcataattcgaattcattgaagttcagcacatcgcaactactagccacaccaaaatgtaggtatttactatcagtaaaggcatggaatcgtagccatcctttaaaaccgacaattagtgatcaggctggatgataaattagcatagtaccttctacggctcatcctacaatttctaatgcttcttgtttttcaacggacccttggggatcttagagaggcatttctcatcgaaaatagcatagtacttcttcagttcgatcatggccttctctccaaaagcatcgatttggtcctcatacttctcatacagaacaggcacggtgtacagtaccataaagactatgtagaacaag

SEQ ID NO: 10365 - DNA, 195 bp, Oryza sativa
  Clone ID: uC-osflcyp157f01a1
ttgttgttttttaattttttgtgtttaaaattttttttttttttttttttggataatcaacaattctaccctaacatcaaaaaaaaaccccaacaccacaaaaatccttgcccacaaaaaaaatccaaaaacaccacaaataccaacaaatttttcaccaataatatgacaacccacttacaatacaaaaaatac

SEQ ID NO: 10366 - DNA, 486 bp, Oryza sativa
  Clone ID: uC-osflcyp157f02a1
ttgttggggttacaaagaatggtgaatacttgtttttcaagcaattatgtacggcaaatcaagatgtactcagaaagacctaccggctcaacagggagccatacaactacattgttcatctctacaaggatcatgaaaaaagaaaaaagaaaattaggtgaaatttgtggggaagaaaggcgaacaaaatgaatacaaagagaatagttttcctttcataatacaaatttgctacttgatgcttcgagtcaccactgcagcccccaagccaagcatcagccaattagagataagtgagaacacgatgaatcctcccagctgtaggtatacacttgaatcatgatgcagcaaagcagctcgcgatagccaagcgccacgggcaaaggtagtaagaataacacacaggagattcgaggggaaaaaaatatctgcaaccagggaacttcacctagctatcaaacatttgctgcagagacagtccaccac

SEQ ID NO: 10367 - DNA, 171 bp, Oryza sativa
  Clone ID: uC-osflcyp157f03a1
ttttgttttttttaattttttggttttttatttttttttttttttttttttttttttttttttttttttttggggggcagcaataaaaccaggaaacatgatccatcccgttaagggaaacactagtactaggggctagaacaaaaataaatggccaagtagggggaggaa

SEQ ID NO: 10368 - DNA, 469 bp, Oryza sativa
  Clone ID: uC-osflcyp157f04a1
tttgtttttttttttttttgtggtttttatcaaaaatgctcttttttcccccacaacggaggctccgtgtggcccttgctgttactgcttcaaagtttgacagcactacagcgtggggcacatgaaagaagaaaaaattgaagtagtgcagcccatgaaacaggttcctcctgcggtcttcaggaacgcacacagattatgagaaaaaaaaaagggccttcgatggtccaaatttttacttctttaggctgcgcccaagtcgttctatagcgggaccaacgccggtttgattaccttgttcctccaccaaatctgttggtttcgaacttgccattttaagattggctttctttgccagcttcaactgtatccaaccaaggggaaagcagactccagcaccaagagctgatccaaccaatacattccttgcacgccacattggtgaacctggcaatataagtccaaatgc

SEQ ID NO: 10369 - DNA, 435 bp, Oryza sativa
  Clone ID: uC-osflcyp157f05a1
ttgtttttttttaattttggggggaatattcaacattaggctgcttgctattgcacatcatcagaacattaacaggagtgcacactactacattcttcttccacttcttctttttggaattttcctagacgaactctagatgaacattaaacttacaaggcaacactgaacaaaggttgcattttgttcatactttttttagggtcattttggtttatactatacaaaaggacacaactaaattcctagataaactctagggacaaacccagactttgagtagaccacaccagcagcagcagccgggaggaaggaagcaaaccaaaacaccggggtgcaaaaacccaatgcttttgcttcatcccttagtttttgcccatctagccatcgcagcctaccaaggctggtggatgacccggggagcgcttccttcct

SEQ ID NO: 10370 - DNA, 156 bp, Oryza sativa
  Clone ID: uC-osflcyp157f06a1
ccccgccctttttttttttggttttttaatagatgcgggcggcaacaccaaaagtcccttcaaatcaccaggcaaaaaaacaggagcctagtacaaactcctcaatatcacacttgtatctaaaaccacgtaacgagtattctgcccctcctacat

SEQ ID NO: 10371 - DNA, 321 bp, Oryza sativa
  Clone ID: uC-osflcyp157f07a1
agcgcgccgccctttttttttgttttttttgaacttgggggtggttaattcgcaaaaatgctcatcaagataggctcctacgacgagacctgcagcaaggaacgccatgtacacactaatctgcatcaagcaaaaaaaaaccaaaaggagaagatcggatttgtatcaaagctgagaaatcgaagaaggagaaggagacgtgtagctgttcgtggttgtcgcgcgagaaggagacctcgcgggaggcggcggtggcggcggccttagtgtcgctgtaccggcctcgtggccgtgcgcggagtagacagcggtgtcagcacc

SEQ ID NO: 10372 - DNA, 457 bp, Oryza sativa
  Clone ID: uC-osflcyp157f09a1
gtgttttttgaatataaggggggtttgcaccatttataaatgctagaagtcaaatcaccaaacctcattgacatgagaacatacccaatcatgcacaatttgatggaaacatataacaagtcaaacaagtccattttacaagaaagggcccttttttttcactatggttatgtatcacattgctgttttcttcccactgtgtaacctcagtgcacccaggtaaagaaacttactgaaaattcagtaagttggcaatcactttggcccagctttcccatacgaatcacgcagggtaaccgtcctgttgaacacaatgttctcaggtgtcgagtctgtgtccactgcgaagtagcctagccgctcgaactggaacttgtcaccaagaaccgcagtcgcaagcgatggcacggcgtaggcacccttgatcaccttttttgagttcgggttaagatcaccc

SEQ ID NO: 10373 - DNA, 473 bp, Oryza sativa
  Clone ID: uC-osflcyp157f10a1
ttgttttttgaacgaaatgcgggttacatgtcgagaatcctcagcgtccagcgctgcatgatactgaagtagtacatctctagtcacctagatggctagccatttactgctacaacaatactacaaacaaaccatttgttcttccatctgcacaaactactcataagttttacactgagaagaaaaaaggaggcatctaccagtcctagtaatcacatccaaatcgtgaaacgtagtcagtatgacgcctacaataatacaacatgggtacaaagagtgggtgcacgataaaatccaccgatcaatgctaactctagttaacctaggtatcattatcataccacccatttgggccgttaatattagtggtatacaaacaattgtgggtgcagtagatgcttttctactttgctcttcctctcgtgcctcggaccacccttttccgtcctcgccgaacgtaggctggtttgggt

SEQ ID NO: 10374 - DNA, 451 bp, Oryza sativa
  Clone ID: uC-osflcyp157f11a1
caagaaaaaaacataacagtaatcttcaaaactacaaaaataatcgcaagccagtacacacctactgggcgttggcgttgccaattttccacaatcaagatggaatacatgaaatcgaaaggtggtacatgtcatatttgcgtgggtcgctaggcctacaaaataattaagtacattgctctctgctaggctgctagcacagaagatttaatatcctctgtatgggcaaacctccagcttatctacactggtgatccgcgggcatcttgctaccgtgggaatgcgttgttcaatgaatcagtagaagatgcagcgatatgccacacatcgcctcacaaggatgtcgaggcatcttgaaatcaaaagtatcttctatcttcttttgactggagttctggatctggaacgcttcttcctgaaatgattagacacagatttaaagacaccacca

SEQ ID NO: 10375 - DNA, 474 bp, Oryza sativa
  Clone ID: uC-osflcyp157f12a1
gtgtttttttttaaatgtgagtcgtgcttttaaaaactcacagatcagctggacggtggttcacccatcacccttcacaaacacgtacgagagatcaataagcagagagcgtatcaattacaacgtgataattcgatatcgagtcggcatatcaagagcgcttcgtgatcggcctcctccccgccgccggcacgagcggcggcggcgaatcacctccctgccacgcccacaccatgtcgccaagcgacggcttaagctcctgcttgtagaagtcccggaaatccggtgagtcgccgccggtcttcctcacctccaccacgtgcacctccggcgccaccttgaagatctccgcctcgatggccagcgcgcccttccgcccgtcctggctcccctccagctcgaccctccctttctccttcagcttgaagctgaacctccccgccttccggatctccttcagcttggagacgatcg

SEQ ID NO: 10376 - DNA, 224 bp, Oryza sativa
  Clone ID: uC-osflcyp157g02a1
ttgttgttttttaattttttgtgtttttaaaattttttttttttttttttatattttttaattaaataaaaataaaaaaaaaaaaaaaaaataaaaaaaaaaaaaaaaaaaaaaaaaaaaaaaaaaaaaaaaaattaaaaaaaaaaaaaacaaacaataaaaaatcaattaaaaaacaaaaaaaacaaaaaaatcaacaaacaaaaaaaaaaaacataacaatc

SEQ ID NO: 10377 - DNA, 541 bp, Oryza sativa
  Clone ID: uC-osflcyp157g03a1
ttttgtttttttaaaattttttgcgtttaaaattttttttttttttttttattttttttataataaattaaaaaaaatataaaaaattaattaaaacaaaaaaaaaaaaacaaaccaataacaaaaacaaaacaaaacccaaaaaaaaaaaaaacacaaaaaaaaaataaaaaaaaaataaaaaaaataaaaaaaaacaaaatacaaaaaacaaaaaaaaacaacacaaaaaacaacaaaaaaaaaataaaaaacaataacaaaaaaaaaaacacacaataaaaaacaaaaaaccaactaaaaatacacaaacaaaacaaaaaaaaaaaaacaaacaataaaaacaaaaacaaaaaaaaaaactaaaaaaaaaaaaaaaaacaataaaacaaaacattacaataaaaaaaaaaaaaataaaaaaaaaaaaaaaaacaaaaaaaacaaaaaaaccaacaaactaaaaaaacaaaaaaaaatcacaaacaaacatcaaaacattaaaaaaaaaaaaaaaaaaaaaacacaaaaaaaaacaaaa

SEQ ID NO: 10378 - DNA, 332 bp, Oryza sativa
  Clone ID: uC-osflcyp157g06a1
tgtgttttttaaaataagggggtccattgcaacacaaagaatacgagctagttcaccgaacaccttcagagttgagcaatggcgtacgagagatttacaacccagcttcgtttgagcgtggcatggacatcttgttatgcattccatggaatcaattgacaagttaaatcagaaccaccagaaaaacacatccgcggacatttgacaacgctaaaaaatcgcaggagttcgttgggcaggaagacaggaagaagctaaaatccgtaagctgtacattgtggaagtctagagtgcaccaggtgcgtccctcatgctgattttaaagctggttc

SEQ ID NO: 10379 - DNA, 101 bp, Oryza sativa
  Clone ID: uC-osflcyp157g08a1
gtgtttttttatattttctgctttacacctcggaaatgagggactacaacccttaaataaaaacccaatacccatatccacaatacaccatctccaaccat

SEQ ID NO: 10380 - DNA, 322 bp, Oryza sativa
  Clone ID: uC-osflcyp157g09a1
gtgttttttttatttttgggggttattttttttttttttttttttttttttttgaccacacaaatgctccaaattttgaaagtaagtgtgggtagtataggctaaaaaaagagaaagattaaacatgataaaagataagtagaaaaattataaagggggtaaaatttcccataaacggacatttatacccacggggaagaattagtttagcaaagtaattaaaagtttcccggccggaaaggtccatttgttgagcatgttggggcacttcttgggggggaactccgggggggtggggccaccctcctttaacgattccaaa

SEQ ID NO: 10381 - DNA, 448 bp, Oryza sativa
  Clone ID: uC-osflcyp157g10a1
gtgttttgtaagcataggcatgtgaccacaaaaaatgttgagccactgcacacggtgcagtgtcagttgtagcattcacaacataccgagtttctttttaggaggtaaaactctacgagtctcacagcatagtaaaacgtagccagctattactagatacgagtagcattttttaagtcgcaaacaaaagggatacagtcccggcttaaggggtgtaaaatcagcttcactatcttcatgttcgccgcaacgggaaacagagcacaatcatctttgggtccaaaaatttacggcaaacctttgcgacgacgttgatttgtgaaccaatgacgagtttcctagatgacatactctgcttactgttgcgcgcactgaactctctgggcacctccaggcatctcatcgtcctcatcatacgcctcctgagcagcttgggcttttctgcgca

SEQ ID NO: 10382 - DNA, 466 bp, Oryza sativa
  Clone ID: uC-osflcyp157g11a1
aattccaggaggtagtaatttaagtccacagttaaagctagtatcacaattcgcatcgacaacacaccattaatcaacacaaggaaaaaaaagagtaactagagcatcaaatcacctaaaataaacatcttacgacccagatcgacagttgcaatacagtactaggtaataataacacaagggagcacatcctcaatcatcatctacgatggatgacgagagcgagaggaatggcaggcaggtaggtggcttaggcagcaacctcgtcttcctcctcgtcgccgtagtcctcttcctcgtcgtcggctgtcgcgtcctggtactgctggtactcggccaccaggtcgttcatgttgctctcggcctcggtgaactccatctcgtccatcccctccccggtgtaccagtgcaagaaggccttcctcctgaacatggccgtgaactgctcgctcacgcggcggaacat

SEQ ID NO: 10383 - DNA, 351 bp, Oryza sativa
  Clone ID: uC-osflcyp157h01a1
tttttgtttttttttttttttggtttttttttttttttttttttttttttttttttttttttttttttttttttttttttttttttttttttttttttttaaaaaaaaaaaaaccccctttttttaataaaaaaatccgggggggggaaaaagtttttggggggggtaaaaaaaaaaaggaggtgtttttcggggggggggaaaaaaaaacccccctcgcgtcccccccccccccccaaaaaaaacccctggtcctccccccctttaaaaaaattatcccggggtttgttaaaaaaatttttggggaaaaaatttttttgccccctttatttaacccctttaaaaaggggc

SEQ ID NO: 10384 - DNA, 345 bp, Oryza sativa
  Clone ID: uC-osflcyp157h02a1
tttgtgttttttttattttttgggttttttttttatttgcaatgttcggcccgcatagattaccaataattaagtttgaaccaacaagtttaagaaaaaaaaaagttaagtaaacctacaacaacaggggccttacagaacacacacataactaccacccccccccctgcctcttttaaaaaaaaatacaaccttttttaggataacgcaacacatgattgatttgagtaggtcgatcgatcgacctaggcgtggatgggcttgcaaaccacgggggggtgcttgaggatctggttggtgaactggccgggctttttggggggggccaccttgtccatcccgggc

SEQ ID NO: 10385 - DNA, 467 bp, Oryza sativa
  Clone ID: uC-osflcyp157h03a1
ttggtgtgacaacaaattggggtgaaagacccatgaattttcttttttttttccctgtaaacaagaaaagcagaagctttttcctatttgcccatatgcccagcaaacaactatcgcttcctccactacatcaaaattcgaatttacagcaggaagcaattggacaaacccaaaactagagaagaacgaacgaaaaatctataagccgctgggcaacaccttttgccgctgggagctttagcacctggatcactaattcactatgtgcaaagaaccatttggtcctctcattgcttacccaccttgcggcctggccatggcacttcaaagatggctacatacatacacccgacaacagcttggagtaccccaagtcgcggccattatggctgtgccatccttcaagcacatattgatgatttgtagggcaggttaccgcgatacttccaggcgcataatttacgaca

SEQ ID NO: 10386 - DNA, 401 bp, Oryza sativa
  Clone ID: uC-osflcyp157h05a1
tttttgtttttattttttttgttttttttttttttttttttttttttttttttttttttttttttttattaaattattaaaaaaaaaaaaaaaaaaaaaaaaaaaaaaaaaaaaaaaaaaaaaaaaaaaaaaaaaaaaaaaaaaaaaaaaaaaaaaaaaaaaaaaaaaaaaaaaaaaattaaaaaataaccgaaaacaaaaaaattaaaaaaaaagacaaaaaaaccaccccaaaaaaaaaacccgggaacctaaaaaaggaccccaaaaagaaaacgaaaaaaaaaaaaattaaaaaaaaaaccaaaaatttgccaaaaaaaaaaaacccaaaaaaaaaatcttaacccttaaaaaaaaaaccaaaaaaaagaggaacccccaaaaaaaaaaaatgaaaa

SEQ ID NO: 10387 - DNA, 307 bp, Oryza sativa
  Clone ID: uC-osflcyp157h07a1
gttgtttttttatttttttgtggtttttttttttttttttttttttttttttttttttttttttttttttttttttttttttttttttttttggaaaaaccaaggggggaaaaaaaaaaaaggggggttaaaaaaaaaggggtaaacggaaaaaatcgaaaaggacccggctgaaaaaccaagaaccccccgttgttaatggaaaaaaaacaaagggggcctaaaaaaaaaaaacggggaaaaaaaaaagggggggatttttttttatgggggtttttttggaaccaaaattcttaagcccttgggg

SEQ ID NO: 10388 - DNA, 226 bp, Oryza sativa
  Clone ID: uC-osflcyp157h09a1
ttgttttttttaaaaaggggaggcgacaccacttgtttccaacatcagctctgagtactaacaaaatcataatatttagttctgaacccaaaatcttggttgtatggattcctcataagagacgactacgacttatccatcatgcgccatttggaggccacttgtgaaattctcagggttctccatgtaaggtgcaagcatcgtcctagttctccatcaagaaatt

SEQ ID NO: 10389 - DNA, 77 bp, Oryza sativa
  Clone ID: uC-osflcyp157h10a1
ccccccgccctttttttttgtgtttttaaaaatatcctcttaaacactcttttttttattatatcttttttattatt

SEQ ID NO: 10390 - DNA, 76 bp, Oryza sativa
  Clone ID: uC-osflcyp157h11a1
tggttttttaaattttggggctccccacctcttttttttattccctttctgagcaacacaccccaaaaaacaacct

SEQ ID NO: 10391 - DNA, 462 bp, Oryza sativa
  Clone ID: uC-osflcyp157h12a1
agttgggaagactaagtgtcacaacatttacatcatttacaccgtttatattacatatagttcttctgaaggtcttcgttccaacataggctaatacaacttgaattctgaagtttgtgaccatcacataacctgaaatcttacatctatgtgacgataaaaaaaaaaagtggttgaattctgcgagataaaatcagctaagtgtaaatccagaagccatgagaacttattatgcttcatagagcaattaacagcatatatatatagaaagaaactaaatgatcagccaagatacaggtgtagagaaagaaacatccctgctatttgcccggctaccatatagaagttcaattctttgatgaactataaaatgtcattgaaattggtaaaccacctgtgatttcttcctcctgtcaattaatttatagggaaagcctgcacgactgcacaatggacaccata

SEQ ID NO: 10392 - DNA, 400 bp, Oryza sativa
  Clone ID: uC-osflcyp158a01a1
gcaacggcaaaattaaagagggaattgaaacagcatgtaaagggccttacactgactggttcgttcaaaaaaaaagggccttacactcagaaagcctaaacacggactcatcaagcacaaactacttgaaagcctgccgttttattcaaatccaatatattattgaaactggcattcctatatatatgctcattaaagcaaacgatacttcacagggacttggccgttgcaatgacattttccactgtcaaaccaagctccttgtatattttcccagcaggcgcactagaaccaaaacggtcaacaccaatagctttacctttttctccgatatatttctcccatccaaatgtgaccccagcctcgacgctgatcctagaagttacttcacttggaaaaa

SEQ ID NO: 10393 - DNA, 471 bp, Oryza sativa
  Clone ID: uC-osflcyp158a02a1
tttgttggataatttaaatacttaatagtaatagactctttgatggagtattacaacatgcagcagtggcattaatacgccagtacattaattaagttacacatatgcaggctccattttggtttcttttaatttatcgtattacagaatttctgtagccttgcagatgatcacttggatatcatgtactagtaattaacaataggatgcatacaaaagatggcccaacgacaacagaagatgcgtgcatctgacattgtctggccttatttgttggtagtactccaattaattaacaagagatgatgcattcttgtgccttagtttcttcacatgcttggcttcacgttgagcctattcgcaatcttcacccccaacgactcatcacactgggagaggtagttgacccagatggcgcggagctcaggggagaccttggggtgcgcgagctcgccggcgaagcggcggatg

SEQ ID NO: 10394 - DNA, 293 bp, Oryza sativa
  Clone ID: uC-osflcyp158a03a1
ctccttggtttttatttcatttcattccgatggatagcaacaagcagttcaaaccccataaccaaagcgaactcaattcatggtaacatcacgggcgaagaacacctaacactggatggatggatagagggcttttcgactcgggagagccactggacacgataacgactcgactcgatgataagatgattttgccacggatggctaaggataactggccacgatgggccccaccaatcagttcctccagttcccgccggagtccccgccgaagccgccgccacggttgccac

SEQ ID NO: 10395 - DNA, 355 bp, Oryza sativa
  Clone ID: uC-osflcyp158a06a1
gggggcgttcttccttttttttttttttttttttttttttttttttttttttttttttttttttttttttttttttttttttttttttaaaaaaaaaaaaaaagggggggaaaaaaaagggggggcccccccgggttcccaaccccttcaaaaaacctaaaaaaagggttttgggcagggggggggggaaaaaaacccccccaaaaaaaccccagaaaattttgggggtccccccccccccgggttttaaaaaacccccggaaaaaaaaaaaaaattccccccccccggggggggttttattttttttttaaaaaagggggttttttgggccccttttggaaaaagggggcccaa

SEQ ID NO: 10396 - DNA, 408 bp, Oryza sativa
  Clone ID: uC-osflcyp158a07a1
aaaaaacgacgtcgcaaacacacataaataaacttaaatcctctaaaaaaaccacccttttttttttaaattttataaaaattataaaatatttttaaattttttttaaaattaaaaaaaaataaaaaaaaaataaaaaaaaaaaaaaaaaaaaaaaaaaaaaaaaaattaaaaaaaaaaaaaaaaaaaaaaaaaaaaaaaaaaaaaaaaaaaaaataaacccttttaaaaaaggataaaaccgaaaaaaaatttaaaaaaatacgaaaaaaaaaaaaaaaaaaaaaaaaaaaaaaatgaaaaaaaaaaaaaaaaaaaccataaaaaactaaaaaaaaattaaaaaaaaaaaaagaccgaaaaaaaactaaaaaaaacagggaaaaaaaatcggaacgattacaaaaa

SEQ ID NO: 10397 - DNA, 381 bp, Oryza sativa
  Clone ID: uC-osflcyp158a08a1
ttgtttttttttttttttttggggcaaaaaaaaaatgatgggctttatttaaggagtctgttcattttgtatgtacggtatagcatggtatgaatatatacattatcatgaaaatgaactttaccagggaaataactaatttagccgtccagggaagagctataactataagcttaaatagctttcggagcaaaaatattactgacaataatcggaagccaaaagaaagaaaaatgtctgaattcaaacctaagaagttaacgactaagatagctagtcacctttgtaagttgtcaagggctcgtatcttcagggttttgaaggtgcccatgaaccgttaactgatatcctcttgaagttgatggggagttctgattagag

SEQ ID NO: 10398 - DNA, 446 bp, Oryza sativa
  Clone ID: uC-osflcyp158a09a1
gatccaggttccacatccgttacatcacgacagagtaaaaatagtttctcagtagcacgcgaacataggattgttgatgtgaaacacatgcattcgacaaaagggaaatgaaatacgacaacgaaagcagttctcttagcagtagaccaactagaacatgtaagggtaacggcacaacacatgcggcggccaaaaatttagagcttgtcctcgaaatcggagaggggagtcatctgctccttgagacccttcctcttgcggatatcctgcaccagggttgaagcctgcgagccagcttcaagaggatcagaggtcatcatgtcccaatggtcgaacacacactgggggaaggcctggccagatgtcgcagccctaagctggcttgagaacccaaaggactcgatgacagggaggtaagccttgatgttgtacagaggggtaccagg

SEQ ID NO: 10399 - DNA, 419 bp, Oryza sativa
  Clone ID: uC-osflcyp158a10a1
gtgtttttttatttttttgtttttttaattatttatatttttttttttttttttttttttttttttttttttttttttttttaaaaacgaaaaaaaaaaaaaaaaaaaaaaaaaaaccaaattttttaaaatttttaaaaattaaaaaaatttaaaaaaaaaaaagatttaaaaaaaaaaaaaaaaaaaggttttattacaaaaaaaaaaaaaaaaaaaaaaaaagtttaaatttaaaaaattttcaaaatttaataaaaagcaaaaaaaaaaaaaaaaaaaaatttttcgttttgcggcggcccccttccaaacggaaaaggtttgccccaaaaaaaaagggtggcgcccttttaaacgggggcgggaaacgcaaacttaaacggggcaaagtgccccaaatttgccccccccggccc

SEQ ID NO: 10400 - DNA, 452 bp, Oryza sativa
  Clone ID: uC-osflcyp158a11a1
gttgttttttaacatgcagaagccatatatgttccgttgaactgcaagctcaattcgagtcagaaaaccaaagaaaagcaggctaattataccgtgtgcgcgtgtgagtcactcgggagtcaggacaccctgaggcactgctgcttgaacatcttgctggtctgctgcccgctggccgagtcctccacggtgaggccctgcgcgccgaagcagatgttgatcagcctcccgttgccgcacccgtgccgccgcgccggcatctccgccgacgcgtcgtcgttcacggacgaccccgagctcgacggctcgcccatggcgtcatcatcgtcgtcgttgttcagcacgatgtccttcagcttgccgaacaccggcgtcgtcatcgagttctcgtcgtccagttccaggcagacgcccttcatcttgccggactgcggcggcggcggggtggagga

SEQ ID NO: 10401 - DNA, 331 bp, Oryza sativa
  Clone ID: uC-osflcyp158b01a1
tttggttgtttttttttttttttttttttttttttttttttttttttttttttttttttttttttttttttttttttttttttttttttttttttttttttttttttttttttttttttttttttttttttggggaaaaaaaaaaaaaaaaaaaagtttgggttataaaaaaaaaaaaaaaaaaaaaaaaaggccccccccccgccgggaaaatttgggggggcccccaaaaaagggggggaaaaaaaagaggggcccaaaaaaaaaaactcccccccccctaaaaaaaaagggggaacagggggggggggagaaaaccgggggtgttttt

SEQ ID NO: 10402 - DNA, 227 bp, Oryza sativa
  Clone ID: uC-osflcyp158b02a1
tgttgtttttttttttttttttttttctatatatttttttattttaaaaaaaaaaaaaaaaaaaaaaaaaaaaaaaaaaaaaaaaaaaaaaaaaacaaaaaaaaaacaaaaataaaaaaaacaaaaaaaaaaaaaagtaatcaaagaaaacagccaaaggacaaaaaaaaaaaaaacaaaaaaaaagggccaaaaaaatttttatattaaaaaaaaaacaccaaaaa

SEQ ID NO: 10403 - DNA, 208 bp, Oryza sativa
  Clone ID: uC-osflcyp158b03a1
aaaaaaaaaactcaacatagtactttccctcaacaagaagcaaaatctgatgacaaggcatggtttttaccaacacaatcttaagttaacaatatacacgagggcactttaaacataacaagggaaccatctttcttgagcatctaaagccttcattctgtttattccatgcttgccaaccaagatgtaccagtaatctaagacctgg

SEQ ID NO: 10404 - DNA, 435 bp, Oryza sativa
  Clone ID: uC-osflcyp158b04a1
tttgttttttttttttttttgtttttttttctttttttttttttttttttttttttttttttttttttttttaaaaaaaaaaaaaaacttccttttttttttttggtttgggcctgcatttgctgatcggggggaccatgaaccccaaccctgccccatttccccattggcccaacaaaagggggccccatcagcagggggggggccttccccttttatcaccccccccctggcgggctgggtcatttttttggggttttccccccccccccctgcggtaattaagcccctcccttttttttttctttttttacacataaaacctcggaatcttgtgttttgggcgcccttaacataatttgggggactccactggcttgcccccacggtggaattagggaggagggggggtccattgttcttgggggggggccc

SEQ ID NO: 10405 - DNA, 361 bp, Oryza sativa
  Clone ID: uC-osflcyp158b05a1
ggccgcccttttttttttggttgttaaacacaacaacaaactggattttatttatctacacatccatcatatttacataccaagggagaatccgcaggactcattttcctttctttcaggaagcctcagcagtggagaaatgcattttagcagccgattcacgcaaaaagctgcttccacatttggcgtcttgactgctgatgccataatccaatatatcggtctcatgtttgttgagatcgtctggtgctgaattactacttgtggtttcagcatccttgagcctatcaaattcgccaggagcttggagcactgctgaactctggatagcattctggtggtttttcttggacctaccctt

SEQ ID NO: 10406 - DNA, 284 bp, Oryza sativa
  Clone ID: uC-osflcyp158b06a1
tttgttgtgaagctttcattgagctttattcatcagaacacgagagatagacctcaaccacaacgtggtatcatcagattacataagtatcagtattcagtactatgacgtagaaagatagcaatgctctgaatgtttgcagaagagttttacggacgcctgaaagtaaaacctagcgcgtcgtctcaggagtggttcttgagtacttcagcatcagacataccagggcagagtccacaactggaaatgccgaaatggtaaaatggaagccatctcaatggtat

SEQ ID NO: 10407 - DNA, 348 bp, Oryza sativa
  Clone ID: uC-osflcyp158b07a1
gttgtttaacaacaagaaggcaaatactgaatgattttctttgaaatggagcgttgccaaatttctggaagctgaaccatcctgttcgagcagccagtactgtacaagtcatacaacaaagcgttcattgagtctgttagactgaatatccatccgcaccacctcggctaaacttcaataagaggaaatgcgatgtaataaagctacaggtacgaaaaaattagcctctcaagtctgaaccaatcacggtaactactgatctcggggatattctaccaggttgctcgcttgtaagtgcacttgcaaccacacctatagagcccaatggctgctgcccttagttcttct

SEQ ID NO: 10408 - DNA, 374 bp, Oryza sativa
  Clone ID: uC-osflcyp158b09a1
ttggttttttttttttttttttttttttttttttttttttttttttttttttttttttttttcccaaaaaaaaaggagtcccttcctttaattaacgggataatgaaaaaggggaaaaaaacaattccatgattatcacggggccttttatgggggaaaggggggttggcctggaaaaaaaattggaacaaaccggatcccactttttttaggatttttgaggcatacagaaacaacagggccataatttccccacttaaaataatcccaatttctgagaaaccattttaaaacattcttggggaaaaaaaaaacccaccccattttatcccaaggggaaaaaaaatccccaagccccaagcaatttttccgag

SEQ ID NO: 10409 - DNA, 235 bp, Oryza sativa
  Clone ID: uC-osflcyp158b10a1
gttgttttatttatttgcgtcggtccttcttttttttttttttttttttttttttttttttttttgttttatttttaaggctgaaatttctactttgcaagaaaccccaacaggagagaaaaggaaccaaggaaaccaagaacggaaccaaaaaaacacacaccaaggggggacaaccggagacgccaaaaaccaaaaaagaagacgcacaaatggtgggaaaaacacgagcaga

SEQ ID NO: 10410 - DNA, 436 bp, Oryza sativa
  Clone ID: uC-osflcyp158b11a1
gacctcatgggccgcggctccttcggcgacgtctacaaagggtttgacaaggaactgcataaggaagttgcaataaaagttatcgatttagaagaagctgaggatgacattgaagacatccaaaaggagatatctgttttgtcacaatgccgttgtccatatataactgactattatggctcatatcttcatcaaacgaaactgtggatagtaatggaatatatggctggtggttctgtcgctgacctactccaaactggccctcctctagatgaattgtctattgcatgcattctgagggacttgttacatgcagttgaatatcttcattcagaaggaaagattcaccgtgacattaaagcggcaaatatcctcctgactgaaagtggagatgtgaaggttgcagactttggtgtttctgcgcagctgactaaaa

SEQ ID NO: 10411 - DNA, 459 bp, Oryza sativa
  Clone ID: uC-osflcyp158c01a1
gcaggggaaaaaggtctacttttaagtattaagcaagctgatacaaatagccaggcaggtactacactgccagcccaaatagacactacgctaatgtatcaagacatcgacaaaatgttataacaaaaacagtaccaggtacaactagccaagcaggcactacactgaattgacgttctagcatatgtgctgcccgtcgactacgaagattattcaaacttgatggtggctacgagctccagggatgaataccatgaagcgcactgtgataagcaaaccgtatttgggtctgcatgctcaaaggtctctgaagtctggcttgtccatcatatagaagagagtagaactccaaatacgtttcttggacataaacaaggactaggaattattgaaggtgccctaaaaaaggcataacactactagacacaattctagttggagaggcatgaaagaaagatg

SEQ ID NO: 10412 - DNA, 391 bp, Oryza sativa
  Clone ID: uC-osflcyp158c02a1
ttgttttttttttttaagaccaaatccggacccaaatgtctattgtgtggttataaacggccgaattaagattaaaaccaaccccagaaggacgagatccaactccaccgaatcgatccaagaactcgctaatcaaccaaaccatgggcgatctatttaccaacacgacacgaactataaaaagataaaccaccaccactcttcttatttagggactcgcgactcaagacactgatactggcaaaggcaaggggaacagcacagatctaggagagctggccgatcgggatgacaccggttgggggctcccgcggggatcccacctttgaggcttgacactcatgcctgacaccggcgaacacagtgttccgtcagcagtgagggacgggca

SEQ ID NO: 10413 - DNA, 313 bp, Oryza sativa
  unsure (1)..(313): unsure at all n locations
  Clone ID: uC-osflcyp158c03a1
gagggggacgacaactttaaatattgctcaataaaacactatctggagacaacacacacgagagtcatatccagaggaaaacaatcagcccagacggaccactagcaccaaatgcaaagcaatgggaagaactaattcgaccgctaccaccctagtaaaaaccagagaagagagaggaaggggggacaggaagaaaaacattctagtagaacaggagaagaatccatccatcatggtgacagcagcatgaggcatctaaatcgatggtctccaataacatgcgggagcgcatcgatcagagtcggnatcttcc

SEQ ID NO: 10414 - DNA, 275 bp, Oryza sativa
  Clone ID: uC-osflcyp158c05a1
tttgttttttttttattttcgtcgttccttctttttttttttttttattggagggaacaaaaccgatatattaacaacaacattttggagatatcagctaggaaaataacactctagcaacaattctacatgacattttccatcttggtttaaacctttttttcccctcttctcgatacaaagcaagcaatgcaaaatgcaagaaccaatcaacagagctacgtagtcagttaaaaaaatgatgatgatgaccatgaaaatggggcagccaaggc

SEQ ID NO: 10415 - DNA, 431 bp, Oryza sativa
  Clone ID: uC-osflcyp158c06a1
gccgccctttttttttttgtgtgttcaagactacatagatatcacaattcacacgctcagaacactgaagctatactgtaaaccagtaagtgatatcatgtttcatgctcgtattacttacacgatagtacatccagtctgtcatctcttcttatttcactttaatacttatacaagcgtatttaagtgtggcacatccattggctattgccgtagaggcgtcgggtaccgacaggctacaaacttatatgctggcctagttataatgtcagcaggaccagcatatcgaagatgctggaagagcagcagtgcgccttgcagaatgcgaatagccggttcttacatgacaggcctagtggcagctccagcggggccagcttgtcttagcagctggaaataggattctagtttctgcctcaggacagcatgct

SEQ ID NO: 10416 - DNA, 327 bp, Oryza sativa
  Clone ID: uC-osflcyp158c09a1
tttgtttttttttgacacaccccccaagttattaattcgtatccttgagggattccattacaaatctgacgcaaccaatgtgcaaatttaggcctctatcgggtaccgcacacggtacagatgaagcaccacgctcgacaccaacataaattaaaactctgtactgtacatcatgtaatagcatattgatcacacttaataagcatgtatcctctcagttctcaggtgttcatcactggctctcttctcttgacccttaccaagagcccattcttcatgtggagtatgacggaaagcctcggcttcacgacgtgccccggcaccacc

SEQ ID NO: 10417 - DNA, 315 bp, Oryza sativa
  Clone ID: uC-osflcyp158c10a1
gttgttttttttttttgtgttttttcataagagcaactggaaatgctgctacatgcaacatatgaaaaacttagtcgacagcaaggtttgagagtgactaattctaacttaaaagagtaaatagacggagatcttagatgcaacttcaggtataggcaaggattaacctatgaccatggggtggtgtctcactcggagcctaggaccacaagaattctctgggtttcaccgagtgttcgggtgacatctgcatgcgcagcaagcgcacggtggtcccggtcagcggcagggggttggtggccccgacgagcttgc

SEQ ID NO: 10418 - DNA, 410 bp, Oryza sativa
  Clone ID: uC-osflcyp158c11a1
gtgttttttttttttttttttttttttttttggtggatcgggaaatttcttatgcacgtgacaaatttatacaggtgcattgcccatgtacacaggaaaacacgacaaaagacctaaaattccagtgcgtcgttgaacccggcgtcgtaggcggcgtcagcctccatgtcgccgaccatttccccgagcattatcccgccgaccgcgccgccgaggagcccgagtccgaggcccatgcccattcgtccacctttcctcgccgccggctgttgtgccgccgcgtagctgtacgtcgccggcggcggtgggccggcgttgtacgcgtacgggggctgacccgcgtaaccgtactgctggtgatgcggggggtacccttcttcgtacggcgcgccgtacggcacgaccggcgg

SEQ ID NO: 10419 - DNA, 293 bp, Oryza sativa
  Clone ID: uC-osflcyp158d02a1
aaactaaaaattggcaccagaaaaagggggcatcaaggtgcccaaagaaacacaaagtaattttttgggggagtttttcaaaggcccaaacagaaaacaaaggaagacagctcaacggaagaggcaaaattacatccagagttctacgaggaagacaaaagagggatctagggaagagcaccctaacacaatgcagagtagagcgcatctagtagtagcggtaacttaggaagcacagataagatgagatacccaacctaccggttgtaggcagcactacaaaatatgagcca

SEQ ID NO: 10420 - DNA, 309 bp, Oryza sativa
  unsure (1)..(309): unsure at all n locations
  Clone ID: uC-osflcyp158d03a1
tttgttgttagacggacggacagacgacggtatatatgtcctaagattaatgtgcttacagcaagttaggcatgataagagatattatgagcatgatgggtagggtacacgtatgtatgtatgtatgttgctgngccacaccacaatcataccatacatacaagcaagctaaactgatgcagagcctaataaccggctgtcacccagcaacgtcagttccttggtcgatttgattacacaatgcaaatgcgaatgattcctaaaaggcgtacattacggacaaggggaggaggatgatgattccttggg

SEQ ID NO: 10421 - DNA, 78 bp, Oryza sativa
  Clone ID: uC-osflcyp158d05a1
ggtgttttttttttcgcgtccccccttttttttccacaattccatattattaacacctacactaaggacatgcccaaa

SEQ ID NO: 10422 - DNA, 478 bp, Oryza sativa
  unsure (1)..(478): unsure at all n locations
  Clone ID: uC-osflcyp158d07a1
tggctgcggcggcggcggcgaggggtgtgacgaccgtcgcgctcccggacctcccctacgactacggcgcgctggagccggccatctccggggagatcatgcgcctgcaccaccagaagcaccacgccacctacgtcgccaactacaacaaggccctcgagcagctcgacgccgccgtcgccaagggcgacgccccncgcatcgtgcacctccagagcgccatcaagttcaacggcggaggccatgcaatcattcgatcttctggaataacctcaagcctatcagcgagggtggtggtgagccaccacatgcaaaacttggctgggccattgatgaggattttggttcatttgaggcacttgtaaagaagatgagtgcagaaggtgctgctttacaaggatccggatgggtgtggctagctttggataaagaggcanagaagctntcagtgggaacaactgctaaccaggaccctctg

SEQ ID NO: 10423 - DNA, 64 bp, Oryza sativa
  Clone ID: uC-osflcyp158d09a1
gttgtttttttttttttcgcgttcccccttttttttttttttttttttttttttttttcttttc

SEQ ID NO: 10424 - DNA, 88 bp, Oryza sativa
  Clone ID: uC-osflcyp158d10a1
gtttgtttttttttttttggtttttcccctttttttttttttttttttttttttttccggccggggcacccggaaccgaccggaccga

SEQ ID NO: 10425 - DNA, 304 bp, Oryza sativa
  Clone ID: uC-osflcyp158d11a1
gttgttttttttttatactaacaaaaaaatcatatcaaacaatttttacatggtgtataacgtgtaaacctcagggaaaaaatatatatcagccttacagctcaagtgacagattatactacctggatattgattctgaatgaaccattaagaaccagactctaaaggatattagaaggtatggtctttgccaaacatgctataacagcaggagggccgcatagggccagcagaatcaggggggcaatcatgcaggcgccaagacgccggtatgccccgaagtgcacagatggtgacccatagc

SEQ ID NO: 10426 - DNA, 193 bp, Oryza sativa
  unsure (1)..(193): unsure at all n locations
  Clone ID: uC-osflcyp158e01a1
ttgtttgttttttttttttttttttttttttttttttttttttttttttttttttttttttttttttttttttttttttttttttttttttnaattaaaaaaaaaaaaaatttaaaaaaggaaaaaaggggaaaaaaaaaaaaaaaaatttaagggaaggaaaaaaaccagagaaatttaaaaagggtggaat

SEQ ID NO: 10427 - DNA, 451 bp, Oryza sativa
  Clone ID: uC-osflcyp158e02a1
gttgttagtgtgaagtacgtaagtagtttgtaatcactggctggcttcttccatagccaggtaccataaaacttcaccacagagtggctacttcgtggtccacataattaagaacacctaaaaacacacgtcctcccaaggcaccaagaaggatgacaaatactaatccttctctcccggatgaatcttaaatcatctcgaggagccatcaactcacactcacgtacctcccacacatgaagtaaaacacacaaatcaaaccaagcctttctttcttttactaccactttctgggcctaatcagcggtcaatctctatttcccgccgttgtgtcggcccttccccctcgccggctgggcctgcctggcccgcgcgaacgccttgctgaggaagcgcagccgccggctgttcgtggtgatgacgcccgtggtggacggcgtctcaccgaaga

SEQ ID NO: 10428 - DNA, 329 bp, Oryza sativa
  Clone ID: uC-osflcyp158e03a1
ttgtgttgaacagaacacataggctgccattgatatagtacacaaaataactgatacagactggagatgtgtcgactgtgctagggggacacatgtagtggggatattacaaggaatagtgttatgaaggtataaggggctatataacaaaacaggctgggatttagaaagcctggagagtcacttgggatacaggaggatgacaggttgtagccgatgcatattgccttcacaagacatctgccgttgcttccaggcgatctgtcttggaaaagtggaatatgcaaattggtccaatcttgatttgtgctgccttttcatcgagcaag

SEQ ID NO: 10429 - DNA, 166 bp, Oryza sativa
  Clone ID: uC-osflcyp158e07a1
gttgttttttttttttttgttgtttcttcctttttttttttttttttgttttttttctttttttttttttttttttcggggcgcacccaggggctccttctttttttcccccccccacaaaaaccacacgaaaaagaagccaaaacaacagggacaacaaaaggaa

SEQ ID NO: 10430 - DNA, 377 bp, Oryza sativa
  Clone ID: uC-osflcyp158e08a1
ttggtttaactaagaccagtttgatttcgtgtttgatacaaaaattaagatggacggattcacaagagagcaccctctacttaagctttacattacaaggccaaccagcagctgcctgccggccgaccactgcgtgcgcacgcgcgcgcaataatcaaccaatcacacacagtacgcacgcacataaaaaccacccatagccttcacgtacgcccggacgcacgcaccggttcgtgccaagctcaagggtagatggttctcgggatgatgatgtcgccgatgttgttgtgccacgggtccgagaggtggctggccaggttctccagtgggccggtgcccgggtacgccgactgttggacgcaaaaacccacaaaagc

SEQ ID NO: 10431 - DNA, 55 bp, Oryza sativa
  unsure (1)..(55): unsure at all n locations
  Clone ID: uC-osflcyp158e10a1
aagggggaatgcttggaaagggaatnggttttaaatttggtgaacgggggagggg

SEQ ID NO: 10432 - DNA, 394 bp, Oryza sativa
  Clone ID: uC-osflcyp158e11a1
ggagcaaagctaccagaaaggcagaaagttggcagtagcagctcacagtaacaacacacaattcaactttcactctagagacagcactacagcaggcaactcctccagtattctaaattagcagttagcacttcgatagtaatcgccaatctcaaagagctgtctaatgtacatgactcgcatacaagcttttggtcagtggccatcccatgattgggatttgtgaacacatgaatgcagctagccgcacaaactcgcgagctgctgttggatacaatgtacaaactctttggttattaacagtaactaggtggagacggcggtgaacgattcctgaatcgataagcgaaacctagttagttctgcccattttcttcctccagtacaacgttgc

SEQ ID NO: 10433 - DNA, 420 bp, Oryza sativa
  Clone ID: uC-osflcyp158f02a1
gaccaaatatacttttttccatatatcttatataaatgacatatattccaaacaatgctcacatacagctccgcagcaatattttggaaggacacatgtatgccttatgttgccatcggcctattacaacaaaataaccaaaaataataattattggctcactcaaacatgacacgatctcttttaagagaggattatttagatgttcatatttcgcatgggacccaacaagagtacacatgtctgttacttagagttggattccactcttgtactcagagccagctgtaaagctttcagggatgacatcgtcgacgacacggtagccgccattcttgacaaggaagcggacagagaaggggcccttgagcggcgactcacttttgagcgtccaagtgttagacgacgactccttgagcg

SEQ ID NO: 10434 - DNA, 159 bp, Oryza sativa
  Clone ID: uC-osflcyp158f03a1
ttgttttttttttttttttttttttttctttcttttttttttttttttttttttttttttacatattatttttttataaaacaaccaaaaaaaaaaaaaaaaaaaaaaaaaaaaaaaaaaaaaaaaaaggaaaaaaagtaaaaagtaaaggaaataaaa

SEQ ID NO: 10435 - DNA, 119 bp, Oryza sativa
  Clone ID: uC-osflcyp158f04a1
ttggttgttttttttttttttttttttttttttttttttttttttttttttttttttttttttttggaaaaaattaataaataaaaacaaacatacaggggaaacgtacaggggaggtg

SEQ ID NO: 10436 - DNA, 464 bp, Oryza sativa
  Clone ID: uC-osflcyp158f09a1
gaagcactgagtatcaaactattttaatgtacatagacaagatgtttgacaaatctagttttacagagtcccaactcccaagttcgtcacttgctgaacacacaagttacattccattttattatcggccaagcggccatctgctgcacattattgcctataccattcccactgacagcaggaagatttccctcagatctcatcacgtcgaggacctacagtcagtgtgcctcatctactgcaagaggtacagtcttcgccagttcacggaacttcaatatgtagaacatctcaagatagcgcctggtctcccgcctctcaagcttcgagacatacttccagaagccataaaccccagccaatgtcatcaacctctcagagtagatcttccatgtatatttctcatatatacgttgtaggcctctattagaaactttcacccaatgggtggggtcttggttaca

SEQ ID NO: 10437 - DNA, 416 bp, Oryza sativa
  Clone ID: uC-osflcyp158f10a1
ttggtttttttttgcctgtaggaactagcatacactgatccaaacggaatcattctacagaacagaacaccaacatatcaaaaagggaaacaagaaaaaagctatccatcctgtgctgtccggctgtttggccttacacatgtcttctactacacctctgattaaacaaccaccattcacccccaacaacctgagtaccaacgctaaactaagaccgatacagcattttctttgagacgagggcacaatctactttacttattctcgcctaagctaccgattactcaggtttatttgtaaagttcctcaacaatctcagccttctttgggcagcggactagaagaacttttcgtagtcatcctgtgttggctgcccccagaaatccatgaaaccaatatcagtgagagacccatat

SEQ ID NO: 10438 - DNA, 461 bp, Oryza sativa
  unsure (1)..(461): unsure at all n locations
  Clone ID: uC-osflcyp158f11a1
aaactaaagctaataatagataccacataatagtcagcctggcataaatgtattgcacaaaacaccaccagttcgaaaggtgtatataccattcgagatttggtatataacttttggtatggcatgaactctctgcttcaaagttggagtttctccaatataatcaatggacgatagatggcatcagttactaagttttaaggtngagagaactattatgacttctggtgcaccgatggttgatcttgcaatttgtttgagttatctggctcgactttcagggagcctggttcgtctatggccatcgcacttgcatcggtaggaacagtttgtttcgaggaaccaactccatcagccgcaggttctgtgcccttggtgtgctctgcagcgaccctattaccatcctgatctgcggcatctgtttcagcagactctctcttaactctcacattctgaatact

SEQ ID NO: 10439 - DNA, 317 bp, Oryza sativa
  Clone ID: uC-osflcyp158f12a1
gttgtttttttttttttttttttttttttttttttttttttttttttttttttttttttttttttttttttttttttttttttttttttaatttatatttaaatataaaaaaaaaaaaaaaaaaaaaaaaaaaaaaaaaaaaaaaaaaaaaaaaaaaaaaaaaaaaaaaaaaaaaaaaaaaaaaaaaaaaataaggaaaaaaaaaaaaaaaaaaaaaaaaaaaaaagggccaaaggaaagaaaaaaaaaaagggggggggggaaaaaaaaaaaaaaaaaaaaagggggggggggcaaaaaaaaaaaacaagggaggg

SEQ ID NO: 10440 - DNA, 425 bp, Oryza sativa
  unsure (1)..(425): unsure at all n locations
  Clone ID: uC-osflcyp158g01a1
catcagaaaaagattttattagcaaagaacaggggataaattattccacatgccgacttgatgaatgatactaattatttccagtgttaaatggaattaagttggcgtaaaaaaaaattctagctgaaacaacaccagttgaactggcatgccaattggcggtacgctgccttattctatttacttttgaccgtgatacccttcggctgttcttgggataattttctatggtttaccattcaactggactttagctagcttctctccgctttcttcggcgccatccaccttaccaggaaatgacctcccactacttgtgacaagttccttgatggttgcttggatgtccttatcngccaacagcgaatccaatgtcacatgtagccggaatctccaataatgcttcgggttagttgggtcattga

SEQ ID NO: 10441 - DNA, 471 bp, Oryza sativa
  Clone ID: uC-osflcyp158g02a1
tttgttgtttttttttttttaaaacaaatgagcagtgatatctctgaactttcgcttacacatagatagcaagcagtctagtagtggaccaatccggccttctgcacgcatacagtcactcacacgctactacgctatctttacatggagaacatatacatatattgcgacatagaagtgcatatgacatataattagtgtgcacatgtgtgcatgctgctgctgcatgcagcgctagattattcgttcgcagcaggtagcgaagttgtgtgatcagttttgtcaggcgtggtccggctcaccaggaagagcagcgagaacatcaggaggagcagcgaatacatggcggtctatgtcgtcaggtggactagcgaacacttggtccggatcatggtctacgtcatcatgggggctagagaacacgtagcggtggtccggatcatggtctacgtcatcagggggactagagag

SEQ ID NO: 10442 - DNA, 315 bp, Oryza sativa
  Clone ID: uC-osflcyp158g03a1
tttgtttatttgattaaagacctttattcatgttgggatactacatcactacatgccagtttttattggtagtactaactgatcgaacgatcatgcaataggataacaatccgatggatcgatcgatcactcagctagctagctggcgaagttgcgctggttgtagcagtcgaggttgctgccgtagcctgcgccgagcatgtcgcagtagcgcttgtagtagccgatgcggtcgacgttggcgtcgttctggccgacgccgcactcgatgccgccgttgatgatgttggtgatgacgccatacccggggacgcg

SEQ ID NO: 10443 - DNA, 213 bp, Oryza sativa
  Clone ID: uC-osflcyp158g05a1
agccatacctttttttactaattagaatgtggcaggcgaatacatttacatgcaccttgcgatataaaggcaaactaactatagtaaacatgccgcaagaccgaggacacgtacaagtattggcgcgataacgactataaggacatagaccaagaaaattaaacagagcagagagccacgacgagcggggggcggagagagagatggggagag

SEQ ID NO: 10444 - DNA, 407 bp, Oryza sativa
  Clone ID: uC-osflcyp158g06a1
ccattcaaaatacatttttcaaggttcacatctaagcagggtaaagaggtgtacagactgagaacaggcccaactgcctgcctgacaagagaaacattgtcgacaacactataaatatcactcgatcgttttggtgttgatattacaggatgcattgtattcctgcatagctcctccccacatgatcagcttcgaaccttcatacctgcggctccagtgattacgataaatggactaccgaagtgaggaagaagacatgagaaaggattggatgcgttgcaggagctccgccttcacagaatcaggcactgatgctcttccttttggagtaatgacatgaataagaacatctactgtaacattatttcttcctttcttccttgcataggccctacagaaataaaata

SEQ ID NO: 10445 - DNA, 207 bp, Oryza sativa
  Clone ID: uC-osflcyp158g08a1
atgggaaacagcatatataattgatggggggggatccacaacagttaacatcctgatgaggatcagagtcaaacacatcaacagccacaggccatgaaactatttcatgcattacataataactccttagctaccaaaatactacccagaaacttcacacttgctcctagtactaagcataacacgatagaatccccttcatgtctc

SEQ ID NO: 10446 - DNA, 180 bp, Oryza sativa
  Clone ID: uC-osflcyp158g09a1
ggagcaaggattttggatttttttggaattcttaaagaattataataaaaggcattttccttcgtccattttattttgggtacttagaacactggcacgcccgcacattttatttccctggggggggagattttagttaaaattttttcaaaacacatttattttgggcctgagatcttc

SEQ ID NO: 10447 - DNA, 154 bp, Oryza sativa
  unsure (1)..(154): unsure at all n locations
  Clone ID: uC-osflcyp158g10a1
ataaaaaatataaaataaagaaatgtagaagggaagagaaagaaacaaaaatttatacagaagttacaaactgaaaaagttaatagagcagggtaaagggtacaatggaagacaaccaaaaaacacaaaccaggaaggctnttgacccaagggg

SEQ ID NO: 10448 - DNA, 232 bp, Oryza sativa
  Clone ID: uC-osflcyp158g11a1
ggaattgggattccgatttccttataagtaatagcaagatttcgtatacatcaaagttttacacgtttagtacttgttcaagccacaagaaacaagaggccaggggtgcttgcttggaatatgtggtctcagaaagatcagatatcccaaactccaccattgggtcagaagatccattttctttcagcaatgtacattcagggctcatctaccccacataggattcctcttt

SEQ ID NO: 10449 - DNA, 331 bp, Oryza sativa
  Clone ID: uC-osflcyp158h01a1
tttgttttttattagagaatattgctttaattattgatctcgttacaacttaatatctgaagagatcatctcaaatctctatttacagtatatatcaattgcttgatttaggtagttagtcacttgtgcttctggatcatttccctaacctcatccatcacaagccatgctttatggcctcctatcacttccgctgcccattctccatccttccataactggatagtgggcattttagttatattccctcttttcaccacagtctgtggaacctttgttgcatcgacaaagtagaaccctggaaattctcctgctatcttctccagtctgg

SEQ ID NO: 10450 - DNA, 119 bp, Oryza sativa
  Clone ID: uC-osflcyp158h02a1
ttttttaggttgtatatgattcggttcgtatttctgttattgtggacaagattcaggatagaaacttatattcgtagtgtactattttgtgaaatatgttctttgcacattagcccgat

SEQ ID NO: 10451 - DNA, 97 bp, Oryza sativa
  Clone ID: uC-osflcyp158h03a1
caaaaaaccgaaaaatttaaacaattccttcagaggccaaaaaaaaaaccccaaaaaaaaaaaaaaacaaaaaaacacaaaacctttccaaaccccg

SEQ ID NO: 10452 - DNA, 375 bp, Oryza sativa
  Clone ID: uC-osflcyp158h04a1
tttgtgtttgggctgtgtgtatgatttgatatatggattcctcactcagactggggtttaaccacaaattttagatgagaaccactttacaaattatatgtacaatgcaagttaaccttaacctaagtgtatgatgctgaagaagcaatggcgttttcagatatccacaagactatttacatcaccccattctccatttatttcctaagctaaagtcgtcagattcttatgtatgaacaaggtcgtgtttctgatcttcttggtgagaaaatgagcaattttttttttcaggagtaggatctgatgagcctgaacccctggaacgagcccttgagcaggttgccaatgatggccgccgcgccttcgccgacgttg

SEQ ID NO: 10453 - DNA, 411 bp, Oryza sativa
  Clone ID: uC-osflcyp158h05a1
ttgatccttttgtgcgccgccctttttttttttgttgttttttttttttttttgtttttttttttttttttttttttttttaaaaaaaaaagcgagagttttattcctttggggttaaacaagaacgccccacaagctcggttaaaacaacccaaaaaacagggcataaacctacaggattgaccccaaaaaaaaaaaccttgcgaagaaaaaaccgaacggggatcaaaaacccccagggggctcaactttgaccgaagaaatttataatgaaacaaagggcgaatcccccaaacaagggggggcccccagacttcaaagctgccacaaattaatccacaacaccggaaagggggtccgacaataaccatgaaaatcgaagagcaccaaagatttcccccattaacacaa

SEQ ID NO: 10454 - DNA, 293 bp, Oryza sativa
  Clone ID: uC-osflcyp158h06a1
gtgttttttttttttatggggaatttttggggttttattaactgatgaaaccttacacgaaaaagtaacctctatctaacaaacattggatcgggtaatgcctcacaccgttttgataccacacacccgcatcaggctgatggacacaatgatggatatttgatttaacaaactctgtgataatgctccacagtcagagatcggttgattggccacagtgaaaaatcaacaccgcggagaggctagacctcatcctgtcctccctttcgcctcagcatccccccgccgtcacc

SEQ ID NO: 10455 - DNA, 140 bp, Oryza sativa
  Clone ID: uC-osflcyp158h09a1
ggggggttttttaattttttggggtttttttttttttttttttttttttttttttttttttttttttttttttttttttttttttatttttattttttttttttatttatttttttttaaaaaaagaaaaaaggtaaaaa

SEQ ID NO: 10456 - DNA, 326 bp, Oryza sativa
  Clone ID: uC-osflcyp158h10a1
acaaaaacatgcaaaatccccttttttccagttactgatgttcggaaagagctccatatgagaattacaagccccccagctatccatactttacacggttacaccttgtttacagtttgtttggaccatgtccaggcaggaagccatatcaattctatatatttcttttctttctttcgcaaacaaatgaaaacccgtttagctacagtacaaaggggcgttggcaggcttgtaaaggaacgttttgacggtgtgagagtttcctgaaggcttgctggatgtgaacttgaccccagagggtgtatcaccccttttagggcaatgct

SEQ ID NO: 10457 - DNA, 250 bp, Oryza sativa
  unsure (1)..(250): unsure at all n locations
  Clone ID: uC-osflcyp158h11a1
accacaactttttaaggatggaattgagtagcaatactttcaccccaaaatacagtttagnacaatatctanaaaagccgcttgtttgccgcatggctggaagctgagagagcagtacacaaaaacacgagacactataaaccaaacggaacgaacganaaaatacagggcttttttgctgaagaacacgaagcggttcgtttcttaatttttagtctctctcctctcatgatgggtgatggaatggaat

SEQ ID NO: 10458 - DNA, 332 bp, Oryza sativa
  Clone ID: uC-osflcyp158h12a1
gttgtttttttttttttttttttttttttttatcagaaccataccgatatacacatataacctaccaaataggcacatgaagcatttaatatagtaaactaccaaattccatccagtcatgtcttgtacataagtgtacatgaatacggtattggccctaggcccgcaacttttcaacaggggccagatgaaggacggcacggttcaagccgacgttttaccttgctgaatatgtcaatggtcgagcagactgacctaagtctggctctcttgcccaccgcacagttaccttctcttacccgggagaagggcggttagctgcccaatggaag

SEQ ID NO: 10459 - DNA, 266 bp, Oryza sativa
  Clone ID: uC-osflcyp159a02a1
tttgttgtttttttttttttttttttttttttttttttatgacctcattcagagaggattcactgcatccaaagttctgaagggtactcgatacaatttaaacacacgtctctcttacttggagtatcacacacacacacagacatttattctcggtttacatagaagatgatatcccttctgtcaagacttgtagggtaacataatatataaaacagggttatagatgacagccccatgacagatacagtaagatctggagacag

SEQ ID NO: 10460 - DNA, 264 bp, Oryza sativa
  Clone ID: uC-osflcyp159a03a1
tttgtttttttttttttttttttttttttttttttttttttttttttttttttttttttttttttttttttttttttttttttttttttttaaaaaaaaaaaaattttttttaaaaaccccatttaaacttaaaaaaagccccaaatggcaaaaccccaaacgaaaaattttataaacccttaaaaacccaattgggggggaaaaaaggggcccccttaaaaaagggtttttttttaaaaaaaaggtttttaatgggttttttt

SEQ ID NO: 10461 - DNA, 457 bp, Oryza sativa
  Clone ID: uC-osflcyp159a05a1
ggcgccctttttttttttgttgataggatcaaaacagtgatattaccacagctttttaaggatggaatggagtggcaatactttcaccccaaaatacagtttagcgacaatatcttagaaaagccgcttgctttgccgccatggctggcaagctgagcagagcagctaacacaaagaacacgagatcactataaaccaaacggcaacgaacgaagaaaatacagggtgtgttctgtccaaagatacacgaagcggctcgtcttcttttattgttagactcctgtgcttctagcagatgggtgtatgggaatggcaatggcgatgggatcttggcttagttgatgggaaggggattgccccagcactccttgaggcagtcgagcatggggtcgatgagcttgccctggctgatgccctggaacaccttgttgcactcctcgccgggggacttgagctt

SEQ ID NO: 10462 - DNA, 292 bp, Oryza sativa
  Clone ID: uC-osflcyp159a06a1
tttgttttttttttttttttttttttttttttttttttttttttttttttttttttttttttttttttttttttttttttttttttaaaaaaaattgtcttttttttgcgcctgtgctttgcatttaaaaaaacatcaaatttcgtgtttggaggttttcaggcccttttgtaacattttcccgatcaaaactaacctttttttaattttttgttgaagttttgccaattgttaaactataaccttttttttttccctttgtccccaagttttttcttttttcccttttcca

SEQ ID NO: 10463 - DNA, 299 bp, Oryza sativa
  Clone ID: uC-osflcyp159a07a1
gtgtttttttttggatgggagccaaaaatgagccattacacctcatttggtcaggcaggagggtaaaaaacatcgttgatgcagcggcaaaagatacaccgggcaggcaatcatgagtggagagcatacaaaaaacacgaggcagtaagtgacccagggcaactagagggatacattcgaatccagaagtgcctgtgatacgataagcttggtcaagagcactgcaggatggtattgctcagcttgtacgcgtgtgacaccaagaccagaatgcgtatccttgggtgtctagaacgaca

SEQ ID NO: 10464 - DNA, 511 bp, Oryza sativa
  Clone ID: uC-osflcyp159a08a1
gcccgcggggtgcttgtacgcgagctcgacgagcggcaggatgagcccgtacagcgcggcggcgccgagggtgaggaagaagcccatccagtacttcccggtggtcaccccggcgggtcggtccttggacgcgtggaggcccagcacgacggcgccgatagtgagcagcgccacggcgttcagcgtcgccgcggtgagccgctgccgcacgatgaggcacgcgaagaagacggtgaacgcgagctgcgtggagatgaggatggcggagatggacaccggcaggtaggcgaggccgtaggcgtagacgaagtcgtcggcgccggtgaggacgccgagcaccgcgcccgccagcagcacgcgccgcggcgtgaggaacagcggcgcgccgcggtcgcgcgcgcggcggctgcggtaggacgccgacacgggcaccagcagcagcgttcttcctgttgtattgagccactcccagagccacttccctgttttcgccctttgtttaaaaagagcc

SEQ ID NO: 10465 - DNA, 101 bp, Oryza sativa
  unsure (1)..(101): unsure at all n locations
  Clone ID: uC-osflcyp159a10a1
ggtntgttttttttttttttgttgttttttctttttttttttttttttttttttttttttttttttttttttttttttttttttttttttttcaatatctc

SEQ ID NO: 10466 - DNA, 317 bp, Oryza sativa
  unsure (1)..(317): unsure at all n locations
  Clone ID: uC-osflcyp159a11a1
ggttgataggatcaaaacagttgtattaccacagctttttattggatggaagactgccaaatttcgcaaagactgaacctaacatagacaatcatggaacatgatgcaatgcactcagaaatataaatcaatgagtgcggtctctgtaaatgatattntcctatacttgatggctttatcacagcaatgacgggctgcgctgggattaagataacattatgacgcagctggcttaggtgtactctcaatcattcacagcagatagcttaagacagtcaggtcttgaatcttgaactctgaatatgcagagtatctgt

SEQ ID NO: 10467 - DNA, 465 bp, Oryza sativa
  Clone ID: uC-osflcyp159b01a1
ttgtttgtggacacaatgattagggatcacttattcattatagttcttccatgctgctctaccacagcaaaacgtttcagacaccatcaaaccagacttaaggatacacattacaggtaaatagtacacaatgaaacgggacacgaccaaggaccagaccagacaaccatagctccattggggaagacaaataggcagacttgtgaaccctagaacagcagcagctccatggctgaggacttactggccaccacggaggcggagcaccaggtggagtgtggactccttctggatgttgtaatccgcaagggtgcggccatcctcaagctgcttaccagcaaagatcagacgctgctggtccggggggatgccctccttgtcctggatcttcgccttcacgttgtcaatagtgtcggacgactcaacctcaagggtaatggtcttgccagtcagggtcttcacgaa

SEQ ID NO: 10468 - DNA, 166 bp, Oryza sativa
  Clone ID: uC-osflcyp159b02a1
tttgttgttttttttttttttgtttgttttttttttttttttttttttttttttttttttttttggaattctacaaccacaccatgaattttagggaacatatgttcgggaacatggtagggggaaaaataaaaaaaaaaaaaaaaactaatcaataataattaaa

SEQ ID NO: 10469 - DNA, 193 bp, Oryza sativa
  Clone ID: uC-osflcyp159b03a1
tttgttgttttttttttttttgttttttttttttttttttttttttttttttttttttggagcactgaacattactacttgattcaacaggggatacagattcaaacattatcataaagtcctcacaactaggcagctcatcgacaattttattcgcacaagtattttgcagacaaatttaaacaaagattga

SEQ ID NO: 10470 - DNA, 435 bp, Oryza sativa
  unsure (1)..(435): unsure at all n locations
  Clone ID: uC-osflcyp159b05a1
ttggttgtactcaacatcgtacaccaaatttattgccataaaaaacatccatgaaaacagagtagcaaggtatttacattgtctgaccattgcttctaggtcatcactcgtttatttacacataggaactgcttgactaattttataaagtggctgggtggattttcctttgaaccagttttgtttgaccattcacatccttcggtatcaattacatgtaagctcagtgcatgtctctgcaccagagaaagattttcaaagcttctggtgacaagatctccatgaataaccaccaaatcatcctgcttntacttctaatggacanattctttcagatcaataggttggngaaggatgatcaaaatgagtatcattttcatctctgatcattcgccttttcagaccatttttatgtgatccaggaaattgcccata

SEQ ID NO: 10471 - DNA, 122 bp, Oryza sativa
  Clone ID: uC-osflcyp159b06a1
cctttaatggcgcctttttttgtgttttttttgtgttttttttttttttataaaaaaaaatgtaaagaaaaaaacttagaaaaaaaaaaaaaaaggaaaatttttaaaaaaaaggagaaaat

SEQ ID NO: 10472 - DNA, 440 bp, Oryza sativa
  Clone ID: uC-osflcyp159b10a1
gtttttttttttttttttgttgttttttttttttttttttttttttttttttttttttttttttttttttttttttttttttttcccaagaaaacccacaggaaaaaaacaaaaagggggattgggccccaggccgggaaaggtaacatgggggcggcccaaaccaaaaaaaaagggggggggcttttttggaaaacccgggggcccggaaaaaaaaaaaaaacgggcccaaaaaaaaaactggggccttttttggaagcccttgaacggccccgaaaaggggaaaaccctgccttcggaccccccccaagggtaatcccccccccccgaaaataaggggccgggggggacccaccataagccccccccccgggaaaacgagaaaacccgggaaaaggggttaaaaagaacccaaaaaaagggggccagaaggcccaccg

SEQ ID NO: 10473 - DNA, 445 bp, Oryza sativa
  Clone ID: uC-osflcyp159b11a1
aacgaaagctgaccaaatataatatttttccatacatcctctataaacaacatatattcgaaattgtgttcacatatagctccacaacaatgttttggaaggacacatgtatgccttattttaccactggcttattaccacaaaataaccacaagaaattaattgtttgcttgctcacgcgtagcgtgatctcttacaagacaaaattatttagaggttaataattatcatgcaactcaatgcaagagtacgcatgtctattaattagacgttgataccactcttgtattcagagccggccgtaaagctttcggggatgacgtcgtcgacgacacggtagccgccgttcttgacaaggaagcggacggaaaaggggcccttgagcgccgcctcactcttgagcgaccaggtgttagtcgacgactccttgagcgccacccagtcc

SEQ ID NO: 10474 - DNA, 458 bp, Oryza sativa
  Clone ID: uC-osflcyp159b12a1
ggtcgtctagaatggcttgccccagtacatgaggatgtcctggaggagggggtcgctgccgccgccgccgaggccgccgaggccgccggagccggcggggtcgaggatggaggcggcggggttgatgggcccgacggtggcgaaggtgcgctcccactcgctgatcttgggctggctctgcacctcgcacgcgaactccggcgacagcacctgctccgagcagctcgagtcggcgtgcagccgcggcatcgagtccgacggccggtcgtagtacgccgccaggtccgggaacgccggccccgccaccaccggcttctgctccggcggggagctcaccgccgcgttcacccccaccatcggcttcctctcgacgccgccgccgttgctcaccatccccgccgccgtcaccgcgggccgcggctttccagccgccttctgtgaaatcggacagacatatc

SEQ ID NO: 10475 - DNA, 488 bp, Oryza sativa
  Clone ID: uC-osflcyp159c01a1
agctcaagtaatatatatgtgtagtatatatgtattttatttacatctcacacctccaaaatcttattctactacagtaaactgggtacagagatataataatactcatacaaatatgtacaacaacaagcacaccacacactgatcaacttttccttggattttttgctctgcagcaaaacaccaaggcaaaagcttatcactgctcatatgtatctcatcatactgaattatactaagtagtagtagtaactacatggctgtatagctatatgcagaccaaatctcgtcaaaattaaaatcctaaaatccaagaagaaaacaagaaggagtaacaaatcgaatgaaggtgtgcagtgcaggtaggaggaaggtatcaacggtgacccaaacacaccaagagcaagaaggatgacgaccaagaggagctagctcgagctcgagctctagccatggcgatggcgatggccagagagagggggagaagg

SEQ ID NO: 10476 - DNA, 373 bp, Oryza sativa
  Clone ID: uC-osflcyp159c02a1
agagaacaaaagcttttatttatatctgaaaagttaagctagcagggaggcaacagaccaagcttaaacaacccttgaagggcagtaattaactagctcgagtagcccatgggaaaaacccccaaagaaacgaagcaattaaaccagctaggacccaaggttcctcgcttcgaacgaacgaacatggggcccgggggaaaccggggaccatttatgggtttggctccaccttcacaggcgggagcttggggaacctggggaaaggattcttcttgaccaaaggcagcagctttttgaacagctcgggggaagcctccgcgtggtcccgcattgccacctttttttcccccgccggcgggtggtaaaacggggg

SEQ ID NO: 10477 - DNA, 243 bp, Oryza sativa
  Clone ID: uC-osflcyp159c03a1
atgacgcgacgtaagctgatccttaatggcgcgcgcagggggggccaaggaggagcgcggcgggccggcgggtgggcggggggggcccgcaggcgagggggaaccaaggagggggcagtgcggcaccggggggaggaggaaggaggcagccagcggcagcgaggcggctgcaaggggaggggcaggccgcgcgcgcaggcgagcaggagcaccgggggcagggcgggggtaaggggggaggcg

SEQ ID NO: 10478 - DNA, 386 bp, Oryza sativa
  Clone ID: uC-osflcyp159c05a1
aatcaaaccacataataatttgcaagataaaacaggtcggcttacaagttacagccttccaatgagtacctctaacgctagcataaatttaacatcataacatgctatagccaaactagctaagttccatccacaatcacaaaacttgacttcagtgacgagggaaaacaacaaaaaactaacagaaacatgattacgccattgccactagacccaacagtgttcccagagccagtagtacaaatgtaaatgagttttcacttctttttcccggcatcaccagccttggtcttcttgacaccacggatcttcttagctctgttcttgcgttctttcatttgcttgcgagattttctcaaccttggtagcaagaccattcctgatga

SEQ ID NO: 10479 - DNA, 149 bp, Oryza sativa
  Clone ID: uC-osflcyp159c06a1
ttggttgttttttttttttttgttgttttttttttttttttttttttttttttttttttttttttttttttttttttttgaaacaaaaaaaacccaggaaaaaagggaaggccagagaagaactgggttgggcgaaaaacaaaacgggg

SEQ ID NO: 10480 - DNA, 240 bp, Oryza sativa
  Clone ID: uC-osflcyp159c09a1
gacccggaaggaaaaaaaaaaaaaaaaaaaaaaaaaaaaaaaaaaaaaaaaaaaaaaaaaaaaaaaaaaaaaaaaaaaaaaaaaaaaaaaaaaaaaaaaaaaaaaaaaaaaaaaaaaaaaaaaaaaaaaaaaaaaaaaaaacaaaaaaaaaaaaaaaaaaaaaaaaaaccaaaaaaaaaaaaaaaaaaaaaaaaaaaaaaaaaaaaaaaaaaacaaaaaacccgaaggccccaccggcac

SEQ ID NO: 10481 - DNA, 459 bp, Oryza sativa
  Clone ID: uC-osflcyp159c10a1
gttgttttttaacctcaacattacggtgtaaaacggaataatagttcagcatcaagcaacagtgctcaaactaaggaagtttcgcctcgctaagttctgttctaactgcataaataaggtaatcctcattttctttctctatgtttttcatctaaagctcccggtagagtctgacccggtgtccaaaacttgatgatagcttaccgacgccattgctgtcttgagcagccttctctcatctaccgacgccctccagttctcctagccgctggagcttgctcttcctcgtcagattcaacatcaccatactgccagatctgcagcctttccttctttgctttctcctggaactgttccagattctggagagcagcctttctctccctagtatcccatctcttgcttctttcaagccgagcaagcccttcctcaagcatggtagcattgatgctggtttct

SEQ ID NO: 10482 - DNA, 369 bp, Oryza sativa
  Clone ID: uC-osflcyp159c11a1
ttgcagctgcagacgtcgccgttgcggacgccgaggtggtagcagaggcagatggtcttctgctgctggtggtgatggtggcgcgacgcggtcgtggacgacgcggcggccggcgtcttgggcggcgagctcggcaggctcatggacaggtcgaggtcgaggtcgaggttgaggtcggggcaccgcggcgcgtccgagctgccgccgctgctgctgtggccgtcctccgacggcggggacgccgcggacctggcgaagctcgcattgctcggcgccgcggcgtgcaccgggttgtgtagcctgtgctgctgcggcggcggcgccggcgcaagggacggaaaggcggcggtgctggccgtcgtggtcagc

SEQ ID NO: 10483 - DNA, 197 bp, Oryza sativa
  Clone ID: uC-osflcyp159d01a1
ctattccactgtatataaattagctagtaaggtataacagggcagtttgaccaaaggaggactatttttcagcgatgtatttacacaagaaagttactatgcgctgcagaaaccaaggaatctgtagttaatgccaattttgacccattaagtgacccacaagataaaatgttggggtacattttagaatggatctc

SEQ ID NO: 10484 - DNA, 399 bp, Oryza sativa
  Clone ID: uC-osflcyp159d02a1
tttgttttctctttttttttttttttttttttttttttttttttaaaacaaatcacatagtactttcattatttcaaacgaacataatgatacataaacacatgaaagaaattaagggagatgttgcaaacatatccgcaagaaacacgacacaatgggcgtttgcactactggacatgaacacagcttgccttttaatcacttcttaattaaaccttctgcaggtcttcctgatctccccgtttgatcccgtaaacggggggatgtcccccatcttgaacatgcccgtcacaaaatccgcaaagaatgggctctggctacctatgtaagactgaacaagagcatcaggggctccgccattgaagagctcctgatcagaatgcaggagccccttcttga

SEQ ID NO: 10485 - DNA, 431 bp, Oryza sativa
  Clone ID: uC-osflcyp159d04a1
agcgacacgaaagtcatctgatatatatttcagataaagatgttcaacacaagatagcttcagaccaggcaatatagcaccagacacttggggattcagggttcaacaaagggatatatgatcgagtctacaaacaaacaaaaagggccgatatttcgtttcccacagatgataaggatagatatatctaagcggctgagaggaaggccttcccgggggcacgagcagagaggcgaccatggcaaccaagtagcttagcattgacaccatcaggcatgattctaccctcggtcttaagcctgacgtattcatcgcggctgaacttggtgaaaccccactttctactctaaatgaacttttggcgaccagggaacttgaacttggcacgacggagggcttgctggcaggacagcatgtgggcttgcaccgac

SEQ ID NO: 10486 - DNA, 395 bp, Oryza sativa
  Clone ID: uC-osflcyp159d05a1
gttgtatccaaaaaaggggccgttccattcgacgtttagttattccgccatgaacaccacaagcgttttacaacagcaagcaacggacggagccaactcaatgacagacaaaccgcacaagacacgtcgtccacacggacgccgaccatgacaacacctaaaccgaacaatggcggagggaaaaaaacgatggaaataacacgacagggaccaaggctgcgacaccggagctcagcagctgacacatacatagactacaaatccacaggcatgacacacgcctgatccgcctactttgcacttgatggcaactctagcaatggcactgcaatagccttcctctgtgcccaagtgccctttcctatcttaagagactaaccatagatagatgcatg

SEQ ID NO: 10487 - DNA, 237 bp, Oryza sativa
  Clone ID: uC-osflcyp159d06a1
tttgttttttttttttttttgtttttttttttttttttttttttcccactccatctcgagcttattgttattatcaaataaaagaggagggggatgtaacaaccaaagaaccgaattaaatctaacgactgacatgatctaaataaaaggaaggaagctgaatctgctgatgctgctaggtgggcaggtgctgagatggaggatggatatggcccatcaaatcaaattcgaattggg

SEQ ID NO: 10488 - DNA, 462 bp, Oryza sativa
  Clone ID: uC-osflcyp159d07a1
aggggacatcaagaaagatcaacaccaggattgaagtcgaagtctcagggggagtacaaaggtgagcaaagaatagacagtatcataaaacatctgggagcacatatcacggttttgtaagctaaaaacaatacaaggctacacaatgatgttcatgtaggataatctctactgcctgtcattccaactcaaacaaattgacaacaactgacaactcatgaaaattgggagtagcaaaaattgagttcggatgggcctttgtaataatttgatatacgtgtgacgtcttcgtcacagctcagttaactgctgcctcccttctgtttgagggtgatcttgtcgcctaagctgagggcgattccttgggtcttactccgtattctgatatagccgctcagcttgccatcggcttgcttttcaacgctgatgttcaccaatgcatcctcaccaaaaacactcttg

SEQ ID NO: 10489 - DNA, 459 bp, Oryza sativa
  Clone ID: uC-osflcyp159d09a1
aaggagaacgaatatgaccttaaactacttccccaaagtaattccgattatcaaccaaccatccatatgaaagtcattggagtgacaagagaactcacagaggggggcaaatgttgacataataaagggctaagttagttctataataacaaaatggctcccacagattatgtcctctcctcgcgtaacactcactcctccaagcaaaatagttaggaagctaagcgtttgcgcccagctcaaccctcccaggatgggcgtggccacctccctgcgaacctccaccttgattgttggaataagagttgccaccaccagagcgaccacccctgcctctggtgctgtaccccctctgctggtagtaaccaggctcattatagtagtacccaccaccctaacccccaccacggtcattctggtagccaccgccgccgccaccaccacgaccattctggtacc

SEQ ID NO: 10490 - DNA, 457 bp, Oryza sativa
  Clone ID: uC-osflcyp159d10a1
ggggtttaggctaagtcggcatctcataactattcgatcctctcgcagcatcagagataattcaaacatgaattatcatatccctaaagaaacatatcgaccaatgaccatatgcatggaccgctaattaattaccagctcacacaaatactcgatcagatcatcaccctctagcttcaatattaggcgtctcccttgccgaccagatccttgcttttgttccattgcttgctcccggggctccacttggggcacccgggactgaagtacttgccctgcaccctcgcgtcgagcagctcgacgaccgggccagggcgcacgcaccgcggcgccttgtactggccgaaggacgcgccccggctgaacgcgtagcccatgagcttgcccaaggagccctccgccaagacgcgtatctcgagcgggcccatggacccggcgcacgcgccggccctgccgg

SEQ ID NO: 10491 - DNA, 269 bp, Oryza sativa
  Clone ID: uC-osflcyp159d11a1
gtgtttttttttttgtgttctttttttttttttttttttggagaaagagtcttgggatgaatgcaccaagggtgaaaggatttccaaaaatttaaacttacaaacagcttaaaactaactggatagtccggtaccactgcaaacaatctgactatagagcagcctggatatgtccgagctggtatcaataacaatcccaatcataagccatccgcacagggaaaacactatatagtgaccctggaaaacacgaaactagaaatgaaaaa

SEQ ID NO: 10492 - DNA, 526 bp, Oryza sativa
  Clone ID: uC-osflcyp159d12a1
cagagaaatacgtacatattttcattacttgatcagaaccaagtcatgaagggagtaacacaaacctcaagccaagaatcagtaactttaaacaggtactctgatactattcacaacatcaaagaggttaccaacttggttgttgttgaggtgtggattaaatcaccctgaggaacataaaaagcttgtgcacatggtgctaatctgccaataatccagatttaaattaacaaagcggttcattttaaattaaggtgcacactgaaaacaaaatgaacatgttaccattctaaaagcaaacctcatagcaccagtaacacttcctcaatcgtcattgcaagacatgattactaattcaccttatctaaagcttttccataatcttcagtacacatccaataccaggtttcaatacaataatcatctacggagtactaactagcccaatttgcacaattaattcatgtagtatataaatacaataaatcatttaactatgtatttttcggttatattttttaaaaac

SEQ ID NO: 10493 - DNA, 427 bp, Oryza sativa
  Clone ID: uC-osflcyp159e01a1
ttgggtgggttttttttttagcagtgtatttttttttataatatttttttttttttgcaaaccaataaaattaaaaagcaattatttggaaactcctgtttgtttgggaaaggtgagtttaactgacgttcgagcctaaactttgacctttccaaaaacagtttttcaaaccccaaacgggcaaacggtttgcctattcggactaaccctgagttggaaacaatccgttaatgggaatgccgccgtcgaccgaaaacgtttggccggggaagtaggaagcgccgggcatgcacaggaacccaaccagggaagacaccttttttgggtttccaacgcgcttaaaggctgttcgacgcacaaagctttaaaaaaaatccttccttggcaaattattttccaaaagggaaggcttaaagtaccaaggggc

SEQ ID NO: 10494 - DNA, 440 bp, Oryza sativa
  Clone ID: uC-osflcyp159e02a1
tttgttgttttttttttttttgttgtttttttttttttttttttgtaccaaacattttaattaattaattaacaaaaacagttctattcattaattcgtttattttgcataatccagcatgcatgcacacttacataatactccagattcaagtccagggcatgggcatgcagttaattaaacaactccttggttcgggtccaaattaaaacactagaacacagtccgtccgtccgtagaagaactcatcacgcacatttttttttgttggctacgtacatagcacagcacgtacgtttaatagtccgtttaatccgagactaattaatcaagatacgtaggtaattaattaacacggcccgcccccccccccacagtaggtgggacgtaattaattaactgattaattaattacccggggaaaagagaggggcacacgc

SEQ ID NO: 10495 - DNA, 95 bp, Oryza sativa
  Clone ID: uC-osflcyp159e03a1
ttggtgggttttttttttgggggggtcctcctttttttttttcttatttccccaccccttttactcattccccccagaaagacggaccccaagga

SEQ ID NO: 10496 - DNA, 101 bp, Oryza sativa
  unsure (1)..(101): unsure at all n locations
  Clone ID: uC-osflcyp159e06a1
tttgttgtttttttttttttgttgttcgcctttttttaaattaaacaatcaaacaaacaatataataccttacaatataatgttttctactganttactta

SEQ ID NO: 10497 - DNA, 460 bp, Oryza sativa
  Clone ID: uC-osflcyp159e07a1
gttgtttattatcaagcagcgtatatatgttcagaacaactgagaggatcttggcattactactattagagtttaaagatttgccacgaggtaagcaaagaatatacacttgtttggcaagtcttatttacaggagttgagagcgatattgctgccgcgcctagagcagcccaaaggtgttctcgccactgtaggtcatgtagaggaacccatcctcatccttgttctcctcgtaaattgcggacatcagagcagctgttggtggaagagtattcttcacaaagatgaagattgctttctcaggactgagcttgatccgcttccgaacaacatagacaaactgcccaacggtaagatcagcagggaccaggtacttttttttgtcgatgtcaggaatatcacttcttttagctttctcaacaatcacaggaattctgtcactgtacttttctctgatacg

SEQ ID NO: 10498 - DNA, 315 bp, Oryza sativa
  Clone ID: uC-osflcyp159e08a1
gggcttaaaaaaattttttaaaaaggcttttttagcccccaaaattttaaatttttaaattaaaaaggggggggcaaatccaaaaagccccatttttgggaaaaaccttagggggggacccgttaaaaaaaggtttccctttaaaaaattaaaaaccccaaaaagggggcccctatccaaaaaaaagggtttaaagctttttaaaaaagggggaccgggggggcccaaaaaaatgggaaaaacaaagggaaaagggtttcacaggagggttttaaaaaaccaggggctttaaagtcccaaggggtacaccaaagg

SEQ ID NO: 10499 - DNA, 506 bp, Oryza sativa
  Clone ID: uC-osflcyp159e11a1
tttgtttcaactggtaacgagtagagtccacacaaatcaccagtgatcatatgttggaaactatttaacagccatcagtcatacaaaatctctaaagcacaaccatgctcaatttaaatatgaaataggttccattaaacagtagtactaattctggctctaagaccattgaaacatattgctgatccaacttggaaccaaaaactcaacatggcactactaagccgcggcagtcttcttgagcttcgcaagctcttgcctgatagcacctcccctcttgatcttggccaacataaccttgaacctgtcaaagtcattgagtgacgctctcctcttctggacaattagcttcttgccccatgagctattctcccacttgttcttaacatcagcctcctccatagccttaatcaaagttgtcttcttcgggacacgtttgatgtcaatcttgatgtcggtcagggaaagccttctgaagtgatctggcacctgaccatgtcaggagc

SEQ ID NO: 10500 - DNA, 347 bp, Oryza sativa
  unsure (1)..(347): unsure at all n locations
  Clone ID: uC-osflcyp159f01a1
aaacaaaaggggtcaaggaaattgtaagttacttgtctcaagatatagtgcaagtttagtacaggtgctgaaatatgatcctcacaaaaaccagacttgtcccatctgcagggtaatttttcgcttagtacagacaccatcttccaagtggtaaaactttaataagtactaactgaagcacataaaggtttcagtgcaaggggatccctccaccagcatattcaacctcccgagcaggagccagtgaaaacacccaatctgatgcatttgttggaagaagacccaacgtattgagcttccatacacctaaacccatagctgccaatgttgagagcaatanaagacca

SEQ ID NO: 10501 - DNA, 300 bp, Oryza sativa
  Clone ID: uC-osflcyp159f02a1
agacccttcaaggaaaagttaccgggccaaaatttggaaaaaaaagggtaaaaaacccccattgttaacccaaaacccaaaattttaggaacaaaaatttgaagcccctacaacggttttatatgaaccccaaaccaccggcaggtagcaaaatgggcaaaagcccaaaaaaccccaaaataaaaaggggaaaggttaaaattgccccccagaattaaaccggatcggggcaaatgggcccaaagagggttccggtttaacacccaaaaatttggccccgtccaaaggggaattttttcc

SEQ ID NO: 10502 - DNA, 78 bp, Oryza sativa
  Clone ID: uC-osflcyp159f03a1
tttgttgtttttttttttttgtgttttttccattggggatcggaaatcttatgacggcaattatcagggattgcatgc

SEQ ID NO: 10503 - DNA, 72 bp, Oryza sativa
  Clone ID: uC-osflcyp159f05a1
tttttttttttttttttttttttttttttttttttttttttttttttttttttttttttttttttttttttt

SEQ ID NO: 10504 - DNA, 440 bp, Oryza sativa
  unsure (1)..(440): unsure at all n locations
  Clone ID: uC-osflcyp159f07a1
tttgttttttatcaaaaaggcaggcacgcatcatgcaagattctgagccatcatacgatggagaaaagtacagcagctcactcagtcgccaagcaaaataaaaacagattggggggtaattcagacataggagacaataatcttaacaagttctcagactcccactactaacaaagctcttcttgctaacacctgagaaaatcttccatgtgagatgaatatctctagtagaaaaagccgagcaccttgcctccgacgttcttccgcctcgcttcttcgtggtccatgattccggcagaggtggtaaggacaatgtacccaaactgacgggagggaagcagcctagcagtccaggactcgatttccttgacaccaacatcaaagcgtgggctgatgacaccacactntgttatggcgtccattcagcttcaaccacgatc

SEQ ID NO: 10505 - DNA, 66 bp, Oryza sativa
  Clone ID: uC-osflcyp159f09a1
gttggtttttttttttttggtggttcttcttttttttttttttttttttttttttttactttatac

SEQ ID NO: 10506 - DNA, 431 bp, Oryza sativa
  unsure (1)..(431): unsure at all n locations
  Clone ID: uC-osflcyp159f10a1
gttgtttttaaaacataagggccatggattcacgatgttcatagccatatacaggtagcaacgacagaaaactagaacggaaaaaaaaaagcagttcttgagtctcatagatggctgccatacatagacagcggatagggaacaggtccaatcaccaaagagtttcaggatgcagccttttgcatctaagctaaacataacgatatgctacccccaaggtgccatgcaggtgcctcccaatctccaatagtatttattccttttttttccctgtgtacatgctccgactagaagacttncgaattcctcaatagaaaatcgcttaacgggcactgtcatcacaagcttccagaggttccatggttgcttgacaacaatcctgtgatcccactccaggttgagaaaggctatcaattgagttaccagcacca

SEQ ID NO: 10507 - DNA, 449 bp, Oryza sativa
  Clone ID: uC-osflcyp159f11a1
accaagcaaaatggccaatgggacaataactatcctcgcaattaaattataacaggagtcacaagtcgcaaccatacccgattgtttaaaccaaccataatctcagacgtcagacgttccaagtaactagagttagacccaacacactagacggggatagaacaaaaaacattccttctgtagaaaatacatttgctgcttctacactagcctacagctactcttttttgcagcaaaatacctaacagcagtcgccgcctcctgttatttcaaatgaactgcaagagccagctgctgagctgtagacctatagtacaccatttttcctggaaaattaggaagaaagatctcaggctctcagccctacaacctgcagcgtacacatgtaagtatgtaaccactacatacctccacatgcccccatactggcgacaagaaaaaagaggcta

SEQ ID NO: 10508 - DNA, 263 bp, Oryza sativa
  unsure (1)..(263): unsure at all n locations
  Clone ID: uC-osflcyp159f12a1
agagtagcaaccatggaaagagatgttgcacttatcaacatgtagtacagtaacaaccatcatcaaatgtccctacaactccgtctctctcatgctcgaagaatataataatctcattgattgaaacacgtataggaaaatttaagcggcaattaaggaagtaatagtattgttgtagcagtagaagagtacagaacacacngtaattaatcangcgagagcgatggatggatcgcgcggtaaggtctcgtctcnacctcaca

SEQ ID NO: 10509 - DNA, 271 bp, Oryza sativa
  Clone ID: uC-osflcyp159g01a1
ggtgttttttttggggggaaacctcttacttttatgttgagagagttcagcatatacctatccagactgcagttacagtaaaacaataccttgaaaactcgactccaacttatatgtgacatactatagattgctgaaccaaactgatttattatgtgggctaccatcaatgttgttgaatccaatatcgcgtttggcatcacctatcggacccagtttgccaagttgcatttaccagccagttggaatttgaccaccagtcggcatagat

SEQ ID NO: 10510 - DNA, 175 bp, Oryza sativa
  Clone ID: uC-osflcyp159g02a1
tttgttgttttttttttttttgttgttttttttttttttttttttttttttacatttcatttttaatttttatttaacatttatttattgaacaaacaagttaaaacaccaaaatcaaaaaaaactgaaggggggcccaaacaaagcaaaaacacacaggggccaaaccatttac

SEQ ID NO: 10511 - DNA, 386 bp, Oryza sativa
  Clone ID: uC-osflcyp159g03a1
ttgtttgttttttttttttttttttttgctgaaaaatttgatgattaatttcccacttatatcatcataaacaaatactaacacatgcgaaaattatcaagcaaaaaagttccaaacaaattcatccaaacaaacaagggtaaaaaaccttttttttcccaattcccccttgaacaatccgtaaaaaccaccattccaccaaactcccctctgtcttctacgacaaaaaatcttttaaacccagtaacttaaaattaattacagagagattagcaaacataaaatggtaagaatcagttgtcgaaagtgcggcactcgtcggtctccgggttgtccttgaaaaaggccttaaacggaacgaaagtcttcttgaacttgacgcgcgc

SEQ ID NO: 10512 - DNA, 478 bp, Oryza sativa
  Clone ID: uC-osflcyp159g05a1
tttgttgtaaacataagaacgtagagccagctctaccttacagccatttcattgatagaaatgataagttacgttgttacatgattgggaaagagtagaaaaaaagaagagaagagcagcaaaatggaatgtacaaaagtgtaagaaaaaaaatactatgcattggcctcagctgattaaaggccgattttcactttgattttattactggcaggcacgagtaatttttaatttcggttttcagatcgactatcagatttccccggcacacagtcttccaatgagggtacggattaaaataatacagattatatacgatttcattaatctgatttcgattgacacagctaggatgctcaattatcacttccatttcggatgccctctctctaggcaggagttcctcggcttctttcacaagggaaccaagagtctttaggctgctactacatccagagataaccatgatgtcctcaat

SEQ ID NO: 10513 - DNA, 296 bp, Oryza sativa
  Clone ID: uC-osflcyp159g06a1
tttgttgtttttttttttttggctctactgcatgaaatatatatttacagtgattatctttactgaattagatagagaagtgcgaaaaccatacatgttaggaatgtaactgactcataaaatatgcattacaagatccaatagacgtgcatggataataaaattagctttgtgcattaagctggaacttggcttcaacaatgacagtcgggatcatgattgaaatagaattgactcacatacagcattatataatgcattccgggaactatttacaggctataaggttgtctttt

SEQ ID NO: 10514 - DNA, 423 bp, Oryza sativa
  Clone ID: uC-osflcyp159g07a1
gttggttttttttttttggtaggcgaacaaaactttcgaactcttttttttctccttggtttctatttcatttcattccgatagatagcaacaagcagttcaaacaccataaccaaagcgaactcaattcatggtaacatcacggacgaagaacacctaacactggatggatggatagagggcttctcgactcgagagagccactggacacgataacgactcgactcgatgataagatgattctgacacggatagctaaggataactggccacgatgggccccaccaatcagttcctccagttcccgccggagtcgccgccgtagccgccgccacggttgccaccgtagccgccgccgccgccgtcacggtcgccgccgtagccgccgccgccaccgtagccgccctcacggggcccgtagcc

SEQ ID NO: 10515 - DNA, 139 bp, Oryza sativa
  Clone ID: uC-osflcyp159g08a1
gtttgttttttttttttttgtttttttttttgttttttttttttttgagtaaaaaagggagatatattactgaaacacactacaaagacagcgaggtgaaactaaagcatatcaatggattgacctaacactcccctaa

SEQ ID NO: 10516 - DNA, 75 bp, Oryza sativa
  Clone ID: uC-osflcyp159g09a1
gttggtttttttttttttggttttttttttttttttttttttttttttatttttttgttcttagttgaggaaaaa

SEQ ID NO: 10517 - DNA, 274 bp, Oryza sativa
  Clone ID: uC-osflcyp159g10a1
tttgttttttttttttttttttttttttttttttttttttttcagcccaaatctcatgtattaataaatctatactcccagcattgcccccaattctccactcattgttttaggttacacgaaagggctcaaacgtgaactattttgtacatttacttcaagatgtaatcctcatgttacagttgccatcgtcctacacttaaacaacagaatttaaccacaatagggggttacatctggggtccccaaatcaacctaagtttggatattaaat

SEQ ID NO: 10518 - DNA, 439 bp, Oryza sativa
  unsure (1)..(439): unsure at all n locations
  Clone ID: uC-osflcyp159g11a1
acnatcacatgagtaagtctaactaganntggcctatattgtctggcgttacatcacacacaagtttaataacagataacttgatctaacattacatcacagtttgtcagattcccatggaggcataagcagcagtagaccaggtgtaagcttctttggcttgaactttgctgattcttgagttgaaacattgacaaaagcttgcccagaagtgaccttaattgttgcacttgtagaaccctgagaatgggcatgcaattccactagtgccttttgctttgaagacactgttttccttgactgacttgcagaattggtgttagcagctgtacgtgactttcttttcctgctttgtttagagctttgttgtgtgtttgagagcactaaattatcnagctggatttacaancttggagagggaatctggtngctgctagag

SEQ ID NO: 10519 - DNA, 266 bp, Oryza sativa
  Clone ID: uC-osflcyp159h02a1
gttcaatatgtacagataaaaatacattgatacatgacacggatagagccatgcaaaccactgatttgaacacacaaagggcaaggatgcagagaaaatcaagcaacacaagctgaactaacgggcccacctgtcagcctctcactggtcgaggccggagactcttgtgaaaaacaggaacaccacgcatgcagaagaagacaaattattacacacacaaatcgacgacacgggggccggcgaagtacggcgaggtcgttgccgcc

SEQ ID NO: 10520 - DNA, 397 bp, Oryza sativa
  Clone ID: uC-osflcyp159h04a1
ggcaaaacaatatgattgattatgttttatttcagttgctagtaatatgtcatagttgtagtttgacataaagaaggaagcaaaaaagataaattagcctataaaaacataactaacaaatgtagacaaatcattcattcccattacattaaaaatgatctagtctacatatggacggatgtaagcagagttcagctcccaaatctttagcgatttggcagtgactctaacatttgtggcattgttgaaaagaaagattttggccgactcgtaaatggctttggtgggatacacacgcgaggtaatgcatgtcctccctccttgagcgaagccctcaactatggagtgatcaaccaaaatccttattgacaggttttcgccatttagcacaggtacc

SEQ ID NO: 10521 - DNA, 429 bp, Oryza sativa
  Clone ID: uC-osflcyp159h05a1
gcacacggaaaagaccaaggtatatatatcaccgacagcaacaagtgagtggtccacatgacaaaatgtatatagagcagagtaccactggacaccatttcccaactacacaaacccaggcacataaagcagcttccaaacataagacaatggaagataataatatcgtctaaaagaatcccaccgggtaaatcctgaaatccctggagcacactctgcacaccccctgtaccgcttcatctgtatgactcggtgcgcttcggcttgctttggaccaccgcttcgatcttgtcgacgacttctggggttagcagcggaatgacatcgagggccttcatgttttcaacaatctggttttcttttgtggctccagtgatcacagatgagacgtttgggttcgatgcgcaccacgcgatagcaagttgggct

SEQ ID NO: 10522 - DNA, 276 bp, Oryza sativa
  unsure (1)..(276): unsure at all n locations
  Clone ID: uC-osflcyp159h06a1
nttgttttttttttttttgaacggaagaacacnatgacattatataatggtggcacagacttgttttatgtgaagagacacggactttaggtgtgtgttgcatatatacattacaagcgtttgagtaaaaaaaagaggactcacatatttacatgacacagtgaagcgtggctgcaagttcgtatgctcgtcggaagcacacactaggaatttcactcaccagctgtttgatgtgcatctatgttatgcacacttcagtgatgtatcatctacatg

SEQ ID NO: 10523 - DNA, 451 bp, Oryza sativa
  Clone ID: uC-osflcyp159h07a1
tttgtttaatgttattgtttttttaatttttgttttattttgttcaaagttttatatttaattttattgtttcatgacacttttagtgccaggaaaagcacagggtttaccacaaaaaggccaaacacgggaaggagcttaacaaaggcaaggtgacaacaatggaaaaaggcatttccaacccccaaaccaaacagggggggagaccaggtggttgggccccaaaagggggaaaaaatttaggcaaggaacctcaaaaggggcgaaaagtttttcccggaaaaaaaaaaagctttgggcccccaagggaccccctgaacaggttttccgggggggaattcgggggggccaaaaaaaactgtaaaggggcccaaaaaaatttccaaaaaagggggaaaccaggggggccttaaccaaagggcccccggaaaaaaaaaaaaaatgcccccct

SEQ ID NO: 10524 - DNA, 391 bp, Oryza sativa
  Clone ID: uC-osflcyp159h09a1
ttggttttttttttttttttgttttttctcccctcttaaatagggtgctcccaattccataaatgtcatgttaggaatcgtacaaaagatttaatctaaattcgataaagatggatgagctcaggatgctccattattccaataacaaacagaagcaatagctgcgttcacttgaataaaactattgcggaggtggggaattaactcagctatcagtatcagtatgtactacttggaatgtgaaagccagtgttagaacaaaattgcagaaaccaattcgccccaagaaaatgcttcaggccttctttgtcaccaagcgacaaggtcgcaggtagttttatgctatgtacaccatcacaaacttgactcatgcttccacaagtccttgact

SEQ ID NO: 10525 - DNA, 481 bp, Oryza sativa
  Clone ID: uC-osflcyp159h10a1
gcttaacattcaaatatggccatctgtccattccctcttcaaaagtttaaaccatttctgggtcccaaaatattacagaagaacatagcacgaactcaacacgagcaatacaaaacttttacaaatcgatcttcttgctgcccccctatgcacaaatcttcagaaatcgctgacgccctctctcagcagttgatgccgcactgcctgacgtcagggcccctggccttgatggtgaagggatcaatcctgacccagagcaaggaaaagatggaggcgagcagcacggaccagatgacaacaatggtgggcgtccggttctgcctccccatgagccccttgaggaaggggtagaggtggacgatgacccagaaggcgaagaagagctttccgaagagcgggccccacgcctcggagccgttgttgatggcgtcggagacgccggcgacgaccccgatgatgttgggatgagcaggggtgggcg

SEQ ID NO: 10526 - DNA, 146 bp, Oryza sativa
  Clone ID: uC-osflcyp159h11a1
ggaatcgggtatactatccagtttaaaagataataaaaattgatcgcaacacatccagatactacgatggccattgctgtactcggcgcataagcaggacatattattccatacactgatatgatcataacagacactgttacaag

SEQ ID NO: 10527 - DNA, 280 bp, Oryza sativa
  Clone ID: uC-osflcyp159h12a1
gttgttttttttttttttttttttttttcttcttctcaaagtagggtagcatctttccttctttcaccattacataagcttaagcaataacagataacaaatcctcctcctcctctaggtaaaatattcaaacacaatacccttataagtacttattattaggaaagtagcgtgcatgggcataaatggcagcggggggcaggttaagaatcacaatgctgagcagcgaggaaacaaaacaccataattgggacaagagcaaatagccctccgaaagggg

SEQ ID NO: 10528 - DNA, 218 bp, Oryza sativa
  unsure (1)..(218): unsure at all n locations
  Clone ID: uC-osflcyp160a01a1
ccngggatcttagggatggggcngtaacacattttttttttttttttttctttttatctaccatattttattaacatcatatccacctaaccctcaccaaaaaatacaaactaaaaaactctctcactctcaaagcccaaaaacaatctaacccctcttatcaaaaataaattcctcacctatcctacaaaaacaaaatacgggggaaacaagcaccc

SEQ ID NO: 10529 - DNA, 479 bp, Oryza sativa
  Clone ID: uC-osflcyp161a02a1
agagagcctctgcacgatccattatcccacataattatacatatcgaacaacataaacaaacaaacaaacaaatttacatgaacatactgtaattaattattatacagcccacacagcacacaacacaaacaccatggattaattacaaacacatcgatcagcctcgtgtttaatttattccgatttccgaggcaaggaaaggagcagaggtagtagcaagcaaggaaattaagcagcagagatgatcgtgatcgacgccggccgccggccggccatcacatgatggagcaggcgttggcgttgtcctcggtgtagcaccacggcggcggcgggcagacgggcggcggcggccacacctgcggcggccacggcctgatgccgcagccgcagttcccgtggccccccgagcacccgcacggcggcggcggcggcggcgccggcttgcagacgcacacgaaggcgtgcgagcacccgcacg

SEQ ID NO: 10530 - DNA, 302 bp, Oryza sativa
  unsure (1)..(302): unsure at all n locations
  Clone ID: uC-osflcyp161a03a1
acgcgacgtagttgttccttagaggtggcgccttttttttttttttttttattttttttaannnngtgggatgggccaagcacaagtatgtttatagagttatacagtatattactgggggagaggtttatatcatgcttgttcggttccaagaagttgggtagatacatgaaggaaaagaaagatgaactggtcgaaggttttccagattgaaaataagggaattaaaaaaaaaaaaagattgcagatattgggggaataagcagttgacctagtcctatctttaggcatattggaggaat

SEQ ID NO: 10531 - DNA, 478 bp, Oryza sativa
  Clone ID: uC-osflcyp161a07a1
acttacattgacatacaccgcgcttaaccgcttaccaaagcaggggccaagcgaaggcaccccttcacatgatcacatatatacttactcgtgacagggaaaaatgcagaagcccccaagttgccacctgtggccacttggcccaaattacgtgctgctacttagcttagcttaacctacttgaatccgacgagctgctgctgctgctgctgctgttcatcatagctcgaggaagacgaactcctcgatcgccgggatgtggccgatgtgctcgagggtctccttgtcgggctcctcgtcgacgccgatggccatgatggcctgcttgccgcggaaggtccggccgacgctcatgaagctgatgttgacgttcgtctggccgaggatgttgccgaccttgccgatcatgccgggctggtcgatctgccggcacaggatcaggttgccctccaggctgacgtccacctcgtagggcccg

SEQ ID NO: 10532 - DNA, 119 bp, Oryza sativa
  Clone ID: uC-osflcyp161a09b1
cggccggattctgggtcgcccacgcgttttattttccctcgcggctggagagtgagagattgtcgatggccagcatatagatgctcagaagccggtggaggacggtggaggcgccacca

SEQ ID NO: 10533 - DNA, 176 bp, Oryza sativa
  Clone ID: uC-osflcyp161a10b1
tatttaaccgggagctgcaaacgatgcaagtttttgatcacccaaatgttgcatgcttgaagcattacttttgctcgactactgtgaaggaggagctataccctaactagattgctgaatatgcgccagaaacttgttcatcgtggtattagacaattccaataagatgagccaac

SEQ ID NO: 10534 - DNA, 316 bp, Oryza sativa
  Clone ID: uC-osflcyp161a11b1
ttattcaaccacccgcatccacacaccgcaccaccaaccatcgaccgcctcgccggagaggagagagaaaggaagagcgcgagatggaggcggcggcggcggtcggccgtgcatctgggcaccttcgaagccgcagatcgcgacccaggccgagatgtcggaggcgcgccttccactgccctaccgtgaccagtgcgcccaccttctcatccccctcaacaagtgccgcgacgccgagtactacctcccctggaagtgctagcccgagcgccactgctacgagaagtgccagtaccagcttgacatggagcggatg

SEQ ID NO: 10535 - DNA, 460 bp, Oryza sativa
  Clone ID: uC-osflcyp161b01a1
actaacatgcacaaagatcccgtcagctactagtgaatccaatgaaggccaatcaaaacaagacaaactcagacaccagtaaaagaacaaacagcttactgtcaataacaataacaatgtggcttcttaactacacataagaatgttgcctgtcaagcatcaaacatgtacagcaccaaacatatctgtcttgggagtaatatgttatatacagcaacaccagactttacacaccaggcacgacctttcttgcaccaacaaacacactacgcacttgggagggtgaaagaagcaaagcaaccactgatgaacactttcacgtttgctcgttgtgaatcgaaaatttctttaggccccaaagcacccgatgagtttcttgggagcatggccggtggcacggtacttggctgccatctcctcggcctttaggacttccttgccgcgctttgcctcgaccatt

SEQ ID NO: 10536 - DNA, 360 bp, Oryza sativa
  Clone ID: uC-osflcyp161b02a1
aagaaaaaaaattactcctagactacgggggaaaaagatttattaacatccgggaaatgttgggacaagattttatattaaaaaacctttttgttcacatacccaatacgaaaaatggggggaaggcacaaatacaaataaaaaaattcccccaccccccaccattgtggattggggcgggcccaaaacttagttttcacccacaagaaaattaatccacgagtttatggcccagcattacttttcccataattgttaatccaattttggaaaggggtgaaggttgcccaccggaaacgagttttgacgatgcccatgtcggggatgacaaccagtatggttttccaggggggccaccac

SEQ ID NO: 10537 - DNA, 410 bp, Oryza sativa
  Clone ID: uC-osflcyp161b03a1
gggggggggaaggggggggaaaaaggggagggggaaaaaaaaaaaaaaatttgggggttttgggagaaaaaaaaggggggggcttgaaagggaaaacacaccacccctttttttggtttaaagaagcaaaaaaatttttgaagagggggaaaaatatggggggaaaaaaaaaaaggaggggttcaaaaaaaaagggaataaaaaaaaaggaaggggggttttttaaaacaaaaaaaagggggaaaaatctattggaaaaatttgaaaaattttacaaatttggggttttttagggccctttttttttagggttaaaaggggcaaagggggagggggttaaaaatttggaaaggggagggggggccccggggtaaaaaaaaagggggaaatttttaaagttttgggggggg

SEQ ID NO: 10538 - DNA, 386 bp, Oryza sativa
  Clone ID: uC-osflcyp161b04b1
gtttattcctctccccaaccctagctagctccccctccttccccggcggcgacatcgacgatggcggcggctgcggcaggcggcggcgccccgcgggcgctctcccagcgggagcaggacatccagatgaatgcttgcggtggacgtccaccttggtaccaagaacttgcgactttcagaatggagcgctaccgttacaagcgccgatccgtcggtattttcatcattaacctttggaaaacctgggagaagcttcagctggctgccagagggattgttgccattgagaacccacaggacattatcgtgcagtttgtttggccttaaggtaagagggtctgtctcaaggttacacagaacacccgagcttatgccatttgcttgca

SEQ ID NO: 10539 - DNA, 310 bp, Oryza sativa
  Clone ID: uC-osflcyp161b07a1
acgtgatactctatccattttttcgattggccccgaatccatcagatatgctctagatacatatcttgtgtgtatatagccggagctttgttttcacatatcctcacccaacgataattgcagtactcttacaataaaaccggtcggagagggagggaagagattattacatatgtggtaagagcagacgccattgagatggttcataaccaaattgtaaaatcaaaatctatagcatattatatattggtatatcatcaacatagcccaaaacaaagctgcatactattattataggcagcaatccacc

SEQ ID NO: 10540 - DNA, 530 bp, Oryza sativa
  Clone ID: uC-osflcyp161b09a1
aacttaaggttgtcgtctcatagacctgtagaatttaagaatcacataactctttgaacagcagcacagttttaacctaccacagtgtccagtagtgaccaaatccataactaacagtcaatagaatccataactaatatttcctatctccagttcccttccatcagaccacgggcagaaaactgaattaatggataaactctaccattttctacattcccaatgagtatactcacttaagggcaatgatgatgagtacatgagatagctcaacttaaattggagaccatcttgttcagaagtttcagtctttcacccacactggtaacttgacaaacaagagccacacatagtggactgtttctctccatactcctaactccttagtgacatgcaggagtactgcatgtttctaatatgtgatcatcattttccttttttcatcaacctattgtccttatcagcttgagaagtggcttatttcatgtcagcactaacacagtagctcaaacgtactttcatgtataaag

SEQ ID NO: 10541 - DNA, 206 bp, Oryza sativa
  Clone ID: uC-osflcyp161b11b1
ttttatgcatccctggaaacacaattgccgtgcaagcagacatgccatatagcggcttgtcatcttttgagacagcatttctatcaaagtttgaatgttctcagaagcctaatccattactggatcatttaacctatgtggacactcctggtgttctatcaggggataagtcatcgaatacagcgttactatagtacttcactgga

SEQ ID NO: 10542 - DNA, 495 bp, Oryza sativa
  Clone ID: uC-osflcyp161c01a1
cggcaacatcccccaacatctttgattgtcaatcaatggttcaaggcatgatcctcatcacaatggcactggtagatcaaaggctacactaacaagaatccaagcatgatcgcgatagcgggttcgcggcatccaccagggaaaaataaagagggaaaaaagagcaaaaaaagaaaaggttcctacatgaatgaacatactgacagcagacatcaaatatccttatcctcctgccagatggctgatgctcttactacagccatatctcttgtgaaacaagcatctatgagaatgacaggcaaagctggagaagcactagcagaagcatcaagaggttgctgcttctaacatgctgcagcttccacgagaaggccgagtcaacctcgatcatgataccgaatctgcatgttccggtgctggggtcttggccagtgatcgttgcgaggttcgagaacccacaggcgacatcggcttgatcgttcttctggtagtagc

SEQ ID NO: 10543 - DNA, 403 bp, Oryza sativa
  Clone ID: uC-osflcyp161c02a1
atctcaaccaaattggggagacgagctttttttttttttgaaagaacttcacaacggcaagcattttacaaactatttgttgattgaatgggaaaacgatcagtacacaaacagacatgggcgcaaaaactttttaagattttaagcttgacaaggaaaggcaaggcaaattcctagtacagaaagggaaacttttgtctagtcaagatgggtgacccgagaaagacatttgggggggatcaaaattttatgatcaaagctttcaaaacccggaatatctcctcatatacatcttaagcgggtgggaaaacctttttccctgcaccaatttttgaccctgccggaatgacctttaacacattgaaccctacgggttttgaaggggcctgcactggccaatgaa

SEQ ID NO: 10544 - DNA, 499 bp, Oryza sativa
  Clone ID: uC-osflcyp161c03a1
gaagggactaattaagcatagctgaatagatagacccaccagaagttcagagaaccaactgaacacatggcaaagcctgaagattcagttattaatcgtatacggatacagagcagttgttgcaacagggagaaattaggtcggagtgacaaaatgggagagaaaaaaaacagagaggaagagcctagtgagcgtcttcctcctcgcagtgcttggtgtacttggccgggtccagcagggcgtccagctccgacgggctgctcggcttcaccttgatcatccacccgtcctcgtacgggcttgagttaatcaggccgggtgtctcagagagcttgtcgttaacctcgacgacctcaccggagatgggggagttgatgtcattggtggccttcacactctccacgttgccgaatgcacctccctggctgaccttaggccccgcctgcggcagatccacgaacaccacctctgccagatggccctgagcatggtctgtaat

SEQ ID NO: 10545 - DNA, 289 bp, Oryza sativa
  Clone ID: uC-osflcyp161c06b1
aagtgatttataccaaatgcccgtggcccaggccttgttacctttgggccggatcgtgttatggagttctgcaacaacaatgacttacagttaattgtgcgagcacatgagtgtgtgatggatgggtttgagcgttttgttcaaggtcacttaatcactttttttctcagcatcaaattacttgtggtacggctaaccaatgtcggagcaattcttggttctaggatagagatcttggagtagtttacgaaactttatccattcttttgctcgtctgccattacaattt

SEQ ID NO: 10546 - DNA, 401 bp, Oryza sativa
  Clone ID: uC-osflcyp161c07a1
agcaaatcgccccatgcgaccatgcgtgcaaatcagttggagcacaaatttacatgttacacccacaccctacacccatgcataataatacatcgtatatacgtacgtacatacatacccctttcgatcacacgcaccatcgatcgtacaaaggtgcgtacatacatacgtacacacatatacgcatacgcacgtacatacatacataattaaaaactcggaattaattaaatacgtagttgatggcatctctaatggaacttgaggctggtgaggatgttgttgtggacgggaccagcgaggtgatcaagcaggttctggacggggccaaccccggtgaagagcgcctggacggagaaacctaggaaggcgagcatggacagccctccatttttgaactc

SEQ ID NO: 10547 - DNA, 463 bp, Oryza sativa
  Clone ID: uC-osflcyp161c08a1
agggacatagaaatgcaaaacatcatcccccaacaggtagtacatgattacatgaagaaaataacaaaattggcacaaatccataaacaaaatacactgaagattagcttgcgcctgcctattgttcttaccccaagaaacacgacattaacaaactctgcccccccaaactcgaaggggtccagtcaatcccttctttctgcctatctgagcaaataacattcgaatgaacacattattccctggccgctaacttgcctctaatttaccaactccttaagtatattcacatctgatctgatgctaatcagtagggaactgaatggaagagagaaacaaagttacaggggttccttcattttatcttgttctcaatgcattgggcttaaaggagcatattagacttggcaggcaatcttctgtagagtttaagggacagagggcattctgttgggaaccgggg

SEQ ID NO: 10548 - DNA, 396 bp, Oryza sativa
  Clone ID: uC-osflcyp161c09a1
gattaattagggtttggccctttttatagtttttttattaagtttattagaaataatttgaaatattggtatattttgaagaataagttattaattgtatacgggtacagaggagaagatgaaacagggagaaattagggtggaggggaaaaaagggagagaaaaaaaacagagagggagaggcctaggaggggggtttcttcttggaaaggttgggggacttgggcggggtcaaaaaggggggcaagttcgaaggggtggttgggtttaacctgagaaatcacccgggcttggaaggggttggagaaaaaaaaggcgggtgggttaaaaaggatgggggtaaacttggaggaaaaaacggaaaaggggggagtggttgttttagagggttttaaa

SEQ ID NO: 10549 - DNA, 308 bp, Oryza sativa
  Clone ID: uC-osflcyp161c10b1
gttccagagagagagaagggatccatcgacgcgcgagcgctttgcttagattccttcgtcgccggcgaatccgtccccttcgcgccgcccgcaatggcgaatgcagcatctgggatggctgtggacgatgagtgcaagctcaagttcctggagctgaaggcaaagaggacctaccgcttcatcatttacaagatagacgagaagaagaagatggttgtcgtggagaaggttggggagccccgactgaactaccacgattttggcgctaggcctcctgccaacgaatgcagatacgccaatatttcgac

SEQ ID NO: 10550 - DNA, 148 bp, Oryza sativa
  Clone ID: uC-osflcyp161d01a1
ggaaaaaattcacccatatttttgggcagaagcccaatttatttttgcccaatgggcacactcagcatcaaaggggaaaaaatgaaactgaaaataaaaataaacaaaagttgttggaggagtagtagtacacttgaatcatgcccaa

SEQ ID NO: 10551 - DNA, 532 bp, Oryza sativa
  Clone ID: uC-osflcyp161d02a1
gggggtatacaaaataatactataattccctatcttaaaacaaaagcaagcacacgcactactacgtcattttagctaaagtattttacttcaataattcaagacaactcaaacttagttggcacacatgtactccaccccctatcactagagttgttttcttttttgtacaagatcatcctaacattcccacaaggacataaagaaacagcagaaccttcccgggaaaatttcactgagacaggtgcattccgtgcacgtacaataatcatcaccatcatcgtatcatccaacctacaggaaaacgcaaattcaaggtactcttgtccaaacctgtaggtggccagtgatttgctcccatcggctacaactaccagactcaaaaaaactagacacaggtatgatgctaataagcttagcatgatcgactgatggacagacagtaataacaaataggaaacggggggaactatatgtgtcaactcgatgaactctataatatatggatgatttccagcgcccttctggcaaa

SEQ ID NO: 10552 - DNA, 406 bp, Oryza sativa
  Clone ID: uC-osflcyp161d03a1
cccgaacaaactcatgcgagggacatgagagtttgtggagcattcaccaggcaagagggttacgatccagattaattacaggcatcgcccctcaataggacgagttaaaaacagaactccagtaaaagaacagtttaccacgtaatggacagcatcggggactattttactttccaggaagaccgaacacattttgatctgccaatggatgaatagcagcatagctagtctgcacctaattaagcatttggtggccaaagttttggatcttgagttgtgtccacagaagttggaggcaaccactgccacattgccatcccttggaatgctgcgggcgtaggagcatttttgttgcccagagtttgattaggggggataaatggagggaatgcaacgggatggaatg

SEQ ID NO: 10553 - DNA, 354 bp, Oryza sativa
  Clone ID: uC-osflcyp161d06b1
attgtgaatggtgggtccccagggcttaagatcagcaagatcgagaacaagacgtcgctgagggttgtccagaactgtgacattctgctggaggacgtgttcgtccctgacgatgaccgtcttcccggcgccaactctttccaagacctagtgaaggccctctctttttcttgcgtcatcgttgcctggatcagcatcggcattgcagcaggggtttatgatgcatgcttacggtatctgggggagaggaagcagttcggggcgccattagcggcgttccagctgaaccaggagaagctagtgaggatgctgggcaacattcaggcgatgtggcttctctgctggcgtctctgc

SEQ ID NO: 10554 - DNA, 371 bp, Oryza sativa
  Clone ID: uC-osflcyp161e01a1
gagaggggtctgaatattcaacattaggctgcttgctattgcacatcatcagaacattaacaggagtgcacactactacattcttcttccacttcttctttttggaattttcctagacgaactctagatgaacattaaacttacaaggcaacactgaacaaaggttgcattttgttcatactttttttagggtcattttggtttatactatacaaaaggacacaactaaattcctagataaactctagggacaaacccagactttgagtagaccacaccagcagcagcagccgggaggaaggaagcaaagcaaaacaccgcggcgcaaagacgcaatgcttttgctacatcctttatttttgccatcctag

SEQ ID NO: 10555 - DNA, 443 bp, Oryza sativa
  Clone ID: uC-osflcyp161e02a1
cttgggagatgaaacctgctcttctataatcccaaacacaccaagcactatataaataccaccacattgtatatgtacatatctagcagagcacacaaaggctcatccttattaacaccaacaacatgatgagcttccaatgtagcattaccagatgatagggcacatacaaatcacaccagaatgcgcttccaatcaaacccaaatgtttaggccttgcgaccagtagtatacacatataccattggttctctctctgaaagaaccattttacagttgcaagatgcaatgttcttgcttatttgaggtagtttcagctttctaggccggaaccgcctcgcgcagtttgctgctgtccgctgatggcgtcaagctgtcgtagtattcaacaaggacctttcagccacccgggcacatgaatccgtcaggggggctctggcagt

SEQ ID NO: 10556 - DNA, 340 bp, Oryza sativa
  Clone ID: uC-osflcyp161e03a1
ggtgtcatcaatcaataatagttacagtattcattccatggagtagtaggattacaacaattaaggacgatgaagagaaaggggtggctggcgatacacatagagaggcaaagcagggggtagcttagttacaacttacaaacgaagctctgatcgatcaagtctgatttgattgatgcagctgaagaagaagaggaagaagacgacgatgatgatgcaatcagctgctgacgtacttgtcgatgatggtggcgagggtggtcttggggacggcgccgatgacgctctccttcttctcgccgttcttgaacatgaggacggtggggatgctccggatgcc

SEQ ID NO: 10557 - DNA, 285 bp, Oryza sativa
  Clone ID: uC-osflcyp161e05b1
attttcttctctttctcgctgcgattagagaattcaccttcttcttcctcctctcgcctcctacctcttgctgcagcgcacggcgccgcgccgtcatctcgagcttgtatccttggtcttcatcttctctcaccttcccttgagaagatttgctattactagcttaatatttctaggaaagaggagaagaggagaggagaggagagggttggaacgcaacgttaggtgggggcgtgctagggaagtaagaactagaggaagggaggcccaactgttctatccttc

SEQ ID NO: 10558 - DNA, 353 bp, Oryza sativa
  Clone ID: uC-osflcyp161e07a1
atgagaagctcctttataatttggcatgtcaattcacatccagtcagcaggagataactgagctagaggttgcaagatcctttgccagcatactgcatatctacatcacagggtgctaacataaagacgatgaaccaagagagttctagttgggcattaatctagccatgcaaatctaagcagcctcatgcacatatgttacatagcatggccaacattgaccaaacatgttgcatcctatcttgaatctgtcagttgaagacaaccagttctttccatcaggccactttcacgtttgtcttcagcctatttgcagcctgcacgaaaccaaccatgaccttgaactatccaat

SEQ ID NO: 10559 - DNA, 116 bp, Oryza sativa
  Clone ID: uC-osflcyp161e08a1
aggatcaataaacgccttttccctgtacacaggaaaccaatatcttgagactgcacaacggttaacaaagtggactatatagcatgcgatctgtaagagagcaatgcttctttgcg

SEQ ID NO: 10560 - DNA, 247 bp, Oryza sativa
  Clone ID: uC-osflcyp161e09a1
aatatagtgagcagtatccctttcatggatttgtttgattacaacaattaaggacgatgaagagaaaggggtggctggagatacacatagagaggcaaagcagggggtagattagttacaacttacaaacgaagctctgatcgatcaagtctgatttgaatgatgcagctgaagaagaagaggaagaagacgacgatgatgatgcaatcagctgatgacgtacttgccgatgatggtggcgagggtg

SEQ ID NO: 10561 - DNA, 432 bp, Oryza sativa
  Clone ID: uC-osflcyp161f01a1
gtgggacatttcacaaacagcatggatacctttgtataggaaatgccatcacaagtttgcaatataaagatatacattaatcaaaacatcaagtggcaaaatttagttctcgcttatctttgaaagaaacaaaatttaactcttcatcgtaatcatcgtcatcatcatcatcatcgtcattaacctcctcaaaatgacctttcccagcctcgactttaccatttcgattacttgtggtgcatgcgccatctaacaaactgtcatgcccagcatcattttgtccatgtttatactcatttccagtaccatttatttctaaaccatatgttgttccatcgggttttgcttccagctgaattgcacaattccctgtcaattcattcgcttctttttggtcttcaggagttttggcaagagaaaagaaggatattc

SEQ ID NO: 10562 - DNA, 472 bp, Oryza sativa
  Clone ID: uC-osflcyp161f03a1
gataggttgacttcctgaaagctatggatgcatacaaggaaacgatggtagataaggaggaaggaagcaaattaacattggagcatacaaagtaaagcgtttccactgtacagctcatgtgaagctattggttggtatgcttctctttcttccttgcacttttgtctccctcatatgaagaaagaaatctaagctacctctcttctgtacagaaaccaaacatatcccgactcctgaatgatgtataggttcggacgttcattgctgtcgacgacatgtttacagcttgccttcttgctgcaaaagctttataccaacagtgcttgagcttttgttgaccatcgtatttcaagttatccttgggttaacttcaatcgtggaacaacgttcattgcttgcagctcctggaataaaagcttgcaagcatacggcatcctcattttggcatatttctccatttttgacatgaaca

SEQ ID NO: 10563 - DNA, 392 bp, Oryza sativa
  Clone ID: uC-osflcyp161f06b1
gtttatttctggaggcgccttgatccagcagttcatgatcttatcatttggatctctcgcaaattctacaccctacctgggaggaattctattggtaattgttcttgcctggttgggtgctgtaaggtcccttgactcacagttctccccactggctaagcaagagcttgagaaggagaaattgctgaaagcaaagacggtcgaaacaactgctcatgttgttgggtcaggaaaaggttctctccaagaaactctagccagtgagaactttgcgaatggttcggccatcaaagtgtctcacgaacctgagagtactaccttggagaagactggccaacaatctaatcagttctttgccttgcaaatttagttagtattagcttttccgtggg

SEQ ID NO: 10564 - DNA, 318 bp, Oryza sativa
  Clone ID: uC-osflcyp161f07a1
gaacaacttgcacgagaccgtgcgaagttctattgatagagtaggaaaaaaattacaagattacaaccctggagaatcgtaaccaggaaaaaggaaaaaaaatataccaccacccacacatcgacaacgctaacacacaagcccgggagaaggctagcaccagaccggccgccgttagaccaacaaaggaacacagacgagatcgccccacctagggtatgccaaaatgacgtcttcaagaagagaaacgacggaaaaccgccgccgccgtccgttggggctcaaaagagccaagagcgggctttcgcccggcaacca

SEQ ID NO: 10565 - DNA, 289 bp, Oryza sativa
  Clone ID: uC-osflcyp161f08a1
agacaccaagctacgcgcaaaaaaacgtgttaagatgactaaacgcgttgttatacagcaacaaccagacatggaaaaagaaaagcaataactagttcggaatggtggccgagccaacgatccctgcatttcatgaattcagagaagatgctctgcgagtccctaggtattttgctctcatattgccggtcggatagatctgatttcctatgaacatttatttggtgctaaagtccgctacgcagaataaactggaaacagatcagccgtgaactttgggaacaacttc

SEQ ID NO: 10566 - DNA, 246 bp, Oryza sativa
  Clone ID: uC-osflcyp161f09a1
tttttgttgtgttttttttttgaaaaaggcaggtgccctctcggagacaaaagttggatacgactaaagaagggaataaacaacagagcgttctatggactacaaagggaatgtgcaacaaacattaggctattcgatggactgctacaaaatattcattgaacttaagtcgcccgcatggccaaaatgaccattaagcagactttgtcttggacagaaacaaaacgtttcccaactcctgaggga

SEQ ID NO: 10567 - DNA, 207 bp, Oryza sativa
  Clone ID: uC-osflcyp161g01a1
cccttaaacaattttaaataaatttatgaaataaaactacacacataatgttttagaaaccccacgaacaaacggaaaaaaaataatggcatacaaaaaaaccggggctaatccaaagtgcacacacccatagacaagccagcagacccaacaatttttttcggaacacgggggcccccccggggaatcccggcccggtacccgaag

SEQ ID NO: 10568 - DNA, 330 bp, Oryza sativa
  unsure (1)..(330): unsure at all n locations
  Clone ID: uC-osflcyp161g02a1
gttacttgatagcaataacgaaaaacagtttgcaattcaaaaggcagagcgcgtgacagatccgacaataaggcccagtacaaacaacaaaaaacaagaaccaacattttttctcactgctcatcagaaccgatttacagnctctctctctctctcactaccaaatcatctctcatcttgctgttccaaagctttatgcgttccagttatgatgctcttcaggttgaagcagcggcagcgacgacatgatctgctgcatctcgagggtgaagtcgtcgtcggtggtgacgacggacgacggccccggagacggagccgacgacccgccgg

SEQ ID NO: 10569 - DNA, 399 bp, Oryza sativa
  Clone ID: uC-osflcyp161g03a1
gagagttgagattactattacatgcagtagaccagttacaaaattactgaattgcatacggcctgacagaagattattcttcctagttggaactgcaggattaatacgttgtggtagaggaaaatgtgcagtacctgagccaaatgaacaggactggcttgctctatgtacaaaccaggatggaagggtaactggttagttaatttaaacaattaaaagaaaacgaactccaataatgaaaggcgttgatggagaagtaggtcagccgcctgaatgacatgctggtaatgttgtaaattgcccatctttgaaagcatgaatgaactgctggggtaaggaatgcttgggccaatagacggcgcttgttgcatttggaacaagagcattgatttcactaga

SEQ ID NO: 10570 - DNA, 304 bp, Oryza sativa
  Clone ID: uC-osflcyp161g04a1
cccaaaaaaaaacaattattattgattttttcttaaaggagtactaagcttagtactcccctttactactaccactacacttgatgaagggggaccggcccagtcattattggacgaagtccaaaaaaggaaaacgtttaagcgggtgctaattagcagccttagcatagcccaaaaccttttctccactataacgaagagggttttctttctctcttggccaaaaaaaataatttctcaaggaaaaaagaccaccacgagaaccaaaaccaaaaaggacaccggggttttatatgggggggtc

SEQ ID NO: 10571 - DNA, 283 bp, Oryza sativa
  Clone ID: uC-osflcyp161g05b1
gttcttttcctagctccgccgcctccgccgccttcaggagaggagaggtaagtcgaagatggtgtccggctccggcgtgtgcgcgccgcgcgtggtggtggactctcgccaccacatgcttggccgtctggcctccatcattcgccaaggagcttctcaacgggcagtgcgtggtggtcgtccgttgtgaggagatctgtatgtccggcggccttgttcgtcagaagatgtagttccttctttttttccgtaagaggatgaacaccaagttcttccatggtcc

SEQ ID NO: 10572 - DNA, 148 bp, Oryza sativa
  Clone ID: uC-osflcyp161g07a1
ggggttattctcttttaaattaaaatgtattttttgagacaaaaccgccaaaaagggccaatgcaaaccacaaaaaacaagaaccaacaatttttgtcaccgataaaaacaaccgatatacaagggttcatctacccggacaaaacaa

SEQ ID NO: 10573 - DNA, 340 bp, Oryza sativa
  Clone ID: uC-osflcyp161g08a1
agagtcaaatacgcatttaacgcgccaaaccaaagggcttacttccaggtgccacaatttatgccgcattcacaagatcattacaagcaaatcccattcttgttgctacatgaaacaagtactactaaatctatgcaggtgccttattgcatcatactatgtacaatcctcagaaatcagaagatgtactctggtatttccagagggaacggagccaccgtgacctcaaatggctttccttgaggccggctgaacttccccggaacaaacgtgaaagagccctccacagatccggcactggcacgcacaggcgtgcaactcttaaacacaaactgttgct

SEQ ID NO: 10574 - DNA, 325 bp, Oryza sativa
  Clone ID: uC-osflcyp161g09a1
agccaaaaccctggggatgagaaaacaaattacatggcactttggaattaccgcgctaaggccccgggggaacggaacaaccaccccctattaaacaggccatgattattttggtggctagcaaaccacttatgttttttacacacattcatgccggccgtcagacgaaatattccagaaacaaggatcgtttgcgctggctatatccgggaaggggggccccgacaaaatagggctagcttgactaggacccctgcggaagggggaacggacgggttggcctagaagccggcggacccccccccggtcggtttggaaggggaaa

SEQ ID NO: 10575 - DNA, 402 bp, Oryza sativa
  Clone ID: uC-osflcyp161g10b1
cttttctcctcctttcctcccatccttctcttccttcttctctcaccccatctcctcctcccctctcctcccctccagcggggcggcgggatggaggccggccacggtggccccggacagggcgacgggatggaggcctccgcggcggcccgacgcgaggcgacgagatggaggcggcggcgggctgcatcgagggcggaggcgaccggcgccggacgagaggggcggtggccggctgtatcgggcgcggggcggcgagatgggggcgactggcgccggtcgaggtggcggtggcctgcccccggccgagagggcggcagccggttgcgtctgggacagccagtgccggaccggagggcggctgctgcaggcgagaacttttttttcttttctctatgctat

SEQ ID NO: 10576 - DNA, 360 bp, Oryza sativa
  Clone ID: uC-osflcyp161h01a1
gctcgaagaatataataatctcattgattgaaacacgtataggaaaatttaagcggcaattaaggaagtaatagtatagttgtagcagtagaagagtacagcaacacacgttaattaatcacgcgagagcgatggatggatcggccggtaaggtctcggtctcgacctcacacgaggcggcggcagatggtgatgccgtcggcgatggccagctggcagacgtcgatgcgcgggtcggcggcgagcctggagttgaggtccctgatggcgacggggaacctccggtccaggttcgacagcggcgtgtccggcggcagcgccacccgtgccggcccacagcgggttgtcgtacacgatgtg

SEQ ID NO: 10577 - DNA, 59 bp, Oryza sativa
  Clone ID: uC-osflcyp161h04a1
aattgttaatatagaaattagtttaatgataaggaatatggtaaaggaaaatggataaa

SEQ ID NO: 10578 - DNA, 512 bp, Oryza sativa
  Clone ID: uC-osflcyp161h05a1
gccaagttccaaacatcatttgacatttcagtttaaacatcgttgcgcttacatgattccagtacatttcaaccaagcatcattcatactcaaatgtaacacaaatatgtcatttcttgggcaagtcacattgttcagattgcagaacggtattcaggagtaaggtgggcagaagccagccacagagcaccagcaaacacacacctttacttacaccttggaaaatgcaccctgtcgacatagcctcccgacatcgccgtctgaacattcctccggaacttttgtgggtcatctcggaggacagccgcagcatcatggttcaagggatcctcgtcattgggttgaatgaaaagaaggttcaaaccatatacaatggtattgatattcaagacaggcttccagtcttcacgcaggatattcaggcagacatttccgtccaagtcaatattagggtgataaaccttagtcgtgcacttgaccttgggcggctcgtgagggtaagtaggaggaac

SEQ ID NO: 10579 - DNA, 484 bp, Oryza sativa
  Clone ID: uC-osflcyp161h06b1
ctttaatcatttatgttactgttccattcttgttgagtaaaagatacaagtgccatctcctatcatctccgttcttctcaaattctcaatgaacagctcaacaccatgtttttcatatttagttgattatactcctgatgattaagcaatccctaagcctgcaattcacatttctctctaaattttgaaatttcaaataacatgttttcaaaatcatgttccttgacaataacaagttgccagtactccattgttataatattagtaggcatcatgtactaacacgggtttatctgttaaattagtttgctgccaagatttgccctgctgcatcatttagagaccacatgcctaatcgagaaaggccccaaaggtgccacttccacaaaagagctttggttaagcttttggagtgaggtgcactacaattccttggttgcaacttgagatcttcccaattccaagacccagaagaagccctggc

SEQ ID NO: 10580 - DNA, 442 bp, Oryza sativa
  Clone ID: uC-osflcyp161h07a1
atcagccgaagaacaagacaaaacaaaaagttcaagatttctgccgtcttctgcccaaggatgattacagttttagttggaggcccacgacgtgcacagcacgctcaatgatcgagagcatcctgtgctcatggggtacaggcattcagcccaacccacaacatatatttttcttttttcttttattcagtagcagcagcttgatgcatacactacattctacaggtacaagtacaagctctcagaaaaaaagaccatagcgcaaggcactgtgttgaaggaatacacggatccatgttcatggcattttgatagtagtaacagcactgggcacattattttctgaagcgactgatgagatgacacgctggtgctcacgttcatagctgtctgtttgtacaacatcagcagaacttgacagcttccagctttctatttctca

SEQ ID NO: 10581 - DNA, 439 bp, Oryza sativa
  Clone ID: uC-osflcyp161h08a1
ggcctagaattctaagattatataacgctgcatatggtaaaagcatcaccgatggagcttattaggtgattcgaaatcaccactttttctgaatccacaggtacaaaactgctcccaaaagcaagtcacacgagtctattacaaggaaacttccaggatgtgctcagccagcaaacatcactgtctgaatcctcagaacactgctgcggatggttttaagatgttattcttggagggagctgctatgctaccatcattcacttcagttttgtgactgcggcatggattgcatctgcaagatgcggaatggtcctcccgctcaaaccagccatactgatccttccatcagatgtcatataaatgtgggattcctgcctcatgaaagccacttgatcactgttgagcccagtgaaagtgaacattccgatctgcttaatgg

SEQ ID NO: 10582 - DNA, 159 bp, Oryza sativa
  Clone ID: uC-osflcyp161h09a1
attattattattattttactccaaacaccccacaagtgcgcacaattacactcgaaacccccgattggacaaactgaaagagagtctaccacgcacgcgtgcaagctcttttacctcgaaaacaatttgccccaacggccacccgaccaggaccctgca

SEQ ID NO: 10583 - DNA, 181 bp, Oryza sativa
  Clone ID: uC-osflcyp161h11b1
tctttatagacccacgcgcctttcttttacgagtagctgctgctgcagagctaggttgttctttgaacggtgagggcgacgaaggagctgcacagaagcattctcctcgctctgcatactcgccagacttggccggatgcaatggatgaatgaccccgttagaccccaatgggaaacatca

SEQ ID NO: 10584 - DNA, 436 bp, Oryza sativa
  Clone ID: uC-osflcyp162a02a1
ctatataactcgagtaagcccattaccacacacacatggccaaggcagttatttgaatcagtcttcaacatacttcaaatcatagaccacaccatacagcaaacatagtataaacattgtcatagagagtacagctgatagcagcttgtaatattctagcattactttggtagcatccctctacaaaacatagcagacatcaccagctcttcatcttggccatacacattcaacatggtttgctagtgacagaccacactgaccagaacatttcgtctcctcagtaggcaccagctgccatgagcagctcatcaaggctccagatgcccttgttgcttgccccgtcttgtgtagcatcattttgcagaaggttgtccattgattcatctgagctgctctcaacataaggtaatggcaaatacttcatctcgggatc

SEQ ID NO: 10585 - DNA, 416 bp, Oryza sativa
  Clone ID: uC-osflcyp162a03a1
ttactattactggttgcaatgtaacacttcggatacaatagtacattacagagctagctaaatgcgaagccacaataccgtcagcgcaagacgatcataaataaagcttacacaacatagccaacatgcaaaccattcggactgaccagagatgagggttcttgaagctgccgtggtgtgccatgcatgacaaatgccgaacaactagattgtagcagccaacatgaaaggaaaaggcatggataatgcagcaaagatggatgatgaagaccgcagattgtgacgcttcgttcaccaaccatatgaaacccctaaattttgtcaagtttctccgccttcaccaccggattagccttgggaatagcatccctagcagcggtccgataggtaaactggcagtcatgcttatcggaata

SEQ ID NO: 10586 - DNA, 244 bp, Oryza sativa
  Clone ID: uC-osflcyp162a05a1
ttatttggagaaagattttttaggggtaaaaccaagccaaacctggtcttaaggtggggctgcatttaaaaacaagggggggcgccttttgggttttgggggggggtttaatggtttccaaaaaagcgggcgttaaaaaaaagttagggcgcctccctttgagggggaaaatttggggggggggggttatttccaaaggggggggccatgggcaggaaaatgccctcaaacctttttggggttt

SEQ ID NO: 10587 - DNA, 437 bp, Oryza sativa
  unsure (1)..(437): unsure at all n locations
  Clone ID: uC-osflcyp162a07a1
ggtggccatttcangctcaagggctggcccaacacactcagttaatgaacatgatgatacagcagatgcagaattagctcaaccaagggaacaacaatgctccaccgccgcagaacaagttagctgattttcttcgtgtgaggccgcctaccttttctagcactaccaacccagtagaagcaggtgattggctacacgctgttgagaagaagttggaactgctccagtgcacggatcaggagaaagtcgtgttcgcttcacatcagttgcaaggacctgttggagttgttgctttgaagaagcgtgagttcagggcattgaagcaaaaggatcatactgtggcagagtatcttcatgagttcaatcgtctggcacgttatgctccagaagatgtgcgtactgacgaggaaaggcaggagaagttcttggaaggccac

SEQ ID NO: 10588 - DNA, 565 bp, Oryza sativa
  unsure (1)..(565): unsure at all n locations
  Clone ID: uC-osflcyp162a08a1
tttttaannaaggaacaatnggggctgcatccaagatagcaatatatacatgcatctgcatagagcatatgcatacaagagtacagacaactcttagcattcattaaatttaagtcataacttcacaacaaagtttatcgaattactctacattgaagtggcatctcttctagataatataaatacagagagaacttcattggacaagtgacatcttaagcaggtctttattggacacgtgatatctttagcgggtctccattcataaataactttagcaaaaaaatcttcaatggacaatttctgggacaagtgacatctttagcagaacaatttcagtaaccctttcgattttgacctaaaaataatagtttgaattctgtgagcaatattgcatgtagaatataaagaactatctatcataatataaatacattcttgatcacaaactgacaagacaccatgcatgcaaactggccaggatcaaagaaacaaaatagctacatatgcaatcaatgtatgttattgaggtcacttgatcatgcagcaccaatagggaacactt

SEQ ID NO: 10589 - DNA, 575 bp, Oryza sativa
  unsure (1)..(575): unsure at all n locations
  Clone ID: uC-osflcyp162a09a1
aacctcgnggcgnncgccttctacattgccgcccatgcggccatgcctcggccacgacatgcctgagctcgaggacggcctcctggaagcggccccagtgcacgttgctgaagacgacgagagggaggtcggcggtggcgcgatggggcgtgtcctaactcctacgggttgaggaaccttggagtacttggacgccgtcaccacgctgaggtcgccatgtcgctggccgatggatcatggaggtggaacacccgccacctcccccaacttcccccgccccacatacaggttcgacagctgcacctgcaccccgctgtggtcgtccagccccagctccgccatcatcgccgccacctccttcccggcctcagtgtcgccgcgcgccattcacgcattcagcagcgcccccagcacgcactagtcgggcctcatcggcatcctgcgccttctccaccatccccgccagcacatccaccaggctgccatagttctccacgccgggctccatgccgtacttcgccgccatgctcccgaagatctcccttgcctggccgatgagccctgccctccccgtt

SEQ ID NO: 10590 - DNA, 178 bp, Oryza sativa
  Clone ID: uC-osflcyp162a12a1
accgaaaatccaagagcttttttattaataataattggaaaaataaacgccaaaggtttttacacggaagcaactaacttagcacacaaaagacagacatgaacacacccaagcccctccttttccttgtttaaaacgaagcagcacctaaattaaatggacctaaaattccgaggcc

SEQ ID NO: 10591 - DNA, 420 bp, Oryza sativa
  Clone ID: uC-osflcyp162b03a1
acgcaatcgcgcgcccacactgtacagccactgtaactcatcagaaacgaggtcaatatacaacagtaattttcgccgttccataagtccataaaataccgatttctaatatcccaggagactctagctgcagatttagtaaggaagaacaaagcaagttactcacagtcacaggcaagctacacattgtttgttgcaaaaaaactcgaagtattgaggaactacacagagctgatctgggacagggaaatgagcacactggaaaattacagccggctgttcacttgacgatctctggtatgctgcgctttacaatcagctctccgttttgatcccctgcttctggatctgcttctccttctgtttccgcttcctctcgtttcgcctcttcacccagggcttttcttcctccactggcgc

SEQ ID NO: 10592 - DNA, 378 bp, Oryza sativa
  unsure (1)..(378): unsure at all n locations
  Clone ID: uC-osflcyp162b04a1
aaanaaaacagaagggcccactcccggtcttcagggccattcacaaaccaaaaggttttttgaacagtctaactgacaagtcgacaagttttaaaataaagcacagattgtagctaatctactacgatattagtttagttcgttccgtgatgcacgcgtgcatcaaccctgtatcttctaccaagtccttagatcatttcgcagcatctttccctcggttcctcggatgcctgataccgtggaaatatttgtttccacatagacactgaaatgctttaacaggatctttgccatcacccaaatcaataccattgccccatgtgagcttctcaaaggcctccaccttgttggttgtcaaataagcaagatgataattat

SEQ ID NO: 10593 - DNA, 118 bp, Oryza sativa
  Clone ID: uC-osflcyp162b05a1
cccaaaaacgaataaggatgagaaaaaaaaataatggggggaattaaaaaggggggtaaaaaaaaagggatggggtaaacctccgggggggttttaaacttcggaagggggggaagaa

SEQ ID NO: 10594 - DNA, 281 bp, Oryza sativa
  unsure (1)..(281): unsure at all n locations
  Clone ID: uC-osflcyp162b06a1
nnnnnnnnnnnnnnntttgtttttttaaannnnggcggttttgcccatggccaccaccggtccaaattaattattgataccaaacagagggcacaaataaaaccatggaaaatacaggatcccaaatgtcatgatggggtagcggtaattagataatgccacacccagcaatcactggacttggtactgggggtttaagctggggggatgttttttggagcattccttttaaaaacatggctttggtttttaggttagggttgaaacataaggagcccttt

SEQ ID NO: 10595 - DNA, 466 bp, Oryza sativa
  Clone ID: uC-osflcyp162b07a1
ggaaattgcagcgcgatgctcatacctgagtacgcatgatggagtacaacgttgactctcaaaaatgagcttgggtttttttttaaactaaaccggcaggagaactgtcaattatatttcattaaacaggagtaaaaacccagacgggttacagaaaaagaaaaaacaaactctcggcgagtagagactcgccaagtctttccaccgtggctggtacaaccacacagcacacggagctctatatcactctagccaaactatcaacgaaacgatggcggaatccaacgacgaacaccgatgtcgagatgctgaagaggcggcacaccgcgttgacatcacaaggcacatgtcatcgttaccgagctagccgcccagcgacccagcagctccaactccacggcgatcatggcatcattgtaggcaccgccaaaccgagcaaagcaacaccaagcttacactttggaca

SEQ ID NO: 10596 - DNA, 506 bp, Oryza sativa
  Clone ID: uC-osflcyp162b08a1
ggttcttgcacactggtgcgagtgccaattaccatgaaacgaatccataaaacagcattaaccacaagtctatgccgaatgcaaaaacatctccagatatatctttaattcgagctatctaacataatgccaaaaagtgctaacataaaccaacatattaaggacacaacctgcttgaattctgaaacccagataagcaagctacagaatttgggcccagttactcagcacagaaagttttatgatcgttacggaaacaactagcttcaaacttcttttctcattcctcatcttcttcctcaccgtcaccaccaccgccgtttgccttcttctggttcttccgattcaccctaccaggggggcctccaccgaatgggcttgtcagtgagaagtcaatgtgcttctcagactcaaccctcaccatgaatgatgggatgttgacaatttgcctgccgaccctgatgtggcgttgcctgatcaggacacgagcatggtggatggacttg

SEQ ID NO: 10597 - DNA, 385 bp, Oryza sativa
  Clone ID: uC-osflcyp077h11b1
ctctccttcctttccccaactaaaccctaactcctggccgacgactgcggctccgcctcctcgtcggagcagcgagccgatgctccttgtcctgcaccaccagccatggcgacccagatcagcaagaagaagaagctcgtgagcgatggcgtgttctacgcggagctgaacgagatgctgacgcgagagctggccgaggacggctactcccgcgcggaggagcgcgtgacgccgatgcgcacggagatcatcatccggcccacgaggacgcagaacgtgctcggcgagaaggggcgcaggatcagggagctcacctccgtcgtgcagaagcgcttcaacttccccgagaacggtgttgagctctacgccgagaaggtcgtaaacc

SEQ ID NO: 10598 - DNA, 507 bp, Oryza sativa
  unsure (1)..(507): unsure at all n locations
  Clone ID: uC-osflcyp078a01a1
cttgnccggctcacgagacacacatggtcatatatcttcacagtacatcaaattttgtggcgcaaaaagacctaattttctgcttcactaggagcaattttttttttgacagtacaacatgggccttttcaatatagtaagaaaaaggatgcttcatcagattatttactaccctaaagaggtgacccctcactgcatggtagagtacaattttgcagactggatgaaatctttgatgttgaaagtctcatcagcatcagactttgtgatcacacccttttccgttatgattgcggtaatcagatttgccggagtaacatcgaaggcagggttccacaccgatatacctgacgcggcgacttgcttacctaggccaccttcagagttcagcaactcattgggagacctctcttcgatcacaatttgctcaccagatgggagggagagaacaatcgaagttattggcgcagccacgtagaattgcacaccgtgatgcttcgcaaaaat

SEQ ID NO: 10599 - DNA, 308 bp, Oryza sativa
  Clone ID: uC-osflcyp078a02a1
ggttaataaatacagcccaattgaattaactacgaaaactgcacataaacaatccatccgttggttggttccaagtacaaattatttgtggtcttttggatgaacagagtccagactaccgcctgaaacaaaacctccgccactctataaacaggtgcgattctggagctccagcatcacaacttattatttccaccacgattgaatcactgtatgaccgaagatgatcagaagatgatgtcttcgtccctctctccaccggcaaccaacatgttggtggcagcacccacagagatacccctcttgag

SEQ ID NO: 10600 - DNA, 472 bp, Oryza sativa
  Clone ID: uC-osflcyp078a03a1
cacctgcgtataaattgtaatacaacactgaagggatgccccctagatcaatagtttcgtatgattcaatccacccacaagtcaaaattttaatgtacaactaggtggattctcaatcgacaccactgctctcttttactaacgcagacagtgcgcattccctgaagtgaagatttgctccttttaactgacgcagattccctgaagaattgctccttttagccagctaccttctctatcgcagttctcaaaagtcctaaaggaatcaaggtgcatgcaaatttcaaggtcccggcatggactcaactaaaggacctgaccttgccggtgaaagatatgaggctaacaagaagcgtttatgcagcttgatagctggatggggcaaatgacagccttggctttcatgttgttgctgcagctctaggcttcttgaatctagaagagcgatcagatgctttacccccacgatttt

SEQ ID NO: 10601 - DNA, 366 bp, Oryza sativa
  Clone ID: uC-osflcyp078a05a1
ggggggaatcaggcgcattaggccaaacaaataccaccatccaacatgccaaccatattttacactaggaataccttcctaccccgcaaaaaagggcaggaacaaaagaacattttttaagggaccaaccaccactagctcaaagctagaaaagctttacaaaggagggaaagatggcagccattttcggcacacactgggggagccgccaggggagggcaagattttctgggggggggaaaaaagaaccaaaaactaatttagacatgtcatcatcatcatcaatcaacacctgtgctggtgccacaggcaaaaggagatgctgtggacttgatacatttcaccctatcccacaaatctaaactg

SEQ ID NO: 10602 - DNA, 462 bp, Oryza sativa
  Clone ID: uC-osflcyp078a07a1
atgtaaaagataatagaatcatcatatgagctaattcactacaatgttcatgaactcgagtcatgacttatagcctaatacagctttgctccagcaaaaaaataagttctttgcttaactacaattgactgaaggggaacaaaattatccccagcaggggtgcacaatcttaattcatggcttcttgtaatgttgccaataatatcatggagccctatcaaatgggcgtgtatcattgtagcatatactccatacagcctcaactgcatcttttgcagctgtccctgaacagtgtgggttgttcctgagagacatcagagcccgccgtttaacacattccttcagaaaatgcagaaaatgtcagaacgtacataaatttatgtagggtttagtaagtgtgcacatgttacacaccgcgcttgaaaaaaggagacttatgctcacttaaataaagtttacttt

SEQ ID NO: 10603 - DNA, 413 bp, Oryza sativa
  Clone ID: uC-osflcyp078a08a1
aaacgagcgaacagatgtaacgacattccggggaagagagcaacatcgagtctacaaatgggccccttcagcttaagggttaacacaaaacacatagttcattgggcgccaaccatgcgggcgacagaatggtacaccaaaaaccatgcgcagagatcaggggcttattggagaatctagagtagccactcaggtaaagacgaaacggctaaaagctcgtagagtttcaggcttctggtgctgggagatggaagggtgagttcacacctccaggtttcagccttgaaggccgatgatcccgcaagcaacacggccaccagggtttccgggggtcttgctcaactcgtgcccaccctttccaagatcatcaggatcggcatgcacaacgacggctctgccaatgattgaatttg

SEQ ID NO: 10604 - DNA, 514 bp, Oryza sativa
  Clone ID: uC-osflcyp078a09a1
agatgcctctaattattataatattattatattagagtgtatttacacatagtataagcagatattgaaaaggaatagggcctgcaatattataatgttattttctctaagtaccatatatatagatagagccaccaagagaaacccagttctcaatttgcccagatttcaaggcggtcagggcagctacgttgcgaaactagtggtggaacaagggaaggtgtcaggatggcaccttcatgcatcttacttgcaagttgagaggatcaaattgcaactcttcgcagatatcttggaggaactctgccttctttggggtcgcagccaactcattgttaaagaatttagtaggtctgaaatactcgagccttgacatctgtgatgattgcttctgcttcgtacttcgccagtccaaatatattcctcagttgattcaaagccgcaagcttgtcatcgctaagatgtccatctgaaagtacctccattgcataggcactatagagcatctttagat

SEQ ID NO: 10605 - DNA, 451 bp, Oryza sativa
  Clone ID: uC-osflcyp078a10a1
ggtgcaatatccatctctttttattgcatttgtacggttgtacacataacaagacgtcgtgttattgtggaagagaaagccaaaaaaaaggattacgaagtgctttccaccacaccagctacgagcaaaaggatgcctcatattcagagtctgactatggtgttgtcttacacgtagtatgtaacaacacaactcacatgaagaccatggttttggcgagctcgacggccctctcccgaccaaacagcttctccacgatggcgagagagaactccatggatgtgcctggaccttggctggtgattaggttgccatcaacgacaaccctgttcttgcattcgctttggtccgagagcttgttccacataccaggaaaggatgtagccttctttcccttcagcaggccatgtggttcaagggcgattgctggcgaggcacatatagctccata

SEQ ID NO: 10606 - DNA, 275 bp, Oryza sativa
  Clone ID: uC-osflcyp078a11a1
caaaaaggggggaggacctgaacaaaaaggggggcacatgataccagcaaaacagaatccacatgacaaaactgtatctgtcaaggcccacctacccaatttcacccaatcgaatcattatctatgggcaaaagctaacgtttttctattcctccccttcactagtcaaaaacaataaaccccacaacatatcctaaaaagggacggcatataagatgatcaaatcaagaggacgatactccagaagagaaatttcttgcgttaagttgacactt

SEQ ID NO: 10607 - DNA, 374 bp, Oryza sativa
  Clone ID: uC-osflcyp078b01a1
atgggggggggggattccaaaatgctaattcccaactactagtataatgggggttgaatgacctacccccccccacccaaatgggggttgccttatttaagttcccaaaatttattttacaggacttttttaaaacttaaaaattaaaaaaaatttttaattcagtcaaaaaataaagcaaagtaagggaagggaaaaagctcaatccttacccccaaaaaccttttggccagctcaatgtaattgcctttttaactcgcctggttaacattgttggacctaaagaacttcccggaaaaacccttaacctgggggggaaaagaaacaaaaaaagggggggcccccccctgttaaccttttttaagccccaattt

SEQ ID NO: 10608 - DNA, 516 bp, Oryza sativa
  Clone ID: uC-osflcyp078b02a1
acatgaatcttttaccagttacaggcattgaatgttacatacagcacaaggagaaggtgaaaatggggtaggaaatgtacaatgtttttctcttgtacaacatacagcgtgttttgacagttttgggttgcctgttgcttccatgaaccaggagtaatctaatcatagaggagctgcagctacaagaacacaaagagaaaaattgctgactagcagctgctgatacaacttggaaagctgacaagctaaggccgtaagttcgacgaagagtatcacagatcactccctaaaagatgtatgatcatgagagcttcgtcaaagcaaataaaatggcaacctttgcgttggagatcaaaaccataaatatggaaactcctgagatgctttacagattggacagaaccccacatagcgttgaaattagtgtacacggacttgactgttatgctgatgcagatctagtgttatctattctgtgtttgttagaactacactacagatcaacatctggcaatg

SEQ ID NO: 10609 - DNA, 55 bp, Oryza sativa
  Clone ID: uC-osflcyp078b04a1
tttttctatttttttttttttttttttcttttctttttttattttttttgggggg

SEQ ID NO: 10610 - DNA, 386 bp, Oryza sativa
  Clone ID: uC-osflcyp078b05a1
cttccctacaaatccacaatgaccacaagcaaggagaggtattgatacaagcttgcctgctgatgcataaccacaaaaccagacagattttggagttttgaccctcggagcttatgagaaatcataatgctcatggcatcagaaatacaaacgcaaagatttcggtacatactgcagtgcataacttcgttcaaatcgattaaattcacttctattacatgcatttgacgctaaataagaaaaaaaagacctagcatggtacacaagcgtcgaatctacattgcaaaggtatatattagacacgatacaccttcgatcatatcatatgtaacaacactggcccgatcgccatcttgttgctacattaccaccaccatcaccaccta

SEQ ID NO: 10611 - DNA, 522 bp, Oryza sativa
  Clone ID: uC-osflcyp078b06a1
tgcacgcacacgtgcgcgggcattgctatacagtgagcggcctgtccttttttttttttttttttttttaattctttttttttttttatatttgggggggttttttaacaaaaggggggggaacaataccctcaaagccaagtcctcaagacaaaaccgttggtggcctagcacacctacccaacgtcacccataaacatcactactcctaaggggatgctaaccagttgacggatttcacccttcaccagacttaaaccataaacctcccatcaaatcctcctaatcgacggcatataatatgacaaaccccatcccggactctccaatggcccccaaacgaacttcaaggccccactttttattcccaacttcgattaacgcgcctggcaacccatatcctacaagtgccggacctaaaataacccctaaactggaccgtaaccaagatcagcctgaaacttgtaaagcttcgtcagcctggcaccaagcttcccaaaggggagggcggccaccttctcg

SEQ ID NO: 10612 - DNA, 467 bp, Oryza sativa
  Clone ID: uC-osflcyp078b07a1
ggttggcctcacattcatatgggggaatcacaaattttatatcataattattcatttttcagaacggccaaaaaaaaaacaaacaacccccctagctaaaacgacaaaaaacacacaaacggcaccaccccaaaaaacccaaaacccccccaaaaaaaccaaaaaaaccccccccccccggaaaaaaaaaacccaccacgaaaacacaaaaactcccccccccccgggcacaaaaacaaaaaaccccaaaaaaaaaaaacgaggcccaacccccccgacaagcccaaaaaacgggaacgaaccaccaaccccccccttggaaaacccaccgccccaaggcctaccaaaaaattagagacccctaaacccaaaaaccccgccggagggaacaaaacccaaaaaacccaaacaaccgatcccgccaaggcaaaaacgggggcacaaaaacaccacaaaaaaaacccccc

SEQ ID NO: 10613 - DNA, 410 bp, Oryza sativa
  Clone ID: uC-osflcyp078b09a1
gtgtataaatccttctgaaacaaaatgagtacatcatcctcctctatcatctccctccttaattaaatcatcacagaataatcatatatttactccgtgatgcagtagtatagcgcgtgacgaaaagtcggagcagtaaataaataaatccaaaaggcgaatttacgaagcaagcaagcattagtggttattaatctccttcaattaaggcctcctcctccttaatcaacggcgagggcggcagtgctgcggcttggcggcggcgccgtcgccggcgggcttggcgtccatgacggccttgaaggtgccgacccgcgcctttaccctgttgcactggcatttcttcaggagcttgcttcgcgcctcttaatctcccattgctccccccgccaaccgcgccccgaggctgc

SEQ ID NO: 10614 - DNA, 425 bp, Oryza sativa
  Clone ID: uC-osflcyp078b10a1
ttttctttgtttttttttttttttttttttttttttttgggttggttttttttttttttttggggctcaaacttcccaacttattggaagatgcttaaaaagggacctccaaaaacttgtcagaggttgcttccaaaccaaaaaaggggcctctcaacttgacagggggtcaaacttctcaactcgttggaaattgaacttgcccccaatgctttacttttcctggaaaaagctgtgggaaggaaattcaaacaagttactgtggggccccatttaaaatggtcctgtcttgcttcaaaacttaaaaaaaatactttgaggagctcctccgggtttggccttcagaaccggaacaaaacttcccccatcacctggtttttgaaagctcccaccaagccccgggaaaaaataaaacttttttttta

SEQ ID NO: 10615 - DNA, 472 bp, Oryza sativa
  Clone ID: uC-osflcyp078b11a1
aaaggcaagaatattattcataaatggcgcgtgatttttatcaaaacgcttgcaaatgatatcagataagtagagtcaacaagacaaaactgtatctgccaaagcacacctccccaactccacccaattacgccattatttctgggcaaaagcaaacggcttcccattcctccccttcaccagtctcaaaccataaaccccacaacaaatcctcctaagtgacggcatataagatgatgaaaacaaagcaggatactccagagtcgtcatggcgaacttcaagttgacacttctcatgccacagccgctagtcgtgctgggcagcctagtaccggtagtgcgcgggcttgtagggaccctcaactggaacgctgatgtagtcagcctgcgacttggagagcttggtcagcctggcaccaagcttgcccaagtggagggcggccaccttctcgtcgaggtgcttgggaagaac

SEQ ID NO: 10616 - DNA, 346 bp, Oryza sativa
  Clone ID: uC-osflcyp078b12a1
gttggggaaccctgccttcgaagccaattatgccatacaaaacaggggggggcctttccagcgtaaccaagggtaaccaaccacggggtaacccgaagggccggcatacaacatgggggattccccttcaaaaaaacttaaactttgatcttcccggggaattcaaggacccgggggaatgaaatctgaacctctcggttttggactcttccttgggcccaagctggtctttggggccccacttcttatggcggaaacggacagccctgggggcaacccaggcctagcagtggggggaaaacaaataagcctaaattgccttgggggcgagggcctgcggggaggg

SEQ ID NO: 10617 - DNA, 242 bp, Oryza sativa
  Clone ID: uC-osflcyp078c02a1
gtccaccgtctgatgggcaccgcgagggtcgacgccggcacggacgccgtcaccggcgtcacctccaaggacgtggtcatcgacgcccagtccggcggcctcgccgcgcggctgtacctgcccggcggcgtcccgaggtgcgagaagctccccgtcgtcgtgtacttccacggcggcggcttcgtcgtccactcggccttctcccgcgtgcactccaggttcctcaacgccctcgtggccgg

SEQ ID NO: 10618 - DNA, 483 bp, Oryza sativa
  Clone ID: uC-osflcyp078c03a1
acaaaacaggggcattcattcatattcatattcacgcgggatatggtacaggtactaggtggtgagggcattggggagcgaggtttgagtgccaaggaccttgccgccgacgtcggggaagcagtcttggccggggagagagcggacgcggccgtccttgtccacctttaacgggtaacacatcaggggccccttcgtctcctccatttccggggacacgtacgcccttcagttcttcttcgacattttccttacccgccttacgcacttccccgttttcggccgcccgaaggactccttcaccggcccaaggtgctccggccacagggacattctgtacccgcacacctgtccacgaggagggccttggccgggatcagcaaaccacttgtagtgtggctggtaggcgcccatggcgatctcggtgtccctgcagccttccatggacctctggttgatgttggccgatccgataagacttac

SEQ ID NO: 10619 - DNA, 276 bp, Oryza sativa
  Clone ID: uC-osflcyp078c06a1
aaaaaaccacttcccggggggggaaagggccaaaaaaaagggggcccacccttagaaaatcccctaaaaaaaaaggggccttttttttgggtgaaaagggaaccaccaacgccattccctgggctgtggccgggaaaaacccctttccccccctccttttgcccccccccaaaaatcccaaccccctattttttgtcccctcttttttttaaaaaaaccctttcccccccgcccccccaaagtaaaaagggggcccaagacccccaaaaatccccc

SEQ ID NO: 10620 - DNA, 510 bp, Oryza sativa
  Clone ID: uC-osflcyp078c08a1
aatctgaagattataacttaacatgagcactgaacattactacttgattcaacagtggatacagattcaaacattatcataaagtcctcacaactaggcagctcatcgacaattttattcgcacaagtattttgcagacaaatttaaacaagattgacacgataggtccaagtgatcgctgccgttcctaagagctgaagctcttacagtgccttgaggatctcctcagcaccagagattgtgaattggccaccttcctcaatgtttgcaacagtaaccttgaggttgtcagcaaggagagcaaaccgtctcgaacgaataccaagccctttctccgaaaggtcaagctcaagaccaagtgccttggtgtatgttcccaaaccatcggcaaggaatttcacatgcttattctcagggtatgactttgcccacgccttcatgccaaaggggtcgttaacactgacaagcaagatgtcgtctacacccttggctttgagctgctcagcctga

SEQ ID NO: 10621 - DNA, 492 bp, Oryza sativa
  Clone ID: uC-osflcyp078c09a1
gtcactgtatgtgacagcagtaatgtacactgtacagtttcaggtttgcgacaacaacaacagggggtgggttgggagctcgtcaactaatttattcacacagatgaacccgttgcttatttttgcttgcttttgtgttgtgaactcgatgttgtcgcttattatttgcttgcttttggacggccggcagcatcatcagccaacttatgaagcgtctgtgaattgagctgtacaggtcgtgaatctctgcctgggtttctcaatttggcttgttctccttcacggtgaaaaggacactagagtcaaaaatttgttgtccggcagtagccttcagcccttccacatatccggcacaaggcgccttcacaacatgctccatcttcattgcttccataaccatgacaggctgaccttcctccacccgtgccccgtctttaagcaaaacctttacaaccagaccagccattggtgccaaaacactcccctttggat

SEQ ID NO: 10622 - DNA, 399 bp, Oryza sativa
  Clone ID: uC-osflcyp078c10a1
aaacagggaaattcctccagattgcctcggcaagaagctgccaagctggggtcccttgttagcttggcccaagtctggacaagatgcaatttatcaacgggggattccccctccccaggggggggtcccgggtcaaaaaaattaaaattgcttgcccccccggggggggcaacataaagtttcccgagttagggggggggttgccccccccttcattgatttgccccacctgttatttttactggagcttttatttgggctagttgaacaactgggagccagcatcgatcgatttatcgatcggggggcccaagcgggattaattgatctagctgcccttggttgaataaggggagaggcttatggggaagcccacttttcccccccacttgccgggga

SEQ ID NO: 10623 - DNA, 531 bp, Oryza sativa
  Clone ID: uC-osflcyp078c11a1
aagtatctaaaatttctcatctcacaatgttcaaaatatactccttataaaaactctaaagctgccttataaagtacagcagtactcaccaaatttaagcaccatctctcacaagattttaagtgatgtgtgcactatataaacatcatcatcatcatcaatgggttcaatgatcggttaagctgaacaaaacacacgctgcctgatgtaatcccgtatgccacctttggttcccaatcacaaattcacaataacgaagaacacaccattgacgggcgaacgaacgatcgtgtcaaggcaaaaagggcagcagcagattggacctaaatgctcaatcaagtaggatttacatgagagtcgctgcggaaatcgcctactacacccaggaagctgtttttgttttgggcatagcaatccactcactccagcatgtgtcatttgaggaagctcagcttgtctgaagggcctcgaccttacccctggccttctcgctgtcgtcgacaatgagcttctttcggagggcgagcagct

SEQ ID NO: 10624 - DNA, 315 bp, Oryza sativa
  Clone ID: uC-osflcyp078d01a1
agacaaaaccacctggggaaagggggaccatgatccacaggatgggacaaggacccgcggtaccgccattcttggggggttacccaagaggacccaaacgcacttacccaaaagacgaaaaaaaaggggcttatttaaatggccgatgagcaatgtagtagaaggggtagcatgccaccaaatctaaagggaatgggaattttttttggggggagtgacttttttttccctttccttttttttttacttctcccagcacaaaagcaattcaccaaatcgcccgcccaatggggcaaccggggcgacaccggaagg

SEQ ID NO: 10625 - DNA, 236 bp, Oryza sativa
  Clone ID: uC-osflcyp078d02a1
ggggactagttggcaaaccagaggaaaacaaaaaaaacccaccaagaatgcagataccttggcaggcactgcaagaaacccctgaagggagactcttttctcaacccggtgtttgcaaattactcaccaaaaagaggattgtcttcaatattatttttatattcccaagaaggtccacacgatccaagggcataaacccccggaccttcctaaacacggggggccccaccggccac

SEQ ID NO: 10626 - DNA, 467 bp, Oryza sativa
  Clone ID: uC-osflcyp078d03a1
aaacatgcagccatcatattagcatcaacctgaccaacaaatataatggcactgaatcatttttatttcctcatcctttttattcattcctcccagagagacggatccatggaagttttcttgccctcatcaggcaagcagagcacacacacacggtggcagtggaattgctatgaacaagacgctaatcaacatccagagctaaaacaaacaaggggatcaaagcaaatcccgaaaaaaaaaacacaggggaaagtccacatcttcttcttgtccccaacgccttcgtgtcaccaccacgtcttgcggatttttttttaccctgttctattcgctcaggcgtccacgatctcgccgtcgtcctttgacgccaggatcagcttcgggtgcgccgtcgccgccgccgactttttgatcgtgccgccgatggcgtttggccggccgagcgccttcagtgccaggtgcgc

SEQ ID NO: 10627 - DNA, 232 bp, Oryza sativa
  Clone ID: uC-osflcyp078d04a1
cagggggatcttatttatacaacaccacacatcactgcacgtccatcaaccgagagaaatggctggcccacggggaaaaacaaccacgcaccgactaccatagagacagacattgccagacaaaaaaactcacccattacacgacgaaaaccaatcaacgtcgaaaaaacaaacccggggggggacccacctccatagcccgcacacaatcaaggaatgtgccggcccaaaa

SEQ ID NO: 10628 - DNA, 285 bp, Oryza sativa
  Clone ID: uC-osflcyp078d05a1
ctccctttcttttgtttttcaacacccatggctctgacataacattttgcacaacatcactaaaagattatcttggccaatggaatcaaacttgttgccttcgcaagaccaccacaacatcttctattactttgcatgatcaaactgggcaaaccaacattaggatggccttaattcattcacaggaacagagtatcgcgccttccatttcattcattggaaaaacccaattgcactcctaggactgctataggaattacccgactacatttttctctataaatg

SEQ ID NO: 10629 - DNA, 476 bp, Oryza sativa
  Clone ID: uC-osflcyp078d06a1
aagaaggagaacaccaacatcacactatcagtatcgacatctacaaagttcacagaagtttaaacctttttatctgcaacatttgaataactttatattttgacagaagtttaaacctttttatctgcgacatttgaataactttatattttgaagtgctcgatgagagctttgctcgcaagatctcttttaaagaaggcccccagaaactcagacatagtaaaattcctgtactttggtgggtttcccgaagaaatcagatctggcaatggtccataaaaaacagagtcgcctctcttgccaggattgtaaaagatggcgcttgaaactctggcttcttcatgcgacttcattactacccggtgttccacactcttgtacttatcattagacatgatctgcaataggtccccgacattgatcacaagagcgccaggcacaggcttggcatccacccagtagctctccccatcctc

SEQ ID NO: 10630 - DNA, 293 bp, Oryza sativa
  Clone ID: uC-osflcyp078d09a1
atgcattctattatattagcatggagcgggccaatatatataatggggcggaaaaaaaaacagggcctcaccctgcaaaaggggtcctcccaaaaaggcggatccaagggagctggcaaccccaggttaagcaggggggtgcccggacaaggggggaaggggaaccgccaaccacaaaacattaaaagggggccacgggacctgcccccaaggggaggaaagccaaatcccccctccctatgctgaaaaaggagcggcccccccctgggggttcaaaacggcgacgggtcaca

SEQ ID NO: 10631 - DNA, 424 bp, Oryza sativa
  Clone ID: uC-osflcyp078d10a1
cacgacgatcccaaataactaaacatagagaaaagaaacatacgatccctaagcatagattacacatatctccccactgttcaaaatgttacacataagatggcgcgaataagcaatcagtggggagaccaagcaatacattttttgcatttagcaacctactgcaagaccagattaaattcttaagccggtggagctacaagttcctaaacacacaaaggctaattaaattcacaggcagctaaacccaggtccttaagtttatttttcacgaagtcggattataacgaaggcactgctcgaagtagttaataagcagcaggggattattcgctttcaattctttggggcgcaccatgacttcctgcccatcagacctgagggctttgaatgcaattgaaacttgctgccatcgctgctcaca

SEQ ID NO: 10632 - DNA, 79 bp, Oryza sativa
  Clone ID: uC-osflcyp078d11a1
gacatctacacagggcacacatctttagagccctttaaatatgctcacagtctgaggaacataaaaattccagaccgag

SEQ ID NO: 10633 - DNA, 514 bp, Oryza sativa
  Clone ID: uC-osflcyp078d12a1
tgatggaggcgcacgcgtcgttcggtgtgctccggcggcaaggtgctcaacgtgggattcgggatggggctcgtggacacggcgatccagaggtacgagcccgaggagcacaccatcgtcgaggcccacccggaggtgtacgcccggatgctcaagctcggctggggcgagaagaagaatgtcaaggtcgtgttcggacggtggcaggacgtgctcccgcagctcggctcttatgatggtatattcttcgacacctatggagaatactcaggatatgagagagttccaccaacatcttcctaagctattgaagcctggcagggatctactcgtatttcaatggcctctgtggcgataatgccttcttcaacgttgtgtattgccagctcgtagcgttagagttggcaaatcttggctactcgacacagttcatcccgctcccagtcaaagattgtctttcagaggaaatatgattgcgctgaaagcagaaatactggcaattggatacttacca

SEQ ID NO: 10634 - DNA, 325 bp, Oryza sativa
  Clone ID: uC-osflcyp078e01a1
ggcacaactggggacgggtttttatacaaggaatacaatacagagaaccgggttacatgcacatttacatgtttgacgctgaaatttcacaaagttttcacaagggatagttccacacatacatacacgatgggatatcattcacaactaaaatgaaaatgttgcccgggcgcgcacacacgttggtcggacagcttgcatgaaaaaattacaagacatttttaatcacccaggacaaatcaagagaaacaggggtttagcaatcccacaggtggggtcccacatggatgctatgggggggggggggtaagcctggccctgaaaa

SEQ ID NO: 10635 - DNA, 372 bp, Oryza sativa
  Clone ID: uC-osflcyp078e02a1
acgacaaaccacgaacttggatattaaagatgccacaaagaagggtcacataaacaacacagggcacagcagcgaaaggtacaagcaaaccctgcataatcgaaaaggaaatgtttttcaaaaccagacacacaaactggttgatagaagcccacacggacagatcataggatagcagcagtaatcaagcattgccaagggaccaggcaagaaccctgaacctttttaggactcggcacccttatcacccttgtcaccattggcgaactcggagccgacctcctcggaggccttctccaggggggggagggcctcgcgggcctcggagaacttccccttcttcatggccttggcgacgtaccaatggaccaa

SEQ ID NO: 10636 - DNA, 391 bp, Oryza sativa
  Clone ID: uC-osflcyp078e05a1
agcggccacccttttatttctttttttttttataaaagaaaacaattgccaaaaccgatgatggcattgacgcaaaaagaacacgaccgccaaaacccaaatatgaagaaagaaagcaagtgccgtcccaaaaaaaagaaaaaagtgaacccaaacaaaccatgacagctacataaattccatatagaggagccgaactacagaggttacaaggggtaaaagaaacccaaaaaggggaaccaccacttggcagcagtcttatcaagggaggactaacttaatttctgatgccacaaagggtaagctcagctaaaatccctcaaaccctcctttaaacacatccaaggacttctttcgagcacccatcactggaaccttggcctgaaaggct

SEQ ID NO: 10637 - DNA, 352 bp, Oryza sativa
  Clone ID: uC-osflcyp078e06a1
agaacgtgacacacccatatatacacgaggaactgatcaaaacaacaacacacaagacggtaggttcaccgacggcgagaaatggttggcacacggccatgaacggctgagatcgcacacacatagagacagacaatgtactctcagaaacgcacccatttcacgatgtaaaccaatcaaacacgaaaaaaaaaaagcacagaagaccgccaaacaacgcctgcgacgacggaggcatgtgggggccacaaaggggcaccgcgtcactgacgctgggccccaccgcccctcgatgaccaacttttttatttagccccacgtcacgcgttcccacacacacctaccgagtgga

SEQ ID NO: 10638 - DNA, 423 bp, Oryza sativa
  Clone ID: uC-osflcyp078e07a1
ctttcttttcatgtcaggctctccacatcctaaacaactgaacaacattggttcaaagacatcaagcaggcctacattatgggggaaccgatcgatgctattgtacagttgggtgtaaattagagccgcttccgactgataccaaccgagtttcagaggattgcgcatcggcttctttgttctgcgggagatattgtcgcctgttggaacctgtttggatcaaaggagttcaccccatacttttgtctgatactttggctccacgtataagtttcggatcggacggtagctaaggctgggcaccctagggtcagcaacaggctgcttgcccactcaacagctggcggggtgaagaccttggctcaaagaactagccactactgttatactttgcttgattgcccgagtgcactgtgagctctt

SEQ ID NO: 10639 - DNA, 504 bp, Oryza sativa
  Clone ID: uC-osflcyp078e09a1
gtagcgcggcaataaaacattgcattgaattctgaacgataaacaccaggaaccggcgtttatttgaggcaagcactgcccaaaatctcgcaaaagtactgaaaccttagacatagtacacatccatggcaaacatggatgccaaatgacaactacagaaaattatcaaattcgaatgcagctgacggcttctcctgctgaagatgcatattttcccctccattacttggatgtgctctctccatcgacagccaatgggacggcgctggccaggctgcggtatttcagagcatagaacatctcaatgtaacggcgagtctcgcgcctctcaaggttgcttacgtacttccagaatccatatacaccagtcaaggtcatcagcctctcagagtacagcttccaggtgtacttctcgtaaatcctctgcagacctccctgtgaaatattgtcccagtaggttgaatcctgcttgcacttctaaagaagttgaccaagatatcagca

SEQ ID NO: 10640 - DNA, 410 bp, Oryza sativa
  Clone ID: uC-osflcyp078e10a1
gcgcggtattttaacattgtattgaatttgtgaacgataaacaccaggaaccggcgtttatttgaggcaagcactgcccaaaatctcgcaaaagtactgaaaccttagacatagttcacatccatggcaaacatggattgccaaatgacaactacagaaaattttcaaatttgaatgcagctgacggcttctcctgctgaagatgcatatttttccctccattactcggatgtgctctctccattgactgccaatgggacggctcttgccaggctgcggcatttcagagcataaaacattttaatggaacggctagtctggcgccttttaaggatgcttacgtacttccagaatccatatacaccagtcaaggtcatcagcctttcaaagtacagccttcaggtgtcctt

SEQ ID NO: 10641 - DNA, 519 bp, Oryza sativa
  Clone ID: uC-osflcyp078e11a1
attcaggagatcaaattcttaggcctgattctctcagtgatttagtatactagtgccatcgaagttcataatttgaagagagaatgcaagtgctgcccataataacagtcaaaattgacctatacaaaccatgacagctacataaattccatatagagttgccgaactacggaggttacaaggggtaaaagaaacttaaaaaggctaaccaccacttggcagcagtcttttcaagggagcactaacttattttctgatgcaacatggctaagctcagctaaaatccttcagccttctcttcaacacatccaaggacttctttcgagcactttgcactgtacttcggcctgaaaggctcccaaataagctttccggagcatctctaaacttgtcacagatgatagacaccttcttatgatccaaggatccaaaattcttctccctgatacagggttatggaagttctctggctggttgctgagcacagatcggtgagctgcctaatttcgccaggcaatc

SEQ ID NO: 10642 - DNA, 338 bp, Oryza sativa
  Clone ID: uC-osflcyp078f01a1
ggggacaatcaagggatcaactgcaaagcatataatagctcacgataaggcacttgcattatatcaaattcatggaagggggcagcaaaatagtgataacttagccactgaggcattcgctaagtaatagctacaaaactccaatcacatagagaccaggacacaaaagactactgcagcaccctaacttagatgatgccaatcttgttggccacgtcgagagcatcgtcgtctggtgtcagcttcacgtaagccttcttcttcccatcaggcctgatcagagggttcactttctttgctggatgtcgaacatcttcttgacagcagccttgatcttc

SEQ ID NO: 10643 - DNA, 418 bp, Oryza sativa
  unsure (1)..(418): unsure at all n locations
  Clone ID: uC-osflcyp078f02a1
caaangctctcattgattgatagcgatatcatagaagcagcgacacgaattaagatttaaaaccaaccccaagaaggatcgcagatccaactccaccgaatcgatccaagaactccgcctaatccaaccaaaccatgggcgatctcatctcaccaacacgacacgaactcataaaaagactaacaccaccaccacctcctccttatttagggactcgacgactaagacgactgatactggcgaaaggcgaaggggaacagcacagatctaggagagctggccgcagtcggcgatgacgaccggcttggcggtgctcccgccgcgggatcccaccttctcgatggccttgacgacgtccatgccctcgacgacgcggccgaacacgacgtgctttcccgccagccagctgcagggcacg

SEQ ID NO: 10644 - DNA, 457 bp, Oryza sativa
  unsure (1)..(457): unsure at all n locations
  Clone ID: uC-osflcyp078f03a1
aaatacttaatagtaatagactctttgatggagtattacaacatgcagcagtggcattaatacgccagtacattaattaagttacacatatgcaggctccattttggtttcttttaatttatcgnattacagaatttctgtagccttgcagatgatcacttggatatcatgtactagtaattaacaataggatgcatacaaaagatggcccaacgacaacagaagatgcgtgcatctgacattgtctggccttatttgttggtagtactccaattaattaacaagagatgatgcattcttgtgccttagtttcttcacatgcttggcttcacgttgagcctattcgcaatcttcacccccaacgactcatcacactgggaggggcagctgacccagatggcgcggagctcaggggagactttggggtgcgcgagctcgccggcgaagcggcggatga

SEQ ID NO: 10645 - DNA, 501 bp, Oryza sativa
  Clone ID: uC-osflcyp078f04a1
gctatacgtacatgcacgcgccgtacgcttgatcgctatgagcgggcggcctgtcctttttttttctttttttgttctcaaacatcacatgcagtatatattagtattatcagtaaattgttataggccctcgtgtgcccttttttttttctatagtcaattcgtacaaaacaagtgtaagcactcgtgtatgtgtagaatttaagcgtgcctatagcttatccacagatttgtgtgtgtacttttaaaaaaaaacccttcaattttaaaaagaatagatcgacagaaaaacaagcccacgcgtgcacatacaactttccagacgaaacaggaactatcggatccagctataaaactcacaagacgtaaccttttgatttttagaccagcggggacttgtccacttaaaaatgagatcctctgtctgcatccatggagcctgccacattgtgtaggcacaactctcccaaagcatgttgctgctgggttccatcaaatgta

SEQ ID NO: 10646 - DNA, 483 bp, Oryza sativa
  Clone ID: uC-osflcyp078f05a1
attacttgatgtataacaatgtaataggaaatccttgcattacactaatcgctagatgtccagtacaatcaccggaaacacaccaaaactgcagacaaaaataccagcacagtaacttgttcactggtacagccattcggcggcaatatagagtaaaccatggaagtagaactcatcccatttcactacagttgcaggtaggcagtccttttgacagctgcataagatgtaggcatgtagctgtgcaagatcaagctccattactcatctccaaaagttgtcttctttcctgtactagctgtaccagcactctgcctgctctgaaaaccgccacgtccgccttttctgccaccatctctgccaccacgttcaccttttctggcaccatctttaccttcaaacctaccaccagatcggccaccaaacctgtcaccagatcggccgccaaatctgcaccagatcggccacctttttttccaccac

SEQ ID NO: 10647 - DNA, 289 bp, Oryza sativa
  Clone ID: uC-osflcyp078f06a1
acacacagaaacacagatgggaccgagtctggaaagacaccaagagtacagcgagaatttattttcgatccgacgacgcacgagtgcacgacgacacgttgagctcctcagattgggcatgccatgccaatttccctagttacgtatgggaactggggcagcgggggggcacacccgcgctaggggtcgtgttgatcaagttgcggcggggggagcggcttcccccccttgaagggggagaccagccccagggcttgtttctgttgggcaatcggggccaatgtgcccg

SEQ ID NO: 10648 - DNA, 434 bp, Oryza sativa
  Clone ID: uC-osflcyp078f07a1
aaggatctcaggttgcttttaaggtacaataaccaataacatgtcgaagctcaaacattcaggaaggtaattgaatctccatagtgcataaaattatggatcttccacatgttatgcacctgacaaaatcacacagttgtgcaggccatataaaatgatacacaacaaatagcttcgtatctagtttcgcagatcctttcattggtttgttgagtcacaaagtaatattgccggacagagaggatgtatccaataatgccgctcatcttcctgaaggcagagggcacggcaaagctaaatcaaactgtacgcctaaactgaaaatttcagtgacagcttaaatggccgttgacgcggcttatttccacaaacacttttcttgcttgatgagggtatagctagaccagacttctgtcttttcaggattacaataa

SEQ ID NO: 10649 - DNA, 425 bp, Oryza sativa
  Clone ID: uC-osflcyp078f10a1
gggggaaaaaacccccaacccccaaaaaaagggggaaaattgggtaagggaaaacccaaagaaaaaaacgggaagagggctctattaaaaaaaggaccaaacggggggaaaaaaaaacctctttttacccagaaaaaacccgggccccaccctttggggggaaaccacacccgggcacccggggaagcacccctggcccgggaacaaaaaccggggggaaaacggaacccttgcaggagccaatttccctcagggggggaaaaggcaaaaaaaaaccggggcctccccccaaaaaatctgcaacggcaattgacgggaaaggttcccaacggaagcacccccggggggaaaagccaaaggaaggcccatagcctctccccacaggggcccaaaaaaaaaaaaaaaaccctgaaccggggggcccc

SEQ ID NO: 10650 - DNA, 89 bp, Oryza sativa
  Clone ID: uC-osflcyp078f11a1
attaaatatcttgtgggggagcacaacaaccaccaaaccacaaaaaaaaaaaacaaaaaaaaaaaacaaacgactacaagcggtcgcca

SEQ ID NO: 10651 - DNA, 435 bp, Oryza sativa
  unsure (1)..(435): unsure at all n locations
  Clone ID: uC-osflcyp078f12a1
acacacataaacacagttgcgatcgagtctcgaaagacaccaagagtacagggagaattcacttccgatccgacgacgcacgagtgcacgacgacacgttgagctcctcagctcggccatgccatgccaatctccctagctacgtatggcaactggggcagcgggggggcacacgcgcgctaggcgtcgtgttgatcaggttgcggcggtgggagcggctgcccccggatgaaggaggagacgagcaccagcgctcgctccgggtggtcgatcggggccatgtgcccggacccgggcaccgtggggaacaccagcccgtcgtacgcgatcacgtacccggnaacgtccttgccgtccgccgaccacgggcgccagtccgccgccacccgaggtggagcctctccattgactggctcggcgccgtcaccggcacca

SEQ ID NO: 10652 - DNA, 543 bp, Oryza sativa
  Clone ID: uC-osflcyp078g01a1
gtaattgataatccaaatactgaatagtaatagactctttgatggagtattacaacatgcagcagtggcattaatacgccagtacattaattaagttacacatatgcaggctccattttggtttcttgtaatttatcgtattacagaatttctgtaggcttgcagatgatcacttggatatcatgtactagtaattaacaataggatgcatacaaaagatggcccaacgacaacagaagatgcgtgcatctgacattgtctggccttatttgttggtagtactccaattaattaacaagagatgatgcattcttgtgccttagtttcttcacatgcttggcttcacgttgagcctattcgcaatctttacccccaacgactcatcacactgggagaggtagttgacccagatggcgcggagctcaggggagaccttggggtgcgcgagctcgccggcgaagcggcggatgaacctctcctgtctatcctgcgcccacgacctgtaccttttcccgggctgctggaagtcgtctgcttgtgtat

SEQ ID NO: 10653 - DNA, 256 bp, Oryza sativa
  Clone ID: uC-osflcyp078g03a1
aggacggcctgtcctttttttttttttttttttttttgttaatttaaaactaatacatttgtggtcactttcacgtatacgtatacgcatacacgtcttgtttggaacacacgtacgtacgtacgtactattagaatactagaatttatatagtacaagatgcgaagaaaaaaacgcagcctgctgatggatggatggatggacggttttgtatcagtggaagcatggctcggcgttggacatcccgacggcggcg

SEQ ID NO: 10654 - DNA, 292 bp, Oryza sativa
  Clone ID: uC-osflcyp078g05a1
tttgctttttttgaatggcattggccccacctaaacacaccctggaccgctgaaatgagctgcatagtccatctacaccaaggaccatgtatggagccagaggtggtctaaccttacaggatcctgacatagctcaattcaagtgatgcattcctctctggattgctcctgaagtacagacacagccatacatattgggatatatacctcaaagcttacatacctaggtacttgacactcactagacctggatttgaaagacaaaacagttcttaactgaacccaggactga

SEQ ID NO: 10655 - DNA, 364 bp, Oryza sativa
  Clone ID: uC-osflcyp078g06a1
ctggaattggcacaccatttacatttgatgggccacttggaatgatctgcataatccaaccagcctgaataaaccgcattaaactttagatgctcttagccccccacgcgcctttaaaagctcatttcgagtgaacccttcctctccggggggtttctgaagcccatgcaaggaaaaacattttgggatatataccgcaaagctgttcagccgacttacctagaccctagataggggtgtgtctcacacacatatgggcccgtcactggccccttttgctgagggttaaaccatggtctttccctttcacaggcccaatgactttccggggaaatcaaaatccttgtgtttaaaaccccccctt

SEQ ID NO: 10656 - DNA, 192 bp, Oryza sativa
  Clone ID: uC-osflcyp078g07a1
gttaaccttggggccaaacccaaaaacacggaccaaaacaccaaaagcgaaccaaacaacccaaaaaagagacccaacaaaagccgggcaaaaaaaaaggacaaaaacgaaccaaaaagcaaaaaaaaaacggcaaaaaaattcaaaaaaaaaaaaaaaccgaaaaaaaaaaaaaaaaaacaaggggcccaa

SEQ ID NO: 10657 - DNA, 433 bp, Oryza sativa
  Clone ID: uC-osflcyp078g09a1
gggatagaataaccaacacataggaggtttcatttcttcttctcaaagtagtgtagcatctttccttctttcaccattacataagcttaagcaataacagataacaaatcctcctcctcctctaggtaaaatattcaaacacaatacccttataagtacttattattaggaaagtagcgtgcatgggcataaatggcagcggggggcaggttaagaatcacaatgctgagcagcgaggaaacaaaacaccataatgggacagagcaaaagcctccgaaagggagcttttaggcagaaggcttctcccacttgaggggcttcaccacctcccaggtgaagtctgggtcgtcccttccgaagtgaccgtaagccgccgtcttgaggcagcgtccgttgccgcctttcttgaggtcaaggttgatgatgatcatgc

SEQ ID NO: 10658 - DNA, 426 bp, Oryza sativa
  Clone ID: uC-osflcyp078g10a1
gggggtaagggagcctctccacgattaattattggacataattatccatatggaacaacataaacaaacaaacaaacaaatttacatgaacatactggaattaattattatacagcccacacaggacacaacacaaacaccatggattaattacaaacacatcgatcagcctggggtttaatttattccgatttccgaggcaaggaaaggggcacaggtagtagcaagcaaggaaattaagcagcagagatgatcgggatcgaccccggccgccggccggccatcacatgatggagcaggcgttgccttttgcctcggggaagcaccacggcggcggcggccaaacgggcggcggcggccacacctgcggaggccacggcctgatgccccaaccgaagttcccgtggccccccgagcaccccaacg

SEQ ID NO: 10659 - DNA, 494 bp, Oryza sativa
  Clone ID: uC-osflcyp078g11a1
ctctggaattggcacaccagttacatctcattggccactggaatgatctgcataatccagcttgcctgaataatctgcatcaaactagagatgttctagccttccaggttcctgtattatctcaattcgagtgatgcattcctctctggtttgttcctgatgtacatacaaatccatacatatagtgatatatacctcaaagttgatcaacctacctacttgattctagctagacctgcatctcagatacatcaatgctcttcactggcccaatgactgaaaggtgaagcctttttcttgcactttcactggctcaatgactcaaaggtgaagccttttcttgcagctcaatttggggcttggcatcatcgtccacctcacggagctgcaagggcttgaacaagtagcacctagcgcaatggcgtagtatgccaggttgagcacctggagcagcgcgacgatccagagaagtagtcgagcctgcgcggttgatg

SEQ ID NO: 10660 - DNA, 415 bp, Oryza sativa
  unsure (1)..(415): unsure at all n locations
  Clone ID: uC-osflcyp078h01a1
ggttctgcattgnctagatgcaagcaatttactaacaaaaggtgcattctgaaccacaatattttgttcaaaatgccatctgagtcgacaacagtacaatgatatcgaaaaaaacatggtaatgcacctttaccctggcacaaaataacaaatgatggaccaaggtacaaaagcatggtaccaggtatttaggttatgatacaaagtttgcttatttatcagctagttgagtaaaacagggaaatgctgaatccttatcatgagtaacaaaaatcaacggtaaagactctcggactccaagtttgcagcaatctcagtctcccaacgatcgccgttctcaagcaatttttccttgtcgatagcagttcctcatgggtttcagtagcaaactcaaagttaggaccctcaacgatgg

SEQ ID NO: 10661 - DNA, 509 bp, Oryza sativa
  Clone ID: uC-osflcyp078h02a1
acatgcactgatcccttagcttggatcgtatactgtggacggcctgccctttttttttttttacagattgaaacattcaatctatcattgaaccatactaccaaagcatcagcatcaggtagttccaagtcataggagacaacttacaagaaagatacattcagcaaagtccacaggtgtcatattattgccgacatcatctcttacaaccagattttgtttcctctgaaatacaaaatggattatcaagggcacaaatgaagacaatgcaacttctgacgaattgcaagcacaagaaaggtggatacctcgaccatcacttctggtagccgccgccgacggcgtcgtagtcctcctccacggcggtgttcacgtaaggcacggggaagtccttggcggggtcgaactgcttggcggccatgtagcgctcgaggtctggcttgcggaggagggtgcggcggacaggcgggcggtcacggcggccgtcgcgcgtgtagtacttgatgtcg

SEQ ID NO: 10662 - DNA, 490 bp, Oryza sativa
  Clone ID: uC-osflcyp078h03a1
ggatcgtatagagtaggagggcctgccctttttttttttattttatttgaccaaacagctgcaaagcttaactctttttggagcaacagattacacaggtgctggaaccacaaacattactaggactcctactaaggtcccaaaattccaatggagaggaagtgaatgcccttgatattaggttacaacaaaaccaccatgaaaggaaggaataaccactggactatacagtaagatcgcaggcagtggcgagctaatcacataaggggttggaacaaaccacaaatccttacgatgctttgttccagaatcagccgcccctcatttatacacagcatacagacagatttcagcagacctgggtggctggccgtgtctcatgatttcagccgtctcgccaacaaatctggttctggggaacctgaacacccaactctggccaatacagttctgacttgtcagcccttctctgcccgatgtatcctcaact

SEQ ID NO: 10663 - DNA, 519 bp, Oryza sativa
  Clone ID: uC-osflcyp078h04a1
atcacaaatgacacattataccaaagtgaagtgattcttcagttttccttcaccagatagacaacatcgaatcacatgttcacagcaaacacaaaaggacacaaagctagcacctgcataaggaataaactaatgcggctaggttactactgataggtacttaattcaattaagcatgaccgaaccattagtttggatcgatctccacttgtaaagagcccacataaaaggtttgttttggatttatcttcttcttatgccttggaccagaattagtagcaactaatttctctccaatatttgaaccatattcttcaatatcaggcaacgcaccagcaaatggaaccttaggcttcttggacatatcacatgggggcaacagttctgcggcttctttagtataaaagctagagaaaggataatacaggcctccatgcaggatttggggaatattcttgaattgcattgactgcatattgaccatgaagaaaccaacatgcgtgctcaaaaataccacat

SEQ ID NO: 10664 - DNA, 310 bp, Oryza sativa
  Clone ID: uC-osflcyp078h05a1
aatgattattagaaaatggaaaacaaaaaaactagaaacagggtccagaaagaatcagatggaaaccttgcaaacaattaaggcattctagggggcccgtccgcatgccagaggaaaataaaccaagctagaaaccaacgagctgtatttggaccctcgaaggacattcgatgtgaatggaaaaaaagcaaaccagcaattggcggaccttggggccgccccggggggggtggaggggacaggggcgccggaccccctgtcggccaggggcggaagccgcctgctgctggggaaggaccctgaagcaggg

SEQ ID NO: 10665 - DNA, 380 bp, Oryza sativa
  Clone ID: uC-osflcyp078h09a1
atgtcacattctaccaaagtgattagctttcttaggagcacttgaccacacaggcgctgatacaacacacgttcacagcacacatcacaaggacacaaaagttagcacctgcattaaggaataaacctcatgcctgctaggttactactgataggcacttaaattgaattaagcatgaccggaccattcggttggatcgccctgcacttgttaagagaccacataaagaggtttgcattggactcaatatctttttatgccttggaccagaattagaagcaactaattttttttcaatatttgaaccatattctttaatatcaggcaacccaccagcgaatggaaccttaggcttcttggacataatacatgggggcaac

SEQ ID NO: 10666 - DNA, 514 bp, Oryza sativa
  Clone ID: uC-osflcyp078h11a1
aacacaaaaaggcaaattttcatacactccatcggacattatacaagctgaagcagaaataggaaaccagaaaaactgcatacagacttcagtaagattctgtccgcgactctcctaacaatacaagggaacaaagaagccaagttagcattccaggggttcttctcccacccaagaaaccagtgaactgaaaatgctcccatgaaggacatttgatgtggttgaactcattggttaccaccattgcggccaccatatcctcttcctcgccgctgttgctgattacgccgctgctgggcaatctgccggccaggggcagtattcgtctgctgctgtggaatggtcctcatcctctgctgcttcatttgtgcaaagagcgcatccattgtccttggtgccttgttctgcacctccttccccttcccattctgaaaagcctgtcctacaggcctccgctgtattgagttagatggggcactgcatccaggacaaaacattagcagctcacaaaggc

SEQ ID NO: 10667 - DNA, 406 bp, Oryza sativa
  Clone ID: uC-osflcyp078h12a1
ggtgttatagaccacaagagaaacaggaaaaccggacaaacggccccaggcaaaaaaaccatggagacaaggcggacaacacaaaccacaaaaaacaaaacaacaaaaaccacccaaagacggaaaaaaaagagccaaaacccccaccccaacacgaatgtccagaaaaccccccccaccccgagaaccccggaaacggccaaagagaccaacaccccccaccaggaccccacaaccaaagaggaacagaacgcacgcaaaacctgaccaagagatcccccaaaaaaatcaacaagcgcgtgcccatcctggcaacggtgagaacgtcacccactacccagaccaggcggaaaaagcctgaaagccccaccaataagaacaggccccacatcaagcggaaaaaccc

SEQ ID NO: 10668 - DNA, 435 bp, Oryza sativa
  Clone ID: uC-osflcyp079a01a1
aagccaacgggataactattaataaggggtaagaaaattcatgtgtaaagaaaatttaacataattttttatgaacgctagcgagtagccgtgctactgcgcgggactttatttacaaaagcaacctttgaggttaacttgctttggacgggcgtctgcagtcatgagttcactgtgcggttgtacatgcggttggttgaccacgcgcgagctcgtccagccccaccggcgaacacgcgaggatgaagtgtgccaacggctcggcctctaccgagggcgcgcacggcacccattcccattggtccacggtgctgtccaccccgttacgtagctcgtagagcacggctccgattgccgggtcggtcgcattgtacacgtacccttctgtggcgttgccgtacaccaagatcgacggcgacatctggttttagtcct

SEQ ID NO: 10669 - DNA, 455 bp, Oryza sativa
  Clone ID: uC-osflcyp080a02a1
cttgccaaggtgcatcctcttgctgtagtagcatagatgatagaaccaccacacttttttacatttccaaccccactggtcggcagccatctacaatttacatgacaggatagaatgaataaatactacggagaatcttttgttgctgcaggctgaggctgcagaccaaatgtgctagcttagctactggacatgaaggattcatgctttatgaaccgagcataagagagactacttgacactacatgtgacacatttacaatctaggcacacggagcgagatgagcttccatggtggtatcacatcctacttgaaaaggagtagagcaccacaacgagcccaccctgtgagcgctgctcactcaatgatctccactagctaccagtgacaatgtggcattgagcttctcataaggggttgctgaacaaaaccagttaggatctagtgctccggc

SEQ ID NO: 10670 - DNA, 406 bp, Oryza sativa
  unsure (1)..(406): unsure at all n locations
  Clone ID: uC-osflcyp080a03a1
catgacaaatagaaaattttatttgatttgattctgttcatgtagaggtaagctattgtttaatctgaggggatttcgcttggcatctgtcaaactaagaaaagggcttcctgtctcttttttcttgacatctagataatggataagaacagaaaatgagtctaaagctactttaaagctagctaaactgcttatactctctagatctgatcaactggaaacctgaccaaccagagaaatgttattctatggcgggcattgagcaaatggagcttgattggagcgagcagaagtgctacttgtccttgtgttctgcaagctggtcatcttgatctccattgcttctggacatagttaacggctgcaggtccagttcctgcctgcgtgaccgaggtgacctcttcgn

SEQ ID NO: 10671 - DNA, 411 bp, Oryza sativa
  Clone ID: uC-osflcyp080a05a1
agcttgacggcgctcgcacgcgacgtaggctcgtatacagcggacgggccgcccttttttttttttgattgaaaccagacggccattaatttgaactagaggatcacaaactccgtacatcgacaaagagcccgtgtcatggctctaagcattttcgcatggaaaaatggacgtccctagaaaccattacacttttaaacaacctaacacatgagctggatataaaacacaccaagcggtggcgacacatcactacagctttgacttatcatacgacgacagctccgacttgttcttgatgttggataatgcctactcttgaacctcggactgctggacctcctgttcctcttccacgggcgtgtaggggctcatgtcaaggctcttctgcaccgacctgtagatgctgga

SEQ ID NO: 10672 - DNA, 311 bp, Oryza sativa
  unsure (1)..(311): unsure at all n locations
  Clone ID: uC-osflcyp080a06a1
aaaggagcctccaccgcgnccttttggttgggggagacagacccagcttcagagagtgtaaaatttggtttatctttggggcaaaaacaagcgggctctccgttacagggccagttcgatgctagaactaccgcctttattttgctggcgaagatatgcttcaaaatccttgctgagaaatttatagcttcctttctcttaaaaaatattgctcctgtatttttatgcccacgcatccaagctttgcagaaacacatattttagggggtcgtcctcatccttttttttttaaaatttttatataatatttt

SEQ ID NO: 10673 - DNA, 298 bp, Oryza sativa
  Clone ID: uC-osflcyp080a07a1
ggggaaaaaacaaccctccccccttttttatttttttaaccgaaccggggaggggtttttttttttttttttggaaaaaggcggcatacgccatttattgaccaaacaacctttttacaaaacatgccccggaggtaatcccctttttttatccgggccccagagcccctacaaaggacttcgtgtcccacctttacaatgggcccccacattggccaaaccggcccccatggggggaccccggaatacttgaccgggacctgagggggaccccaagttccccctgtgagcgctatta

SEQ ID NO: 10674 - DNA, 456 bp, Oryza sativa
  Clone ID: uC-osflcyp080a08a1
gatgtataagtattgagcgtctatttgaatacacatggacacacaaactgtgtaacggttcaagaactgagagggtggggaaactacagagcagcagctacaatattaaccatagcagctgcaggataaacacggtgctaaataggcaggctttgttcttctttcacagcctggatatctggaaggggaccatgacttcagtcatctcctccctcatgataatcttcccaacctggaaaaggttggagatgcctagctgcgtcgacagatgccttcggcaatgctctgcagcaacaatgcctgaagaataagctccatgcacggacccagagtgatcgatgcaggcgggctccccagcgaaaaacaggttgcccaccggagcacagaatttttcatacaagccagctggcttgccacaaggtcgcaagaataagaaccaagcgaattcgggcggtt

SEQ ID NO: 10675 - DNA, 364 bp, Oryza sativa
  Clone ID: uC-osflcyp080a09a1
aaaaaaaaaaaaacttttaaaaagtttgggggggagataaaaaaaaagaggggaaaaaaagtgaaaaaaaactggggtgttaaaaaaaaaaattatcccggaaaaaaaagaccaaaaaaaaaaatgggctttcaaagaattaaaaacttaaaagggggggagaataaaaaaggccctttttttaaaaaacagatgggggaaaaaaactaccatttttaaaaaagggaaaaaaaatctgtattgaaaaaaaacatttttaaaaaataaaaggggaaaaaaatgggggggtgtcctttgcgcccttttaaaaaaaaacgggggtttacccaacaaaaacgggccggaacctaaaggcccccgaggt

SEQ ID NO: 10676 - DNA, 456 bp, Oryza sativa
  Clone ID: uC-osflcyp080a10a1
gacgtcaacggtgcctcaatctttcttaaataatcattctcttgttcacataagttagattctttttttttctttttgagaaaagaagatagatggttacacttgctgagcaacttaaatcctcagccccctgaacgaagcagcagatttcccaagcaagcaaatgaaatgcaaccatgcgctggcttggaatagctcgatcagtacccaaccccaactcaatgaactggacccagctcgatcaaggcgtgaagctcatctcgaactcatcatcgccaaccatcatgaaatgcgacccatgatcaatcaccttcttgccgtcctccgtcgctctgctgaagtgcttgcatgggctcacctcgaactccacatggacagtctgcatcgacttgaggtgcaggctctggaagccgatcagctggctcgccggcctgccggcgtccgccgcgccgttcg

SEQ ID NO: 10677 - DNA, 479 bp, Oryza sativa
  unsure (1)..(479): unsure at all n locations
  Clone ID: uC-osflcyp080a11a1
aaacctaaagcatgcggcattgtttatttcagaacggcaacctatgcttcagtttaagagtacatgagatcactcgcagtatataggagattctaagtcccaaccaaaattaacttctatccttttttttccttactcttatccaccgatcatcaaactaacagaacgaaaacgaacaaatctccagtctttcagtccacgtctcagcagaccacgcactctgtttctcacctgcaaaattgttcaagtaagcaattctcaagggggggctgcctgctttccttccatcagttgctagcgctcgctgggaggtagtactggtagtagcctagcacggcaagcagggcgacgagcgcggcggccactgcagcagcagggccagcccaggaccagtacgactgggctttcttcctcctcaggatcgccttcggcagcggngccttgctcttggtcacgacgtttctgctgtaccggacact

SEQ ID NO: 10678 - DNA, 420 bp, Oryza sativa
  Clone ID: uC-osflcyp080b01a1
cttaccaccgcctctcaggcctccccgacgggttctaccatagaggccaacgatagacaataactcccccccgaacacagcttacaactttcatcgtactgtgctctccaaagagcaactcttctgaaaatctcaaaacaaaaggtgctgagttggaatcccattctaaggattcttgtggttccggggaatccagctacaggagaaccaggaacggggagctctcccctttttccgcccgactctttgatcttaaacttaagaatgctgggtttaagaacgagtgattgcccttttccgacccttactggccaaccggagagcggacggctaatgtgttccacttattgaacagggtctatggtcggtccgagacccctggacgccgaaagcgtccttggcgtgatctcatagttccta

SEQ ID NO: 10679 - DNA, 406 bp, Oryza sativa
  Clone ID: uC-osflcyp080b02a1
acacccattgatgaaagttttttaacattaccaggaggccaaaactaagacagggaatacaaacatccaaacgcagagcaatccaaggatgacaaccggatcttaactcttgaaaaacaaagtgcattagacaaggccgaggtaggaaggactttatttactgcgccatcctatgcctggtcgtcctagacaggggaatgaatcataagagccttagttggcttggccaagagggcggcgtacttctggaatggaaactagacgaacttggtgttcgtccagaagataggtgtaaggaatgcataagtcttaatcaggcagtgaacggaggtcttgccgcagatgtcactggttttgggagatccactggacgaggtgaagactttctatatgacggctaactgga

SEQ ID NO: 10680 - DNA, 496 bp, Oryza sativa
  Clone ID: uC-osflcyp080b03a1
tttgactgcacgcgcacgcgtgcgtgggctcggtagagcggcacgccctcgccctttttttttttttttgttttttttttttttttttttttttttttttggttagcccgtaacaacatcttttggtattgaaacccaaactaagaggttggtgggtacaattttaaacaatgaggggacatctggcggttccttttgaacaaacattaaaacaccgtaaacccatggggccattacgcctatcctaatcgaaatggtttaggacattcccaaaagaattttcggccaaccggtaggagtttaacacatattcggggtttgggagaatagttgctaggcaggccgcttaattttggcaaaaaggttgcccccccggccctggagcccgtttgggtaaccccccacattagaaacccggcggttttaacaactgtagtgcaagtaggaggccctcaagccgacggtgtccctaacaaacggccactgtttatttttg

SEQ ID NO: 10681 - DNA, 449 bp, Oryza sativa
  unsure (1)..(449): unsure at all n locations
  Clone ID: uC-osflcyp080b04a1
ggtctcaagaatcttaagatggtaaatacacacaagagagaggtacggtatacaagacttagtttttcttaagtacaacagatcttccattcctccatgatcctatcagcttctacacccaaaccacacaaatcaccatgcacgagccctcttcctccactgccaaatcaactcacctggggcttgagtagccaagcatccatgtggtgatcagtagccgatgtcagcgtcgtcgacgacgaggttgccggtgatgagctcacggtaggcggcgacgggccagatgaaccccctcgggaggagcttgacggcgagctcgacgtcgatgatgatctccctcatggccggcttcttctcgccgctgatggcgatgaggtagctcctgccgacccagccgatccagccggcgatgtagaggaagagcaagcccggngtgatgaactcgcccc

SEQ ID NO: 10682 - DNA, 274 bp, Oryza sativa
  Clone ID: uC-osflcyp080b05a1
ctgggaccgggatcaggcatttgattaaatggggataaaccgaacatatgtgtccaaaatcacaagggagaaccacaggtggcaataggtattacagtttttgaatagaaaaaaatgataacagataggccggttgaaaactttgtccacgctaatgaagaaaccgccccaaaaagagagaaacaagccggaggacggggataacagctccttttggcttaacatttttgggtccgaagaattagaagcattttctgtgcacaatggatgggcc

SEQ ID NO: 10683 - DNA, 476 bp, Oryza sativa
  Clone ID: uC-osflcyp080b07a1
gcaataagctaacactactattgtttctagatatacaagggcaatttggcttagacaagctggactactgcagcaattctcagggatccaccctggagaagatcgccaagttcgtcgaacaatatggcagtgcgccaaccccacccttttggagctttgggtaggagtgtgccagcctgctttaggcttccgaaaatcatgacctctctcttcgatggacagataagctgataccgagcagtgaccttttcccggtggtctacatacatgttggccttcctcaatgggtctaaaggctcagccttgcgtcggtgcagaaagagtccaagggtgcgacgtccatgaggatcctcgtcgttgaatgcctggacacttaccttccaaagagagcctgcataaaatacttcagtcgaatgcttcacctgactatctgcgagcctgtgcacatcttcaaactcaactccaaagcggaaagg

SEQ ID NO: 10684 - DNA, 347 bp, Oryza sativa
  Clone ID: uC-osflcyp080b09a1
ggttagccggcaacaacaactcaagattgaatcatacctaagtgcttgctgatacaatatcaacatggagggtacattgccggttccatatgaacaaacataaaaacaccgaaaccccatatggccattatgccgatcctagcctagcttggcgaggacatcgccaagagcagatttggtcaacgtgtagtacttctccgccttttcggggctcttgatcttggctgcatggtcaagcccgtcaatggtggcaaaaagcttgccggtgaggtccttgaggcccttcttctcggccttgggcttggagttgatgacggttttgaggtcgtagcgcaggtaggaggccc

SEQ ID NO: 10685 - DNA, 484 bp, Oryza sativa
  Clone ID: uC-osflcyp080b10a1
aaaccacacaagattaatagcgttgcacaagaggttgatagagcattacatatttagatgaggcacacaaccaaagaagcagcagcagctgaccaaagtttagacccatacatagggcaaccagtcattgcatacaagatgatactagtggattatggcagcttctctttttctcttctgattgagcagagagatgccaccgccattatttcttgaggtgagggaagcacgcggtgaggtcgctcttcggatgcttcgcctcagcatgctctttgcacttggtctcagaggtggtgcagatgaaagtctgcatgcatatcttgcactggatgttcatggccttcttgttggcctcaagctggctccccttggcgcccttgttcttctccatgttcctctccctcgccatcttcgacttctgcccattgccgccgcccatctcgtcgacctcgaccttcctctccccctttgccggaacaagaga

SEQ ID NO: 10686 - DNA, 282 bp, Oryza sativa
  Clone ID: uC-osflcyp080b11a1
atccgggatcggtttttttttgcctaggggaagaacacatgcatatcactcgcagaccataggagattctaagccccaaccaaaagtaactcctatcctttctttgactcactcttatccaccgagcatcaaactaacagaacgaaaacccacaaatatacagtctttcaccccacgtctcagcagaccacgcactctggttctcacccccaaaatcatatcaagtaagcaattcttaaagcggggctgcctgcttttcctcaatcaattgcttgcgctcgc

SEQ ID NO: 10687 - DNA, 335 bp, Oryza sativa
  Clone ID: uC-osflcyp080b12a1
ggacaggagctgaaaatctttataagccatgacgaccatcacatatatatcgccagaggggggggcaagccaaacaaacacagggaccccattggggatcgggggaaagcaacgcggcagcggacggcccggggcaagatcgaagggacccatgcccttttttttttttaccattttggggggacaccctagcacaggaggagaggctttgtttattacaaggcgaccaaaacctaagcaacactgaatttttgcagccgtgccggccaggaaagcgaggttccttgctccgggcttgggggggcacgttggcacggtccccccgggcggcgggt

SEQ ID NO: 10688 - DNA, 471 bp, Oryza sativa
  Clone ID: uC-osflcyp080c01a1
gattattagcgggctggttattaatatgaaccatgttcaatccttagccagatttatcaagacactgcatcaaactcgacaaacaggaccatctccccaaaagggcttatttcaactagaaccatcacacctctagaacctgattaaatagctagctacattaaaattgcacaccatgtttggaggttaaaacatacaacgcatgaatctagagcttgaggaaaacgaattcttcaatgggcggaatctccccaatttttgtcagggcgctctttttaggttgctcatgaacaccaatgggcatgacagactgcttgcgaggagcgatatttccaacactcatgaagccgacattaacattctcctcaccaaggacacttgctactgcgccgatcatagccagttgatcgacctgtctgcaaggatcaggctttcttacaagctcacatcaacctggaatgatccaacctt

SEQ ID NO: 10689 - DNA, 464 bp, Oryza sativa
  Clone ID: uC-osflcyp080c02a1
cttccaccgcaaatccaagagcttcttattaataataatagtaaaaataaacgccaaaagttctcacacggaagcaactaacttagcacacaaaagacagacatgaacacacccaagcccctcctcttccttgtctaaaacgaagcagcaactaaattaaatcgacctaaaattccgaggcccccaatggcggcgatcgacgacgaaaccgaggagctctagttggctgccttgctgatgagctcctgcgcgacggcgacggtgggcagcgccgggatggcacccttcttggtggtgcagatggctccgcacgcgttcgagaacttgagcgcctccctcagcttctcctcgttgtggaagatggagtcgtccttggcgacgttgactaggagggagccgacgaaggcgtctccggcgccggtggtgtcgacggtgttgacggagaagccggggacggagccctt

SEQ ID NO: 10690 - DNA, 117 bp, Oryza sativa
  Clone ID: uC-osflcyp080c03a1
ttatttttttttactatcaccgaacaaccgcttacacacggatggcaagaattctaggagtggaccaacacacccttctgtacgcatacagtaacttacacgctgctacgctttttt

SEQ ID NO: 10691 - DNA, 416 bp, Oryza sativa
  Clone ID: uC-osflcyp080c05a1
gaagaaaaacactgaaaatgcaggttgcttagcctgctacatctgcatccttctcaatcaccgtctgcttagcgacaacaaaagagcaagggcacagacgcagcagctggcatagatacacacaaaacacacacgagttttacaggacaagcctattttagaaattttacatgtactctctcttattgatccaaagggttcgttcatctatctccttcttgtacgctaccttatgctgctgtcagcttcttcttcttcttcttcttcttcagtaactggtgacgatgagcagcccgatcgccgtgacgacgatggtcgacggcaccccgaaccggaggtggctccagaaggagaggttgtagccgaagaactgagctcttctagcctgctcgcagacgatgaggttcgcagccgag

SEQ ID NO: 10692 - DNA, 501 bp, Oryza sativa
  Clone ID: uC-osflcyp080c06a1
gcacagcgcacgctaagctaggacttcgtatagatgctagacgggctgtcctttttttttttaaaatggacatgcaatgcctggcctgtattgtcaatgataaccaggccatggaaaacgctaatacagcgatactaataatgtgctgcaaatacaggaagtggttgaaagttgctaattaactagtaaataagtcacggaagcaatgtagtgcacataaactgtgtccactgggtacttcagctcgacacattttgacatacgcagccctaatcttatgattccacatagcaattgatcctagtacatcttatgatccagtaatacagcaggtagctgagtaaatggactcagaaatagacttcaggacagattagtggccctctccttcaggcttcgctgcttccttgatctcgtcaccaccatcctccgcattgtcagaggtccagagagtcagattgtcacgaagaagttgcatgatcaaggtgctgtccttgtaag

SEQ ID NO: 10693 - DNA, 302 bp, Oryza sativa
  Clone ID: uC-osflcyp080c07a1
caccgcatattcattagctccgggttgggacttattgcaaaaataaacggcgaaagttctcacacggacgcaactaacttagcccacaaaagggcgttattgaacacacccaaacccctcctctttctcgtgtaaaacgaagcagctactaaattaaagcgacctaaaattgcgaggcccccaatggcaggcgatggatgacgaaaccgaggagctctagttggctgccttgctgaagagctccagctctacggaagacggtgggcaacagcgggatgggacccttcttgggggtgcacatg

SEQ ID NO: 10694 - DNA, 436 bp, Oryza sativa
  Clone ID: uC-osflcyp080c08a1
atatatagcgagccattgcttgcagccttgcactggcaaccatttgcaggtataataatataaacattcaatatccccaagaaaccaacaaaaaaggacagaactaaacgatccatccccatctgcagattctgtccacacttgatcatacttctatcttgcatgactatctttttgtgttcagacatcatatcaatcgttctcatatcacagaggcacatgatttgagatgcttaatcaggagaataaatggagatgatcccataagctggcaccaatcatgctgggaccccgccgggtatccttgacggcgccagactggtaaacaggcttgcatcgcagacttatcgcacggcctccttgggaagaaggacgttcttgggcttgcccgatcttggacaggaatccttcacttgtgaccatgctgccaccccat

SEQ ID NO: 10695 - DNA, 442 bp, Oryza sativa
  Clone ID: uC-osflcyp080c09a1
atctctgaactttcgcttacacatagatagcaagcagtctagtagtggaccaatccggccttctgcacgcatacagtcactcacacgctactacgctatctttacatggagaacatatacatatattgcgacatagaagtgcatatgacatataattagtgtgcacatgtgtgcatgctgctgctgcatgcagcgctagattattcgttcgcagcaggtagcgaagttgtgtgatcagttttgtcaggcgtggtccggctcaccaggaagagcagcgagaacatcaggaggagcagcgaatacatggcggtctatgtcgtcaggtggactagcgaacacttggtccggatcatgggctacgttatcatgggggctagagaacacgtatcggtggtccggatcatggtctaccgcatcagggggactagagagcacgtaatgg

SEQ ID NO: 10696 - DNA, 227 bp, Oryza sativa
  Clone ID: uC-osflcyp080c10a1
cacaccccaaccacaggaaagctaggttgtgtaacatgaatcattaacttttacagaccacttaatgtctctttaacactgggaacatgccctgtaggaggcatagatttcacgagaacacccacaagcttctcagaacatgcatatgttagaacacatacctgttccctatgttatataaccgaaggggcagtccatctataatgacacacacactttgccttaag

SEQ ID NO: 10697 - DNA, 491 bp, Oryza sativa
  Clone ID: uC-osflcyp080c11a1
aaattgacttgcacagcctggcctgtattctcaatgataaccagcccatggaaaacgctaatacagcgatactaataatgtgctgcaaatacaggaagtggttgaaaggtgctaattaactagtaaataagtcacggaagcaatgtagggcacataaactgtgtccactgggtacttcagcttgacacattttgacatacgcaggcctaatcttatgattccacatagcaattgatcctagtacatcttatgatccagtaatacagcaagtagctgagtgaatggactcagaaattgactttaagacagattagtgggcctctccttcaagcttcgggtggttgcttgagctggagaacaccattctccgaattggaagagttcaggcctgctcgaatgcgatgaggtacgtcggccgatcaaagggctgtgaggttcccggcaacggtgctgacccacgctaggataagccaggccttcctctctgaatc

SEQ ID NO: 10698 - DNA, 468 bp, Oryza sativa
  Clone ID: uC-osflcyp080d01a1
cgtcctttttttttgacttttaatttacccacaaagaaagtgcgatcattaccgctgaaccaccacctaacgcacagcatcatcattagaaacttttacatggcacattaaagaaggctgacagagcaatctgatgcagagaggaaaccagacaatcacacggaaagatgcacagatactacctagggctaaatttagaaacagatgcagatcaatctgcattgcacacatgattaatgcttggttacacttgcacacttcaccatatattatatgtatgtatataaacatatatatatcatgagctggttcatcaccaaaaccatgggcaattcgagttcttccccgggccgccatagtagaagtaggtgccccagtcgccattggtgccgttctgaacattgtaacaattggactggttggtgtaggtgcccaaccccttgggggccctcagctgggtgctggtgt

SEQ ID NO: 10699 - DNA, 477 bp, Oryza sativa
  Clone ID: uC-osflcyp080d02a1
gaagttagccttgagtgaattttattcatcattccctgtgtattacactatacagtagtgcttcaagatacatgcacatatatggacagcattctggtattcgcatatcacatctcgtgtatttcttgtgtttctgtcgctaaccttgtgttgctgcttcacatctctgccacgagtttggactgggcaagcgcaagatcgaatgaggagaaagagtgaggagcaagcgtgacttgcatctgctctgctgcattggaaagctggcttttgacaggaacaaccttattcgggttactaaaagagttctcatccatcacattactggatgtgagaacagtggcaggttgatcccagtgcattaacacgggcctgaagcccagttgcagagatcgtgaggctcacctggatcagacccaaagtttataatctttactcttaagaagctattttcagaatcctgccaagtaattgcagatg

SEQ ID NO: 10700 - DNA, 403 bp, Oryza sativa
  Clone ID: uC-osflcyp080d03a1
gggacggggggtgtattctgggcagaaatcattaattccaaggctgaatgccctgaccaaaaccaatacaagagggccaataataattaaacaaacttaacgtttagtacttgactatagcaaactgaagtccggaccctaaacaaaacaaaaacttgggtcactgattgggcttaactgaccaggccttgaccaattttgtcaccaactttacaaagactgcaagcaaaaaaagtgccaaattaacaaacgccaaacacttgcaaattttaaccatggtcggggtttacacaaggcccaattaagcgctgtttttgggctcaccggtggtagacgtggccgttttgtgcttcctcggcggagcccttgggggaaccgggcaggaactccatgaacttggcca

SEQ ID NO: 10701 - DNA, 477 bp, Oryza sativa
  Clone ID: uC-osflcyp080d04a1
gatcttcaaggcaccatgtatttcagggaactacctcataatactattttactgaaacactccatatctctcaaaaatgtttagaaacactggaagtaaacatgccaagataccatagctggcgattatgttcacaattcttgaccaaataaagcaaagccttacattaaagaaactagccagaacatccacaagactattgctttaaccaacttggtgtttctgacttctttgatcatgtctaattcaggagcaccacacacaattgccacttcttgtccaggtccgtaggccttaaattaaggagctccatacaatccggggcctacaccaacctcctacggtgccatgtgtgttccatagacgatatgatgcaaaatctcagtaatatgaactagaaccactaccgccatagtagccactgctgctacctacattacgccctgagtaaagtgatgaatatgaacttccaccaac

SEQ ID NO: 10702 - DNA, 543 bp, Oryza sativa
  Clone ID: uC-osflcyp080d05a1
gactgcacacgcacgcaatgcttggattctgttgacgcgggcgcgctcgcccttttttttttttatatgcttttcagaagattactgatatgtaagaacatgtagtagcaagtacaattaaatgaatagcctctcgatccatgcccaaatatttggaccgaacgaacattgccatacaaagtgtgcaacatccttcctcgcatgttgctacaatcttgacaaaccgatcgaattcagttttcaacctgattttacactcttcttcatcaactttacagaaccgtggatgattttttggttacaccggcagcagcaaagtgggaggggggaaaagaatacgcggcgctagaatcccggacaaaaaaaatgtagttccacttccatatgcaccagctttcccaaatggctggaggcagggttcatttctgttttctaatggaggacggtgaaaaaattttgaactagttttcatgctgacctcacaaattaccatcctacgaaagcgcattgttttcaagcatgttttgggataagctttaccag

SEQ ID NO: 10703 - DNA, 266 bp, Oryza sativa
  Clone ID: uC-osflcyp080d06a1
aaaaaaaaaaccccccccctttttttttttcccccccccgggattaaaaacaaaaaaacttccccccaaatttaaaaaaggccggcccctgccccgacccaaaacggtttttgggggaaaaaaaaaaaaagggggggcacccccgggttttaaacccaaaaacacgccctggggccttaaaaaaaaaaaaaagggggggggccccaaaaaaaaaaggttaaaaccgttggaacaaaaaaccggggaatccgggccccctttggggg

SEQ ID NO: 10704 - DNA, 439 bp, Oryza sativa
  Clone ID: uC-osflcyp080d07a1
ggaagaatgctgcttcgattcaagctttgtaagggtgatctcatcacacgtaacaacgctgaaggtatccttcatccccccgctactctatatcagtaaactcacacgattcggttgcgccactgaattagatatgcagaggggttcttgccacagttaactcaaaatggcgaacattaggtcaaaaagaaggctatgaacaccattataagctttcaactctttacttctctaatgaggactgggttggtaagatgtatgctgcttctccttgggggggaaccaagctgaattgtatcagttggcagctctcaggaatagaggatcaaacaggaagaaggggctgcctctcatcagtaccgagcctgtgtttagcctcagtagcaatagaatcagacacgttgacgactacagattcctttgatctgtgctcatgagc

SEQ ID NO: 10705 - DNA, 434 bp, Oryza sativa
  Clone ID: uC-osflcyp080d09a1
gggacggggggagtatatgatgatccacccataacttaagatctttattacatttacactagtacaaggatatatatttataacaaattaatggagtgaaggatgaattagcaccccacacacacatacatttcggtaattatttatcacaaatcgcgaggtttgcatatgaaataaacaaccaaacactcgacggataaattaaccaaactttgattaacaacaaacaatcgactgcgaatttataaaaatatggatcgccggagccgctgcgggcggatggagtcgtggagatggaagccgcggcgcgctcgatcgatcgatcgatctcacacatgcaccttgggtgccacgccggcggcgccctcagcggcgccggtgagagacccgccgacgttggcggcggctccaattccagctccaactccagcccg

SEQ ID NO: 10706 - DNA, 323 bp, Oryza sativa
  Clone ID: uC-osflcyp080d10a1
tgtttttttttttttggcacctagcgacacaagggaactagccggatatatcccaagtactgcatgactacgtatgtttcacaaatgcgtcgaaacactggaaactgagactggccgattctctgaaaaggagattatgctcacaacgggtgaccaaatgaagtagatgctgaaattgaacgcctaaagagaagataaggcagactgttggtaaaaccatacgagggtgggtggcctgggagaacctggctagaggtaatccacgacacccaatagcctaatcttgaaccggggcggcatgcctttaacaaggcttttaagcc

SEQ ID NO: 10707 - DNA, 385 bp, Oryza sativa
  Clone ID: uC-osflcyp080d11a1
cccaccacaaattggttaatcagagatttgaaactcttattgttaaggggccaaaacagtgggcccagccattattaacctccccagagggcaacagcctttctttattggccagacaaaccattccctccgtgcggagtcaggtttaaaacggcttaatccctatggtgctcatttgttcattacatctgcattgcaccatccaagacccatatttgcatatccataggtgatacagttccatcgtgaaaacgtttattcctctacaaggttttgcatgctactactaatgcactatacctttagacattcccaggttacaataccgagtaaacaaggtgtctaacaaacattccaatacttgatatgttgtatgacccctaag

SEQ ID NO: 10708 - DNA, 422 bp, Oryza sativa
  unsure (1)..(422): unsure at all n locations
  Clone ID: uC-osflcyp080e01a1
gctatgacgtcgcagtgcacgcggcgaggatcgatgagcggacgggccgccctttttttntgactttttattttacacacattcattataggtctttcatgctggtttaccacaggaaaacgtttcagacaccatcaaaccagacttaaggatacacattacaggtgaataggacacattgaaacgggacaccaacaatggccagaccagacaaccataggttcatatggggaagacaaataggcagacttgtgaaccctataacagtagcagcttcatggctgaggacttactgtgtaccaaggaggcggagcaccaggtggagtgaggacctcttttggatgttagaacccggatgggtgcggacatcctgaagatttttatgattgtatgagagacgcttttggtccggggggtggccc

SEQ ID NO: 10709 - DNA, 327 bp, Oryza sativa
  Clone ID: uC-osflcyp080e02a1
acaacaaaggaacataagtaccactaaaatctttagaaaatgtttttttacatcggctggggggctcccaatggggggaaagattattaacccaagtttcaaatttggacgggaagaggaaaacacctgtctcagactaaaaaattatttgcatttaacatataaaaaagctggctaccacaccagactaagttattactaggcattaaaacaaaaaccttttgtttggtgaaatattaaaagggtggtaacaaggttcgagcaaggcacccgcaaccaattaacataaaaaagaacagggtcagactggactggtgtatttaaaac

SEQ ID NO: 10710 - DNA, 295 bp, Oryza sativa
  Clone ID: uC-osflcyp080e03a1
aaaccaagcaggcagcctgtttgggcccttgggcaaatgcctttctttttttcaaggggaagggctttaaattggcccccccatgaacccacacatggtccataatcgtacgagctaaacatggataacccggggaggcccttacaaaaaaaaaatctacttgaaaaaaaacgggggggccagcccctaaagggggaaggaggcccaaagggcccccgaaaagccccccaaaaaaaaacccccggggaaattggcccaacccccaggggttttcaaattggcagccttctttttg

SEQ ID NO: 10711 - DNA, 98 bp, Oryza sativa
  Clone ID: uC-osflcyp080e05a1
cattttataatttttatctgaccgcgagcaaaacagtctatttagggttgcctaagggtgtaatattcaaaggtccatttccattggcttaaccacca

SEQ ID NO: 10712 - DNA, 293 bp, Oryza sativa
  Clone ID: uC-osflcyp080e06a1
cagcaaccccccatatataatgacaggttaaggaggctttataaataagtctcgggggttccagacgagttatgaaattagttttttcattcatgtacgaaaacccctttctacatccgatggggcacttaaaaatttttttttcgcgaactaaacacacccccaatttacagggagagattgggaatgaaatgggatcccagcatttttctgactaaaaggtggggaagaccttagaaaaaacatatagggatttgcttcgtttatgtcattaggcaagaacggcctgttat

SEQ ID NO: 10713 - DNA, 110 bp, Oryza sativa
  unsure (1)..(110): unsure at all n locations
  Clone ID: uC-osflcyp080e08a1
ccnccccncctcnccccccaagggagcattatttccactaaaaccttaagaaaaccgggcccttacaattgggggggggcccccaagggcaccaaaaaatcttaacccaa

SEQ ID NO: 10714 - DNA, 334 bp, Oryza sativa
  Clone ID: uC-osflcyp080e09a1
gaaggatcggccattcttgatcaatcagctagcagtacacaacatcacatgacagattagcagtaataaatgtaatggcgactgacaagcagtatgatgcaaagagattaccacacgaacacacagaattagcaaggcaatctgaatgggcttataattataaatcaagaaaatatgatatccggtggttcttcgaatctttgagggattacaaaactgcaatcaaaacataaaattgcttgtgtttgtccgcgagtgattacgaggaggaggcgaagcgatcacctaagcgcggttgcggtgggcgtaggggaggcggacggcgccgtactgc

SEQ ID NO: 10715 - DNA, 376 bp, Oryza sativa
  Clone ID: uC-osflcyp080e10a1
gaccgtgtgcaaaacgtcatatatttttttaccaaagggagttatatacaaagttccatttcgattggcataacaccacatgattcgatcagatggatctgagctccaaggctgcaaaacaccatattacagaacatgcatttcagatcctgaaaatagctgcacttcaggatcaactaccgttttcgatgtttattgacatgaaaattccagtggttcttactcccagcaacgaacagaaatgaaaatgaaagtggatgaagctaccaaataccagtagcccaatacgccagtctctcccggtgtgtttacaaaactggaccttattctctacaacgcttagttgaaatggtagagcggcagttcgtcgttgagc

SEQ ID NO: 10716 - DNA, 92 bp, Oryza sativa
  Clone ID: uC-osflcyp080e11a1
acagagttgggtttaatttaacaaaaacccaacccgacacaaaaacaaaaaataaatcatatcttcctcaaaaacaattcgaaaacacctcg

SEQ ID NO: 10717 - DNA, 270 bp, Oryza sativa
  Clone ID: uC-osflcyp080f01a1
cctgatagagctggacggcctcgtcctttttttttttttttttttttgacacagacacaatttaaaccggtatatatggcatgcctatttccctttgatttgttgatacaagggaatccctcaacctgaacggtaataatttttccattgccggatgatcattgcactgatattacagtgtgctacaactgtaccagcaaagaaaatgaaagggtatgtgactgcctctggagctgacttgcaattaggagtgggcaagcaaatgaatct

SEQ ID NO: 10718 - DNA, 483 bp, Oryza sativa
  Clone ID: uC-osflcyp080f03a1
gatctcaaagccatcatccacggctcagaataaataactagtaaaataataaataatcgacggcgaccgtacaccggccgccggcagccgtgaccagagccgcagttcctgcagccgctccggcgtacggtcggccagcgcggcagccatcaataaataacagtactctaccagttcatatacgtatacgtatgtacgtatacccagccgtatccgtatctacgccgtatgtatagataattgctatacgcccccactttccttcgctcccaaatccccaattctgcaattccccctgctaaattatccacttcaattcttcctcctgttcatgtcgtcctcgtcatcaacgtgaccccggacaagtcgccgccgaacttttccagcagcaccaccaggttcccgctaggattcagccatgatcttgggacatggtaccattttgggaggcgtcgccgcagttggcctggcacttttttttgg

SEQ ID NO: 10719 - DNA, 392 bp, Oryza sativa
  Clone ID: uC-osflcyp080f04a1
ccaaaaccaatcctgaacaaggaccgaaattattaagagaattgccatgatatgcgtacttgaaccaagtgcaggattaaaagaaaaaatacatataactgaattagctcatcaacatttgagccaacagtagcatcagcagggtcataattatttctcactgcaaggtaagttcgtggtaggggcccataagattatgctgtaaattaaggagagaaaaagagctttgtctttaagataaagcgccatgggactagatcaagctagcagtattagttcctgcagggtttagagtgatattaagccctgcaaacagccagcaaaaaaaagggacatggttctgtgggaaaccagtttgggaaaagacccatttttacatgcatgcatacaaa

SEQ ID NO: 10720 - DNA, 463 bp, Oryza sativa
  Clone ID: uC-osflcyp080f05a1
aggttcaaaacatttctattaccacaactttttaaggatggaattgagtagcaatactttcaccccaaaatacagtttagcgacaatatcttagaaacgtcccttgctttgccgccatggctggcaagctgagcagagcagctaacacaaagaacacgagatcactataaaccaaacgggaacgaacgaagaaaatacagggtcttttttgtctgaagatacacgaagcgggtccgttttcttttattactagactcctctcctcctcgatgatgggtgtatggcaatggcaaaggcgatgggatcttggcttagttgatgggaaggggcttgccgttccactccttgaggcagtcgagcatggggtcgatgagcttgccctggctgatgccgaggaacaccttgatgcacttctcgccgagggacttgagcttctcgccggagaggaatactcaaacgagct

SEQ ID NO: 10721 - DNA, 473 bp, Oryza sativa
  Clone ID: uC-osflcyp080f06a1
aatgatgcgatagtaatttggccacattagagtagctgctggtagcaaaaaggctgacataatagttatctttcacagtaccacatcgattgaaaggagaatacttggaggcgcgacagtttcctacaattaaccccaaccaaaacattatactgataaaacagcctactcgtcctcctggctacggagccttgcaagcttgatggtgaccacgatgtcgagctgcgcagcacgctcaacgatctccttgcgcttcttcgtagagacgttgtgggcaatctcggcacagtaggtcctgttgtgcatcatgagcaactgcagctcagagacattgtgcaccacaaactttttgaacttgatggagggtagtgcctggtctttttgtctgagccgtaaccaatgttgggcatcaaggagcattccttgaactttctcctgacacgggagtcaatacccttgggcctgcgccagct

SEQ ID NO: 10722 - DNA, 78 bp, Oryza sativa
  Clone ID: uC-osflcyp080f07a1
attcttttttttgagaccaaacacaaattcacattttgtgcagggggtgattcaatatttttgacccgtggatccaaa

SEQ ID NO: 10723 - DNA, 470 bp, Oryza sativa
  Clone ID: uC-osflcyp080f09a1
agggatcacttattcattatagttcttccatgctgctctaccacagcaaaacgtttcagacaccatcaaaccagacttaaggatacacattacaggtaaatagtacacaatgaaacgggacacgaccaaggaccagaccagacaaccatagctccattggggaagacaaataggcagacttgtgaaccctagaacagcagcagctccatggctgaggacttactggccaccacggaggcggagcaccaggtggagtgtggactccttctggatgttgtaatccgcaagggtgcggccatcctcaagctgcttaccagcaaagatcagacgctgctggtccggggggatgccctccttgtcctggatctttgccttcacgttgtcaatagtgtcggacgactcaacctcaagggttatggtcttgccagtcagggtctttacgaaaatctgaatccacccctgagcctgag

SEQ ID NO: 10724 - DNA, 453 bp, Oryza sativa
  Clone ID: uC-osflcyp080f10a1
gccaagaaaaaagatttttgttcattctgcattgagcctggctgtggtccgtataacagaaaaatgatacataaactttctgaaggaaattcttggccataagttatacagatacaaagttttaactgtctggtcaataaacaggttaaaacaaaaattttgcaagatgtagtaatgcattggagcagcctagtttcctatcatttcttcagaagcttcctcagcacttcctcagcatgatgctccatctttggtaaagcccagtcatgctggattatatccaggttgtctttctctgcggccaaaccctggaaacagccagttcaaaaatgtgacatgattctgtgttaatctagttcgttcaaagaaccattataacatgcatgcatacagaaagttagtgaaatcaatagtggaaaaggacaaccaaaggacttgtaaacatcaagcaga

SEQ ID NO: 10725 - DNA, 463 bp, Oryza sativa
  Clone ID: uC-osflcyp080f11a1
aacacaaaacatcaatcaatcaaatggaacaaattagtgaactcagtacaaaatgataaacgtaaaaggccctcttcttccacgttaaaagacctacacaacaaacgcaggtcgggtcgtgataattaacaaatttagacactgtcaagaaaataaaacacaaaattagtaaatgaatttctgtaaaagaaggaaaaaccaaacccaggtcctccccaaatccgtggacatcctgatcgaatgacgtgacatctcatattctcatcgattcagtccttcatgagtctcatatcatgctggccagtgtcatgcagttttgtgccatctggttgagctctacgtcgatcttctccaggggttgttgatcccggactgcttgaagggccgatcgcacgactcaaagtcctgcacagcgagctgcagcatgatcttcgccgtagccttgtcttgaaggtgatcgccc

SEQ ID NO: 10726 - DNA, 466 bp, Oryza sativa
  Clone ID: uC-osflcyp080f12a1
cccatatatcttatataaataacatatattcaaaaccatgctttgcatatagctccacagcaatattttggagtacacatgtatgccttattttgccactagcccattacaaaaaaataaccacagaaaattaattaatagaaaattaattaatggttcgctcgaacatggagcgatctcttttaagacataattatttagaggttcataattccaatatgacccaacacaagagtatgcatgcctgttacttagagttggatgccactcttatattcagagccggcagtaaagctttcagggatgacatcatcgacgacacggtagccaccgttcttgacaaggaagcgaacggagaaggggcccttgagtggtgcatcacttttgagtgtccaggtgttagagcccgactccttgagccccacccagtccttgccgcctttctccttgacctccacctcagaga

SEQ ID NO: 10727 - DNA, 480 bp, Oryza sativa
  Clone ID: uC-osflcyp080g01a1
agaagaaattttattgcatatcttaaaattaaattttcttaaaaacccacaactaagtaaattacagagaatagactatcgcagacagttctattttcaaactgcagatgcaagagttcacagaaaattcaagacatgacccagaaatactcgagagcattagttggatccggcgtactggatatctaaatctaaacaagcctatgatcaaaacagaaaatctaaacaagcctaaataagtctgttctgaccactgcatttcaagcacatgtcttgactctgaaatctgaattcttccaccgaacagagcctcacctgtgtaattcgttggatctcatcagatcacacataatattctaatagagctacacatgtttactggttattgaccatgtacggtgcgtccttgaacacgtgagtggtagggtcaaaaagaatcaactactacggagaaaatcaggcagcaaaaatgggcgaaaa

SEQ ID NO: 10728 - DNA, 382 bp, Oryza sativa
  Clone ID: uC-osflcyp080g02a1
gatcctatacgcatgcggacggcctgtctttttttttttggcatacaatgtatttttgcgtatatagacttgcagttgcaaaccgaattacatgcgtggtgtcgcatagacgtacaaattccacaggctgaggctttcctttctgcatccaaccaagccctgcggtaatacatctggtcgacacgacaaaaccatgttcaactcaaaatatgtcagatttcactccggttacacaaatggaacacttacaggttacaacaagtctcccagcgaacaggttgaacttgattctaatacactatgtaagctacaatggcacacatacagtggtacaagcaattgcccgtgctttgcggttgcgagataccaacaattgccagtg

SEQ ID NO: 10729 - DNA, 431 bp, Oryza sativa
  Clone ID: uC-osflcyp080g03a1
acagcgctgcgtataataaaataccaccaggtggcacctcgaaaacatacaagaaccaaaatggttcaggtgggcatatcaaaattttgtttgttcggatgcccgggaggggcaaaggattgtgcacacgaaaaacctttgcaacactggtattcaaattggaaggttagggcagggatatacccatactgattttacaacctcacaaacatgtaacaagagctataaattatgcaacccatcttaataataacagctatgcctaaatgattgatgattttcaagccgggccggaaaaaatgtatgctcaagcaatgtcattgctttcagaagctctcaagagacattcatcctgttcaaaattgacttaagctgaaaatgttgggctgccagctggtggaatagaaacaacctttcctacaggcaccgtt

SEQ ID NO: 10730 - DNA, 309 bp, Oryza sativa
  Clone ID: uC-osflcyp080g07a1
gtgtatatagacattttttttgtaaacctaattacatgcgtggtgtcaggtagacagacaaattccacaggctgaagcttaacttttcgcattcaaccaagccctgcggaaaaacatttggtccacgcgacagaaccctgaccaaatcaaaatctgggagatttcaccccacctacacaaaaggaacccctaaaagtaaaaacaaagtttccaacccaaaacaaggaaaccgattctaggccttcaaggaaattccaggggcccacatacagtcaatccatcaattgtgcgcgccctaacgggggaaaa

SEQ ID NO: 10731 - DNA, 345 bp, Oryza sativa
  Clone ID: uC-osflcyp080g08a1
ggcattgatttacagcgcggggatatagaaaagaccaggaggagggaattacatgccaggcgagaaccaaactggcaaatgtcaccagatgaagattttgtttgtgcagacgaccaagaggtgcaaaggtacatgcggacgaaacgacttagccacgttgaacttaaaataggtaggataggactggggtttcacaaaagggacacttccaggttacaaaaagtgtacaagagaacaggatgaacttgcctataatacaacttgcaagcttccctggatgacagacgatggttcaagcaattggccaaaaattgatgctgaaagaaagccatagttgccagaggc

SEQ ID NO: 10732 - DNA, 470 bp, Oryza sativa
  unsure (1)..(470): unsure at all n locations
  Clone ID: uC-osflcyp080g09a1
agaaaccaaatacaatcacatatattacacagggcatcatacaatatttatcacctgtagtccaaaattacaccatttatcaccggtcatgcatcgatgattcggcctgaagctagttggaccaacatatttgcgtgcaagcaataacagtaacattattgatttgcatatattctgcacaaatgcagaaacataatattatcccttgtttcaaatataatgcaaaaatggctgctcaaaaagagcatcacccaagagacttttattgttattttcttcatgagatcagggtctgattgctccatctgacgatgataattaattagcgcctcaggctgtgcaggatatattcagcataaagatccatggagtacttgatggcctctgagcagttgccggtggcaggaaatcgtttacggcgacctctttggtttcattcttcttggagncttcaaagaagcggcggattt

SEQ ID NO: 10733 - DNA, 319 bp, Oryza sativa
  Clone ID: uC-osflcyp080g10a1
gtggaatgagaaaagtagacgagttgatttagaaaaaacagatacacagacaagcagaagggaaggctcggccataaaaaattgggggacaaagtactacccaaccagacaacaaaaagcataaaccagcacacaagcaagatggaccacctgtttgtgagggggctagctcccaacaaactaacgggaagggggaacagctccatcccgaggtgaagctccaagtgggggaaaaaaaaaaattgcaggatcaaagaaaggacgtcttggggggagggcgacctatggggacaggcccccccaaaaagcgaagggaatc

SEQ ID NO: 10734 - DNA, 396 bp, Oryza sativa
  Clone ID: uC-osflcyp080g11a1
ggggtattcacataggacacatgcatctttactgttctgcaaggagtttcttgtggtgttaaccgtgttgtactcccaagaacttgtgctttgatcacagatttgcgtttgggggcagcaagtattacaggaaataaaaacagcattattatgttatggtctagtagctggtcattattttgataagcagccactgcctagccacactaattttggatacactgcttatccaaacccttttcccgcaaccaaaacagatcggcgaggaaaatgataaaagcaacaaaaaaaaagtaccaaattggattagcaaattacagggtggagtacacatcaacacttccagatgttgctatcgcgagcacttcggcggatcagtcccggtgtgcagaggca

SEQ ID NO: 10735 - DNA, 391 bp, Oryza sativa
  Clone ID: uC-osflcyp080g12a1
gttaccccacattttttatgacaggttaattgggctttataaataagtttgtgcggttttcagacgagggatgaaaataggttttggaatgcatgtgcgaaaaccccttgcaacatgcgatgagacactgaaaaattatctttcacgcgagctaaacacacccacaattcacagggagagatagggaatgaaatgagatcacagcatcttcctgactaaaaagctggagaagacataacaaaaaacataaaggaatttgctccctttatgtaataaggcaagatcggcctgttatgttcaaccgatacacagcgtgtggcaatgaatacatcaatatgggcatgtgaatttacaaatgtaaaatttaagtttctcaaaaatggagatgatg

SEQ ID NO: 10736 - DNA, 403 bp, Oryza sativa
  Clone ID: uC-osflcyp080h01a1
caccttgacaactgacaagcaaaccttgaattaagcatcgtaaccagttaacactagagagtgacaaatgaaattacaaaattgttacaacaatatacgccagccgatcatcagagcaaccaagaaagcccgggttgcttcttcatcgccactccgacaagatcacctggcctctcactaaatgactcccgtatcttacctttcctggaagtcagttcaggatggattgcagagttcttccatcttttgtgttaggatttacgcctgcttcatgctgcagttgctgcagtctggtttccgcctacccagtactgcttcacagcatacagcaccttctcacgcaccatggggccgtccttgtgatcgaccagcctcgtgttccatttcatgccgagggcgagcc

SEQ ID NO: 10737 - DNA, 437 bp, Oryza sativa
  Clone ID: uC-osflcyp080h03a1
gaccgcccgcccttttttttttttttttttttttttttttttttttttttttttttttgggtggggtcctttttttatttcgcgcccttttttttttttcttttttttttttttttttttcttccaaaggggggaaatggggtagcaaactcttcccccccaaaaaacctttaaccccccaatttttaaaaaacccccttttttcccccccctggggggcaagccgggcaaaccccctcccccaaaaaaccccggacccctttaaacccaaccggacccaaaaaaaaaaaacccgggttttttttggcaaaaaaaccccaaaaggggccggttttttttattaaaaaacccccccccccccccaaaaggggggtggggcaaagcccatccgcaggggtccccggcctaataaaggggaagggggccccccccccccc

SEQ ID NO: 10738 - DNA, 498 bp, Oryza sativa
  Clone ID: uC-osflcyp080h04a1
gtctctttttttttaaccatataacataggaggtttcatttcttcttctcaaagtagtgtagcattttttccttctttcaccattacataagcttaagcaataacagataacaaatcctcctcctcctctaggtaaaatattcaaacacaatacccttataagtacttattattaggaaagtaacgtgcatgggcataaatggcagcggggggcaggttaagaatcacaatgctgagcagcgaggaaacaaaacaccataatgggacagagcaaaagcctccgaaagggagcttttaggcagaaggcttctcccacttgaggggcttcaccacctcccaggtgaagtctgggtcgtcccttccgaagtgaccgtaagccgccgtcttgaggtagcgtccgttgccgcctttcttgaggtcaaggttgatgatgatcatgccaggcctgaagtcgaagttctccttcacaatcttgaggatctccttgtcagggatcct

SEQ ID NO: 10739 - DNA, 345 bp, Oryza sativa
  Clone ID: uC-osflcyp080h05a1
caaaaagggcaaccattaagggcctttggattttattttatttttttttaaaaagggcatgatagaaatgcttcccagccaattgctttaactggtggggcaccaaatacaaagatttcaggattggaatacgttttaacatgttaaaacactttttatttagaaaagcagactggcccaagcagggtttaacgcaaagccacccaacggggccggggaaaaatacttttttttttaaaaataagccccagtgtcctaggttccaaaaaaaaaaaaatttcccgcggaaagaaacctcttaaaaacattggggcctttggggatgggagccccgagcaacccccg

SEQ ID NO: 10740 - DNA, 403 bp, Oryza sativa
  unsure (1)..(403): unsure at all n locations
  Clone ID: uC-osflcyp080h06a1
atgcaatcgntctggaaataccatttatttgggaaatttggtcacgaccaaacagtaaattatcgtctcaaaccttacatttcacactgaacccggagaggcagagaattctctactgtttctaacttcacaagctaaaggaacatcaggaaataaaagtcatccgttcacgtgcttcagactaacatcttatcgcacatcggtcctctgtactgctcaaccaaataatgaccgacccttgtttcgttcaagccgagcctccctctctctctttttgcactccttatagtcgtcgaactgctgctggcacttgctcttgtcttggttggcctccaaacacttgagggaggcggtgtactgggnggaagcaatcggagtcggcgatcctggcggcgctggggta

SEQ ID NO: 10741 - DNA, 378 bp, Oryza sativa
  Clone ID: uC-osflcyp080h09a1
gcccgtccttttttttttagattattatctatagcgtattataaaattaaatttggggaggaaccgacaaataactaaaggacagctaagtaactatcgcagacagtactattaacgacatgcaaaggacagagtacacgctagagtcaagacatgaaccaaaaatcataccgagctttaaacggacccggcgcactggatgtctaaatttacacgggccgtagcacaaaacagaaaaattaaacaagcactgatagggtgagctgtgaccagtgaatttcaagcacatggcttgactctgaaaaggggaaatcttccaccgaacagagcctcacctgtgtaattcgttggaactcatcagatcacacataatattct

SEQ ID NO: 10742 - DNA, 89 bp, Oryza sativa
  unsure (1)..(89): unsure at all n locations
  Clone ID: uC-osflcyp080h11a1
tcttcttgcttttccccanggaaacaccatttattcgggggatggggttactgaccaaacagggaatcataagcctcacaaccttacat

SEQ ID NO: 10743 - DNA, 424 bp, Oryza sativa
  Clone ID: uC-osflcyp080h12a1
gggggccgggaaaaatgcatactgatttcatctaaactgagatgagcagattacaccgccaaatcgccaatacaacccatccagcctttttgaagtttgagctatttacaggggctccccccggtggcacaaccaagcatgcagctgtctgaccattttttcaggctacagctacctatgagaaaagcttttaaacccaccccccaaattataaactttttaaatgggcaaaagtttttttgggaccatgcgggggactttcctaaacctcgcgcctttgtcctcgggttcttgctcttgccagggaataaagttgttggccacttgggaattggcatttatgctgttaacaggttccttttcctccagggcattgtcaaagatctcggggatgtcaactagactgggccttctccttgatttc

SEQ ID NO: 10744 - DNA, 422 bp, Oryza sativa
  Clone ID: uC-osflcyp081a01b1
tttaatacgaggacaagagatggataccgagcgaggggttataaagaccatcggggggtgctagagatgagaagagctcagagtcacaaactagtgttaacaggggtggccataatcaaagatcttcatttgagcaacaccgcacttcaccagctgcagtgagcaaaattgctccagtggttactaggacgcccacccaggcaccacatcagccaaaagcacaaccatcagttcccaaggtttcaccttctcaacccgagaaatcaccttctaatgcaacaccaccaaaggttgagaagccatcagttgcaccacctcctaaggttgactatgcaactgatctcttcaacatgttatcaatggatggaacaaccgagaacgaagccgagtcatcttctaatgatgatagtgcatgggagggc

SEQ ID NO: 10745 - DNA, 216 bp, Oryza sativa
  unsure (1)..(216): unsure at all n locations
  Clone ID: uC-osflcyp081a02b1
tgtattactcctcaacacacataacacatcctccgccttcttttaattcctatcccccgtttccacacaccctcttcntatcacccatcaatccctcccaccttcttcactcaataccccctctcctacatccacactcaaactccactatcccaacccctccctaaaagaattagaaccccccttactatcaacaccacccacatctccttcctt

SEQ ID NO: 10746 - DNA, 335 bp, Oryza sativa
  Clone ID: uC-osflcyp081a04b1
atcaaacgatatcgatggcggcggcggcggcggtaaccgtgacaaccgcgcgcgggggacgtactgcgcctctcgcagcatgggaggtctgcctcccgcctactctgcgccgcagccggcgacggcgaggcgtccccggcgccgcgggcggggaggctggtgctgtacacgaagcccgggtgctgcctctgcgacggcctcaaggagaagctccaggccgccttcctgctcgccggcacaccctactcgctcgcctccctcgagctccaggagagggacatcacgacgaatccggattgggagcagatgtaccagtacgaagatccccggtgctc

SEQ ID NO: 10747 - DNA, 430 bp, Oryza sativa
  unsure (1)..(430): unsure at all n locations
  Clone ID: uC-osflcyp081a05b1
gtagagcaagaagctcatctcctcctcctccggcatggttggcatggccaccggggtntccagcctcctcaagacctccttcgctggcgcgcgcctccccgccgccggccgcaaccccaccgtctgcgtcgcgccgcgcaccggcggcgccatctgcaactccatctcgtcgtcggcgtccactcccccctacgacctcaacgccatcagggtcagccccatcaaggaggccatcgtgtcccgcgagatgacccggcggtacatgaccgacatgatcacctacgccgacaccgacgttgtcgtcgtcggcgccggctccgcggggctctcctgcgcgtacgagctctccaaggacccctccgtcagcgtcggcgtcatcgagcagtcggtgtaccccggcgggggcgcgtggctcggcgggcagctgttc

SEQ ID NO: 10748 - DNA, 459 bp, Oryza sativa
  unsure (1)..(459): unsure at all n locations
  Clone ID: uC-osflcyp081a09b1
tttacggccacaggcgacgctcctgactctccatcggcgaccctcgaaccacaactgggcgttcatcacctgctgctcgcgagacaagttgatgatggtgtgggacctcaccaaccccgtccagaacgtcagcgagggcgccggcagcctccgagtacggcgtgcccttccgccgcctcaccggccactcccacttcgtccaggacgtggtgctcagctgcgacgggcagttggcgctctgtggcttctgggacggggagctccggctctgggacctctccaccggggtcaccacccgtcgcttcgtcggccacgacagagacgtgctctccgacgccttctccgtcgacaaccgccagatcgtgtacgnctaccgcgaccgcaccatgaagctgtggaacaccctcggcgagtgcaagtacaccatcggcggcgacctcggcggtggcgagggccaca

SEQ ID NO: 10749 - DNA, 392 bp, Oryza sativa
  unsure (1)..(392): unsure at all n locations
  Clone ID: uC-osflcyp081a10b1
cttaatcggaggaggaagagaagggcggcggcgctagcttagatggtgaggagggctaangacgagttcgacgagagcccgccggatgacttcgacccgaagaacccgtacggngacccggtggcgatgctggagtacagggagcacctggtgagggagaagtggatccagatcgagaccgccaagatcatccgcgaccgcctccgctggtgctaccgcatcgagggcgtcaaccaccaccagaagtgccgccacctcgtcgaccagtacctcgaggccacccgcggcgtcngatggggcaaggacgcccgcccgccggagctgcacgatcccaagaggtggttgaggccgacgagtagctttgctgctgctgctgtatctgggctggaaga

SEQ ID NO: 10750 - DNA, 430 bp, Oryza sativa
  Clone ID: uC-osflcyp081b04b1
ctctgcgccctcagcaaggtgcgaggtccatggggtgctatgatgttcttcgggggtctatctaagaccaaggaagaatcaggaacaaagaacatcatggggctggaacgtgggttcaatggatgggagctttcgggacaacccgtttgccggtgcactgatgccccttgcaaaggcacatgctcacctgaagaacctgagttgtaactctactcgcttcctgaatgatcagcaatgttggcagtcgatctccaatgctgaatttggtctattttgcctcatgagatcattcgtcacagtgtattggactgaaatgccactttgtggacaatttcatcagatatagcataagttaactaccccactgtagtgtcagggacaccaccgggtactgaattattactgattactaaaaaacttttacatcttg

SEQ ID NO: 10751 - DNA, 449 bp, Oryza sativa
  Clone ID: uC-osflcyp081b06b1
gttcgcgaaaccctagccctcgcgctcgcccggcgcctttctctccccccctaccctaccccgagctcgccacccgatccgatcgaagatgcataagctggggagaggaagccgcgacaaggtgcagcagttcatgaccataactggtgcgagtgagaaggtcgcccttcaggccctgaaagctagtgattggcacttggaaggagcttttgattttttctacagccaaccacaaatttctctgacgaactctcggcatcttgaagatctgtacaacagatacaaagaacctgatgttgatatgatcatggtggaagggtgtatctcagttttgcactgatcttcaggtggatccccaagatattgttatgcttgtcatatcatggcacatgaaagctgccacaatgtgtgaatttactcgccaggaattcattggtggactgcagtca

SEQ ID NO: 10752 - DNA, 274 bp, Oryza sativa
  Clone ID: uC-osflcyp081b08b1
atcgccctatgctcctctgcacagcaaccacggctatgcttacatgaggaggacgcggttcttgagaggtcacagatcttctgatcctgctgttttttggtggtctctgtgctgtaagttgggtttgtggcaagaattctttgctgcgcgaggcaatggcgttcacctcgggctcggcggcggcggtggaggagagggggaatagtgagcggaagaggaagcgtgatgcaactcatgaacttatatactgcctgtgagtagacttctagtgaac

SEQ ID NO: 10753 - DNA, 63 bp, Oryza sativa
  Clone ID: uC-osflcyp081b11b1
gtccgcgaaaccctagccctcgcgctcgcccagcgccttttttaaccccccctaccctacccc

SEQ ID NO: 10754 - DNA, 340 bp, Oryza sativa
  Clone ID: uC-osflcyp081b12b1
gataagtacgagacgactggagcgggacaggaggaagggggaccggttgagagccaacaagcgctcggagaggcagccgatcgggacgggggcgcaaggctccgacgacaaggactacaaggagccgacggcggcgccgctgttcgagccaggggagctcaagtcgtggtccttctaccgcgcagggatcgccgagttcatggccaccttcctcttcctttacatcaccgtcctcaccgtcatgggggtcaacaactccacctccaagtgcgccaccgtcggcatccagggcatcgcctggtccttcggcggcatgatcttcgccctcgtctactgcacc

SEQ ID NO: 10755 - DNA, 471 bp, Oryza sativa
  Clone ID: uC-osflcyp081c08b1
tttttatgcttgagcggaataaagtggaccgcggcatctttagacttcaggccggggagggttgctgtggtcaccggcggcaacaaagggatcgggctggaggtgtgccggcagctggccgccgacggcatcacggttgttctgacagccagggacgagacgaggggcgtggaggccgccgagaagctcagagggatgggcctttcctgtgtcatcttccatcatctggaggtcacggacagttccagcgtttctcggttggctgatttcttgacgactcgttttggcaagctagaaatactggtgaataacgcagcagttagcgggatggagcacgcccaaagagtagatactaacgaggaacagttcgttggcatggacaagcaacagatacttgaatggttgaataaacaaggccgggagacctacgacgcctcaaagaacggcgtgcagacgaactactactgcacg

SEQ ID NO: 10756 - DNA, 283 bp, Oryza sativa
  Clone ID: uC-osflcyp081c10b1
atcgaaacggcggcacttcttgctccatcagcgcgaatttcaacgtgattcacgcctttgaccccccctaccaccgcaactaacctcgcgcagctcccgatcccgacgcccgcgaagactcgcatctcccaccagctcgcggagtacgaccccctccttctcgaccgtttcctcgacatccatcaagacccccaccgcgacgacccccgccagccccaccccccatgctccgagatccctgctcgccattaaggcaagcatgactcccaaacccttcttcaac

SEQ ID NO: 10757 - DNA, 386 bp, Oryza sativa
  Clone ID: uC-osflcyp081c11b1
atcctacctacctacctactctaggcgggagagatggtgttgaagagcggcgtggcggaggacggcggagcgtaggcagctgcggtaatgaggaggtgtctctcggcctcttggcgtaggcgggtgactgactgcgtcctggcgagggagctgcatgacaacgtcgccgacctgaacgacccgctctggagcgccaagagcactactctcctccccgcacctcgaacgcaaggtgcatgtagactacctagaagcaggtgcagatatcataatcacagcgtcataccaggctacaatacaaggctttgaatccaagggattctcaaaagaacaaagtgaagacttgctcgcagagagcgatgaaactgcacgtgaagcgccggaca

SEQ ID NO: 10758 - DNA, 434 bp, Oryza sativa
  Clone ID: uC-osflcyp081d01b1
gtatcccagcgcaagaagctcatcgcctccggtctcgtatgggagccatgggcacaaccggctccagcctactaaggacctgcatcgctggcgcgcgcctccccggcggcgaccgcaaccgcaccgtctccgtcgcgccgcgcaccggcggcgccatctgcaactccatctcgtcgtcgtcgtccactcccccctacgacctcaacgccatcaggttcagccccatcaaggagtccatcgtgtcccgcgagatgacccggcggtacatgaccgacatgatcacctacgccgacaccgacgtcgtcgtcgtcggcgccggctccgcggggctctcctgcgcgtacgagctctccaaggacccctccgtcagcgtcgccgtcatcgagcagtcggtgtcccccggcggcggcgcgtggctcggcgggcagctgttc

SEQ ID NO: 10759 - DNA, 432 bp, Oryza sativa
  unsure (1)..(432): unsure at all n locations
  Clone ID: uC-osflcyp081d05b1
ttttatcatttttggatgcatgatgaacaaatgcaacagttagagctattataggtgatccataacaagaaagaagtcagttcaattgaagttgagcctgggtaagatcatgattcattgacccaagtgttgggaactatagaagcaatcaaatatcagcactacaaagtgccttaggcagcaggaaagctggtggccaacaagggaaagaaacagatcacctccagccatcatttgaagccactatatcagattcaaacttatttaggcagagcagcattcttatcgagtagcttgagctcagctctttccactctcctcctctttcatctttntctcccatctacgtttcttgtagtcaaggagcatctggggcatcttcttcatcagctcaaccgtgttcgcacgcttctcggcggagatgcggtcgca

SEQ ID NO: 10760 - DNA, 488 bp, Oryza sativa
  Clone ID: uC-osflcyp081d08b1
ttagctttcatttcacctggaaaaccctagagcggcgccgacgacggcgacgccggggtactcttctcgggcggccagccgccgtggattcggctctctggaaggctggcacaccggatccgcgacgtggggggatggtgttctgctctcgccgtgggggagagtgtacggcgccggccggtgcgctggagaagtggaaatcgatctcctcgccggccggcggaggtggcggcttttcttcgccggatgtatccggtgacggttatttgattcttgtctctgttttctcttttttttccttgtatgtataaacgatttattttctcaagatagagaggaaaagctctgtatgctgttcttccgatggatagcgaccgtgcgcttgttggagcggccaaaggcgccggcttttccgtcggtatggtcttgtcgcatatgacaaccggctgcgatcggtgatgccttatgaggtcaactctttttttttt

SEQ ID NO: 10761 - DNA, 433 bp, Oryza sativa
  Clone ID: uC-osflcyp081e01b1
gtgttatcttcccctctcgttagggttcgccggcgtttttgactctcgggggcgctcttcccttccacttcccaaaattctcgagtcaaacctcgtggcgttcggccatggcgacggcggcggtgctcggatcccacgacgccctcgacaaccggatgcatctgggggccttcgccgtgtccccggcgtcgaagccgaggcggaggcggcacagcaaggcggcgtcgccgccccccaaggtggcggcggtgagctcgccgccggtggttaagtctgcggcgagggtggcgtcgcctcctcccaaggctgctgcggccgcggcggtgcctcaagggcgtcgctcgccggtggcgaggaagcaagggtcgccgacgaaggagttgccgaagcagaggctcgtgatgggggagatcccgatcctaaagcgcgggga

SEQ ID NO: 10762 - DNA, 515 bp, Oryza sativa
  unsure (1)..(515): unsure at all n locations
  Clone ID: uC-osflcyp081e04b1
tttggccgccgcctcctcctctgccgccgcctgcttcctctccccgtcccctcctccccccccgcgccaccattccatcaaacacctggcgtgcgccgcctccaggtcgccgtcgccggggccctcctcctcccgctccctcgccctcccttcgccttcggcttcggcttctccgtcgccgtggccgcggcggctccgcgacctgctccccgacgagaccggccggatcctgtcgtccgccacgggctccctcatcgtcgccctcgcctcggccgtgctgatcctcggcgacgccggctccgcctccgcgttcgtcgtcgccacgccgcggaagctgcaggccgacgagctcgccaccgtgcgcctcttccaggagaacacgccctccgtcgtctacattaccaacctcgccgtgaggcaggatgccttcacgctggacgtgctcgaggtgccgcaggggtccgggtcggngttcgtctgggacaagagcggncacatagtcaccatttccatgt

SEQ ID NO: 10763 - DNA, 496 bp, Oryza sativa
  Clone ID: uC-osflcyp081e08b1
gtgaatagtacatgagagaggatgtggtgcgggcagttattttgggaaactatcaaaattaggactcgcccctcttctttggtgtattattattggcttaatttatatatatgtatattcagttatctcaggacaatatagcagtaatatgacattactatttgggttattttcatggttgggaattttccttgctactgccggattggttatgttctataagtgtagcagaaaagatcctggctacattgacaagaatacaagagatgcccaaaatcaaagagatgatgaacctttgttgaagaggggtctagacaaccctgaacttctggctggcaattggtctcagctatgtataacctgcaaaattgttaggcctgtacgctcaaaacattgctctacatgcgatcgctgtgttgagcaatttgaccatcactgcccctgggtgtctaattgcattggaaagagaacaaaatgggatcttttatggtcctga

SEQ ID NO: 10764 - DNA, 501 bp, Oryza sativa
  Clone ID: uC-osflcyp081f01b1
cttgaagctgatcaaatctgacttggtccagggggctgtttagaatcctattgggttttttacaccaactgcccccaggactccctaccatcggaaccgatttacatccctatcacgcacttttggtgatggttcaaaattatggcaagaagatattatggtgacaggctttgctggtggctctaagaagccaaggactcaggttttgtactcggtttctcctagaagtgatgaacctggctcaaaacacaaaggacatttccgcaagatacagtctcatagcagtgcaaagagactttctgataattcaagaagtgaacagagcagtcctgagtcattggcttgtgttgcaaatgtcctagttacagttggtgatagaggatggagggagtacgatactcagatcacaattgactcttatgggcagaatgaaccgaggatttgtgtgaagcttgcagaaggaactaagtatgcttaacaagttcttcaagtttgcaggct

SEQ ID NO: 10765 - DNA, 498 bp, Oryza sativa
  unsure (1)..(498): unsure at all n locations
  Clone ID: uC-osflcyp081f03b1
ttctcacgctgctccccccactccctcccgcggcgccgccgccgccgccaccgccgcatcgccgctgccgacggctgcgctccgaagaattctgtgaggatttaagctgagaagatggtgctgaagacagagctttgccgttttagtggccagaagatatatccagggaagggcattcgctttattcgtgctgattcacaggtcttcctttttgcaaactcaaaatgcaagcgctacttccacaaccgcctgaagcctgcaaagcttacctggacagccatgtacaggaagcagcacaagaaggatatccatgctgaagctgtcaagaagaggcgccgcaccaccaagaagccatactctaggtcaattgttggtgcttcgttggaagtcatccaaaagaagagagctgaaaagcctgaagttcgtgatgctgctagagaagctgctcttcgtgagatcaaggnacgcatcangaagaccaaggatgaaaagaaggcg

SEQ ID NO: 10766 - DNA, 526 bp, Oryza sativa
  Clone ID: uC-osflcyp081f04b1
cttctcctcttcatcttcctctcctccttcctgtttctttcgagtagaattctcgaagaaggagaaataaatcgaaaggcagcagctgatggttgcatgctgtgcgtcgctctcatgctcaaaaggtcaacagagttgagtccctcagctaaggcaggcaagcacgagagtcacagatacatatcccctttaatctcctctcccaccaatcctttgatccattcatcccaacttcttccatagtacaaatctcttgctcccctccctctcatctcctatctgtatctatttctatctctctatctcgtatctccttgaagaagaacagagagaggattgggaggagtagtaggtagtttgtttaatctttgaggagccggagaggagagcaagtgtcctggttcgtgattcgatttcaggtgttctgaacgctttttgtggcttttgtgccgtgctggcctctcgttttgagcctttggcgattcgattcccgcgaaaaggaggcgcctttttgtgagttaggtgt

SEQ ID NO: 10767 - DNA, 407 bp, Oryza sativa
  Clone ID: uC-osflcyp081g01b1
cttagctccgcctcccacctcccttttcttgcgagggttttaaaaagcgacgggggtgatcacttatatggccctcaagacgctgcaagttccatctagctttgcaaggccgatcaaccgcagcttcatcggttcttcttcttcttcgtcgtcgtcgtctcagttgtatctgcggacaaagcctgcatcggcacggctcgccgcaagtgtcgccggagagaggcgcctcgaatgcaggggcggcagcagcctgcacggctgcgtggacgagggcgccgcggcggcgtctaggaggcggcaggagcaggcgggggagatccccatcggtctgttcccgtcggtgggcttcccaggcgcgacggtgcagctccaggcgttcgaagttcggaaccggatcatggtgcaca

SEQ ID NO: 10768 - DNA, 458 bp, Oryza sativa
  Clone ID: uC-osflcyp081g02b1
gttgtttctctgggccaaagctcacagggctgggtggagtcgcggttgaggcagctgtcggccagggtggaggcggacacgtccggggtgctgctctgccaccttcacccgcaagcgtacgccaccgagcaccacaaggagccgcggcggcagcgggagcgggaagccgtctccgctgcagccgtctcgacgccaaggatctctgggcggcacgccggcgctgcacggatggtcttgaggagagcagctagctcgctcagatggccttgaggtggtcggcagcggcggcggcggcgatgtcctggccgtcggcgtctcagcgagggcgacgatgttggggaagtccatggccacggcgtcctccgtggtgaatcagtcctcgttgcggaggagctccttgctgccggcggcgaccatcctcggcgtaggcgtggcagtgcacggagcatgcggcggcg

SEQ ID NO: 10769 - DNA, 513 bp, Oryza sativa
  Clone ID: uC-osflcyp081g03b1
attatcatacacttgaccgtggatcctgatttcggggatattctagacaaagtcgcgtatgaatcaaaaggagtaatcgggaagctctacagggaaataaagaagcacacccctcacataaagcacttcacaagggaggtggcaaggcggtcttatgacaccgatatgattgttgatggctatgaagattacatcactgaacctatggcattgaaggacgagtacgacttcaaattgggtaatcttatggatcactatggaataaaaagtgaggccgagataataagtggatgcattcttaagatggcaaagaatttcacaaagaaaagcgatgctgatgctatcagattggcggtgagatctttgcgtaaggaagcaaggtcaaggttcagtgagatgagcttagatgataatgggcatggccatgatgcctcccaagccaaggcaatccgctggtaccatgtcacttaccaccctgaattctggggttgctacaatgaaggatatgagcga

SEQ ID NO: 10770 - DNA, 521 bp, Oryza sativa
  Clone ID: uC-osflcyp081g04b1
tttctacatccccccttcacttcgattcagagggacaaacggatatgcagcaacaccaccatcagttggggctaaaggagctgtggatcagaagaatgctaggagatattccgtggggcccttatctaatgggagaccagccgttaattactcatacttgagcgctaacaccccggcaagagcagctggtgtgcaaaggaagctggagttggatcaccaggtgaatatgaattcttgtcaggctccagagggtaaccataaactgacaaaggcagaggcaatgaatcagccttggtccagaccaccaccagcagcagcagcagtaaggagcaatggaaattacttcactaaagaccagggccctcgtgcgcctgacattgcggagaagctgtctcagctgacagtgggctccaacagggtgccaagcttggcttcggacaagtttgtggatatgaaggcaagaacccatgggaataccatgaagcggcctttgccttctgtgggaaccaggacatggcacg

SEQ ID NO: 10771 - DNA, 495 bp, Oryza sativa
  Clone ID: uC-osflcyp081g07b1
gttgaactcatagatgtgtgctggttggaaatgcatggctggatacacagcaaggtgctctccccaaactcaacttatgccgcatacatggtgtttaagatagctgatgagttctatgggctggatgctccattccaggaggcatcagtcagcctgggaggtaggggatcaacaaaaattgtttgtgtccaaagctatgacagcgaagatgaggaggtgcctgagaattactggcctatgagtattggtccattgctgcgacaaagggccaggagaagagaccgtcgtctagttcttgatgaaggtgtaacggtccctcagaaaaggactgacgagtggatggagctggagatgggtgagttcatcaacgaggaaggtgaagatggagaggtgtgcttcagcctgatggagaccaagggaggcaattggaagagaggtcttattgtgcagggcattgggatcagacttaagaaatctggctgatgaacttctaag

SEQ ID NO: 10772 - DNA, 449 bp, Oryza sativa
  Clone ID: uC-osflcyp081g09b1
cctgaagctgatcaagatcaaacagcagaaaggcgtcgcttattgagaggaccggccgcgtcgctccccgcgtgagcgaccgggcgggcgtcaaccctagcgccgccgccgctttccctctccctcccccaccccgccgctgccggagcggccgggcctcggctcagtgtgcaaggacggcggcggcggggcagtttgccgtggaacggcgggcccggtcctgcgcggggaggtcggtcggcgttcggtggtggctgcggcgacccgacggcgagtcactctagcgacggcggcggggtgggacgacgaagagcagcagctccttggagacggcgggaggaagttgaaggccggagacgaggggacggtcagatccggccgtcttctttctggatctggaggtcgtcggggtgggggtgatggctaccttgtggataatttcacccctg

SEQ ID NO: 10773 - DNA, 428 bp, Oryza sativa
  Clone ID: uC-osflcyp081g10b1
gtcttctgtacaaacacatcatacaatctacatgaatgaaaatgatggttgacatactccttttacatccacttatactgaaaactgttattctatacccatatattaaacatttaagtcatcagaaagatgacattaacattaagatataaaaactttatccaaaagattcatctctagagcactaatatacaagacacagacatattgtagatgtaatctgaattccgtggttgtacttcgttgtgacagggctggacaaactggaggcttgaaattgatcaacgaacagaaacgtttttcatctttcccgacttgtgcttgacaaagaaagcagctagcatacttttggtacggaggggagccttttggatttgacgccctcttgggttgtcaaaagaactaaatgacgatagatgcctgacacc

SEQ ID NO: 10774 - DNA, 285 bp, Oryza sativa
  unsure (1)..(285): unsure at all n locations
  Clone ID: uC-osflcyp081h01b1
cacgcgtccggctggcatgatgggcggcgtctcngccgcccggctncctggactacattggcgggtttttaacnacatggcntactaccggaagctcggggagagctccaacatgtcgatcgatagcctcaatagcctgcagaccagcacgcatggcggtggctccgtggcaatgtctgtggataacagcagcgtcgggtctagtgattcccacaccaggatgctcaaccacccgggcctcagggggcattgtccagccaattacttcggtggggcacagcattt

SEQ ID NO: 10775 - DNA, 409 bp, Oryza sativa
  unsure (1)..(409): unsure at all n locations
  Clone ID: uC-osflcyp082a01a1
ttggtttttttttagcgaagggacaccaatcgccatattaattccttttccaataacaaatagaagtacatagatcaaagcacaagccttgaaacaaatttccaaatgagtaatgccgaaatacagactaatacatctctggggggggggggggggagcaanngatttgacgaccacattacccatttaactgggctgtgcctctggattggacctgacttaagagcaggtagttgcttgggctcaggggaaggtttacccttccaaaaagaatggtccttgtagaggtcgatttacccatatgtgcctgatctgatgggacacttggggtgcgcgagctcgcctgccaagcggcggatgaacctctcctgtctatccggcgcccacgacctgtaccttttcccgggct

SEQ ID NO: 10776 - DNA, 443 bp, Oryza sativa
  Clone ID: uC-osflcyp082a02a1
tgggtttttttattttttggtgttttttttttttttttttttttttttttttttttttttttttttttttttttacaaggggaaaacaaattcaattaaaattatgccaaaaaaaaatttccaaggggcccgcccaaaacattggtaaaggggggaaccccctttggtttttggaaaactaaatttggccccaggacacaacaaacctaaccctaaacactttaggagggacaaaaccaaaccagactggacattttgaaacaagaactcctttcctttttaaccccccaaaggggagctggttcccccttcccggaaaaaatttttaagggatttagacggggccttagcccccccaaagggggtctttttgaaccggcaaaggggcaaaggctcccaattttttactatttaaaaactggaacccggtaggggggggcttg

SEQ ID NO: 10777 - DNA, 429 bp, Oryza sativa
  Clone ID: uC-osflcyp082a03a1
tgtgtttttttaattttttgtttttttttttttttttttttttttttttttttttttttttttgggaagggaattcccccctcaatttaataagaaaggaatccaaactgccaatgggtatttgttttttggacaacaagaacaaacgcttccgccatttttttatatacaaaagaaaaaatgccctaccccacaaacaagacttagggggtactaaatatcccggggcaaaacgattacaagaaccccggaaaaatgggctggtttggtttaccctttgccaaaggaatagcttaaaaaaaaagggggggcaaatgaaaaaaacaagctttatgaacattcaagaccccccactaaaaagaaaggtcccggaattcttgaaaaaacccggccaaaaacctggggcttttttttttattggtaacacct

SEQ ID NO: 10778 - DNA, 418 bp, Oryza sativa
  Clone ID: uC-osflcyp082a04a1
ttttgttcattagaaaagggggtgttccatcaattccacaaaaggacggagaaggttaatacatccgtcaaatggtttaccacagacgatgagtttaaaccgtgtccaatttctctttcgctgtatccatacagattaaacgggggtttttggatgattaatgtctactctacatcacataacacaagtgtccagtacaaatccaaaaaataaaccccactaacttaagctagcatataatacacctgagcacatcttctccggggaagtctttactccaatcctatcctcttttgcctccatcgagctaaccagttatgtacaaaacgagaattatcccaacaacagcgcagcaaagcctttttctcagccaaggtttcgccctcttgaggaagcacttctgtagttaggcctagga

SEQ ID NO: 10779 - DNA, 463 bp, Oryza sativa
  Clone ID: uC-osflcyp082a05a1
ttttgttttttttttttttggtgtttttttttttttttttttaaacaaaaccaatcgcaaaacaagtttacaatttggaacaaaagatgcatcacaaatcatgcaattgttcagaaaggctaaaggttaaataaaagcttatgttataaaatagcaaatatgggcatggggaaaaaaaaaaaaaagggggttgatttttttatggggtcctgaatttgaaatgcattgcatttcactactcactatttgattcgccaactagactttgttttggcgcgtaagaagggaacccttctggctatctaaagcttgctgtcaataacggcctcattggatttggtgggtgggtccccattgacagcaacaagcttggtatctaaaatgagaggccctccaccagggatgggcgggggggacccttgggcaccataaccgagctttgaagggatttttaggtttcttt

SEQ ID NO: 10780 - DNA, 480 bp, Oryza sativa
  Clone ID: uC-osflcyp082a07a1
ttttgtttggttacttttaagggagtcgattacagaatttctgtagccttgcagatgatcacttggatatcatgtactagtaattaacaataggatgcatacaaaagatggcccaacgacaacagaagatgcgtgcatctgacattgtctggccttatttgttggtagtactccaattaattaacaagagatgatgcattcttgtgccttagtttcttcacatgcttggcttcacgttgagcctattcgcaatcttcacccccaacgactcatcacactgggagaggtagttgacccagatggcgcggagctcaggggagaccttggggtgcgcgagctcgccggcgaagcggcggatgaacctctcctgtctatccggcgcccacgacctgtacctctccccgggctgcttgaagtcgttctgcttgtgtatcgtcgccttctgcctcctccccaccacggggcgcggcgtgatgggcc

SEQ ID NO: 10781 - DNA, 379 bp, Oryza sativa
  Clone ID: uC-osflcyp082a08a1
ttttggttctaaggcgggcagggggtttgccttttatactgatagagtaggagaaaatggactatttacaggactgaccaacaagtttatttcctttgaaactcataatgaacagggattgagttgggcgcttgcctgagaattcatgctagtatgaacacagcttcccaatcagccagtacacagtaatcacagtggtggcgccagctcatgcatactttgtcaattgtcacatgctgttgcatatcttgtcaatagccaaataccacctgtttttccagcatttgtagctacttccctcttcaaagtctgaagtgagccacttttgctgcttcttcataagcttcatgtctgcttgacaggttgatgcagtagttta

SEQ ID NO: 10782 - DNA, 374 bp, Oryza sativa
  Clone ID: uC-osflcyp082a09a1
tttttgtccttttaaaattcttggggtttttaatggcactgaatcatttttatttcctcatcctttttattcattcctcccacagagacggatccatggaagttttcttgccctcatcagggaagcagagcacacacacaccggggcaggggaattgctattaacaagacgctcattaacatccagggctaaaacagacaaggggatcaaaggaaatcccgaaaaaaaaaacacaggggaaaggccacatctttttcttgtccccaacgcctcctgggcaccaccacatgttgcgggtttaaatttaccctggtttattcggtaaggcgaccacgaactagccgtcgaccttcgacgccaggaacaaattcggg

SEQ ID NO: 10783 - DNA, 234 bp, Oryza sativa
  Clone ID: uC-osflcyp082a10a1
ttggcccttaacaccccgttgtttttaatttttttttttttttttttttttttttttactcttcctaattatcagaagaatttttatttcattaattccccccctggattaaacaggctaattttataaataattcaccacaccttatttcattgatcagggtcaaaacctgcacaaaaaaacacactaccggttcaaatttcaccttttttccaatactcgaccatccatccc

SEQ ID NO: 10784 - DNA, 435 bp, Oryza sativa
  Clone ID: uC-osflcyp082a11a1
ttgttttttttaatttttgtgttttttttttttttttttttttttttttttttttaccctcattatccttaaaaaaacactgatcagctttgtttaaaaaaaaaagggtcggcatatccccgggttagataaaagcagggaccaacccactggttcaatttatttaagccctattgcaactgatatttggggagggtagtaaacgctgcctttacaatttatgaaaggatgcttcttcgctggtgcatacatcagggtaaaaattaccgctttttatttggggggaaaactttgaactagtcctggtctcaaaacaaagaaagggactttgggttttggagggttggttttcacaaacaacgatgcaaagttttcctcgacatgggaagatgttgagatttggccctaaagaaaagtcattccaactgggccggg

SEQ ID NO: 10785 - DNA, 315 bp, Oryza sativa
  Clone ID: uC-osflcyp082a12a1
ttggttcttaaaagctttgggtgttacactttttttttttatttccaagatctgtttttcttttttcaatttgatgcattcatttattatatcagggcgttctaatatgacagagcatccaccactgcaagtcaacaaaaaggggcgggcccaaccagccctaattaaaagaagaaactcaaccacaagggagaccaaccccgggcaaaaaaccggggccagctcggtcgaaaccagcaaaactaaacagggcgcgcgaacgcacaccaacgcataaatcccgatagaattgcgcgcgaaagagccaaaattaag

SEQ ID NO: 10786 - DNA, 485 bp, Oryza sativa
  Clone ID: uC-osflcyp082b01a1
tttgtttttttgatggcatgggggcatgatagtatcatagtagcacagtacacaacagctgaaaacaacctcttttcttttctagaaataggacaaattgacaatggttgcatcggataaaggaaacaatagagaaacaaactaatgccagactcgtatgttatgacctatgatttcactggtcatgctttctgtgccttggctagtaacgctgatgaggtatttgtacagaaagtatactctctcagtagcacactgcttttacagttgcatgcatgtaatgcttgagacttgaagcattttctccacatctccgaacacatctatcgaccggttgacgagcatacttgaagtaatctggcgtcctgtggctgacgagctgccagtgacggctgacatgaacatgatgtattgatgtggcaaccggccgccatggatggcaggagacctgacctcagctgcaacatgccaaccttcggacgcgt

SEQ ID NO: 10787 - DNA, 190 bp, Oryza sativa
  Clone ID: uC-osflcyp082b03a1
ttggccccttaaacacccgggggtataaagcataatccagcatgcatgcacacttacataattctccatatttaagcccagcgcatgtgcatgcagttaattaaacaactccttggcttggattcaaattaaaacactggaactacagtctatacgtacgtataaaaactcatcatgcacattctttttt

SEQ ID NO: 10788 - DNA, 311 bp, Oryza sativa
  Clone ID: uC-osflcyp082b04a1
ttttggccctttaaccccctggtttcaaactctttcacatccttaacaaactcaccaatttcactaccaatttacacatcacaaactatcacgttttatcccatgtgaaccacaaaaataaatgtgagaaggcattccaaaatatcattcatgtccaggcatataaatgatacacaagatgctcctactctggaataacaaggtcaatctgaaccttaatcaagcctaaaaaaaatgttaagaaccccatattttctcctaggatcctcaaacatggcccatagaacctagttaattcttgcccttctgat

SEQ ID NO: 10789 - DNA, 375 bp, Oryza sativa
  Clone ID: uC-osflcyp082b05a1
ttttgtttttttaatttttggggtttttaatccaactgggaacatcatcccgattctttttcctttttttgatcttttggacaaaaaagaactttactcaacaattcaatcccactaaaggggggaatttactaaaaatgatgatacaaccgtgacagagtcatgggagttaactgcctcccttctgcttgaggggaatcttgtctcctaagctgagggcgattccctggggcttgctccttattctgatggaaccactgagcttgccatcaaactggttctcgatgctgatatttaccaaagcatcttcaccgaaaacactttttgtataaaggttagcggcgagaaaaccgcattctccgtcaagcgcagacg

SEQ ID NO: 10790 - DNA, 363 bp, Oryza sativa
  Clone ID: uC-osflcyp082b06a1
tttgggcccttgaaccccctgtgtttttaattttttttttttttttcattttttttgaattctgttaaaatataccccaatatggaaaccaagcaatacaaacgggcaaatctccggaatttttttccccatcttataccaaccaacccaggcttatgataaacggagtctaagcaaggcacctaacactctctcacttgattttaataaaagctcttaaagaaaggccccctggcccaaaactaaattttggatgacaacttccacaggaacaattgaaaacaaccgccccaaaaaaaaaaaaattaatctcgacgaacagtctcaggggtgaccaaaaacaagcgtagaacacctgcagaa

SEQ ID NO: 10791 - DNA, 482 bp, Oryza sativa
  Clone ID: uC-osflcyp082b07a1
tttttgttatccaccaaatatgggtagagttgatttattggagtcttcaatttgaaaccatgaaagatatccatattcttatggggcaatagttgttaatgcccattattcaaagattaaaatacattgaaaaaaatccaaggtggttagcatccccactgatatgttcgttttgaaagaagccaactattaacctgaagcacctaaaaatatgcctcatgagctcaggagccttgtttgctactttggttcctcctatttactgaagcccaaacattgatgtcactgcattcacatctggccatgtcctaagatacttgctacattctcatccaccaagcaatcaacctataggagaaggacctcatatgtcacctaatatcaaataattaggaggggtgaggctttgaacccaggtcgtctagcccaccaccttgtggagctagccagaagacccctgtgcatttcttctttccatgcat

SEQ ID NO: 10792 - DNA, 437 bp, Oryza sativa
  Clone ID: uC-osflcyp082b08a1
tttgtgtttttttattttctggttttttttttttttttttgtttttatgattttttttgtttttttttttctgtttttgtttacaggaaacaaaaggacagctgggggtaccttggacaaagaaacaaatgtgtttatgcctggcgaaaccgacttttttgggtaacaggggttgcaaaagggcctcaaaacaaaaggggtttatcacggggacaaaatttgttttgggggggggggcacctggggggaaaaagggggaattggaaaaatgggggtggcccatgggccacaggggatctcggataactggttggggggggcaaaaggccggggggaaggggggaccggtttaacccaggggaggccccccggggaaaacgggagtccggtttaaaaaacttaaatttctgtttaagccaccaagggggggggccaaa

SEQ ID NO: 10793 - DNA, 420 bp, Oryza sativa
  Clone ID: uC-osflcyp082b09a1
ttttgtttttttaattttttggggtagaacttacataggataggatcgatctactagcttagctaggattcattagtaggatacacaagtacagaacatgctcacagatgctgctgctagctagctagagagtacaaagttcagtaggactagagagagtataatagatggagatagatgtacagtaaaggagacaggcaggcaggcaggcatcagtgcttctggaagatgaccatgcataaaaaggcgacgcaacggaagaggacaccgttggcggcgaggaccagaatgcaaaggaacctggcgttgatgtcgcagccgctcttgaggagggagccgcatcgcgttatgagccacacgcccgagtacctttgcgcattcgcgaacacgaacccttccagcgcccacttggtgtagcac

SEQ ID NO: 10794 - DNA, 452 bp, Oryza sativa
  Clone ID: uC-osflcyp082b11a1
tttgttttagcaatggatgggcgcattccacaacagtcgaagggcaataataagtcttaacatccaaatttaaaccgaacagaaaatagagttttaaacgactgacatagtgcacaaagcgagcagatattaacggtcaatgcaacaactgaaatgaccgtcgacaaaacttaacgagtactaaaagagctagatatttcaaatgcagatatggaaagcaccacttgaacgaggctcatttcttcttggcggcagccttggtcaccttggcaccggatgggtccttcttctccacgttcttgatgacgccaacagtcaccgattgcctcatgtcccgcacggcaaaacgaccaagaggagggtactcagagaaggcctccacaaccatgggcttggggggaatcatcttaaccataccagcatcaccgttcttgaggaacttgggctccttc

SEQ ID NO: 10795 - DNA, 481 bp, Oryza sativa
  Clone ID: uC-osflcyp082b12a1
tgggtttttagggaagggggggtatcatttcaaatccaaacaataaactcagttaaaaacaagtcgatgaacacacgttacagaaccgtttcaacacaatgggcatggtctcctgaaaggtcgactgtgcagcacactgccattttatgcaatgagaaaagggagtacagtcagcatgaaagcctcgtaagtaaaagtcgcagagcccgagaaggctgtgtctttttccttgaacttctcagtcagacccttaactgtgaggcagcattcaatgaagttatcatattcaatggctttgttcttgcccccagtcttgtcaaactttgacacaagcaagtctagcacagttggagaaactgaatatcccagactgagaagagcatcacgcaattctgttgcatcaattttaccacttcggtcacgatcaaacctctcgaaaatggacctccaattctgaagactgtaaaacacagaggtaaat

SEQ ID NO: 10796 - DNA, 490 bp, Oryza sativa
  Clone ID: uC-osflcyp082c01a1
ttgtttataggaaaagggagtattaggaacgacagaaattttgggttaggccaaaaacaatatcttcggtacaagaccagactacatgcaccaccaacatgctcttttcacaagaggtactgcagtggcacacgccattaaaacaacagcacatcattggtcagattgtgcgtcaaagttgacacgagtagcaaaatggtttatcgtattgggtgcagcttttgaagatctaagcattgcaaccttaggactgttcatattgcttccgagataaccaacaccaaatgaaggggaggaataggcagcaacaagttcagcggctcccaatgcagatacctcccctctctttagaacatcagcctgaattagcaacaacccagcgcctgtatcatgagacatctcgctgctgctttgaaccgcttggcgcagaactttggtacaagcagaagcagggccagattgtatcaatgatgatgagatacaacattca

SEQ ID NO: 10797 - DNA, 349 bp, Oryza sativa
  Clone ID: uC-osflcyp082c03a1
cttatcttcatttttgggaaaccacaaggcttacacaggggttctgccaattgggagaaacatttgcccctaaaaaggggggggttcacgaattgggggggccccaataaacatggttgggtttcaactaaaaaaagggggtacgaccactttttcatgaaccaagagaggttaagaaaagcttggccctgggggccattttttttgggcctcccccctttgggggggttaaaaatgggacctgcttctctttgggtgccccacgttaaaaaggggggcacccttttgtcttttttttgggggggggccccccctaaagattggagtgcccccggggggggtgggaaaa

SEQ ID NO: 10798 - DNA, 479 bp, Oryza sativa
  Clone ID: uC-osflcyp082c04a1
ttttggtcatttacaatatcgggcgttcaaattaattgttcgtcacacatacaccatcttgttcagtaatgatggctcacattgtccgtaatccctgcttaactacatattgactccctcattttatacttaacaatacacaccagacttccacactccattttcacagtgactttatttagcgcaccgcaagctgcaccagcacactcctcatgccaaggagaagcaaataagataattgctccaatgctgccttcctcgagcaatcaggggaatggcttagtgcgctcgccgggtgccaagtgccaaatggccttagaagactataattgatgtgcagctcctggtctgttcacagccgggagatgagcagtgggactgaaacagtggcggtctgctcccccattgcagggtggcacatctccagcatgtccagctccctgaaccgctcaagaaccctcattcggcactcctcagct

SEQ ID NO: 10799 - DNA, 376 bp, Oryza sativa
  Clone ID: uC-osflcyp082c05a1
atttggattttcaaacacgggggttttacattcttttttctgtatttttagttttttggttttgaatttggatattttttcttttaaatttatgcaaatgatttttaaccatcatccgccgaaactgaaccacctaaagaaaaacaaagcttaatgttacaccaatggatgaatctcaggcatcaaaagagggccgatattctggcacaaatggcggaggaaccgacctaaattcaaacttggggctgaaggaccctgacggagacaacgatattgatactgaagaacaagagggggaaaaccacacacacacagaaaataggctgaagaggaaatttgtagctcctgaccttgcgatgagaacgttaccggctgc

SEQ ID NO: 10800 - DNA, 445 bp, Oryza sativa
  Clone ID: uC-osflcyp082c07a1
tttgttttgatgacagacagggttattcttattattctcgaaataaccggcacacaacaaaaatgagaacgaatttgtccagaaatgcactcaattacaacatcatccttgcagttacaggatacaagatggaaactttactgaactataccacgtttcgctccatccaccgtgttcttcagcaacatcgccaccgtcatggggccaacgccacctgggactggagtcaggtgaccagcaaccttgctcacctgtgcgaaatccacatcgccgacgagtctgtaccccgatttcctggctgggtcactgatggagttcgtcccaacgtcgatgacagcagcgcctggtttgatccaggctcctttgatcatgatagcctggccagccgctgcaatgacaatgtttgctttacggacaatactttcagggtttggggaccgggagt

SEQ ID NO: 10801 - DNA, 464 bp, Oryza sativa
  Clone ID: uC-osflcyp082c08a1
tttgtttttttttttttttggtttttttttttttttttttttttttttttttttttttttttttttttttttttggaaaccaaaggggaaccacaggggttttgccaaatggaaaaaacaattgcccaaaaaaagggggggaaccaaaaaatggggggccaccacaaaaaaaggttgggtttcaaccaacaaaagggggcagacgacgtctccatgacccaagagagggtaagaccaccaaggccagggggcccaaaatttggggccccccccattagggggggttaaaaccgggaccggatttcctggggggcccccagccaaaaaagggggcgacccactgccttggtcattggggggggccccccccccaagatttgaaggcccccgggggggggggggaaaagagctttaaaaatagcctgggaaaaaaacccaacgcccccgtttcaaactttaggggg

SEQ ID NO: 10802 - DNA, 489 bp, Oryza sativa
  Clone ID: uC-osflcyp082c10a1
gcggaggaggaggaggccacgaaacggcggcggtacgtgccggtttctgtagttgaagatgaaaggcaagaatctggaaaatctgacgatgaaaataaggcaaatgatggagaaccatcatccgccgaaactgagccatctaatggaaaaactaatattaatgatacaccaatggatgaatctcaggcatcagatgaggcccgatattctggcaaaaatggcggtggaaccgacctaaatttaaacttgggtctgaaggaccctgacggagacaatgatattgatactgaagaacaagatgctgaaaacaacacacacacagaaaataggctgaagaggaaatctgtagctcctgaccttgagatgagaatgtaaccggctgcttcatttattccttggattctttactatctgcctttgggcctattgtgcaaactttcttgacatattgtcatatttagaggcaattcaacacgatagcttacagga

SEQ ID NO: 10803 - DNA, 378 bp, Oryza sativa
  Clone ID: uC-osflcyp082c11a1
atattttggaaattgaactcctgtgtttttaaatttttttttttttttttttttttttttttttttttttttactttttttcgggggggatacaaaaacaaacacaaaaccccaacgggcaaaaacaaaggggggggaacccgaaaaaaaccgaacacgaccaaagccggagcacaaacaaaaaaaaccgggagccacggatggactcacacggaaagccaagcccaagccaaagagactaaactgggccctgggccataagccggaacaggccgaccccacaaccaaaggaaccccaattgccagagaacccaggcgacaagcttgaaaaacaaaaacgcaggagccctcccgcccgggcccaaaactgcccgaacc

SEQ ID NO: 10804 - DNA, 485 bp, Oryza sativa
  Clone ID: uC-osflcyp082c12a1
tttgtttttttattaaaaaggggaaacccaaatcatcagcgtgctcgaaacaaatgaattgtgcacagttcaaaacataaagatttatgaactttagcagttctgttagaagcttgctggtaccattcaggtaacattgacaaaaattgcaagtgctcccatgaagaaaatgcttttgcagcagaggaagaaaacagaaaattctaggcatgggaaaccccagtggcagaatgtacatcatactcattatttgaaatgcttccgcttaaatgctcaaaacattttaatgaaagtaagaaacagtggtccctcagttgacaacatcaaggaccagcttgcgtgacttcaggacggaccacctcatgcgacggtagtatgcggcttggagaagtgcaagtgacagtaggaagatccatttcactcccatcagtttcctctcttccatctcaggttcagctgcccatgacaagaacgaaactacattc

SEQ ID NO: 10805 - DNA, 351 bp, Oryza sativa
  Clone ID: uC-osflcyp082d01a1
ttttggtttttttttttttttgggtttaatatttttttatttttttttttttttaatgtattttttttttttattttttttttttttttttttttttttttaattattatttttatcttttttaatttaaaaattttacaggccgccccaagaaaaaaaaaaaactgcattcaaaaaaaaaaaaaaaaaaagggatcccaaaaaaaaattctgtaaccatggaaaaaaaatacaggaaaaaaaaaaggattaaaaaaccccacctgggggggagggtcacgaacaagtacaaaaatggggttggaaaaaacttttaataaaaaaccaccacaaggggaaaagacttggctg

SEQ ID NO: 10806 - DNA, 467 bp, Oryza sativa
  Clone ID: uC-osflcyp082d03a1
tttttgttttatattatatatggggtgctaattaattaatcataattaaactatagtacataatatcaatcactcacacttacaaaaacaggttattggcttaattacatgtaattaacagccatcatcatcatcatcatgatcacaagcaccccaaaggttaaacaaaaaagttacaaaaggtaaaaaaaaaaagaaaagtaaaaaaaggagggtaaaaaagagaggagaaaattaaaagttatttggacctctagctaaggtgaaagaaaggcttccatggctcaatgcaccttcttggagaagaaccccttgatgccgaagagcccgccgccgccgccgccgccgccggcggaggcgcgggcgactccggcgtcggcgcggcggcagctcacctggtggcggtacccgatgcaggagttgacgctcaggttgatgccgcgtatcccgccgccgccggtggcgga

SEQ ID NO: 10807 - DNA, 435 bp, Oryza sativa
  Clone ID: uC-osflcyp082d04a1
ttttggtttttttaattttttggttttttttacatcattacaacccacaactgcatttagttagactggtatatgtacatacaggacccttaagtccactggcaaagtaccatacattcagatccaaaacttatttcacaaagctgaacagaatacgatgggaattattggggcaatagcatgtacaggtgatgctaccataagaacatcaccatgggggaggggacctacttaaattgatcatcctcaaagcggataagtataatgacaagcttgattaacaagtactcaagggtcgttggagctgctgcaagatcagaccagagcttctactggggcgatttggggctgcttgagttgaggtaacccattttttgagacagcaaggtcatatcatctatagcgggggtcctgggatcctcattgagcccaccc

SEQ ID NO: 10808 - DNA, 379 bp, Oryza sativa
  Clone ID: uC-osflcyp082d05a1
ttttggtcactacaaattatgggaatcgattgatccatgagtgtaatcgtcaccatgtcattgttgtagtgttcataaatatacaaatttgggcaaaacaactgtcgcaactgttctacgttttacatctgaaagaagaataaataatgtgggcaaaatatgttgtctacatacatgttttaagtacatttgacacttcttctcacttggtatatatactagactatgaaaaaatcgtgtaattattgtgagtagtccagtcattgatgacatccaacgtttctaactgttcgtagcaatgggtttcaaaaggtgacaagtttgtttcatcggttgatttgcaaactaaatgcgaagtttagacctcattggcaccacc

SEQ ID NO: 10809 - DNA, 421 bp, Oryza sativa
  Clone ID: uC-osflcyp082d06a1
ttttgttttttttttttttttttttttttttttttttttttttttaagaaacaaccgatcgatcgaacttgacccaatttcacgtacttgatcgaatacaaattaaactgaaaattagcagtacaggtcaaaggggatgggatactaaactgggaatgggccgtacgtgttgtcacacattacgcctagccgggggggggtattgggctatccaattccaaacttgtacgtggacggacgagcgcgttgatcggggtcgaccttgccaccgggttacttagggacatcggttgcctttggctccggggggggcttggccgcgggtttgtcggggtcgctggacttcgggttgacctttcccttgccgcccttggcgcgccggccgggggccccgttttcacccagcgcgggcgggaggaag

SEQ ID NO: 10810 - DNA, 482 bp, Oryza sativa
  Clone ID: uC-osflcyp082d07a1
tttgtttttttttttttttaggaagaatatgtattaacatcatgcaagaattaaggcatggtgtttctgaaacatttatgcttctcttttttcagatacaatttccctctgtaccatcctagaagtgaactctggatctgcattattttgctccacaagtcaaccccattctccactctccaaatactacttcactatactccatcacaactgtaacttgaaacacacttcagtaacctccatacgttatggagactctctatgctgcatatttacagcacaattatgcattgcaacttgcagaagtcttctacatcagacgtacggaaggaggaaagaacagtatcagaaacatgcatgtcgacaggttttacatgagctgcatatgttggctattgcaactaggaaagaaatggttcagtagtcagtactacttaagcttaaccatgcctcatgtggtcagttggtcttgctcagcatag

SEQ ID NO: 10811 - DNA, 492 bp, Oryza sativa
  unsure (1)..(492): unsure at all n locations
  Clone ID: uC-osflcyp082d08a1
tttgtttttttttttttttgtgaactagtgatgagcacgagttagcatgaataggacacaaccttttgtagttaaaatgcaaaggacatgctgtgaagtgtcaacttgcagtcattaacacaaacaccttgtaagcataattcattgtatctcgtggactgcagttttgctgatttcttcactgacccaaccaacccaacccctgaattggcctttaattcatttcctcctactaaacactgcactgatataaaaacaacaaagttgctcacatgggaattttatcactcctgcaaactatcagctcacacacgtttttattaactctatacactaaactttaaaaatcagtagcagagcagacaaattaactaaacagatccattctagtcaatgtgtgacaaacgctatataaatctagtacattttagaataaaatgcacaattcgngatacttactgctactgngtcagaatgaaatccggtcaatgt

SEQ ID NO: 10812 - DNA, 438 bp, Oryza sativa
  Clone ID: uC-osflcyp082d11a1
ttggttttttgatcttcttggacacaaaaaattaatcgtgttattattcattcgtctttcatttgatgaacaattaaatcctacagtacatattcaattcaatcagcaattaataatcataataatcataatttaagtaaaagaagaagaaattccggcggatgatcgatcgatgagaatgcaaattaatgaggagtagaagaaataaaattaggcccaggcaggcaggcgatagatggaagtaaggaagaaatggaggaagattaggcggtggcgtgggtgaagccgatggctatgtgggccatcctgccgtactccctgttcagggcggtgaaggggatgttgccctcgtccgccttccatgcgtcctcgcagcttttggcggggcccaacgccgctgacagctgctccatggccgtcccgagatgcggccttgag

SEQ ID NO: 10813 - DNA, 262 bp, Oryza sativa
  Clone ID: uC-osflcyp082d12a1
tttgtttttttattctttttgttttttttttttttttttttttttttatagggaatcaccacctttattcgattcttcgtcggcatcgctgtttggtacattaccatggcagttcaagcgaaattttcagaaaactaccaccacataggcttacatgcgaacatgcatactacatacaacggcgcctttgacaggcagcagagtttccaccattccatggctatgtatttattattcttcacccggggcccccacaacaggc

SEQ ID NO: 10814 - DNA, 477 bp, Oryza sativa
  Clone ID: uC-osflcyp082e01a1
tttttgttgtttttttgaaagggggaaaataatttgcaggaaaagaacggcatcattcaagcccccgttttcacttccctgcagttgcaaatgcttgttcatgtgataactgcaaactctttggcgccatactagctacatcccgctgcacaggcactcgtttatgtgactgcagaatagcaaaaggagatgcgaatcgcaggagggaaacgaactcccattggaaagaaacggggaaaatgggaggaaaacaagctacactgggagctcagtcccatgagctcctgttactactcgacgctagcatactgggagtgagatgctgcaagaagtgcagctccgatgccagagccatcgtttgccaacttgacaacaactgatgaggcagcctcctctccaagcaggtctgcaagcgttgcttctaggcaggttctgaacttcttgtaatgctcatagagaccaccatccagagcaatg

SEQ ID NO: 10815 - DNA, 493 bp, Oryza sativa
  Clone ID: uC-osflcyp082e02a1
cttggggcctctattgcgcgcgccctctttttttttgggtttttttaggggttgggtttttttttttttctttttgttttttattgtccatgcccgtagatagattacacttcttcttcttatattacacaactgtaccttacatttcaccctttttactgaatttgcactatgcaaaacagcagaaatccaagaaaccaggtagtgacaaccttaaaacaagcatgatcaggcgataaatttattccacacgactccgagtcgaaagtactactctttcttggggaaaagatcaatataatcactagggccataaacgtcgaataaatcagcccagaatccgctcttcctcctcggaatgcaccccatgtcccggcatagctgatcattgtaccagatgtgaaggatttcgatgcaggaccctccaaagtaaccacacgactagcgcttcatgaacttctcccattctaggacatcattctgcatcacactg

SEQ ID NO: 10816 - DNA, 496 bp, Oryza sativa
  Clone ID: uC-osflcyp082e03a1
tttttggttgactatattaaaaagggggaatagcttccatcatttcatttattttgtccaactttatatatattagaaaccatataattcacatgataaagaactacatacaaaaccatacacgggtatttctcaatttgtaccattagaagttctccttgtggaaatcaaatcttgtgtttgtcttgtgggtgaaatctgctgacaactgccttagttggggaaccagcacaggctcaccacagtagaacacaccgacgcgctggttctcatggttgaccgcaaccttcttgaagacgcttcgccaattaggtcgtgcgaaatgggtcttcacactagttcccgacaagatatcgacgcccttcttcgcatgctgaagttcttggagcatgacaatgagagcagaacgagcatcgccttcctggtacacgcttgagcagtggatatggagctcaatgactccatccttggccttctcagacacctcgttcatgac

SEQ ID NO: 10817 - DNA, 477 bp, Oryza sativa
  Clone ID: uC-osflcyp082e05a1
tttgtttactgaattacaggggtattcagaatgacagaatacacaagcggtccatacggaacagaaagaccgaagacgatcaacagaattcagagaaacaggctggagtttccattgtccatcatgatcccatatcacacaagactcatatttaccgacgaacatacagagtttcaccaaggcagtagagaacattcatcacataatagctcaagtgcaaatagagcagagcagatgtttggcacggttcacatgccacgacccatagtctgctcctttggtggcgtcatgaccaagacagatcgcccgttgaagccaggatgggggaccctgcgccgcagctcgcgtccctcctggcagagcgcacaagggtgacagaagtagtgagttgcaaggtctcaggcaacctccaggtgctcacggttcccctcatcctcaacaaggccatggcagcacccacattgcttagtgaaagca

SEQ ID NO: 10818 - DNA, 348 bp, Oryza sativa
  Clone ID: uC-osflcyp082e07a1
tttgtttttttttttttttttgttttttttttttttttttttttaattcttttttttttttttttgggaaaacacatcaaggttataaacccggaaccattttcgggaaaaaacccctttcctaatacagggaagagagccttccttaaaaagggggggttaagtgaactcctaaggccacctttctgaaaggacctagcctaaaggcaaaaaagggggaacggcgacaggggtttgcggggaacccaaaaagaattgcaccccggggccaaaaaagatagggccacgccgtttgacaaaccggaaacccccaaaggctgcctccacggaaacgggccaaaaccgggg

SEQ ID NO: 10819 - DNA, 492 bp, Oryza sativa
  Clone ID: uC-osflcyp082e08a1
tttgtttttataggggttattgtgattttttttcctttttgttatttaaggcacatgcccgtagatagattaaaatccatctccttatattacacaactgtaccttacacttcacacggtttactgaatttgcactatgcaaaacagcagaaatccaagaaaccaggtagtgacaaccttaaaacaagcatgatcaggcgataaatttattccacacgactccgagtcgaaagtactactctttcttggggaaaagatcaatataatcactagggccataaacgtcgaataaatcagcccagaatccgttcttcctcctcggattgcaccccatgtcccggcatagctgatcattgtaccagatgtgaaggattccgatgcaggatctgcgaaagtaaccacgagaatagcgcttcatgaacttctcccattctaggacatcattctgcatcacactgatgcttggcaacctgaagccaccatccatgaaat

SEQ ID NO: 10820 - DNA, 474 bp, Oryza sativa
  Clone ID: uC-osflcyp082e10a1
ttttgttttttttttttttttggtttttttttttttttttttttttttttttttttttttttttttttttttttttcgaaaacccaaaggcaaccaagacaatggccctttttgaaaggaaaaaacgggcccctcccaattagggcccaaatggggccgggggaagcccagtttttataaaaaagggggaaggggtccccagataaggggaaaaagaggggggggtcccaaaaccccccaacagggtggccgggggtttaaaaaggctggcatcctttttattggggggttcccagggggaacacctaagggcaatcaaagggggggcaattaaagggctaactggaaggggtggccaagcgaagcagtggtggaattttaacaggggaacagggcttttttgacccttcccttgggggcaggagggggcctgacggttccaccccctggagaaagggggctgggcgaggaaaa

SEQ ID NO: 10821 - DNA, 394 bp, Oryza sativa
  Clone ID: uC-osflcyp082e12a1
tttgtttttttattttttttgttttttttttttttttttttccacgaaatttaactttttgatgatagctaagaaccattaacaaaatttgaaagacatttaaaggaggggcacagggtggtgtaaacctcatttttggggccaaaattagagaacacggcccatggccctccccgggggcgcctaatcaggacccccaaaccaaacactggggtctggccattttgaacttataaaagttaaactttcctgggaaaacccgcttggctaaaccaccttgcctatggaaaaacccttatatttggaacaccttctttgccatgggtggccaaaacggggtcccgggaggagaacccccctgtgaccttgggggaacttttcgggcccgaagttc

SEQ ID NO: 10822 - DNA, 387 bp, Oryza sativa
  Clone ID: uC-osflcyp082f01a1
tcctctattgagcgcgccgctttttttttttgtgtttttttaatttttggggttttttttttttttttttttttaaaataaaatcagatttggaaaaacctgagcggggtgcaaaaaatgcaatttacattccaggaccccttttaatgtttctttgtttgataaaaacaaccgggtaaccaatgtaccaaccagtgcccataccaacccattgacaacttcgggagccgacacgcatacactattctttagaaaaccccctagccgcccccggggggccctcggtaaaaacctgaacgggcccgaccaacgtgccaagttcccccaccggcaggggccttagggcttaccccaaactggggaattggggccttccccacaaaaatt

SEQ ID NO: 10823 - DNA, 349 bp, Oryza sativa
  Clone ID: uC-osflcyp082f03a1
tttttgttttatcattttgcggggaggaattgttttcaagaattttaataaggcaaatccacacaagagagaggacctgaatccaagacttagttattcttaagtacagcagattttctattcctccatgatcctatgagcttctacacctaaaccacacaaatgaccatgcacgggatctatttctccactggcaaataaactgggggttgcgtggtcaatgctccatgttgagatcagtagctcattcctgttaagcacgctacaagggtgtcggagattagctcacggtcggatgctacgggtcaaattaaccccgtcgggaggagcttgacggtgagctcgacgt

SEQ ID NO: 10824 - DNA, 466 bp, Oryza sativa
  Clone ID: uC-osflcyp082f04a1
tttgtttttttaagatcgagggtactgatcgtccaataaaaaatagcaaatgagttacatctatcatacagaagtgcatgacaaaggacctaaaagcaaaacaaaacaaaatgggaaaactggaaagcccccttccgtcagtagcatcttgtaggttcaatcagttcagagaagagcgcccatatctccagctattgtaggatctccgagtgaactgctgcggcgcaaaacttaacccaaacatctctctcagggccttccctggctcaaggagtccgatcagtctggcaacaagggatgcactctccctgacatgctccaggtctttggtttcggtccaaaggcaacgagcaacctgtagccttctcctcttggaggcaagtgaaaccccccatttggtgtacatgctctctcgttcctcgattgagagccgtctttgcatctgcctgcagagcatctccctttc

SEQ ID NO: 10825 - DNA, 379 bp, Oryza sativa
  Clone ID: uC-osflcyp082f05a1
ctttgttttttcaaccctttgggtttttatttttttttttttttttttttttttttttttttttttttttttcaaaaagcccatatgacaaaaaataaaaaagggggggcatacattcaacaaaaaaactccggaaaacttccaggggttttcagggaacagcagttcaacttgcaaacccaacatgaatccggttcctttaaagaaattttcagccggaagtaaaatttaagagagataagccccctcccccccccttaaagagtttttaaaggctgttcgggaccaaaaaaacttttactttgccccccaagaaaacggggggccggttggactaaaacttggcccggcccacccccgagttcccaggggggggggg

SEQ ID NO: 10826 - DNA, 449 bp, Oryza sativa
  Clone ID: uC-osflcyp082f07a1
tttgtttttttttttttttgttttttttttttttttttttttttttttttttttttttttttttttttttttgggggaaggaaaaaaaaaaattttatttgggaagggacaaattacagaattggaaacaataaaaaaatttttttgaaactatttctgaaactggaccacaaataaattttggttatttagggccccaaaaggaaaaaaaaatgcttaaaaaagggccaaaaaccgcaggggggccctcgggttggaggcgaactgggggaaaaaaagggtttggggcgggcattgggctaggggacaagctttaccaaaaacggggaaagggacgggataaacccttggggggggaaaaaaggctcctttttgggcctcgggtgaagggccccggttttggggggcgggtccggggggtacccaatggagggccccagggggggggg

SEQ ID NO: 10827 - DNA, 297 bp, Oryza sativa
  Clone ID: uC-osflcyp082f08a1
tttgttttttttattttttgggttttttttttttttttttttttttttttttttttttttttatttttttttaattaataaaaaaataaaaaaaaagaaaaaaaaaaaaaaaaaaaaaaaaaaagaaaaaaaaaaagggagaaagagaaaaaaggggaaaaacattcaaaaaaaaatcattcctttaaaaagaaaaggaaaaaaaaaaggcggggaaaaaaagaactatcctaaataaaaaaaatggactggtaatgaactaaaaagaaggacagaaaaaaaaaagatccctatttg

SEQ ID NO: 10828 - DNA, 492 bp, Oryza sativa
  Clone ID: uC-osflcyp082f09a1
tttgtttcaacattttccaggagtgtgttatatccaagaggtacattaatccaatacaactctatgtagagaacatgaagccattctgctaacaaagatgtgttatgttccctgactacagtgggaacacggaaggcataaccgaaccttacagcctgccaggagctttgataggataaagcttagatcgggtaacaagaagaatggttactgtatatatgctttggctgcaaagactaacatcattcctcttaagcacgcttcaccggcctctgaacataagatttgttcggatcctcggtcttcagctttgggggtttgatctcacctttccttgccttctttcctgtcttcataaaatccctccagctagagactcgttggtctctggtctcttcccacttctcttcatgctcccgcttcttcttccacatttcttttggttcctcttcatccttcttcagtcttccttcttcctctgatatcctcatt

SEQ ID NO: 10829 - DNA, 475 bp, Oryza sativa
  Clone ID: uC-osflcyp082f12a1
ttttgttttccggcaaaacaatggtggcctgacatagatttgaatcatacaaaggggagagctacatcatttacatttggcagagtcaccatcagaagattcgccagattggctaattcttggagaagttaagagcaaagaagagatttgccttcaattctactacatcagtgccacgagacaatcatccatacaaaatgttcctgaaccactagaagaagaatggcagctggtagctaagacagtctacaatcttacaaggtcctgcctagctagttcccggagcaattcgcttacgcattaatcccatttcaccctggaaattcaagaatcaagatccatgtcgcaatcaaactaacagtcgcaacgagaagttagagatgttgtgattcactgctccttccaaatccttccggtgacacgcagtttgagctccttcttgtcgccaccggagaagaacaaggccatgttccgc

SEQ ID NO: 10830 - DNA, 448 bp, Oryza sativa
  Clone ID: uC-osflcyp082g01a1
gatggcaaaccagtcaagtgacctattcgacagtgaagagttaaacatttaacagatgcagcggggcaggagctagcaaaacctggtaacctttagtacgacagatttgatggtaatcgttcatctcaggcctggagatgtccaggcctctacaggatgagactagcttagagtgattttttagtttacaacttgtaatatggtaaaagctacagccagtttagcgattagattagacgaaaaaggttcgatattatcgttatgattcctacaaattaactatcgatttccattttggcctccgccttaacagtgggtggctcctccttcactgcctctatgactggatcttgtactggaggcgtagcttctttggaagctgaccaaggcacctcggttgctggatcttttggagacgtggtctctttggagcttgcatctagcataa

SEQ ID NO: 10831 - DNA, 391 bp, Oryza sativa
  Clone ID: uC-osflcyp082g02a1
tttttgtttttttttttttttgtgtttttttttttttttttttgaccaattaactgttacacacccaacgtaaaatgcatgatcccgtgttcgacttatacaggcaatgttttgtattgggtcggaactattccgtcctttaagaattaattaacttggtccataattaagcagcatcaatccgaaaatgggttgagagcagacttgggacggtaaaccgttcgacacggtaaaaattaaaaagtcccaattcccaaggggaccataataatagtatacgatccccggtggggaggtgacttgctttagcaaaccccgttggttttctttttggccaggacggcccttttccagagggagagcaccttgggctggttttccatttcccttt

SEQ ID NO: 10832 - DNA, 489 bp, Oryza sativa
  Clone ID: uC-osflcyp082g03a1
gttaatcgatatcaagggcattactcttcttgttttcaagttcatgctgaaattactccacggagcagacagcagagaaatcgatcccagatgacaagcaagattatcgcacaataacgtcttgtttggtaacacaatgaaatcatgatgtaaaaaaaaaggaaaccaataaattagaggaaaacggagacccacagattatcacatttcttgcattctgattattaatcacctcattactcttctttaaccacctcgcttctgctcttcttgcccttggcggcggcgtaggcggcgccgtggaagtcgaggaagagcgcgagcagcgacgcgttgaagacggcgttgaacgcccacccggccatcccctcgcacccgccggcggggaagtgccgccacagcatcaccgccgacgccgcgaagctgaagaggaactgcgcgatctgcagctccgtgacggcgcgcttccaccgcggcggccaccggagg

SEQ ID NO: 10833 - DNA, 477 bp, Oryza sativa
  Clone ID: uC-osflcyp082g04a1
tttgttttttttatgaattggggaaagcttcacaatccaactgagatatagctttgggataacgatatgtagcaaaaattcaaacaaggtactgatgatatgcaaaacctccatatcaagctggcctacagaaggaactattacagaaaaatagatcatcctgaagacaaccaattcttaaaacatgagttctagcatgcaaaattagactagctaaagcaaaatctctcaagttccattcagcaagaggcatctaggcggaagcttgaatggtctcagccagaaacgccttcccaggggcacgcttcgcaagacgaccatgagaaccaagcagctgagcattgacaccatcagacataattctgccctcagccttcaacttgacgtactcctcacgggtgaacttggtgaagccccacttcctgctgtggatgatcttttgccggccagggaacttgaacttggcacggcggagtg

SEQ ID NO: 10834 - DNA, 470 bp, Oryza sativa
  Clone ID: uC-osflcyp082g05a1
tttgtttttttttttttttgtgttttttttttttttttttttttttttaggaaactaaaactagattcttaaattgggacacgcaaatgcaccaacaaggtattccgatacatgttattcaagcaataagggaagcattaaaatttttccaagaaaaaaacttctagggaaactgaacacatagagatagatcaaattggggatagcaaggtgtagcacccacccaataaatatgggagcagagaaaaaagggcaatggcccccggggaggcggggcaaaccccaaggggggggtcggagtcgggggccggcttaaccggtcttctgggcgaaggcgttttcgtcggactcctcgacgttgtcggggttgtcgtccttgggcttgggggcgtacttcttcttgacgtcgccgggtggcttgcctatgaacaccagggtactggtgggcttggggatctcgttcagcttgg

SEQ ID NO: 10835 - DNA, 436 bp, Oryza sativa
  Clone ID: uC-osflcyp082g07a1
tttgtttttttttttttttttgttttttttttttttttttttttttttttttttttttttttaaaggggattccacattacataacccacatgtccccccattaaaggaaaacaaaagttaaaccatcacccctaaagtttggcccaaaaaataatttttttttcatggaacccataacaaaaaaaaagggttgggggggaacaaaccccccccccgggggaaaccggggggaaaaggaattttcacatccccatcggagggggggttcgaaataccgggatgccccatggtttgggctccggaacggaaacacccatcccttggagctccggggggagcccaacctggcccccgagccgcgcgagtttgttaagctcccggttccggaccccccgggggaggccctacccctcctcccaagaaggaggggggagc

SEQ ID NO: 10836 - DNA, 485 bp, Oryza sativa
  Clone ID: uC-osflcyp082g08a1
tttgtttttttttggtactggggattggtcgtttatttactgcaaatctgtaggtagcaaatacaaatccaataccctcttttacggtttaaattaccacacacggacacgccaaggccctataatcacaacataaaacaacatcacatctcttctgatcgatctaaaaaataatcccaatcccaatataatccgtatatatgcaatgcacttaaccgttctatgtactacacgtatgaacgtatgaatcccccccgatgatggagttggctggctagagatccatgtcgagcacgagtgggccatctcccttgccgacgtcgaactgctggtgcttcatctcgccggcgccggtggtgagctgcacgacgtacttgccgtggaaccccctgaacttgaagtggccgctgccgtcgacctgcccccgcgcgtgcgacgtccactcctgccggagacccacgtagcggtggccggcctcgttgagc

SEQ ID NO: 10837 - DNA, 339 bp, Oryza sativa
  Clone ID: uC-osflcyp082g09a1
tgtgttttttttatttttggggggttaaaaataacttcacttctaaaagagtatcaacttgttttttacatcggttacatcatagaacaagtacacaatcaacaaggcatgcagtgctccatccacaattacatcccaatacaccaccaccattcacaggctactccgaccccaaaaaagagaggtaagtcgcgtccactaacagacttttcatcttgctccatgggcagccattgctaacactccaacacctgaagaactcctcatttgggggtgaaggcctggaagatggtggcgtggccggggtcacctagatgggcaaagaggttgtctacgggg

SEQ ID NO: 10838 - DNA, 474 bp, Oryza sativa
  Clone ID: uC-osflcyp082g10a1
ttttggttttttaaattctggggtcatatcatttttatcctctttggaccagctcatcatcatcaacattatacaaaagggccaagatggccaaggaaatatacttgtctgacaaggtaaaaaggacactcgcctgaaagaaaaaagaaagacagaatagagtccggatctccatgtgaatccagacgtaaatggaattagagcattctacggcaatgatctgcgtgtcgcaaatgtatgtctatctcttccagctgtgacttcgctaaccgatcatttccacgcgactgagtcgatctcgttccgggcagatttgtacagctctagcctgttgactaaggaatccctctactccatcaaagcgggatcctaatccaacattgggctgagctgttacttctccttgcttcccacatgagcatagaaacggataagcaagtttctttttgcctccttcacttgacagtgcaccac

SEQ ID NO: 10839 - DNA, 453 bp, Oryza sativa
  Clone ID: uC-osflcyp082g11a1
ttttgtttttttaattttttggggctgtaaaaacacatttaataaaatacaagacacaatgttcagcaacagtaattgcaaccatcaccgaagcagtcgactaagcgtagagttgaacagagaggaagaaaaaaaaggaaaaacgtcaacaacaacaacaacaacaacattgatgatgtttcctaacaatggtcagagcagatgaacaattcaattcctaccacaaccctgcctccggcggcgccggcaccggagcccctctcctcctagctcttggagaaatggtgcttcttcccgccgccgccgccatcgccgcccttgcctccgccgccgccgcccctattgccggcgtgcgccgtcgtgttcttgagtatctggcggagcgtgttgttctcgttctggagggtggagacgcgctgctcgagctcggcattgcggagctcgaggtccttg

SEQ ID NO: 10840 - DNA, 434 bp, Oryza sativa
  Clone ID: uC-osflcyp082g12a1
ttttgttttttttatttattggggaagcatactgctgtcccacaggaaactgtttcataaaactaacatatcatacggactcgatggtccattaaaccagacacaagtagacatgagcaccacaaatacttgacgaacagaggctcgggatgaccaggcacatcggcagctccaccaaactggctgattactgaccaccacggaggcggagcaccaggtggagggtggactccttctggatgttggagtcggcgagggtgcgtccatcctccagctgcttgccagcgaagatcagacgctgctggtctgggggaatcccctccttggcctggatcttggccttcacattatcaatggtgtcggagctctcaacctccaaagggatggtcttcccagtcaagggctttacgaagatctgcataccaccacggaga

SEQ ID NO: 10841 - DNA, 323 bp, Oryza sativa
  Clone ID: uC-osflcyp082h01a1
aaaaaataagtcacgcacgcaaaacaaaaaaatacaaatacaaaaacgaacgaaaaacaatcgatttagcgaatcacttaattatgatatgacgatcatatcgtcctcgtaaaccgggcgcgcgcgagcgggcgatcgatcgatcgatcgatggatcggatcagatcagatcagatcatcacttgggcatgggcccgtggttgtaggtgtcgcagcgccggctgatcttgccggcggcgccggtcttgacgccgaagaggctgagcttgtcgatggcgcgggagaagtcgtcgaagaaggcggaggggttggacgcgtagagc

SEQ ID NO: 10842 - DNA, 456 bp, Oryza sativa
  Clone ID: uC-osflcyp082h03a1
tttttgtttttttttttttttggggaggttcaactattatagcatcaagccatcaacaaacttttgataatacagacattaacgggactttcagttcatctgatcctctcgggagaaaaagccaaaaagaaaaaaagcaaccacaggtggctgcatgctctatggaacgatatggagttcactgacttcgagatataacaaagcaagctggtcaaacatgtcattactaaaaatgggcagcattaactcctacgatcatctgggtgcaacccagaacactaagcagaagacttgacggtagcagacttgatgatgtccacaaattcaggcttcaatgaagctcctccaacaaggaatccatcaacatcaggtttagcagcaagttctttgcagtttgctccatttacggagcctctgtaaataatcctggttgattcagcaactgcaggactaaca

SEQ ID NO: 10843 - DNA, 475 bp, Oryza sativa
  Clone ID: uC-osflcyp082h04a1
tttgtttggtatgaaggcatggagccattcttctcatttttgttcgtgaggcattgtcatcagattttttcttttaaccatgcctacatctgttttttttttctcctctccatccatgaaacttttttccaagtttcctcccctctgtttttttaaccttctactagaaactttacatccaaggttaaacaagggtagagctaaggttagccaaaggtaaaaaaaacgaggaaaataaaaaaaaactaatccacttcggcccaggcccatcagacggccggcatggtctcgtggcgaagcgccgagacctcgtcgccgaagccgaacaagccggcgtcgaagccgtcgtcgtcccactccgccgcggcggcggcggcggccaccgcctccggcgaggtgagggcgaagccagcgtagccgcctccgccaatctcgtcctcgaacccccagatctgtcccgcgaacccgatggcat

SEQ ID NO: 10844 - DNA, 475 bp, Oryza sativa
  Clone ID: uC-osflcyp082h05a1
ttggtttttttatgagatggggattattaatctgcccattgtacgcagaacaacaaaacttgtctggtgacagtggaagctaaaagtggacaagcaagaagtatatatattcatccatttctcaaactactacaagaggtcgagaggaacacataatcaggagggattgcgacaatttacagcaacaggagtctggagatcgaggcaagaacaagacaggcagcagcagagctaccctcttcatttccactgaatttttacacatttggaatccatggaaaccgagccttccctcccgtcgtcgtggtgtcaccggagtccgatgagaaaaatggtcatggcgtgctcataatccggatcgctcgccggcgtcggtgaaggaggcggggcgattgttcgggcggctgttgaggagtgggttcagagccttgacgacgatgctcatgttgggcctgaagtccgcctcgtactgcac

SEQ ID NO: 10845 - DNA, 452 bp, Oryza sativa
  Clone ID: uC-osflcyp082h06a1
ttggtttttttttttttttggtttttttttttttttttttttttggcgtcgtcacatttttttataataatggaacaagggcatacttacaagattactggggtttggttatataaaacctccaccgagcaacaggttttgattcatcatcgggggggttttccaggattctagggttatttaattggtgacgaaccaatttagggtcttccaaataaaacaaaaaaaagccgggcccattggggggaggggagaaaatgctaactcacgatagcaaacattacatggtttgaccagttccctgaaattttacattaaactttttagggtactagacatatacaggcttgaccaaaaaatagcagaaacccatagggccctcacattggtcatttttgcacacatagggataaagcaagcaatgccaaaagatactggggggaacgggggga

SEQ ID NO: 10846 - DNA, 277 bp, Oryza sativa
  Clone ID: uC-osflcyp082h08a1
tgtggtttactacgcgaaggggggtctggaaaactttattcaagttcatattatttgtctctgcaccgttacatgcatgcattgagctttgcaatatgcaggcagaaagcttattcaaacccaaactatatatggaacgcgtgtatgtatatatctatatcgagcgacgtttaattcatcatcgatcgatctcttctcagaacaatcttcttagaaattgatggagtatgccggcgactggtccgggttgaagaggccgaagtgcctctccgtctcg

SEQ ID NO: 10847 - DNA, 506 bp, Oryza sativa
  Clone ID: uC-osflcyp082h09a1
tttgtttgttgcagagcaaacgaccattagacaatcttgacgtttttcgtacataaacttgagaactgtatacttcactcaactattagctaggtatagttttattcctaaaccacttatattcctttgaacataatacacccttctcccttcacaagagatttcaataaggatgcacggtgagaaacaaaaaaaagaggcatcacatccaacaactcatctgtttacaagatataccaccctctcccccaaaaaaactatgctgtaaacattgcaggcctcaattcctgcaaatctattctccaggaaaatgatgtctaaccccaactcaaccagtgatctggagttgccctatgcttcttcgcagtatccttgtgccgaaactgatctcttcttagtttgtaatccatccactaaccaaaaacagtgcgacaggcatatggcatgtcacgtcatcttgctctggatttgcctgtgcacatgcacaaggaactccacataggaaa

SEQ ID NO: 10848 - DNA, 355 bp, Oryza sativa
  Clone ID: uC-osflcyp082h11a1
cttgggtcccttacccggagaggggctaacactgtgatatatatccacggatttccataatttactctatgcacatcaacctatttccctaatttctacaacaattcatcgatttattcatatttattgctcccacaaggggctgtacacttgctcatcaatggagccatctccatagtacaaatgctcgtcgtcgtacacgcaccaactcgccgccgccggcaacgccaactccggcggccagccgtacccgaacgccccgccgccgtagccgtcgaggtcgtcggaaaacatgtcctccagccgactgatcccagctgctgctgcgccgacgtcgacgctcgccggcccggcc

SEQ ID NO: 10849 - DNA, 443 bp, Oryza sativa
  Clone ID: uC-osflcyp082h12a1
tttgggtttttttaattttttggttttttttttttttttttttttttttttttttttttttttttttttttttttttttggccaacaccgggaacttatttaggaaccttttcccaaaaacaaaaaatgttttggggccgggggtagggaaaaaatggaacaaaaaaaatccccttttttttaggggggaacccactttggtttcggaccacccaaaaagatgggggccccctgcctgttttaaaaaaccatgcaaagaaaagtttttttggtttaaaaagaaaacgggttagaacttttggacacttggggggttctatggggggggatttggccttgaacaacggggggcccttctttgggttggaccaaggggcctttaggggggggtccctggggaacctcctgaagttgcccaagggggcccacaacaacatcccggg

SEQ ID NO: 10850 - DNA, 214 bp, Oryza sativa
  Clone ID: uC-osflcyp083a01a1
ttacttatcaaacggaccattccacttcactccatgtcagacctcaacatattttcccaaaagagggcttcttttacaagtttacaacctcaacttttcaggtgccaagttctacccccccctcactttacattttggattagacagggtttccccctccccacgaaatcctttttttcgcatccttcagggccttataaaacactatttcccc

SEQ ID NO: 10851 - DNA, 432 bp, Oryza sativa
  Clone ID: uC-osflcyp085a02a1
aaatactggacaagagcatgtttgacgcctcgcattatcgcatatagcggatgaaaaaacgtcaggccagcctgcgcgacaacgtctagttacagataagagcagaactgcaagtcaaatacactcttttctctccatagtagagtttgagcagcgagcgggcaaacataaattattcaattattaaatgatatgatcactcttgatcatctcaacactataggaacaaaacttcgctaccgcgattttactattttagttgtccacaacttcaatgagggttggttcgtagtcagcaggagcctcgaaaccatggaagttcattacggttgcagcaacattggcgagcccaggggtctgaatgtcagaccggaatttcacaccagggtgaagaccgggacctccaatagcaaccgggaccggctgaagagt

SEQ ID NO: 10852 - DNA, 396 bp, Oryza sativa
  Clone ID: uC-osflcyp085a04a1
aagcaactatttttttgcttcacaaggggggcaatttacatatcaacaattcagtgttcccattcatctagaaatgcgactaaatgcaacatttgagcttcattcagataacaatacaaggacctatgatcagtataagaagctagaatgctagagcaatcccaacaaatggggcaaatgaatcccaattgcacaactactaaccttttcagaggccaaccaatgtctgaaacttttgacttcactaactgtgatccaagttttcatcacccaagtatcacaaaatgtccttgatgaagtcaagattgagcgtgtcgcggacaatcagaaacatgccaaccatgagtaccaccagtatacctgaccacatgatcctttgttcgattcacgggggat

SEQ ID NO: 10853 - DNA, 260 bp, Oryza sativa
  Clone ID: uC-osflcyp085a05a1
aatggaagttgaccaaatatactttttcccatatatcttatataaataacatatattcaaaaccatgctttgcatatagctccacaggaattattttggaggtacaacatgtatggccttaatttttgccacttagcccatttacacaaaaaattaacccaccagaaaaattaaattatattagaaaaattaaattaaatggtttcgcctcgaaacattggaagttgaatcttcttttttaagaccaataatttatttta

SEQ ID NO: 10854 - DNA, 434 bp, Oryza sativa
  Clone ID: uC-osflcyp085a08a1
gctcactaaaacatcgttgcataacttagaattaacattactcggccttattcattaccaccgctggcagtcaagtccagtccaggtacataactggttacattcctagtgaagattatatacatggaagcaggcacagcttggtctgctgcacttagctaagccagtgcactagtgttgtagacaagaatagcgccgccaactagaattccagcaagagtgattgcccagagaagtaaacctgcctttcctccaacatagacatcaccagttgaagaccattcttctggggtatatattgggctgtacccatcaacatttgctccatacttgttggaaaactggtaaagaccctttcccttggctacccttccagatgcatcaacaccttccttgaacaccactcctccagcaggcccatagggctgggatgt

SEQ ID NO: 10855 - DNA, 147 bp, Oryza sativa
  Clone ID: uC-osflcyp085a09a1
gggggttaaaagatgattggctaagttaaaattaacattaattgaaatgattaaaaaacacagatggcagtaaagcacggcacaggaccagaagtggcaacattacaagggtagataatataacatggagtttgacacaagattggg

SEQ ID NO: 10856 - DNA, 109 bp, Oryza sativa
  Clone ID: uC-osflcyp085a10a1
gggggttataaaaaaattgtgggtgttatgctttacaaggtgggcaaagatcaaataaaaccatacggatcaatacacggcacatgaccataagttccaataatttatt

SEQ ID NO: 10857 - DNA, 443 bp, Oryza sativa
  Clone ID: uC-osflcyp085a11a1
ggagaaagtcaaggttcgataaatattgcttcacttgtacaaagtacagataaaaatacattgatacatgacacggagagagccatgcacaccacttatttgggacacacagagggcaaggctgcagagaaaatcaagcaacacaagctgaactcacggccccacctgtcagcctctcactggtcgaggccggagactcttgtgaaaaacagcaacaccacgcatgcagaagaagacaaattattacacacacaaatcgacgacacggcggccggcgacgtacggcgaggtcgtcgccgccgccggcgacgttgtgatgaggtcgatcagccgaagaggtggtgcttcttctcgccggtggactcctcggcgctcttgtggtccttctttttctcgtggtgctcgtggaaggcgtagccgccggcgccgaccgccgccgtggc

SEQ ID NO: 10858 - DNA, 185 bp, Oryza sativa
  Clone ID: uC-osflcyp085a12a1
gtggagaaagtcaaggttcgataaatattgcttcaatagggcaaagcacggataaaataacattgatacatgacacgagctagagccatgcacacctaattacagtgtaccagcacataggttgaaggctatgattaagaaaatacagccctgcaactctgatactcacatgacctactcttaca

SEQ ID NO: 10859 - DNA, 436 bp, Oryza sativa
  Clone ID: uC-osflcyp085b01a1
gctaaagagaaaaaggcagggtaattcatatggaaataataagttcttctagcctaggaaataggatatggtcatatgcaattgttaccaactacaaataacaacagtaggttcctcctctcttgtatcaagaacaaaaattgacaagataaacattacaggggctacttgcgttcttcgaaactcctggtgatgaggactaattttagtacatagtagtggcatatccagcagttttacagcagaaatagcagagaatgaaatataggaagttgaggcataacttgcgcgtttctttgggcggctcaaattggtagcttttctatccaccaaattgatcatccggggtaacttgggcacggatcagcttccgaacgggatctgtagccgacgtgttgttttctacctgttcagtgactgtttgctctgatggcag

SEQ ID NO: 10860 - DNA, 184 bp, Oryza sativa
  Clone ID: uC-osflcyp085b03a1
ggtaaatagcattcagactttgattcctttctgcacttctccaatttcacgggaaaccagacctttgcacaagctcatgctgaagcacacttaattggaaaaatcgtttttcctaagcgtgccaaaaaatagtttttctcagaaccgggtgaaaagggcccacatgttaaacacaaagacctta

SEQ ID NO: 10861 - DNA, 445 bp, Oryza sativa
  Clone ID: uC-osflcyp085b04a1
gctaaagcaacaaaaatgctatcatttgctggtcactcttacagacttacacttccccagtttcgcagtggtatccacaacagcgaaaggtttcttcacaagggaaaaaacaacacggagcagctcaacagaaggctttacagacaaaaatgcacactccctgttggctctcccaagatttgcaactggctggctggccatgaggtgctccaacatcaactgccaccttcaggttagcggtgtcggcatgaagtgatatgtacagatggagatctcatctctagctttatacagctgctgctactatcagacttggtagaccattcccacctccagtgtggaggcatgaggtatggtagcagcataagatggtccgcggctgtttctcctcaagaactcgtagaagaagtttatcacgattcgctttatgaaactagacccgctc

SEQ ID NO: 10862 - DNA, 464 bp, Oryza sativa
  Clone ID: uC-osflcyp085b05a1
cgctcctccaagacatggccgcccgcttcggccccttcctcctcgtactccccctgtcctccgcgctgctcgtcctctccgccgccacggcgccccgtggccgtcccagccaagtggatgtggggaggcagctgagggaggagctgtgggagagaaaccaagggcacgagatgctcaggtcgtggcgcgacggtgacccgtgctcgccgcctccatgggaagggttctcttgccgatggaaggacggcaacctcttcgttgtcaagctgaacttttcttcaaagaaactgcaggggccgattcccgcagcgattggtaacttaacagaactagatgagattgatctgcaggacaacaacttcactggttctattccagaatctttctttgatctcacacacttgctgaagctgtcagtaaagtgcaaccccttcttgaacaatcagctacctcatggcctatct

SEQ ID NO: 10863 - DNA, 143 bp, Oryza sativa
  Clone ID: uC-osflcyp085b06a1
aaaaaaaaaattaaaaaatttaaaaaaaaaaaaagttttaaagagaattttaaaaaatagtgattgtggcgtttaaaaaccccagtacaattaaaaaaagtcaaaaatatgtaaggcacccattagggttacttttaaattaa

SEQ ID NO: 10864 - DNA, 85 bp, Oryza sativa
  Clone ID: uC-osflcyp085b07a1
attattaaaaaatatataaaaaaaaatgaattaaaaattgaagaaaaagaagtaacaaaataataagctcaaaaaacaatcggga

SEQ ID NO: 10865 - DNA, 412 bp, Oryza sativa
  Clone ID: uC-osflcyp085b08a1
ctagtgtagtatatcattataatgcaagtacaatgtttcatcaattaatcacaatgcagtttgattaagcagagggcatgatcccatcggattcagaggaaggctcttttacactacagatgaatatgcagacacccagcttggtgttacatacatagactggattgggctgaaaattatccggacagggcgctggcgttggagacgaggagggcgccgccgagcaggagccctgtgagggtcacggctccacatcacaagcccggtggtaaccaccaacgtaggtggcaccggtggaagaccattcctcccgcgagtagatagtgatgtagccttggacgtttgcgccgaacttggccacgatttgggacacacccttcccagtgctcttcctgccagatgcatcaatatc

SEQ ID NO: 10866 - DNA, 199 bp, Oryza sativa
  Clone ID: uC-osflcyp085b09a1
aataataaaataaaattaaaaaattaaaaataaaaaaacaaataaaaatatgtaaaaaaacaaaaagttccaaatataaaagggcaaaaattatagagggagtaaaaagatgaatagaaaacaaaagcaaaaaaaagtaaaacataagaactaatataaagtacacaagaacatacaaacaggaaaataaatgaggaaa

SEQ ID NO: 10867 - DNA, 366 bp, Oryza sativa
  Clone ID: uC-osflcyp085b11a1
ataattaattcacaacaccatatttcattgaccaggttcaaaacctgcacagaaatacacactaccggcacagacctaaccttctatccaatactgggacattcatccacgcgggccacaccaatacgtccatatatacggtacacgtacgtacatctactgcactgggtacacacacccacactctcctgcaaagacgcccattgaggtaaacctagctggcttagctgaaggcgatgcgtccccatggcagcacgggcggaggtggtgctcacttgccggggacgaaacaggtggcctaggcccaggctttgttgtttgacggggtcacgcaggcggtctatgaggttttcgagggggcccttg

SEQ ID NO: 10868 - DNA, 107 bp, Oryza sativa
  Clone ID: uC-osflcyp085b12a1
gggttaacttttttttgtgtgcttgttttctattttattttattacgattgatagcaacaagcatttcaatcaccatatccaaagcgaactcatttcatggaaaaca

SEQ ID NO: 10869 - DNA, 117 bp, Oryza sativa
  Clone ID: uC-osflcyp085c01a1
ttttttttttttttttttttttttttttttttttttttttttttttttttttttttttttttttttttttttttttttttattttatttattatttttatatatttttaattttttt

SEQ ID NO: 10870 - DNA, 402 bp, Oryza sativa
  Clone ID: uC-osflcyp085c02a1
acacatgaaatcaacttgcccaacaatttatcagaaaatgcatagcagttcgcaagccatatgcctcagttacacaaatagcagccaggagcgcctaaaatacaaaagctgacccagaaattcgagggcagcacatcacaagagagtttgagagagggagagagccagcaagggagagcatttatttagaaatcgttcacttgccattgccagggttcaaaacatttcagctatttttgcacctacaggctcacggtttttttgggggaattgcccttttcctccaagctaacaagcaggctgtcgaaggcctttttgaaggagtccacaccttccagctttagctgtttgccaaccttatcccaatctatacccagtttttccagggcactgtatacacct

SEQ ID NO: 10871 - DNA, 433 bp, Oryza sativa
  Clone ID: uC-osflcyp085c03a1
gaggcctccaaaacagcaggagaaaatttttttatcgatcaacaaaagatacatccacccacacaactctactactaaatcatctgatcagtaacaaaagataagcaacacaactagctatcgccgccgcaaaatgcatattattcctcaagttcgcctaccgcgcacgcatcaaatggagcattcgcaaacgcctcccaccctccattagctcatcaatatacactcgcaatctcaaatttcatcgaattagtagcagtagtagcagtcgtagaagagatatcaggatcattaccttccttccggtgggaaaaaaaaaatataaatctaacttgcaaatgttccaagggagcctttcattccgagaagtggaggaggagccatcattagccatggcgtgaggagagcggatcacagagggtttttaccatcc

SEQ ID NO: 10872 - DNA, 343 bp, Oryza sativa
  Clone ID: uC-osflcyp085c04a1
aaaacgggccccccgcacccgggggggaatccccccgggggggggggaaccaccgggggcccccacctatatggggtgggccccccataaaccccggacaaaaaaaaccggggccagggggggcaaaaaccagggggaaaaccggggaaaagggcccaccccaaaatctaccggctttttccaaaaccagtcggggtggaccagccccaggaaaaaaatctttaaagttctttggcccccggcgcctttatcctaaaaagcgggcgcccgggaacccggggccccaggggccagggagaattccccccagaggggggggcaatggatgagatggttgaagggg

SEQ ID NO: 10873 - DNA, 407 bp, Oryza sativa
  Clone ID: uC-osflcyp085c05a1
gcagtcataccaaaataaatgcaattttactgtaaaggtacataacattacggagagttaatactcactcactggggacagcagtagctacactcttttaacaggggacaaaattggtccgaaaaacatactcatgttacaaaaaaaacattcaacacagaagcacggatgttcgccggtggatttctcgaattgctgaagatgcttggaagtcaggggcaaaactcatttttcgactgcttaatgggctgggattttaagaatgccacgatcaaccaggggctgcagataaggttttggaagatcccttaccccgcaaccgggggattaaaggaaggcttgaaccactttggaactgtgcccaacagcccatgtcgtgcatttgcctccaagagcttttttccata

SEQ ID NO: 10874 - DNA, 185 bp, Oryza sativa
  Clone ID: uC-osflcyp085c07a1
attataaaaaaaaaaataaaaaaaaaaaaattaaaaaaaaaataaaaaaattaaaaaaaataaaaagtgtaaaaaataaaagggaaaataatatagagggtgtaaaaaaaagataagaaaagaaaaacaaaaaaaagtaaaacagtagcacaatagaaacgacagaagatcaaaccaactggaaa

SEQ ID NO: 10875 - DNA, 260 bp, Oryza sativa
  Clone ID: uC-osflcyp085c08a1
ataattaaataataaaataaaaataaaaaaaaaaaaattaaaaaataaataaaaaaaattaaaaaaataaaaagtggaaaaaataaaagggaaaataatatagatggtttaaaaacaagataagaaaacaaaaaccattaaaagtataacattagtaataaaaaaaggacagaagattaaacaaactggaaaataacagaggaatacttaataggaagaaaataaaaattaacctcaacatctttaaggctatacaaaat

SEQ ID NO: 10876 - DNA, 211 bp, Oryza sativa
  Clone ID: uC-osflcyp085c09a1
aataaaaaaaaaaaaataaaaaaaaaagaataaaaaaaaaaaaaaaaaaaattaaaaaaataaaaagcggaaaaaaaaaaagggaaaaaaatatagttggtgtaaaaagagtattagaaaaaaaaagccaataaaaggaaaacatcaaaagagaagaaaggacatgaagatctaaacaaaacaggaaaataaatgcaggaaaaacaaaaag

SEQ ID NO: 10877 - DNA, 108 bp, Oryza sativa
  Clone ID: uC-osflcyp085c10a1
ttttttttttttttttttttatattttatttttaaataaaaaaataaaattaaaaaaataaaatttaaaaaaaaaaaaaaaataattaaaaaaaaaaaaagttccagt

SEQ ID NO: 10878 - DNA, 459 bp, Oryza sativa
  unsure (1)..(459): unsure at all n locations
  Clone ID: uC-osflcyp085c11a1
tctcgttagtcatcgccggccttccaaatgccgtcctccccgtggatccccaccgccggcgctccgccgccgcgggcagcgccggccgtggtctactactggctgtcggagcgccaccctgtcaaggaggcaggagcaggagcaggcgcttccaacgcgcaggagtccaggccccgcgtttctccggcggagaactctgaagtggaaacccgagagcatgaagagaaggtcaacaaatatcaggctgtccttgcagctcgtttgaaggccaaatacttttctggcaaggcttttggtaaagaaaatgtgtttgaagaaatgactatccagtctgagaccattctgttaagcaggtgcccgttttcaagtttatttgnagatccagcaaaattttgccgggagaagagctgtactaaagaggacatttatccatctttgacaaatgcctcctttgccaag

SEQ ID NO: 10879 - DNA, 119 bp, Oryza sativa
  Clone ID: uC-osflcyp085c12a1
cttatcacaagtgctcctattacgtgggctgggaaagaaacggccaactgatgaatgtttaagcgccactttggcaaagaatgtaagagcctgagcgggaaggaagcaacgcacacgag

SEQ ID NO: 10880 - DNA, 405 bp, Oryza sativa
  Clone ID: uC-osflcyp085d01a1
cccttcaagccatatagaacgcaatgggttagtttgattttctgtctccacctgctccttacacccagcaatccagtgccgctaaccatctccttttattcttcctcaacctcctgatctccaagagcatgcagatgcaaactgatatttctcctccaaggttccaacccttttctccctcccctcgtctcctgactactactattaaccacttgatattgttacacacacattaattctgtcatggtcgacttcaaatttcttgaacacatgagaacccataatccattaagatgcaggcacaggacaaattttgaacatgtataccataatgaccactgtgcagctcatgctaccaccatctacagagaaggcatctattaaatggttacgatctacagcgaa

SEQ ID NO: 10881 - DNA, 430 bp, Oryza sativa
  Clone ID: uC-osflcyp085d03a1
aaaagagtcagcacactagatccttcatgcagtatacagcaaatacaaaccatccaatcaagagagaagagaaggctgccatccctattaggaaaggccagccagccattaaaatgccaacgcatgtcacagttagaaaaggaaagaatgaacgaacaacagacattttatccacccattggccacgcaaccaaacaagagcagccacattcaacacattccacttcacggagccattgtaggcaagccgattcaagcagtttgccacaaatgagtagcaattgcaggtaaacagattatagaacttgtgctcgaaacttctcatgcccagttgcagagcgtcgtcccaggaaatcgccgttcctgcttctgcatgcttgtaggaccgctcacatacatgtgtcgcgagattaacaggaaagcaacactt

SEQ ID NO: 10882 - DNA, 434 bp, Oryza sativa
  Clone ID: uC-osflcyp085d04a1
cctcgttaaattgtccaagattacaggattgattgggtgtaaacagttgtgttacagttctacttgaacaaacacggtattgtcagataactcattttacaaacggtagctacagctcaaacaaacaaaagaaacagttacactcttcgttgagtagggggagacgtcaagggctcaaggcgatcacttctcagtgacgccagcagctgcttccacctgattcgtctcatcttccaacgaggagtacgaagaaaaccttctcagggcagatgcactgtacagacaaaagccaagaacggtttttaccgacgggagcaaactcttggtgaaagtgcacgccgggaagcttccaagcaagaatggagttgatccatagcactatcaggggttttggcttgttgaaattctatgcagctcaatctgaaactcatcaa

SEQ ID NO: 10883 - DNA, 198 bp, Oryza sativa
  Clone ID: uC-osflcyp085d05a1
aataataaaatataattaaaaaaataagaattaaaaattgaataaaaaaaataaaaaatagcataagtgcaaaaaataaaaggggaaatattatagatgatgtacaaaaaagatacgaaaagaaaaataaaataaagtaaagcattaacagtgaacaaaggtcacaagattaaacaaactggaaaataaagcaagaaa

SEQ ID NO: 10884 - DNA, 189 bp, Oryza sativa
  Clone ID: uC-osflcyp085d06a1
aataaaaaaaaaaaaataaaaaaaaaaaaattaaaaaataaataaaaaaattaaaaaaaataaaaagcgcaaaaaataaaagggaaaataatatagagggtgtaaaaaaattataagaaaacaaaagccaaattaaggaaaacattagaaataaagaaaggcctgaagatcaaacaaacaggaaaaata

SEQ ID NO: 10885 - DNA, 211 bp, Oryza sativa
  Clone ID: uC-osflcyp085d07a1
aataataaaataaaaataaaaaaaaaagaataaaaaaaaaaataaaaaaaatgaaaaaaaaaaaaagtggaaaaaacaaaagggaaaataatatagatggtgtaaaaagatgagaagaaaacaaaaatcaaaaaaaggaaaacaacattacatgtagaaaggacagtaagaataaacaaaacaggaaaactaaagcaggaaaacccaataa

SEQ ID NO: 10886 - DNA, 142 bp, Oryza sativa
  Clone ID: uC-osflcyp085d08a1
attaataaaaaaaaattaaaaaaaaaagaataaaaaaaagaataaaaaaaattaaaaaaagaaaaagcggaaaaaataaaagggaaaaaaatatagttggtgcaaaaacaggaaaagaaaagaaatgccaaaaataggaaaa

SEQ ID NO: 10887 - DNA, 184 bp, Oryza sativa
  Clone ID: uC-osflcyp085d09a1
aataataaaaaaaaattaaaaaaaaaagaataaacaaaaaaacaaaaaaaatgaaaaaaataaaaagtgcaaaaaacaaaagggaaaaaaagatagatggtgtaaaaacataataagaaaaaaaatgccaaaaaaaggaaaacagcagaacagtagaaacgacagaagaataaacaaacaggaa

SEQ ID NO: 10888 - DNA, 257 bp, Oryza sativa
  Clone ID: uC-osflcyp085d11a1
aagtaaatagatcatatattccattatatatatatatataataggagacaggatacatacattagaacttaaaatcaccggaagcgaccatcacaagctcaacacaagcagaagccgcatcagccaggagcaaacgacatgatcacccacgcttttggatggagaacaagaagaccgagaagaagatgacgaaggctgaacaccttgaccgagctaaacactggcgatcgatcaccagtcacctacttggtgaacag

SEQ ID NO: 10889 - DNA, 95 bp, Oryza sativa
  Clone ID: uC-osflcyp085d12a1
aattaattggttttttatttttttttatatttatttatattattatttattttttattaaaaaaaaaaaagtgtaaaggaaaattaaaagaaaaa

SEQ ID NO: 10890 - DNA, 76 bp, Oryza sativa
  Clone ID: uC-osflcyp085e01a1
tttttttttttttttttttttttttttttttttttttttttttttttttttttttaaataattttattaatttaat

SEQ ID NO: 10891 - DNA, 444 bp, Oryza sativa
  Clone ID: uC-osflcyp085e02a1
gatacaacagcagaaaaggatatacctctgcttccccggttaccatatggaaagatttttacgttacagacatacaagttacagcacaagcagttttcatatgcttgaacatctaatgtcagcggtagcacattaaccaaaagtaaagtaaaaatcacatcttgggagcaagccccgtatcatgcttgggaacatcagctaatatcagtcttaaatcacatctcaggaaactgaccggcaagtcatcctttcctactcgctgatcctacagcagctgcttgcagtgacagtcatggtgtggccttgtcagcaagtgagtgggcagccgagctccttcgccgccgcggtgaggaaggcgagcgtcagcccggtggcgcggcggctgtgggcttcccactctatgcatctctccacatcggcttgccagttgatgatgcttgctgc

SEQ ID NO: 10892 - DNA, 427 bp, Oryza sativa
  Clone ID: uC-osflcyp085e03a1
aggaagaacacatcatctattcataaaggtaatgcagagcattcccattgtttcattgttcatatgacaaaatgtaatccatacgaagaatttccaacacgacgcgaaaaaaaaaagaggaagaaatctcgagtatagctttttaaacacaagaaaccggtgtactgcatatgagttataacgacaggaagaacggctgttgttgttctgaaaggttgcaagatttccaagaagaattcatttctgtgagctatctgtagcgaagtaaggtatggccacgatcaagctgagaggagctgattgatctttatggtgtagcagctttgaaattactccttgccatcggcagcacggagggagcccagctgaaccggggcctgggtggacaccaccttggatgagccgtaacccgcgatgtcgaccccct

SEQ ID NO: 10893 - DNA, 423 bp, Oryza sativa
  Clone ID: uC-osflcyp085e04a1
gagatcacagtagcaatatttattgagcatgcactaaaatatatacctacacgcttgcgggagataaacccgagctgaaaagctaagggctctccgactcgtccgatcaccatggggggcattatgccgcctttgcgaagccaaccttcaggttgccatagtcaaacacggtatggtaggctcccataaagacatctcccaagatccagagaggaccacgaggaggaggaatgtccatagctgggaatccactgatgcactgggtagcagttccctcaccaaccttaaggatgtattgttctggtttgagaacaaacttgttgccaccgattgtgaaggcaatgtcaggcatggatgcaaggctgctgcagtcaacagatgattctcccataggactaggaagacggtcacatagctgatcaa

SEQ ID NO: 10894 - DNA, 130 bp, Oryza sativa
  Clone ID: uC-osflcyp085e05a1
aattaaataataaaataaaattaaaaaaaaaaaaattaacaaacgcatcaaaaaactaaaaaatatcagaagtgcaaaaaataaaagggaaaatatgatagatggtgtacacaaaagaaaagaaaagaaa

SEQ ID NO: 10895 - DNA, 199 bp, Oryza sativa
  Clone ID: uC-osflcyp085e07a1
attaataaaaaaaaaataaaaaaaaaagaattaaaaaaaaaataaaaaaatttaaaaaaataaaaagcggaaaaaataatagggaaaaaaatatagttggtgtacaaacaagataagaaaacaaaagccataaaaagtaaaacattagaaaaatagaaaggacataagattaaacaaacaggaaaataaacgaagaaaa

SEQ ID NO: 10896 - DNA, 187 bp, Oryza sativa
  Clone ID: uC-osflcyp085e08a1
aagattgtattttttaataataaaagaaaaataaaaaaaaatgaattaacaaacgaagaaaaagaaggaaaaaaaggagaagcgcaagaaataaaagggaaaataggatggagcgtgtacacaccggcgtagaatacaaatgccaaaaaaaggaaaacagccgtagtgtagaaaggccagaagatta

SEQ ID NO: 10897 - DNA, 163 bp, Oryza sativa
  Clone ID: uC-osflcyp085e09a1
aataaaaaaataaaaataaaaaaaaaagaattaacaaaagaacaaagagaaggaaaaaaaggagaagcgcaagaaacaaaagggaaaaaagtatagatggtgcacaaacagtagtagaatagaaaagccaatatgaggataacattattagatgtagaaagga

SEQ ID NO: 10898 - DNA, 138 bp, Oryza sativa
  Clone ID: uC-osflcyp085e10a1
tttttttggttttttttttttaattgtatattttaataataaaataaaaatataaaaaaatgaattcacaatagaacaaagagatggaaacaaatgtgaagcgcaagaaacaaccaggaaaacagcatagtaggtggt

SEQ ID NO: 10899 - DNA, 415 bp, Oryza sativa
  Clone ID: uC-osflcyp085e11a1
atgaaaaatttatcctgctactactaaaggtaaacaccaacttaattagttacaaaatatccatgcacgtttccaattaattacaccaaattcgacatgcacactcaagcataggcaggccccgcctatttgcagaacagtaaaaaaaaaaaaacgatagaggcaggatcagtaaacggactcatcgaagtggaaacttgaattggtctctacaccaactaagagtgcaaaataattaactgccgcctcgtgtcgagtaacgcgcgagcgggggatttagagaggatttatttaactcctattatagaggggaattatactctcaatcccctcttcaatttgtttctgggattaaccgaacaaggcctcatagggagaggccgccggactcgaaggctttgtcgagcgtggaggt

SEQ ID NO: 10900 - DNA, 156 bp, Oryza sativa
  Clone ID: uC-osflcyp085e12a1
ataataattcacggggcttactgattatgttaacacaatacattgttatgcactaagtttaaaggcacatcggacataaatcaaactgaaattcatccaaggagaagcagggctcacacagtggggaccgatccgagataataacggtaccaatac

SEQ ID NO: 10901 - DNA, 166 bp, Oryza sativa
  Clone ID: uC-osflcyp085f01a1
tcgacggtcttgtcggggtcggagccgacgatcaccgtcgtcgcgccgtcgccgaacagcgcctgcccgaccatggagtcgaggtgggactcggagggcccccggaacgttaccgtcgtgattctttggagcacaccggtgaggactgcgcgcgccgcggttgttc

SEQ ID NO: 10902 - DNA, 297 bp, Oryza sativa
  Clone ID: uC-osflcyp085f03a1
aaaaaaaacgaaactaggaaaaaaaaaagggaaattttaaaaaaccccatgggaaattataaaagctgaagaaaaaaagggaaaccaaaaaaactggataaagacttaagaaagattttggccgggaattttttaaaaaaaaaggggaaaaaaaaagccaaggtaggattccgggggtttttttcccacccaaaaaaccagggaactgaaaatgcccccaagaaggaaatttggggggggggaactcattgggaaacaccatggggggcaccaaaatcttttcctcgccggtggggg

SEQ ID NO: 10903 - DNA, 189 bp, Oryza sativa
  Clone ID: uC-osflcyp085f05a1
aataataaaaaaaaaatataaaaaaaagaattaaaaaataaataaaaaaaataaaaaaaaaaaaaagcggaaaaaagaatagggaaaataatatagttggtttacacacaagataagaatagaaaagccaaaaaaagtaaaacattagcagtgtagaaaggacataagattaaacaaaaaggaaaataa

SEQ ID NO: 10904 - DNA, 211 bp, Oryza sativa
  Clone ID: uC-osflcyp085f06a1
aataaaaaaataaaaataaaaaaaaaagaattaaaaaataaagaaaaaaaataaaaaaaataaaaagtggaaaaaaaaaaagggaaaataatatagttggtgtaaaaacatgataagaaaagaaatgccaatataaggaaaacattagtaatgtagaaaggacagaagattaaaccaacaggaaaataacgcaggaatacctaataggaga

SEQ ID NO: 10905 - DNA, 188 bp, Oryza sativa
  Clone ID: uC-osflcyp085f07a1
aataaaaaaataaaaataaaaaaaaaagaattaaaaaataaataaaaaaaattaaaaaaataaaaaacggaaaaaaaaaaagggaaaaaagtatagttggtgtaaacacaggatcagaaaacaaaagccaatattaggaaaacatcagaaatgtagaaaggactcaagattaaacaaactggaaaata

SEQ ID NO: 10906 - DNA, 184 bp, Oryza sativa
  Clone ID: uC-osflcyp085f08a1
aataaaaaaagaaaaatacaaaaaaaggaattcacaaacgaaccaagagacggaaaaaaaggagaagcgccagaaacaatagggaacaaaggatggttggtgtacacaccggagaagaacagaaaagccaataagaggaaaacagtagtagagtagaaaggccagaagattataccaacaggaa

SEQ ID NO: 10907 - DNA, 355 bp, Oryza sativa
  Clone ID: uC-osflcyp085f09a1
aataaaaaaagaaaaataaaaaaaaaggaattaacaaaagaagaaagagacggaaaaaaaggagaagcggaagaaacaatagggaaaaaaggatagtgggtgtacacacaggcgaagaaaagaaaagccaatataaggaaaacatcagcagagtagaaagggcagaagattagacaaacaggaaaataacgcaggaaaagccgaaaggagaaggataagaaggaagccttttcaatggtaagggtagggctaagtaggaaacaatagggaaggggccagaaagtgggcaatatagagggggggcacaaacgccgggggctagtaaaacggagtaaggacaaaccggggaatgggc

SEQ ID NO: 10908 - DNA, 81 bp, Oryza sativa
  Clone ID: uC-osflcyp085f10a1
aataaaaaaataaaaataaaaaaaaaagaataaacaaaagaacaaaaagaaggaaaaaaaggaaaagcggaaaaaacaaaa

SEQ ID NO: 10909 - DNA, 64 bp, Oryza sativa
  Clone ID: uC-osflcyp085f11a1
aaaatatgtttttaaaatttttttttttaaaaaaaaaaatggggaagcgtaaataacaatgaga

SEQ ID NO: 10910 - DNA, 228 bp, Oryza sativa
  Clone ID: uC-osflcyp085g01a1
ccaaaccctgtgttacaatacaacaaccaaaaaacaaacccaccctccaagcattattagccccagactctataccctagcaacgaagcatagtgactcaatacacaaagtgccataagagatacttcctccgttttacaggtcattctagcatttttcacgttcatgagaaaagctagaataacttacattgtggaacggagggaggagtacttatttattttccca

SEQ ID NO: 10911 - DNA, 426 bp, Oryza sativa
  Clone ID: uC-osflcyp085g02a1
aggaaacaaactcccatccgtttccgtttgggctgattaggactttgtttctgtttaggccgaataggacttgggttgaattataccaaggcctattcgggtagcatcaccaggagaacaagggcatatatacctacataggataaaaaatcacagcacataacaaagaattacatgccgccttaaagcacttagcactgggtaaaagacaaaacaacccataactttcccttagtccaaaggggggcaccgagaggtccgcgcctatgtcgatcccaggtaatccaacaactccgttggatgcattttacatattactctggtggggagttaataatactacatattacctgtagggaggattttgcaccagcagtgtcaaatccttgggggtcccttgatagggtgtccatcagcttgttctgg

SEQ ID NO: 10912 - DNA, 422 bp, Oryza sativa
  Clone ID: uC-osflcyp085g03a1
acccatgagatgatgagaatgatcagggcatcaggcagagggtaagtattaatacatcatttgggaatgtataatatttatgtgttaaccctaaccaatcataaaatcttggctaatacaggctattaaatgttgattctgtcaagctgcaaacaatttacaacaaaactgcagtggtaatttccacatactccagagacccagatacacactaggacattagtaacctggactcaccaatgagcaccagagttgattgatatctgtttagctttcctccagtctccgcaacacagagtcagcaaagatgcgctgcttctcttcagtgtgtttgggactagggcggttgtgtttcagatacccgtcccacggaaccttcttaagaccagctctagcagctatcatgtctcttactctttcag

SEQ ID NO: 10913 - DNA, 431 bp, Oryza sativa
  Clone ID: uC-osflcyp085g04a1
ctggtaaattttcccatttcttttgtccgtaacaacagatcatgtaatctttgctggagtaaaaatctaaaaaaagaatggctacggaagctgcattgttttctgttgctaaagggactgacaactgataactacaatgacagaccaaagtttcgaatgatctatcttgaagagtataggcaagataccaaacctcttgttcaagaactgcatttgaacagtaacgttttcatgactagaacaacttcctagctctgctgtcagttctccagtctgaatcttgcatggggagatgttcatcagggtatggtacactgccttgcctgcgaagttagaacctttcgcattatgtactgattcttgctcagcatcaggaacaagatgttgtcaaaaccaagagacaccagacgacgatttcgggctatacatgg

SEQ ID NO: 10914 - DNA, 190 bp, Oryza sativa
  Clone ID: uC-osflcyp085g05a1
attaaaaaaaaataaatataaaaaaatgtattcacaaataaacaaagagatggaataaaatgctaagcgcaagaaacaacctggacaaaagaatagttggtctacacaccgtacatgaaaagaaaagccaatttgagggtaacattctaattctagaaaggtctgaaaattagacaaactggaaactacc

SEQ ID NO: 10915 - DNA, 206 bp, Oryza sativa
  Clone ID: uC-osflcyp085g06a1
ggttaataaaaaaaaaaaaataaaaaaaaaagaattaacaaacgcacaaaaagaaggaacaaaaggagaagcgcaaaaaacaatagggaacaaagtataggtggtgcacacacatgataagaaaacaaatgccaaaagaaggaaaacagcccaagtgtagagaggccagaagatcagaccaaacaggaaaaatacacgcaggaaaa

SEQ ID NO: 10916 - DNA, 147 bp, Oryza sativa
  Clone ID: uC-osflcyp085g07a1
aataataaaaaataaatataaaaaaatgaattaacaaatgaagaaagagaaggaaaaaaatgaaaagcgccaaaaacaatagggaacacaagtattgttggtgtaacacagagtagtagaaaacgaaaagccaaaattaggataaca

SEQ ID NO: 10917 - DNA, 172 bp, Oryza sativa
  Clone ID: uC-osflcyp085g09a1
aatataaaaatttaaatataaaaaaatgaattaaaaaatgaataaaaagattgaaaaaaatgataagcggaaaaaacaaaagggaaaatagtataggtgttgtaaacagaggatcagaaaagaaatgccaatataaggataacagtataagagtagaaagggctggagatga

SEQ ID NO: 10918 - DNA, 186 bp, Oryza sativa
  Clone ID: uC-osflcyp085g10a1
actaaaaaaagaaaaatataacaaaaggtattaacaaatgtacaaaaagaatggataaaaggagaagcgcaagaaacaataggaaaaaaaacagagatcctgtaaacacattggcagaacagaaatgccaatgatagaataccaccattattagaagaaacgccagaacattagacaaactaagaa

SEQ ID NO: 10919 - DNA, 140 bp, Oryza sativa
  Clone ID: uC-osflcyp085g11a1
gctcaaaaaatatattttagacaatacgatatgacaaaattacatagtgggggtaaaaatgactgcccgctaggagcaacatgaaacacaccaatgtacgtcaaaaccgcacagttggatagaaatgaacgggtaaggat

SEQ ID NO: 10920 - DNA, 412 bp, Oryza sativa
  Clone ID: uC-osflcyp085g12a1
gctagttgcgggttatatacaaatatacagtgttgcgactaattgttcaaaaccaaatatagaggcttgtgatattacactgcctagacaaacttgtaacctgaatcatggtcccttactaatgcatattaagcctggtccaaagggattggagggggtcgaggataaatgattccacacctcaatatgggacaatgaaacccctgcaaatctaacagaagatctatatcatcaccattgtcttcatcataaaatagagtcggcattgaaaaattttgatagatgcgcaaccctgccatgaacaaaagctttgaaatctgactgtaccaggccttaagatttatcttaactaagactgcacgaagcataacgaaacacatcaatagcagctttaacatcataaactttaatg

SEQ ID NO: 10921 - DNA, 85 bp, Oryza sativa
  Clone ID: uC-osflcyp085h01a1
cataaggcctaggcgaggaatgccgttcgtcgtcgctggctttaccaatatacaaaccaaccctaccaagcataattagccaagg

SEQ ID NO: 10922 - DNA, 234 bp, Oryza sativa
  Clone ID: uC-osflcyp085h02a1
attttttttattttttttttttttttttttttttttttttttttttttttttttttttttttttttttttttttttattaaattaaaaaaataaaaaaaaaaaaaaaaaaaaaagaaaaagtaaaacaaaaatgaaaaaaaaaaaaaaaaacataaaaaggaaaaaagtaaaaaaaaaaaaaaaaaaaaaaatcttaaaaaaaagagtaaaaaaaaataaagaacaaggggagt

SEQ ID NO: 10923 - DNA, 239 bp, Oryza sativa
  Clone ID: uC-osflcyp085h05a1
tggttcgcggacaagttcaaggaggccttgaagccccacagcttccctccgggcgcgtccatcctcttcacccactccccgcccggcgtcctcaccgacgcgttctccaaggactcgtcggtgccagagggcgccgtggcggcggtcggtgatcgagaacagggccgccctgcgaggtcgtgtgctggaattccatcattcggccagtcacggggttctcgtccggcggtggctttcgg

SEQ ID NO: 10924 - DNA, 419 bp, Oryza sativa
  Clone ID: uC-osflcyp085h06a1
aattcgaaatgtgagaataatcttgatggatcacatggtttctcattgatatatatggtagtcatacataaagatagatggtagccattctagactaagtacaagacatggtgttacaaaattggactaccagagagtttatatcgagatactactgtgtgcccttaaaagagaattacaatttttcgaagatccctaatacaaggtctaagcactttctgaaaatttggctggaggattaggtactacagtaggagttgccatggttaaacaataatgacgaccattcctctcatagatataagacagcccgtgtaactctggatcactagcaagtgccaggtcaggcatagtactacgggttttatgatcagggcatactggtgctgctgaaggcctaggacacaggaagagagcac

SEQ ID NO: 10925 - DNA, 300 bp, Oryza sativa
  Clone ID: uC-osflcyp085h07a1
aattatcattgttaaaactttttctttacatgtaaattatctgcaaagtaagaaagttacactcccaagttacaacagcacaccattcatatatccatgccggcagcctgtttgtgcccttgggcaggatgcatttcatttatacaagtacaaaggccctcaaatcagccaccacatgaacacacacatgttccagcatcgaaacgatctacacatgcatcacaccggtcatgcatcttacaaaccaaaagaatctaccccgaagaagtccgggaggttcgagcaccgtagaggaggaag

SEQ ID NO: 10926 - DNA, 188 bp, Oryza sativa
  Clone ID: uC-osflcyp085h08a1
aaaaaaaaaaaaaaaataaaaaaaaaagaattaaaaaaagaacaaaaagaaggaaaaaaatgagaagcgcaaaaaacaaaagggaaaaaaataatgtgggtgtacacagagtagaagaaaagaaatgccaataaaaggaaaacatcattagtgtagggagggcagaaaatgagacaaacaggaaaata

SEQ ID NO: 10927 - DNA, 171 bp, Oryza sativa
  Clone ID: uC-osflcyp085h09a1
ttttttttttttttttttttttttttttttttttttttttttttttttttttttttttttttttttttttttttttttttttttttttttttttttttttttttaaaaaaaaaaaccggttttaggggggttaaaatccaaggggtaaaaaaaaaattaaaaggggggaac

SEQ ID NO: 10928 - DNA, 431 bp, Oryza sativa
  Clone ID: uC-osflcyp085h10a1
gcaaatgttggattttaatctgaagatgacaacattggtctaggagttgccaaacataaggatggcactgcagcaatgcagagacaccatcgtcagtacatcttgggtatgaaaattgacgattattgcgggtatctaacatggcttgtaagcatgctagacttggtaagggctccatggtgtatgatccgaggatattaacactgcacagatgatgatatgagagcaggtttagtccttgtagacaagaggcttgttgacccaacggatgcggcagccgcaggcctgcagcatctggagcagctcaggagacagcacagacttcagcccactcagcatcttcagttttttcagcctcccgcaagccgctcttagtgccatctcgaacccttttatagagacccatgagaggtgtaccattttaacatcct

SEQ ID NO: 10929 - DNA, 414 bp, Oryza sativa
  Clone ID: uC-osflcyp085h11a1
gggtatattaaatagaagcaatctaacgcactttcagaaccactcaacaacgggattatagcactctaccctacagtggataagcgcgaaacgcaacgcgccaaagccagacatggactttggaacgtgttgtctttgccgctaggtttttttctggcatttacgaccatactataaacggaggtcttagagcgagctaaaaaaaagcaaaccgaaaacgggaatacggcgaaagaaaactaggcaaaactaactagccaactgctcctcagtagcaggcaggcagcaggatcttgggcccgtgctggcagtttcacagatcagaggatttcagaccatcagtttcttggggccaaatgcctgttgagttcttaaggaccgtcatgttcttaatggctagctagggaacatggg

SEQ ID NO: 10930 - DNA, 437 bp, Oryza sativa
  Clone ID: uC-osflcyp086a01a1
aaagaattccgccttccttaaaatatcagaaacggttcttgtaggttgagcacctttttcaaggaaatagagaatagctggaacatttaaacaagtttgattctttatcggatcataaaaacctacttttcgaagatctcttccttctcttcgagatcgaacatcaattgcaacgattcgatagacagcttgttgctttctaccacatcgttttaaacgaagttttaacataacattcctctaatttcattgcaaagtgttatagggaattgatccaatatggatggaatcatgaatagtcattagtttcgttttttgtatactaattcaaacttgctttgctatctatggagaaatatgaataaaagaaattaagtatttatcgggaaagactccgcaaagagccaatttatttaaacccatattctatcatatga

SEQ ID NO: 10931 - DNA, 433 bp, Oryza sativa
  Clone ID: uC-osflcyp086a02a1
aacttgaatagtaactactctttgtttggattcaagccaaatctatgcccaatctctgcttaaagcagcacccactatacaaccacaaatgcagaatgaggcaaatagtctaaaccacagtgccctctactgatcgtatatcaactgcaggaaaaatctagaaataacatgttttttgtgtttgatgtcattcgatacacaggtctctcacggtctcaccagatatttcaatcgataataatggcctgaacccaccacctccttctatggcctgcacccaccagcttctatgtccaaaatttcccgatcaaatccagggcgatgggggcgatcttgctaaggatattatacactttatgagccttgtcgcataccgtcaccaccacagtagctttcttatcttctttgaaggcaagaaaaccgacgaagatgc

SEQ ID NO: 10932 - DNA, 455 bp, Oryza sativa
  Clone ID: uC-osflcyp086a03a1
gtccgcctcgccagccgcgccgcctcccgtccgtgacgacggcttcgatgccggggcggagctggtgctgaggccctcgcacgtgaggagggtggtgccggacaggatactgtcggtgcgggtcctgccgctggtggaccggaccgtggtggcggcggggaacaagctggggaacgttgggttctgggacgtggacggcggcgccgtggcgggtgcagatggggtgttcgagtatttgcctcacaggggccctgtgggggcaatcgtctcacacccagctacgccgcagaagatttacagctgttgctatgagggtgaaatttgtcttatggaccttgagaaagagaactttaatatgatctatctgactgactatcctattttctcactttgtcaagcgccaaatagccccagctctctatatcttgctgaaggaaatgatctgaaactttttg

SEQ ID NO: 10933 - DNA, 217 bp, Oryza sativa
  Clone ID: uC-osflcyp086a04a1
gggggcttggcaaaaaaaaaaatcaactttcattgaaaattttggaaattggaccccaacaacttaaattgaaaaaaaacatttttgaattccacttagtttaaaaaaaaaatcccccgccggattgttttaaaaaccaccaaattaattaaaaggaaaatggggataagtgattttggccccaagggactgattaaacctaaccaaagggagggga

SEQ ID NO: 10934 - DNA, 584 bp, Oryza sativa
  Clone ID: uC-osflcyp086a05a1
ctattttgagcagctacgacgtatgctgcccgccgacggcagggagcctccagtgcggccgccctcctttttttttttttttgttttttagcacaaaccaaccaccacaaacatgattataatcgccaaactgaatacaacgtgctgcacaatgagcgaatttgaggtatgaaaggctagttcgagtagaaaaatatcgaaaagatacacccccaaaaacaggctaaatagaaaatggccgtatgctaaatagccagctgtctccaccatggagaacgaatttatccggatgacatatgaagcatatcaggagtaacaccatccaaatcatgtctcaagaacgtactaattgcaagatagaccactcgtttgacgacaccgaacactttctgagataaattaaattgactgcgcgtgcaacacccaactggcacaaggcactgcccaatgagaaaaaacagcccatacgcggaagttacgtccatgggagataaattttttcacacgtataaacacacggggtttccttatcttcacgctggaggggcaaacatttatgcatgatattctgcttagggtctgac

SEQ ID NO: 10935 - DNA, 319 bp, Oryza sativa
  Clone ID: uC-osflcyp086a06a1
ttttgggggattataaaaaattgggggttttttttttttttttttttttttttttttttttttcatttttttttttttggaaggaacaaaacacaaccccaaacaaaaaacccccccagcgcccacattaaaaagggaaacaacatattttcccccaaaagccacgcaaccgaaaactaaactttagtgagcaactgacaaaatggaatgctggttagacaacacaaactggatcaaccaacgaaaaaatttaccccgcttataaaaagaggttttctgggggcagaataaatccccccaaaaaggaacgcccccaaaa

SEQ ID NO: 10936 - DNA, 445 bp, Oryza sativa
  Clone ID: uC-osflcyp086a07a1
gccgcgtcggcggcggcgagcgcgggcgccgggaagatgacggcgtcggcgccggggttgtagaaggaggcgatggacatgcggttgccgtcggggcgcgtgaggacgcggtgcatgacgctcttgtacctgccgttggtgatcacctccagctggtcgccgatgttggcgacgatggcgtggcgcatgggcggcacgtccacccactccccgtccttgagcagctggaggccgctcacctggtcgtcctggaacagcaggatgatgccaccggcgtcggtgtgggcgcggaggccgtcgacgagatcggggcgcgggcacggcgggtagctgctcaccttggtgccgaacgttgggccgttcgacccggcgaaggccttcttcaggtaacccttcttcaggcccagattcttgcacagcaggttcagcaccctctccgagagct

SEQ ID NO: 10937 - DNA, 299 bp, Oryza sativa
  Clone ID: uC-osflcyp086a09a1
ggggaaactaaacatttgactgttattagcttttgcaccaattagttataccagttaactgaactttttttttaaactgccaaaaacaaatgtaggatggtacaaacatgcatgaaccatcggattcacacaaagcaattttcaaaaccttggactacatatatacgggtgggccaaaacgcagttgtttggcttttattaaatttttttcaaaatacacatcacataaaatatacattcctttctatactggccaaaaatgaactaacctgcatcaaaaaagaggcttaaacacgaaa

SEQ ID NO: 10938 - DNA, 452 bp, Oryza sativa
  Clone ID: uC-osflcyp086a11a1
atggaatagaatgttcttcgttaacaaaatgagtagataatgcttctacattaaaaccagtagaaatcattttgcaacagcttacactacagacgacatgatgcatattctgatattcatgcatcaatccgcataataaccctatggttccaaaagataggagtacaaaaacctttgtaattatcaaaagttcaaaatccaatcagctatattcagcatatactggtggaaaattatatgctgatgaagcagtgaggcctacacctatgatgagttgatgaccaataagattcttgtgaaaacttgactttgttaaagaagtgggatcaccttcatgcgacagcactccaatcgcgcgtgtcgtggtaaacagttataaggttaggcccttaattcttggttctctgcctcaggagcccttggttggaggcaagagctcaggtatgtcagta

SEQ ID NO: 10939 - DNA, 380 bp, Oryza sativa
  Clone ID: uC-osflcyp086a12a1
ttttgggggttttttttttttttgggtttttttttttttttttttttttttttttttttttttttttttttttttttggggggaacaacacacagccgcattcttaaaacctttccggggcccgggtttaaaagggggccaactttttttgcgccatatggcacgcaaccgataactccacttcagtgttcagctgacatttttgttttctggttagacaacacaaactagatgaaccaacgcttcattttactcggcttatgttatgatgttgtctggaggcagaataaataacacagcactcgcgcacaattttataagccatgcgagcatgttgcttcagagtctgatggggggaaagaaaaaaaggaagaaacaat

SEQ ID NO: 10940 - DNA, 364 bp, Oryza sativa
  Clone ID: uC-osflcyp086b01a1
atattcctaaggtttgaattaaacattcttctaaatgatttttttatcagtacggatggagtataaaataaacaaccaaacacttgacggttaaattaaccaaactttgattattaacaacaaaaacaatggacggcgaatggttcgtggatcgatggccggcgctgctacgggcggatggagtagtggagatgacgctcgacgcgcgctcgatcgatcgatggatcgatcgatctcacacatgcaccttgggtgccacgccggcggcgccggtgagagacccggcgacgttggcggcggctccaattccagccccaactccagccccggcggcgccggcggcgttggcgccaacccccagggc

SEQ ID NO: 10941 - DNA, 425 bp, Oryza sativa
  Clone ID: uC-osflcyp086b02a1
cagatgtggcaaggggatcatatatatgaaaatcgaaatcaagttccaacttttgtttgtttgtctataccttctttagttacataggcatgcttatatacatatcatttctacgaggatatactcaacctgctcaaggaaacatatggctcaggtaaaagaattcattgactggattactgaataccaaaagccattctcttctatttttgtatcggagatttttcaggagttcatatatacagtacaaaagtctataagttttggaccgtggttccgttaactcggatgtatggaacatgagcaacatatggccaatcggcaccatctttagatacccgagtactcaaacacgaagtacagttgtttatattgaactcttggagagtcaggggcagagcattgtctggtatggactgcaagcc

SEQ ID NO: 10942 - DNA, 419 bp, Oryza sativa
  Clone ID: uC-osflcyp086b03a1
atcacataacaatagaattaactcatgtaagtttatcagagtgttaatacaaaagaatgatcaaatacaatcaaatagcttgtaaccaaacagatgtctccaacttttcacacatagaacttttttggcttagccctacaaactggaagacttaaatctgatggtcggtgaaacctgatagaggctctggaatgaaatatggctcaagcatacatacgggttctttcttgcttgatacagcagagtgaataaagttctcaagtcaagggcagaccaatatacaagccccaatcaataaccactcactccatgtcttcatctgctttacagaatatgatggtagaaggcatgcccaagcagggtgcacgtagaacaaaattagggcccattcaataatactgcaggccatgctgttctac

SEQ ID NO: 10943 - DNA, 351 bp, Oryza sativa
  Clone ID: uC-osflcyp086b05a1
atgtaggtaggtactgtagctatatactgtataagtgaagtagaagtatatgacatattatatagatagtggtagtacatgtatagagagagagagagagagacgatcgatatgattgattatgcggcggggcgttggtcatcgtcgtcgtcctccggcggctgcagcttctggggacgaggggcaggctcggaggaggtcgagggaggcgctccgtcgccatcgccgtccccgtcgcctcctctgtcctcggactggaagcagcagaagatgcccattatatttatggtgtgctgggccctccaccaacgccaacaggaacgaatcctggaaccagagggatgatcctcc

SEQ ID NO: 10944 - DNA, 461 bp, Oryza sativa
  Clone ID: uC-osflcyp086b06a1
gaagatgaaacctagtgtttgcatgctcaaataatagtatggactaattgttgctgcacaccagctgcaattaatttcttttgcagaagagcaagaatatagcaacaagcaagcaggccttcatcttgatactccaaggaatgccatatcgaccacttcccactagacctctcagcaatggcatgaagcacagcaccagccacccacaggagatgaattcactgataccagggccaccgggcaagccttccgttgtcaccaaaaccaccctccatgctcctacagcgattgcaatgacacttaacattgcaagtgctgtcacgggaatgaacaccgtcgattcgtcgaaggtgaacctccctggctcaggctcatcggtgttggaatcaccatctgatgtgctcttgtctttgcgggtgacctcgaacacagtctcggagaagcctaggtcttgaggatga

SEQ ID NO: 10945 - DNA, 247 bp, Oryza sativa
  Clone ID: uC-osflcyp086b07a1
ttttttttttttttttttttttttttttttttttttttttttttttttttttttttttttttttttatattaaaaaatgaaaaaaactaaaaaaaaaaaaaaagaaaaaaaaaaaaaaaaaaaaaaaaaaaaaaaaaaaaaaaaaaaaaaaaaaaaaaaaaaaaaaaaaaaaaaaaaaaaaaaagaaaggaatacagaaaaacaaaaaaaaaaaaaaaaaaaaggggaaaaggaaaactaacaagag

SEQ ID NO: 10946 - DNA, 56 bp, Oryza sativa
  Clone ID: uC-osflcyp086b08a1
aagagatgcccacccccatgggggatggggccccctccccgctttgccccctaatc

SEQ ID NO: 10947 - DNA, 431 bp, Oryza sativa
  Clone ID: uC-osflcyp086b09a1
agaaatcacgcacaatgatatcagaaagtgtcaatggaccaaagatgaatgtatggcactatgatacattacggtacatgatggaaaaaatacggtacactgcgaaatagatgttagtcaacatatctcactgaggaaggcaccaatgtcagcgttcctgaattaatagtttttcatctacaaaaagaaaaacaaaattatgtcaggttttctccgttgaggtgagaagtccaagtttttctgttatctgctcaacgttccttttgccccaccaaagatgttgtcgatctcctgatttcatctcatccaccttgtttcctccatctcgccgttctgattgagcctcctgatgtgcatctgatgatccaggctgctcggtaagaaactgctgccagaagccatcgtttgcaccaggtgtgacagcaggaggc

SEQ ID NO: 10948 - DNA, 145 bp, Oryza sativa
  Clone ID: uC-osflcyp086b10a1
tttttttttttttttttttttttttttttttttttttttttttttttttttttttttttttttttttttatttttttttatgattaagaaaaagaaagaaaaaaaagaaaaaaaaagaaaaaaaagagcggaaaaaataacaagg

SEQ ID NO: 10949 - DNA, 467 bp, Oryza sativa
  Clone ID: uC-osflcyp086b11a1
ggcggtggaggcggaggcggcggggaaggatggcggggaggaggtgagggagtacaagagcgacgcgaggaagctggaggagctgttcaagaagctgaacccgtcggccgaggagttcgtgccgctggcgcgccgccgcggcggcggggacggcgcgcgccggctgtcggcggacgcgcccgtgttcgtgtcccccgcgatcgacttctactcgcaacacccggtgcagcagccgccgccgatccaggtgctccccgtggtggtgggcggtggcgggggcgcgggattggactccagcagcgacggatccaccaacggccagccgaatcgtcggagaaggagtagctttaaccaagggaggaggaggatgggaggccgaccaaggcgaactgattgggaggatagtgtgcggcgaactgtcttagtatctgacattgatcagcatgggactgaacagaagcttgctg

SEQ ID NO: 10950 - DNA, 431 bp, Oryza sativa
  Clone ID: uC-osflcyp086c01a1
atagtctaacagaaatttactccaaccagattcggggtagaagcatagcaaaacagagcagctaataacagttctacaacgagaagcagtagcagtagcttcagtgaaacatcatttcagctcattacatcggcagttcgccgctgtccgcgatgacaactttgctcttcggtgacccactctgctggccctcagcttcaatcttgtaaaccacatccattccagacagcaccttaccgaacacgacgtgcttcccgtccaaccagctggtggttacagtggtgatgaaaaactgggacccgtttgtgtctctcccagcattggccatggacaggaggcctggtccggtgtgcttgatcttgaagttttcatcggcgaacttcgtcccatagatagattcaccaccccttccatcaccaagtgtgaagtca

SEQ ID NO: 10951 - DNA, 424 bp, Oryza sativa
  Clone ID: uC-osflcyp086c02a1
gaagacagaacacagaatactttattcttccaagctgaaggatcataccacattgtacactaaaagatagcatttccattgtgtctcaaaacctatcataactcagaacgtcctggtactcatctctctgtgcttaattgtctaacaagatacaaggtgacccttggatttcctctcatccgacaaataggaaaagaaataaacaagaggatagagcaggaaaccaagatgcatatatcataacctggagcagtggccttggtgtatcatgcctttctatctatttaacaagttttacctagcctatcttggatgaaaaatgagctcaggctggtagctccagcttcacattgttcttccagctcattatgtaatagtagaagaagtcagcatacaagagagtctgcacgatgcccgcaaccca

SEQ ID NO: 10952 - DNA, 96 bp, Oryza sativa
  Clone ID: uC-osflcyp086c03a1
gttgggtaaattatggaataggataaaaaagaaacaaaaaaaaaacggagaaaaaattaaaaaatataaatataaaaaaaattaaataacagaaaa

SEQ ID NO: 10953 - DNA, 455 bp, Oryza sativa
  Clone ID: uC-osflcyp086c04a1
aaacagccaaagagatcattgatattttaataaacatcatgcataaaccacgcaggttatcaagtcagttttaaggtccagcacaactcttgcacactagggactatgacacacaaagagcggcagcattacaaggtttgcgacaacataatagttattcagtattcactcatgcaccaacagaaacatcctgcatggtatcaaaagacccagcataggttacgcaaacattttggctttggttgctccaacactatgcttcagggcctaatagtagaacattatttcttgccgcgcagctttgttccaagagccctttcaagcttcccgatgatctgctggttcggaatagctttacctgactcgtactcctggatcacctggggcttctcattgatcatctgtgcaagctgtgcctgggtcatcttcttgtccagccttgcttgcatgaggtt

SEQ ID NO: 10954 - DNA, 412 bp, Oryza sativa
  Clone ID: uC-osflcyp086c05a1
atatgaagattatttaattatatataaatccgtgatactgtactttgtttcagtaaggtcaaatggaactggaatagcaagaagtagtttaattgaacagatccatctatgaaagaataaaaggaattggaagaagtagctatcgctcaggccgcttcagattcagcagcactagcagcattcagatccacagaaagatcaagttccttcccagtgatcttgctgtacaatgcaagcacatccttcaccgttgtctcaaaatgagtagttgcatcgtaactatttgtcacgaagcagttgtcctcgtcagcggtattagtaggttcgtatcggtcatagatgtcaaaaaatgtttcctctacaggtccgagcagaacgatcccaggtttcagctcgatctcaggcttgtcag

SEQ ID NO: 10955 - DNA, 445 bp, Oryza sativa
  Clone ID: uC-osflcyp086c06a1
aaccgcgccttgtattcatatattcatagaatggagggaatgcgacggcgttcgatgccacgcggccgttcgtcttacaggagcagccgccggccggccgtcttcttgcggaggccgacgagggaggcgtcgtcgatgaccggcccgcagagcgagccgtcggtcatggtgtggtagaacgtgctctggaacacgacgcgggtgcggttggcgatggcggcgaactcgaggacggcgcgcttgtacccgccggtgcccttggactcgtacggcaccttgatgaaggccctcgccgcgtacgcctcggcgaccatggagcccgcgcacccgtcgcgcgcgtcgcccacggcgaacgacaggcggtacgtccacccgggcacggtgcgcaccttctgcaccagcgccgactccttgccccccaccagctccacggcgcgggcgccct

SEQ ID NO: 10956 - DNA, 433 bp, Oryza sativa
  Clone ID: uC-osflcyp086c09a1
accttaatttatatttttttttttattttttttttttattttttttttaaattattttttttttaatatttaattaaaaaaaaaaaaaaaaaaaaaaaaaaaaaaaaaaaaaaaaaaaaaaaaaaaaaaaaaaaaaaaaaaaaaaaaaaaaaaaaaaaaaaaaaaaaaaaaaaaaaaaaaaaaaaaaaaaaaaaaaaaaaaaaaaaaaaaaaaaaaaaaaaaaaaaaaaaaaaaaaaaaaaaaaaaaaaaaaaaaaaaaaaaaaaaaaaaaaaaaaaaaaaaaaaaaaaaaaaaaaaaaaaaaaaaaaaaaaaaaaaaaaatataaaaaaaaaaaaaaaaaaaaaaaaaaaaaaaacttttaaaaaaaaaaaaataaaaaaaaaaaaaaaaaaaaaaaaaaaaaaaataaaaaaaaaaaaactaaaaaataaa

SEQ ID NO: 10957 - DNA, 102 bp, Oryza sativa
  Clone ID: uC-osflcyp086c10a1
aaattgggtttaaaaattcaaagggtaaaaggaccgaaaggaaaaatttaaaagggtggtataaaaatgggaaaaaaaaaataaaagggggtttttaccctt

SEQ ID NO: 10958 - DNA, 456 bp, Oryza sativa
  Clone ID: uC-osflcyp086c11a1
aaagcatggccctctgaccctttagttaagcccaagagagaagctccataaccagaaagacaagtgaatctaccatataggaaaaaggaggtaggccatcaccacaaccaccaccagatgccattgcttctcttcagaagacttggcattacaaaaaaggaagaaagaaagctcaaggcagagagagattagaaagcaacaccggggacccattcacatgacacacactatctagggctaaaaaactggagcagatggtgtattacacttgaatggttaaacacttgctcagggtgttcagttcagttttcagttgtcatgggcagtttgagctccttccagggcctccatagtagaagtatgtgccccagtcggcattgttaccgttttgcacgtcgtagcagttcgattgctcagtgaatgtgcccacccccttgggggctttcaggttgttgg

SEQ ID NO: 10959 - DNA, 98 bp, Oryza sativa
  Clone ID: uC-osflcyp086c12a1
tttgggggataaagaatgataccgctgacctttagttaagcacaagagagaaagccccataatcagataagacaagtcaaatttacacatagaagaaa

SEQ ID NO: 10960 - DNA, 402 bp, Oryza sativa
  Clone ID: uC-osflcyp086d01a1
gggaaccagaaaactttgactttgtaggctcggagaaaaatattcacttttacaaaaatccatgcaggagtcaagttaaaagaagaaacagggttctgtctttgagatggagtataatttatttaagatcattccctccatcccattatccatgagtttgcaaacttcagctcacattttaaaaatgaagatgcaaaaaagagagagggacagcaacttaaaaacgtattggtcaaccagccaaagggggattgagcgcactgggaacattcactccaatttgagctttggccttttccagttcagttgaggccgatccaagcttggcgttgaattccgggagaccctgctggaccgcggctgggtcgatctggtccagggggacagccttaacagccacaa

SEQ ID NO: 10961 - DNA, 433 bp, Oryza sativa
  Clone ID: uC-osflcyp086d02a1
aaaatcattattgcaaaaacatcatcttcttcttcatcttcttagtgtacacaacaccaactcgatcatcatctcgtcgcactaaacccatcttccccaacccaaagacaacgaactcgctggccacaaatccatccaaccacaattaaccactgctaagctacggtcccccacttcacttgccggggacgaagttggtggcgtacgcccaggcgttgttgttgacggggtcggcgaggtggtcggcgaggttctcgagggggcccttgccggtgacgatggcctggacgaagaagccgaacatggagaacatggcgaggcggccgttcttgatctccttcaccttgagctccgcgaacgcctcggggtcatcggcgaggccgagcgggtcgaaggcgccgccggggtagagcgggtcgacgacctcgccgag

SEQ ID NO: 10962 - DNA, 264 bp, Oryza sativa
  Clone ID: uC-osflcyp086d03a1
ggctagggtaatattgcatcattatcatttcccttttttttatgggagaactcactttgctttcgatacatccaaaaagattggggcaccatgcatgttttacaaatccatgcaaagaaatgctattttggttcgaaaagaaaacgggctagaacttttgaacacttggaggtttttataggggggtatctggccttgaacaacggggggccttcctttggcttggaccaagggtacttaatggggggatcccttgggaacttt

SEQ ID NO: 10963 - DNA, 448 bp, Oryza sativa
  Clone ID: uC-osflcyp086d05a1
ggggcaaaacacgataattttattagaacttggaattttggattttacatcaatatttagtttacatgttgctctattagacatttcagtgcctttttcctgctaccgttacacagctctacaggaccggatagcttgaggcggcctccctcccttgaagagaataatctccatgtctccaagcaactcgattcatgaagttccttcagcaggtttgggttgcaccacagttgacaatctcagtctcaagggcctcctctgggtcatggacgttggtgcaggagggcgaactagtggggcagcaagctcaagtggctcaagctcttcctcagctttacgcttcagatgattgttatcaggtgaacctgtggttcctgctttgcccccattacttccaactttatgctccaaagataatccttgatctactgcagttaaatctttctga

SEQ ID NO: 10964 - DNA, 451 bp, Oryza sativa
  Clone ID: uC-osflcyp086d06a1
gcgatcaaaaacacagatgggcaaccacacagttaacacaaactagatagttccacacaaaactaacgatgataacgatcggatgatgatgatggtagctcgattagatagatagataacttggccatgagggccccaccgctcagttcctccagttcccgtcggagttgccgccgccgcggctgccgtagccgccgccgtagccgccgccaccacggccgccaccgtagccaccgccaccgccgtagccgccttcacggcgctggccgtagccaccgccgccgtcaccaccaccgtagccggcgccaccgtagcctccgcctccgccgcgctggccgtagccaccgccgcctccgccttcggagcggcgcgactgggccttgttgacggagatgttgcggccgtcgagctccttgccgttcatccccttgatggcgtcgcgcatggcctg

SEQ ID NO: 10965 - DNA, 414 bp, Oryza sativa
  unsure (1)..(414): unsure at all n locations
  Clone ID: uC-osflcyp086d07a1
aaaatcattattgcaaaaacatcatcttcttcttcatcttcttagtgtacacaacaccaactcgatcatcatctcgtcgcactaaacccatcttccccaacccaaagacaacgaactcgctggccacaaatccatccaaccacaattaaccactgctaagctacggntcccccacttcacttgccggggacgaagttggtggcgtacgcccaggcgttgttgttgacggggtcggcgaggtggtcggcgaggttctcgagggggcccttgccggtgacgatggcctggacgaagaagccgaacatggagaacatggcgaggcggacgttcttgatcgccttcaccttgagctccgcgaacgcctcggggtcatcggcgaggcccagcgggtcgaaagcgccccccgggtagagc

SEQ ID NO: 10966 - DNA, 404 bp, Oryza sativa
  Clone ID: uC-osflcyp086d08a1
aggaattaaaatttacttatgtttcttcttcttcttcacagttcacatggaaatcagaaggaagtagcaaaaggaagagctgttctacactcgacagagtaacaaactaagagagcaacacaagtaacaagaggagagatttagtctcttttctggggttctgcaaataaaactctcccctcttgctacccctaaaccccaacccaaggtagtagtaagtcaccccactaaaagtaaccggccatctcttacaaaaattggctgtctcctttgaatcaatcgaatcagatcatcatcatcatcatctacagctcgtcatgctcgtcgttgacgccgcccttgccgtaggcgccgtcacccggggcgccaccggtcctttggtagacggcggaaatgatggggtt

SEQ ID NO: 10967 - DNA, 335 bp, Oryza sativa
  Clone ID: uC-osflcyp086d09a1
ggccaaaaaaaatttttaaaattgtttgggtttaaaaaaaaggggaaattcatttttaaaaaaaaatgtttaaatggggcttaacaaaatttaaaaaggtttttttttaaggaccaaatggtgggaaaaaaaaatgggaaaaaaaagaggtttttttttcaaaaattttaaaaagaaaaattttgaaaaaattttttaaaaaaaggttttttgaaaaaaaatttttaaaaaccgggaaaaaaaactttttttttccggggtaaacttaaaggttttttggggggaaaaaaattttgctttaaaaaaaaaggaaaaaaaaccccctaagggggggg

SEQ ID NO: 10968 - DNA, 385 bp, Oryza sativa
  Clone ID: uC-osflcyp086d10a1
aaaaggccaaatggaattgaaatttggttagaaatatatttgggttattacagaggttgggggaaatttttcctataaccaaagggggtcgatcaaaaaaaattacaggaaaagaacaattaatttggcgacgacgatgacgacaacaacaacaaggggaaaatgaaccggaaaaacgaaaaaaaaaaaggggatttttttacgggaaaaaatctcctttaattttattaggaacacataataaggggaataaaaaacgccggggaattaattaccatacggggccgaaaaaaagggcaagggttcgggcaccgccgtcgggggggggacaaacgggggcaaaaaaggggggccccccgcctacccgttgggccggaagccgggt

SEQ ID NO: 10969 - DNA, 437 bp, Oryza sativa
  Clone ID: uC-osflcyp086d11a1
aacaattgcctccttttttattatcccatccagatgtaacattttttttctgatgggttagtacatcaaaagaaaaacatctttacctaataggctagtactgtagaatatacttcacgctactgattcagaaaagaaagcttgcactaagtcttaagcactacgctgatgctactgggattcaaaaaagaaagcttgtattctgaagtacatagttgctgctggtctctactaccagtagcaactatgtactggtctccactaccagtacatagtccttacaaagtaaccagaaaaataaacatcacattattacagcggtccaaaggccacgagaaaatataactggggagcttcaggaccatgggtacctgggcaaaaaagagaagcacccttgcataatcagatacccagtgctgtcctctgggaagaaatgt

SEQ ID NO: 10970 - DNA, 281 bp, Oryza sativa
  Clone ID: uC-osflcyp086e01a1
ggggggaaaattccctgtttttattggggaaaaaaaaggaaatctatgtaaaaaaaatggttttttaaaaggaaaactggcaaaaatttttataaaagggccctaaacctgatgcttaagggggaaaaatttaagggttaaaatttttataaaagggaaaaggggaggggaaaagggattggtactggattttttatgggggtgcatttaaaagggatgttttgggattgatttaaaggactgggttaaaattgaaaaatgggccaaggaggggttttttt

SEQ ID NO: 10971 - DNA, 417 bp, Oryza sativa
  Clone ID: uC-osflcyp086e02a1
attcgagaagatcagtactactttattcatgccatgaccatgcatacatatgggctttcacagatccatgaagaatttcctcgcccgaaaccgaaacatacatatatagcaaactcactcactctggctgcagagcgaccgtgcgaagtgcgtactcacacgcaattttattagatcgatcggggccggcacggcggcgcacacgtctacttcgccgcagacgccgacatgatgccgccgtcgaacggcgcctggccgaagcagtccaggttgggcccgtagccgacgccgagcacgtcgcagtagcgcttgtagaacgcgacccggtcggcgccgccgttgccgccggcgcactggagcccgccggtgaggatgttcgtggtgagcccgtagcctggcgcgcggtcggccgcgctg

SEQ ID NO: 10972 - DNA, 399 bp, Oryza sativa
  Clone ID: uC-osflcyp086e03a1
aatcagaagttgaaagattctaaacattagactgcttgccatcttaatatatccaacattaacaagggcggtagtagaatcattagtacacatgattctacatcactctctatttttgctttttttttctaacacattttagatgatgcacctgaaactgaacagaagctgctttactactacaagggatgcagcaccagaaagctgcaattttccccctttttttttcagtttttatacacagtgaagaaaagcagagagactaaactctgaaaactccaaggttatacactagacagcagcagcagcagcatcaccactcacccatggcgctctagcgaggctggtggatgacgtggcgggcggcgccgcccttggcggcgacgaactgggccggct

SEQ ID NO: 10973 - DNA, 437 bp, Oryza sativa
  Clone ID: uC-osflcyp086e05a1
atcgtattacagaatttctgtagccttgcagatgatcacttggatatcatgtactagtaattaacaataggatgcatacaaaagatggcccaacgacaacagaagatgcgtgcatctgacattgtctggccttatttgttggtagtactccaattaattaacaagagatgatgcattcttgtgccttagtttcttcacatgcttggcttcacgttgagcctattcgcaatcttcacccccaacgactcatcacactgggagaggtagttgacccagatggcgcggagctcaggggagaccttggggtgcgcgagctcgccggcgaagcggcggatgaacctctcctgtctatccggcgcccacgacctgtacctctccccgggctgcttgaagtcgttctgcttgtgtatcgtcgccttctgcctcctccccaccac

SEQ ID NO: 10974 - DNA, 335 bp, Oryza sativa
  Clone ID: uC-osflcyp086e06a1
ggggcttaaaaaaaaggtaatggggtaaaaaaaaaacgggaaaaggaaaaactggaagttaaagggggccctagctagtttttggaaggattaccccaaaaaaaatgccaaaccccaggggtaaaaaatttttaaatgggaaaaaaaggaaaaggggggctggatccccaacccagggtatttagggaaaaaagttgaaaacggggggatccaaacaatggggttggaaaaaagctttttgggggccttcctggggctcccgggtttccagggccaagggagaccttcaagggggaaccccggaaaaaaaaacccaataaaaccccctttggggg

SEQ ID NO: 10975 - DNA, 270 bp, Oryza sativa
  Clone ID: uC-osflcyp086e07a1
agattatgttttattttatttatgtttttttttttcatacatatgggtttttatagagggaagaataatttaatagagggaaatcaagggggtataacaaaggaaaaaggttaaaaaaccaacaaaacaaacttaaggggaaaaaataaagggaaaaaggaaaaaaaggaaagggaaacggaaaagggccagaccagaaaaacataggtgcaaaaggggaaaaaaaaaagggaaaattggggaacctggaaaaagaaaagcatgatgggt

SEQ ID NO: 10976 - DNA, 316 bp, Oryza sativa
  Clone ID: uC-osflcyp086e09a1
gggaaaaaaaacgggtggtaatatttttagaatttaattttaaaaaggaccagtttgggaaaaggcatttaacaaacctgatttttcatagaatagggggcctaaaaaaagattttttgcccatttttcctttaaatgctggccaggaaaagcaaatgttttaaaggtcttctgggtttaattgttgggcttttttttagggatgctcaaaaccaaaggaacttggaaaaaaatgggtgtttttgcctttttgcgaaaaccaatttcccaaccatgatggatttttttattcggatataaaaaattaaggtttaat

SEQ ID NO: 10977 - DNA, 369 bp, Oryza sativa
  Clone ID: uC-osflcyp086e10a1
gggggggggacctactggatgaaatatatatatatataggggggatttaggaactggttacccttgggggctgacattggggttcccattggtggaacgggaaattttttatgcacgggacaaatttatacaggggcaatgcccatggacacaggaaaacacgacaaaagacctaaaattccagggcggcgatgaacccggggttgtaggggggggaaggcttcatggggccgaccatttccccgagcattattccgccgaccgggccggcgaggagcccgagtccgagggccaagcccatttgtccaccttttcttgccgccggttgttgggccgccgcgtaactgtacgtcccccgcggcggtgggc

SEQ ID NO: 10978 - DNA, 375 bp, Oryza sativa
  Clone ID: uC-osflcyp086e11a1
acacatggaagatgtttacacacaaacacacttttttgggttggcgctagcccttgataggagccagcaggctagctgacacgtaccgggttttgggagtactaacagagacaggaaggtactaggaacagagtaacaagataagatagcaacatactagataattaattacgtattagataaccacaaggaccagcaaacatggggtgacagagagatcgaccaggcttcgatcaatgggattattcagttcaacgatggctgctcctgggctcgtcgctgtacagccaggcgtagaccgtgggggagttgggctgggggcggtagaaaaggttggcgcccaggcttttggtggcaaggttgtttcccgggtgg

SEQ ID NO: 10979 - DNA, 447 bp, Oryza sativa
  Clone ID: uC-osflcyp086f01a1
gaagttaaatttgtcaaaatcttataccataaagttcatttttgttttttgtttcttaacaaaaataaaatctgtttgcagtgacatggaatgtgacctgcacatactcccaatttcttgctcagaagactccttcctgctgtgtatctctctcatcattttataatgacacaattgtgaactgcccaacatgctcttgtggctgccaaaacaatgggacaagtcctggaagctgtgtaaagtgagttaataaaaccaaaaactcttacttcgcttcttgttgaggcccaacttttctgcaaaattgctaacaagttccatgcatttccacagtgagaattcaccttatttacaatctgccattgatggccctggcaaatggaccggtcagcctcttgtccaatgtacttttcacatgtgcccgatcagaatccactggcatgtgaa

SEQ ID NO: 10980 - DNA, 414 bp, Oryza sativa
  Clone ID: uC-osflcyp086f06a1
aatctccaaattcaagtatcaagtgtagtatatcatcatcatgcaagtacagggttacatagattaatcacaatgcagtttgattaagcagtgggcatcatcacatcgcattcagaggaaggctatcttagattacagatgaatatgcagacacccagcttggtgttacatacatagactggatttgggtgaaatttagccggcgagggcgctggagctgcagaccaggagggcgccgacgccgaggagcccggcgagggtcacgggccacatcagaagcccggtggttccaccaaccaaggtgacaccggtgggagaccattcctccggccagcagattgggctgtacccccccacgtttgccccccacttgtcaacgaattggcacccacccttccccgggctcctcctgcc

SEQ ID NO: 10981 - DNA, 422 bp, Oryza sativa
  Clone ID: uC-osflcyp086f08a1
tttttttttttttttttttttttttttttttttttttttttttttttttttttttttttttttttttttagaaaaaactggcgttcggtggaaaaaaaaaaagggtcgggaaaaaggggactagtacaagaaagaccgtttagggcaaagagaaattatttttgggatttttacaaacaggggtttaggaaaccaggatacatactggcaaaaaagccctaattggaattttggatggatttccataactgaaaaaggagccaggtgaaaatgggttaaaaaggccacccgggtttatgacccatccattttcacgaccacaggggcaaacccataattttaataaattagattcaccggattggtggcaagatcccatccaaatgggggttccaaaagggattttaggtttggaggccatg

SEQ ID NO: 10982 - DNA, 401 bp, Oryza sativa
  Clone ID: uC-osflcyp086f09a1
gcaggttctgcctccaaaacgtgttttgttccaagggtattcaccaatcgtaatgggtacaaaacgaaagcaaattttaatcgaaacatacatcacagttatatatcacggtttatcggggccaaccagccatggctggctgggaccctgcctgctatggactcgatcggggttccactactccgactccttgacggccgccttcacccggagcagcacgaagccgacggggacgccgacgagcacgagcccgttcatgatgacggggaacctgaatatttcaccggcggggttgcactgggccccgaacgcgccgccggggtttttcccgccggcggggctaaacttggccaccaccttggcgaacgagtagtcggcggtcttgcgcacgccgagcaggg

SEQ ID NO: 10983 - DNA, 435 bp, Oryza sativa
  Clone ID: uC-osflcyp086f10a1
agggatcacttattcattatagttcttccatgctgctctaccacagcaaaacgtttcagacaccatcaaaccagacttaaggatacacattacaggtaaatagtacacaatgaaacgggacacgaccaaggaccagaccagacaaccatagctccattggggaagacaaataggcagacttgtgaaccctagaacagcagcagctccatggctgaggacttactggccaccacggaggcggagcaccaggtggagtgtggactccttctggatgttgtaatccgcaagggtgcggccatcctcaagctgcttaccagcaaagatcagacgctgctggtccggggggatgccctccttgtcctggatcttcgccttcacgttgtcaatagtgtcggacgactcaaccttaagggtaatggtcttgccagtcagggt

SEQ ID NO: 10984 - DNA, 443 bp, Oryza sativa
  Clone ID: uC-osflcyp086f11a1
ggttcatccatcaaggggaattcaatccatagttatcttgacagcaaatagtttggtaactttgaaactccacagtacaatacggcgttctagaggtccagacaaagagcatcaaagcaagaatgaagagaaagacaattggaatcacataaaaagatggcccaaagcacactaatttttattacaaccgccacgacagtcttgatcgtactgactctaaggcgcaaaatacaaatcggcattaatcttttgcggatatcccgctctctaaaggcttcttattcctcagcaaatcccagttcagagagcttgaggtgggcctcggcgtaatccgcaaagaaggcgtcctcatccgcagcatatttctccaccagtggacggaaggctgggtcagccatgagggctttgtcacttggcagctgaagaaggccttccttctcgcc

SEQ ID NO: 10985 - DNA, 449 bp, Oryza sativa
  Clone ID: uC-osflcyp086g01a1
ccagtaaaacatcatattactgccatagtgctaataatcatattgttacagattttacaagatgcaagtatgcaacacaggcaatacacatgtattctcatagcctaattgctgatgcacaaaacataaaggcaaagctttggtgatcctcattgcaacgatcatgatttactgctgcgacgcaatcctttcatgccttggatgagaagtgtgaaccggattattttttcatctttgtttctgtattacatggaagaaaacgtagtggacaaaggtactgggaccagaaacctagttccaatagaacttcatatacaagaaaagtatgaacaaataattgatttctaaaacaaatgaaacgtatctgatatttacacaaagcactacgaaaagatctgttggatgacttcctcggcattcccaccatattgcataagcagttggatcgc

SEQ ID NO: 10986 - DNA, 411 bp, Oryza sativa
  Clone ID: uC-osflcyp086g02a1
aaaatgctaccacatgacccaattttaatacaacagaacatttggtacaagttcaaaagaatgatcagggtcattaatcattggtcgaaacggttgacatcataaaactcgatgttcttatatttctgggaaattatttttgcctgaactttccgagctgtgtcagttgcacatccaacaaggataagcactgatgtaccagcaaatcccctgaatgccgttaagtgagtgatttgttcaaccacagatggtccagcagctaaaacagcaaggaaggcaaatcctaggacagatttattactaagaactgtttttattaaggcagctgcactttttcctggccgtacaagcggtattgaaacaccttgccgtttaattgctcactaagatcattaggatccaattgaagga

SEQ ID NO: 10987 - DNA, 387 bp, Oryza sativa
  Clone ID: uC-osflcyp086g03a1
aaaaagagctaagtagaatatcatcatccacgaaaatggcgtcacatgcatacatttaaaaccccatttttttgctgccgccataagcgccccactcttacttattcagttcaagacttcaggcgaaggctacctctcaccttcaggcgcggggacctcacctactgggttttcgccgactcgcttttcgacggctgggcctccggcgatgactcgccgaaaaccttggcgatgcgctcgggggggatggcggggaggaactgggctccggggtaacccttgtcggccggggcggcaaacaccttggtggacttttcggcccaataggcggcggtgggcacggggatctgcgccacctgggggaacagcggcaggttgttgagcgag

SEQ ID NO: 10988 - DNA, 440 bp, Oryza sativa
  Clone ID: uC-osflcyp086g04a1
atcacctagtgtattagtataatactgctagagaaacaaaacatgagtgctcatcgcagaatgttaatcacaaaacgcatttccaagagcgtaaataacttatctataagactactccgttactgccaatcaattcaatggccatacacagtaagaaaatacaaaagggggttactacattacaagaagctcattagctacaggaacgaaagcttcctaaagaatccactgctgctttgctgttcctctcgcagcagcacaaaagctctgttgtgaagactagcaatcgccgtatataacaactcaagctgagttggttctgaccattagctcttctcattcaactagagacttagctacaactgggctgcaaggatctcattccatgtatctggtagtccaggaaggcaccagtgcaagcaatcttgaactccctgcgt

SEQ ID NO: 10989 - DNA, 347 bp, Oryza sativa
  Clone ID: uC-osflcyp086g05a1
ggcttaacattcaaatatggccatttgtccattcccttttaaaaagtttaaaccatttttgggtcccaaaattttacagaagaacatagcacgaactcaacacgggcaatacaaaacttttacaaatcgatctttttgctgcccccctatgcacaaatttttaaaaatcgctgacccccttttttaaaagttgatgccgcactgcctgacgtcagggcccctggccttgatggggaagggatcaatcctgacccaaagcaaggaaaagatggaggctagcagaacgggccagatgacaacaatggggggcgtccggttttgcctccccaagagccccttgaggaagg

SEQ ID NO: 10990 - DNA, 368 bp, Oryza sativa
  Clone ID: uC-osflcyp086g06a1
aaaaactgtttaactttactcactaaaccacataatatatattttttgggccccaagcatttaatagcccaggccattacccacaccatactatcatcctatatcagtttttaagtagctacacgtgggaaattaaggcggcccgatgacgagttttttttaagggaaggcccatggtttgcccgccgccccgggttccgggcacggaaccgggaaaacgtcggaggcgaaccctttgacatgggggcagttccatggcagttttttggcgtccggcgcgagctgcccggtgacgttggacatgcaaatgccagggtaggggtcgttggaaatcccctcaatcctgccggccatggggacgttttccg

SEQ ID NO: 10991 - DNA, 344 bp, Oryza sativa
  Clone ID: uC-osflcyp086g09a1
ggggggttgaattccccatatatattaaaaaccttaaaaattaaaaaggcatactaaattttggttttcaagcctttttttaaaattttttttaaaaaaggggaaaaaaccccaccatttttgggatttggggatcgattttaaaaatatgcatgggggggtacacaaataacggggggacgcatgcatgagctaggggaaattttatgggggaaaaataattaatatggatggaggacaagggggttaattatagctggggcttgggggaaatgggaagggccccggtaacaaacgggttgactttgttttggggggccttgagcccgaggttgggttcaagt

SEQ ID NO: 10992 - DNA, 421 bp, Oryza sativa
  Clone ID: uC-osflcyp086g10a1
ctatataaaagaataagatcatgagaagcgtcaaaatttccacatctcacagggtttgctgttcgtgcatgtctatcttatggcccatctgttcaatctccaaacaggagaaaatacaaaaggcacacatctcaactgtacagcttccgaatgctggcacaaacatgcaaatgatttcggtggcatgtttggaacacccactgggtctactgatctaggggtctgccagaagtcacaagttagaaccaccggcttatgtcagcactagttgaaatggaaaaaagaagggtttgtgtccatcttatggcaaagaatcaatttgagtgccaaactgccaattctatgctatgtgaatcctctgtattcataatctatgaaccgccaccactgttgataccgaagtagatcgtcttgcgactga

SEQ ID NO: 10993 - DNA, 372 bp, Oryza sativa
  Clone ID: uC-osflcyp086g11a1
ggacgattgaaaaaaagtaaaaatccagcattataaaattacagatacatgaacgggaaaactggcaaatttaaaaacagaaggatcgggtatataggagcacttttattccacttggttaaccccaaaaacaaacgaattttttggggggaaaagaaaaggcaattacatcaaaggataaaatagactaaatataaactttccattttcaagggatacggggagaaacaaattttcaaataagggggcaatcaaaaacacatgcttggggttggagcagcagccccaccagaggcccgtcccgccataattttaattggggggggatcccatgccttgcccttgggggaactgcaatttcaagttttgttg

SEQ ID NO: 10994 - DNA, 170 bp, Oryza sativa
  Clone ID: uC-osflcyp086g12a1
aaatggaaaatttttattttaaatttgaaaaaagaaaaaagggaaaaaggaaaaaggaaagaaaaaaatagtaaaggcaaaaagagttggagaatgggatgatgatgatgatgaagaatttaacaaataaaagttcgaaactctaaaagagaaaaggaaaacgacgaaaa

SEQ ID NO: 10995 - DNA, 383 bp, Oryza sativa
  Clone ID: uC-osflcyp086h01a1
agcttcaactacaaaccacttactccatatggaggcagaataagtaagtaaattgttttacttaactttcacaggaatagaatgcccccgggacatgcccctcccttcttaaacctttttgacagaatttgttccttctattttagatgataccgcaatgttctggggaggaaaggtctacaacgatttgctcatgcaagctggcccacttggaaatgcgcaggcagaactacttttggggaaggattctatgcctttcacctttgacaagggatgggccttaccccaccgggtgtacttcaatggggaccattgggtcaagccaccttcagatgcatatccatgggtgcctaatgcaagccctttaacaaaaccacccttgg

SEQ ID NO: 10996 - DNA, 267 bp, Oryza sativa
  Clone ID: uC-osflcyp086h02a1
gaaaaatgcggaaaaatgaatgcaaatttttgggtggtttacaaaaagtatgaaaaaacaagcttttaaatttgaaattataccgcaaaaagaaaatttggataaaaagttcccagtccgaccaaaaactaaggaattccttgataggaaaccccaaagtaggaagtccagggttttttgagacgctgtaaaaaggttttaaatggaggtattccctttataggctttcttttttgatgtcgcaaagttaaaaccaagaaatatctg

SEQ ID NO: 10997 - DNA, 395 bp, Oryza sativa
  Clone ID: uC-osflcyp086h03a1
cgatcaattggctttagtttcgggcccattgacaatttgcagatcgacagagagtacgtacgtacacagagcctggctttccattgggtaacccgtaaagggcgccactactcattcgatattgccacactgactgactgactttagcatctgctactactactactccatggacacacagcacactacctgacctgtcaccacggcgccgagcacaagagagaacacacaatgatgatcacacacactggatcgatctcactgctactagtagtagtagtagtacgcgtgcaatgcgaggcgggcatgggaatttttttacatgatggagcaggcgttgacgtcgtcgtcgttgaagaggttgctgacggggtcggcgccgcggtggggctccg

SEQ ID NO: 10998 - DNA, 429 bp, Oryza sativa
  Clone ID: uC-osflcyp086h05a1
ggctggaaatggatatattccccaagcgtgacaacaacttttgagtgccagtgtgtgtgtgtgttcccctcccctccctgcttaattacatcatctctaacgtaaatgattcgtgatcttcaacgggaggaaaatgacgctctcttcgacctccagagcggttttcctcccgagacaaaaagcacaaatccaaagctccccaaaaggctgtacaaaatggcaaaaagaagaaaaaaaaagggagatcgaatgatcccacatcggaatccgacctcgaggcgacggtgtatatgagcgtctgaccgtgctagctccggagcgcgaccggggccttgtgcacgagcgagccggtggcctgcgcgacgccgagcgcggcgctatcggcggtcttccccggtgagccggacttggacatgcggcggacgaagg

SEQ ID NO: 10999 - DNA, 440 bp, Oryza sativa
  Clone ID: uC-osflcyp086h06a1
agagggacgaatattggggccacagtcgtacagaaactattttaaatttgaggtttacacaatgctaattctaagtatcgaaatatatacttatagggttaaccaaaaacgacggccaacatcacgaagggctctgcttcatcacaactactaagaacgtatacatgagcacatgacaccaggatctgagtgcaccaacaattttcaggagttccagattatccttacaaaaaaatcaacctattgctgctgaaagcctagaactatcaaaagccttgagagatgcatgcaactgacggggcactgaaaggatgttggccgtggcttgatgcttactctctggtggctcaactatccaaaatttatgcaaaactatttgaacgccactaggccattcaggagaagctataacttcttccaacagtcgttaaaactgtgcc

SEQ ID NO: 11000 - DNA, 409 bp, Oryza sativa
  Clone ID: uC-osflcyp086h07a1
caaataaaaaaacgttgtatttttgtttgaaaaataggaagttcaagatagaatttgggtactataactataggtggggcgattaccgctataggcggggcgattaccatatataacataagacttctcccccaattctgtttagtcgagcttctcgatctgtcattatacctcgagaagtagaaagaatagcaattcccattccgcccaaaaccttaggaattccttgatagttggcataaattcgtaagccaggtcggctgatacgctttaaaaaggttctaggtctatatattccctttctaggctttctcttttgatgtcgcaaaggttaaacccagaaatatttgttactttcctgaagtttccgaacactttcaataaaaccctttcgtagaagtattttaac

SEQ ID NO: 11001 - DNA, 431 bp, Oryza sativa
  Clone ID: uC-osflcyp086h10a1
gggggcaaagcactcattcattttcaatatcgatcgtttaaattaattgttcgtcacacatacaccatcttgttcagtaatgatggctcacattgtccgtaatccctgcttaactacatattgactccctcattttatactcaacaatacacaccagactcccacactccattttcacagtgactttatttagcgcaccgcaagctgcaccagcacactcctcatgccaaggagaagcaaataagataattgctccaatgctgccttcctcgagcaatcaggggaatggcttagtgcgctcgccgggtgccaagtgccaaatggccttagaagactataatttttgtgcagctcctggtctgttcacagccgggagatgagcagtgggactgagacagtggcggtctgctcccccattgcagggtggcaca

SEQ ID NO: 11002 - DNA, 439 bp, Oryza sativa
  Clone ID: uC-osflcyp086h11a1
accatgaaacgaatccataaaacagcattgaccacaatgccgaatgcaaaaacatataaaaacaccaaaattaaacatctccagacatatctttaattcgagctacctaacatggtgccaaaaagtgctaacataaaccaacatctgaaggccaacctgcttgaattctgaaatccagataggcaagctacagaatttgggcccagttactcagcacagaaagttttatgatcattaaggaaacaactagttgcaaacttcttttctcattcctcatcttcctcctcaccgtcaccgccaccgtcgcttgccttcttctggttcttcctcttcaccctaccaggggggcctccaccgaatgggcttgtcagtgagaagtcaatgtgcttttcagactcaaccctcaccatgaacgacgggatgttgacaatttgcctgc

SEQ ID NO: 11003 - DNA, 387 bp, Oryza sativa
  Clone ID: uC-osflcyp087a01a1
agggggctcttatttggacgcttttttttttaaatgggtcatgggttttccacacacatttccctttacattcccccggtaaccttgacccgccaaaaaaacaagggcaaaaattaatcttccggccgccttcatattttaactccacccttttttcagtgagacttactttcttaacccccagggcccgtttcaacactggttttacccccggcccccctttttaggggccccggggaaatgggccccttcttcccgtttcccacaattggaaagggggggcccaaaagaaaagggaaaatggatttgggtaggaaattgccaattatactttacacaattttcgaaccccaaatggggatttcaaagggaaaaaacccccgggga

SEQ ID NO: 11004 - DNA, 458 bp, Oryza sativa
  Clone ID: uC-osflcyp088a02a1
aatcaaaaatcaaaaatcgccctaggtatgcttccaaacaaatttttgttagtccatatagttcattgggtccaactcggttccagaaaaaaaagttgacgagcaaaaaagactaatcaaagaacaatgtctacatcaatgaaatcacaacaaattaaatactaacagaatgctgagctcgccagatgtcgaggccactgctcgtcggggacaccgccactgccgctgggcctgaggccgagtctatcgccgctcccgctcctccttgctcgtcgaggacgaagacgatactgttcccgctgctccgacgccactggacagcgtcactcctgttgctagctaaggacgtggatgctgccgctcccgctgcttgtcaaggtagaggacgtcgctcccgctgccccaatgccactggacggtgtcactcctgttgctagttgaggccgaggccaccggcg

SEQ ID NO: 11005 - DNA, 458 bp, Oryza sativa
  Clone ID: uC-osflcyp088a03a1
gtatgaggcctacagttgtgtattcttttcaccaaatgcagcacacatcattccctaataccattctatcacacatctgtgctttcttgtacatcataccgtgtcgcttctttctttttacattgaacaacagtggccactaattacagcttctccttgctaataaaactcgctgagactgtagttcagttcattcctcggaatcggaatccattgggcatgatccgtcatccacggtggcgagtggatcaaacatgtgcgagtttggatccatgcaccctgacacaatgtccagcttgcagcgatctcccccctcttcgtagtagctgcccatctcgcagcttgtgatgacaacgttttcgtctgggaagatggctctgtcgcatgccccttctctgttcagttcgtctgctagacccttgttgaagaagctcaagggcttgttgagccatggcttg

SEQ ID NO: 11006 - DNA, 92 bp, Oryza sativa
  Clone ID: uC-osflcyp088a04a1
aaaataaattcatttattattctataaacataatcttattacaaattatatttatacattcatagaattggaaacgaaatgcatgccggaac

SEQ ID NO: 11007 - DNA, 139 bp, Oryza sativa
  Clone ID: uC-osflcyp088a05a1
atattacattcatttaatttttttttttttacttgtcttaacatcataaaatcttatttagtgactgaagctaaatcagaaggcctgtacatataaccaggtttttgcccaaagccttggtgatcataatgaaactcaa

SEQ ID NO: 11008 - DNA, 80 bp, Oryza sativa
  Clone ID: uC-osflcyp088a06a1
cccctgtcgtttgtttgttatccagaatacaacctgatggagccccattagatgatcgcaccatgccttcaaaagggccc

SEQ ID NO: 11009 - DNA, 159 bp, Oryza sativa
  Clone ID: uC-osflcyp088a07a1
aataattatttttttatcattcttattactgattggaaccatcatatttaacaatccattcaaggaatcgaaaaaaaaacgaatgtcggaacattgtccattttgttttctttaccggcgctaaattagtccccggatacctcagctcacgatcattac

SEQ ID NO: 11010 - DNA, 373 bp, Oryza sativa
  Clone ID: uC-osflcyp088a09a1
ggataaggaaccaggggtttattatatatgaacaatttaaagatagaacccctatttggctatctacaaggaagggttctttcccattttttaagagggattttatacttaacaagaacggaagacaaccccctttaatgaagaaatttttttttaccaagggaaacagaaagaattgatccgccagggggacaaaattttgcaaaacgatgcgtttgttttgcagtttttttggctaaacaatgcttcccgccattaagtttccaatgaagacgaaaaacgcaaagaccaaaggcccaaacagggctttgaaacccccatcggaggaagaccttttttttttaagaagatccagttcttggcgaagcttctg

SEQ ID NO: 11011 - DNA, 114 bp, Oryza sativa
  Clone ID: uC-osflcyp088a10a1
tttttggggttgatgaaatttttttttgttatttttttaaatttattatttagaaagcctttgaacataatcgtacacagagttccttcgggacattctaagaactagaaagta

SEQ ID NO: 11012 - DNA, 237 bp, Oryza sativa
  Clone ID: uC-osflcyp088a11a1
aggttgttcatacgcatgttcctatatacaaaggggggtaaccaacgcagaagggctggaaacataataccatctttgcaggaggcataggctcgcactttgaaacattagacacgagatacagcctgtggttgacagagaaacattactggctggactgctatataatacatttaccgctaatagaataggcgcacaattggaagcaccggcctacttgaggcttctacgtaagcc

SEQ ID NO: 11013 - DNA, 387 bp, Oryza sativa
  Clone ID: uC-osflcyp088b01a1
acgaaaccagctacctttattggcatggcatggcatcccgcgcctatcgattatttttctgttcatttcgcattggggcatgggtctatttccatggatgggcaaatgaaaaacgtacaaaatgcctttcttttttttcacctcatttttgggaggggggcatggagagggagaccccctgagccggggacttcttccactggtgggggaccgttttgatctgggagaaaaactggacgcccgccttggcgtaaaaattcaaggttcctgcaaagggggctttgctgccggtgaaggaaaaaaacggccggggtactggaatcggcacgttgatgcccacctggcccggttaaaggcctgtttgaaatttccttgccaaccccccaa

SEQ ID NO: 11014 - DNA, 193 bp, Oryza sativa
  Clone ID: uC-osflcyp088b02a1
aacatatattcattaaatatgctatatatataacaaaataatacataataaatattcaaacaccgaagggcaaacgacaagtttgcctgaacactatacaaactatcgtatttaacgaatgtgaacaaatactcttttacaaagaaccgcggccatttccaaagcctttctgaccaaaatgtaagtcaaacat

SEQ ID NO: 11015 - DNA, 79 bp, Oryza sativa
  Clone ID: uC-osflcyp088b03a1
attctaaatatttaataaaattataaataataataattctataatataatcatatacaaattgaatgtctgaacattat

SEQ ID NO: 11016 - DNA, 96 bp, Oryza sativa
  Clone ID: uC-osflcyp088b05a1
aatattaattctttatttattattaatatttaaaaaaatcataaatttttatttttcaatcatataatcaattatcaaaagtctgtctgaacactg

SEQ ID NO: 11017 - DNA, 85 bp, Oryza sativa
  Clone ID: uC-osflcyp088b06a1
gctatatatttaatgacatcatccctttttttaagccattcctttcattgtttatatattgtttgtcggaacactagaaaatctt

SEQ ID NO: 11018 - DNA, 102 bp, Oryza sativa
  Clone ID: uC-osflcyp088b07a1
aatcattataaataaataaaaaaaatatcattttaaataaacaattcaataaatctaataaaacacactttttggaaaattagaaaatcattagacgttaaa

SEQ ID NO: 11019 - DNA, 185 bp, Oryza sativa
  Clone ID: uC-osflcyp088b08a1
attcattataaataaattataaaactatcaatttaaataaacatttcaagacaacgaatatatcacgttttttgaaaaattataaataaatactacgttaaaggatataaataaatcccttaagacaacaaatttagatcattaccagaggtatgaacaccataatataagccaaacattccaca

SEQ ID NO: 11020 - DNA, 288 bp, Oryza sativa
  Clone ID: uC-osflcyp088b09a1
gtattcatgataaattaattttataaccatcattttaaatacacacgtcaaggcaatgactatatctcgttttttgaaaaagtatatgttaagaatacgttatagaatataagtaaatgcccaaggacaacaaatttatatcattaccagagggatcaacaccataatttaagccaaatattttacctcccgaaatctttagatcatagctctttgccaaacttgctgctttgcatttcatggcagttagcccataaacgaaataaaggcagtatggaatcgtgtaca

SEQ ID NO: 11021 - DNA, 258 bp, Oryza sativa
  Clone ID: uC-osflcyp088b10a1
aaaattaattttaaaaccattattttaattacacatgtaaaggcagtaactataagcattttcttgcaaaagtacatatttagtaaacgttctagcttaaaaataagtcctttaagacaacaaatttataccattacgagaggggtgcacaccatgatatgagccaaatattccacggtgcgaactctaaagataataggtacttgccggactgtccgctttgaagttcagggcaggtggcccaagaacgaaatcaag

SEQ ID NO: 11022 - DNA, 370 bp, Oryza sativa
  Clone ID: uC-osflcyp088b11a1
cacagcatccagtgaaatgaaacatgcagatgattcattcttagcagtgagtacagcacttgatatataccactgcaatcaaaaggcagctagaggctatacatacactgttacatatatatttagggcagcaacttactcggaaggactggaaacatcacatttccttcccagttgccataagcactgaaatagtaacgtgtcgcagatgatacagtcgctaggttaattagaaaaagaactggctacactttcagataatacggattcggttattagaatcgcatcacaattactaacctctttctactcgtggatcctagtcaagcctgcagctagagattgcaaagcaaggaagtgctataaaccc

SEQ ID NO: 11023 - DNA, 159 bp, Oryza sativa
  Clone ID: uC-osflcyp088c02a1
accacctagagccattaaattcagaatatattcaagataataaagaacattgatcatagcatatactagtcctatatgaatagtctggctggctgcttcacaaagtaacatagtgaacgctattgaagttttgcgtattcattaatcttcagtgcgact

SEQ ID NO: 11024 - DNA, 132 bp, Oryza sativa
  Clone ID: uC-osflcyp088c03a1
aacatatatccaaaaaatattctatatatataacaaaatcataaataaaaaacatacaataatataaggccatacgaaacgtatgcctgaacactacacaatctatcatagtaaacgaatgtaaaccatttc

SEQ ID NO: 11025 - DNA, 290 bp, Oryza sativa
  unsure (1)..(290): unsure at all n locations
  Clone ID: uC-osflcyp088c04a1
gcgacactattagaagatgctatgcaccgtcgcatgccaccgccgtaccgtaagccnnttggatccctctttagtcggcccgccctttttttttttttttttttttttttttttttttttttttttttttttaacattcatccatcactcattcaatacaattaacaaaattatacataacaataatacaatcacataagtgtaaataaattgcatgcctgaacattatacaatcagtcttagttaacgaatttaaacctatcccccattacaaagcaccgcgtaccatc

SEQ ID NO: 11026 - DNA, 86 bp, Oryza sativa
  Clone ID: uC-osflcyp088c05a1
atataacaacatcatacatattaaatatacaatcatttaattgaaaataaaacgattgcctgaacattataaaatcatttgtcttt

SEQ ID NO: 11027 - DNA, 114 bp, Oryza sativa
  Clone ID: uC-osflcyp088c07a1
aataaaaattaaaaaaaaaacaagaaatatacagaactaaaccacctaaaaaaatacacacataaagtaaaagaataaaaaacaatatttgtaattctaaaaagaaattatact

SEQ ID NO: 11028 - DNA, 93 bp, Oryza sativa
  Clone ID: uC-osflcyp088c09a1
aaaagtattcatgaaaaactaattataaaactatcattataaataaacacgtaaaggaaaaaaaaacatcaagttttttgaaaagttaaacgt

SEQ ID NO: 11029 - DNA, 89 bp, Oryza sativa
  Clone ID: uC-osflcyp088c10a1
aatggattcatgaaaaaccaagtacccaactaccattttaaatacacatgtcaagacagtaactaactaaatgtttttgacaagggaaa

SEQ ID NO: 11030 - DNA, 449 bp, Oryza sativa
  Clone ID: uC-osflcyp088c11a1
cttaaatctgtctgtgttttttgatttttgttattcttagtcatttttttattttttactactaaatggaaggatcttatcaacgtccatgaatgcgaaatcatagatcgaactgccgaattggcaaaattcggtgctatcatagtatccgctaagttcacgggctggagataagcggactcgaaccgctgacatccgccacagggtaaaccaccgcctctcaggcctccccgacgggttctaccatagaggccaacgatagacaataactcccccccgaacacagcttacaactttcatcgtactgtgctctccaaagagcaactcttctcaaaatctcaaaacaaaaggtgctgagttggaatcccattctaaggattcttgtggttccggggaatccagctacaggagaaccaggaacggggagctctcccctttttccgcccgac

SEQ ID NO: 11031 - DNA, 442 bp, Oryza sativa
  Clone ID: uC-osflcyp088c12a1
aagatcacagaaaatccacggatcccaaatgttctcattgattgatagcgatatcatagaagcagcgacacgaattaagatttaaaaccaaccccaagaaggatcgcagatccaactccaccgaatcgatccaagaactccgcctaatccaaccaaaccatgggcgatctcatctcaccaacacgacacgaactcataaaaagactaacaccaccaccacctcctccttatttagggactcgacgactcaagacgactgatactggcgaaaggcgaaggggaacagcacagatctaggagagctggccgcagtcggcgatgacgaccggcttggcggtgctcccgccgcgggatcccaccttctcgatggccttgacaacgtccatgccctcgacgacgcggccgaacacgacgtgcttcccgtccagccagctgcagggca

SEQ ID NO: 11032 - DNA, 351 bp, Oryza sativa
  Clone ID: uC-osflcyp088d01a1
aaaataaaacgtactgatttatacttaattagtagaaacaggcacagtataggtagaggtagaggtagagaattaggaagagggggtgactggttcattggaggaagtagccggagaggaagaagaggaagccgactaggaggctgccgcatatgagcagcgctttctggtcgccggtgagggagttgccgacgaggcccaactgctggttctgcgcgaacccggcgatctcgacgctcttgctgtcgaagaaggactgcgccgggccgcacgtcgggcaccgacagtcgccggggagctgatcgaacggccattccggctttaccggtttccacgggtcaccggcggcct

SEQ ID NO: 11033 - DNA, 160 bp, Oryza sativa
  Clone ID: uC-osflcyp088d02a1
ccgagtgaaccgattgcattgctgaggaggacgggctaggaaacattacaatttggcaggaaattcctgcttcctatgaacttcctgcaaatctcctacgtccaaactaaaaagggaggcaagacaccatttttttttcatcttttttttgtaagatccg

SEQ ID NO: 11034 - DNA, 111 bp, Oryza sativa
  Clone ID: uC-osflcyp088d03a1
aacataattcctttttatattttaaatattaaataaaatgataaataaaataaatcctattatataaggacatactaacattatggctgaacattacaaaatctatggtag

SEQ ID NO: 11035 - DNA, 135 bp, Oryza sativa
  Clone ID: uC-osflcyp088d05a1
aatataaatccaaaattcatgattaataaagaactaaagcacaaattatataaagacaatcataaaattgtaaataaattgattttttaaaaattataaaaacttttttatttacacgaatgtaaacaaattctc

SEQ ID NO: 11036 - DNA, 67 bp, Oryza sativa
  Clone ID: uC-osflcyp088d06a1
cacatattctaaaaatttaaacgcactatacaaatcataaatccaatctatgacacggaagcaaaac

SEQ ID NO: 11037 - DNA, 182 bp, Oryza sativa
  unsure (1)..(182): unsure at all n locations
  Clone ID: uC-osflcyp088d10a1
aataaaaatttaaaaggaattctgataaagaaagacccaaactataatattaaatacacatgtataaaccctaaataaattaaagttttagaaaatttaaacgcaaaaaaaacgttagactataaaaataaatgccaaaagacaacaaatttntaacattacgagtggtatcaaacccaaaa

SEQ ID NO: 11038 - DNA, 324 bp, Oryza sativa
  Clone ID: uC-osflcyp088d11a1
aaaaggcataatggtttacatgtacggacaaactgatattaattacactcgtgaaggaactaaaaacctgacggttttagaaatgtgatgtgactgtatggcataagattatacaaatactttcccagtggcaacaagttgctcaccttactaaaggatgcaaaccctacatatcagcatcctgttgaaaaacgcacactttaaagcttaaatccctgttacagacgtactgatttgatatccatgaccagtggggcaaaaatgaaacaatggcccaatggaaacctttacattattgaaccatcgacacaattcagtaccccg

SEQ ID NO: 11039 - DNA, 392 bp, Oryza sativa
  Clone ID: uC-osflcyp088e01a1
acacaagaacggggctgacttacttgcattggtgcattattccgtacatgcattcatgtctaatgtctggagggtacaacaacattgtaaaaggggctaagcaaacacaaattggactgacatcataagagcgacctgttaaaaaagaatcttttaaatagttcatgcacaactaagtgttctttttttctggtttcaaactaggctatggttgacaaccgagctaaaacccctacctgctaaccagtaaccagcgaaccactaagcacatgatgaacagagccacgttacttgcttgaaaggcagggactgatactcattgatcatttgcctatttttggcaggtggttgcggtcacgttcatcgattgttcatgctcttaactgttctta

SEQ ID NO: 11040 - DNA, 462 bp, Oryza sativa
  Clone ID: uC-osflcyp088e02a1
ttttgtacttcggtctcatcctttgagtcagacgacagcaaaatacatcacgaggttttcacggttatatagattgctgttcaaaatagtacttaatagagcaggacacactgacgtcactgagcaagttgacaaaacgtctggttggtgctgatggactggctagttatcactttgcatgctcctgatcatgttcaggatataaaggaacaagttgaggatgtcaaggtagagctcaacagaggcccaaatgtagtcgtcataagtgtggcgctttatcaagttctctgtgtcgcagatgatgaaacctgagaaaactaaagctccaaggccaccaaacaatgcaactggtccagagcccaatgggaagaacacctgaataaagcttatcacaacaagtaaaacaagagcagaaaacagaattggtccaagataaccaaattctttccctttctttgaagc

SEQ ID NO: 11041 - DNA, 105 bp, Oryza sativa
  Clone ID: uC-osflcyp088e03a1
aataaaaatccaaaagacattataaaaaataaaaaaaaccataaataaaaaaaagccaaacaaagaaggacacacaaacggcatgcctgaacaatagaaaaccta

SEQ ID NO: 11042 - DNA, 160 bp, Oryza sativa
  Clone ID: uC-osflcyp088e04a1
tatgtgggccgcccgtccctttttttttttttggtttttttttttagcttttaaatttttttaaaataaatccagaacatatgatgaataataaaaaacacaacaatgattttaaatacaaacatataggccataacaacaagacggttttagcaatttt

SEQ ID NO: 11043 - DNA, 131 bp, Oryza sativa
  Clone ID: uC-osflcyp088e05a1
attcttatctcattctaaacaaataatgtcaccacactttttttatatactatcgtttaagggcatacaaacactatgtctcaacactagccagtctttcttctttcaagaacctaaaccgttcctctatt

SEQ ID NO: 11044 - DNA, 83 bp, Oryza sativa
  Clone ID: uC-osflcyp088e06a1
ataacatgcattaaaaataataatacgccaaatcattaaataacatacacagaagcaaaatccacttaattgccttaaaaata

SEQ ID NO: 11045 - DNA, 300 bp, Oryza sativa
  Clone ID: uC-osflcyp088e09a1
attattctaaaagttttcatggtaaattaagtcccaaactgttattttaactacacccgttgaggccataacgacattccggttttagaaaatgtaaatgtcagtaatacgttatagtatataaatacatgcccaacgacaacaaatttatatcattacgcgaggcatccaccccagattttcagccaaaagttgcacaacgcccactttaaggcttaaaattatttggcaggcgttctgatatgatatccacggccgctggcccaagagacacatcaaggccgtaaggcatcgtataca

SEQ ID NO: 11046 - DNA, 321 bp, Oryza sativa
  Clone ID: uC-osflcyp088e10a1
ataaatctaaaaggcatcatgattaataagtttcacaactgttattttaattacacccgttgaggccctaacaacatgacggttttagaaaaggtaaacgtctgtaagacgtactactatataaatacatgcccaacgacaaaaaatttctatcattactagtggaggcaaacccagattttcagaataatgttgcaaaacgcccactttaaggattaaaattttcttacaggctttctgatttgatattcatgaccgctgtcccaagaaccaaataaaggtcgtaatgaatcgtttacaccattatggattcgacactaa

SEQ ID NO: 11047 - DNA, 216 bp, Oryza sativa
  Clone ID: uC-osflcyp088e11a1
acatcactatattttattgatcattatcaaaacgtgctcatgaatacacagtaccggcacagagcttaccttctctccaatactggcacatacaaccacgcggttcaaacaaatgcgtacatctatacggcacacgagcgtacaaatactggaccgaggacacccactcacactctctaccagagacgcccatccctgcatacctaactagtctta

SEQ ID NO: 11048 - DNA, 56 bp, Oryza sativa
  Clone ID: uC-osflcyp088e12a1
aaatcgccagtacattaattaagttacacatatgcaggctccattttggttgcttt

SEQ ID NO: 11049 - DNA, 312 bp, Oryza sativa
  Clone ID: uC-osflcyp088f01a1
gggcaaaaaaaaagttaaaaacacaaaaattaacaaccccgaaaaaaaagaaggggtttattaacacatcgttggcaaaaatgggccaacaggggggccgaaaattataaacgggcaaagaggaaacaacttggtaaatgaacccggcgaaaaaaatctttaaggggttctaaaaagaggctaattataccaaaaaagtccattgcggaagggcccattgtcacaggaaagattttttgtggggggcgcactttgaccccttggccccgggggggccctttttcccacttttttgttggaccccccaagccc

SEQ ID NO: 11050 - DNA, 498 bp, Oryza sativa
  Clone ID: uC-osflcyp088f02a1
ctatgcctcttttattcgggccgccctttcttttttttttttggtttttttttctatttctctttattcttgggaaaaacaaatgaaatatgttaaaaatacaaagcctgagtacacgtcaccatttgagccgcaaaatttgattagcaaaaggtcgaatgcaatctctacatacactgcccacataaatacctgctattaacatcagacaaaatttccatctccaaaacaggaattccttccgcctatccagcttcaaggtcacccagcatctataagctaatggcaagctccgtcagcattgttctgcagtacgcactatgccgtgcctgcttttggttacagacttaccctacacactggccggatcgatctcggcatcaaattgagaagccaaaatcagccctttactcggcgcagcatttcgatgttcgaaatgctccaaggtcgtatcttttactcatgcatgtccacagactagagtctcaggatggttcg

SEQ ID NO: 11051 - DNA, 527 bp, Oryza sativa
  Clone ID: uC-osflcyp088f03a1
aggcgacactctctatgagctatgtctgacgatgcacgcacacgtacgcatggctatgccatcctcatatgaggccgccgtccttttttttttttttttttttttttttttgagtaaaaatagtttctcagtagcacgcgaacataggattgttgatgtgaaacacatgcattcgacaaaagggaaatgaaatacgacaacgaaagcagttcttttagcagtagaccaactagaacatgtaagggtaacggcacaacacatgcggcggccaaaaatttagagcttgtcctcgaaatcggaaaggggagtcatctgctccttgagacccttccttttgcggatatcctgcaccagggttgaagcctgcgagccagcttcaagaggatcagaggtcatcatgtcccaatggtcgaacacacactgggggaaggcctggccagatgtcgcagccctaagctggcttgagaacccaaaggactcgatgacagggaggtaagccttgatgttgtacagaggggtaccaggcc

SEQ ID NO: 11052 - DNA, 120 bp, Oryza sativa
  Clone ID: uC-osflcyp088f05a1
catgctgtacaaatgaagacactatattttagtctactacaaacgctgcatgcaatttatatcaattcttggacctctagattgcctttcttactccatgaccgtaaacaggttccctat

SEQ ID NO: 11053 - DNA, 273 bp, Oryza sativa
  Clone ID: uC-osflcyp088f06a1
tttgtggaaatttaaaatccttaattaggtaattaggactcttttgattggaggtattaacaacaatggaagcaaaagggaaataaaacggcccggttcattaaataaggtacacatatgcaggctccattttggtttctttaaatttatcggattacagaatttctgtagccttgcagatgatcacttggatattaaggactagtaattaacaataggatgcatacaaaagatggcccaacgaaccacagaaaaaatgcgtgcatcttgaca

SEQ ID NO: 11054 - DNA, 240 bp, Oryza sativa
  Clone ID: uC-osflcyp088f07a1
cttgctatgctttctatgcgagcggcccgttcctttttttttttttttttttttaaaattttttttttttttttttttttactatttttatatgtttcatgtttatataatgagtactctttaccttttatttctcttaatttgtccttcaaaatatctagtttcttgtcatgatacactgcccatattgtttcaagactttaaactgggtcccaatgatccatatacaaaaaagattat

SEQ ID NO: 11055 - DNA, 107 bp, Oryza sativa
  Clone ID: uC-osflcyp088f08a1
aatatgttaaaagtacaaagcgtgggtacacgtcactttttgtgcctcacaatctggctagcaagacatcgaagttctagacattttaaacgtctctaattgttact

SEQ ID NO: 11056 - DNA, 197 bp, Oryza sativa
  Clone ID: uC-osflcyp088f09a1
ataaaacttaaagttataatgggtcattcagtaccacacgctttctacaaaagggcacggaaattccacaacgaaagcaggtttcttaccagtggaccaactagaacatgtaagggtaacgtcaacacacatgctgtggcaaaatttaggctttgcctgaatcgaaaggggagaatctgttcttggacccttcctat

SEQ ID NO: 11057 - DNA, 433 bp, Oryza sativa
  Clone ID: uC-osflcyp088f10a1
agggtaaccgtgagacggcatcctgaaatgccgaaaattaaattggagctaacaatgtaatttacatttgatctttctgctctacagctacaacaacatgcagaggcacaggctgcagcagtcacatacaatgctgtagacttgatacatgttcagttaacgcccgtttacagaagcaatctgtgcatccgtgccttacagtaagtttcacaattgtgtcccaagctaccaaattttgtcaccccatgttccaatcctttgtgtatacaacttgagtggaggagatgggtggcgttttcgtcaggtttcagaatacagaatgagcaattggagagcatcaatttggcaacttgatgaataacaacagtggaataataatctctgtccttgctactcaagaatgtctgttggccacaactgtctccaatttgag

SEQ ID NO: 11058 - DNA, 453 bp, Oryza sativa
  Clone ID: uC-osflcyp088f11a1
cttggggggagattgaaataagtctattagcatttcagaatggacataatacagatagctaagttgactcctttcacaaggtttgtttacacaagtattccatttccagagcccccctattgtaatactatgaaacatgagaacaggctacaaggaataaaggtccataaggagaattaactctgcacgaagcatatcgaaagcaggatttgctggtcgttatatatgcacacgacacggtaaacacatcgaatgcaaaacaaagaaaaaggctttcaatgttctagcacttgaagcccccgcaaataatcagccagaggaagagaatcaacgccgcaacagcaccacccaccatcaacttaaacctcaggttctgaagccacatcttacgcctgagctctcttcatgcctgtggaagctgtcagcctgtgattgtaaggtttcagtcttgcc

SEQ ID NO: 11059 - DNA, 80 bp, Oryza sativa
  Clone ID: uC-osflcyp088g02a1
actctgaagtgtcccgcacgaaacataagttcttgcaagttcattcatatttaattcgtccaagaaggaaaactggttct

SEQ ID NO: 11060 - DNA, 495 bp, Oryza sativa
  Clone ID: uC-osflcyp088g03a1
cttgctttctatcgggccgcccttccttttttttttttttctttctcaacgcaaataatctagtaaagaatacagcagcaatatctctatgttgataaaaaaaaaagaagagaggatttgtctcccaaacatcggaaaccaacccatccatatctgcaaacacagtagttacacgtctcatcatacaatggaaaaactggcaaaagaggccaagccatgcatctgccaaaaaaacaacacaagcccaagcagccccactgtggaaggactattttagcaaactgctgaccaaacctgacaaaacgtcccaaaggaaaccaccaaccaggcgcctctctaagcaactgcgctatatcttcgcttagctccttgcttagatccaacgttacaggagcccgacaggggaagagcttcgcatgaaacggcggtcaaagctccaatcggtgctctgacaaggcaaaaggccaaagtcgccgagagatgaccgggggcttt

SEQ ID NO: 11061 - DNA, 466 bp, Oryza sativa
  unsure (1)..(466): unsure at all n locations
  Clone ID: uC-osflcyp088g04a1
gggtcaccggaggcgaagaagatgaagatgaagatggagatggagatggcggcttcgtcaccagggcctggggctccctcgcgaagaagctattggaggcgccttcagaagcagcaaacatcttgtagcatggcggcgccacctcccttgccttccccagcagatggccggagaaatggtccccccagatgtcatatgtgaagtctttcttcctcgttgttgtcgtcgtcgcggcgccctcggttctcttcacagccttatctttcatcaggttggatccaggagcgcgagaatgaggcgcgatcggggaaggcgaggacaacaatggcgagcgccatgcattggttggtgcagtaggtgaaggcgatggcgacggcgatggatttcctgatgttactgaaggtggtggagcaggttgctctttagcagtttgcaaccaagaactcttctcaaggntattcctagc

SEQ ID NO: 11062 - DNA, 286 bp, Oryza sativa
  Clone ID: uC-osflcyp088g05a1
caataaggcatgtaaatctaaaacagacaacttattttaggcaagttcaaagccatcatttcttatctacaatatctgactacgactagttgactgttgttgccaaagaaggttaatattttccttacctacgtgcaatctggtgactgcttcacacggctatggtaaatatttggccaggcgacaataggctgcgtttgttttcactattcagaaccaccgatgccatgtcggaatccattatgcacaggttactcgaagatcatccccgttgcacggagatcca

SEQ ID NO: 11063 - DNA, 70 bp, Oryza sativa
  Clone ID: uC-osflcyp088g06a1
cagaatccatgcagttcaatacacctcacctttattcattcaacaacgcatcgttccgtcaacttaatcc

SEQ ID NO: 11064 - DNA, 119 bp, Oryza sativa
  Clone ID: uC-osflcyp088g07a1
catgaggttccaagggcgacaccgcaattttgattacaaccatcctggcaggcaacataaacaggttcttgaaaggttagaagtcctttattcttgcaagaacataaactgggtctcta

SEQ ID NO: 11065 - DNA, 196 bp, Oryza sativa
  Clone ID: uC-osflcyp088g09a1
gtcccatcatcttttctaatctttataaaatgaaatcataaactcgtcttcgagattaaaaggaactggctttctgtcactaagtgtttacgcaggacatggtctaaatgtaattacgagtcaataataccatgaagttcaactggttaactgtgatactgcagctcatgggttgacagcgcgttactgattgaag

SEQ ID NO: 11066 - DNA, 416 bp, Oryza sativa
  Clone ID: uC-osflcyp088g10a1
ggttccaaggctaaacatctgcattcatgctctgaaactaaatctctttataaatatcaaatagagcactaatacgagtaaagctaaaagccgatatttcttatctacatgatgagactacgactagttcacggttgttgccaaataaggttaatatttacatcacctacgagcaatctcggtcaggctacaaaaggctatggtaaatatttggccaggcgacaataggctgagtttgttttcacttttcagaaccacgggtgccatgtcggatccatcatgcacaggttcctcgaagataatgccgcttccacgagatccgtgacgcctctttggaccgactgaggtggctcagatgaattctcctcctcatagcagataatggggatttaattgatacgtatgcatgctcaatg

SEQ ID NO: 11067 - DNA, 446 bp, Oryza sativa
  Clone ID: uC-osflcyp088g11a1
ggaggatgaaattgctccatgaaagcttttgatacactaccagaagaacaacattggtgcacagggtgtcaaggatcatgagccacaaaagctatctgtatgctaaattaacaatttacaagtgtaacatgcttctagagggacaagaggaaataaaaatcacttaccccatgaactacatattacaggatctgtaaaaaactcaaaagcaagcacacaagtggtgcataaaaacaaagctatgcggtatcgatgagaatcagctgaacttgatcgaagaacctacacatatatccgagatgctttcttcttcgcgaggtattgtggttttacagccacggaatcgacacagagtccaccttttgtgtgtgtgcaatctatttgaaccattgcaaattggatcttcactagttcattagagctcttcacgacgaaatcgccgacgt

SEQ ID NO: 11068 - DNA, 440 bp, Oryza sativa
  Clone ID: uC-osflcyp088g12a1
gattcaacaaggcgtgaaatatacgaacatccaaaattcaacacacttaactcagtctgggctataataattcaataatgcatcgctacttcagttagattcagaaggttctacccccacaaacctattacatcttaaagtacaataaaaatggagaaagagtttccaccttgtgctagggaaagattctattcaagtgtggtgttcagtactgctcttcatcccatcataaacttaacttaaaccatgcagtatccccgtgtagtatgtctagctgtttgctcttgctaataggccagagaaggatggaacaggggagttcctcatttgttcttgagcttgctttatctcctcgggatctatgttctccatcattttgggcataacgaagaccattatgaccataaaaccaagcatcatacccatagggctcttcaaaa

SEQ ID NO: 11069 - DNA, 277 bp, Oryza sativa
  Clone ID: uC-osflcyp088h01a1
agacaaggggggtcctttttaaagggccaagggaactaaataagggacgcgtccgccggcccaaaacgggacggttgcaaaaaacacacacccaaacagtttaagggcccaaaaacccataaaggcctacacaaggcccataacccaataaagacctacccagagtttggggcaaaacctgatggcttcagtaagcctaattacctaacaatcccccctatttaagaaacggtttggtccccaagccggagcttctggaaaaacaaacttaaattga

SEQ ID NO: 11070 - DNA, 387 bp, Oryza sativa
  Clone ID: uC-osflcyp088h03a1
agcatgaaagtacttgggttggagaaataattatttaagtggtccaccggttcacatgtttactcatctttcgatcccgcgatcctaacattttatttcttattacacatttatccttactccgccctaagatagagtaacatcgaatagaaagatcactttttagtactaaactctttgacgtcacttagcttccagcatgtacgtaccgtgcacgtatgcaatgtacgtacgcaccaaacgttttattcattattattactctgatcattattcactcgatcacgatgagccgagcagcgtgtgcatgcaactcaacagtagaggttgccccccgggctgacgccaaactggcggcagtagtccttgtagttagtttacccttgc

SEQ ID NO: 11071 - DNA, 304 bp, Oryza sativa
  Clone ID: uC-osflcyp088h05a1
ctgttacatatttacaatcgtttaatggaaaggctctgaatattgtggactttccatgatcttctccgaaaactagatggattgcgtggctgtagtgaatagggttccccattggcagcccttgtctggcaaatggatccaatgagctattcactcacttgaaagcatggataaccttggattttccaagatccagcccaatccttgtggcctcaatgacaatctgaccatccaggtagtgaagcctacatacaggcatgtccacattagctcctccaatgagctcggacttagttttcccgtg

SEQ ID NO: 11072 - DNA, 449 bp, Oryza sativa
  Clone ID: uC-osflcyp088h06a1
aaaggaaacacatcttattttttattgatatatgttggatgaatccaataaaaccgatacaagtcacgaaaaatcagactagatgaatccttcgagatcacatgagcaaaagctttcaacgaaagctggcctatagtcgtggaagcaataacactggataaagataggaattcagacacgagaggctgcagactataagatgtcatcaaatctccttgaacgccgcgaagagatcaccgttgatgtagtcgttgaccacaagactaaccaagaagtagctcttctggaccttgtctagtatctccctagatgagtcgccctcagggaacaggcaagcccaaccctttgaccaaatttcgaaagcttcgactttccaaaccataaagctggctgagtcaacgacagttggctggactatttccttgccagggaaaacaccccatgtgacc

SEQ ID NO: 11073 - DNA, 334 bp, Oryza sativa
  Clone ID: uC-osflcyp088h07a1
aaggatcagatggttagtttaaccaccaatagcaacaagctgaaacgaatactggttttgctggatttcactggatgttgttgaatatcacaagcttagagcacaacaacgttgcatcaaataaacagaagaaacagaaaacagctaggtacatctatgacctttggaggtcaatttcttattgttgttcgaggcgaatgtgtatattacatggggagaacaaaggagcgcaactgcgaggacgagtatgcatgcaagtcgtcttctgaacccaaccgtcaaagtccacagccacttggggacttaagacaaactaggggttgcttgggtttga

SEQ ID NO: 11074 - DNA, 181 bp, Oryza sativa
  Clone ID: uC-osflcyp088h08a1
gctccagctgggccccggcagcagtagctgtcgacccatcctgctccatgcccggcccctcgccgccggcatcgcctcctcttcgcgagggcccgccgccgtggcggcgcggacgcttgggcggctgctgctgctgccgccgccgccgccgatctcgccggaccggccggtgagggggagg

SEQ ID NO: 11075 - DNA, 423 bp, Oryza sativa
  Clone ID: uC-osflcyp088h09a1
atggcaaatagtcaaccatgacaaataaataacatcattcggtcatacatagttttaacaatagatataataaaagtaaaagactcctccctcctcaccagcacatagcacagcctagcaactacaaaaattcccataacatggcataaaaatttggaaattgtctacgaccacagtgacttttaaaacagaacccccacctttatcacttccccccccccccagataagacagtgatacttcagacaaaaacaatccttatcaggccccttaacataactcttctgaacttgatcacagaaggtcagcgacgttggccggcagctcctcaatcaccacattgtagaacctctggatgtcaaacagcatcctctcatcgtcacgggtcacaaagttaatggcaacacctttcctaccaaaacg

SEQ ID NO: 11076 - DNA, 247 bp, Oryza sativa
  Clone ID: uC-osflcyp088h10a1
agtacaaaaatcgttttatttaattactaggctttgccaacttatgtgatcaaacggcaagccgaccagtacagtgctatatcgatacaatccgacaagctctttgtaaagcagagagagaggctcattactgatcacggttcacttataacaacaggctattgtaactggtagagtaaacgagcttaatggtgtccgttgcctccgacgtaacctgagccatatccagagcctaagccatagccgg

SEQ ID NO: 11077 - DNA, 396 bp, Oryza sativa
  Clone ID: uC-osflcyp088h11a1
ggatggataagaggatgcccatccacatccaaccttattcatagatagctaatcaaggcattacacataatacagcacaggtccaaacacagacagacggacggacagaccacggtttatatgtcctaagattaatgggcttacagcaagttaggcatgataagagattttatgggcatgatgggtagggtacccgtatgtatgtatgtatgcggctgggccacaccacaatcataccatacatacaagcaagctaaactgatgcaaagcctaataaccgggtgtcacccaacaacgtcagttccttggtcgatttgattacacaatgcaaatgccaatgattcctaaaaggggtacattacggacaaggggaggggggatgatgattccgttggg

SEQ ID NO: 11078 - DNA, 114 bp, Oryza sativa
  Clone ID: uC-osflcyp089a02a1
aggttcaaatccaacttattcataaagcatactgctgtcccacaggaaactgtttcataaaactaacatatcatacggactcgatggtccattaaaccagacacaagttagaca

SEQ ID NO: 11079 - DNA, 187 bp, Oryza sativa
  Clone ID: uC-osflcyp089a03a1
gacataattgagttagatagacaattgatattctagatatcaatacagatacaaacattcacaatgtcaataatccgttgcatattagatttgttcatcaaatgggaagcgattgcaacacatttcaacttgatctattcctgtatttaacgtacattgaaattccttccttcattttcccgcccaa

SEQ ID NO: 11080 - DNA, 126 bp, Oryza sativa
  Clone ID: uC-osflcyp089a04a1
gaatggacttgtccatattattcgtcactggctggggggcagtcctagtttagtatagtagtttagggtaaggtagtgtagcatccggggcagctgcaacatgtgtcgtgtgcttggcacacgcca

SEQ ID NO: 11081 - DNA, 161 bp, Oryza sativa
  Clone ID: uC-osflcyp089a05a1
atcacaaacagttactatattgaattttgggacaactgtcatgcaaccctgtagaacatctctgctgtctcccccataagaaatgtacaggagaacgaaaaatgttgatgacaaggtggattattgacctgtaatctatagcctatgaacaaattgctgag

SEQ ID NO: 11082 - DNA, 152 bp, Oryza sativa
  Clone ID: uC-osflcyp089a06a1
gaaacaagtgcgggtttctgttatattatacatttatactccatacaactttggccacaaatttatgctatattatacatttataattacaaactatttaaagttaaattacttgtcttggcacttaaacacatccctttttcaccagaaag

SEQ ID NO: 11083 - DNA, 116 bp, Oryza sativa
  Clone ID: uC-osflcyp089a07a1
tttttttttttttttttttttttttttttttttttttttttttttttttttttttttttttttttttttttttttttttttttttttttttttttttttttttttttttttttttt

SEQ ID NO: 11084 - DNA, 390 bp, Oryza sativa
  Clone ID: uC-osflcyp089a09a1
gcaagctgaaaacctctcataaccctcgtagcatttgattggagaaacagatgttcacaagtagatacagagctaccgaaactggaagaacagaaacccgagggaatggacacaaggaacataactgaagggcaaagtgtttacattattatgattgagcccagcttgcaacaagtactaaaagtttctactgaggatttggtggcctggagttggcagcagaaaccctcgatccccattccagcagctctttgctggtgtcgttccttgtgcgcgatcacctcaatgaagcacaggcagtccttctcccccagcgccatcccgatcgcctccgtcagctcctcctcgcacttcaccttagaagtccagcatttgccctctccattgtgg

SEQ ID NO: 11085 - DNA, 87 bp, Oryza sativa
  Clone ID: uC-osflcyp089a11a1
ctaagttccattccacaggtaaatttcatgggttcaaattttaggcacttcaaatgagaaactactagatacacattccataaaatg

SEQ ID NO: 11086 - DNA, 119 bp, Oryza sativa
  Clone ID: uC-osflcyp089b01a1
aattacgtaataccatccattttttttattggcgacgaatttttcagatttgctctagatacatatcttgggggtttatagccggggcctttgttttcacatattcctaaccccaacga

SEQ ID NO: 11087 - DNA, 385 bp, Oryza sativa
  Clone ID: uC-osflcyp089b02a1
gcttcaaacaccacagtttgttttattgaaaaaactctgcaatgttacaaattagaacagtaaattgaattgtcaatgctttaaacaccacttttgttcctatgcaatgttacaaattggaatagtcaagcataatctcctccaaatttaccacaaatcatttttttttttaaaaaaagacaagatatataactttcttgttcttccttcttttccttcgattattgctttccttttgttcatcatggacactgctgctatatacgagagtagtacgggtaccctcagagctttgatgctgtcttcaagtctttgctcggctcagattggcgctttgcagccatacgttccttcatcttgaaaatgagctcatggacttcatcaa

SEQ ID NO: 11088 - DNA, 433 bp, Oryza sativa
  unsure (1)..(433): unsure at all n locations
  Clone ID: uC-osflcyp089b03a1
ggatctgaatatctgatatttatgttaacgcatgatgggtaatatacatttacttcatgaattcctgatgtagattgaaatctcacctatactcctacatgacatacatacgtgcgcttctattgactcggtttgatttaatctgatctattagtaaatgtatgttgtgcattcccttccttttcaaatccttcacttcatatnntgccatctcaaaccatttccaacctttaatgcttggccattctgttgaagttaccacaatgtaaatttcaacatctgctaaagggcctcttttcaaaaagtctttttccaggtacaaaaggattcagaaccaaagaagagttcactattcctttctgttacaaattcccatttaagcccattcgtcccagttaaatcaggattttcggggctcaaaattggcctgccc

SEQ ID NO: 11089 - DNA, 149 bp, Oryza sativa
  Clone ID: uC-osflcyp089b05a1
ggggaatccatatttgaatacccaccatttgccagatgatctaatgtttatcaacagcttgcaaaaaaaaaatgctagttcacctgtctatccataccacaacacttattacaggtgttaccccacctatgatttcactacgttacagg

SEQ ID NO: 11090 - DNA, 81 bp, Oryza sativa
  Clone ID: uC-osflcyp089b06a1
acagttcctaaaatgcgtatatttgaattccacaaaggaccaggttggtttcatctttgaggtacacagggctgactatat

SEQ ID NO: 11091 - DNA, 201 bp, Oryza sativa
  Clone ID: uC-osflcyp089b07a1
acctcgagcatgccacatggaatcagcatgtgaagctcttgggtgtccacttccagtctctctccagcgggtacaagaagacaattagacagtagttaacattacggggcttttgtccatttcctcggcaatgtatccaaatgatatcgctcaatgatggcgatccttggaacattatcctttgcttggatccctcgttgt

SEQ ID NO: 11092 - DNA, 211 bp, Oryza sativa
  unsure (1)..(211): unsure at all n locations
  Clone ID: uC-osflcyp089b08a1
aatctccaaattcaagtatcaagtgtagtatatcatcatcatgcaagtacagtgttacatagattaatcacaatgcagtttgattaagcagtgggcatcatcacatcgcattcagaggaaggctatcttagattacangatgaatatngcagtactacccgagcttgtngtgttacattacatttagaactcggactttgggttgaaattt

SEQ ID NO: 11093 - DNA, 400 bp, Oryza sativa
  Clone ID: uC-osflcyp089b09a1
cacaatccaactgagatatagctttgggataacgatatgtagcaaaaattcaaacaaggtactgatgatatgcaaaacctccatatcaagctggcctacagaaggaactattacagaaaaatagatcatcctgaagacaaccaattcttaaaacatgagttctagcatgcaaaattagactagctaaagcaaaatctctcaagtttccattcagcaagaggcatctaggccggcaagcttgaatggttctcagccagaatacgccttcccaggggcacgcttcgcaagacgaccatgagaaccaagcagctgagcattgacaccatcagacataattctgccctcagccttcaacttgacgtactcctcacgggtgaacttggtgaagccccacttcctg

SEQ ID NO: 11094 - DNA, 292 bp, Oryza sativa
  unsure (1)..(292): unsure at all n locations
  Clone ID: uC-osflcyp089b10a1
acgtaataccatccattttttttattgccgacgaatttatcagatatgctctagatacatatcttgtgtgtatatagccggagctttgttttcacatattcctcacccaacgataattgtagtacttcttacaataaaaccggattcggagagggggagggaagcacgatttaattacactatgtgttttaagagncacgaggtccaattcgagtatggttaccataaacncaaaatttgttaaaataaaaataattattagcattanttatttatattggattattattca

SEQ ID NO: 11095 - DNA, 170 bp, Oryza sativa
  Clone ID: uC-osflcyp089b11a1
gaaatgaaatttacttttcttccttattcattaaacaaaactctggaaggatgaatagaatagcaatccaatctcaccttaaccttgctcccaagtgaaataaaaaataatctagtgcactctttgatacatacatgaagcatacaaggtactcattttgcggcaatgaa

SEQ ID NO: 11096 - DNA, 443 bp, Oryza sativa
  unsure (1)..(443): unsure at all n locations
  Clone ID: uC-osflcyp089c01a1
cacaactatttgcatcaaatttgaaaggtaaaggtacacgagagggtatcccatcgtcgatgggaatagaatccactcccgaacagaagaacaaatatactcttaatttaactagagaaaaagccagccgtatgtttctcttaagcaatacagagatatgctatatccaatttttaaaagaaaccaagggataaaatacttcatcttgccaatgcttacagntttcgagttgccccttatgcgtaaagaaaacaagtacataattactcaaaacgtattccaaaaatccagccttgaaaacggnattcattcaataagcctatccatccaattggaaggtgaggttctgtaacaaaaaaaaggaaaaancaaacttttcccaccattacggtgggtacgagttcccatgcaaaattgaggnacaagggcatcttggagatgag

SEQ ID NO: 11097 - DNA, 448 bp, Oryza sativa
  unsure (1)..(448): unsure at all n locations
  Clone ID: uC-osflcyp089c02a1
aaagcaggaaaaggtatgggatcacatatatcatggcaaagtattgggcaacaacccaaattacattccaatggcactctgaggtaaaataacaaactatcaactttagagctgaaactttattccatatggatgatcagactcaaacatttgttctaggttgatcattgcggaaccccctttgagttntctttcgcaatttcctagcaaagttacctttcccttggttcggaagggccttgtttgcagccttcaagccttctagttggcaatcccttgtattcncattcatccagncgtaatggttgccaggatcccgttacggtgctttccgcccctttcactttgcttccccatctcaaacaatccctagcaccaaagggttgtacccctactggnaacaaagtatcatgccatgatgcactagctgagntaattgcctgtcaac

SEQ ID NO: 11098 - DNA, 297 bp, Oryza sativa
  unsure (1)..(297): unsure at all n locations
  Clone ID: uC-osflcyp089c04a1
aataaacaataatctttgtaatattacatccggggaagaaaaaaatgaactcccctgtagctgtatatatgtactgtcctacttgtgctttactttcacaagcctgtattaatcctgcttaattttcctattaacatggatgattcttaaccaatccagttagctatgctacaacttaaacaagatatagnanntgtaaattcctttctgttcgttctgcctgggntngctttagttgcttttgcattctttaggtagacttcttgctgccttgagttcgncttgcacccaggtggg

SEQ ID NO: 11099 - DNA, 186 bp, Oryza sativa
  Clone ID: uC-osflcyp089c05a1
aatattctgctaaacagtttatttgctgcggtaaaattttacaactcataagcaatccatgcctgccgttggcactctaccagtttttcaatgccattcgcagcatttctaatcgcacaggaggctttctataagacttaaaagcagtgtcattcccagaagaattggttcacacttaaagaaagg

SEQ ID NO: 11100 - DNA, 56 bp, Oryza sativa
  Clone ID: uC-osflcyp089c06a1
cataatatattgcatttttcattaaattttttatactccaacataaatgtaccatt

SEQ ID NO: 11101 - DNA, 170 bp, Oryza sativa
  Clone ID: uC-osflcyp089c07a1
agcttccatcattttatttattttgtccaactttatatatattagaaaccatataattcacatgataaagaactacatacaaaaccatacacgggtatttctcaatttgtaccattagaagttctccttgtggaaatcaaattcttgttgttttgtctttgtgggttgaa

SEQ ID NO: 11102 - DNA, 209 bp, Oryza sativa
  Clone ID: uC-osflcyp089c09a1
cataaaactgtgacactgcgattatatcttaattgtacaaagttataacaatacattgatcaaacataataaatacaacaattaaccacttaaaaaaggaggggaaactgcagaaacatattcagtttcctctatccctgtcgccctgctttgtcctacgttacccctatatatttttcaagggataccgtacccctatgtaatggaaa

SEQ ID NO: 11103 - DNA, 148 bp, Oryza sativa
  Clone ID: uC-osflcyp089c10a1
ggattaatgtgcacttattgtaatgcaaggattatcaggagctgcttatggtacaaatgcacattattagtactagcatacatgtatgatcatactagagaaccaatctgcactccagaaggaattctattacatgatctgtactaag

SEQ ID NO: 11104 - DNA, 248 bp, Oryza sativa
  unsure (1)..(248): unsure at all n locations
  Clone ID: uC-osflcyp089c11a1
ggacaacatgcaattcataaaacgtataggattacacgtagtacacacagatcgtgtacatactgaagaaaattaagatagaacatgcacacagggagcgtgcaacataaagtatacagctgatacagagagagaatggagcgctgcattgtctgccgcaggtgtctattttaattgacctttgttcaatattatgctcgttagcaaaatacggtgctttaattcactnnagctgattccaactccga

SEQ ID NO: 11105 - DNA, 243 bp, Oryza sativa
  Clone ID: uC-osflcyp089c12a1
caccattgaaattatatgttaattatgcaatcaaaatataataatgcattttaattacaagagatatccggccggtaaaatctagtatataacaaattatacaatggtagagatagcacgtaagcgctatttaatttattaattaaaatttgatatgcacccacttactaacttttgttatctatatatttattccatgaattatttaaaccacatgcatgatattttatagttgcttacaaa

SEQ ID NO: 11106 - DNA, 94 bp, Oryza sativa
  unsure (1)..(94): unsure at all n locations
  Clone ID: uC-osflcyp089d01a1
tttnttttttttatttttttttatattttttttatttatttttatatttttttttattatttttatattttatttatattttttatgtattttt

SEQ ID NO: 11107 - DNA, 122 bp, Oryza sativa
  Clone ID: uC-osflcyp089d02a1
aggtcaagagccccacttatgaaggaaattaaacccatgacagttgggaagggggacaaacaagcaaacatactaaattttggggctccaatgcaaggccaacaatttggggcctgtgaaaa

SEQ ID NO: 11108 - DNA, 385 bp, Oryza sativa
  Clone ID: uC-osflcyp089d03a1
gtaaatatgttcattaccaataaaaacagaaacgaatgctcatccaccactttctcctaggtaggagtatatcttatgaaggccaagaaagccttatgttgttagcacaagcttatatatcaaacgacacaacttagacattcactatttaatttaactagtacaaaatacactaaaatgaacagtctcaccaaaaactacttagtttacatggagtatcatcacttgcgccagaaagtgacacttcttactgtttgagcacactgtactcttggagcatcctcctcctcatcttcgtcgtacgcttcctgcttcctttgatactgcttgcgcctcatctcctcttctatgttcacatcatgcatggtagttttctcacattgat

SEQ ID NO: 11109 - DNA, 74 bp, Oryza sativa
  Clone ID: uC-osflcyp089d05a1
acttaaaattttttgctccatctaaacaggtgccataatcactccaactttgttacaggtgtcagaaattttac

SEQ ID NO: 11110 - DNA, 200 bp, Oryza sativa
  Clone ID: uC-osflcyp089d10a1
ggaggaattaaaacaagtatcccatctggaattcatcctcaccgatcaacgagtatcgcagttaaacagcagaaccgacaaatacaagtaagctgacaaactatgaaaactgaagtatctgaaatacactaacacttcttagaggcatataagcacgagaattatgatatatttcataaatgcccggttcccaaccgaag

SEQ ID NO: 11111 - DNA, 104 bp, Oryza sativa
  Clone ID: uC-osflcyp089d11a1
gcccccctagggggaaaaagggtttttccaaaaatttttaaaatttacaaaagggttaaaacatacggggttggcgggtccccctgggaaacaatttgctttta

SEQ ID NO: 11112 - DNA, 402 bp, Oryza sativa
  unsure (1)..(402): unsure at all n locations
  Clone ID: uC-osflcyp089e04a1
aaaaaataagagccttttctatatcagtgacatgtccctacgttcttacacgaagcaagacagcttatagcataacagcagtactatgtttttcatgaggttaaatttttacctagacctactaaagcacccagttaattcagaaaagtacactacattaaaaatnataagagcctttttcttatatcagttgacattgttcccttacgntnntctttacacgatagcatagacagnctttattaggcattataccagccagaaattattgnntttttcaacgcggttttagcatttgntttacccaaggctttttttngggacanataagcacctatttcttttcagcaattaatccccttttcttggaatgttaggnnagattttaccatcgccccattg

SEQ ID NO: 11113 - DNA, 134 bp, Oryza sativa
  Clone ID: uC-osflcyp089e05a1
tttgggggggataaaattaataatggacttgaaatatgtaaaacgatgaataacaaaacccttttcccaagctacaaaaagaaccagcaataaacaaccaaagaaattataaaaagtctgccttaagtaaattc

SEQ ID NO: 11114 - DNA, 51 bp, Oryza sativa
  Clone ID: uC-osflcyp089e06a1
attaaaacacaactcattacaagtacagaaaataactaaaacttaaacatc

SEQ ID NO: 11115 - DNA, 56 bp, Oryza sativa
  Clone ID: uC-osflcyp089e07a1
attaattcacaatcttttattggtgcagaaattaattaaaatttaatcatcacggg

SEQ ID NO: 11116 - DNA, 453 bp, Oryza sativa
  unsure (1)..(453): unsure at all n locations
  Clone ID: uC-osflcyp089e11a1
gataaaattattattgtcttgaattatgtaaacgatgataacaaatccttttccagctacaaaagaaccagcataacaacaaagaattataaagttgcttaagtaatctctcccttcatctcaaaaagagctatatctagggggccctatggccatcagcaacacttttcacttttaaagggtaacttttccattcctgtcgtacactacaatgcttcccatggaatctatatcttacttggcctttgccgtttctttcgacagccatgcagttcgtagggggttttcaagcttcattccctagtgcctcnngtatccaggtgtaccatgtgctatcggccaaggcttnngacgaaggtaggggttcgaaatctttgccgagncttcttcccttgacctgcctcgngccgagggaggaggttagcactttctggcacggtggtcgcaactcct

SEQ ID NO: 11117 - DNA, 118 bp, Oryza sativa
  Clone ID: uC-osflcyp089e12a1
agcgtctcttattttattttatttttattttatataaagatttttaacaaaagattgcttcagaccaatcaatttagcaccagacacttggtgattcagggattcaacaaagggatag

SEQ ID NO: 11118 - DNA, 181 bp, Oryza sativa
  Clone ID: uC-osflcyp089f02a1
gcaacagaactgcagtagagtagcagcatcttctccattctatgctccgctcattaatccttgttcatgtatacagcatgtattatagtagcattcaacaaggatgcactcacagcatctcttacatacaaggctaccagttgcatttctcaatctttgtttaaaaaaaaggcagaaaaag

SEQ ID NO: 11119 - DNA, 154 bp, Oryza sativa
  Clone ID: uC-osflcyp089f03a1
gaaacaattaaatgtccccagttctggttaaggttcgtccaggattcaactaagcatcacacttaacaaacattgatgaaacaactttccaaaaaaagggttagcacgagatatccggtgtccatatattaagaaaccccagggccctccaagg

SEQ ID NO: 11120 - DNA, 134 bp, Oryza sativa
  Clone ID: uC-osflcyp089f05a1
gatccttatctatttatattcatattaaacactgttgatttccactcagattacacacaatacaaatacaccgacaaactgccttaaaaaccaccaaattgattcaaaaggtaaaacgggtatgagggtatctt

SEQ ID NO: 11121 - DNA, 207 bp, Oryza sativa
  unsure (1)..(207): unsure at all n locations
  Clone ID: uC-osflcyp089f10a1
gcacttatcaacatgtagtacagtaacaaccatcatcaaatgtccctacaactccgtctctctcatgctcgaagaatataataatctcattgattgaaacacgtatagngaaaatttaagcggcaattaagggaagctaatagctatagcttgctagccagctagcaagcaagtaccagcatactacatcgttaatnnttaatcacg

SEQ ID NO: 11122 - DNA, 395 bp, Oryza sativa
  unsure (1)..(395): unsure at all n locations
  Clone ID: uC-osflcyp089f11a1
gccacatgtaattgaaatttgattagacatatatatggattattacagagtctgatgtacatctttcctatcaccaaaagggatcgatcaacaaacattacatgacaagaacaattaatttgccgacgacgatgacgacaacaacaacaacgtgaacatgaaccgtaaaaacgaaaaaaaaaaggagattatcttaccggaatatatctcctctaatcttattatgaacacataataaaggngaattaaaaacgcccgtgttaattaattaccatacgttcgccgatcacaaggccaaggctccggccaccgccgccgccgcgagcaccaccgcgcgccacgacgcggcgccgcccgccgccgcgttgggccggaagccggggtcctgcgggtag

SEQ ID NO: 11123 - DNA, 162 bp, Oryza sativa
  Clone ID: uC-osflcyp089f12a1
agcgctctcaaagtagcatatattattcaatcttgatgaaagagggacacaagccatcatctatagtgatggatgcctcttacaaacttcaacacacgggtaacaagcatacactcaagagtcaagaggttggcctaggtttttgtgtgtacaatgtgaaca

SEQ ID NO: 11124 - DNA, 120 bp, Oryza sativa
  Clone ID: uC-osflcyp089g01a1
gggtcatccagcattttacgcattttttaccttccagcttgggttcataaattcaacttaacctttcaacaacaatttttcctgtttgaaaggcttttttttggctttaaaaaaacccaa

SEQ ID NO: 11125 - DNA, 173 bp, Oryza sativa
  Clone ID: uC-osflcyp089g03a1
atcaatccaatttacgcttattaaccgcgaggaaaaaaaatcatccctcaatatgctgaaacgagaggtgatacagctatggattcgcaatgacaaaatttctccaaccccaaatatttcagtattccattctaaattctcatttttccattcttatacaaaatggaggttac

SEQ ID NO: 11126 - DNA, 188 bp, Oryza sativa
  unsure (1)..(188): unsure at all n locations
  Clone ID: uC-osflcyp089g05a1
agacatgaatgctgaatttcattcttttgcgcttcagaacattttacatgtctggtatacacagatggcctatgataaagcactctgaacttgtgagcatgcaatncctcacaagaaaacactgattccgaagcgacactttggcacgaatcctcactttattatgntacgaaaaacaataattatct

SEQ ID NO: 11127 - DNA, 112 bp, Oryza sativa
  Clone ID: uC-osflcyp089g07a1
cttggaaacaaggatgctccaatttattattgcagaaacggcaccaaggccgcttctattattcataggtaacatcccagcaacaagaggagacagagcaaccataccacac

SEQ ID NO: 11128 - DNA, 201 bp, Oryza sativa
  unsure (1)..(201): unsure at all n locations
  Clone ID: uC-osflcyp089g08a1
aaatacttaatagtaatagactctttgatggagtattacaacatgcagcagtggcattaatacgccagtacattaattaagttacacatatgcaggctccattttggtttcttttaatttatcgtattacagaatttctgtangccttgcagtatgattcactttggattatcatgttaactagttannattaacaaatag

SEQ ID NO: 11129 - DNA, 113 bp, Oryza sativa
  Clone ID: uC-osflcyp089g09a1
ttttttttttttttttttttttttttttttttttttttttttttttttttttttttttttgttttattttttttttttttttattttttattttttttattttccattttttt

SEQ ID NO: 11130 - DNA, 152 bp, Oryza sativa
  Clone ID: uC-osflcyp089h01a1
gcacaaactggtccttgttatcaacaacactccaacagccatgctgatacaggtagcaatgcctagcggatttacagccaaacccagacagctctagcttaagcacaacgcatgtgccagaatttattcttgtatcatagaagcggaaaacc

SEQ ID NO: 11131 - DNA, 174 bp, Oryza sativa
  Clone ID: uC-osflcyp089h02a1
atatgagagaaaatataataatattagccgtgcaatctgcgtgggccaccacgctagtttacatcattgtaagtgtaccttctatcatatcacatgggtaggggccctgaaaatatatgcctaattaatgtatgacactcttttatgattataaagaaatcaaagaaaaagaat

SEQ ID NO: 11132 - DNA, 130 bp, Oryza sativa
  Clone ID: uC-osflcyp089h04a1
ccctgtaaacaagaaaagctgaagctttttcctatttgcccatatgcccagcaaactactatcgcttcctccactacatcaaaattcgaatttacagccaggttgcatttggacattacccaaaactaga

SEQ ID NO: 11133 - DNA, 101 bp, Oryza sativa
  Clone ID: uC-osflcyp089h05a1
caaaacggccagaggcttccaattggaatatatatcattcacaaatattcgggtttcgacctgtattccataatgtctccaactgttacacactgtttaaa

SEQ ID NO: 11134 - DNA, 179 bp, Oryza sativa
  unsure (1)..(179): unsure at all n locations
  Clone ID: uC-osflcyp089h07a1
aagatgaagaacacatttaaatgtacatatatgctcggaaacattaaatgtttcgttctcacatttctgatcctgcatgctttgcattgctactattaattaacttgatctcgatatgatattccatgtcatgtcttttacagtagnaaggacggataaattacgtatgcctttcttaa

SEQ ID NO: 11135 - DNA, 97 bp, Oryza sativa
  Clone ID: uC-osflcyp089h08a1
aacacgatctagcattttttttcaaacaaaatttgcacccatatgcaaatgttttaaataatgggccgcttgctattttatctcacggaaggaaata

SEQ ID NO: 11136 - DNA, 59 bp, Oryza sativa
  Clone ID: uC-osflcyp089h10a1
cattccgatagatagcaccaagcagttaaaacaccataactcaatagcgaactcaattc

SEQ ID NO: 11137 - DNA, 387 bp, Oryza sativa
  Clone ID: uC-osflcyp089h11a1
gttgctaccaagatggaaccggactaactgactcattcaagctgtaaacttgtcacaaatcgcacccaggtttacacattgttcaagagatacaaactgcagctataaagccacttgtgctaacaaataccactataagaggataggtatatcagatcgacacaaagtacagtcgctaaaaagatgtactaaaaaacccaaacttttatcaaccaacgcagatcattattccaagctctcttcaagaaccgtccacatcttcagacgcaaccaacgaatttgacatttctcaacgcatcacaaccgagcaaaaccacaattcaagcaacaaaggccacccctgagtctgctgtgaagtgacaccagcacaaacaggcgtttataacc

SEQ ID NO: 11138 - DNA, 146 bp, Oryza sativa
  Clone ID: uC-osflcyp090a06b1
gctggtagcggcctgcagcagccgccgcgccgaaccggggcgatccgcacgcgtccggtattttacgcgaaagcaaaggagaaagaaatggggggtcactaaagagggactcgacctccaacaacgtaactgtggtaaacaattga

SEQ ID NO: 11139 - DNA, 67 bp, Oryza sativa
  Clone ID: uC-osflcyp090a09b1
ttattttaaaagctagtagacgagaatgcttatgtagtatataacttattatatccctccattcaac

SEQ ID NO: 11140 - DNA, 440 bp, Oryza sativa
  Clone ID: uC-osflcyp090a11b1
gtgcccggaagctagcgcctcgtcaacttgggcggcggctgaagtcagtggccgaaggagcggggattacttgcccgcctcgaaggctctccgccggcgggcaggcggtatagcgcggcagcttcccactccggctgatcaggtgttgtgagaagtttctttttactttctttattttatttttcttttcttctctttcattttttcctcttatttttcttttttcttcttttctttattttttttttatttttctctcttcttttttttctcttttctttattattttttctttctttttacatttttttttttttctttctttttttatttttcattttttttctttatttatttcctttgttctcttacttttcattttctttctcctcttttattttttatttattttctttaattctctttctttcttttttttc

SEQ ID NO: 11141 - DNA, 302 bp, Oryza sativa
  Clone ID: uC-osflcyp090b01b1
tcgttatagtctgactcgtcatggacgaccaatatttgtgacttcaacagcgccatcggtattaaatagtctgaatgccggttcacaataattactgatgcatgttatggtaagacctccatttatgtcttgtgccccttttgtgacatcaacagtcaacgtctgcaaatgtatctgctcctgttaagcaccctgtacatttgccacatcctatatcatcccaagttaatgcaatttctcaccccacagaatcgcacttttcactcatgaagctcttataacttttctacaacttcacattt

SEQ ID NO: 11142 - DNA, 221 bp, Oryza sativa
  Clone ID: uC-osflcyp090b02b1
tcgttaaagaatgatttggagaggtcaacaaagaagggtgacgatatattttcgatgggagggtaagcatgctttttactttgataatgatttattgatgtgtttatacttaactatgtgatttgttttttgatctgatttttttttctactttcttttttattctcttattatcatatactaacattttttttttaactttattatattatatatcttat

SEQ ID NO: 11143 - DNA, 171 bp, Oryza sativa
  Clone ID: uC-osflcyp090b03b1
gtgatcgaggaattgaggcgcacatcggaggttggagaccgaccatccatgcttctagcacccgctatcttttattctttctaccttcattcacagatggacgcactccatgctgctctctcctgctctctattagatttcttgacctaatgcacatcttcatttctccat

SEQ ID NO: 11144 - DNA, 81 bp, Oryza sativa
  Clone ID: uC-osflcyp090b04b1
ttttgtggttcatatgccgtggccgatgtagagtgggggcaatattgaaggacccgcggattaaagtcgattagggatggc

SEQ ID NO: 11145 - DNA, 63 bp, Oryza sativa
  Clone ID: uC-osflcyp090b05b1
ttatatgatagcaagccgaggccaatgcaaaatggtgaaatcatagatggcctcgccgttcaa

SEQ ID NO: 11146 - DNA, 273 bp, Oryza sativa
  Clone ID: uC-osflcyp090b07b1
ttatttgcgcctctgctcaggagaatgctgttcgtgttcatgaatgcaggaccggtcctcaacaaaactatggggcgctagcactccatcatgttgatgttttttactgaccatttggcatgtggactacttgcaaaacgtggaacatctgaccttggattcaaagaataccttcacgtatctttagcctgagcccttgatgtgctagtagaagcactaaaactagtctttgggctcattgtcagagcctagctccctagttctttgggtatt

SEQ ID NO: 11147 - DNA, 85 bp, Oryza sativa
  Clone ID: uC-osflcyp090b08b1
ttatattcggccaagctgaggcgaatgcaaattggtttcttcaatgtagcactcgaactccactgtcgttacggggtttcccaat

SEQ ID NO: 11148 - DNA, 81 bp, Oryza sativa
  Clone ID: uC-osflcyp090b11b1
gtcaggcgaagtcgaagtcgcgggaggggggggggcgactttagttagggttgcaatagtttgatgtttgtgttttatatt

SEQ ID NO: 11149 - DNA, 349 bp, Oryza sativa
  Clone ID: uC-osflcyp090b12b1
gtagttcacacagtctggtggtgtaagaccatttggagtatcattattgattgccgggtacgatgacaatggcccacagctgtatcaggttgatccctcaggatcatacttctcctggaaagcatcagctatggggaaaaatgtctccaatgcaaagacatttcttgaaaaaagatacacagaagacatggagcttgatgatgccatccatactgccattttgactctgaaagaaggatatgagggtcaaatctcagccaacaatattgaaattggagttattcgatctgaccgtgaattcaaagttctaaccccggcagagatcaaggatttcttggaagaggcggag

SEQ ID NO: 11150 - DNA, 339 bp, Oryza sativa
  Clone ID: uC-osflcyp090c03b1
tttgggtagagattggtgtggtcaatgtataccatggactatatagatggaatccatgatatttgacgtgacgtgtttagacaattatttattactgattttatatggttcttattacttgtggtttgttggttaatttagataaaatgtctttttcattttctaattaatttattattcttaattttttttcattctataatataatttttactattttcattctgtatattaaatatttcttcactttattttctttattattctttatactttcttattattttatttatttttttttttatctattatatattaatttatctatctatttttttt

SEQ ID NO: 11151 - DNA, 213 bp, Oryza sativa
  Clone ID: uC-osflcyp090c04b1
ttattttcatgcttgctgtggcgtatgataagttgggacattaaagacggtctagaagatgaatatcggtatgggggttgacaatgattctgtaactatgttttacggtacatctgacgctgtgttttaagaaaatagtcgtacataatatacgtggcgtacacattattaaagttacatttattagcctgtaaactaattaatttctaataa

SEQ ID NO: 11152 - DNA, 376 bp, Oryza sativa
  Clone ID: uC-osflcyp090c07b1
atttttgccatcctcgccgaggtcctctcggccgtgttctgcgaggtgatgaacggcaagccggagtacaccgaccacctgactcacaagctcaagcaccatccaggacagatcgaggccgtcgccatcatggagcacatcttggagggaagctcctacatgaagcatgccaagaagcttggtgagcttgacccactgatgaagccgaagcaagaccggtacgcgctccggacatccccacagtggctcggccctcaaattgaggttatcctcgccgccaccaagtcctattagcgtgagatcaactccgtgatctacaacctgtttcatcgacgtttttccgtgctaggttcttcacggctgctactttcagggt

SEQ ID NO: 11153 - DNA, 120 bp, Oryza sativa
  Clone ID: uC-osflcyp090d08b1
ttatagtgtcgcaagctgaggagaatgcaaatttgttaatatatagtaggactcgaagtcaactaaccttaggtcggttaattatagttttagtattattatattcattaatatttttaa

SEQ ID NO: 11154 - DNA, 260 bp, Oryza sativa
  Clone ID: uC-osflcyp090d09b1
gtatattggagcatgctgaggtgaatgcatattgtgttcaacaaggtagtactcggcattgactgatggaaagggggttaaccatagatgagcgattctgtttaggggattattggacttgtcgtctaagacaaaaacgtgtaatacgttacatttctctaagattataagagtcagatccaataacccgtaatactcatacatacgatgatagagtttttaattgttagttgatgatccaaaatggcatgatgttaaag

SEQ ID NO: 11155 - DNA, 143 bp, Oryza sativa
  Clone ID: uC-osflcyp090d10b1
ctggggtgtagagtggtgggccccacacatacgatcttctacagcccctgccctctatttatatgtctcgcagtgatcgtatacgtcttttttccacccaattttgacgtgaagctggagcacggctcgaggaggctctgtat

SEQ ID NO: 11156 - DNA, 71 bp, Oryza sativa
  Clone ID: uC-osflcyp090e03b1
tcggttggatggggtatgatgtgactaatacatctcatgtcattaatgcaattcctcgatcatgtctttct

SEQ ID NO: 11157 - DNA, 339 bp, Oryza sativa
  Clone ID: uC-osflcyp090e12b1
gtgaaccagagcgtgccacttatggatcctatagtcacgcttttcggcagtgtccatgagaacatgcctcatgctggaggaagcatgcggagtacattgtttcccaactttggtagtatgtttagtgtgacagatcagcaccccaaggttgatcaatgggatgaggagaaccttcatagggatgatgaggaatacgcgtctgatggtgctggaggtgactatgaagacaatgttcacagcccgttgctgtcccgacagaccacgagcgcagaagggaaggacattgcacaccatgcttattgtggaagttctttgatgtatgagatgaagaagcctttt

SEQ ID NO: 11158 - DNA, 591 bp, Oryza sativa
  Clone ID: uC-osflcyp090f03b1
tcgtttagatatgggaggatgtgaacaaggtataatgtgattagatttggaactctcgagtttgaatgtttttaaggatgttagcaaggtatttgttattaactttaaatgctttttattgtaagatgattattattaatatgttgtattttaatattgtatttattgataaaatggtttatgatattttatcatattgtataaatttttgtttattatttatatattaatatttttaattattttatttttttttttatttaatactttttaatttattatttttatttatattttattattttttatttattttatttttttttatttaaataatttattttatatttaaatttatatttatttttttatatttattttattaatttatttatttatttttattatattataatttattttgttatattctttatatttaattttttttatattatcttttttcactttaatatttattattattatttaattttattttaatatttatattttttatcttttatattaatatatttatatattttttatatatttttattttaatatttctattattatttttttttt

SEQ ID NO: 11159 - DNA, 83 bp, Oryza sativa
  Clone ID: uC-osflcyp090f05b1
gggcgcaggtagaggagtatgaggagtggggttgtctaagcacggcctcgaacacgactattcttaattgggttaacaataat

SEQ ID NO: 11160 - DNA, 223 bp, Oryza sativa
  Clone ID: uC-osflcyp090f08b1
gtatattggcgcatgctgtggtgaatgcaaagttgttacattaaagggggactcgacgtcgaatgacggtaagggggttgaccatgaatcaggtatgctgttttagggttcacctgccctgctgtttgcgacaaattcgcgacatactatacaggagtctctgaccacaaacgtcctatttatgatcctgtagtactcatacctcctgtctgagcctactcaa

SEQ ID NO: 11161 - DNA, 255 bp, Oryza sativa
  unsure (1)..(255): unsure at all n locations
  Clone ID: uC-osflcyp090f11b1
ctcctcgtcgccgacgagccgcctcctcctcgtcgtcgccggcggcagagcaccggagcagccaccccatggcgtccccggacctcctcttcaacctgcgcaacctcttctacctcggcgcctaccaggccgccatcaacaacagcgacgtcccgggcctcgacgccgacgccgccgccgagcgcgacgccatcgncttccgctcctacgtcgcgctcggctcctaccagttggtgatcagcgtgatcgactcgt

SEQ ID NO: 11162 - DNA, 103 bp, Oryza sativa
  Clone ID: uC-osflcyp090f12b1
tcgttcctcgccgccccgcacgccgccgtggccatcacctgcggtcaggtcaactccgccgtctgtccctgtctgacctactcccgcatgttcatctttataa

SEQ ID NO: 11163 - DNA, 174 bp, Oryza sativa
  Clone ID: uC-osflcyp090g08b1
ttattttagaatgtgctacaatggatacaaatatcttaaatcaaattatgaattaacttctactatctcttattctcttaataattaaactactcaatttaatattttttaattattatattttttattatctcattttaaccacttttcttttttacacttttatatttttat

SEQ ID NO: 11164 - DNA, 64 bp, Oryza sativa
  Clone ID: uC-osflcyp090g09b1
gttttaagtcgcgagctgtggaggaagcatagggggtactctatcgatgcactcgacggcgacc

SEQ ID NO: 11165 - DNA, 88 bp, Oryza sativa
  Clone ID: uC-osflcyp090h01b1
ttattttgtcacctgcagaccgagagccaaagtgattatgtcgagccaagaatgaggattgtgtctacgaattttggtatacaataaa

SEQ ID NO: 11166 - DNA, 78 bp, Oryza sativa
  Clone ID: uC-osflcyp090h05b1
gtatattaggacaagctgatgagaaagaaaatgttttagaataaagtaggacccgactttaacttacgttagggtggt

SEQ ID NO: 11167 - DNA, 417 bp, Oryza sativa
  Clone ID: uC-osflcyp090h08b1
cagcaaaggaacatttacttcttcctcccgagttcccccaaactccttgcttcttccgatctcccaccgtcgcctgggcgcctggcggactgctccactccataggcggccatcgtcttctcaaccagaaagcttctggctgtacagcttggcgggatacaagacgacggtctgccgtcggcgatccgcagtcgcctgagctgaaggtggaagcttccaacacgtgtagtccgtgcagctctgtaaagaagctcataaaattctattttctatatttctttaaagatttttcttattttaaatatctattttctttacattttattaattaatattatttatttttttttaatactaacaattttttataaaactattttttaatttttccattaatttttttctttaccttttatt

SEQ ID NO: 11168 - DNA, 274 bp, Oryza sativa
  Clone ID: uC-osflcyp090h09b1
tctcagtctcatttcctacagaaagtttaactacattatgagcagcctgagattgttaagagtatccccgatactgaatttctggggtacgactctgtttctgccactgctgttgttaaaggtcttttagttaatggcaactcagtgaatgtagtttcagaaggttctgatgttgaaaatattttagattggacaccatttttagttctatctggtgttcaagttgttagataatattctttttttaatttcacttttttttctatcttctcta

SEQ ID NO: 11169 - DNA, 217 bp, Oryza sativa
  Clone ID: uC-osflcyp090h10b1
ttcgttatatcattgattgctatcctcctcctcctccttcctcccctaaatctctagagaaatggaggacaatctaccagtcaatgtccgggagtatcaagaactcgccaaaaaagcgttgccaaagatggcttatgattacatcaatgggggagcagaggatgagcacacactgagggagaatatcgcagcatacacaagaattatattacgacct

SEQ ID NO: 11170 - DNA, 124 bp, Oryza sativa
  Clone ID: uC-osflcyp090h11b1
gtgcttataaacataaaaaacatctcaaacacaacccaaaatagggccaaaattctagaatattatttttgttttgaaaggaatttaagtttgtgtggtgtgtcatccatggcggacatggtga

SEQ ID NO: 11171 - DNA, 321 bp, Oryza sativa
  Clone ID: uC-osflcyp091a03a1
gggggggaaaaaaactgggtttatagacggaaacgaaacttggttttacaggggggcacaacttcaaaaaaaagccccaaagaggggggaacatatggaaaaaagttttgacccccgaaaaaaagatctagtttccccaaaaggaaaggtaggtaggacctatttaaaggaaggggggggtcccaaaaaggggcccaaattgaaaatggacccttgaaaaaaaaacttggggcaaagggggcccctggcaccaaagaggggaaacttggcaagaaagattgggcccaccccgtttccaaaaaagaacccccaacccggggg

SEQ ID NO: 11172 - DNA, 355 bp, Oryza sativa
  Clone ID: uC-osflcyp091a04a1
aagcgaatgccccttttttgggttcttttttaattggtaggggggcttgccacttcatgaaccaatataccacccctatatgcccatgccattggccccatagagaccccccttcttatgaacttacacattgcttggaataaaaacccaccaaatgagaatgaccccggcccctttgtcaaacacaggcacaagaccccaaaatgggcgagggcaagaaagcaaaggcacacagaaaagagcaacaaaagggtataccaatagtgcatcaaatggacttgaggggcggcaacttaatgccacaatcaaaaccggtttccaggggtgggcaccccaaggcaaccttgcagccctg

SEQ ID NO: 11173 - DNA, 414 bp, Oryza sativa
  Clone ID: uC-osflcyp091a05a1
gacaaaacaaaattgaactattatatcatctagtagtaaaaagagtttgtatatagtatctcaatgcaagcccatctgccgggggtggttaatggacacaagatagatgggggatgaactctagcgattagcaccgcaccgacactggaaatccgctcaatcatcatcatccaggtaaattattgttgtggcctagcacattataaatagtatataataaatatatattggagattctctgttaatcacacggtgtatgactgctggatggtctcaagatccaagcccttctgcttcaccaccgactccatccgccccttcagggtggtcagctctctcaaccttgcgatttcggctctcctacgggccttttctgcaagctggttgagatcgttgtagcttgtcatgtcgcgg

SEQ ID NO: 11174 - DNA, 410 bp, Oryza sativa
  Clone ID: uC-osflcyp091a06a1
aggatcaaaacatttctattaccacaactttttaaggatggaattgagtagcaatactttcaccccaaaatacagtttagcgacaatatcttagaaaagccgcttgctttgccgccatggctggcaagctgagcagagcagctaacacaaagaacacgagatcactataaaccaaacggcaacgaacgaagaaaatacagggtcttttttgtctgaagatacacgaagcggttcgttttcttttatttttagtctcctctcctcctcgatgatgggtgtatggcaatggcaatggcgatgggatcttggcttagttgatgggaaggggctcgccgttccactccttgaggcagtcgagcatggggtcgatgagcttgccctggctgatgccgaggaacaccttgttgcac

SEQ ID NO: 11175 - DNA, 379 bp, Oryza sativa
  Clone ID: uC-osflcyp091a07a1
ggttcaaaagcattcgattctagctatttttattggagaccttttgtatgaacttatctgaatttaagggggaggacgggagaacagattttcattcacatcctctcatatgataagagatccgcatggtaaaaccaataatacattacaacaagtgttaatccaacatgaacgatgatgtacagctccatcggctggaaagttgtacacatttctatctgcttcgctgattatggacccgagctgtaggcgaaaatgccggatagtcccagccgctgtagaagacatgcgccagcagatcagatcacagctttgctcatcgtcaccaccctctcagagactaatcaaacaggggagaaatggaggttagattcatttt

SEQ ID NO: 11176 - DNA, 257 bp, Oryza sativa
  Clone ID: uC-osflcyp091a08a1
tttttttttgggtttttttttttttttttttttttttttttttttttttttttttttttttttttttttttaaacaaaaaaaaaacttggggaaacccaagttgtgaaagaaagtaaattacgcgggaaataacataacccgggtagaaggggacagtttacaaaacttatatatgggccaaaaaaaccactgcctaaagaaaactccctttctatccgaaaattgatatataggggaaactccattaagtttatct

SEQ ID NO: 11177 - DNA, 313 bp, Oryza sativa
  unsure (1)..(313): unsure at all n locations
  Clone ID: uC-osflcyp091a09a1
gaatggggaaactgaaaaaaagttaaaaaaactaaaaaaatttaaaaggtggtacactaaaaaaagggtttggcactcccaaattttntaagaaaatccctttttttgggcaaaaaaagaaaaggggtttaaacaaaaaacatggcagggggaaaaatttttgaaaatttttaggggaaaaaccaatgctcaaagaatttcccaattttttcaaaattacacattttaaagggaataaggggggccttttttggggggggtatttagaaaccttttggggttttttgggccgatttttacttttaaagtccaa

SEQ ID NO: 11178 - DNA, 298 bp, Oryza sativa
  Clone ID: uC-osflcyp091a11a1
gcgtgtaggcaccctctaggcgcgcccgccctttttttttttttttttgggttttttgacaaaacaaaattttactattttattatctagttgtaaaaagagtttgtttttagtatttcaacgcaagcccatttgcccggggtggctaagggacacaagatccatgggggatgaaccatagcgatttgcaccggaccgacactggaaatcccagcaagccataacaaccaagaaaaaaattggtggggcctaccacaatataaaaaggttttaaaaaacttatcttggcaaattttgg

SEQ ID NO: 11179 - DNA, 387 bp, Oryza sativa
  Clone ID: uC-osflcyp091b01a1
ggcaaaccccaacttttttcagtttctgaattctggatggatcatatcagattcatcacagcatcgtacaatctgtgcaagcattggtacatcgagcgatggaaagagagagtagtctacaatggcggctgggccattcacgagcccggcgtgaacttgggggcgtaaacccaggcgttgttggcgacggggtcggcgagggggtcgagcaggttctccaaggggcccttgccggtgaccatggcctggaccaaaaagccgaacatggagaacatggcgaggcggccattcttgatctccttgaccttgagctcggcgaaggggacggggtcgtcggcgaggcccagcgggtcgaaatactggccgccggggtagaggtcgttgccc

SEQ ID NO: 11180 - DNA, 388 bp, Oryza sativa
  Clone ID: uC-osflcyp091b02a1
gacagcaaatgagaggatatcttacattcagaatccagtaagtatgagtgctgcacgctatcggggatatacagtgcacacgcaggtgacatagggtatatatctatgtacaaaaagagagcgaacataaatacatcattacatcaacatgcaattaggatgaatccgtcactcagcaacaacacggttccctttgctgtagctgcagagtttcgatcattcagtaacagttgatgttcttcatgaagctagccgttgtcttgggtttgcgacattgaaccgagggaactagtactggctgctttgcttaagctagccgtctctcaatcatccttttcatcctccagatcactgaaggatatgtcttcctcctgccctgctgaattga

SEQ ID NO: 11181 - DNA, 431 bp, Oryza sativa
  Clone ID: uC-osflcyp091b03a1
ggagcatcctcgtccatgcctccggccatgtcagctccggcgccctggtacatcttggcgatgatggggttgcagacgccctccagctccttcatcttgtcctcgaactcctcggcctcggcgagctggttgctgtcgagccagctgatggcaccgtcgatggcgtcctcgatcttcttcttgtcggcctccggcagcttggacgcgatcttgtcgtccttgatggtgttccgcatgttgtaggcgtagttctcgagcgagttcttggcgtcgaccttcttcttgtgctcctcgtcctccgccttgtacttctccgcctcctgcaccatcttctcgatatcctccttgctcagacggcccttgtcgttggtgatggtgatcttgttcttctgcccggtggtcttgtcctccgccgagacgttcaggatgcc

SEQ ID NO: 11182 - DNA, 114 bp, Oryza sativa
  Clone ID: uC-osflcyp091b04a1
gggaaaccaccccaaatcatgcaaagggaaagggacaaaaccccttgtatggggcccacccctaaagacaagcaaaataaattcgggaaaaagaagggcccgcgccctaaaaag

SEQ ID NO: 11183 - DNA, 419 bp, Oryza sativa
  Clone ID: uC-osflcyp091b05a1
gcatatgaggccgattaagaaatgccaataaagatataaaaacaaacacaaagtttgtcaacatacgacttgagataaaaaaaaatgttacgtacaaaagagcacaattgagtagtggcatcattagtgccatttttcaaggaccggtacatatgaaagtacatatatgctggtttctgttgagaactgacacatagacaaacatctgtaagcgtcggttctcagcaaaataaatcggtgcaagggatatatttgccggttcctaattttggcctcctgcacaggtcggggaagatgggaaatgcctcacacacaccgattttgtgtggactggtacatttggtggcatcagtcatcaattagtagtggttcatcgcggcaaccctcgcttgcgtggcaaacaccgcgaggccgagaga

SEQ ID NO: 11184 - DNA, 95 bp, Oryza sativa
  Clone ID: uC-osflcyp091b07a1
gtcaaggtacccattggttatacgtatttgaggtgttcatatgctttaaattacaaacgcggaacggaaagaaatgcagtgaggaggatcctgcc

SEQ ID NO: 11185 - DNA, 167 bp, Oryza sativa
  Clone ID: uC-osflcyp091b09a1
aaatgtaaccaaactttaatttttaacaacaaaaacaattgacggcgaatggttgtggatcgatggccggcgcctgtacgggcggatggagttgtggagatgtacgccgcgctcgttcgaaacgatcgatcgatcctacataatgcactcttgggttgcctacgccg

SEQ ID NO: 11186 - DNA, 379 bp, Oryza sativa
  Clone ID: uC-osflcyp091b10a1
tcctctatagtgcgcgcgcattgctctcctccgtcgatttgcaacgcttgccgatggaatcctccttggcggcggacgtggacatggggctgaccttgcctttgcccttcccggaggccttccgcttccgtgcattgccgacggaagcccccttgggcggaatctcggtgccagcgggcgccggatcagacaccgacgactcgctccgggtgttcccgagctccatctccttcgatgcgccggccgcgccggctttagggaggccgaattgggcccgggccggtaccggcgcagcctccaacgtcggcgtcgtcgagagcgtcgaaaccagagagcctggcggagcgctaggcgaaaccaggggcctggaggaactggt

SEQ ID NO: 11187 - DNA, 418 bp, Oryza sativa
  Clone ID: uC-osflcyp091b11a1
ggaatcaaatatactatccagtttaaaagataataaaaattgatcgcaacacatccagttactacgatggccattgctgtactcggggcaggagcaggacaaataactccatacactggcatgaacaaaacgcatactgctacaagattctcattgtaagtaagtcggcaacctaagctgattctgaggtctcccattacatgacagccggccaagcagcactgcgactcgcaagaagttccagctaggagttatacagctaaggtgatcaaaacccaaagaaacctagctcggtagccctttctttctcgaatgtctcaaaatactggtagatgattgtaacagcgagcagtatcccaattcctgaaccaattgcacccatgaaatcagctaggacagtcaatgcaccaatgcagac

SEQ ID NO: 11188 - DNA, 348 bp, Oryza sativa
  Clone ID: uC-osflcyp091b12a1
agcacgcacatataagcgtataccctatagatggcgcgccctttttttttttttttgggggtatttaaaatttttagttttttatattttttttttttttttaattattttaataatttataattttttttaaaattattattaaataatataaaagtaatataattatattaaaaaaaaaaaaaaaaatctgtataaataaaaaaaaaaataataacggaaaaaaaaaaaataaatttaaaataaagaaggaaaaatgtataaaaaaaaaaaaaaaaatataaaaaagtgaatttaattagaaatttggttaatttatataaaaaaaaaaaaatatttattttttta

SEQ ID NO: 11189 - DNA, 52 bp, Oryza sativa
  Clone ID: uC-osflcyp091c01a1
aaataattctgtttagcgcacctaatcgtgaaataaacataaaggtcagtca

SEQ ID NO: 11190 - DNA, 374 bp, Oryza sativa
  Clone ID: uC-osflcyp091c03a1
aaaaactaaaatcagattggcatagcattcttcatttactcgccctatttgcaacttccgactttgaagaaaaacactgaaaatgccggggggttagcctggtacatctgcatccttttcaatcaccgtctgtttagggacaacaaaagagcaggggcccagacccagcagctggcattgatccccccaaaacccccccgggttttacaggacaagcctattttagaaattttacatggcctctctcttatggacccaaaggggtcggtcatctatctccttcttggaccctaccttatgctgctggcagcttcttcttctttttcttcttcttcagaaactggggaccatgagcagcccgatcgccgggacaa

SEQ ID NO: 11191 - DNA, 408 bp, Oryza sativa
  Clone ID: uC-osflcyp091c04a1
gtaggcaatgtaacgacacgtctgaaattcagaggccgccatcatattcagatataagtatccggaaggactttaaggtgtacatacctatatcagatgcagagtaatatcacatgtgcttggaaggaccaatttgttagcaatttagcatgaaccgtgcagctcgaattcatgctggttcacatgagtagccaaattttttttgtacattagtgacttctacctcaattttgaatgtattgtacagcagaaaactctctctccccctccctctctttcaatttctttcatggtttcacatctccatggcgtcctgcgccatattctgcaaatcctcttcggttaagagagtcttgttgccgccgctccccgtcttatcgtaaggctgcgccatcctccgtaggaact

SEQ ID NO: 11192 - DNA, 108 bp, Oryza sativa
  Clone ID: uC-osflcyp091c05a1
aaatatagattttaagttatttattgtttatccgaacacaatctgacaatattcatacaataacaagcgagaacagaatgaaatgcgttgaacagatcctccaaataa

SEQ ID NO: 11193 - DNA, 96 bp, Oryza sativa
  Clone ID: uC-osflcyp091c06a1
gttaatactgctgtcaagggatccactttgtacccgcataagatgtggggacctactcaacacaacaagcgggaacggcaagaaatgcataaacag

SEQ ID NO: 11194 - DNA, 107 bp, Oryza sativa
  Clone ID: uC-osflcyp091c07a1
gttaatattactgtcaaggtatccattctttacacgcataagaggcggtcatatactcaacataacaagcgggaacggcaagaaacgcgtaaacaggtcctccaaag

SEQ ID NO: 11195 - DNA, 85 bp, Oryza sativa
  Clone ID: uC-osflcyp091c08a1
gttaatataattgttaaggtatttattgggaacacgcataagagggaaggacatacggaacacaacaaccgggaaagggaagaaa

SEQ ID NO: 11196 - DNA, 113 bp, Oryza sativa
  Clone ID: uC-osflcyp091c09a1
ttttttttttttttttttttttttttttttttttttttttttttttttatatatattataattttttatatattaaaaattaaaattgaaaaaagaatgatatggataatgag

SEQ ID NO: 11197 - DNA, 403 bp, Oryza sativa
  Clone ID: uC-osflcyp091c11a1
accggcagaaaaaagatttgcataacagcaaatcatgttaataagagcgtatgtgcttctgattgcagcaacatcccattgttacagtccattaggacaacgtcatgcagagcaacatgacacattgacatgtatgccaattgctagatttcatctgctaccccattttctggctaaggcagcatcaatacaccagcatcctcctgctctacctctagcaatgaaattagtcaaccactaacttagtcacatatgctgccaccgggagcggtttccttgactggtctctcacagcttgcttcttagttcttacccgcgtcactgttacctaggtgcagagcgaagtcttcatgatcgtcacaaaatgttttccggagtctcagtgcaatcatgttgtggatta

SEQ ID NO: 11198 - DNA, 110 bp, Oryza sativa
  Clone ID: uC-osflcyp091c12a1
tttttttttgggtttttttaaatgtttggtttttttttttttttttttttttttttaatatttttatataattttaaaaatttattatttaaataatttttattttattt

SEQ ID NO: 11199 - DNA, 420 bp, Oryza sativa
  Clone ID: uC-osflcyp091d01a1
actgggatgataacttcgatgttattcatttcatagaataatcgcaactcaaaaacaaccagaacacatgtattttttctggtaccctcatcaggcatctgattaaatttgaataaaccgaacatatgtgtccaaaatcacaagtgagaaccacaggtagcaataggtattacagtctttgaatagaagaaaatgataacagataggccggttgaaaactttgtccacgctaatgaagaaacagcaacaaaaagagagaaacaagcaggaggacggcgataacagctcctcttggcttagcattcttgggtccgaagaattagaagcatttcctgtgcacaatggatgggccagactcatcgtactcagccttggcaatccacatctgctggaatgtgctgagagatgccaagatggatc

SEQ ID NO: 11200 - DNA, 326 bp, Oryza sativa
  Clone ID: uC-osflcyp091d03a1
aaaaaccaaaatttttttatttccccagggaaaaaaaaaaacaaaataaaaaaaactacgaaaaagagcccccatttcccaaaagggggtttttttggggcaaaaaaaaaggttttgggggtatgggaccccgggggaaaaaaaaaatttccgggggggggaaaaaaagaggcccaaaccaccaaggtgggcccaaagtggggaaaaaatttggccccgggggggatgggcccccgggggaactttttatggggccggggaaaaaatgacctcttttgtccaaagcaatcaaaaaggcccaaaaattaagggtaaaaaattggggg

SEQ ID NO: 11201 - DNA, 146 bp, Oryza sativa
  Clone ID: uC-osflcyp091d04a1
ttttttttttttgtttttttaattttttttttattgtattttttttttatatttattttatttgggtatatattttaaattatttttgattttagaatgaaaagggaaaacaggcccaacaaaaaaaattagaaatgggggtaagg

SEQ ID NO: 11202 - DNA, 124 bp, Oryza sativa
  Clone ID: uC-osflcyp091d05a1
gggggaattgtaaataaaaatgtcaaggtacccttttggtacacgcaaaagaggcgttcatatttttaaaataactagcgagaaaggaaagaaatgcgttaaacaggtcctccaaaaaacaatt

SEQ ID NO: 11203 - DNA, 111 bp, Oryza sativa
  Clone ID: uC-osflcyp091d07a1
aatattaattttaatttatttattttttaaatttataatatttattgatatatttaaaataataagcgagaaaagaaagaaatgcttaaacaggtcctctaaatacaattt

SEQ ID NO: 11204 - DNA, 223 bp, Oryza sativa
  Clone ID: uC-osflcyp091d08a1
ggttcaattgataattttaatgtcaaagtatacactctttacaagtataaaactcatttatcttttctacaaaacaatcgagaatggaaagaaatggctaaacaggtccttcaaattcaacgagcacgcatgcagtcgtgcatatactaggatctacactaagcaagtgcaagctcttagcgagtcatgatgatacacacagtttgcttattttggtcctcac

SEQ ID NO: 11205 - DNA, 403 bp, Oryza sativa
  Clone ID: uC-osflcyp091d09a1
acaaaacgttattatggaacctatacatgtactacaagaaaggaagtcatatagttcaattaaatttctgggttgctataaaatacaaaaggtgcacctgtaattacctaatttgcagtatctaagttcaccaaagggctgtgcccagtatataccaaacaagaaatacattttgcccctttaacttacaaaacacacatgtatcagctttcctcagcgtgacaacatcttttctatgtaaccaggtaagtgaatgaacaactgatatgttgtattgaacaccgtggaacctgacaacttgaatctcactttttttttgtttcacccatcatgcataagccaggaaagtagccaacacattccaaaatgccaagagcgggagcgacaatggttgatttgttag

SEQ ID NO: 11206 - DNA, 355 bp, Oryza sativa
  unsure (1)..(355): unsure at all n locations
  Clone ID: uC-osflcyp091d11a1
aaacaacaacaaaccttaactataaggaataagttaaccggggttccctcaacttaacagggagattttttaagattccttaacaacaaaatcagaaatgggtacccctaaacttacacaaaacgttcaaatgaggtcccatggcagtatatgggaggggtttcgctgacggggcatcctagtcagaaaaaaataaaaaggtccatggggcccacatgtcagttgcacattttctttcttttcttttcttttccttctcttctttttaatcgggnaaatgggcgggcagcgtgcgagcatggcagttgagcgacggggggcggaaacagttgagcgcggcctgggggcgagcggc

SEQ ID NO: 11207 - DNA, 407 bp, Oryza sativa
  Clone ID: uC-osflcyp091d12a1
actgaaaggaaaacgaaattgcatccgataaagcaggttcagataatgctacagaacattacatagacaaaagtaaccatatccctaacctgacttacaactgctgaacaactagggtatgtggctactaacatctgcaataacagcaggaaggaatactaccatgcacctaagtcacagaacatctacaacaactttcctcattcactacctcttcttttttcttcgttttcgcccctcttttttttttgtttttggatttttcttctgccgcagcacgctggaaggggaacaaacactccagggtgtctagcaaccgccgtctaaacacaagggcgtaagacgcaatatgtacaacaggtcactcagcacagcagggcaatgttgggagcctgtgccagtaagca

SEQ ID NO: 11208 - DNA, 58 bp, Oryza sativa
  Clone ID: uC-osflcyp091e01a1
aaaaataaacccctctccccttttttttttatatttttcttttttttttttcaaacat

SEQ ID NO: 11209 - DNA, 419 bp, Oryza sativa
  Clone ID: uC-osflcyp091e03a1
ataaaaccaaccacattatatagtaaacattggcttcagagttcagatccacaaggttcacagccactatagcaagtacagataaggtagaagctaagtaacttgttccagcctcatatagcagttacagatagatagtttcactgccaaatagtacttgagacttcagcatctaagctagacacagcacatactaacatactaacatagctatatagcgcaactagaagcgcccgacagacacatgccgcttcttggatgtccagaatgtttattccatttgtccttatatatacaggcaccagttgctacaccccaaacccctcagtagaactcggccgacacgggcatgtcatcgaagctccaaaggtccatgctactggccacatcctgagatccatcagagctcagaagggtgt

SEQ ID NO: 11210 - DNA, 196 bp, Oryza sativa
  Clone ID: uC-osflcyp091e04a1
atgagcatagcttaatttggatcataattgtatgctcaatggagcatacaaactccagacattgaattgcctggcgaactcgaaagggttacacgggataacttggacactttgagagctaggcaaaactgaacgaaccggttagctacaagcaacagtgaggaacaatagctgtgtttagctgattctgcaatat

SEQ ID NO: 11211 - DNA, 62 bp, Oryza sativa
  Clone ID: uC-osflcyp091e05a1
atatattgaaaattattagcgggtaagggatgaaatggataatgagcacctgccaagagaca

SEQ ID NO: 11212 - DNA, 86 bp, Oryza sativa
  Clone ID: uC-osflcyp091e06a1
gttaatattgatgttaaggtacctatcctgtacacgtactagatgtgttgatatacgcaacattacaagcggggacggaaagaaat

SEQ ID NO: 11213 - DNA, 103 bp, Oryza sativa
  Clone ID: uC-osflcyp091e07a1
gaaaataataatgttaaggtatccattttttacacgtataagagggggtgatatacgcaacacaacaagcgggaacgggaagaaatgcttaaacaggtcctcc

SEQ ID NO: 11214 - DNA, 86 bp, Oryza sativa
  Clone ID: uC-osflcyp091e08a1
gaaaataatgatgttaaggtacccatttggtacacgcataagaggggggcatatacgcaacacaacacccggggacgggaagaaat

SEQ ID NO: 11215 - DNA, 171 bp, Oryza sativa
  Clone ID: uC-osflcyp091e09a1
acatgtgccgcaaatactatcttattgagggctgcatagattgaacaaaggtcctaatgtgcactgggtatgggactgggcccaaacttatatggctatcccgattgcatccttatcctatcaggttgtagtatacacctttgacatagcattcccgtgcaaatatccaaa

SEQ ID NO: 11216 - DNA, 394 bp, Oryza sativa
  Clone ID: uC-osflcyp091e12a1
agggcaagtcaatatatagaaatcattctccccatagaaatagttacaatgtgcacattttaaaaataacgatctcagttatttcaacaacataggagtttataacaataatacccacactggtatgataaaaattcctattcctcgattggaggtgggaacagacacatgcgcacccgtcaaaataaataaaaaaaacagttgtaaggaagtatttgggttgctaacctagaaagatttatttgataggtaaattctggtagtaggatggcaaatcaaaatgtccaacatatagaacgtatccaggggcggatccaacgtgggtgctagggggacttgagtcccccctatcccgctggaccaccattggtagaaggggaaatgaaagggggaa

SEQ ID NO: 11217 - DNA, 355 bp, Oryza sativa
  Clone ID: uC-osflcyp091f01a1
agaaaaaagggcccgcattaaatcaaaggggggggggaaaactggccccacccccaggggacaaaccagggggccttttggcaaggggcccccaaatttaaacggggagcgggacccaaattaagggatcaagaatgggttcaaaacaaatgggacctccaaaaggcccgaaacttggtcaggggcccaaaacttgcaaaaattggggctgggaaccatccgggggaaccactttaacccttacccaacccgttaagggtcaccatgggggcaccaccataaccttctttggccataaaaccaagctgggtggaggaccttcccccatttgggaagggcggaccccccccttggc

SEQ ID NO: 11218 - DNA, 441 bp, Oryza sativa
  Clone ID: uC-osflcyp091f02a1
aacgacgaccaccggatctttcttggcaatggtccagtgatccatccatccatccggtgactctctctccttcctacacatgcatacctccatgcgcgtcaatggcttcttcttcttcttcctcctccatctcttgtaccatttgtatctacctacctgtcgcctcctccatggctcgtccatatctcaacaccatcaaaaagctcaaaaacctaaaacctcaagaattctcttcctcctccggcatatttctccattgattcctcatgcaagctagcagctatacatctccatgccaagaaagaaaaattcgcccatttcaagctgcatgcatgcccatcgatcgttcgtcgctggatgttcctagcaagaaaaagctagtagcatcgatccatttcttgattcgttcttgtgttaattacagtggtctctcccatctcg

SEQ ID NO: 11219 - DNA, 422 bp, Oryza sativa
  Clone ID: uC-osflcyp091f03a1
aaaagctaaaattcgccccaacgagacggctagttcatccctgcatagtgttacaacagtgcatgtacatatgcatatcaggtgggtgctatataaatgacccacagaaaggagattgttggtctatgagattaatctgaagcctaaagtcacaatctgaaggctattttttcctgagcaaatggaactttctccaagctcacacaaccttaccttatgaaggggttatgcatgtctccagatataaaagaattatcatccaaagacaagcacatttaagtcctttaagcattgacaatctacactttttggcatcttgagctaaatcaaccaggaacagactcggaggtgatgtgcccaccatttgcaccgctggcattaaaaccagtcactggcatggttcgctgagcaaaatcaagcag

SEQ ID NO: 11220 - DNA, 419 bp, Oryza sativa
  Clone ID: uC-osflcyp091f04a1
gaagaaaaacaaatcaacctcagattacaattgcatcccgtgatgctgtcgctagtgtacacttaaaattacacagaatgacgtcgcctatcattctctccttccattagcctttcctctccagaacccaattcaatctgcaacgaagctcagggagatggtgaaccaaccatgcagggacgcacgcctaaacaaactgtgcatatacatccactgactagttctggccatcatcatcttcatcttcatcttcatctcgccaagaaatacgacaagaattgaaaagaggctattggcaatgcagctactatgatccactctcactttggttactgaatggcaacctgtctactcccctctcaatggcgtctctccacaaccgataccggataccaagcttgtcatatgatactggccag

SEQ ID NO: 11221 - DNA, 343 bp, Oryza sativa
  Clone ID: uC-osflcyp091f05a1
ggggaacctttttagggaaatttcaaaattacgggtaggcccaggggaacaaacccttaagcataccgttacaaatggcacttcccacctttttaaaaagggtcatttgaacccacaacttggtggtcccggtcccataagactaaaaagggggccttttttttttttttaaaaattttaaaaaaaaaaacttggcgggttaaaaaaaagcccggaaagccggattgttatttttaaaggacaagcgggggggaatttttaaattacttttgaaaaaaggatctgggactgttttgagcccctggggattaccttaaaagaagggcaagagtcccgcaaaagc

SEQ ID NO: 11222 - DNA, 337 bp, Oryza sativa
  Clone ID: uC-osflcyp091f07a1
cccacggacccaaaaggttcaaatggatgggaggggaaataaaaaaacccccgccccgaataaaatttaaaacccaccccaaaaagggaaccaaaaacaaactccacaaaataaaaccaaaaacttcgcttaatcaaaccaaaccagggggaaattgatttcccaaacaagccaggaacttaaaaaaggataaacaccacccccaccttttgctaatttaaggcttcatcaattcaaaaagattgttcttggaaaaagggaaagggaaccaaaacactattaggaggggtccattaatggaggaaaaacaaccggattgggggggccccccccaggg

SEQ ID NO: 11223 - DNA, 137 bp, Oryza sativa
  Clone ID: uC-osflcyp091f08a1
gtggacagacaaaacaaaacaaccggggcccgaaagaaattgccctaaccagagccaaaacaaaacactaggcccgctatgaaaaaaaacacctaaaaggttagcccacaaacgcagcccagggcgcgtgcctttaa

SEQ ID NO: 11224 - DNA, 345 bp, Oryza sativa
  Clone ID: uC-osflcyp091f09a1
ggaaggattggcccatttaatcccccaaatgggaaaaaaaaaaattggaattttttttggggagggaaaattccaaaacgacccaaaaatgggggcaggaaaaacataaaaacaaaccacggggtcctggttgggaaaaaaccacccgtttttgaaattaaaaggggggggggaatccctaaaagggggggggcccggttttaaaaagggaaggcaaaaatacccccccaagggggcaaaaaaatcctttggaccaaaaaaggaacctttccttattttacgggaaaggtgaaacaagcctgggccggccattggaacgtaaacactgaaaagaacccaaatttt

SEQ ID NO: 11225 - DNA, 419 bp, Oryza sativa
  Clone ID: uC-osflcyp091f10a1
aaaaatgttctcaaaacagagctgtgtgtggctacagtattcacacagaccacaaacagctcatttcaacttgtattgaaattgttgtgtatcagaggcatgctacccacaccatcttctgtctttacaagcagcaaaattatggagtagaaagaattcgagatctttacatacaagggtcgcattcttcctgtactcagaccgactagctggtaacttcacaaaccaggccgattttagatggcgagcattctgtcaagtatagtttgctatgtccacatggaaaagaatcacccagtgagaagatatgttacagtttagggtttctttgtctgtacttttttcaggtatttcttatgaagcttcaaagcaccagcacaagcttttttggcatctaaatttccatttacatcattcag

SEQ ID NO: 11226 - DNA, 254 bp, Oryza sativa
  Clone ID: uC-osflcyp091f11a1
aaaaaaaaaacaaaccaaaaaaaaaaaaaaaaaaaataaaaaaatggaatttttaaaaaagggtaaagggggtagaaaaaaaaaacccaaaaaaaaaagttataaaaaggggggggaaaaaaaaaaaatttaggggggttaaaacccaaattttttcccaaccccaaggaagccaaaaaaaaaccctttttataaaaaaaaaaaaacccacgagttgtaaaagaaaaaaaaattccaaaaaaaaggggggggat

SEQ ID NO: 11227 - DNA, 314 bp, Oryza sativa
  Clone ID: uC-osflcyp091f12a1
aaaaaaaaaaaaccggggtgataataattttaaaaaaaaaaaaggggggggaaggttttttaaaaaaaaagaggcgggcccccttttgggaaaaaaaaaaaaaaaatacccccaagggggcaaaaaaaaataaccccgcccttgggggtacaaaaaaaaaggggggccaaaatgggttttttttgggtttttgcccaaaaaaaaaaaacccggggttaaaccggggggggggggattaaaaaagccaaaaaaattggaaaatggaaaaaaaccccttgggggggggttaataaaagggggacccccactttgga

SEQ ID NO: 11228 - DNA, 418 bp, Oryza sativa
  Clone ID: uC-osflcyp091g01a1
ggagtaaatcaattcattaatctcagaaatttaatctagcgcatagccatcataatatacaggtcatggcaagaacatctgaaaaatggcatgtttatggccatagcgtacagtctcacaacataaaaaaaaaaagatcattcactgaaaacagagctgattttgcgacaataaattccacccacatggcccttgaagatgtcaatagcataatactttacagtatggtagctttttaaggatcttggggagaaaatgccgcctggggttgggaaatgttttcgctattaaaaggaaaacgcttcacttccgaaaagttcccttggtcaaacaaaccatacaaactaattctttggtggcaatgcttttcatgcctttttcttggcttcttgttcagttggtgatattgctcatcatc

SEQ ID NO: 11229 - DNA, 419 bp, Oryza sativa
  Clone ID: uC-osflcyp091g03a1
ggatagtaaattgacaactctcgcttaccattcacttcacctcaaaaagaaatcttacagagtagtacagaactgaactgaaatgatggtctagtctatacatttcataagcaatggcagttgcatggaagctgcagatgaaaaaaaaaaggtgtatggtagttttctttacatcaaatatacaaaatagactcaggataactaatgcttcattgcatttcccggtactacaattcgggctcaccgtctctgtggagaacagatggagtaggcgccttcattgtcctgtcgcccattgtcggcgaaccccccagagggctaggtccaggtgatctccgtggagctgatggactctccataatgaagatcgatggactagcagtgctgctcctgtatggcgaacctggatttgacctaaa

SEQ ID NO: 11230 - DNA, 389 bp, Oryza sativa
  Clone ID: uC-osflcyp091g04a1
agcaaaacaaaaatctcatttttatcaataatctggcacaaggacggccacaaaaggatacagtacactgagtgattctgatcaaatttgggcaaaaattatccttgtaattattatctggacccagcaggcaaaataatacattaacttggctgaaatgaaatacaaggtacagagatctatctttggacatgttttgatgcacagtacatcattccacatggatcactagcaggcctgtatcaccacaacagcattttgggggctgcttcgttctgtcagctgaggatgtatggtgcagtatagaagtacattgacttcaagaaaatacatgggctttgagccttgaatgttcagattatttccttcttttctcgttgaatttttcg

SEQ ID NO: 11231 - DNA, 414 bp, Oryza sativa
  Clone ID: uC-osflcyp091g05a1
gagcacaaaaacatagttaaattgtctaagagacccagttttggaaatagatgacaaacagtttgatgcaagatggtttttcacactgaacaaatatagatgtacctcaactgtaaaaatatgactctagtcccacctttccaatattagagaccagctagcaactgttctaaaggacacactcatcactgaaactgaagctaagttatttgagatggactgaggagatcaatgtgtaacttgatttcttcagacatgaccttaaaaactcaaagaattgttgaacaaatggtgaaggcggaagagttgaagaatttgtctatccatttgaaggaatcaaaagagaaggctgaaaagctgaaagaaaggagaaaacaaagatcatatagtgagcatatttttatttgcacctct

SEQ ID NO: 11232 - DNA, 338 bp, Oryza sativa
  Clone ID: uC-osflcyp091g06a1
ggggcccaaaatcgcaaaaaaattttttccccccccggaaattaccccccaattgggggcccggccaaaaaaaaaacatttttccaaaaagattttggcaaaggggggactaattacgggccacaaaaaggctttttaaaggggggaaaacgggccccaaaagtagaaggccgggggacatgaaaaagtttaaaaaaggggggggtttaaagcggtaagtttttttaaaaaacaaaggccccccggtagggggaacgcaagcccaaaaaaagggggggggcctgccccccaaaaaacctcaggaggaggtcaaggccgggtccccttaaggcaagggg

SEQ ID NO: 11233 - DNA, 353 bp, Oryza sativa
  Clone ID: uC-osflcyp091g07a1
aaaatgaccacaccagatcacacagggccggggcagaacctggaaacaaactcccacttccgggacagaatacacctctccttccagactacaacatccaaacacggggaccaaaagaacacctgcaagcatacgggacacgtacggccatacactggacggggtccacacacgcacactttcctgaaaagacgcgcatcggtcgtgaaccatagctagcttaaatgaaggggatggggacagacggcactacggaggaggaggcgcccacttgccggggaccaactgggaggagcaggccaaggcggctccggaggccggggctgctaggcgggccttgaggggcacgaggg

SEQ ID NO: 11234 - DNA, 140 bp, Oryza sativa
  Clone ID: uC-osflcyp091g08a1
attatatattttttttttttttttttttttattatttttcaacataatttaaattatataccatactatacagtaaacatagtataaacattggcatagagagtacagatgaaagcaagcttgaaaaattataagcatta

SEQ ID NO: 11235 - DNA, 415 bp, Oryza sativa
  Clone ID: uC-osflcyp091g09a1
gtccgaataaattatgatttattgcttggggacgctatagaaaacatgtacgggtaaattaacaaaactttggggattcaagaatgcacagataggtctacatatacacgggacagttttcgtaccgcaaaatggctcgatccaaaaaaaaaaaaaacattttcatgttgaacttctgtatatgcacgcaaaagaatcaattaccagatcaaaagtctgagggtcggtattactcaataacaatgttcctcgccttaatgtcctccttcacaacaagcttcccaccttcgtccctggtgaaaagcttatgcatcagctcatcccaactggttcttcctgcagattttgcttctgaggtggcttcactatgagtatcagagggcggcgtagggctagaaccctcctggatctccac

SEQ ID NO: 11236 - DNA, 389 bp, Oryza sativa
  Clone ID: uC-osflcyp091g11a1
cttaaaactttcagcacttggagtttctgttggctttgctttcttctccttctcaccatttcttttcctctgtggtaggtattctactggaagtctctctttgccttgaagcctgatgatatctttcgttgtagctgtttctccaggaaaaactttagggagcctatttttaggatttcctggtgtttgaatctttccaggatggttgtcaagatttgagtatgtggaaacaatagtctcacagtcccaaacttcagactcatcactgctttctgaaacaagtacaacttcttcctcttcagcagtttcatttaaatacctttcagcatattcagcacatttttggattacattagcagattcatccacctcctctgctgcgcttgaat

SEQ ID NO: 11237 - DNA, 411 bp, Oryza sativa
  Clone ID: uC-osflcyp091g12a1
gacaactgagaaaattttatatccataaagattcatccagatatgcacaaaatgatcatttcttgagctagatatcctcaccttacagttgatttaacatggatacagcacatgaattctcaagagtgactattcacttgattattacaaggatatagtgctctcaatactagtcttctttacagtgaactcagggccggatcaggtagtatattgtagatacagctcatagaagggaagcagccatgtcaaacagcacaaggcccaggggtcatcttctgcctcctctcatctaagtctagggtatgaacaaaagccggcaagcaacagcgaccggtgtaccacgccttctccttgcgattcttcgcttctctgatcggcgtcggttctgtgctacacgtggagctggac

SEQ ID NO: 11238 - DNA, 332 bp, Oryza sativa
  Clone ID: uC-osflcyp091h01a1
agcacttagaacagatataatttcatcaaagaaaaccaatacaacatataacaatattacaataataataaaaaaaatctccttttcccaaaaaaataaaataaaataaaaatctcccatttggggccacatgccatctctcctatatgggcctcatttcttgatccgaaataattcctcataaaccatactaatatttttccccttttccccatacaccattgtaataattatggcaatggattttctacgtaggcttaatgatcaacccatcataatcttcgctagtgtcaacgggttattcaaagaagactggagaaaaagaaatggtg

SEQ ID NO: 11239 - DNA, 424 bp, Oryza sativa
  Clone ID: uC-osflcyp091h02a1
cctactggaagtgatccacaataataccattacacacaacttctgataacatgtcatcgttggaagttggacctgctgtgaattgaacaaacgcaatttgaaatgctgaacaggactacgacaattattgtcacaactaatatgacacggtcccatcaaaagactaatacaaagatatggccattttttggatagcgaaaactaactgaacagcgagtccactttgaaatcagcaaatgtgcccacagaagcataaaaagagcgacctagtagagttcttcctccttgtgggtgtgaatgacgcaatccgccttagggtacgaaatgcatgtcagaacgtatccctcgcccatctggttctcgtcgaggaaggatccttccgactgatcaacttctcccgatgacatcttacccgcacatgtgg

SEQ ID NO: 11240 - DNA, 215 bp, Oryza sativa
  Clone ID: uC-osflcyp091h04a1
gggaaaaaaaatttagcccccaaacaggcaacccggggggggggctttataactaaaggaccctaaaaagggggaaacttttaagggcaaagggttttgccagggaaatcgggctaaagggggtcccaaccatattacatttgggggcacccccaccctttgaaggaaaaacggcataaacccccccggagctttgttgtagcagggccggcccc

SEQ ID NO: 11241 - DNA, 178 bp, Oryza sativa
  Clone ID: uC-osflcyp091h05a1
ataattaaaatatttttaaaaaaaaaaattaataaaataaattattataaaataattaataaaaaaaaaaaaaataaaaatttaaaaaaaaataaaaaaaaaaaaaaaaaaaattaacaaaaaaaataaatacaaaaaaaaagatacaaaaaaaaaaaaatttatgaaaaaaaataaa

SEQ ID NO: 11242 - DNA, 418 bp, Oryza sativa
  Clone ID: uC-osflcyp091h07a1
caaatatcttccttcgtaatttgacagccgttccagttacaccacaaattttgctatagtgaccctgtttatttcacttcccatgggaacaaatcaaattgtctcgaaactactcaaatctcaccaaaattcagattcaagcctactacccaaaaattgacggccagtgaccttcccggagaacaagtaactgtaacttagtcatcagtacccgtagccggagttgtccatcgggttggtgacgggcgcaggctcaggctccttgatctcgacgacgacgacatccgatgtgaggaatgtcttggccaccgacgcagcatgcttaagacaacatctcaccaccttagtggggtcaatgataccagcagccatcaaatcctcgtactgtccagttgcagcattgtaaccaaacttgaag

SEQ ID NO: 11243 - DNA, 409 bp, Oryza sativa
  Clone ID: uC-osflcyp091h08a1
agcggtaatatatattcacatatattttcacccaaaaaatatatccacagtaatctcagcacactatattttttggtcatttatcccacacacattcatgtaaggcataaaccctacacgtgctctacattgaagttctcaaattttcatccatggtagtgcagcaacatggacaaaggaaacaaacaaagccccttatcctttagctctccacatggagttacactcttctgactttgatcaacaaacctcaccccctctaccattgcatctgcatagtccatcccctctcttccacgatcatctccaatcccaacttccttggttaggtccctggtattgcacctccttttagggctcaattccagctgtgtcaaagcactgaccttagggctattaactggagagc

SEQ ID NO: 11244 - DNA, 233 bp, Oryza sativa
  Clone ID: uC-osflcyp091h09a1
atagacacgtgtgtttccacctaaaatttatttattcagtaatttgatcaaagtatatgtgacgggctttattcttgcgaccaaaaacgcaaggcgtgcaaccctacacgtgcacatacatctgagagttgtttaaactacaaatctcaacggttggtgacacgaaacgatgtgacagaatggatggcaagactaagagctccgattatatctgtatagactttggccacatg

SEQ ID NO: 11245 - DNA, 384 bp, Oryza sativa
  Clone ID: uC-osflcyp091h10a1
cggtaaaaacaacttaaatttttgtgatagtagagatatatagaagtcattactaactcaaataaaaatatactgctatatgaattatattgttgaaaagctcccctagagcaccaaacgaagtttaatccaatcgaacgtgattgcaagcttcagtgggatcgatcgatcatgcatgacatctcgcgacatcctgctaatccctgcaatcctgttctttctcacatccacgcgtgtacgtgtttgcgggaccgccggggtggaggagctttggtgttccagggatgtcgtcgtggttcatggtcgtgtagccgatttcattgtcggcggagacgccgacatcctcgacggcggtgaggacgaggagagccaccagggacaggc

SEQ ID NO: 11246 - DNA, 300 bp, Oryza sativa
  Clone ID: uC-osflcyp091h11a1
ataaacccaccaataagagataacaccataaaaaaaaaccgaaaagcaccctgacaaatgaataaaattacatgtgcatccacccaaaaaaaaagaaattaaaaggggcattataagagaagaaaaaaaaaaaaaaaaagctttaatgtcaaaaaccatattgccgggaaaactgacctcaaggggggtcacgtttttgccgattctgggaaagatttgggccaacccctgtcttgggggggtaacctttttcggggaaaccccctccttgggggggagggactgaacctaggaattggg

SEQ ID NO: 11247 - DNA, 317 bp, Oryza sativa
  Clone ID: uC-osflcyp091h12a1
agaaaagagtcaaagctttttataatctgaagcggagggtgtaaccagcccaagcaattctcccaaagaaaacattcacccaagtaccccgcagcaacgttaacctttagcacagaaccgggttcgtacttgtttacaagacgtcataggtcttaagatcatcaaaatgaactgagccccactaaaaaatgggtagagaaaagggctgcaaaaagaagcgatacaagacaacatacgggggatgcacattgagatttcacttcagagctttttattgggctgaggaggtgacccatttcgcccgggtgcctgccatt

SEQ ID NO: 11248 - DNA, 95 bp, Oryza sativa
  Clone ID: uC-osflcyp092a05b1
tttctatgttgtgcaggaaagcgctcccacgaggagggaagcttagaagaatcatcgtcttcagtaagagtagcaggcgagaccttgcgcgaaga

SEQ ID NO: 11249 - DNA, 71 bp, Oryza sativa
  Clone ID: uC-osflcyp092a06b1
actgatactacgacttccaagcaaagccaaggtgggcacttattcacccgtagagctagctagccatggct

SEQ ID NO: 11250 - DNA, 183 bp, Oryza sativa
  Clone ID: uC-osflcyp092b01b1
acatcgtctcacccacctctggagatccgatcatccatgcatggctgctattcccctgcgcctcctcgacaatggagccaatgctgtacctttcatgcgtggtagccgccacccgcgaggacgacaagccgacgccgtgtataggccgccttgatcatcgtactttttatgccaaagcagttc

SEQ ID NO: 11251 - DNA, 396 bp, Oryza sativa
  Clone ID: uC-osflcyp092b08b1
tcggtacaagtgagcatgggcgcgaggcagcatttgcagctgtagttcttggagataacgccctcatggaaaaagcatggcaagacacaggaatgttggccgaggctgttttgcattctcaagctcatggtcgtctattattaatgaacttattcatagattgtaactagatacttcagctgtagctgattcatacttccctctgttctttttgtatgttttattctactatttttttcctctcttctatttatcctataattattattctttatgtattattctttttattttctccatatttttctatttattttacttttaaacatcttattttattctttatttcattattcatttcttaattattctttatatctttcattttacaatttt

SEQ ID NO: 11252 - DNA, 73 bp, Oryza sativa
  Clone ID: uC-osflcyp092b09b1
tcggtgtgagagagagagggagggaggcaagacgtgtattcatttggtagggagccacacagtcttcggaaag

SEQ ID NO: 11253 - DNA, 434 bp, Oryza sativa
  unsure (1)..(434): unsure at all n locations
  Clone ID: uC-osflcyp092c01b1
tngttgaccacggcaatcagtccaaggacagggaggagcaggctgagttcaagaagatgtacggtctcattgaccagtacaagttgaaggggcatatccgctggatctcagctcagttgaaccgtgttcgtaacggggtgttgatccgttacatttttgatacctattttgttttctttcaacccctttttctttaatttttatatttttctttttatctttccctttattatctttttttccttccatttttctttctttttcttacctcttattttttcttatttttttatctttcttttctttcttcattttatctcttttattttcatttcttttatattattttattttctactattttatatatttttcttttctaactttatcttctttttctctttcctatttatatatttttactatatcttttc

SEQ ID NO: 11254 - DNA, 351 bp, Oryza sativa
  Clone ID: uC-osflcyp092c03b1
tttcttcatatccaagaagttgttctctcattttattcagatttcatctgctgccatacatatcaaagatataatgttgtcagcagcacctacaaaaagacaactacttcaggacatgatccgagcttcagtcactcagggtcagacaatagtgcctgggcatatcagcgcaaattcagagcagaatgctcagggtggctttagtcaagaacctgggctcaatgccacagatgcagatgaagagaagaatgaaaaacaagttagtgatgatgattgggatgatgactgggataatttttagcccctcccgcacattgttcctacaatgcgttttatctttctacagtttgt

SEQ ID NO: 11255 - DNA, 470 bp, Oryza sativa
  Clone ID: uC-osflcyp092c11b1
aaaatcacagaggatattagaaaatatgctgatgaacatggttacgggacagtggaggaagcggtgatacaaggaatgaatgctatgagtgctgagttttcagctgcaaggaaaacagtcagtggggagcaacatggtgaagctggaggggagatatatgttccagaaagctatacagctcgcaaataagatcgtcttggtgtccatctactccgggtggagcgtttatcagcagcactcctcaccatcctatgttaggaggtggggtgcctgtattctcaacgatctgaaggccttttggcctggattgttgtgaattgggctgagaaagtccctttgaacctgaacaggataatgcctgtgaagggagtgtgcatttctacttttatggtttcagggcactttcattaaaacccttttttggcggtaggacgagctatccatattgtccttctataaatctttttttt

SEQ ID NO: 11256 - DNA, 66 bp, Oryza sativa
  Clone ID: uC-osflcyp092d07b1
tactgacctagagaaggagatgaaccgccagtttattctttgctggacatgccgcacagatgaagc

SEQ ID NO: 11257 - DNA, 162 bp, Oryza sativa
  unsure (1)..(162): unsure at all n locations
  Clone ID: uC-osflcyp092e02b1
nctggagctcaatcagcaacaacatctatctccttcttgcttagttaagtccttcgccctcccaagaagaagaagatgtcttgctgcggcggcaactgcggctgcggcagcggctgccagtgcggcggcggttgcggcggatgcaagatgttccctgatgtg

SEQ ID NO: 11258 - DNA, 81 bp, Oryza sativa
  Clone ID: uC-osflcyp092e07b1
tacagacctagagaaggagaagatctgcgggggtatttttggtcacccacgccatacaactgaagaaaagccaatagtcag

SEQ ID NO: 11259 - DNA, 114 bp, Oryza sativa
  Clone ID: uC-osflcyp092e08b1
tactgatatagaaaaggagatgaacttcgagtgtatttatgggtaattacgtagaacaaatgatggaaagtaaagggctagctagttaatcatattgctttcattgttaatata

SEQ ID NO: 11260 - DNA, 59 bp, Oryza sativa
  Clone ID: uC-osflcyp092e09b1
taatgatctagagaaggtattgatcttcgtttttattttttgtgaaacactccgcacag

SEQ ID NO: 11261 - DNA, 280 bp, Oryza sativa
  Clone ID: uC-osflcyp092e10b1
acctgaaggatcaaaaaaacttcaaggactgcaagtatgtacttgatgaataatgaaggtcaactaccacaagaacaattaccattcttatatatatatcatattacaattatatcattatttcattatttatatttattatattattaataaatttttttaatttttttaatttattatattttatattataatttatacaattacttttatatatatataaatataaatttaattattaattataaaaatttaaatatttctaataatactaatattt

SEQ ID NO: 11262 - DNA, 494 bp, Oryza sativa
  Clone ID: uC-osflcyp092f01b1
tttgtcccaccatctctctcctcgcctagggtttcacgctctccgatcccgcggcggcggcggcgagaagcttccactcgcctcggcggcggcgccggccagaaagatggctggtggttttcgagtactgcatcttgtcaggccctttctggctttcctgccagaagtacagagtgctgataggaaaataccattcagagaaaaagtgatctataccgttatctctctcttcattttcctggtgtgcagtcagctcccactctatggaattcattcaactactggagcagatcctttctactggatgcgtgttattcttgcatcaaaccgtggcactgttatggagctgggtattaccccaattgtgacatctggaatggtaatgcaacttctagtgggatcaaagatatttgaaggttgcaacagtgtgagagaaggccggcctctttgaattggccccaaaagctgccgggttttttgattgtattggggaa

SEQ ID NO: 11263 - DNA, 224 bp, Oryza sativa
  Clone ID: uC-osflcyp092f02b1
tcctgccgccgcagaagcgcagaccatcaccggatctttccgcgcgaagacgagcacgccttgtgaatggtgggagcccgcacgacctcccccgcctccccgccgcagccggagagggcctccttccgcagcttcggttgctgcatgcagggctggcaccaccgctgcataggcctcgacccgtgaacgcctcgttgccggcgacgagcgcgctacgggcgcat

SEQ ID NO: 11264 - DNA, 126 bp, Oryza sativa
  Clone ID: uC-osflcyp092f03b1
cctacccgatcttcctggtgcccggggcgagctgcagcgacctggaggcgcggctcaccgaggcgtaccggccgtcgacggcgcactgcggcgcgatgaaggggaagggatggtttgtttttattt

SEQ ID NO: 11265 - DNA, 110 bp, Oryza sativa
  Clone ID: uC-osflcyp092f07b1
ttcgtaagacctagagaaggagaaaaacatcgagtatattttttgtgagtcacgccgcacagatgatggaatggcaaaggccactcagtcttcgatgtgggtagctgagt

SEQ ID NO: 11266 - DNA, 353 bp, Oryza sativa
  Clone ID: uC-osflcyp092f11b1
tcgttcgtcttctctctctcgcaggactcgatcgcgatggcggcggaggtggcgaaggcggcggtggtgccggagtcggtgctgaagaagcggaagcgggaggagcagtgggcggcggacaggaaggagaaggcgctcaccgagaagaagaaggccgtcgagagccgcaagctcatcttcgcccgcgccaagaagtacgcccaggagtacgacgcgcaggagaaggagcttgtgcagctcaagcgtgaggctcggatgaagggtgggttctacgtcagccctgaggccaaacttctgtttgtggtccggatccgtggtatcaatgccatggcaccccaaggacagggaagatc

SEQ ID NO: 11267 - DNA, 341 bp, Oryza sativa
  Clone ID: uC-osflcyp092g03b1
tctgtatgctcttgccaaatacacccaaggtttcagtggtgctgatattacagaaatctgccagcgtgcatgcaaatacgccatcagagagaacattgaaaaggacatcgagatggagaagcggcgggtacaacaagtccggcaccgacgacgactacgacagcggctacaacaacaggtcaggggctaacgagaagtacggccgcaacaagtccggcgacgacgagtacagcggcggcggcggcgccgaagccgacgaggagtacgtcgacgggttgtctgcctgggacgacccggagaagtacaggaaggaggagaaggagcacaagaacaaggtgcgc

SEQ ID NO: 11268 - DNA, 118 bp, Oryza sativa
  Clone ID: uC-osflcyp092g06b1
gatattgaagctccagtgctgagaaggggaacatgctttgagtaagtgaggagaacagatttaggagtgaattcaccaattgcactaacctcatgagcatttaatatttcagaggtta

SEQ ID NO: 11269 - DNA, 81 bp, Oryza sativa
  Clone ID: uC-osflcyp092g07b1
taatggccaagagaaggcgcaattcttccagtccatatttagagagtcactgcgagccgctgaagcaaggacagatggaag

SEQ ID NO: 11270 - DNA, 122 bp, Oryza sativa
  Clone ID: uC-osflcyp092g08b1
taataatcgagaaaacgacatctacttcctctatatcttataagagagagccctcacataatataatacaatttatatatataatattattaaacatattcttaataaataattaaatttta

SEQ ID NO: 11271 - DNA, 171 bp, Oryza sativa
  Clone ID: uC-osflcyp092g09b1
tcggtacaagcttggaaacgagttgatctgctgcggcacgtattgctactgaccaggtacagctgacgtagctaaagaggccatggcgctggtaatgatggtaggagaacgacgccaccggagggaagaaaggaggtaataaacgtttactgacttttatttttaattact

SEQ ID NO: 11272 - DNA, 73 bp, Oryza sativa
  Clone ID: uC-osflcyp092g10b1
ttggtggaggtcactgatggagcaatgctggtcgtcggaactgttagaaagaccgagcttcacggaggttgac

SEQ ID NO: 11273 - DNA, 127 bp, Oryza sativa
  Clone ID: uC-osflcyp092g11b1
tgttcgctccatctctctccaccacacaacggtggtggcttggtggaggcggaccggttacagaaagggaggccgcaacagtgttagtttattatattttttttatttttaaatatatttttattta

SEQ ID NO: 11274 - DNA, 453 bp, Oryza sativa
  Clone ID: uC-osflcyp092h01b1
ctcatttcgcacttagagcacttgctcgatctggcatgaagattggtcgtattgaggatgttactccagtgccgactgatagcacacgcagaaagggtggtagaaggggtaggacgctgaaatatatgtgcatgatccgagcgcacccaggtgatgtttatacagtgaccggtattgcattttgactgttttgttcgtgagattcattatttttggatcatttaaatctcttatttgtactttttcatcttcatcaaatctttgttttaattcttttatttctccttaattttttatatctcttaatacttttttcttccatatcttttaattcttttttatcaatgattttttttttttttttattttttccttctctatcttatcttatcttttctttttaatttaaatatttattaatctatataataatttatctaatattataatttt

SEQ ID NO: 11275 - DNA, 147 bp, Oryza sativa
  Clone ID: uC-osflcyp092h02b1
tgataagaatgcacacaaaactcgctaatctgatagggttagtttaacctggtcgaagggttcagcccgcagaaaggtggtagaacacagtgttcgaatttgacgattctgcttgatttaagtattctagcaaaccgacaaggtaaa

SEQ ID NO: 11276 - DNA, 307 bp, Oryza sativa
  unsure (1)..(307): unsure at all n locations
  Clone ID: uC-osflcyp092h03b1
tnnttaaaatacatccattgttggtaaatctgaaattgagagaaaactcgctgaaaatgaccagaaggcagaaaggtggttgaacaaagtatcccaacttgatgattctgctgatttaagtagtctagcagccgacgaggattttcctgagatcatgccgattaggaagggggtcaattaatttgtggttagcacacgcatgataccattggagagaagactggtatatgcacagtacagtagttacaatagcccccaagatggattatctgcatccaagattatgtaaacattttacaggattctt

SEQ ID NO: 11277 - DNA, 163 bp, Oryza sativa
  unsure (1)..(163): unsure at all n locations
  Clone ID: uC-osflcyp092h07b1
ttatacgccagccacacctctctccatcctctcggtctctctctgtctcctcttctctctcccccgacggagaggagagaaggcgaggagccgggggagatgggatcggactcgncgccctagaaatggggcctcagggagcagcgcgaagcctacctccggt

SEQ ID NO: 11278 - DNA, 121 bp, Oryza sativa
  Clone ID: uC-osflcyp092h09b1
taaataaaaaaaaaaaaaaaaaaaaaaaaaagaagagagatttttaaaaaaattaatttgttcagaaaaaaaataaaatgaggggtggatgtaatgaaatggggtggtttttttgggggta

SEQ ID NO: 11279 - DNA, 203 bp, Oryza sativa
  Clone ID: uC-osflcyp093a01b1
gtcctaccctttttcatcagaagactgttcagggaactactggatccccagaggacccttccacttgtcttcagggcgaggatggtcatgatggtagccctgagtgcaatttatgtcctgagccccattgacaattctttcttgaaaacgtgctggggctgtttgtaattttcgatgtatcttctttttctttttatctgtat

SEQ ID NO: 11280 - DNA, 138 bp, Oryza sativa
  Clone ID: uC-osflcyp093a02b1
gttctagtgtgttaaagatactttagatgcccagctgcctgttgagaatccgttcctgggtaattcagtatgttctttagatggtcatcagagtgaccatgttgttactaatatggatagcatgtggggtcctgatga

SEQ ID NO: 11281 - DNA, 538 bp, Oryza sativa
  Clone ID: uC-osflcyp093a03b1
tgtaatatgttcgctaataagcatcgatcgaaggcgaggtcagttagccagccggtgcgccgggggagctggggaagattttatttttcacttctttatttttttttttctattttccttttttttttttattttttttttttttcattttttttttttttttttttttttattttttatttattttattttttttattttttttttttattatttttttttttttatatttatttttttactttctttattttatttatttttttttttaatatttttttattttcttttttctttttcttttttttttttttattttctatctttattattaactttcttttatttttatttatttttctattttctatttattattttattttttttcattttcttttttattttttattattttttttatttttatttattacttttttctttttattatttatttattatttttattttcttatttttttttatttttattatttttttttttttttttaatttttattttctttttattctt

SEQ ID NO: 11282 - DNA, 517 bp, Oryza sativa
  Clone ID: uC-osflcyp093a05b1
cgtgatagtgagcctagaaactgcggcggttttgggcgcgatttggtttccaaccacctcgattggagtgcgccggcggtgatcgagctggtccttggcctttggttcatgtttttttacttattcttatttttattttttaatctatttttatctttattatttttaatttattttttttcttttccaatttcttttatacttttttttttattattatttataattctctttttctttttcttttatttttttttatattattatttaattattataaattattttatcttaattatttttactttcctcattctttttcttttttttctatttttctatcttttcatattctatttttcttttttttattatttctttatttatttctctatcttttatcttcctttatcttattttttattattctttattatttataaaattactattattttttatattatcctttatttctcctatttctactctatatcctatatttaattattttttt

SEQ ID NO: 11283 - DNA, 276 bp, Oryza sativa
  Clone ID: uC-osflcyp093a06b1
ctgaatagtcatgggagttttgattttctccaagcaggtcctagagtagttgaggctaacttgtataacaatggtacgtttagtcaagttttagaccaaagatgcagttccacttctgggatggtagggtataaaaccatctgtttcatattaattttcttcattcttctcaattcattgtgaaaatggagaattccacatgacaatcatttaagactctgatgtccattcttttggttttgatgtccaagtttcgagcggtttgaaatcaaccta

SEQ ID NO: 11284 - DNA, 426 bp, Oryza sativa
  Clone ID: uC-osflcyp093a08b1
ttggttacttccatctcattctcctaattgtcatcactagcttctagctagcttaattaattaattagccatggcggaggagaagcaccaccaccacctgttccaccacaagaaggacgacgagccggccaccggagtagactcctacggcgagggcgtctacacgtcggagacggtgaccaccgaggtggtcgccggcggccaggacgagtacgagaggtacaagaaggaggagaagcagcacaagcacaagcagcacctcggtgaggccggcgccctcgccgtcggcgccttcgtcctgtatgagaagcacgaggcgaagaaggacccggagaacgcgcacaggcacaagatcacgggggagattgcggtcacggcagtagttatccgccggctgctacctctttcacgagcaccactagaaga

SEQ ID NO: 11285 - DNA, 289 bp, Oryza sativa
  Clone ID: uC-osflcyp093a10b1
tttgttgtttagtcattggcggaccttatggtgatgctggtctcactggccggaagactcatcattgacacttatggtggctggggagctcacggtggtggtgccttctctggcaaggacccaaccaaggttgaccgtatcggagcatacgatcgcatggcaagctgccaagagcattgttgctagtggccttgctcgccgttgcattgaccaagtctcataccccatcggggtcccacagccactgtcctgattcttctacacatacagtactggcaggattcctgac

SEQ ID NO: 11286 - DNA, 51 bp, Oryza sativa
  Clone ID: uC-osflcyp093b04b1
gtcttaccctcgcgggccggagagtgagagatcgacgaatgccagcatata

SEQ ID NO: 11287 - DNA, 478 bp, Oryza sativa
  Clone ID: uC-osflcyp093b05b1
cttgtctgtaagctagctaactaactacgtggctatggcccccaccgtgatggcctcctcggtcacctccgtggctccattccaagggctcaagtccaccgctctccttcccgttagtcgtcgttccatcaacttgggctttggcaacttctgtaatcggcggttggatcatgtccctgcttgttgagttcttttgaggtcttcttgtatatcttgtctttttcgttttctttccttttctccctttttgtttcttttttcctttctcttctcttctttttttgtctatttattatctatctccctttttcttctctatctcttattctttctctttttttcttttcttttcttcttttatttttttttttactatttatcttctttttccttttattttttttttactttttattttatcttcctttttttttctttttctttccccttttttcttattcttccttttttatcattt

SEQ ID NO: 11288 - DNA, 341 bp, Oryza sativa
  Clone ID: uC-osflcyp093b07b1
tcgatgaaggacagggctatctcgaacgacgaggacgatatcaggaaagaatatatgggcaataagagagaatggctatcaggttactggactggattcaagtcaccagaacagatatcacgaatacgaactcctggaggcaagcctgagactataaaacctgctggagaagcgatgactactttggctgaaagtgacaagcctgacaggtctgtcaaaaagacacttgagctgcgtagagagaagattgagacaggcgaacgcattgattgggctgttggaggagtacttgcttatgcagctctcataattgagggaaaccatggttggttatgtggtca

SEQ ID NO: 11289 - DNA, 56 bp, Oryza sativa
  Clone ID: uC-osflcyp093b09b1
ttatttataaaattaaataaaaaatgaacaatgaaaaaaaaacattaataatggat

SEQ ID NO: 11290 - DNA, 183 bp, Oryza sativa
  Clone ID: uC-osflcyp093b11b1
tctgtccaaacccgttttcatggactatgccatgcagcagatgccgtggactctacagctgcacatagtcccaatcttccggatcattctgtgagagttcaacgtgtttgcatatactagtcttctatggattttatcttcatgaagtggtcatacactctcacccattcaaccctaaatttc

SEQ ID NO: 11291 - DNA, 366 bp, Oryza sativa
  Clone ID: uC-osflcyp093b12b1
caagcacgaaacaagaaacattacaccaaaaaactagctagctagccaatggcctacatgtcctccttccgacttgccgtggcggtggctgcactattggtcattggctcacatgccacagagctcacctttaaggttgctgagggcttctagcgccactagtctagagctcgtcaccaacgtcgccatctctgaggtggaggtcaaggagaaaggcggcaaggactgggtggggcctaaggagtcggcctctaacacctggacactcaaaagagatgcaccactcaagggcccccttttccgtcgttttcttgtcagaacggtggctacccgcgccgtcattatgtcattcctttaagctttacc

SEQ ID NO: 11292 - DNA, 162 bp, Oryza sativa
  Clone ID: uC-osflcyp093c01b1
cttggccgaaccccccctcgacacgccgtcgccgccgaggggagagagagagaggccgccggccgccgctaccactgacccccccccctcgccggagcgccccgttgtcgggtatgatcgatggcgttcatgaggattcctgtaaggagttgaatgaccttc

SEQ ID NO: 11293 - DNA, 316 bp, Oryza sativa
  Clone ID: uC-osflcyp093c02b1
atcacttcctagcaattaagatcatggtgcagcgcacttcatccgattcggcggcgtcggctgaggccatggtcatggacctgagtcccaagcgtcccgccaagtcctacggcggcgaaggcggctcgtactttgattggtccccctccgagctgcccatgctccgcgccgcctccattggcgccgccaaactctcgcttgccgccggaggcctcgccctccccttctactccgatcctgctaaggtggcctacgttcttcagtgtaagggcacctgcttcgttctccttccctagacccccttcttgaagattct

SEQ ID NO: 11294 - DNA, 161 bp, Oryza sativa
  Clone ID: uC-osflcyp093c05b1
ttcgatgagagcgtcctcgtgcggggcatgctcgccgcgatccgtcgcgagcaggtctaggtggaggactctttttttttttactaatttttttttatttcatgttatacttaattttatacttatattttatacttttattataatttatattttttatt

SEQ ID NO: 11295 - DNA, 270 bp, Oryza sativa
  Clone ID: uC-osflcyp093c10b1
tcgtttgacgcgtggggtttcatcccagccgccggcgccgcagcctcctcctctcgtcttctccttcgagttgttagctacctccttattcaaccatgggtaaggagaagacgcacatcaacattgtggtcattggccacgtcgactccggcaagtcgaccaccacggtccatctgatctacaagcttggaggtatcgacaagcgtgtgattgagaggttcagagatggaagccgttgttatttaacaagaggtcctttaagaactcctt

SEQ ID NO: 11296 - DNA, 240 bp, Oryza sativa
  Clone ID: uC-osflcyp093d02b1
ttcgttcaaccacatcccgctgtctcccgatacggttatcgaggtgaatggtcagcggagtagcatgcacaccgagttcatctcttcatccctcaggagggacagggttgacaaaatgaccgaggaggctacattcgtgagcacagatagtataaggatgacagggagtgtcaggtttcaggtgtttgatttgaacgatctgctgctcacaggcgacctaaagttgtgcagtgccaattg

SEQ ID NO: 11297 - DNA, 61 bp, Oryza sativa
  Clone ID: uC-osflcyp093d05b1
ggaaacaactcatgaattcctagaaacccatcagcgtgtggtttttcttaatgtttaattt

SEQ ID NO: 11298 - DNA, 353 bp, Oryza sativa
  Clone ID: uC-osflcyp093d07b1
tcggttagattagattgatctaacaggactcatggtcaagcgcacctcgcccctttccgtgcgtgagacgcaccgtacacacacctcctctcctctcttttgctgcccctgccctcccctctccataattctcttttctatttgtaagaaatattttttatcaagaaatcaacagtttgatgagttcaaaataattactatagtttttaatatattttgaaagcaaacaatcagatcaagaaaattctcttatgcacctacccactgctgtgtcaatataagcgatgcatgcaacttccatctcttcgattgatctctcacgccttaccgtgcttgttactatgattccatgt

SEQ ID NO: 11299 - DNA, 131 bp, Oryza sativa
  Clone ID: uC-osflcyp093d09b1
tttttatcgaatagaaattgccaatttgttcgatgatttccaactcttgaagaatatgatcgataatttgccacaatttatgtcttatctgtctagcgacttgctactttagatcctttagctaaacaatg

SEQ ID NO: 11300 - DNA, 155 bp, Oryza sativa
  Clone ID: uC-osflcyp093d12b1
tttttaattcaataattacacacaaaaaaaataaggcattataaggcagttgcagctgctagctgctgttgttgttggttgtatcattaattcttttttttttttttattattatttttttcttttttatctatttcattctttttttattttca

SEQ ID NO: 11301 - DNA, 427 bp, Oryza sativa
  Clone ID: uC-osflcyp093e03b1
tagatcttctcgctcatgtccagggatgaggcccggcacgctgggttcttgaacaaggggctgtctgatttcaacttggcactggacctcgggttcttgaccaaggcttggaagtacaccttcttcaagcccaagttcatcttctacgcgacctacctgtcggagaagattgggtactggaggtacatcaccatcttcaggcacctcaaggcgaacccggagtaccaggtgtaccccatcttcaagtactttgagaactggtgccaggatgagaaccgtcacggtgatttcttcttcgcgctgctcaaggcgcagccgcagttccttaacgactggaaggccaagctttggtcacggttcttctgcctttcggtgtatgtgtccatgtacccaaattattgcctatgtactccattctatgaaggga

SEQ ID NO: 11302 - DNA, 542 bp, Oryza sativa
  Clone ID: uC-osflcyp093e06b1
tgttattaaaacaaaacacaccaagccaaataaaagcgacaatgggatcgctcaccaccaacatcgtcctcgccgtcgccgtggtggcagcgctggtcggcggcgggtcgtgcggcccgcccaaggtgccacccggcccgaacatcacgaccaactacaacgccccgtggctccccgccagggccacctggtacggccagccctacggctccggctccaccgacaatggtggcgcgtgcgggatcaagaacgtcaacctgcctccctacaacggcatgatctcctgcggcaacgtcccaatcttcaaggacggcaggggatgcggctcatgctacgaggtgaagtgtgagcagccggcggcgtgctcgaagcagccggtgacggtgttcatcacggacatgaactacgagcccatctcggggtaccacttcgacttcttcggcaaggcgttctgcgccatggctcgcccggggaaggagaccgagcttcgaagggcggcattatcgacatgcagttaggagggtgcgctgtagtccccggtg

SEQ ID NO: 11303 - DNA, 124 bp, Oryza sativa
  Clone ID: uC-osflcyp093e10b1
tttaccttctcctgcggctcttcttcagcatcgaatcctctcttctcctcgtgcccaccaccaccaccgtagcaatggcgggcaacgggccgatcaacaaggaggacccgctcaactggggcgc

SEQ ID NO: 11304 - DNA, 351 bp, Oryza sativa
  Clone ID: uC-osflcyp093f06b1
gtactatgccaccacaggctacgcaaaattctctcccttccttctccaccacctccactccgacgatcctcctcctgatcctgtgccggccggcgatggcgtaccggttgctggagctcacgctggtctccgcgagcgacctcaagaaggtcactctcttctcgcgcttgcatgtctacgccgtcgcctccatcttcgggagcaacgttcccatgcccatgcacggcacccacgccgaccgcaacggcggtagctaccccgtgtggaacaccgtgctccactttcctgtaccagcccgctttatcattttcggtcttgttcttcacgtccagtttcttgcccggttctctt

SEQ ID NO: 11305 - DNA, 454 bp, Oryza sativa
  Clone ID: uC-osflcyp093f07b1
tcgttcggcgagttggcggcgtagagggaacgagaagaggcgagttcttgacccttccaccgttgcgcgcttcgtctgagttttgcgcctctcctcgagaccggcatggatgcaaagaacttaggcaacagacgacaaaatcatgagaagagtacaatgacagaagatgcacggagccgagatcaggagaccttgcagcggtttgcagattcagatattactgtgagttcagtcaacagtcatgaatctggagatgtgaacatggaagctgccatctctgctgaggatgtcttgcgagctggtggtttctgagcaaaagatgacattggcagccttcttcccacagtcgtagattcgactgatttcgaggccttgttaccggatgcttgctacttgaaggtgtgagcttaaaactatgtattctggacttggatacttatgcatatgaaactga

SEQ ID NO: 11306 - DNA, 292 bp, Oryza sativa
  Clone ID: uC-osflcyp093f10b1
tcgctcaaccatcgtaaggatcttattcagcatctaacctgctcttttcgtcgtggcaacgaccaacagcgtagaatcggagtggatcatgcatttcatcaaggcggacgacggtaaacgggggagcggcaccagctgctagggcggaaggctacgattggccggatatggacggaggcgacgatttcactcgaagatcaaccggaagcggcttgacaagctctgatattattaaaatctgtgaggagacttagtacttgtcggtacctatgtcactaaggcttatcggatt

SEQ ID NO: 11307 - DNA, 329 bp, Oryza sativa
  Clone ID: uC-osflcyp093g07b1
tcgttttcattttccccaaataataatagaggaaggggaaaaacacatttgcagccacatcatccatggcctctctccgcaccattccggtgatcttcggcatcctcttctatgtccttgccagcactgtcactgtcaccgacgcaccggactacgttgtccaaggccgtgtctactgtgacacgtgccgtgccgggttcgagaccaatgtcaccgagtatatcaagggtgccaaggtcaggctggagtgcaagcactttggcaccgacaaggtcgagcgtgcgattgactgtgtgactgatgagaccgggacttacatgattgagctt

SEQ ID NO: 11308 - DNA, 267 bp, Oryza sativa
  Clone ID: uC-osflcyp093g08b1
tcggtttgaactataacacctaccttcacggatcaagggaatcctaactggggatggagctggatggaacgctggatgacatcaaggccttgggagagccgagtgattatagataaggattctaaggaccattattgaacaaagaatcccagcactagcgcttttcgtacttatgtaccccgcgcaatcttaatccagagacctgtaacaccaaacaagtctagccgttcaccaagtcggtaattttcattaacttcttcgttaagg

SEQ ID NO: 11309 - DNA, 76 bp, Oryza sativa
  Clone ID: uC-osflcyp093g09b1
gtgatccaaattagttcctctactgctcatcttcacagatgcactccttctaggcgttatgcgtccaattctccag

SEQ ID NO: 11310 - DNA, 79 bp, Oryza sativa
  Clone ID: uC-osflcyp093g10b1
tctgtgagccagactctacccaggtgtggatttagccatgaaggtggccaaatccaagggcgccgtcaagctcgactgc

SEQ ID NO: 11311 - DNA, 171 bp, Oryza sativa
  Clone ID: uC-osflcyp093g11b1
ttttcagaactcactcagtttcactagttcagttgatgaagccagacatgggagtgatgccaaacatggggcatcttctagcatgactgaatatgtatcaaagcaaaagcacagatcgaatgatccgggttgggattcttttctattaagctctttttatattttttttgt

SEQ ID NO: 11312 - DNA, 331 bp, Oryza sativa
  Clone ID: uC-osflcyp093h01b1
catttttctcgaagcgagagtgcgttgcgttgcgagcgggaagcgaaaactcgaaaccatggccacgggccgcgaccaggcagaccagcaggcggcggtggcgcatactggggaggtgaccgaagctgccgctaaagaagtggtgtccgtggagatacccgcgcccgaggggtggaccaagaagtttacttcccagagaggggggagatttgagattgtttttgtttcacccactggggaagagattaagaactagagacagctgtgccagtttcttgaggcaccccctggaggccctgcattcttagagttttgattggtgaactggtga

SEQ ID NO: 11313 - DNA, 122 bp, Oryza sativa
  Clone ID: uC-osflcyp093h03b1
cttctttccatccgcttccaccccccagcccccgaattccatcgcagatcagatcaggtgaaaaaagaggagagaggaggggggaagatcttctttttctcttctcttttttttttttctct

SEQ ID NO: 11314 - DNA, 114 bp, Oryza sativa
  Clone ID: uC-osflcyp093h11b1
tttgttctcatttgccagacagagattacagtctgagctggattaccacccgtagctatagttaaacactactcgttaacctattatccttcagcttgctcggtgatcttagat

SEQ ID NO: 11315 - DNA, 214 bp, Oryza sativa
  Clone ID: uC-osflcyp093h12b1
tttgtttacctgtgccacacagagcttacgttctgagctggaatacaacccagagccatatatatacactagtggggaacctaccgtcgctgacaatgctcgtgttcatagctcatgtgctatagctcagcctctcccaagtcagtgtggccctggatagcgtgttcaccgaggtattcttgctctcgatcgagaatctggccctgaacggata

SEQ ID NO: 11316 - DNA, 159 bp, Oryza sativa
  Clone ID: uC-osflcyp095a01a1
aaaagaaatttaagccattattattagatcactccaaatcaccaatacaatgtggcagttcgatagcaagcggctctggattgtgtggcaaaaacaacacctgatccaaggaccatctagcacctttaaaaccttatttcctcgcacttattcagaaac

SEQ ID NO: 11317 - DNA, 402 bp, Oryza sativa
  Clone ID: uC-osflcyp095a02a1
aacaacacaacgtaagattcatttttttattatgtaaatacaaatgtatgcaatttacagcttaaaatagcccttttattatgaagaacatggcgctatatattaaatatatagctagataaaaaaaaaagaaactatgctgaggaatcgatcaaggaaactcaatcgtgcagcagcatttctccttgttattatacaaacacacgtacagcatacttagattcagcatcaccatggccgaaaacacgtcgtggtcatgtcatctcactttgctttggatgcgctccagcgaagcagggttctgcctgaactcgagcagcttgtcggcgtcatccggcacgactccctttggccgcgttcggtggcgcggaaccgctccttccacgcggccagcgccggcgt

SEQ ID NO: 11318 - DNA, 396 bp, Oryza sativa
  Clone ID: uC-osflcyp095a03a1
gaaactaaaccggcaggagaactgccaattatattttaaataagcaggagtaaaaaccctaaacgggttacaagaaaagaaaaaacaactaccggttggctgaatagctgcaccgaacacgccaaaacttaactaacaacagaaaaccacttgacgggagcccaacatagaacgttcgtttaccaagtcttgaccaagacggcaaagggggttccgaccttgcaaccgggtaattgttgccgagcttgccgcctagggacacagtcagttccgatttaaaattggttgcataatccatacctaacttgttgtaaatggttcaagtggtttaaacttcccacgaagaactttagccaaagccgtttaaacgccaaaatctattcacggccccaaaca

SEQ ID NO: 11319 - DNA, 426 bp, Oryza sativa
  Clone ID: uC-osflcyp095a07a1
aaccaaaacataggaggtttcatttcttcttctcaaagtagggtagcatctttccttctttcaccattacataagcttaagcaataacagataacaaatcctcctcctcctctaggtaaaatattcaaacacaatacccttataagtacttattattaggaaagtagcggtgcatgggcataaatggcagcggggggcaggttaagaatcacaatgctgagcagcgaggaaacaaaacaccataatgggacagagcaaaagcctccgaagagggagcttttaggcagaaggcttttcccacttgagggggtttaccaccttccaaggtgaagtctggggtcgtcccttccgaagtgaccgtaagccgccgtcttgaggtagcgtccgttgccgcctttcttgaggtcaaggttgatgatgatcatg

SEQ ID NO: 11320 - DNA, 253 bp, Oryza sativa
  Clone ID: uC-osflcyp095a08a1
atctgctatatattaaatacatgagccatttttcttttgtgggaacactaggggataactctattgttacagtacaacataacacaagcctcattagtgttctctacttctgatattttgcatcactatgtacattggtcctattagttctactatgccatactgcacgttgtgttgtaagtaccttacaacacaaacattagagttgcttagcctctttctatttgcctatctggctgaagcctctgcttgg

SEQ ID NO: 11321 - DNA, 283 bp, Oryza sativa
  Clone ID: uC-osflcyp095a09a1
gcaaagaacaaactttacaatgttttcttttcaggtgagtggtgattggtgaatgagaatatgctccttgtcccaggttttcctgtgatccattttacagacagtaacagaagctccgaaccttaaagttcctacctgttttgcggttcacaaaaaaattctatgaaattgaatgcccgtacttgtttgcggttctgtaaatattaaccttacagttttcccagattacaaaaaaaagggatccgtgttcttccaaattcctcttaccaaggctttcggttag

SEQ ID NO: 11322 - DNA, 372 bp, Oryza sativa
  Clone ID: uC-osflcyp095a10a1
gccatagtagcaccgatccacaaggaattcacaatatacccttcagtttcagtctcatgcggacaaaaaactccccaactttcgaaagacaaaaaagaaccaaccaggcgcagtgtacagtttcacggcacgcactagggccaaccaaggaaccaccaacgggagcaaacggtacggattcaaggcatccaggagattccaagatggctgccggaataaacgcttcttggtgaccggcgtttgaagattgtcgggtgtacccccacggacgcccgacgtagccacgcccatccttccttccgacctccgcgtcccgttcacccaacacattgcgtgggcacgggtggggacagccatttgcgcccatggacc

SEQ ID NO: 11323 - DNA, 433 bp, Oryza sativa
  unsure (1)..(433): unsure at all n locations
  Clone ID: uC-osflcyp095b01a1
actgagggtatattgacttctccctatatagtaatttagtaacaccaagcaaactacattaagagaccatggagcaacagcatcactcttgttctacacactttcactgcagcaacaccacaaattaaacctgaatacatcagagttgctactgctccctaattcagtnctgttattttggtgtttcgcgttacagnaaaaagngctcaacttgtgttccacagaacctgcacctttctcctcaagcttattccatggctgatgccaaatagttgtcacagtaaccaggtggctcatagataaagcaagagatcacgtcttgcagtgtcacgacaccaacaaccttcgaagtcaccgtccacgacgtatatccggtgggttattcttgatgcaatgctgtcaatcacgctgccaagagaagcgttaggcgaac

SEQ ID NO: 11324 - DNA, 364 bp, Oryza sativa
  Clone ID: uC-osflcyp095b02a1
ggcaggcagaacacaattttttcaatttccaaacgggagcttttcacataaataagataaccgatagctcaaggttgagaatcaaaaaccgaaagaaataggttttttgagcagagggcagaactttaacaaaaatgcctgttgcaaattgcaagactacaggtaaacttaaatgccataaggagtttgtttgggcgcataagatgaaactactgggataaggctactttttaacttggcatccttttcctcggcattcatcatcagcaccagttgagggattgagagccattcaatttttcgacgagaactggccttcctttgcttgaaggttaactttttgaggttgaatcttttgggggta

SEQ ID NO: 11325 - DNA, 121 bp, Oryza sativa
  Clone ID: uC-osflcyp095b03a1
ttttttttttttttttttttttttttttttttttttttttttttttttttttttttttttttttttttttttttttttttttttttttttttttttttttttttttttttttttctttttt

SEQ ID NO: 11326 - DNA, 143 bp, Oryza sativa
  Clone ID: uC-osflcyp095b06a1
attacttgttacttacatattttgtgataagaattggatccttcaagggttgaagcatagagaaacggtgtataatgactttgtccagagggttaacattagtgtagaacccccattaggtcatggttagacttttctcacat

SEQ ID NO: 11327 - DNA, 166 bp, Oryza sativa
  Clone ID: uC-osflcyp095b10a1
cctcgacttattttcctcttcatatcgcagcccaacttattttcccctttctgaaagcccaacaattccaaagttcatgttcttttttatcggatactcgggatcaacacatcagttgatcgatcgatcacttgatcaggtttcacttgagttcagcacttcagag

SEQ ID NO: 11328 - DNA, 453 bp, Oryza sativa
  Clone ID: uC-osflcyp095b11a1
gagaaggcaaccaatcgatcattggcccaatcgagaaaatcgttacatagttacatctgccggccactgttatgtacattcattccgttaagaatcacctaatgttgtgcggactctccctagcaaatgaatatgatgcagcccctcgtattgacaacctgcggtatagagatcaacccgtgcataataactagtccctacaaatcacagattaaaaattatatatatagctacaaatggagcaaatctagatagagccgcataattccatgtgtgcagtgttgctatttatatttgaagatcatccagcgtcagttcatcgactgacatcatctttagtttcgtgatgaactggggaggatcatccagactagatgaaccaagtatgacttcccgctttagcttggatgtaagcttgtgcacagcacgtaactcccaccgagtggcgccacc

SEQ ID NO: 11329 - DNA, 423 bp, Oryza sativa
  Clone ID: uC-osflcyp095b12a1
gcaaaaattattacttgttacacacatattttgtgataagaattggatcctccaagggttgaagcatagagaaacggtgtataatgactttgtccagaggttaacattagtgtagacccccataggtcatggtagactttctcacattaaagttggacaattcaattccttcgagtacttgctagcagctacacatgttgcttttggaaccaacaatagcttttctttcagacgcaccgacaacccaaactcttctgacatatcaacctccattgcatgtgcaggcagcgcccaatcaaatttccagagaaggttcgctagtgtgatctcgataactgccatggcaaagttcatcccgaggcacattctccttccagaaccaaatggcaagtattgatagttattcacccaaaagttgactga

SEQ ID NO: 11330 - DNA, 100 bp, Oryza sativa
  Clone ID: uC-osflcyp095c01a1
tttttttttttttttttttttttttttttttttttttttttttttttttttttttttttttttttttttttttttttttttttttttttttttttttttt

SEQ ID NO: 11331 - DNA, 334 bp, Oryza sativa
  Clone ID: uC-osflcyp095c02a1
agatggcaaataaaatatcatatggatggcaacttctgttcactacaaaactggaacgggcaaacaaacgattgcatcacaaagttccacaggtggcctagtaaaccatttgcagaccatcctgaggtgcatatagctgtgtttacaattcattcaaacaagctcagacaatagcatttgctgcactagctatcctaggcccaaagggttaacacacttcttcccgatgggttccagggattgcaaaacctttcatttcaccctttggatttcacaattactccagcattatcttcgaaggacatgtaaacacccgtccttgcggggccacggt

SEQ ID NO: 11332 - DNA, 79 bp, Oryza sativa
  Clone ID: uC-osflcyp095c03a1
ttttttttttatttttatattttttttttttttatataataatttttttttttaaaaaaaaatatttaaaataatttat

SEQ ID NO: 11333 - DNA, 59 bp, Oryza sativa
  Clone ID: uC-osflcyp095c07a1
aatattgtaaataattaacatttaataaattaaaaattttttcatttatataaccatac

SEQ ID NO: 11334 - DNA, 53 bp, Oryza sativa
  Clone ID: uC-osflcyp095c08a1
tttttttttttttttttttttttttttttttttttttttttttttttttattt

SEQ ID NO: 11335 - DNA, 131 bp, Oryza sativa
  Clone ID: uC-osflcyp095c11a1
ttttttttttttttttttttttttttttttttttttttttttttttttttttttttttttttttttttttttttttttttttttttttgtttttttttttttctatatttctattgattttattttttttt

SEQ ID NO: 11336 - DNA, 382 bp, Oryza sativa
  Clone ID: uC-osflcyp095d01a1
gattacatgtggcaaggttctataaaaccatgactgattacataattggagggtttttaaggcaacttggtaatgggtatacaccaagagtataagcaaaaggcaattaggtacatcaaaagcttcaggatttctgtacccacaacatacaaattagccatctgctcgacagttcgttcagtcatagcttacaataaaacaaactataagagtttatctgacagaggttgcattgcatataaactgacagcagactattatcaggtagatacttcataagccaaggatgaattgccacgggcacaccggagtgcgccagtgagggtaaaccagaaccgcccgtgtcccgcgatcccgaggttttcaccttatgacggggaca

SEQ ID NO: 11337 - DNA, 248 bp, Oryza sativa
  unsure (1)..(248): unsure at all n locations
  Clone ID: uC-osflcyp095d02a1
atggttaagagtgacatttgcgtacggaagatcatatacttcatacattatagtttcaacaccattcactcataaagttctacaaaatagaagggtgatttccaataacttcagaaaaccgttactggaaacatgtttcgaacggacaagcagaaatgcccaaaacgggagcacccagcttaccattatgtaaacatattggaggtattacaggnattagttcccgatagttgttttaaaattgaaaa

SEQ ID NO: 11338 - DNA, 69 bp, Oryza sativa
  Clone ID: uC-osflcyp095d04a1
ataatatattatttaataaaaataatttttaaaaaattataaaataataaatttaatatccaataaaaa

SEQ ID NO: 11339 - DNA, 354 bp, Oryza sativa
  Clone ID: uC-osflcyp095d11a1
ttgttattaagatgaatatgaatatggttatggagatggcggttttgcaccagggcctggggctccctcgcgaagaagctattggaggcgccttcagaagcagcaaacatcttgtagcatggcggcgccacctcccttgccttccccagcagatggccggagaaatggtccccccagatgtcatatgtgaagtctttcttcctcgttgttgtcgtcgtcgcggcgccctcggttctcttcacagccttatctttcatcaggttggatccaggagcgcgagaatgaggcgcgatcggggaaggcgaggacaacaatggcgagacgccatgcattggttggtgcagtaggtgaagg

SEQ ID NO: 11340 - DNA, 343 bp, Oryza sativa
  unsure (1)..(343): unsure at all n locations
  Clone ID: uC-osflcyp095d12a1
agcaaaactgcttcgcgctaatgcactgccgtctatacatatacagcaggatgtcacaccaacaaaactacaaaactgaagggtacacatgatcataatcatgttccatcttttgatgttgatgaacattttattactttcctaactcagtttgcacangtccagcccttagcccaatcttttggccttggcccattctgcagggcttggtcaatngaagttatataagctgctttgagacaccgtacacccaacttccttttgtttgccagcaatatttcgaacccttttttcccttgaatagggtaaatacttaccccacagggaagacaacttacgacag

SEQ ID NO: 11341 - DNA, 382 bp, Oryza sativa
  unsure (1)..(382): unsure at all n locations
  Clone ID: uC-osflcyp095e01a1
gagtataaatttggcagccatgttggagtacaaagtagaagacatgcatgaacacataaaccatgttcattacagttcaggagggtattgtgtgaagccataaaccatacgtacaactgaaagtattctatactgattatcatagacagattatctcacaantccatgcttaagaattacgtctgcagattccagtgatggactccctttgggctacaacggcaaatatccatcatgccttcactttgatagcgggagcacgagatggaagttgctgatagcaggaaatgagtgaggtgacgaatccaaatgcccctgttacccttggagtgatcttcttgggtgacagctgaagaagccctacggccaccacaacattcat

SEQ ID NO: 11342 - DNA, 63 bp, Oryza sativa
  Clone ID: uC-osflcyp095e02a1
attaaattattaattgttcattaatcccaatacaaaatgtcgccactatccttgcttacgctt

SEQ ID NO: 11343 - DNA, 85 bp, Oryza sativa
  Clone ID: uC-osflcyp095e05a1
ttttttttttttttttttttttttttttttttttttttttttttttttttttttttatttattattttttttactttggattttt

SEQ ID NO: 11344 - DNA, 54 bp, Oryza sativa
  Clone ID: uC-osflcyp095e11a1
atactatatatacgtatccatagaagatttattgccctaattaggcaagcagag

SEQ ID NO: 11345 - DNA, 333 bp, Oryza sativa
  Clone ID: uC-osflcyp095f01a1
ggaccatacgtccagtagagatacaggttaaaaaaggggggatgaagcacatgagcagaatgtaaatggttgttgcaaacaacaaatgtttcgtttttgaagtaaaaaaaagcaaaggatatcgattctatacattttcatatgttctctttttaaatggttttcctataacatgtcaatatctgatctaggagtattgggactttgggagtatattcctatcaagaaaacggcctatccctgaatatgctaccccatacttggttacatttcactacgaaaggaatttccttgagacctcagatagtcagcgttttatgtatgctaaatttt

SEQ ID NO: 11346 - DNA, 409 bp, Oryza sativa
  Clone ID: uC-osflcyp095f11a1
aacattcaaatatggtcatttgtccattccctttttaaaagtttaaaccatttctgggtcccaaaatattacagaagaacatagcacgaactcaacacgagcaatacaaaacttttacaaatcgatcttcttgctgcccccctatgcacaaatcttcagaaatcgctgacgccctctctcagcagttgatgccgcactgcctgacgtcaggggcccctggccttgatggtgaagggatcaaatcctgacccagagcaagggaaaagatggaggcgagcagcacggaccagatgacaacaatggtggggcgtccggtttctgccttcccatgagccccttgaggaagggggagaggtggacgatgacccagaaggcgaaaaagaacttcccgaagagcggaccccacgcc

SEQ ID NO: 11347 - DNA, 80 bp, Oryza sativa
  Clone ID: uC-osflcyp095f12a1
gggagcacactaaaattaaataattcattaatttgatcaaaggaatcaacacgaagctttctattttggggaacaaaaac

SEQ ID NO: 11348 - DNA, 148 bp, Oryza sativa
  Clone ID: uC-osflcyp095g01a1
ttttttttttttttttttttttttttttttttttttttttttttttttttttttttttttttttttttttttttttttttttgggggtaataagcccgagctttgttttaacaaattctaacccaacgaaaattggggtacttcttac

SEQ ID NO: 11349 - DNA, 53 bp, Oryza sativa
  Clone ID: uC-osflcyp095g06a1
attaatatatttttattaatttgataatttttacttaatacccatacaaaata

SEQ ID NO: 11350 - DNA, 51 bp, Oryza sativa
  Clone ID: uC-osflcyp095g09a1
attaattaatatattttaaattcagaatggtcaataaataccaatataaaa

SEQ ID NO: 11351 - DNA, 66 bp, Oryza sativa
  Clone ID: uC-osflcyp095g10a1
ataatatattattttaataaaattatttttaaaaaagtaaaaatcgaaaataaataaccataaaaa

SEQ ID NO: 11352 - DNA, 101 bp, Oryza sativa
  Clone ID: uC-osflcyp095g11a1
aaaaaaacacccaaaattaaaggggtggaactttattggtaattgcttataggacccttcatagcgtaagtcccaccaagttcaggtctgatttctgattt

SEQ ID NO: 11353 - DNA, 221 bp, Oryza sativa
  Clone ID: uC-osflcyp095h01a1
agcacagtaaaaccacagataattcgcaaaccaaagcatggcatgttcacatagtccaacacagcacaattatttggtttgggtatacttaattactctgcatctggcctgaatgattttattcatacaacctgacaggtttgacaacatatattgcgtaaatgggtttacgccgatccaagggaaacgaccccatccaagttcggagaagccgagaccag

SEQ ID NO: 11354 - DNA, 202 bp, Oryza sativa
  Clone ID: uC-osflcyp095h02a1
acggacacaatgattacggatcacttattcattatagagctacaatgctgctattccatagaaaaacctttgagacacaataaaactagagttaaggatacacattacagggaaacagcacacattgaaacgggacacgaccaaggtaccagacgagacaacaatagcgtccattggggtaagagcaaagaggcaacacttg

SEQ ID NO: 11355 - DNA, 196 bp, Oryza sativa
  Clone ID: uC-osflcyp095h03a1
aacaaaactttgcatagagtagattccataaacacgttctgatgaaaagacttcgttttgttgggaacaatatccaaatcgatagggtcaaaacaccagccctgccaggacttcaagcaaaaaggatctgtctataaactaccccatgaataatgcgagttacaaggctcatgcttgcggtgaaggccctttcttg

SEQ ID NO: 11356 - DNA, 169 bp, Oryza sativa
  Clone ID: uC-osflcyp095h04a1
cagtctcagatcaaattggattgataagccaagcatcccaaattctcaatgtcacaatgtacaaattggcttacggcacagcagcagtaagcaacctgagcttcggcgagatcctttacgaggccagggtgcgtgtgtggggccagttgttcgacgaccgtaaggcgag

SEQ ID NO: 11357 - DNA, 436 bp, Oryza sativa
  Clone ID: uC-osflcyp095h05a1
aacgagtcacactatatacccatccaagaaagcattctaccacaatatcaatttaaaccgtgaaccagagtctgaaatacaagtgaatatccttctagctctagatatgaatgaaatattacaattggtatgtagcacatcaaatatcatcgactgtatcttcttgccccttccatttttcctaccagagtgggttaggctgccaattcagtcttttcgaagaactgctgcctgcgctcttcttcccgccatattttcttgcttcccaacgcttgaagggaacatatttgtattttatcatgtgcacaatctggcgcttcatcgtgaggacaaaaagaacaacccagtagcagaggaagtattggccagaagacaggaacatcaaatacagagaagaaagtcatcacaaaagctattagaaaagcttttgtgattg

SEQ ID NO: 11358 - DNA, 85 bp, Oryza sativa
  Clone ID: uC-osflcyp095h06a1
ttttttttttttttttttttttttttttttttttttttttttttttttttttttttttttttatttttttttattttaataattt

SEQ ID NO: 11359 - DNA, 169 bp, Oryza sativa
  Clone ID: uC-osflcyp095h07a1
gcacttcaaaacaagctttattccttactgtatccaggcttattacaaaagttcagtatttgggagaatgaccatacattacaaagtgttcaacacattggagcaaacaaaaacaatggaaaccttaactagttaacgcaacattagcattgacttcccaaatggtgga

SEQ ID NO: 11360 - DNA, 106 bp, Oryza sativa
  Clone ID: uC-osflcyp095h11a1
ggccccaaattttttttattcagcgcttattcggttgtttccccaaaattccaaaatttattaaccaaaacacattgtgggaaagttttttgtacagttttcatta

SEQ ID NO: 11361 - DNA, 57 bp, Oryza sativa
  Clone ID: uC-osflcyp095h12a1
aaaataactcccataataaaagggtgggaactttattcgaaattactcaaaggacca

SEQ ID NO: 11362 - DNA, 196 bp, Oryza sativa
  Clone ID: uC-osflcyp096a02a1
gtcacaatgcatgctctctctttctttttaaacatggcatatcaacaaagaggcatctacaaaaaaaaaagcctttgatccacattcgggctccaaaatcgtctacacattttacatagtctggagctgtgggacggggggtattcacactgttggcagttcgggtacacacaggaaagaaaaatggctagaaaca

SEQ ID NO: 11363 - DNA, 108 bp, Oryza sativa
  Clone ID: uC-osflcyp096a05a1
gacgggcatcgaaaaccgtcgtacaaacccagtttgttctccctctgccataaacgtcttaagagcataggctttgccaagctatagaaccctttacagcaccacggt

SEQ ID NO: 11364 - DNA, 78 bp, Oryza sativa
  Clone ID: uC-osflcyp096a08a1
acacaaacaagttacaaactcacaataaagaacagttccggaatattgaaaacaagttatcaggattaaaggccaaat

SEQ ID NO: 11365 - DNA, 133 bp, Oryza sativa
  Clone ID: uC-osflcyp096a09a1
atcttaatatgttcgcaatcttccaggaaaggcgtaacgacacaacatttgccaagttattgataccactacagcacgacagtaacatatggtttcgcaaagccatagcgaactacaaagttgaagattatcg

SEQ ID NO: 11366 - DNA, 115 bp, Oryza sativa
  Clone ID: uC-osflcyp096a10a1
gaaaaaacatgcttttggaccctttattccatcaggcagggaatacctgattatttataatacatgggtttagtaaatgaaataaccccgggtatttcctggcacaagatttttc

SEQ ID NO: 11367 - DNA, 142 bp, Oryza sativa
  Clone ID: uC-osflcyp096a11a1
aacaaatcacttgttcaaagcgaaaaaaactttgcaatttccatggtcgggttaaaaaattggtttgaaacccattttttccagtgacaaaaggggaaaatggggccttacaaaaatttgccccctaatgttccctaaaaac

SEQ ID NO: 11368 - DNA, 142 bp, Oryza sativa
  Clone ID: uC-osflcyp096b01a1
gaacaaacgcgcatattataagtgacgaagcggtctcacataaaacagggcacacaggttacaacaacgagggttgtaagcccatttaagccccaaacattcagatcaccacaagcaaatgttctcgaagacacacgtcaca

SEQ ID NO: 11369 - DNA, 88 bp, Oryza sativa
  Clone ID: uC-osflcyp096b02a1
acattctaaaggctttgttattcaaaccagaaaacgaacaaatggaacactccattcttttacatttctaaaggctttacatttccaa

SEQ ID NO: 11370 - DNA, 206 bp, Oryza sativa
  Clone ID: uC-osflcyp096b03a1
cggatacattttgctcactgtggcagacaaagcagaccacctagagcccttttattcagaatatattcaagataataaagaacattggtcatagcatatactagtactatatgaatagttctggctggctgcttcacaaagttaacaagagtgaatcgctatttggagtttttgagttatttcttttaatctttcagttgcgtctt

SEQ ID NO: 11371 - DNA, 62 bp, Oryza sativa
  Clone ID: uC-osflcyp096b04a1
tttttttttttttttttttttttttttttttttttttatttttattttttatttaatctttt

SEQ ID NO: 11372 - DNA, 188 bp, Oryza sativa
  Clone ID: uC-osflcyp096c01a1
ccaaattaatttttttttgtccaatacaaaaaaggctccagcttataaatataagtccctggatggatggctacaatgtgagaatatttgtagcaaatgctgcttaattaacacaattaatgcactccattaattaaactcagtaatttaaattaactaatttaattcaaactaattcgattccctcc

SEQ ID NO: 11373 - DNA, 78 bp, Oryza sativa
  Clone ID: uC-osflcyp096c02a1
agcatataaaaacaccaactctaaatagacaatcaaaacaacccttacaccattcggcaaattttatgaaccaataac

SEQ ID NO: 11374 - DNA, 56 bp, Oryza sativa
  Clone ID: uC-osflcyp096c03a1
attatattgttactttaatcttttttattttctacattttattcttcagctttttt

SEQ ID NO: 11375 - DNA, 100 bp, Oryza sativa
  Clone ID: uC-osflcyp096c10a1
atacttattaaacttttttataaatgtaatgtcactaaaaatgcttaaaaaaaaaacattgaccagtctagcatatgaacaaatgctaactaggcaaaca

SEQ ID NO: 11376 - DNA, 471 bp, Oryza sativa
  Clone ID: uC-osflcyp096c11a1
ctccaatacgcttattaaacgccattagaaatctccctgcagcagctctgccgcaaaatcacaccttgccccgtatagtatctgaacgcatggttattagtgccacaattttccaaaggtatatcagaacctataccatgatgaagcactagtggtatgtatcaatgcctgtatcagcagcttaatgtaccaccttagatgatgtttaagaatgtaaagcctcttggtaacaagttttcacctctgaactccgtcagcttggtatacatccgcgtgttgagtctagcggtcctgcaacccttgtgcactcagccagactttggtttactcagcttgggcagcatacatcgcaagagaaatcctcgctacatggctcttctctagggacagggtttcaagcttttcccacatgatgccaacgtgccagtctaaaatatggcgagcacctattgacaccaaccacaactgcca

SEQ ID NO: 11377 - DNA, 284 bp, Oryza sativa
  unsure (1)..(284): unsure at all n locations
  Clone ID: uC-osflcyp096d01a1
ggagaaaaacaggagcaacgtctgcaacaccagactcagcaacataggaatacaaaggatgaaacggagtgatgcagtgtaacggggaagtgaaacagattacaaatcggagcaccaaacatagcaactgattcaacgttatgtaccacccaccacactcaaaaccaaagtctaaaangagtcgaatgattgattcttgggtattgcagttaaaaaattctgaacttgtaaaagcgacggagcccgggtgatgattgagncgttgagtattttggccatttggt

SEQ ID NO: 11378 - DNA, 98 bp, Oryza sativa
  Clone ID: uC-osflcyp096d06a1
tttatgcggccggccttcctttttttttttttggggcacaacacttggtttttcttaggacacttactgcgtgccgggtccccggcttattttgaccg

SEQ ID NO: 11379 - DNA, 337 bp, Oryza sativa
  unsure (1)..(337): unsure at all n locations
  Clone ID: uC-osflcyp096d11a1
gcaaaacattattttattattagcacacgtactgcgtgcagtgcacaggcttatagaaccgcacttcacacaagttggtcgtcggcacaaacatgacgaaagcatagaacataacacaatacatacagacaggtacatactaattccaaatatacgttcatgttataacaggagacaggcagccgtccagacgactggatgaaatacgtttctacaataatctttgtgttgcgactcctgtccagttcagactatttttgagaccaggnacttttgtaattttgaacagcatggaaaacagattacttgagacttttccaagtatgacaagggaagg

SEQ ID NO: 11380 - DNA, 271 bp, Oryza sativa
  unsure (1)..(271): unsure at all n locations
  Clone ID: uC-osflcyp096d12a1
cacaaccaatggtttgacatctgtctcacattgcttgatggatccagaatatattgcacgactataccgattgctcgacagcagacagggttaaactaaagctaataatagataccacataatangtcagcctggcataaatgtattgcacaaaacatccaccagtttcgaaaggttgtatattacctatttcgagtatttggtattattaacttttttggtatggncattgtaacttctcttgctttcaaaggtttggagttttctccaa

SEQ ID NO: 11381 - DNA, 128 bp, Oryza sativa
  Clone ID: uC-osflcyp096e01a1
gatcgtgcatttgaaccaacacaaactttttcctttattttatcaacgtatatattacccaacttgagatcatacagtcgaacaagcgaaacatttttacatttacaaacttgggactatatgcacac

SEQ ID NO: 11382 - DNA, 166 bp, Oryza sativa
  Clone ID: uC-osflcyp096e02a1
atacgaaaaccaacaacattatatatttaaaaatagagggaaagggcaagagtagactagttgaaactccaacgatgcatacaattaatcacataatatcaatatcacacgtttattaaagcatgaaagcccccacaatgatggagagtattaccaggtaaccatg

SEQ ID NO: 11383 - DNA, 64 bp, Oryza sativa
  Clone ID: uC-osflcyp096e03a1
tttttttttttttttttttttttttttttttttttttttttttattgttattttaatctttttt

SEQ ID NO: 11384 - DNA, 138 bp, Oryza sativa
  Clone ID: uC-osflcyp096e04a1
tctctattagctatgacgccccatgcacgcgcgacgttacgcttggtatgcctcctcattgttggccgcccttccttttttttttttttggtttttttttttattttttttttttttttttttttttttttatttttt

SEQ ID NO: 11385 - DNA, 119 bp, Oryza sativa
  Clone ID: uC-osflcyp096e12a1
ttttttttttttttttttttttttttttttttttttttttttttttttttttttttttttttttttttttttttttttttttttttttttttttttttttttttttttttgtttttttt

SEQ ID NO: 11386 - DNA, 167 bp, Oryza sativa
  Clone ID: uC-osflcyp096f01a1
accaacaaccacactgttacttcagagaagaaccaaaggtaagtgcccctagtatttacatcgatgctaacatttgagttcctcctatgaaattcaggagggcatgctaaccacagtatcacagaatatgtcattgcaaatggttcaccagaatgctggtttgaaat

SEQ ID NO: 11387 - DNA, 108 bp, Oryza sativa
  Clone ID: uC-osflcyp096f04a1
ttttttttttttttttatatttattttttttttttttaattatattattactttaaactttaaaaaaaacaacatataaaaaaacaacaacatacaaaaactaatcct

SEQ ID NO: 11388 - DNA, 60 bp, Oryza sativa
  Clone ID: uC-osflcyp096f05a1
atattattattttaaactttaaaaaaaacaacacataaaaaaacaacaaaagccaaaaac

SEQ ID NO: 11389 - DNA, 79 bp, Oryza sativa
  Clone ID: uC-osflcyp096f09a1
atacattaaattttaacaaacacaaaacttaatactacagatactgtcccaaactttcctagcctagccgctcaggtaa

SEQ ID NO: 11390 - DNA, 430 bp, Oryza sativa
  Clone ID: uC-osflcyp096f11a1
aaacatgcaacaatcatcatctcattgttcaagagttcaaacattatcgtcgtcatcatgggacgaggaaaatttgccagacacgcaccagagatgggagaacatctggactctggtctcttctaagtgaagctaacagtaaggctaaggtaacaactcccaagaggccaaagataagacaacagcaatcctgaaacaacatgagacccaaaaagaaacggtgcgggcgattcccaagcacaacgtacactggcagtcgttattcgtgatgtccgtcgaagatttcagcgctgctgccaatggtattatgttcttagaaccacttgaacagcagaccaccgtgtgtggcgaagaaaggcgcaaacacaagggactcgacggccatgagcttgatgaggatgttgagcgacgggcctgatgtgtccttgag

SEQ ID NO: 11391 - DNA, 94 bp, Oryza sativa
  Clone ID: uC-osflcyp096f12a1
ttttttttttttttttttttttttttttttttttttttttttttttttttttttttttttttttttttttttttttttggacaacatgcaattt

SEQ ID NO: 11392 - DNA, 110 bp, Oryza sativa
  Clone ID: uC-osflcyp096g01a1
ttggagttttgtgtgatgttgtaatccgacagtgctaaaagtcttgcgatgcaaatataacttcgcacacaaatacagtacgtagtacgtccgcaacacatttaaccaac

SEQ ID NO: 11393 - DNA, 167 bp, Oryza sativa
  Clone ID: uC-osflcyp096g02a1
aagtacaattattatatattctattattaattacaagaatgcagcaattgcttaattatcccctctctatatgcgaattattactacaagtagctgcacacctgaaccatgcagcctagccacaagccattggcacttgtacgttaggtaccaagaaaaaaacacag

SEQ ID NO: 11394 - DNA, 65 bp, Oryza sativa
  Clone ID: uC-osflcyp096g03a1
gttccttttttttttttttttttttattattatattttttttttataataaaatgaatacataaa

SEQ ID NO: 11395 - DNA, 78 bp, Oryza sativa
  Clone ID: uC-osflcyp096g09a1
atataatcattcattatatgtcagcatcatccaaaatttattctacagatacttcccctttccttactcgtacggcaa

SEQ ID NO: 11396 - DNA, 433 bp, Oryza sativa
  Clone ID: uC-osflcyp096g11a1
agccaaaagtaaaacatggacagcatatattgtcttacattccatcatgatgtttataaatatagtataacaggcaggaaactaatcactgtaactcagctgaaactctaaaccagaagtatctttgcatgtccagacataggagtgagcgaccacaggcccagctgttctgaaaccaatagaactactgaagagcaaatggaacacactgagcaaaaactggggcagcagttgagcatattgatatgggaggtcctaagaatgaaacaaatgaagaagtaggttgtgcttacattacgcttaacacgacgatgggtatcgacaaaaactaggatagggtagagctagatagagacacgaaaaagcattgactaataactgataagcgtgctcgttgagcctttcagacttgggccgtgccttgcgtgaacaa

SEQ ID NO: 11397 - DNA, 436 bp, Oryza sativa
  unsure (1)..(436): unsure at all n locations
  Clone ID: uC-osflcyp096g12a1
agccaaaagtaaaacaaggacagcagatattgtctcacattccatcatgatgtttataaatatagtataacaggcaggaaactaatcactgtaactcagctgaaactctaaaccagaagtatctttgcatgttccagacataggagtgagtgattacagngcccagctgttctgaaaccaatagtaactactgaagagcaaatccgaacacactgtagcaaaaatctggggcagcagtttgagcatatttgatatgggaggttctaagaatgaaacaaatgaagaagtaggtttgtgcttacattacgccttaacacgacgatgggttcgacaaaaactaggatagggtagagctagagagagacaagaaaaagcatgacataataactgataagcgtgctcgttgagcccttcagacttgggccctgccttgcgt

SEQ ID NO: 11398 - DNA, 73 bp, Oryza sativa
  Clone ID: uC-osflcyp096h01a1
gtgcaaagaaacacttcactttaccataccccaaacctattcaagcagcacttgggacctaatttcttttaca

SEQ ID NO: 11399 - DNA, 107 bp, Oryza sativa
  Clone ID: uC-osflcyp096h03a1
ggagggaacttttcacagttgtgttggcaatgtgcacagcaagatacatcatcacagtatggagtttggcatcagtgtatcgatatgtggctcctttacctttatca

SEQ ID NO: 11400 - DNA, 124 bp, Oryza sativa
  Clone ID: uC-osflcyp096h04a1
ttcttatctgccgcccttcctttttttttttttttttttttttagattttttttttttttggattttttcaacttgccaatgtgtgtttaataccccattacctttattaaattacacttctcc

SEQ ID NO: 11401 - DNA, 439 bp, Oryza sativa
  Clone ID: uC-osflcyp096h05a1
gaactatcaaagcatattgtacttcttcaatgtgctgatcagttcgggatatccatatctttggaaacatttgaatgaattgtcactgaaaaaggtttacacacttacaacaacagggttaacaaggttaaggtttacacacttacaatcaacagggtttaacaaggttaacttccctcatctcatgcaaacaggattggagatgatatttctgacccagtttgaactgaacttaattagtttgctaaaagttttctttcattgttttcgtcttcccttgtgacttgtttgtttctccaaagaatttgttcttacatggaaacatggtttccgacaaagatgactgcgcagcaccagcttaacttacgtttggtacagcttgacttcccatctgaagtattctgggcagtatctccccacatcttgcattaattttaag

SEQ ID NO: 11402 - DNA, 432 bp, Oryza sativa
  Clone ID: uC-osflcyp096h06a1
acattaaacgaccgacaaagctgtcattagagtatatatcgaagcagctgtgctcaaattaactgaaaaagtttttaatcacaatgcatgcacttccagtttgaagttgcttatgataagatgcataggaatgtaacaataaactggaaagttatttgctgactttccgtacaaaataaaccatcaaacgaacatcatcacaactccaggtagctcatcggtggaagaacagaaattttgttagatcgaatcaaccacagacaaaccccaagtcctgaccttggatctagtggtgggcggcgccggctgcgccctgcctctctagctttcttaggtgggcgaggtggcggcgctcctttgggaggttgatgaggtaggtagaaggccttgaggccctagatgacgtggaagagcggcttccgcgagctggtc

SEQ ID NO: 11403 - DNA, 297 bp, Oryza sativa
  Clone ID: uC-osflcyp096h07a1
acgacaaaccacgaacttggatattaaagatgccacaaagaaggttcacataaacaacacaggtcacagcagcgaaagctacaagcaaaccctgcataatcgaaaagcaaatgtttttcaaaaccagacacacaaactgatagatagaagcccacacggacagatcataggatagcagcagtaatcaagcattgccaaggcaccaggcaagaaccctgatcctgttttgtactagaacccctcataaccctcatcaccatcgttgaactcggaacccacctcctaggagtccttttc

SEQ ID NO: 11404 - DNA, 55 bp, Oryza sativa
  Clone ID: uC-osflcyp096h08a1
attctaatgtttccattgctttttttgcttttttggccaaccaattattaaccat

SEQ ID NO: 11405 - DNA, 258 bp, Oryza sativa
  Clone ID: uC-osflcyp096h09a1
ataataccattgatgattcatttgattctggaagagaaacaatcatcaaattacaacagtaaccaacatttattctacagatgccatcgctttctttgctttttcggcaacgcaagcaaaccattttcaccgtcacacacacccaccatattatgccacgccaaatataaaatacaagtaacccaaacaaatttcccctttaattaatatcccgctttaatttaataaaacagccaagccttaaataattaaagttaa

SEQ ID NO: 11406 - DNA, 404 bp, Oryza sativa
  Clone ID: uC-osflcyp096h11a1
atcctttttttgaacgaatcgacaagatcgagccgatcccatgtacatttctctctttcaggatgcttgctatcaacagcatccagcaatcatggacactagtatacattaagtctttggcactttattctacacattattaccaggtcaccgtacctatacagcaatcggctataactatagccctaagaggccaaaagataatgttacatgtatagacagtgaaattatgggtcaactgtcgcctatgaccaaattggtcagggtggtcagcaggactagtatcgatacagtattctgtagtatgataacctgttatgtaccaaaattgcctttaattgttgggtgtagcatggtgaattccctgaactgaaatcctagtacatcctgaatgaatctaaaaa

SEQ ID NO: 11407 - DNA, 450 bp, Oryza sativa
  unsure (1)..(450): unsure at all n locations
  Clone ID: uC-osflcyp096h12a1
gaacgaatcgacaagatcgagccgttttcatgtacatttctctctttcaggttgcttgctatcaacagcatccagcaatcatgtacactagtatacatttctctttggcactttattctacacattattaccaggtcaccgcactcgatacagtcaatcggctataattatangccctaatgaggccaaaagataatgttacatgttattagacacgtgaaattatggtttcaacttgttcgcctatgnnatcaaaatttggtcagggttgggtcaagccaggactaggtaatcgaatccagtatttctgtagtttgattaacctgtttatgttcgcaaaaattcgcctttcattggcctggggtgttagcaatggtgaatttcccctgaactgaaaatcctaggtagaatccctgcatgaaatctaaaaaacattagcagggaagtact

SEQ ID NO: 11408 - DNA, 441 bp, Oryza sativa
  Clone ID: uC-osflcyp097a05b1
gcgcgtttttgcggctcttgtggcggaggaggatttggcggaggcgctggaggtggcatcggaggtggacagtagtacgagcatgcggtgagttcaaataatggcgcgtaccgtttgcaaggtttgaaccagccggcaagctagctagtcagtgtcattaaaaaactagcatgtattatatattcctagatagtactagttataatttgtgtttatagtctgaatgaatgaatgtatacgaatgatacgaggaataatgcggtggacaaattcgagacgatgatcgagttaatttcttaagagatggatttgtgttttgtgctgcagtttcttgcttgtaccttcaattaatgcattcaataacacttgtttttttatatttcagtttttagaattaaattatttattgcgtttttttttcatactaattattatgggctt

SEQ ID NO: 11409 - DNA, 467 bp, Oryza sativa
  Clone ID: uC-osflcyp097a07b1
gtgctctcttgcaagggcaggcactacaggcactgcagagattttttgcttcactggtccagtctgcaaatacaagctttgacactttgttggattctcttatttctactgctaaaccatcgcagtcaggtggacttgccaaacaagcattgtcttccattgcacagtgtgttgctgtgttgtgcttagcagctggggatcagaagtgtgcctcaactattgaaatgcttaaaggcattttaaaagatgacagcactactaattctgctaaacagcacatggccttgttatgtttgggagaaattggaagaaggaaggacctcagcaattatgctcaaattgagaatattgtcattgagtcatttcagtcaccttttgaggagatcaaatctgcagcgtcatatgctttcggaaaacattggtgttggaaatttattctaagtatttgcctttattttgaattgatt

SEQ ID NO: 11410 - DNA, 426 bp, Oryza sativa
  Clone ID: uC-osflcyp097a11b1
tatatattcctcttgtaatcgaattcttagctctcttctcatcagaatttgggtgtgcctcgtattctgttgtgcgtggcaacaaagtttttgccttggtcatttctcctagtttccacctctttcatatcgttaaaaacaagtggaaaatttgagatgtaaacaagtaaaaaaaaagaagtaacttttattttctctttgctggtctctattctctagctagtcatctcaggtcattttatctcgtctttcagtgtgattacaaagcaaggaaccctcctaccgtgttggtgagctgataaaggagctctgacgactcggatgcatggctttgccatcaatcaattgattcaacatggcaacttcgatcggatttgtgtttgttgaacttcttcaattgactcccttcaagttttctttcttctt

SEQ ID NO: 11411 - DNA, 480 bp, Oryza sativa
  Clone ID: uC-osflcyp097b01b1
ccgtgttgcggcgggggcgacctaaggcgagaacacgagcgaaaccagagagggggcgatggcgacggcgacggcgctcaaccgcggcctccgctccgggatccgcctcctcgccaccggcgctgaggcctccaagacagcttctcgtggattccatgccactggtgtgaagaggatgggagggcatggccatgatgagccctactacctccatgccaagcacatgtacaacttgcacaggatgaagcaccagaagccgaaggtgtatctttccgtgctgggagcagttggcattggcatcgcagtcccagtttatgcggttgttttccagcagaagaagaccgcctccggataagctctctaagtgctacataatgaacttactttctatagcactccgcgaagttaaaattgggacttcactttaaattggttattgcttgttactccattttgcacttgcctgaagttgtaagcttc

SEQ ID NO: 11412 - DNA, 326 bp, Oryza sativa
  Clone ID: uC-osflcyp097b07b1
gtctagccggaggccgagcctgccaaggaggaggtggcgcacagagcccgtcgccgtcgactaggcggaggtcaaggatgccgagccggcggcgcaggtggtcgaggaggtgatggaggaggttatggaggaaatcaaacaaaatgatgacattattctctttattgatgaagtgcacacgctaattggagcaggtgctgctgaaggtgcaattgatgctgccaacattttgaaaccagcttttgctagaggtgaactgcagtgcattggtgccacatcacttgttgagtacaggaaacattattgagaaagatccagctttagag

SEQ ID NO: 11413 - DNA, 284 bp, Oryza sativa
  Clone ID: uC-osflcyp097b09b1
cataggaaggcgagggagaggaagaagagacaggcaatgcttatggaacgcccgctcgaactgtttctaagagttattaggccattagcactataagagatatctcattcacggaggaagaaagtgtgtgtccaaaaaagccaacttcaatagatgaggtggagaaacatagcgagctatgtggtacgctcttgagctaggatgagagcaagatgaagtatggcaaatatttcaattgcttatttttaatgagtttattgccttattgactattatactatttt

SEQ ID NO: 11414 - DNA, 339 bp, Oryza sativa
  Clone ID: uC-osflcyp097b11b1
gtcaggttcctcctcgttgcgcttctactcgccaggcgcgccgacactgtccctcgcctcaccacccacatccgcacgctcctcgacgactccaagaagaccctccaagaagccgactacaaggagtggaagcacgtcgtccaagaaatcgcgaggtatatcagagctgactccccctttatcaacatgagaccactcaggtacagctacgcatttgatccttcccctgatactcttcctaccgtcccacctactgtcaagaagcgaggtctggtcttaagtgatgtcatgctttgcagttactatcaaatcgagatcaaatttacagacctcaccata

SEQ ID NO: 11415 - DNA, 413 bp, Oryza sativa
  Clone ID: uC-osflcyp097c03b1
gagtggtagagcttggaaattcccttataggaacaacaaagaggggaattgggccatgctattcaaacaaagttataaggaatggacttagagtcagtgatctgcggcatatggatacatttggtgctaaactcaataccttgctgagagatgcagctctgcgctttgaaggatttgaatacagtaccaagacccttaaagaggaggttgagaagtacgaaaagtttgccgagcgtctaggaccttatattactgataccgtgcactttatgaatcaatcaatcttgcagaataagaaaatattggttgaaggtggccaagccaccatgttagacattgactttggtactttacccaattgttacttccttgagttccttaatttggtggtattttcacctggacttggtatt

SEQ ID NO: 11416 - DNA, 116 bp, Oryza sativa
  Clone ID: uC-osflcyp097c04b1
gtcatttttgaaacggatcaagctaaacatcatcagcaaatctttggatccgaggcatcgagctaagcctagggatgagagacaggaacacattcaggtaggctacaagcgttttt

SEQ ID NO: 11417 - DNA, 497 bp, Oryza sativa
  Clone ID: uC-osflcyp097c07b1
tgatatgtttgatggggaccatgcaaaaaatctggaggaaatgaatgtatttgagcgagagaggtaagtacaggtatgaggtacggggaccctgagagggtggcaccaagtattgttgacacggatggtaacctacaaatataaggtagatgtgatgattttttactgattaggttagaaatataataggagaactttgtgctgatggggatttataaaggtatgaatttatctgcaatgattatttgctttgagcaatgttccgttctattgttagatcattcgatattttttatgtatatattttttttattaaaaaattattgtcttttttatttttattttatacttttatattgttaatttactatatttttttctatttttatcatttcttttacatttctttattcttctacttttccatttttttttatttccttattcttacttatatttatatcttctttcttttttttctttttttttattcatta

SEQ ID NO: 11418 - DNA, 499 bp, Oryza sativa
  Clone ID: uC-osflcyp097c08b1
gttacgtttgaaagggaccaacaaaaacatctggagtaaatcattagattcgtgcgatcgagctaagtaaaggaatgaaagacgggaacaacttcaggtaggccacatgtgtatttgacacggtagactatcaagtaaggtacggtatatgtgtagtatatagccaattaggtttggaatactattaggggaacctgtagcggatggggaattatataggtagacgataagctgttacgactatctgtatgatcattgaatcctgtgttttgctagaatcatacaaatgttttaattagtgaaattcttttaatttctttctgccttaacagtcttttttatacttttatttgagttcatttaattatctttttttgtatttcacatatattgtttatatttatcttctatttttaatttttttaattaactattttttttttttatcttaattattattaattttatttatttaaatattttaattcttattattttt

SEQ ID NO: 11419 - DNA, 488 bp, Oryza sativa
  Clone ID: uC-osflcyp097c10b1
aacaaattaccctgcaagaccaaaatactcttctaataagcttccttcatcaaaagcttcccggaacactaagtctgcatcagataccatcaaaggatcatcatcagctctagacacgatgtcaacttctgctaatggctatccatcctcgaagactgcaaacaaggcatctggtgcttccatttcaaaagggtatcctctgtctagcaagtttgcggtgcatactaaccaaggaaaagacaatctttaccaaagtaaagacattggtatgaaggaaagtggtagaagctggaacagtactgagaagctcaaggccagaagtaagctaaatggatatggtgactgtgatatatcagataacctcactgataactccaaaaatagtttgagccctcaaggtggtcattatggactatcaagtgcaggggggggcaatgatgttacaccttcacctgttgcaatgagccgagatgcatataatcttccag

SEQ ID NO: 11420 - DNA, 145 bp, Oryza sativa
  Clone ID: uC-osflcyp097d04b1
gtctcttttgagagggaccatgcaaaacaacttggggagatctatagatacatgccatcgagctaaccccatacatgaaggatggggacgcagatcgctttggcacctgagttctttatattctaagtttaatactctttttttt

SEQ ID NO: 11421 - DNA, 131 bp, Oryza sativa
  Clone ID: uC-osflcyp097d06b1
gtttatgtttgagagggatcatgcaaaacatcttcagtaaatctttggatttgaggcatcgagttaagtaaagggatgagggacggggacgaatactggtaggcgccaagtgtatttgacatggaaagatt

SEQ ID NO: 11422 - DNA, 564 bp, Oryza sativa
  Clone ID: uC-osflcyp097d07b1
tatacgtttgagagggatcatgcaaaacaacagggggaaatctatagatacatgcggataagctaactacatagatgaaggacgtggacgaatagatgttggaattgagcattatttgagacgcatagttatgcaaaatttctttgtttactttgatttattttattgtttatttttattttaaatattcttttctgtttattatttattttttattaataatatttatttttttattatatttttatatttctattcttaattatattttttatattctatattctatttataattattttattttacatttttctattattatttttatattttattcatattttactatttaattatttttatatatttttctatactatatatttattttttatatttttctatatattattttaaaatttatctttatttttttatttacttaattttatttctatttttctttattttttccaattttattttattaataacattctatatctttttttattaaatttaaattattttttatctttatacttatatatttttatttat

SEQ ID NO: 11423 - DNA, 127 bp, Oryza sativa
  Clone ID: uC-osflcyp097d11b1
gtacgtatacgacaaacaaaaaacaatctggggcaattctatagatatgtgcgggcgtttaatgacaggaagaatgacggggacaaagctcaggtcgtttttttatgttttttacatgagatgatta

SEQ ID NO: 11424 - DNA, 486 bp, Oryza sativa
  Clone ID: uC-osflcyp097d12b1
tgttatcttagctagccagccatggcgaggcgctgtccttgcctagccgtcgccatgctcctgcttggggcgtcggcggaggcgagcgccttcattgatgaagcggctgctgctggccgggggctcgggcatggcgcccgcttcatgagcaagcagggtcgtgtgacatacgataagctgccggatccggacccgaagcgcaaagccaaagcctcatcctaaacccacgccaaaacctgagcccaaggcagagccggagccaaaaccagtacctgagcctgagcctaaaccggaaccaaagccagaaccaaaacctgagcctaagcctgaacctaaaccatacccagagccaaaaccggtgtctgagccagaaccaaaacctgagccggagcctaaacctgagcctaagccagaaccaaaaccagaacgcaaagcctgacccagagcccaatcctgagctcaaaaccggaaccgaagccggaacca

SEQ ID NO: 11425 - DNA, 483 bp, Oryza sativa
  Clone ID: uC-osflcyp097e01b1
gaggtgtttgtttccccagtgttttccctgccgagacaacagctctgccatagttgcacagatgcaagttcattgcctctttggaatttaggtcaggctaagcagaattaggcctgctgggattttttttgttagccgacaacacctcagccataactgcacggatgcaaactgttagattacatgacccctttagaattcaggccaggctaaccagaactaggccaacatagaaaatttttcgttgatatttggattttatttaacacccgcatgagaatatggaaagttctctactttttttaagtttgggactaggtaccatgtcctagatatcgaataagagattactctgaaaaattttcttcataaactggtgtgaatgggggagcatcagtcattggattatacctgataatttagatgtacgttgtcttcctatggcttttcatctaatgtatatgatttattattcaatggaaa

SEQ ID NO: 11426 - DNA, 301 bp, Oryza sativa
  Clone ID: uC-osflcyp097e04b1
gtgtcttttactagtgaccaagaaaaacatcttcggtagatctatggatacatggcttcgagctaagcacagtggtgaaggacggggacgcattgagttaggttccgtgtgttctttatatcgatagtcatgccattttcttcgcttattatttggtcactctagtcgatcttcctttagattttttagttttatattttttcattatttttatttattttgttttttttttatattatctttattaatttttatttttttaatttctttctattttttttattttattttatattcttat

SEQ ID NO: 11427 - DNA, 89 bp, Oryza sativa
  Clone ID: uC-osflcyp097e05b1
gtttttgtttgagtgggatccagcaaaacatcttcaggaaatctgtggatccgaggcatcgagctaagcacaggaatgagaggcgggag

SEQ ID NO: 11428 - DNA, 292 bp, Oryza sativa
  Clone ID: uC-osflcyp097e09b1
atacatttgaaaggtaacaagcaaaacatctgggggaaatttgtagatatgagccatcgagctaattacattcatgaaggacggggacgattacagcttgtcactcttgagtacttgagacgtaaatgtactcaactttctttgttttctttgatttgtttttgtaacttgttttatatatttatttaatgttcttctaattttattctattttttttctattaatatacttttttttccatctttatttcttctatataattatctttattttattttttttttttttttc

SEQ ID NO: 11429 - DNA, 188 bp, Oryza sativa
  Clone ID: uC-osflcyp097e10b1
gtaaccactcctcaccaagtcaaagtttcttcctcgcgaccggcggcgagcggcggcggcggcgatgtctgggagaggcaagggcggcaaggggctcgggaagggcggtgcgaagaggcacaggaaggtgctgcgcgacaacattcaggggatcactaagccggcgaaccggaggctgtctagtaggg

SEQ ID NO: 11430 - DNA, 486 bp, Oryza sativa
  Clone ID: uC-osflcyp097e11b1
tctacgcgtgcggcaattccgacattcaattttgggtcaagcactagaatggtggcagcaactaaatcagatagtacaaatacagtggcaaagccagctagcagtttattgttcggtactggggatgctatagctgaagccaaatctactgcccaggatacagccaacaaggcatcatcaaatttaagtaccactcctatttcttcaaatatttcaagttttccagtcacatcctcttctgctttttcaagcatagcaacattttcatcttttatggttgcagcttcaaatgatggaattgccttaattatttctgccttaacagtaccttttacattttcgagtttatgaatcaactattttttgttttattttctcatgttaatctgcttatttcagattattttgtttatgttttaaccacctacctcttcttattctctctctattttttctcaaatttttattattttttttccttatttt

SEQ ID NO: 11431 - DNA, 453 bp, Oryza sativa
  Clone ID: uC-osflcyp097e12b1
gttgaggggctatgttctggagcactggaacggtttgagggtagagtggtgggggggctatttgtatatgtggaccaacaaatgtcagaacaaaacacatggaatcacacctcgtagatggctccggttttgcaacctagagttgagtgaaatagtaacaaaatggctaaaaacagatcagtggacaagcaaccttgatcttgttaccggacttaggaaatttgcagatgatgaaaagcttcatgctgagtgggcatcagctaagttggctagcaaaaaacgcctagccaagcatgtgttggatgtgacaggtgttacaatcgacccaaatagcacttttgatatacaaattaaacgcattcatgagttcaagagacagctgctaaacattttgggagctgtttacagatacaagtagttaaagggaatgagtgcagaggagataccaaaagt

SEQ ID NO: 11432 - DNA, 485 bp, Oryza sativa
  Clone ID: uC-osflcyp097f01b1
cttctctcctcccttccaccacgacgcgaccgacgcggcggagaaacccgcgaagccgcagtccagccagcgaggggccgccagccgaagctgaagcgagagctagggtttgctccaccccttgaacccgcccgcgcccccgctgccacgaggccgatcgagggttctgcttctgaggctgtcaagcctggcggctaattgggatggaccttgtgggatcgctgctggtgaacatgactcacttggttgacacctcggggctccagttcttcggctggctcatcaccgccggctccttcggcctcgccgcgctcatctacgccctcctcaggctgcagagggcggcgtcgctgtactggatcaaggcggctgccagggagaagaaggcggcgtggaagtcgttgcggtgccccagctccggccacacctggaccgaggactacttccgcggcggccagccttcgacgtgctgcgtgtgcctgtcg

SEQ ID NO: 11433 - DNA, 111 bp, Oryza sativa
  Clone ID: uC-osflcyp097f04b1
gaaagggatcatccaaaacatcatcaggaaatctgtggattcgaggcatcgatgtaagtaaatgtatgagaggcggtcacacatactggtaggctacaagtgttgtcgaca

SEQ ID NO: 11434 - DNA, 88 bp, Oryza sativa
  Clone ID: uC-osflcyp097f07b1
tatatgtttgatacggaccaaccaaaacatctggagcaaatctatagatacatgcgatcgagctaagtaaaggcatgagagacgggaa

SEQ ID NO: 11435 - DNA, 94 bp, Oryza sativa
  Clone ID: uC-osflcyp097f09b1
gtcacatttgaaacgaatcatgaaaaagattaggaggaaatttatggatacgagcgatagagctaactcaatgcatgaagggcagtgacgaatt

SEQ ID NO: 11436 - DNA, 180 bp, Oryza sativa
  Clone ID: uC-osflcyp097f12b1
cctgattcgataaggtcaggccaccaaacatgccctttctaagttactgcctttctgtgatctttctcagcatgtgatacttcagatgatcttagcagaactgaggccacctatacacttgaattgagcagaatttataagagtacatgaacagatttttttacacttgtcattttattc

SEQ ID NO: 11437 - DNA, 357 bp, Oryza sativa
  Clone ID: uC-osflcyp097g04b1
ctctgatcgatcgctcgctcgctcgcggggacgcgacgagagtacatcttgatcggacaatttcccgatatttcagagtgcaaggcttgccagcaagaggacaacttgttccgttgcaaccgagccgccgccttccacaaccgaagaaccagagatggatcttccaaaggagatattcctgaaagaatacaaaaagcctgattacttatttgactcggtcaatttggaatttcaacttggtgaaaacataacaatagttacatttaaaatttgctgtatctccaggaactgaaggtaccttctcttcacttactttttatgggcgagaatctgaagctgctattcaattaaagttaa

SEQ ID NO: 11438 - DNA, 119 bp, Oryza sativa
  Clone ID: uC-osflcyp097g07b1
gatgtgtttggaacggatgacgaagaacatcaggggcaaatgtatatatacgaggcctagagagaagcaaactgcagagatgcaggaaccatttcaggaaggcaccatgcgtatttgcc

SEQ ID NO: 11439 - DNA, 406 bp, Oryza sativa
  Clone ID: uC-osflcyp097g11b1
tctagaagagggagagcaccaaggacacgcgactagcagaagccgagcgaccgcctcctcgatccatatcttccggtcgagttcttggtcgatctcttccctcctccacctcctcctcacaggttcttggtgtagcttgccactttcaccagcaaagtttcatgtctgatctcgacattcagatcccaactgccttcgatccctttgctgaggccaatgctggagactctggtgcggttgcaggatcaaaggactacgttcatgtacgcatccagcagcgtaatggccgtaagagcctgaccactgtccagggattgaagaaggaatttagtttcaacaagatccttaatgattcttaagtaagaagttttgttgtatgctactgcttttcaggtcccattgcttg

SEQ ID NO: 11440 - DNA, 120 bp, Oryza sativa
  Clone ID: uC-osflcyp097g12b1
gtctatatctggggcacccacgtcgtgctggtggcgctctacttagtgccgttcctgctcctcgaggccacatacgtgagcgccgtgtgcaccaagatcctccgcggagggtgggtgccg

SEQ ID NO: 11441 - DNA, 357 bp, Oryza sativa
  Clone ID: uC-osflcyp097h05b1
gccgtagcatcctgcgaggacctgcacacttgagtccgacgaggaagccatatgctgggggattgcatactgagtcaaaggggggcttaaaaaggagcaagaagcaatgaagtacttggaaagaagagagtgtgagtatgaccagaagatctatgtggatttctacaaggaaggagattctttgaagccagctgtgacaggtgtactagtctttgtatccactcctgatccagtaggcaacaaatactatctagggcctgcttctttggaggacattggcaaggaaaatttgctacagtcaatggctccctattgggaatatcagtggattaccctgtctctcaatgtataaagttt

SEQ ID NO: 11442 - DNA, 82 bp, Oryza sativa
  Clone ID: uC-osflcyp097h07b1
tatgcagatagagcggctagcagagaagggcaggaagggtattaaatctgagccatcgaggtcgagagacgacatcggctgt

SEQ ID NO: 11443 - DNA, 310 bp, Oryza sativa
  Clone ID: uC-osflcyp097h09b1
aataaaaagcaaccgatgaaacgaagatttaatgatcttagcgaagatgaggaagatccgttggcaatgatcaggagcatgtttaggtatgatcctagtaaatatgcatgcagagatgacaatgattgcgacatggaagtagtattggttactatagaaatggaagagcaatgacgcgcgaggattgcaaaggaggaggatgacgagcaatttcttctgattgaggtggatgacatatgtctgtatgttcagagggatgcaataatgctttttaatgtactgttatcagtcattgttatagtttttttta

SEQ ID NO: 11444 - DNA, 157 bp, Oryza sativa
  Clone ID: uC-osflcyp098a01a1
aaaataattaaaatgaatggttagccgctactttagaattaatggcggcatacattaaaagaaaactaaggcaagcattgaaatgtacatttatactgtattatttatacatgttaataaataaatgcaaattattattatgcaaagtagtttgggt

SEQ ID NO: 11445 - DNA, 187 bp, Oryza sativa
  unsure (1)..(187): unsure at all n locations
  Clone ID: uC-osflcyp098a02a1
cctaacttctaaggatgaaaactaccagtaatcctccttttgtttcctttttactactattacataggngttgtgacaacaacagatatcagtaataatcatagngatctaaataaataagaacaagcaattggagtttgggaatcacttcatcctttcgttcggtgcctgcttcgtcgaggtcaca

SEQ ID NO: 11446 - DNA, 392 bp, Oryza sativa
  Clone ID: uC-osflcyp098a03a1
agcaatgtaaatactcgcattccaaaacagccgatggacaataattggactcagagcatcagttttaaccgaacagaaataaacgagagtattaaacgactgacatagttgcacatttgcgagcagtatattaacggctccatgtaaacgaggagcctatgcccgggggtcaaaacttaacaaattctagaactagatattctcaacttgcagtacatgtcaaaccaccatttgaaacgaggactcactttattcttggccgtgcagcccttgagccacacttggcaccggtttggggtccttcttttccacgtatcttgatgacgccaacagtccaccgtttgcctcatgttacgcaccggaaaacgaccaaaaggagggtcctcaaagaa

SEQ ID NO: 11447 - DNA, 204 bp, Oryza sativa
  Clone ID: uC-osflcyp098a04a1
gaatcagtctccaacatacttaaaatcatagaccacaccatacaggaaacatagtataaacattgccatagagagtacagctgatagcagctcgaaatattctagcattactttggtagcatacctctacaaaacatatgcaagacatcatccagactcttagatcattggcccataacatcatttcaacattggatttgccta

SEQ ID NO: 11448 - DNA, 169 bp, Oryza sativa
  Clone ID: uC-osflcyp098a05a1
gcgaaattggccacattgaaccaagaatgaggcaatttcttgttgccattcatccattctacctttaataacacattcctgtaaattgtagtgtttgagttgctcatgactacacttacaaggttgataaacttcattcactgtaccacacacatataaagatcctacc

SEQ ID NO: 11449 - DNA, 426 bp, Oryza sativa
  unsure (1)..(426): unsure at all n locations
  Clone ID: uC-osflcyp098a09a1
aatacaacagatttaacttattattgccaggatatatcccctctcatcttttctctacaaaatgcaataacaatatatgtagcaacgaatcaaggttcccaacacaacacaacactttcttaacanataacaactgctacactcatatcgtggcgtcacattccgtgtcctagacatctttctgcccttctccttcttgtgtcctacaggtaataccattntatgcagctgagtccaagtcctgttattcacttcatggcagccatgcaattgggttttcagtttggcttgcttgcctgcaggttgcctgccttggcagcaagcggccctttctccattctcttggaacacttgccatttggcagagggcgttcctttgctaggctgccgcagctacctttggcttccattcctttcctgcagcac

SEQ ID NO: 11450 - DNA, 250 bp, Oryza sativa
  unsure (1)..(250): unsure at all n locations
  Clone ID: uC-osflcyp098a10a1
aatacaacagatttaacttattattgccaggatatatcccctttaatcttttctctacaaaatgcaataacaatatatgtagcaacgaatcaagagtcccaacacaacacaacacntttcttaacaaataacaacgctacaccatacgttgtgcgcacattccgttgccaagacaactctgacctttcttcctcttggtgcccctacaggaaaaaccattttagcagcttgaagccaagtccgtttatca

SEQ ID NO: 11451 - DNA, 456 bp, Oryza sativa
  unsure (1)..(456): unsure at all n locations
  Clone ID: uC-osflcyp098a11a1
ccaccaaatccacatattacattataatcataattatgaatactttccttgaagagcatcattacacaaaatcctttgcctcccctcttgcatgctcaagaaaaacctaccaattttctcctccctacccttaacaatccaaaatccagtccccactctaactactattgccaaagtcaccatttgtgccatnctnnggtaatcccttctaccatccaactagctacaatgaaagagcaaattatcccttgtccccctacagtcatggcaatttaagaattgaatttgcatacattaaacagttgacatcattggccccttacatgnattgaaacattacttgatggcttctggttcctacccacactaccacaacaaccctnttcttattcctagatcagaagcactggtactggtacaaggtctatgggttggctggttccatgagctggcacc

SEQ ID NO: 11452 - DNA, 69 bp, Oryza sativa
  Clone ID: uC-osflcyp098a12a1
aactggatcttggtatagttgcatcaagaggtattagcaattatcccctgaggatgattggtagcccaa

SEQ ID NO: 11453 - DNA, 228 bp, Oryza sativa
  Clone ID: uC-osflcyp098b01a1
gcacgcgacgaagctggaccttttattacggacgcccaaaaaaaagggggggaaaaaaagaaaaaaataacacaaaaaaaaaaccacaaacagaaaagccagaaaaaaaaaggaaaaaaaaaaaaaaacaaacaaggggaaaacaacaaagggaaaacaagaggcaaagaaaaaaaggaacaagaaaaaccagaaacccaaggaaaaagaaaacaaacagaaacaaaa

SEQ ID NO: 11454 - DNA, 362 bp, Oryza sativa
  unsure (1)..(362): unsure at all n locations
  Clone ID: uC-osflcyp098b11a1
gagtcaattgacaagattggtagggatgttctcccgctgttctctggaaaacaaaaacagtattgagttctctacacagtaagcggctcagtctacaactctacagttgcttactcaactagattcatataaacgtccattccagaacaagttccaacaatgtcactatcacaagttctgctcacggatgtggcaactttcaaaccttgcaccagttttcggnaaacaaaattttcagtgtctatttgtctctaaacagttgacaccgttttggcacaagatcggtttacgggcccttgtcatttcccctttgaatctaggactttactgcgctccagcagcagctggcccccatgacatgt

SEQ ID NO: 11455 - DNA, 300 bp, Oryza sativa
  Clone ID: uC-osflcyp098b12a1
agccaacaattaatcttatgaaaactgtatagttctaataaatatatatggacacaagttccctataggaatgtatcgaactaccgttcatagcttcacgtaatgcacataacacaaaaggtataattttttcaggacaattggaacatccaaaatcacacgctgacaggatgacatactttacaaaagggagcttttctttttccattaaaacttgtaaccgaataacaaacccccaatggtaattcccatgtctactatttgattggtggaattggtaaaactggaaaaaggcggaaa

SEQ ID NO: 11456 - DNA, 410 bp, Oryza sativa
  Clone ID: uC-osflcyp098c01a1
gacagaaaattcaagttcagtaaggaaaatctcgagtacatccaagctcagatcattaagataagatatgatgctaatttaatctagggctaccagtacaagatgagaaacatggtgccattgcaaacagctaactaattccagtagatcacatcttgttgcagtccttcccttttcacggtttccacttgctttcaattttgagctcttccttcttccttcgctatccattcctctgacaggtacttccttagtccttggaccttgtgccgtcccgccttgcttgccatacgcttgtcgtaggctgcttgcggttgcctcttcgcttgctccttccggctacctttccacggtagtaattcgtgggctaccttccacggttagtaaatcgttcgtgcttccctggaccg

SEQ ID NO: 11457 - DNA, 459 bp, Oryza sativa
  unsure (1)..(459): unsure at all n locations
  Clone ID: uC-osflcyp098c02a1
gaatctgaataacagtgctacctcaatttgaagtcgattccttcacgctctcgaaatacaagaatccgatgaattgatgctacaaataattatgactcgacacgacaaaaagaataagaacgaacagttgttacaagaaatgcagcagtatccatcgaatttcataccccttcctttcccatggnagnaattttcagncaggttgtcttagaaagtcnggaagcaccgcaattatcgnctaccccgaacgatttatttttgcaaatttggcaaggctagtttaacaagccgattctcttgcaattcaaggacaatcactccactcgtattgaaccccaaagcttggcgaaggaatgaagggccaggaatcagcattgaccgatagcaaggaaccaatccttttcctgcctaacaagccagttcttggttttctttgcaggcttctactccttgctgtgc

SEQ ID NO: 11458 - DNA, 462 bp, Oryza sativa
  unsure (1)..(462): unsure at all n locations
  Clone ID: uC-osflcyp098c03a1
gcacaaactggtccttgttatcaacaacactccaacagtcatgctgatacaggtagcaatgcatagcggatttacagccaaatcccagacagttactatgcataatgcacaaacgtcatggtgccagaaatttaattcttgtttcattagaaggcggaaaccnncgcttctttaattaccattgcatctgtgctattatctactattaaggtttgngcgctttttgccttcctatgcaccagaaactgtgggccnnatctctccaatctttcacttttggagtttcctttcaaggaaagtccggcgtttattcaaaccaaaatacctacttttcccagccatttcagggtcaaggcaaaggggaggcaatcttttgtgtttgaggccctcggtagttgggaccctggccttgcccgcaaaaaatcttttccccctaagttctttttgtaaaccaaactcaac

SEQ ID NO: 11459 - DNA, 64 bp, Oryza sativa
  Clone ID: uC-osflcyp098c04a1
gttattaaccattttcttatgagaatttacgttttttgtggcacatgtaagccaacttacattt

SEQ ID NO: 11460 - DNA, 78 bp, Oryza sativa
  Clone ID: uC-osflcyp098c08a1
ttttttttttttttttttttttttttttttattttatattttatttaataaaattaaaattttttttaaacaataatt

SEQ ID NO: 11461 - DNA, 435 bp, Oryza sativa
  unsure (1)..(435): unsure at all n locations
  Clone ID: uC-osflcyp098c10a1
gccacttcaaatggcttagcaataccaaactaacttgcaggataaagttgatacacatggtgaccagttgtcgatataacaccagttgtgatgaacttaagaccagaattgaaaagaaacagtttttttgtctttggcaggagtagtagcatttgatgagctcatgtcaaggtcccatgtcctttagcttgcaggcatacttcttntgtctttatatttctactatatttgtaacttccatttggtattctgccttgttggccataaaacattcatagcagcaggtaaccttcctttccatcttcaatgaaaaaaatggctgacttcaggtacatcaggccaagtatctgtaatgaactccacgatatcatatgatatatccccttgcacatcaatttgctccttttcagtggggcccttaacaacagatgctcc

SEQ ID NO: 11462 - DNA, 447 bp, Oryza sativa
  unsure (1)..(447): unsure at all n locations
  Clone ID: uC-osflcyp098c11a1
gaacaatcatggccaacgaggggctaacaacagtttagcacagtacaaaaagtaaacacacataacaggaatatgcaatgcaatggaaccggagtatactgacaaaccaatcattaacctagagaactacttattaaccagctacttaatagtcttcttccattcgtcgttctttcgtcgtctgcacccctcggtcacccgactttcctcattagtcctttctcatagggcagctcaaagtcctcacggngctttctgagnaatttcacnctttcttcccatttccctcaccaacgttaccatgtgcacaaatcgcacgcttagcatacattcaagttcgaacttgtggttcgatgcgcgaggaaaacctcagcaacagcagtgttgttgctgaatcatgcacactgcacgctgaaccttagccaggtcaccaccagggacaacaga

SEQ ID NO: 11463 - DNA, 182 bp, Oryza sativa
  Clone ID: uC-osflcyp098c12a1
ctaaatcacaactctgattcagtgatgaagagaacttcacttctaaaagagtatcaacttgttttttacatcggttacatcatagtacaagtacacaatcaacaaggcatgcagtgctccatccacaattacattcccaattacatccaccatccatttcacagccctacttccgattcgga

SEQ ID NO: 11464 - DNA, 408 bp, Oryza sativa
  Clone ID: uC-osflcyp098d01a1
aaaaaaaaaaaccattggttcacattcaagagataccagtaactcgggacatttcagtacctagctcaatatcttctgagctgcaaggaggaagagggagttccgtatgccttttacaactgactccctgaaataaaaattgtacccaggaaagaatggctagatctcaaattctccttatttcaatagtaccggagataaaattttgagttatttgctaactgaattataatacaagcggtacaccaaacagtttccccttctctattagggcttttttatgtttccttttaaatagtttagctcaatagacttgggatcagcactagaatttcagccaatatagatggaaccatttttcttttaccaagtacatgggcagaacagctataatctgaatgcactcta

SEQ ID NO: 11465 - DNA, 180 bp, Oryza sativa
  Clone ID: uC-osflcyp098d06b1
gtctttcccgggcgaagcgaggagaatgcaacgggtcgggtacaaagctgggacgccctgaaggactggccgaattaagaagtgcttggctaatcggacccagaactcggagatccaggtcacccagcctggttgggtaccctataagaagaagcatagggcattggagaacgagttcta

SEQ ID NO: 11466 - DNA, 83 bp, Oryza sativa
  Clone ID: uC-osflcyp098d07a1
aaaaataaaaaaccattggttcacattcaagtagataccattaacttgggacatttcagatacctagctcaatatacttctga

SEQ ID NO: 11467 - DNA, 66 bp, Oryza sativa
  Clone ID: uC-osflcyp098d08a1
tttttttttttttttttttttttttttttttttttttttttttttttttttttttataattttttt

SEQ ID NO: 11468 - DNA, 66 bp, Oryza sativa
  Clone ID: uC-osflcyp098d09a1
cttacaatacggttttactaacactctgaacattaattgtcgacctgggtgtaaattaacatctat

SEQ ID NO: 11469 - DNA, 369 bp, Oryza sativa
  Clone ID: uC-osflcyp098d11a1
cagtgcagaaatttttctgaaacaaaatgagtacatcatcctcctctatcatctccctccttaattaaatcatcacagaataatcatatatttactccgtgatgcagtagtatagtgtgtgacgaaaagttccggagcagttaaataaataaatccaaaaggccgaattttaccgaagccaaggcaaagcatttagtgggttatttaaatcttcccttcaatttaaggggcctccttcctccttaaattcaacggcgagggtcgggtagttggctgcggccttgggcgggcgtcgcccgttcggccgggcgggccttgggcgttccatggacggtcttcgaagggcgccgaacaagccgccttcaccct

SEQ ID NO: 11470 - DNA, 427 bp, Oryza sativa
  unsure (1)..(427): unsure at all n locations
  Clone ID: uC-osflcyp098d12a1
aagcaaataaattcattaacatgcaaatcaagccctgaagaagagctgaactgagcacagtgatccatgacagattaaaccaagacactcactctcaccgacggtgtgaaatttgcaggaacatgtacattactaaggnaagnagacttaattattttattggcacantaaaagatgatggatgttatcgatgtattttcagaggagccctcgttgaggtagttcatcggaccggtggttgtacttggacgttccggggaagagcctgggtggccctccaacggtcggttggcctggaatccaacggncgttcgttcgttctcccccctttatgtaccctgcgtgccgcgatcgacagcacgatgttcaacggggatctccgacttctggatttgcttgagcacggcgtccttgggcacgtacaccc

SEQ ID NO: 11471 - DNA, 273 bp, Oryza sativa
  Clone ID: uC-osflcyp098e01a1
caaatctcccaaatatgtatatatgacaagtaacatatagtacttaaaatgtataacattccccaccaccatcctttcttttttttaaccaccaagtctatgttccatgttcaccaagaaaaaggtgcccccatagaaaatttcttttacaaccaccagaagtgaacccccaaaatccagcaataagtaaaatccattgccacaatttaaaggaaagggggaaaaaattccaaacattttctttctcgttcattgaataggttgaattagaac

SEQ ID NO: 11472 - DNA, 122 bp, Oryza sativa
  Clone ID: uC-osflcyp098e03a1
cctcatcctttttattcattcctcccagagagacggatccatggaagttttcttgccctcatcaggcaagcagagcacaacacacaccggtggacagctggaatctgctatgcaacacagac

SEQ ID NO: 11473 - DNA, 84 bp, Oryza sativa
  Clone ID: uC-osflcyp098e05a1
ggtgataagtgaaatacttaatagtaaatagactcttttgatggggaaatgacaaacatgcagcagttggccattaataccgcc

SEQ ID NO: 11474 - DNA, 102 bp, Oryza sativa
  unsure (1)..(102): unsure at all n locations
  Clone ID: uC-osflcyp098e07a1
cactatagaacgtagctactgacgtatcgcatcgcacgacgttacgtcataggctatggcattccttattctgagccggccccgttcccttnntttattttt

SEQ ID NO: 11475 - DNA, 152 bp, Oryza sativa
  Clone ID: uC-osflcyp098e09a1
aaaaaaaaaaacccaatgattcacattcaatactgaccagccacacggaacatttcaatacctatctcaatttcttctgagctgcaaggacataaaaggagacccgtagccttttacaaccgactccctcgaaaacaaaaatgggacccagg

SEQ ID NO: 11476 - DNA, 316 bp, Oryza sativa
  unsure (1)..(316): unsure at all n locations
  Clone ID: uC-osflcyp098e10a1
ggaaagtattaacccaccaggcttgcactgcctttcgttttacagggttacagaggaagagtcatacagaaaaatttggcattggtgcgataatacatagcaaattcatccagtttgtgaagagcgtataacaattcttttgtggggatttataaatggatcttggttctatatctgggcattctaagggtctggaaatacttggacgcaatatttctgtgcacagantccctattacacaatttacttattttctcaccaattcagagaatttggatttttccccctgaaatggttctaacaatgcctgggtaaa

SEQ ID NO: 11477 - DNA, 438 bp, Oryza sativa
  Clone ID: uC-osflcyp098e11a1
aaatacttaatagtaatagactctttgatggagtattacaacatgcagcagtggcattaatacgccagtacattaattaagttacacatatgcaggcctccatttttggtttcttttaatttatccgtattacagaatttttctgtagccctttgcagtatgattcactttggatattcatgtacctagttaatttaacaaattaggatgcattaccaaaagatgggcccaaacgaacaaacatgaaagatgccgtgccatcttgcacattggtctggccctttattttggttggttaagtacctccaaattaatttaaacaaggaagatgaatgcatttctttgtgcccttagtttttcttacacatgccttggctttcacgttgaagcctaattcgcaaatcttcacccccaacgaccttaatcacactgggagag

SEQ ID NO: 11478 - DNA, 350 bp, Oryza sativa
  unsure (1)..(350): unsure at all n locations
  Clone ID: uC-osflcyp098e12a1
gcgaaaatgaatttaatttccttccaaaactggtagatgaacatagatggagagtatcaatttgggtctttaataattaacatcttctgctgagttacaaactcagagctcaggttatttggcacataaacattcttcatggaagtggaccaaaacttatgggttacataacatgttcttccatgtgaaaaattaggctcagggaattaattttacaacagnaggtatacacacaaaactcatgggcaaacttgtacaacttggccttgtggccagtctgcaccccctacagattctgagggtttccttggtgttgggggaatctttccttccattgtttgccagccttt

SEQ ID NO: 11479 - DNA, 201 bp, Oryza sativa
  Clone ID: uC-osflcyp098f01a1
atccaaaaaaaatatattagtagaatgtagtaaagcacgagatgtaaatttatgtagctcaactaatcttgaaattgagcaacgtttgatgacggaagctgtcaaaacagaacaaaaaaatggcgtggcgtgataacattagccattagacgtttgggcattcggttatctgcttgaattaccccttccagtttagcgcag

SEQ ID NO: 11480 - DNA, 234 bp, Oryza sativa
  Clone ID: uC-osflcyp098f03a1
atatatctagcttgctataatatcattggttagaagactaaatagacatatatacaagcttggtaatgagctaatggatataagcgggcttgaagatcagaagaagaagaagatagagaattacaacaagaagtaagagaacaaaaatgataaacgacgacctgaatgaagaatttcagggactacgctaagaatgagcgtcggcattgcctgcatatgggtttggtttgatgg

SEQ ID NO: 11481 - DNA, 225 bp, Oryza sativa
  Clone ID: uC-osflcyp098f04a1
attataaaatgacttgtattatattcccaacattaaagtttgatattcggatacattttgctcactgtggcagacaaagcagaccacctagagcccttttattcagaatatattcaagataataaagaacattggttcatagccattatactaagtactatattgaatagttctggcttgtgctgcctttcacaaaagttaacagtagtttgatccgccttattg

SEQ ID NO: 11482 - DNA, 92 bp, Oryza sativa
  Clone ID: uC-osflcyp098f05a1
cttttcggcggccctccttttttttttttttttttacagcttaaaatagcccttttattatgaagaacatggcgctatataattaaatatat

SEQ ID NO: 11483 - DNA, 57 bp, Oryza sativa
  Clone ID: uC-osflcyp098f06a1
ttttttttttttttttttttttttttttctttttatttttttttttcattgtctttt

SEQ ID NO: 11484 - DNA, 88 bp, Oryza sativa
  unsure (1)..(88): unsure at all n locations
  Clone ID: uC-osflcyp098f08a1
gacgtatcgcatgtcacgaccgtacgtcataggctatggcatctcttatatgtagcggccccgtcccctttttnnttttttgtttatt

SEQ ID NO: 11485 - DNA, 180 bp, Oryza sativa
  Clone ID: uC-osflcyp098f09b1
tcggtagcagcagcagctgagctcgaagcagcagagcgaggtagacatggccgccgccaccatggccctgtcgtccccggcgctggccggcacggccgccgcgaaggcgctcgtggagggacgccccaccatgcgcatgtccgcttcttaatcctttcctcgtattcttcttttccttcc

SEQ ID NO: 11486 - DNA, 406 bp, Oryza sativa
  Clone ID: uC-osflcyp098f11a1
acagcttaaaatagcccttttattatgaagaacatggcgctatatattaaatatatagctagataaaaaaaaaagaaactatgctgaggaatcgatcaaggaaactcaatcgtgcagcagcatttctccttgttattatacaaacacacgtacagcatacttagattcagcatcaccatggcgaaaacagtcgtgtcatgtcatctcactttgctttggatgcgctccagcgaagcagggtctgcctgaactcgagcagcttgtcggcgtcatccggcacgactcccttggccgcgtcggtggcgcggaaccgctcctcccacgcggccagcgccggcgtcctcgccgggtcaatcagcctgcgaccgatcagcttggtcatcgccgtgaaccacccgaggtagcc

SEQ ID NO: 11487 - DNA, 398 bp, Oryza sativa
  Clone ID: uC-osflcyp098f12a1
cttcaaagaggaatggatcactgtctcagcagttcttcaaagaggaatggaccacagtctcactgataaactgtttcatataccattacaaaaaaagcatggatatgactagatctcactggaaaaggaacatgctccacatgtatgccacaagctcggctgcctttgctatttcaattcctcccattggacagaatggcactaattctagggtttacattcagaggggattaattacatttaaatccatgccagggggtcctggtagtgggacagaaccagcacaatgggcaagaagaatattgtgaacatgggatggagcataaggaagtatgccaatccattctcgggctgggctgttgcatacttgcaattgtcccaaagttccaaacttgcag

SEQ ID NO: 11488 - DNA, 262 bp, Oryza sativa
  Clone ID: uC-osflcyp098g01a1
gaaaacaaccaaatttgttcctaaccgggaacaaggaggagctttgggggtgccaattggaaattggcctttttcaatcccaaactacgcataaccgttacacacgagagtgcttttatttatcacactcccttcctttcacttatacacttatatggtgatatttgaaggaggcaatttattgtagccactagaatattttatttctcagaacgaaaccacgaggagagaaatgccttaagtttgtaaccctttgagcttg

SEQ ID NO: 11489 - DNA, 321 bp, Oryza sativa
  unsure (1)..(321): unsure at all n locations
  Clone ID: uC-osflcyp098g02a1
gcatgacagaatggagaggcatcgatcatagatcaaaactgatcaaaattttacagagcatgccatgcacgcttcagctgcgattttacagccaaatcgaatcgattgagataactacatactgtgtgtcccttcgggcaacgaccagttctaaaattcattcatgggacacaggttgatgcccatttagaagagggnaggttgtcaccgtcagggaaggttgaaccgccgatcgaaagcagtcgcaagattcacccagatacggcaggcaaggttcacattgaggagccttttccgatttcccaggttacccctgctgca

SEQ ID NO: 11490 - DNA, 95 bp, Oryza sativa
  Clone ID: uC-osflcyp098g03a1
ccgccccccttttttttttttttttttttttttttttttttttttttttttttttttttttttttttttttttttttttttttttttcaggacca

SEQ ID NO: 11491 - DNA, 72 bp, Oryza sativa
  unsure (1)..(72): unsure at all n locations
  Clone ID: uC-osflcyp098g04a1
tatgacgtaatgatgcactcctacggaattgttggcaccctatattagcgggncgctccttttttttttttt

SEQ ID NO: 11492 - DNA, 97 bp, Oryza sativa
  Clone ID: uC-osflcyp098g05a1
agagggagcatccacctctgctgctctaaggaaacggcatttattaaaccactattaattattcatagccaaacaaccagcactagttccagttgac

SEQ ID NO: 11493 - DNA, 120 bp, Oryza sativa
  Clone ID: uC-osflcyp098g09b1
gtaggacccgcgggaactgatgaaaagcctacgttttatctttaaaccggagtctgttcttgcgatacaccaaattaagatgctctcgtataactagaatcttagtgcgagaaatgctgt

SEQ ID NO: 11494 - DNA, 433 bp, Oryza sativa
  unsure (1)..(433): unsure at all n locations
  Clone ID: uC-osflcyp098g11a1
agagggagcagccacctctgctgctctaaggaaacggcatttattaaaccactatttttattcatgccaaacaccagcactagtccagtgacaaccaaacgacaattcctacactccaaaagtttacatttatggttctcaaatagtgatacatatgctttgagagttgaaacccgtcagatacttngacatagtttatnngaggttgcccctggnacgtttggcaaaaaacttncacggaagnatttgttcgcagctctggnnacgcacaaagttctgcatcagcatggcactgaaaatngtcaacggtggtgcctcaactgagtcacagactttcaatgngcactatggaccgggatcggagaagaaattgctgatgaggtcttgattaactggagcattcttgtcaacagtcacaaaagcttgttgggtc

SEQ ID NO: 11495 - DNA, 104 bp, Oryza sativa
  Clone ID: uC-osflcyp098g12a1
ttttttttttttttttttttttttttttttttttttttttttttttttttttttttttttttttttttttttttttttttttcttttttttttttttttatttt

SEQ ID NO: 11496 - DNA, 76 bp, Oryza sativa
  Clone ID: uC-osflcyp098h03a1
gctctcttaaactgattgggatggtttcaatttagttgcactttgtcgatgacattgaacacgttaacatcaaatc

SEQ ID NO: 11497 - DNA, 92 bp, Oryza sativa
  Clone ID: uC-osflcyp098h04a1
acagaaggtaactcaaatattatttcagggtattgaatggacccccgggctattcattatctcaaattagttgttccaatgggcaaagaact

SEQ ID NO: 11498 - DNA, 125 bp, Oryza sativa
  Clone ID: uC-osflcyp098h07a1
gtaggtcaatggcaaaaaaggtttcctaatccaataacggcacggtaatgatgaattactaaacgattcttggcgatcgaacaagcacgcagccgctttacagtccctgatgctttttttctaag

SEQ ID NO: 11499 - DNA, 173 bp, Oryza sativa
  Clone ID: uC-osflcyp098h08a1
cgtagaatgattggtccatattttattttggatcgggctgcaaaagccaaataagtccccccttgacatttacatcaagtacacaaccaaaagtaaaacgtgcgagcaaaaaaaagttctccagaattcactagcatcggcgtaaacgtactagtttaaaccatatttcacca

SEQ ID NO: 11500 - DNA, 435 bp, Oryza sativa
  unsure (1)..(435): unsure at all n locations
  Clone ID: uC-osflcyp098h12a1
aacaacaaacatcactagattaaatattaaaacacaaattgccagccatccctgcaattagactaagtcttggtacagctgcattagtggaggcatgatgctatcactaggacatgacatgggagataaccagctgggcacaagttctgactacaatgttgagnaacangaacaatgnngaaaagataagcattcggtcctacatcgactatagccataagnnacatatttacatnngcatgtaatcggtgnaatacattagnnatgatattacagnnaagggctgagnacaatcgaacatttgacattcgctggngcttaatctgttagcataccatgttttcttccctgngagctcaatatgctagtaggacgggtatggaaatttggttgcctgtcagtacgacggctaacgtcattcagaacagaaccaaa

SEQ ID NO: 11501 - DNA, 70 bp, Oryza sativa
  Clone ID: uC-osflcyp099a02a1
aggaatgtatactcggattccacaacattggaagggcacaaataaggttttaaacatcccaaatttaaac

SEQ ID NO: 11502 - DNA, 55 bp, Oryza sativa
  unsure (1)..(55): unsure at all n locations
  Clone ID: uC-osflcyp099a03a1
aaaggaaacccaactnattttttattgacatatgtgggatgaaatccaataaaac

SEQ ID NO: 11503 - DNA, 435 bp, Oryza sativa
  Clone ID: uC-osflcyp099a04a1
gataatagacaagggtgtagatttcagagtactacgcgactcgagaatattaaccacaaccaaggggatgtaactttgcacagcacggtgtagaaacatgggccagagagaaacatcagctcgatgttatccattcttcaactccattcatatgagcataaaccagactagttacaattaccatcagctttgaacaacttcgcgtctactgtcttcttggcttccaagtttccaaccttaatctatctctccgaaccagagaacgcatcaaataccccacagcaattccaccatgttgcccgctgccctgctgcagccacagccactgcaggtccccgggccacctctgtagtatcagctgcacccagagaccgtgacaccttcaccacattcttgaccaacaccccaccgctcttcgtctcccattcctgcacc

SEQ ID NO: 11504 - DNA, 402 bp, Oryza sativa
  Clone ID: uC-osflcyp099a05a1
cgaatccaagaatggacaaacacctcagagctaaccaaaaagaggaagaacaaggcctcaagttcgttcacagcgagtaaatgaactcgaggcatttctgtgcctgcctactctagtaccataagatagaagacgataacagacagaggacggttgtaagttaaaccctgttacccacctgctattctacaagaactctagaactgtatacactttatacagttgacctaccaagcaccaacacaagacaacttctcagaatctcatgttagtagccttttcgaatcaaggatccgatctgaactcttgaagttgtacaccgattcaaacgcttccatgcaaacgctggcgaatcccggcatcgcctgaaaaacgttagggaaacctgtctgaaggttgttc

SEQ ID NO: 11505 - DNA, 399 bp, Oryza sativa
  unsure (1)..(399): unsure at all n locations
  Clone ID: uC-osflcyp099a11a1
acgacaaaccacgaacttggatattaaagatgccacaaagaaggttcacataaacaacacaggtcacagcagcgaaagctacaagcaaaccctgcataatcgaaaagcaaatgtttttcaaaaccagacacacaaactgatagatagaagcccacacggacagatcataggaatagcagcagtaatcaagcattgccaaggcaccagggcaagaaccctgaacctctctagtactcgtcaccctcatcaccctcgtcaccatcgtcgaactcggagccgaccttctngtagtccttctccagcgcggcgaggtcctcgcgggcctcggagaactccccctcctccatgccctcgccgacgtaccagtggacgaaggcccgcttggagttcatgaggtcg

SEQ ID NO: 11506 - DNA, 300 bp, Oryza sativa
  Clone ID: uC-osflcyp099a12a1
ctccttgattactatttcatttcattccgatagatagcaacaagcagttcaaacaccataaccaaagcgaactcaattaatggtaacatcacggccgaagaacacctaacactggatggatggatagagggcttaccgacttgagagagccaatggcacacgataacgaacttgacttgatgataagcatgataactgaacacggaatggctaaggataacatggccacgatggcgcccgaccaatcagaccctccagattcccgccggagttcgccgacgttagccgccgccacggttg

SEQ ID NO: 11507 - DNA, 423 bp, Oryza sativa
  unsure (1)..(423): unsure at all n locations
  Clone ID: uC-osflcyp099b01a1
accaggactacatctgaaattctgaatagacgtatatgctacaattagtaaaccaatatcaccactgctctcccttgccacaaaacaagggaagcttcaatttatgacccgatttttgctgataatctctcacataaacccaactcaacacataccctcttcccgaatggttgataattccaacccacgaaaatatcaaactttttcaccgacgcatagcaaccgaggcatagcaactaactcgctcactttgcaacggcactagtgcccgatggcgcccgagcagcacgaccagcanagtggtcaacccgctggtagccaacatcaccaccacgtgatgaaccacctctaccagcgcctctgcctccatagtcggatcgataattgaactcaccccttccatagcccctcctccggtgtaat

SEQ ID NO: 11508 - DNA, 85 bp, Oryza sativa
  Clone ID: uC-osflcyp099b02a1
acacacaagctccaagaaatatacattaaatttatagagagataaagagagaggatgaaaaaaataaagctaaccttacagctaa

SEQ ID NO: 11509 - DNA, 446 bp, Oryza sativa
  unsure (1)..(446): unsure at all n locations
  Clone ID: uC-osflcyp099b05a1
gcatggccaacacgcatgtcaaagccattagcgcaatggccgaaacactggtgccaataaccacttgctctgctgtagtacgcagaggtcgacatccataatttgtaccatcagatctttttcctaacttgcatttgcataaatatcctcctggtgtgcttgtggcagaactcctttcctgcaaggatatatatccttcatacttgggnatcctgcttacgtaatgcgcactcaatccacgtctttggcagccgttcagaagataagggttgccctcataccctttggagcactggcataagtaccctggaccattgttcgcgtccatgcagtagctgtttgcgctgatgcacgcataatcaccaggtatgcctttcccctcttccgggcatgagccattcctaaaggcccaatcaggcccaacaggtgctcccctctgagctctg

SEQ ID NO: 11510 - DNA, 297 bp, Oryza sativa
  Clone ID: uC-osflcyp099b06a1
aaaaacttaacaccatccaaagagaaatcattgggattacagggacatcagttaaataccaaaaattggatacttgaacaaaaaacttctagggaacaaacaaaaaaggggacccatgagttttaaaaaaagagacgggggcaaaggggcgatctttgaaaactactttttgggaggagtttggcccccgctttttgcccaaaccaacaaaaggggggacaaaacggcgtgttggactggaaccgcttgggggcccggccccggggccttcaggtcctggcctgctttgccaccttt

SEQ ID NO: 11511 - DNA, 76 bp, Oryza sativa
  Clone ID: uC-osflcyp099b07a1
tttttttttttttttttttttttttttttttttttttttttttttttttttttttttttttttttttttccttttt

SEQ ID NO: 11512 - DNA, 440 bp, Oryza sativa
  unsure (1)..(440): unsure at all n locations
  Clone ID: uC-osflcyp099b08a1
gtagatacgcaatatgagcacaactatataacttaataagcacattacagcacacacatggccaaggcagttatttgaatcagtctccaacatacttcaaatcatagaccacaccatacagcaaacatagtataaacattgttcatangagagtacanngctgatagcagccttgtaattattctagcattactttggtnnagcatccctctacaaaacatagncagnacattcaccagctcttcatcttgngccatacacattcaacatggtttgnctagtgacagaccacactgaccagaacatttcgtctcctcagtaggcaccagctgccatgagcagctcatcaaggctccagatgccctcgttgcttgccccgtcttgtgtagcatcattttgcagaaggttgtccattgattcatctgagctgctctcaaata

SEQ ID NO: 11513 - DNA, 432 bp, Oryza sativa
  unsure (1)..(432): unsure at all n locations
  Clone ID: uC-osflcyp099b09a1
acacaatgctaattctcagtatcgaaatatatacttatagtgttaaccaaaaacgacggccaacatcacgaagtgctctgcttcatcacaactactaagaacgtatacatgagcacatgacaccaggatctgagtgcaccaacaattttcaggagttccagattatccttacaaaaaaatcaaccttattgctgctgaaagcctagaactatcaaaangcccttgagaggatgcattgcaactgacggggccactgttagggatgtttgtccgtggncttgatgcttactctctggtggctcaactatccaaaatttctgatatatgcacacgattacattaactccctgtatcctgactggnaagtttcttcccagtgttcttatcagcaagtttgttcccgagtagtgtaggatgtgaaaatgcgctgga

SEQ ID NO: 11514 - DNA, 372 bp, Oryza sativa
  Clone ID: uC-osflcyp099b10a1
ctcgatgaataattcagggaacctttatatgattagaatgaattttgttccattttggagcgccggcaatttatccagtttacattttcacacaagggggtttttaatttttttataattaaaacaatttgcattctcctaatgaaagccatggagagatagagggggaataaacaacagatttactacataaaagtaaagggaacaaaccgggaaaggaaaaagggaacattgtccaagagcttttaaaaccctacgggtttagattttccagggcctccagaagaatgggcctgaaccttttgcagcccagcttaacattttgttggcccatgaaagtttgcctgatgaaattgaatccccgttggggga

SEQ ID NO: 11515 - DNA, 384 bp, Oryza sativa
  unsure (1)..(384): unsure at all n locations
  Clone ID: uC-osflcyp099b11a1
gggaaacgaataaaatcattattgcaaaaacatcatcttcttcttcatcttcttagtgtacacaacaccaactcgatcatcatctcgtcgcactaaacccatcttccccaacccaaagacaacgaactcgctggccacaaatccatccaaccacaattaaccactgctaagctacggtacccccacttcacttgccgggngacgaagttggtggcgtacgcccaggcgttgttgttgacggggtcggcgaggtggtcggacgaggcttctcgagggggcccttgccggtgacgatggcctggcacgaagaagccgaacatggagaacatggcgaggcggccgttcttgatctcctttaccttgagctccgcgaacgcctcgggg

SEQ ID NO: 11516 - DNA, 429 bp, Oryza sativa
  unsure (1)..(429): unsure at all n locations
  Clone ID: uC-osflcyp099c01a1
gaagagtaacaagttaggactagattatccccaatcaccggccccaaaaaaatgtgaatcaaatcatctacggagtagaaacaaaccaatcatccgagatcagttcctatgattccatgagagtactagaacaatcagagattcacaaagcagtggcacttgacacgaaattaggaacaagnaaactgaatcatcttaaggnattggnactttcaaacttgactgttcttgatgcgatcgacacatgngctcgcttcttctcctggaggaactccacngagggccctgagcgcggcgtcgacgtcgtcgctagctgcgcagcagcatctccgacacctcggccggcgtggcgtccacgccggcgagcatgcatgtccatccgccccggccggagcagcgccgcgtcgaggcgttccttgtagttggtgg

SEQ ID NO: 11517 - DNA, 428 bp, Oryza sativa
  unsure (1)..(428): unsure at all n locations
  Clone ID: uC-osflcyp099c03a1
aggggggcatgagcatgatcatacgactacatttgttgtcatagaaatattccactaaatttgctgtcatctacatttataccacaacccggcagcaaggggctgatattcttactagcttcttcctagcagtagcaaaatttccatgcacacgtataataacccgtgtgcaggagcaaaaagaaaagncttgttactgcggcatcaccagcagtatagcctgcagcctgcaaaaattagaaatcaagcattcgcccacccagatagcttataaagatctatatactatggtaaggtctgtaacaaccaacattttggtgcttaacacaacactagtcactcaaacaacaacctttcgctgtctaaggactgggaagaaagtcacagctgcctatttacatggtgtcctttattcattttgcagtgaa

SEQ ID NO: 11518 - DNA, 452 bp, Oryza sativa
  Clone ID: uC-osflcyp099c04a1
ggcctgctggagctgcgcgtggagggacacggcggcggcctgctccgagagggccttcgcctgccacgccgccgcctcgctgcggaggcgcgccagccgctcctcgagttccgcgccgcgccgcgcctcgcgctccgcctccaacgccttctccctgagccggcgcgccgcggatcgctctgccgcgacaagcagcgccctgttatggcgccgcacccgatcggccatcgcccgcctgagctgctcgccctgctctttgatgaatcggtcgagctcctcatcttgccgcttcatctgtccggcaggctcgtcggagaacgagacgaacggcatgggcgacgacgagtagcacaaggctttcaggcgtttgctcttttgttgctgctgctgctgctgctgctgctcatccaatgccaggcgaaggccagtggacacgagtgccgccggcgcgc

SEQ ID NO: 11519 - DNA, 434 bp, Oryza sativa
  unsure (1)..(434): unsure at all n locations
  Clone ID: uC-osflcyp099c06a1
agggatcacttattcattatagttcttccatgctgctctaccacagcaaaacgtttcagacaccatcaaaccagacttaaggatacacattacaggtaaatagtacacaatgaaacgggacacgaccaaggaccagaccagacaaccatagcctccattgggngaagacaaatagngcagacttgtgaaccctagaacagcagcagcttccatggcctggaggacttactgggccaccacggagggcggagcaccaggtggngttgtggaactccttctggattgttgtaatccgcaagggttgcgggccatccctaaagctgcttaccaggcaaagatcagacgctgctggtccgggggggatgccctccttgtcctggatctttgcctttacgttgtcaatagcgttggacgacttaaccttaagggcaatg

SEQ ID NO: 11520 - DNA, 228 bp, Oryza sativa
  Clone ID: uC-osflcyp099c07a1
acgcatgcatgccacgccgacagcaaggtagcctcctttttagcggccctccttttttttttttttttgtatctgtacttatgttctgcttcagctggtaatgcataaaaaatgactctaagcagcaaccattcatatatattacaaggaaagaaatcataggcatctacatttatgtagaaatgagaccatgtcaatgtaacatgtcaaattaatttacaagaaaac

SEQ ID NO: 11521 - DNA, 208 bp, Oryza sativa
  Clone ID: uC-osflcyp099c09a1
ccacatgatcatagcgggcgcaggtatagatagcaaggaaggccgagcccccaagtctgacaaacgcctaacaccagacgtacattatcaagagcgctacatctgcacagcagaagatgccacagagcccttatgctatgatttagtcaacgttctgggcacacagctgttttgcatctcaggggagaggcacgtcacgattagtcat

SEQ ID NO: 11522 - DNA, 174 bp, Oryza sativa
  Clone ID: uC-osflcyp099c10a1
gctaaacctctgtagcttcaaatccgctaaaaagccttcaaataattgtcatcatgatacagcaaatagtccgaaataaaaagaaaagctaaaactcctcaaaaccgcttaaatttctgactggttaaccaagtgactagctgatataaaaccctccacggtgacaactatcag

SEQ ID NO: 11523 - DNA, 374 bp, Oryza sativa
  Clone ID: uC-osflcyp099c11a1
aaacaaaatttcatgtcgataactcgagaattctgtcttattgaaaagagccaagggagcctcaggggggccattttcacaccgaagataagcaagaggaaaggctaggcgtaaaaggaagatttgggtagttccggggccagcaatgcggtttttacaaaggaaattgctcgctgttgcccacgagcaccaaaaagttttccaaggtttttttactggcccatttgctctccctattttaacattccgggttgcttgaaaatttcgaacatagttgaaccaatcttcgctggtgactcaacaacagtaaccccagcctttttgagagccttgattttgccttgggccgaacccttgccccctgacacaattgc

SEQ ID NO: 11524 - DNA, 271 bp, Oryza sativa
  Clone ID: uC-osflcyp099c12a1
aaaaaatgcccccccatatatattattatttatttcccctactaagtagaaaagaatgccccaaacccgggttataaaaatggccgtagcatcccttaaaaaataactttaatatacaccttgctatgcacggggccacactttgaaacaaacgcacgcgggaaaataaaagggggaaaaaaaggcacagcaataaaggctatgctcaataacacttttattccaaaaacggggccccagtaaaagaactcggcttggttcctcccctttg

SEQ ID NO: 11525 - DNA, 423 bp, Oryza sativa
  unsure (1)..(423): unsure at all n locations
  Clone ID: uC-osflcyp099d01a1
gattaagtattgctcatataacaactattttgctacaagaggaaataagtaaaacaaaaatgaaagaactgttacatggtcaacaatttctgtcctacatccttttcatgtcaattgacatgagtacaagtacactacttctaattagtaattacacatgaaaagatttggngaaatgtacaaaatctattacacccaccaggggcagaaaccgtcagacttaattacgtattgccatctacaacataatgaatgaatgatcttacctacaaaatagttcctggaatggccaaaaaaaacatccatcggctgggtcgttatgctttcttgagttaagagttaagagtgttcccttttgttaatgacgtatttactgtacgtctttactaaaagccctgtaaatgaagtccctgaaccttttgc

SEQ ID NO: 11526 - DNA, 409 bp, Oryza sativa
  Clone ID: uC-osflcyp099d03a1
attataaaatgacttgtattatattcccaacattaaagtttgatattcggatacattttgctcactgtggcagacaaagcagaccacctagagcccttttattcagaatatattcaagataataaagaacattggtcatagcatatactagtactatatgaatagtctggctggctgcttcacaaagtaacagagtgatcgctattggagtttttgagtattctttaatcttcagtgcgcttccctcatcagcagctcctcatcttcttaccctctgtgccatctatctcctcgacagcatcgtcttcccagtagagagcctccattttaccagctttctccgtgttttcatagcaaagcaatgcagaacagatcgtggcgacccggtggcgatttcagcagtagcagt

SEQ ID NO: 11527 - DNA, 72 bp, Oryza sativa
  Clone ID: uC-osflcyp099d06a1
attgagacaggataaggaggtgctggccccaaaagcattatatttacaatacacacagaaaaaacacctaaa

SEQ ID NO: 11528 - DNA, 80 bp, Oryza sativa
  Clone ID: uC-osflcyp099d08a1
agaaaccatttaatttaacatacccaaactggttttatcacaatgttagcccgtgacaatgggaaaggaggaatctaggg

SEQ ID NO: 11529 - DNA, 95 bp, Oryza sativa
  Clone ID: uC-osflcyp099d09a1
ttttttttttttttttttttttttttttttttttttttggaggcttcaaaaatttagcattttcttattgctgcacggggtatcaacaatccttg

SEQ ID NO: 11530 - DNA, 429 bp, Oryza sativa
  Clone ID: uC-osflcyp099d11a1
gacactggataacaacattatggcaccaaaagtattatatctacaatacacacagtaatctatctaaacaaactgtagcaggtgataatggaagcctggcgaaccttgggcataataatataatcagtagaattgcatactgaataaaatataaatatttacattattcatactgcaaataaggagcaagtgcaccctgtgccaatccaaagttcccacgcaaacaccaagaaatatagccttgaaggcgtgcccaagcgcattgaagcagtgcttccagtgctagagagacatcaatccgtggtgctttgtcgaaggcgttcattggcaaagcaaatcccaggagaatgatagatacatccaaccccttgaagtataatcttgaagtaaacttgacagatcaagtaacaccatgaggaaattaacgag

SEQ ID NO: 11531 - DNA, 415 bp, Oryza sativa
  unsure (1)..(415): unsure at all n locations
  Clone ID: uC-osflcyp099e01a1
aaatccaatttcacttttatgtagctcagcaaaaaattatgctgtgaaatccgcttgttaagataacagcgacaaatgacgaaccatccaggaacacgacctcaatttgcaatgtgctttgaagtaagaactcacaattcctcggtgaaatatttccaccatcaaaaagtctattctaaacacngaatattttattctgaaatgctctgacctgaggcatggcccgatatataatccattcttctagccacagctgctcaaagtagttaatttacataggcaagatgaggttccttggtatcctgagcctggtcttggatttgcacacttttttgtatgaactattaaatttcaaaattttgcacaaatgtaatggccttctctgatcacaaatcaaatctaacatcccattttt

SEQ ID NO: 11532 - DNA, 379 bp, Oryza sativa
  Clone ID: uC-osflcyp099e02a1
gggcccactaagattcattcattcattcatttgatcaaagcaaacgagacgagctttcttcttgcgatcaaaaacacagatgggcaaccacacagttaacacaaactagatagttccacacaaaactaacgatgataacgatcggatgatgatcgatggtagctcgattagatagtatagataaccttggccatgagggccccaccggtccagttcctccagttcccgtcggaagttgccgccgccgggggttgccgtaagccgccgcccgtagccgccggcaccacggccgccaccgtagccaccgtcaccgcccgtagccgccttcacggcgcttggccgttgccaccgcccacgtcaccaccaccgtagccgccgc

SEQ ID NO: 11533 - DNA, 432 bp, Oryza sativa
  Clone ID: uC-osflcyp099e04a1
agcaatgtaaatactcgcattccaaaacagccgatggacaataatcggactcagagcatcagttttaaccgaacagaaataaacgagagtattaaacgactgacatagtgcacattgcgagcagatattaacggtccatgaaacgagagccatgcccgtgggcaaaacttaacaaatactagaactagatatctcaactgcagacatgcaaaccaccatttgaaccgaggctcactttttcttggcggcagccttggtcaccttggcaccgggttgggtccttcttctccacgttcttgatgacgccaacagccaccgtttgcctcatgtcacgcaccgcaaaacgaccaagaggagggtactcagagaaggtctccacaaccatgggcttggtaggaatcatcttgaccataccagcctcaccgttcttca

SEQ ID NO: 11534 - DNA, 451 bp, Oryza sativa
  Clone ID: uC-osflcyp099e06b1
tcttcgcaatctcgagcatctacatcgaagagagcaatgactttgcacactggaaacgtaaaggggagggaagcagtactacagcgtaacggtgctgacgaggacggcggacggcgacgagggcggcaagcaccagctgatcacgggcaccgtcaacgacggcaagctgtacatgtgcaaggcgcaggccggcgacaagaggtggttcaagggcgccaggaagttcgtcgagagcgcagccagctccttcagcgtcgcatgatcgcggaaatctatatctcagcttctctttaatccctagcgaatcaaaatcaaatcaatcgagttcgttgctcagagagatgcagtgcacgcatgtgtgtgtgcgtgtgtgtttttttgtttgtacatgttaatcaagaacatgttatttgtgagggtatattccttcttttttctatcgttttaagga

SEQ ID NO: 11535 - DNA, 221 bp, Oryza sativa
  Clone ID: uC-osflcyp099e07a1
cacagaaaccaaggcccaaaactaccatgtaaacaaacataataatgtgtccgatcttgctcaattacaacatcatcaacatcaaacacagagaaacgaggggttcggaagccatacattatcatcttgggcaagctgttttggccctgaatacttggaggcctaggacaaggcaacctccttcaaacctaaaagtggccaaatttaccaaaatattccca

SEQ ID NO: 11536 - DNA, 439 bp, Oryza sativa
  unsure (1)..(439): unsure at all n locations
  Clone ID: uC-osflcyp099e09a1
agggctgaaatggcccatcgatcgaataatggtatcacaacatgcatttggccaaaatgacaccatggggatcagcaacaaaggggagcaactgataaactgaacccttacatccatccatacacgcctgcatactactacacctttggnaaaggcaggcacggatcacaatggttgataatgatgaactgatgtacannaaagatgtgccagccaaaattcaacttcaagttatcacttgctccaaggccaagcctttcttgaaggccggttcgagcatacgttggaggttaaccttgagcgagctattaatcctcctggaatcgccgggaggtcgaacatgaggggggtttcatgaggttttggtctttgcatttgcatcatttcccggtgattcccctatccccctttcaagaaacggaccaccgatttcatgcta

SEQ ID NO: 11537 - DNA, 73 bp, Oryza sativa
  Clone ID: uC-osflcyp099e10a1
attcgaaatgtataagattctaagtaagaagcttttggtgtcacaggcatcacagttagctaacccaatcgtg

SEQ ID NO: 11538 - DNA, 113 bp, Oryza sativa
  unsure (1)..(113): unsure at all n locations
  Clone ID: uC-osflcyp099e11a1
ttttttttttttttttttttttttttttttttttttttttttttttntttttttttttttttttttttttttttttntttttttttttttttttttttttttttttttttttt

SEQ ID NO: 11539 - DNA, 404 bp, Oryza sativa
  unsure (1)..(404): unsure at all n locations
  Clone ID: uC-osflcyp099e12a1
acacatacatatttagcacaatcccagatcctgtaacttaattattcttaaacatatatggatattaagaccctacctccatgaagcacggcacgtacgcgcacgcatgctgctggcggatatatatttggngtcgtccaaaagtttaatacagtatatatgtagaggcaagcacacaggcatatatattatatatatattatatatatgctgcacacctatgtatagcatgtacatacatacgtacgtacgtatatatatgcacgctatctctcgacgtacttattaaacacaaactacagcggaaaccttcccgcatactttaaggatgtcggggattttgaccttcaaattgacgagagcattaaccttgatggcttcgcaaaggcagaccgcagcggtgt

SEQ ID NO: 11540 - DNA, 375 bp, Oryza sativa
  unsure (1)..(375): unsure at all n locations
  Clone ID: uC-osflcyp099f01a1
gaaggaaagagggttcattgcgattgggattggcatttacatgatgaaagagcaaacaaaaacagggagcagctacactactgtagggcaatgctaaggatcacaaaatgggaagaaaccaaaatgaaaggagaaaaaaaaagaaggaaagcagggtttccctaagcttaacatngtctctcagtactccaccaacttacattttatccttaaccttacctactactcaaccagccatgccccgtcaacgtaccttaacaccagcaggcagccagcaacgcattttctcccatggttagataattttacataaattgtactttcttctctggtactggagtccttgcggaaatgggcttgacggatggatggatc

SEQ ID NO: 11541 - DNA, 75 bp, Oryza sativa
  Clone ID: uC-osflcyp099f02a1
ggggagaaaccgcaattttttggtttgggggattaattttttaaaaaggggttaataccttttaaatttataaaa

SEQ ID NO: 11542 - DNA, 430 bp, Oryza sativa
  Clone ID: uC-osflcyp099f03a1
gaggcacaacgtatgcacagtatagatgttaacctgcagttttggccacaaaaatacattgcacaatacaacgaaatgtctatcagttaaaagcaaaaaatagccgccctaacgctttacagactcccaaaaatacagactgcctttacgtttgatctttcttcagttcttttacgctctttctctgcagtcaaatgtaagggtgcggcccgtttctaagatctcaagaatgtttacaagcaccagacgtgtatatcttgggatgtacaagtttgccaacgcctaaaacatctagtcaactcaaagcctcgatccctttgtgaattcgctgcttctccatgttttttagtttccaagttaatgaactttctcatcaacaattggacaactcgtgccgtcgatccaacagtatatggtagtatagcaatgg

SEQ ID NO: 11543 - DNA, 461 bp, Oryza sativa
  Clone ID: uC-osflcyp099f05a1
ggaacaattatcagaggctcctctggattatttatttataaccaaaaaacaagggccccgtacaggcagatgacaattcacaaacaaggttttgcattccggccgggctgacccacacagaagcacaatttttatgtcaaacatatatggccctacaaaaagggtcaaaaccattcccataaaggccccacgcagcgttgtgaaaaatgggaaattacaaaccattcaatggtgcctaattcttctctccctcccttcctaatttccatctaattcgatccttcacatttcgaatacaggagggggtgtcccctgggtaagttgggcatattcattaaagcaagccaaaccccaatgagagctagagacaagaaggaatgaatccctgtaattccatgccaaactcttttctaacaagtattttcacaagaggctattgcagtgtctagtttggcttgcct

SEQ ID NO: 11544 - DNA, 208 bp, Oryza sativa
  Clone ID: uC-osflcyp099f06a1
gtacgacacaatcactcaatcaggatggaatgaggcgacaatgacgtttcacattctctgactgaagtcagatacatcagtagcatttgtctcttgttcactgaatgctgatgttgcatctgaaatgagctgctcagttttcatataatggatcattaggaaaaatcaactaagcttcattttgacaagtacatgtctcattctgata

SEQ ID NO: 11545 - DNA, 184 bp, Oryza sativa
  Clone ID: uC-osflcyp099f07a1
caggcgacactattaacgagctctgacgatgcatgcacgacgtacgtcaaggctatgcctctcttatttagccgccctcctttttttttttttttttttttttttttttttttttttttttaaacattttttattttgatgattctttttggtgttccataatgttcatttacaagacacacac

SEQ ID NO: 11546 - DNA, 392 bp, Oryza sativa
  unsure (1)..(392): unsure at all n locations
  Clone ID: uC-osflcyp099f08a1
attggaagcccagcaagaactttatataaaggtgatcactaataacaatgatgataaaaccacatgtggaaaggaggacgatgatccacaggatgggcacaagtaccgtaggtacggccattattggaggattacacaangagcacccaaacgcactcacccaaaagacgaagaaaaagggagctaatctaaatgnngcagatgagcaatgttagttagtagtggttagcatggccaaccaaatcgaaattggaatgagaatcttctttttggcgtgatttctcctttttttttcctctttccttttnttttttactttttcccaagcacaaatgccaattcaccaaaatcgtcccgatcaatgggagcaaccggagccgacacggcgagct

SEQ ID NO: 11547 - DNA, 86 bp, Oryza sativa
  Clone ID: uC-osflcyp099f10a1
ataacctaataacaagggcccccgtacaggcagtggacaattcacaaacaaggtttttgcatttccggcccggggctgaccccaca

SEQ ID NO: 11548 - DNA, 428 bp, Oryza sativa
  unsure (1)..(428): unsure at all n locations
  Clone ID: uC-osflcyp099f11a1
aggataagataccatgctccattacatcctaaataacccaccattacaaaattcagtctctcagaaaattgcaactcaaaggatgatcagacacgggcagacaagaaacagcacttcatgatactaggggcaagatagggagtttacgcatacctttgtggatggtaccccttgttcgctcacgtagataccattccaagaaacttcctgatataccttggtctttcacggggncattttctggttgatgaggggctgcctgagcgagagacgagctcgatgttcgtttgccgttcgaggnacgagcctcgtccttcaccttctccgaccgcaagatggtcacccccttgagcatgtcaacctttctcacctttttttcgcccaagaagttcctgatctcgatggcggtgttggagttggtgatggag

SEQ ID NO: 11549 - DNA, 374 bp, Oryza sativa
  Clone ID: uC-osflcyp099g01a1
ccagtgaacaaccaagatttatcaggtgattgagttgggagtctatcccttcaatcgaatcgatttatacaaccatttttgatcctatactacaaattgatttcctgccaattcttttagaaaaaaaaaattctacaatctttgtaggatcagaacacaaaccttgtttacattcttacaaacagcctgaattatatgaagaaccggttaggaacaaacagtttgtttaaattacatggctactttcaagccccttaattggagggctttgtagcccaatggaactttcttcacaatttcccaggttgaatttcaatgtgttttattgtccaaatagcaggccttggttcagccttaattttaataaatttaat

SEQ ID NO: 11550 - DNA, 256 bp, Oryza sativa
  unsure (1)..(256): unsure at all n locations
  Clone ID: uC-osflcyp099g02a1
aagccacaaagcactatattatgataagaatgattacgaagtcaagaggttccaaaattgccaaatctgtcgggtaaatttaccaacacggtcccaactgccaacaaagtacataacacggctagaatgtaacagttccggaggtaggccaatttcacggcctcactagaattcgcatatattaggggcggatggnaggattactaccaggtacttagaacaaaaaatcgggctcaaattgtttcggtcttagtcg

SEQ ID NO: 11551 - DNA, 359 bp, Oryza sativa
  Clone ID: uC-osflcyp099g03a1
cctggccttcgttctccagcgcatacttattctgtccttgtgctcctgcaattactgtatagcacttgcactgttccaacctactatatcccttgaggaccgtgcacatgaacatattcggttcttggtagactagcccaagtggccatgcgcatatttgacaccagccacccagggcacaatggatgaaacccactgagatcttacaaatcacacgactttgcccgattccaaccaagaggctggcacatcattttcccaattggacatcaagcgcaagccttttccatgaacgaaaggaaccattcttaggcagctaaatattctagtccatcctcctttcactagattactttctc

SEQ ID NO: 11552 - DNA, 57 bp, Oryza sativa
  Clone ID: uC-osflcyp099g05a1
ttttttttttttttttttttttttttttttttttttttttttttttttgtttttttt

SEQ ID NO: 11553 - DNA, 161 bp, Oryza sativa
  Clone ID: uC-osflcyp099g07a1
ggctcacaagagtcaaacacagctaaaatcaagaatgaattttacctgatggcataaacaacacacgtggcggtggatgcagaaacgtaagcactgtactcaggccgaaccgtgctactccagttcattatattgtgaagaatttaatacctagtcacaaa

SEQ ID NO: 11554 - DNA, 432 bp, Oryza sativa
  unsure (1)..(432): unsure at all n locations
  Clone ID: uC-osflcyp099g09a1
agcaaaggtttgaagctgttcgtgtcctgttgcgcgttgatagtaatattgtttggtccatattcagtttgacaagtgcttctccatgcggaaaccatgggatgcaagcaaacgaccactccaacacgataagaatattggatcggaaactctgttcacacatgngaacaatatggtatagcgataaactaaatatagaattcaatanacttgttcgatccgctgttgagccccacggnccagatanngagggccccaagattgtatcttcatctactgtgcacccccaggaactggatggagggccccatgattgttgcggctgtgagttcatttctggttgctgcggtggtgttctgggtctagcatattcagcaaaaataacccatccatcgagaaactttccatccattccttttattcctttagctg

SEQ ID NO: 11555 - DNA, 111 bp, Oryza sativa
  Clone ID: uC-osflcyp099g11a1
ttttttttttttttttttttttttttttttttttttttttttttttttttttttttttttttttttttttttttttttttttttttttttttttttttttttttttttttt

SEQ ID NO: 11556 - DNA, 427 bp, Oryza sativa
  Clone ID: uC-osflcyp099g12a1
gatccaaacccaaacccttttgatttattaattaattaaccctcttgtggaaggataatacttaattacattttcctcgtggatctcttcactaactctcctcctactaccagataaatgcctgcagtgatggctttgagacttgagagcttcagaaaagccatcgacaacattcagaggagtaaaaggcaaaagacttacctaactgctaaacacttagctactaccactatatgtacaaaaaaagaagctagccccagacaattaatcggcggcggcgacgaggaggacgacgacctcatcgtggctcgatgacggtgatggagacgtcgttgacggacaccggcgaggcggtggagtcggtcttggtggtcatgagcggcggggcgaggaggagcgccctccggagcctggtgaacatgggcgg

SEQ ID NO: 11557 - DNA, 342 bp, Oryza sativa
  unsure (1)..(342): unsure at all n locations
  Clone ID: uC-osflcyp099h01a1
acaaactcaagaagcactccgaattgaaatactcgccattgcttgcagtacgtacagagccgaaattgctacactacccttaagtttgcatgccgtcgctagctgcttatcgatcaatctcacatgngccacgcatgagctgatacatagcatcggtgtagtttctcaaccgtgatttgatcagtgagacagtgacatatatataggaacagtttcagcgactaaattaaacggtggncgcccgttgcttttcccgccattggggacgacgtgggtgttttgtcgggcgtcgttccatgaagcgcttccagaaccagtgctgcttccaaaccctttcggtca

SEQ ID NO: 11558 - DNA, 184 bp, Oryza sativa
  Clone ID: uC-osflcyp099h02a1
gccggaatgaccgaaggcggtcatttaatgcaattaaaataggaagaaaatattacaagaaaagttttacctcgacaggctggctgtcccggaaggatgtgcaccaggagcacacgccttgaaccatggtgccaaccgggccaaacacacgctttccagacagggaaagccaacccaaccgaac

SEQ ID NO: 11559 - DNA, 417 bp, Oryza sativa
  unsure (1)..(417): unsure at all n locations
  Clone ID: uC-osflcyp099h03a1
gatccatcaactcatgcggtgatcgatcgatcagctggagagaaagttccagggacaggttcatcaaaattaagccggcaggcaagcctgaaagctaccgttaacgcattttattttttttcagaacaactgaccaccggccgggtatttactccacttaatagaagccaccttttgattcaggccttgggtgatctttgtccgtacagcctttttacantcattatctacttccgccaaggttgcattccacggtatgttaaggggttgatcatactttatatacctgtgcccaattttggtctggacttgggtcattgctaacttccaggccatgggttcatgtttaccgttggaatgaacaaccagcagcattatctatctttgagcgatcaatgcttggggttgtatcctaat

SEQ ID NO: 11560 - DNA, 424 bp, Oryza sativa
  unsure (1)..(424): unsure at all n locations
  Clone ID: uC-osflcyp099h06a1
atgaaaagttcattacgacaattatgactaattggcagcattccaaaatattcctcaacgttgacactccatgccacacaatacaatcgaaatttctagaataggcaacatttccgagcatctcggagacaagaccaacatcaccactcgaatgacactgaggggngaaatatacaggnggaagaagcaaaaatgctatctttaggtagttcgtttgacgacagacaagttaagtgtagtgcacctgttgtagcactcgcttactcccccttgtgctccttatctttcagagcatttcctgtgatttacgaacaatgcgtctaacctttttcttgaaatcgtcccttttttctctccaatccttagccgcttcaatatttgctggagactcatcatttggactagagaggcatcgaaatgatgc

SEQ ID NO: 11561 - DNA, 359 bp, Oryza sativa
  Clone ID: uC-osflcyp099h07a1
agctcattggcaaatctaatcattaattaatgaaaatgaagtagaaagtaccaggcaaatggtatgcctcagaactgccaaaaacttgataggcatcacgatgtttaaattaagattcctaagcctttcaacaaattcaccacctagattgcattagccgccaaaccctgtagacctttccaaaccctgatagtttccatcagtggtagcccagccgaagagggctgcttgccatcagcggctccagcctcaaacttgtggcagtacaggcatcttggctcttgaaggccctggactttctgggcttgaggttcctgcatgacgagcttggactcgagggtcccaggatcttgacggag

SEQ ID NO: 11562 - DNA, 64 bp, Oryza sativa
  Clone ID: uC-osflcyp099h08a1
ggggagaatttaccaaaatgtgttaggagaaacattgtggactgttaaattacctttttctgaa

SEQ ID NO: 11563 - DNA, 443 bp, Oryza sativa
  unsure (1)..(443): unsure at all n locations
  Clone ID: uC-osflcyp099h09a1
aaacggaacgaaagaatgggctgtgacaaaaattaaacacgatatatgaacttggtcgtaatacaaaaagtacagcagcctggtgtctcctagatcctcaagcacaaggaacaaaagcacaaaccaaatgacacctcacagctgcgttgatctatgaatgacctagcaacggggtaaaatcagctatatatngccccaagcataggggnaggnatcaccaactgggcagtaaaggagcaaatattgagtatgataagtagatgcatcaggactatttggaccatgcaaccgcatcaatttctgcttgagcactccgatatagctccagcctcttcgcaagattagtcctccgttccatgacggccgggtcttcatcaagaagcttagaaagttgtttaatctctcttgctcccaattcagtaaagaagtgatcgagcagtgag

SEQ ID NO: 11564 - DNA, 437 bp, Oryza sativa
  Clone ID: uC-osflcyp099h10a1
aaaacccgcgtcctcgctgaggagtgcctacgtactttcttcatagaagaaagatcagggttgctttcgtagttctttcgaaatgatttacggtcattcttctttattttattgaatacattacagctagtaccggatttttccaattttttagaaaggtttatccagtccctgtaagggtatacttctttacccttattgaggatttccatgagcgactaagttggtgccttttgcttcatttccagaatccatcccggtcccgggctctaattgggccatgcgcatcgataatatcctttcttaataaaaatgattgaggtctatctcatcgtccgcttacttccctttggggagttcaagtttcaagtctgcttcttataacatcatgttgaattgggtggtttgatggcccggcattttcttctccaagttga

SEQ ID NO: 11565 - DNA, 463 bp, Oryza sativa
  Clone ID: uC-osflcyp099h11a1
aagccaagctgcaacaccagatacaggataaggggattcaacatctatcatgagaaacagcaaaagttgaaacaatttagcaacaaaacttataacttatagaagttaaggggagaacaaaacttatacggattaaacagatgcaattcagacctaagatctgcgggttggcagaaaccattcaccagaagggccagaagtcacagcacaggatgaacatatttaaacttgattcccaaccattaaacagcatgattgggattgcccttcccccaagctttcatcgcgtcctcctgcataaatgaccaaggactttaaggtcctcaattagtttcctccaatcggccacagctggggaacatcatcaccaataggtagaatgccattctacgacctgtaggtcctcatccttggatagaacaatctgggaatctaatatcagagttgggctccaagtccctgg

SEQ ID NO: 11566 - DNA, 217 bp, Oryza sativa
  unsure (1)..(217): unsure at all n locations
  Clone ID: uC-osflcyp100a01a1
agcaagaagtatatatattcatccatttttcaaactactacaagaggtcgagaggaacacataatcaggagggattgcgacaatttacagcatacaggtagtctggtagatacgaggtcaagtaacaagtacagngcagtcagtcaggagctacccctcttcattttccacgtgaattttttaccaccatttggaataccattgganacaccgagcc

SEQ ID NO: 11567 - DNA, 209 bp, Oryza sativa
  Clone ID: uC-osflcyp101a03a1
aaaggcaagaatattattcataaatgacgcatgatttttaacaaaacgcttgcaaatgatttcagataagtagagtcaacaagacaaaactgtattctgccaaagcacaccctcccccaacatccaccccaatttacgcccattattttctgggccaaaaagcacaacgggttttcccatttccctttaaaatgattaaaggttcaatg

SEQ ID NO: 11568 - DNA, 105 bp, Oryza sativa
  Clone ID: uC-osflcyp101a04a1
gggaaaaaaaaaaatggggggtggggtaataaaggggggggaaaaaaattttgtgaccggttgggggataaaaaatttttggggggagatggatcgaacctaaat

SEQ ID NO: 11569 - DNA, 223 bp, Oryza sativa
  Clone ID: uC-osflcyp101a05a1
acaaaacggggggagtttagatcaagaaaagaatggcaggctcggtttattttcaaggggccaaaaaaaaaaagggttttaccccttggatgcaagttttcaactattcaagctggggggccctggggtatcacccaatataaggctactgtataaaaaccgggtaaaaaaatcgatttgaggaaaaaaatgggcacttggggggtgcccaaaccccagcaag

SEQ ID NO: 11570 - DNA, 132 bp, Oryza sativa
  Clone ID: uC-osflcyp101a06a1
gctgcaacctagaatctgtagataggtttcaagctagttgtgcatggttgcaacacataagtccattattagacaagccaatcccctaaatttattatacaggtgactgacccccaaccaaaaccacttcct

SEQ ID NO: 11571 - DNA, 243 bp, Oryza sativa
  Clone ID: uC-osflcyp101a07a1
gatcataaggcaaagctgcgagcgccagatcatcttattactacagcttcttggcgatatgctacagtagcttcttcctcccttgcaaaaagaaacccaaaccttatctacaacgcaacacacacaccggacacagagcgctcgatcgatcgaagcagacgagacgacgatggcgaactactactaggtaagcgacaacacctaggctatacagggatacagcgcgcggcggcgacgggcggc

SEQ ID NO: 11572 - DNA, 426 bp, Oryza sativa
  Clone ID: uC-osflcyp101a10a1
atacgaaaaagagctatatatttatgtataatccacaacgtacacgcacgtagtacaagtagtactccatgtacatgcagaagtacatatgcatatggtacaaaaactgatctctagctctcaggtacgtatagtcgatcgacgaataaattaaggaaacagatagcgtagtgaccggccgggcgatcaaccatgtatgcatggcgatggatcgacctagctagctagctcttattttattcagcataaacacagataacacaagatacaaagcgtgagacgacagctgcatctcggccggcgctgcatgtcatcctccggtagcgatcgatcggattagttcacgctggagcagtcgatggaggggctgatggtgtaggggatgctgacgccgcacctggaggggatgctggcggcatagccggc

SEQ ID NO: 11573 - DNA, 418 bp, Oryza sativa
  Clone ID: uC-osflcyp101a12a1
gctgcaaagtagaatctgtagataggtttcaagctagttgtgcatggttgcaacacataagtacataattagacaagccaatcacataaatatattatacaggtgactgacccccaaccaaaaccacttcctgtatctttcacctaaccgtcagtctacaaagccctcaactcaaaacatcaactccaaacccaaaccaagtcaaccattccagtgcttacaagtcaataccagcagacaagctaaatacaatacatcagtaatgtacatacaaatgcgagaaactcatagaatagtgctccattaacaggtgattacttggcaataagaccaataaattgaccagaaaaggtactgaatttatcccaaagaaggggattctggttcagaaccactaatggatgtgaaagtggatagc

SEQ ID NO: 11574 - DNA, 71 bp, Oryza sativa
  Clone ID: uC-osflcyp101b01a1
gaaaaaaaaaaaggtgtttttttaatttaattttttaataaaaaattggagattttttttaaatataaaaa

SEQ ID NO: 11575 - DNA, 328 bp, Oryza sativa
  Clone ID: uC-osflcyp101b02a1
agaaaattgatccatgggaccatgggggcaaaatagttggggcacaaatttacatgttaaacccaaaccctaaacccatggataataaaacattggatatacctacggacatacataccccttttgatcacacccaccattgatgggacaaaggtgggtacatacatacgtacacacattttcccatacccccgtacatacatacctaattaaaaacccggaattaattaaaatcctagttgatgggatttttaaaggaacttgaggctggggaggatgtttttgtggaccggatccagggggggaacaaaccgggtttttaaggggc

SEQ ID NO: 11576 - DNA, 397 bp, Oryza sativa
  Clone ID: uC-osflcyp101b03a1
gaaaagtcttcaagatcttcttcagttcagctgcaatctacgtgaaactgcaacagccggtcagagttacccgacctgccataaatcctatcttcttttcatatttacagaggatttctgcttcacaagcagttacccaggtcgctgtactcgagactctgcactgcattgcacagagcctaatgctagatcacaacgcgaacctgacggaaggttgggcgatccgttgtcaagaagcattgcagttcacatcctcaggttcagaaacgttgtagtacagcgttgacctcctgccgtcgaacctggagatgacgttgtgcgcggtcaggccgcagtagcacttcctgagcctttggatgcaaatgtccatgatcttctggaacatgtggtcccccct

SEQ ID NO: 11577 - DNA, 333 bp, Oryza sativa
  Clone ID: uC-osflcyp101b05a1
ccgtccttttttttttttttgatacaaaaagacagtgcaatattgataaatcaccacttgcttacaggaattacaatgttctgtagctatctaagctactttgacaaatggctaaatgaggatacatctaatcgtaaccgtgaagttaacatggtcaaacaagataatcttattgtaattcagaatgcgggctattttcttaatctttcatctgtttaatctctattggatcaactactctgaaccttgttcccgctgaagatccggttgaggtattgcagcaaaagccttaagccaccttgagcaatcccttttctgaacaaacaggcaggg

SEQ ID NO: 11578 - DNA, 325 bp, Oryza sativa
  Clone ID: uC-osflcyp101b06a1
gcagtaatagggtaatatatcatccagttacatacacaacaacaatgcatagcaaaaccttgggttctgaactatgcaaattgatctgaagaatgcaaatctttcatcacatgaaaacaagaataaagaaaacgtttacatcacaagcaaaaggctatacaagctcggatgaggctcctctgttctttcatgacaaactcttcgctgtcccaaactgacaaaggcttcagtacgtctgctatgcacactttagtgcagttcatcttcgctaaaacatcaacatttttggcaatggcatcagagagatttttcgaatgctttcggg

SEQ ID NO: 11579 - DNA, 420 bp, Oryza sativa
  Clone ID: uC-osflcyp101b07a1
tttttcctaaagtagattgaagaatgctagtcttcactaactttggttttagtggggcatggccattatggttatgatctttagtggtccattaccaaatcaatgttggggtggatgaatgatagttgtctcatgtttagtcgttattcagtgtaattgcaatagccagatgacaacttaatattgattttttttccgatgtgcttattcatttgaatatctttatgcagcttgatgcatgtgcacatcctttctttgatgagctgcgagagccgaatgcacgcttgccaaacggacgtccatttccaccactattcaacttcaaacacgaactagcaaattcttctcaagagctcatcagcaggctcataccagaacatgttcgacggcaagctacccacaacttcttcaatactggga

SEQ ID NO: 11580 - DNA, 390 bp, Oryza sativa
  Clone ID: uC-osflcyp101b08a1
ataaagttgcagacccatttttttcattggcaactatgatgtctgttaagtcaggtattttccgaaaacttgagataaaaacgacatagatatgcttcgtatacatacacatgattgcatattgatcaatcccctatggaacttgatgaattacatatccatttaagtagctaccgtttgaggcgcctcaacactatcaggaaagtatcaaggcagagtgtgtagtcatcgaaggcacttattccacaaaatttaccacgagtcaaaactaatttgtcccctccaatttgaagcctatcaaaggagcaagcgttggaaacctttacaccatggccaaagtttttgggggcctagcttctttggacatattactgtgctgttgcctcaaat

SEQ ID NO: 11581 - DNA, 349 bp, Oryza sativa
  Clone ID: uC-osflcyp101b09a1
attggaaggaggctttgctgggtttccttttggtaaggccctgtttggaaggcatgaattttagtttcaaatgaaacgggtcgatttccaaaggaatttgagcattttcccgcataccaaacgagcccctaagccctaactaaaccaatgcaagaaccaacctaaaaagccaatacaccctgttaaaaggggcttggaagcagaaaacccaaattggactgaagaacaaaacaatttacccagttaaacactaccaaaatttaaagctttccactctttttttttaactggaaggaaaaaactgaaaatgcattccggaaaccatttttggacgaaaaccggtgccccc

SEQ ID NO: 11582 - DNA, 306 bp, Oryza sativa
  Clone ID: uC-osflcyp101b10a1
aataagaaagaattgaattcaatagcactttacatgcaggtacacccccctctcatcatgtcccaactcaaattcatttagggcttattcggttgatctcttaagaaaatgatcggggtagataaggtatgaaattaaatccgctgaattttttcttagaggagggagggattaaccgcacaagccctgagaaaacacccacacctatcaatgtatgcacctccctggcaccctccatgagaagtagtccatgttcccggcagcaacccttttccttatacctccttccaaatcgtcggagcacat

SEQ ID NO: 11583 - DNA, 79 bp, Oryza sativa
  Clone ID: uC-osflcyp101b11a1
ataataaattatataaaaaaaaaaatgaaaaaaggaaaaaagaaaagagtaaaaggaaagggtatagggaaaaagtgaa

SEQ ID NO: 11584 - DNA, 335 bp, Oryza sativa
  Clone ID: uC-osflcyp101c01a1
aacagaaatcaacaataggaatatgaattatattctgaatccattacaatcactttgctttgcatagagcaaggctagagccaaggacaaagccagatgatcagaatttcagaagatacatatatgtttcctttgcaataactttttaccttagcatggccattttcagagtcaccatgtgttaacatgccaaaacttctctcaggctctcggcactggtcgtcaatgctactacctttttcctttacattcagaactatgtgacaagtgaacaacatagaagcacgaactaaagaaaaaacactaaaacatggggtatgagagaacatatatga

SEQ ID NO: 11585 - DNA, 317 bp, Oryza sativa
  Clone ID: uC-osflcyp101c02a1
ttatgttggccgccctcctttttttttttttacctaaacatatggaaaattaattaattatgaagagaggtacatacatagactctaagaaaattacaccataaataacaatggaacggcaacagcaaatggcccatggctaggggacaacagatggatcccaaataacccggtgctggccagaaccgcaatggaaaaacaaaggcgggacagcacggcagcaaagcttgaaacttgagcagaagggcggccaacccacaaaggagaatgcaacacaacaatgagcccatggaaatggaacaaaactgaaccagacc

SEQ ID NO: 11586 - DNA, 116 bp, Oryza sativa
  Clone ID: uC-osflcyp101c03a1
agaaaagggggtcctattcatgattgcccccattttattcatggattcaatttattactcgggggaaggggcattgaacttttgtgggtaaagaaaaccggttagtggccaaaaag

SEQ ID NO: 11587 - DNA, 125 bp, Oryza sativa
  Clone ID: uC-osflcyp101c04a1
caaaaccgaccagactaaactcaaagtgaaccctatgaaggtaaaatgtttgcgaataacgcctccgtctattacaatgtttggagataaactttttcaccacggggctaaaggggcttacacaa

SEQ ID NO: 11588 - DNA, 297 bp, Oryza sativa
  Clone ID: uC-osflcyp101c05a1
acaccaaacagttcatccatccaccattaatttatgaccaagtagtaggcagtattacatggcaccaaaaccgcccaatttttaaaaaaacaaaataaacaaaaaagaaatttaaaaatctaatcgatttacttatgccaattacaccaacaacaaatggaatgcacgttagctctcttctctctctcagccacccaactgatcaggaagtccatacgccatatccttcttcatctctggtgatccaaaaattgaaaaaaaaacatggaggtcatcatcacctgtaatctaatagac

SEQ ID NO: 11589 - DNA, 238 bp, Oryza sativa
  Clone ID: uC-osflcyp101c06a1
caccaagaagagcaaacaagatgaaaaagatcaagctacaataataattcacatcaatgctacaacaaaaaaaaaggaaaaaaaaagaagaggacaggatcggggtaaccaacgaacaatcagaaggcacggtgatctacatgatgatgacaggcacgaagagtatggacatggagattcttctgcagcacagcattggccatatgcatcaagcgtccgggccagtcggatgcgttgc

SEQ ID NO: 11590 - DNA, 502 bp, Oryza sativa
  unsure (1)..(502): unsure at all n locations
  Clone ID: uC-osflcyp101c09a1
ggacccagaggatcagaatacaagactaggtagtacaagtacagaagaataagttgccatggagactatgcacttttcaaacatatcgaacctgacatattattgggggnacgagctaatggagnagttggcatcaaagggatnatccttagagatagntagcgtgaaaaaacccatccaaaaaaaataggggtccaaaattgggctattgtaaacgccaattggggactttaataggggggttggccttccaaaaggcacagctgtttcagtcttaaatataggtacaaaggagtagaacaattatatttacccacgatgtaaggttaaatgacagcctgtgagcttatgataacctagatagatccgacagtagggggcaaacagaacaaacgaagatgggaggtctgaagaactgattggataaaggattagataacttctgtcagagcaaaattcagcttttagatctttactggacaaccaacattattatgcacta

SEQ ID NO: 11591 - DNA, 425 bp, Oryza sativa
  Clone ID: uC-osflcyp101c10a1
gacagcaactcaataatctttcgatatttcaccgagggtaatgtatggtaggaaaatcgccagacataacagagccggccagactcaactcaaactcaaccctatgatggtaaactgtttgcgattaacgcctccgcctatgacaatgtttggagataaacgcttccaccaaaaaacgaatgtcggggagtgttctcccctacaagaattattattgttttcaatgttaaaaaggcaaaattcaccagatcccgttagtgcaggaccaggaataaacacttgttcgtcatcattttctgccagtttaggcaccgcccgagccgtacttctttccaaagaagaggatctgcagctggtcatagcctgagagcacaccagcaccagcaatggcacgtaggatgttggcaccagcacccttgaacagt

SEQ ID NO: 11592 - DNA, 350 bp, Oryza sativa
  Clone ID: uC-osflcyp101c11a1
ctgctaaaaaaattgcattgtaggaacttggaaactttaaagccttcccaactgctttggatttacaaagggatgatacactcaggctttaacgcgcacgctggcgcacaaacgcgacacgacccgaaaaagggcgccaatctgagagccaagacaaggtcgacccgagcgacccacatggcaaagatctcatcttgccgatgaacttcctcagacttttttccggcgccgtcgggcatcggggccttggagaaatcaatctccttcgtcgccgcatgttgatgcgtggcttaactcttgaaatctcggctggattcaacgccaattttttttagctgatcattatatta

SEQ ID NO: 11593 - DNA, 329 bp, Oryza sativa
  Clone ID: uC-osflcyp101c12a1
aaggcagcaatgggtactagtatcaacaagcgatcactacactttgtctcaaaatcaatacatgaccagaggtcaaatgcataggataaactggaaaaccctttggacaaaaattttttaccggacgtttacatgacctgaacaactactgactagattgcacaggaatctatttttggggggccaaatcaagaaaggataatttcatggaccaatcttggatcttcggttcattttcagagaataagaacttgaaatcgatcaggggattcattaatccataaggcctggcatcaatcatgcaatcatggggattctgcaggagcaaa

SEQ ID NO: 11594 - DNA, 273 bp, Oryza sativa
  Clone ID: uC-osflcyp101d01a1
gaaagaaaaaaataaatcccagttttaaaaaaactttttttaaagtttaaaggtgacctttggggccccgggggtccccccggaaattccggcccggaccctgggggggaaccagttttccttatgggggggtttttaaaggttggggtaaaaatgggaaaaggtggttcccgggggaaaatgtttttcctataaaaattcccaaaaatttacgtggccggaaaattaaaggttaaaccctgggggcccaaaggggggggctaaccaaaatta

SEQ ID NO: 11595 - DNA, 93 bp, Oryza sativa
  Clone ID: uC-osflcyp101d02a1
tttttttttttttttttttttttttttttttttttttttttttttttttttttttttttttttttttttttttttaaaaatttaatccttttt

SEQ ID NO: 11596 - DNA, 393 bp, Oryza sativa
  Clone ID: uC-osflcyp101d05a1
gacaaaaacatcagcatcctagccatagaacaagcaatagcaaacccaatcttgtctatcttgttcccaacacatgagattccaaacaagcaaaacaatccctcccataaaacacccatggatggttttcccccgttcatgacacaaaacaggcacttacaagcctagatagagctcaagataatgtaagcctactactactgtaccaccaccaccactactactgtacacacactgcaggccttgagcagagcagaaaagaattgcatcagtacaggctgcacagaattggctgcattcttgtgcagatggagattctagaatttgtgggacaagcttctgcgtattctctatcccaggcaattttccttgccacataggactgtggtttac

SEQ ID NO: 11597 - DNA, 304 bp, Oryza sativa
  Clone ID: uC-osflcyp101d06a1
atgaattaaacaaattgcataatacgaaactgtatcacaggtgaaactccgaatatcccaacttgatttcaaatatgtacgtgatggaactcaataaaccaaatcaaaatgtccaccccgggttattttctgtttcttcttctcagatttgcttcgaggcttacggcacgacccgggcttaatttcatacaatgggttttccatcttcttacaagcaacttcagatttcaaatgttaagtattaacttaaattcccttcatgaggggctacatccttggggtgtgcctttggccgatacgatga

SEQ ID NO: 11598 - DNA, 294 bp, Oryza sativa
  Clone ID: uC-osflcyp101d07a1
atacaatatatataaaagattacctagaatctacaagcagaagatagcttcaaagcctaataggatagcctgataccggtatcatatgggccgccgttatgcagttgggctttggcttgaagcgtaccttcacaccttgaaaaagcacaatagcgataccaatataagcatcgcatgagactatgagatggacttctctaaattgctactaataaaattgttaacctatagtattatatgtttcagctttattataaacttcatcgcttgtctccacatattcccttaaattgg

SEQ ID NO: 11599 - DNA, 304 bp, Oryza sativa
  Clone ID: uC-osflcyp101d08a1
aacattaaacttccattttttattccaactggcctcccatttttaaggcagggccccatttaaggaatccgaaaaaaatttggagtcgttgacaaccatgggaatgcctgaaaacatatttgggagcaaagtaagacaggcaagctccctgatattatatcgggttcaaaattttggggcttccaaactaaaatattttttaaacactggttgatctacctataatttccctttgaattaaggggccgggctaaaatcaacagggcccatttttttataaaggctttgccccccccccttgaaa

SEQ ID NO: 11600 - DNA, 399 bp, Oryza sativa
  unsure (1)..(399): unsure at all n locations
  Clone ID: uC-osflcyp101d09a1
cttgccttctttctcatccgccattcctttgttcttttcttttcttttccttttcctctctttaacccttttcgcttcctccattcaacacattcnctntnnntttctttctttggccttttttgccctctccttttctaactctccttttcttgggccgnnctcttcttatatcccctcaatttaaccatcgagggcggccaaaaaaaagagagaaaggaagagcaaaataacacattacaccatggcgcgattcgtcatcatctccgtcgtcgccgtcgccgccttcgccgttgccgctgtcgttgagggccggcttggacctatcgacgtcgttccgaccaacctgatcaccaacccactcggtgccatttatcgacaatgggccgcaagatcacc

SEQ ID NO: 11601 - DNA, 213 bp, Oryza sativa
  Clone ID: uC-osflcyp101e01a1
ggtacaacctttttttcaaaaaatctgggaaaagctggaactcccttggaaaaaatttttccctggttttacttttacacattggggcctcctggggcaaggtaacaaatttcaggggggaaaacaaattccccccagtttacaaaactttgggggggggtttttccggtttttgggggttggaaaaatttgggggtgttttacaaagaattg

SEQ ID NO: 11602 - DNA, 302 bp, Oryza sativa
  unsure (1)..(302): unsure at all n locations
  Clone ID: uC-osflcyp101e02a1
aggcgacactattttatagagctatcgacgtncgcatgcaccgcgtaccgtacagcttggtatgcctctattagttcggcgcgccctttttnttttttttttttgtattgaggcctacagtttgtgtattccttttcaccaaatgcagcacacatcattccctaataccattctatcacacatctgtgctttcttgtacatcataccgtgtcgcttctttctttttacattgaacaacagtggccactaattacagcttctccttgctaataaaactcgctgaagactggtagttcagtttc

SEQ ID NO: 11603 - DNA, 410 bp, Oryza sativa
  Clone ID: uC-osflcyp101e04a1
gcacaacattgcactgaactcagtaaaaattatcctacaatttcagaagaaacaaaacgtttcctctttggctgcatattctaaattacagtatagtaaggacaaccattattctgaattcttgattctttctactaatgagtaacctctttcaaggttcaagccccaaggttgaagtaaaccgtgtagaattcgtctctcaggctgtacaatggttcaagcaggaagttcctcttcaccccctttgcaatgaagctgataggatggtactgcctcaatggagcagcctgcacaaagctcgcggcctgctcgaaaatcccgttgatgcttggaagagaactcttgcaactgacctgaatctttgtacccacggagtaatccacgcctatcaccaggaagcatcccggttt

SEQ ID NO: 11604 - DNA, 356 bp, Oryza sativa
  Clone ID: uC-osflcyp101e06a1
agcggcgtcaaaggaattttctcatgttaattacatttgttgttacatttccaaactccaatggaaatcgaaatgaccacgttagaaagaaatacaaaaagttattagccaaaaacggcatgaagaaatgggatcaaacaaaatatggcagaacgtacaagaggtgatccagaacatgcttgcggaggtggacaaggaaagaggagaggaaaattaaaccacaatccccatgcatgcatgcacggtggctagaaaaatgcattgcatagagatctactatgggctgtgtgtgtctctcattcgtctccgtttaatttgttgctgacgaattgaactgtggcaacgacgacgatgat

SEQ ID NO: 11605 - DNA, 246 bp, Oryza sativa
  unsure (1)..(246): unsure at all n locations
  Clone ID: uC-osflcyp101e07a1
agcgaggccctgcgcgttcccgacgccgtggagatgtcgctcgccccctcttcgccgcctcccgcacgtctcctgccaggcgaaccgagggggttctcgggacggcaattcgttgagcacctcggcggcggcggcggcggcggcgtcgccgccgccgaggtggcgngccgcggtgtccgcggcgctcgcggcggcgattgtgtccgcggcgcccggcctacgccgaatctttaaccaagtttcgaa

SEQ ID NO: 11606 - DNA, 63 bp, Oryza sativa
  Clone ID: uC-osflcyp101e09a1
aaaggcgcagggaaaaaactagcttttattggtttaaaaaatgtcgggggtttaattggacag

SEQ ID NO: 11607 - DNA, 409 bp, Oryza sativa
  Clone ID: uC-osflcyp101e10a1
gcaaaggttattaaatacaataacaccatttagcaaccaaagcacgactatcaaaattacatgataaaattattattgtcttgaattatgtaaacgatgataacaaatccttttccagctacaaaagaaccagcataacaacaaagaattataaagttgcttaagtaatctctcccttcatctcaaaaagagctatatctagggggcctaggccacagcaacactttcacttaaagggtactttccatcctgcgacacacaagctcccaggatcaatctacttggccttgccgttctcgacagcagcagtcgaggggttcagctcatcccaggcctcgatccaggtgaccatggcatcggcaagcttgacgaagtaggggtcgatcttgccgagcttctccctgacctg

SEQ ID NO: 11608 - DNA, 69 bp, Oryza sativa
  Clone ID: uC-osflcyp101e11a1
gacaaaaattgcggggccagcaaactgggtcgttgttgcaacctggatacttaaatgttatgaagaaca

SEQ ID NO: 11609 - DNA, 382 bp, Oryza sativa
  Clone ID: uC-osflcyp101e12a1
agcggcgtcaaaggaattttctcatgttaattacatttgttgttacatttccaaactccaatggaaatcgaaatgaccacgtcagaaagaaatacaaaaagttattagccaaaaacggccatgaagaaatgggatcaaacaaaatatggcagaacgtacaagaggtgatccagaacatgcttgcggaggtggacaaggaaagaggagaggaaaattaaaccacaatccccatgcatgcatgcacggtggctagaaaaatgcatagcatagagatctactatgtgctgtgtgtgtctcttattcgtctccgtttaatttgttgctgacgaattgaactgtggcaacgacgacgatgatggcgacgggtgatctacagggccct

SEQ ID NO: 11610 - DNA, 395 bp, Oryza sativa
  Clone ID: uC-osflcyp101f01a1
catcattatctttctccagccatcacaaagcaaattaatatcgttccaaacatttaaggagctcatgaatccaataatccggaggtttttttaaaaggggactcattctcaacattccattaacaagggcaaacgattagtttgttttttccgacacccaacatttagaccattaacgaggttcaactgacaaccaattagacttagaccaaaaatacccgcgggactgcatagataaaacattcagtgttcgagcagaaggaaccgttttcagcacttgacctccttcagcccatgagagaagtaaaggaaggttgggttcggtggctccgtccttgtagtaggcaaacaccaagccgccatcatcatgcatgcttttaccaacaaagaactga

SEQ ID NO: 11611 - DNA, 357 bp, Oryza sativa
  Clone ID: uC-osflcyp101f08a1
gaaaacacatcaactttattaagcaggaacagatctagggaataaaccccattacatatccaagcaaaagagccatccttaagaaaggagagttaactgaactacgaaagcaaccttcctgaaataacctaacatcagaacagaaaaaggagcaagtcgacagggatctgcggcgaagccgcgacgactgctaccctgggcctcaaaagatgtgcagtccgcttgacaaaccgttaatccccatcggctgcctccacggaaacggcacaagaccgaggttttgatgctgagccgtagattttggggggtgcgtcaccggactcagcaaaggatccccacgggggctcattaggtggt

SEQ ID NO: 11612 - DNA, 420 bp, Oryza sativa
  Clone ID: uC-osflcyp101f10a1
actacgcaaaaaagttgtcattccattcgacgtttagttattccgccatgaacaccacaagcgttttacaacagcaagcaacggacggagccaactcaatgacagacaaaccgcacaagacacgtcgtccacacggacgccgaccatgacaacacctaaaccgaacaatggcggagggaaaaaaacgatggaaataacacgacagggaccaaggctgcgacaccggagctcagcagctgacacatacatagactacaaatccacaggcatgacacacgcctgatccgcctactttgcacttgatggcaactctagcaatggcactgcaatagccttcctctgtgcccaagtgccctctcctatctaaagagactaaccatagatagatgcatggatagatagacgattgttcatgggttg

SEQ ID NO: 11613 - DNA, 418 bp, Oryza sativa
  Clone ID: uC-osflcyp101f11a1
agtgaaaagctcatggaatccctttattatttagtgtgtcaaaggaaacagcagcacaccagtctcggctctagtattagcaaaatgaaagttacagcattgccgcagcggttgcgaaagaaaatcagcacattctggttccccagtgtgccagggagctcgaagcagactgttaaactcgttcaatccagcgtcaagagtgagtaggtcagaggagatctcatctcttccaccgccgagcttgctatcttgagtccacaacagtgccctcaggaagcgcagacaggtgtacgagagcgtgagatttttgtgggctatcggagccagtgatcttctccttcggccggctcaacaccttcctgacctcgttagctagcttgatgattgaatcatcttcatggcatatgttggacaatgc

SEQ ID NO: 11614 - DNA, 280 bp, Oryza sativa
  Clone ID: uC-osflcyp101g01a1
acaggagcaagtgaactctgcatttccgaatagaatgtaatgtcaatacagtgcaaaagggatgcccaggatcaattcatcacacgacacaaaggggggactacaatgggatagttcaacaaaagccttaacgccattccacattccacccacatgggccggttttttgattcatggcaggataggataggatctgttttttttgaaaatggcgacaaatattccttccagaaccgaaaactaaaaaagctttatttttttgggtcagggcacacatgat

SEQ ID NO: 11615 - DNA, 232 bp, Oryza sativa
  unsure (1)..(232): unsure at all n locations
  Clone ID: uC-osflcyp101g02a1
aggttaagatattcctcgcttaaatncctgatgtggtattaattatccttaacancttatnntatgggcctnnttgagatttaataggataangtttgggccttagccccaattatttctaaccaccttattgacttatgtccttacctgannaggaataccattttaatcttttaacacccacgttcccttaaattttcctttggccagttttggcaccttgaaaaagatg

SEQ ID NO: 11616 - DNA, 166 bp, Oryza sativa
  Clone ID: uC-osflcyp101g03a1
aaaaccaaccacattatatagtaaacattggcttcagagttcaaatccacaaggtttacagccactatagcaaggacagataaggtagaagctaagtaacttgttccagcctcatatagcagttacagatagatagtttcactgccaaaaagtacttgagacttta

SEQ ID NO: 11617 - DNA, 90 bp, Oryza sativa
  Clone ID: uC-osflcyp101g05a1
gagaggaaaaaacgagggatgtatttaaaagtctaaaagattctgagtgaaatgcattgggaagcaatatgttaaaggaaatagattaat

SEQ ID NO: 11618 - DNA, 116 bp, Oryza sativa
  Clone ID: uC-osflcyp101g09a1
ttttttttttttttttttttttttttttttttttttttttttttttttttttttttttttttttttttttttttttttttttttttttttttttttttttttttttttttttgggg

SEQ ID NO: 11619 - DNA, 283 bp, Oryza sativa
  Clone ID: uC-osflcyp101g10a1
cttcacaaaaagaaatatgtggctcacataaatagaagagacttgtttacatacaaacaccaaaggtttcaagtgacaaatcgatatagttttacagaaacaacaaatggaaatcgactggccagggttaacttgccgaatcctgcctagaggcaaaataattgtgggttataaactgggaaaaacaaatgccccggcaacttaattacaagctggatattataaatctttaaaaccctttggttcatttggaatgaaataatatctggcaggaatccattgc

SEQ ID NO: 11620 - DNA, 278 bp, Oryza sativa
  Clone ID: uC-osflcyp101g11a1
atatagaattgaaaagctgtattaggacagcactgttacttgtgtttaagctggaaacggtttgcatctcggtgcaaaattatacaggattatctaaaaacacatcatcaccttcagggatctctattgctatttcacaatgctaaggcacactggaaaagagttcatgcaatagcaaatggttcctcctcagcatctgctcctggcttcttggacgcgggcgaggcgggcggctgctcctccccgtagatgacgcggaggcgggacgcggagatggg

SEQ ID NO: 11621 - DNA, 148 bp, Oryza sativa
  Clone ID: uC-osflcyp101g12a1
tttttttttttttttttttttttttttttttttttttttttttttttttttttttttttttttttttttttttttttttttttttttttttttttttttttttttttttttattttttttttttttttttttttttttttattatatt

SEQ ID NO: 11622 - DNA, 77 bp, Oryza sativa
  Clone ID: uC-osflcyp101h01a1
accaaaaatttaaaggccaacgcccttaatctttaaaaattaaaagggggtgttttaaaaaacagggtggaaatttt

SEQ ID NO: 11623 - DNA, 295 bp, Oryza sativa
  unsure (1)..(295): unsure at all n locations
  Clone ID: uC-osflcyp101h02a1
gatcaaatatccaccacatcaatgactaaatcacattatgcgaacaagtcactcaacagagaagtgaaaaccttgaccacacatcatcgagcaactaaancctacacaaacaacgttacacaacgaaacgcatttccaagtcttgggacgggattggaacggatcacttcatcaaaagcttacctcaatcgaaaacgcattactcatcaaaaacttgcacagttaaaaatgggacgagatgttactttttgacatagccatatggtttcgcccattacaaggccgcttctgcagt

SEQ ID NO: 11624 - DNA, 319 bp, Oryza sativa
  Clone ID: uC-osflcyp101h03a1
aagagttgtacctgtcacattggttgatatgggagtactaatataaaacatactccatattgggcttgcagaaattcttctacttcaaaaattcaaatttagaatttgcaaatagttcaaagaggaaaccatcatacatgctaatttgaagtaattattcaactagctattggtctcagatagggatctcttgaatgcaactcgatggttcaggttaccccatccttgttccctttctatcctcaaaccacttaacaatggtccttccgtggaaggcctttgtcacttgaaactatgctgctgaatcatttggatttgt

SEQ ID NO: 11625 - DNA, 94 bp, Oryza sativa
  Clone ID: uC-osflcyp101h05a1
ggcctgtaaaaaaataaaaaggattttttatatataaaggaggaccacattaaaaaatttttggtgcggtttaaacaacggggggattactact

SEQ ID NO: 11626 - DNA, 416 bp, Oryza sativa
  Clone ID: uC-osflcyp101h06a1
gacttggtcggacttggtccttcttgcggttcttgccgcgggagctcttcttggccttgtccttcttctccggggcggcgccgccgtcggcggccgtgcagtccatggaggaggtggcggcggagcccctggagcggtgccgcctcgaccggcgggagtcgggcgacggcggggagtcgccggcggtgatgtccatgctgccgctggcctcgcttctggtttcactgaaggatgtgtctcctaggcttcctccgtctaccacgatttcttgagaagcccatggattagctgcagcagagccccctctgtcgctcctaaatgaggctgagtccagtggcgccgaatggtaatccttcatccagctaggtgctcctgcagtattattattggtgttgggggacactaggccccatccc

SEQ ID NO: 11627 - DNA, 323 bp, Oryza sativa
  Clone ID: uC-osflcyp101h07a1
agataaccaatacattaatgatattataacaatatatgaaaagtgatacaatgcacggtttggcggctagttccaatcaaattcgaggaaaatcatatgaagactttaatggaagtatggaacaatatattggaaagtcaaacttgcacacacacacacataagagggaccatatgatgaaaatatttgaagttacatgtaccgaatagcttccgtagggatccattgacacttggtttttttattagaatgaatattcccataaggtatgtttacggtctgagggaactagttggaatatgaatacttcttgagcgaccaaa

SEQ ID NO: 11628 - DNA, 176 bp, Oryza sativa
  unsure (1)..(176): unsure at all n locations
  Clone ID: uC-osflcyp101h08a1
agttcctcgcatcaggttctttttctaggagttctttcttttcattggtggtttgctattgtggattataatgctaggaaacattttttctcaaagatttttggttttaccttgaaaaatttgtagaggtttatgngcacaacagattggaagtagtcgagggtagcttcagtttg

SEQ ID NO: 11629 - DNA, 97 bp, Oryza sativa
  Clone ID: uC-osflcyp101h10a1
gatttacttggtttctgtctctatttactactacttcttgaaccttaagaagggcacgctccggtacgccgtcatccgcgacgagccgttgtgtgat

SEQ ID NO: 11630 - DNA, 322 bp, Oryza sativa
  Clone ID: uC-osflcyp101h11a1
gccgacgaatttgatggggcgtatcattttgaagcgtaatccactcatcatgtacatttgccttgctcagttgctgtcgtgagcccagcaggcaaatcagacaacgcaggatatgcagggctctgctctgatctgatctgaactagtactagtataataaataagaaagataatttgggggtctctcgtggcaagaaggggagtactcctaggagagatcagtcgtcctggacgcaaaagatggggggcttgacgggctcggggatcttgacggtgccctcgagcattttggcgaccttgcccatggagggccctcatgtcg

SEQ ID NO: 11631 - DNA, 445 bp, Oryza sativa
  Clone ID: uC-osflcyp102a01a1
aggttcaaattagaaattttaccagcttataatcatattacaaagagaataaaatacatcttgctcaaaatcactgttacaaacatgccatttcagctcttttaatgggacgccattcaaaatttttagttcagttcacacattgtgtatattaacattcggacatactataatggcaacagtgtctgtcagatctttaactggcagctcgtaggcatgtaaataggtaaattccagaaatcctttctaattggtagcacttcagtgtcaagcttctgaaaacggactgctggttggatcataatgaatctcccgctaatggaaccatcgttacatgaaaagcagacatagttagaaaccagcctatgggtcaacccacaggtccaattcaacattggcaaagtactgcttttttccgtctcatgaatatgtaagcatagttgct

SEQ ID NO: 11632 - DNA, 382 bp, Oryza sativa
  Clone ID: uC-osflcyp106a02a1
acagaagcaaagcaacgggttcccaaaggtccacacttacagtacgttcaacgtacaactgatccaagcaaatgaaacaggtttgatgatgcactgatgcgagaaactaaacggttggatcggagtacggagacgtaggcgatcatggacaagcggtcggacggcggccgatgaggcttagtagctccggtggatggggaagctgcctcgatgggctgttggggatgatgtaagaggaaccttagaaagaatgaccgccggctgagagccaaccgaacgattgaggtgggtcccaacccaagtacaccccaactggggacttcccccaggaccagccttgacgcaggggcccgggtccgaaaggaggacggcgcgggtttca

SEQ ID NO: 11633 - DNA, 112 bp, Oryza sativa
  Clone ID: uC-osflcyp106a03a1
gggacccaatgattaggggtcacttattcattatagtttttccatgctgctttaccacaggaaaaccttagagaccccttaaaaccagagcttaagggtccacaattacagg

SEQ ID NO: 11634 - DNA, 400 bp, Oryza sativa
  Clone ID: uC-osflcyp106a04a1
acgcgcgcagcatgcattttatttaggcacggtccacaattcatacatgtataggggatacgtctcgttggcagacactcacggtatagtagggtagttgtgtgtacagtgatatagtcatatctgcgcgtcttttcatgccgttcgttgacttcgttcacagggtcagggatcgggttaggcagatatcgagttgtgacagccaccacaggctcgggagccagccgacgaaggcggaagaatctcggatgtagcccgacgctcgccccatgacctggaccccatgagtttcttgatggttccagtactttggcgccggaagacgcgttcggtgcccgtacccgacgacggttgacggcgtgcggtaggggcgtggccgaacgggccccgtgttaacgcc

SEQ ID NO: 11635 - DNA, 122 bp, Oryza sativa
  Clone ID: uC-osflcyp106a05a1
aaaacacctgttgggattgcataaaaaaggaaggcagcccatttgggctaaaaccctcgcccggacccaagttctccgcctttaagaagttcaacttatgcgtacggccggatttaaaccaa

SEQ ID NO: 11636 - DNA, 171 bp, Oryza sativa
  Clone ID: uC-osflcyp106a06a1
cttctttttttttttttggacgggtactactggtacatgttcttggctattttcttatgtataagacaagattacacacttaggaacttaatgactgaaacagaacagaaactgaccacaacaccaaaatgactttcactgatcaggaaaggaacagatcttggagatgag

SEQ ID NO: 11637 - DNA, 317 bp, Oryza sativa
  Clone ID: uC-osflcyp106a07a1
ggacccttaatcccttatcttcccatttatcagcttatcatcatccaatagattataataatagagggaggagaagtagcagctactagccagtggagctgattcgagcaggggatgatttggagtttctcatcatggctgaagagggaagggtttggccatgtacgtaggaggagatcccatcaaagccaaaagcaagggaagaagtaagcaacgaacgaaaaaagaaaaagggaaaaaatgggaagaaaaaaatccttccaaagacacatgggagtaacacaaacgaggggaaattcaaaaaaccaaacctccct

SEQ ID NO: 11638 - DNA, 362 bp, Oryza sativa
  Clone ID: uC-osflcyp106a10a1
actcggcattaacttggactatactgaattatcacaaaaaaggaagatctgatcatggccaactatagcaaagtgcctaagatcagatcctgatcgatgggagaccaacacaaaagtatacaacaatagaacacacaactgaatctacagggtcaactaagtaattcaccggacacaaatcatcacatattgacacacaagaacatctcactaggagcagagatcaaacttggagaggcacaggaaacaaagcttctcacttcctcagaagcccttcccaaggtgaaaatacctgggccttgttaccagccagcaatggcctggagagcaccgggagcccccactgcgacgcgaagatgatg

SEQ ID NO: 11639 - DNA, 393 bp, Oryza sativa
  Clone ID: uC-osflcyp106a11a1
gatcccaattgacctgattgattgatagcgatatcataaaagcagggacacgaattaggatttaaaaccaaccccaagaaggatcgaagatccaacttcaccgaatcgatccaagaactccgcctaatccaaccaaaccatgggtcgatctgatctaaccaacacgtacacgaactcataaaaagactaacaccaccaccacctaacttcttatttaggagactgagacgcactcatagacgactgatactgagcgaaaggttgaatggggaacagcacagatttaggagagctggccgtagtgggctatgaccaccgcctaggcggtgctcccagcgcgggatcccaccttttcgatggccttgacaacgtccatgccatggacgacgcggc

SEQ ID NO: 11640 - DNA, 364 bp, Oryza sativa
  unsure (1)..(364): unsure at all n locations
  Clone ID: uC-osflcyp106a12a1
ggcactgaagattatcagctcataatctgacaaccaaccgagttattcgctgcacacatatacagggactagctgagtgcccgtgcgttacaacggagaaaataattcacacctaactacgactcaatatataaatgatgcaaaattgtgaaaaatgcaaaagagaaaggaacagctttacgncctaaatnctcttattcctaacatgaacattagagagaaccatgcattgatactaagctggtttcttgaattttatgcagagtcccacgaatttccggagcaattttggcttgtcgatcaatgcagcttcctgaattcttttggtattgtccagagagtaagcaaagaacatggagtgatc

SEQ ID NO: 11641 - DNA, 60 bp, Oryza sativa
  Clone ID: uC-osflcyp106b02a1
gggttaaacccttaaaattcgaatacaatttcttaacatgtggtaaaaaaaaaaataaaa

SEQ ID NO: 11642 - DNA, 87 bp, Oryza sativa
  Clone ID: uC-osflcyp106b03a1
acaaagggagggaatttatgcaatatgcgtcacaaattacaaaccaaaaccaacctccaacaaggtgctttgaatccaacttccacc

SEQ ID NO: 11643 - DNA, 289 bp, Oryza sativa
  Clone ID: uC-osflcyp106b05a1
tacttataatgagcatgacgatcgacggcatgcagcacgcagcgcaggcgtcgtgagcctctagtagttagcgcgccctcttttttttttttttgaagcgtaccaaatttgcatatatttatttttcagaacccgcattgaacaacatgtatatttcatcgcagtttattgatccatctttattcattcacaaaagtagatacaagccagagccttggtagagtgtggaggtatcgagcacttttggctctacaatgcctatatgctaacaataactggccgatatgaa

SEQ ID NO: 11644 - DNA, 117 bp, Oryza sativa
  Clone ID: uC-osflcyp106b07a1
ttttttttttttttttttttttttttttttttttttttttttttttttttttttttttttttttttttttttttttttttttttttttttttttttttttttttttttttttttttt

SEQ ID NO: 11645 - DNA, 122 bp, Oryza sativa
  Clone ID: uC-osflcyp106b08a1
gggacaagcaagaaggatatatattcatccatttttaaaactactacaagagggcggggggaacccaaaatcaggggggatttgggaaaattttacaagcaacaagggagtttgggagaacg

SEQ ID NO: 11646 - DNA, 231 bp, Oryza sativa
  Clone ID: uC-osflcyp106b09a1
gctataccattatcaccctcttgtatatatataaaagcggtttaccctcgtttacaacacaaagaagtgaaaattgcagactagtaaactttgatctttcaggaagtgaagttccaaaacatgaatcaagaaaattgtattagatgggtggttggcttggccaacccaaatcataatggcattcttgaaaaaaatttcttgaaaaccagttagccacctaatattcaatga

SEQ ID NO: 11647 - DNA, 171 bp, Oryza sativa
  Clone ID: uC-osflcyp106b10a1
tttttttttgtttttttttttttttttttttttttttttttttttttaaaacaaaaacaaaacaggtttcacaaaattacagaagttgtaaccacagcttggtaccaggtgataggattaatcatttgttttgggggggataaaccaggccactccagaccaagaacggcc

SEQ ID NO: 11648 - DNA, 376 bp, Oryza sativa
  Clone ID: uC-osflcyp106b11a1
catcagtctgatagtatgtcattaacaggctcatagcatatagaaatacactgaagtctaaaatttcaagcacaagactgtaaacagctagacttaaagcactagaacaaagaacttgtttaccttccaaataaaaaagaacttgtttttccacatagggatggaacgagttctcagatgacttcttattactaacaagttcttattactaaccgatctgttaaatagcactatttcctatctaacaatagattacacagggatggaactgtatgccagttaaatggcattattcagtattaaatacttggaggattttccagatcatgcattttagttggggcagtggtcctttgagctttcattatcgtagctg

SEQ ID NO: 11649 - DNA, 136 bp, Oryza sativa
  Clone ID: uC-osflcyp106c01a1
ataaaatgaaaacccaaggggtcataaatacataaaaggggaacctaagggatcataaattatacgaccaatggaacatattggacaaatgaataacaatgggatggttatgaattatataaaaggctccaactgg

SEQ ID NO: 11650 - DNA, 67 bp, Oryza sativa
  Clone ID: uC-osflcyp106c02a1
ataaattatataaaattatttatataaaataattataaataaaaaaaaaaaaaaaaaaagagcaaaa

SEQ ID NO: 11651 - DNA, 308 bp, Oryza sativa
  Clone ID: uC-osflcyp106c03a1
ggactatcaaattccaactttattagcatatcacttttgcaggggcagatgcaaagaaagcatcatatacgattatttgaagtgggaagatataagcaaaccacccccatgaattacactcattatgctggagtaatcactgatcacgctttgtttagataagaaaaggcttgggctatatcacaagggatttagataaaaggcaggggatcacactcacctgtatccactttatttaaggccctaattgcaaactgattatttgggtagggccttagttaacagctgcctttacaatcctattgaaa

SEQ ID NO: 11652 - DNA, 378 bp, Oryza sativa
  unsure (1)..(378): unsure at all n locations
  Clone ID: uC-osflcyp106c04a1
ataggatcaaaacatttctattaccacaactttttaaggatggaattgagtagcaatactttcaccccaaaatacagtttagcgacaatatcttagaaaagccgcttgctttgccgccatggctggcaagctgagcagagcagctaacacaaagaacacgagatcactataanaccaaacggcaacgaacgaagaaaatacagggtccttttttgttctgaagatacacgaaggcggttcgtttttcttttatttttagtcctcctctcctcctcgatgatgggtgtatggcaatggcaatggcgatgggatcttggcttagttgatgggaaggggctcgccgttccactccttgaggcagtcgagcatggggtcgat

SEQ ID NO: 11653 - DNA, 376 bp, Oryza sativa
  Clone ID: uC-osflcyp106c05a1
aattcgatcatcccttggatgcggcctgcggcttacattaaatctcgatccaaagaagcaaagatgatgacagacagaaattaattaagctagaaatctcctcgatcgatcacacacacacacacaattaaggtacatacatacatgcactgctgcaactgcaactgcagggtcggtgcgtggctactacaagtgtacacatggtacgttggttggcaccatctcgatcgtgtcgttgtgctcacttgccggggacgaagttggtggcgtatgcccaggcgttgttggcgacggggtcggcgacgtggtcgaagaggttcttggtggggcccttgccggtgacgatggcctggacgaagaagccgaacatggagaa

SEQ ID NO: 11654 - DNA, 96 bp, Oryza sativa
  Clone ID: uC-osflcyp106c07a1
aaaaaaaacccccggggaaacacgaacccaaaggggccaaacaaaaaaaaataattcccggaaacaaaaaaatttaaaaaaaaacaatattaaaaa

SEQ ID NO: 11655 - DNA, 281 bp, Oryza sativa
  Clone ID: uC-osflcyp106c09a1
ggaaaaaaggggaccaaaaaaaaaataattcattaatttattggaaaaaagaaaacgaaacggggtttttttttgggaaaaaaaaaacaaaggggaaaccacacagttaaaaaaaactaaatgggtccaaaaaaaaataacgaggaaaacaatcggataaagaaaaggggggctcgtttagaaagaaagaaaacttggccatgagggccccaccggaaaattcctccagttcccgccggaattgccccccccgggggtgccaaaccccccgccgaaaccgc

SEQ ID NO: 11656 - DNA, 369 bp, Oryza sativa
  Clone ID: uC-osflcyp106c10a1
agaaatactcatgaaacaacgggatctaataaaggattaaatgttgcacagccacataaagacgaaatggcactgtatctgcaaaattcttggggcattaatcccagtattattaattaagaaaaaaaacttggaaatgcagatttaaccttattaaaaaaataaaaaataattggttacttttgtacgtgctggaggtgaagcaacccaagctccgagctgcatgggaaagatttttcttggccaacctttttccaacagaatatttgaaagcacgattagtactaactttcatttacaatagcagtctcctaatgtcaccaaaattctgtgacaactctgtgaaaaacttgcctcctacttgaccat

SEQ ID NO: 11657 - DNA, 355 bp, Oryza sativa
  Clone ID: uC-osflcyp106c11a1
atattaacataaaatgtatatgcattttggagcaattttttttataagtaaaatacaaacacaggcgctcacaatgcgctcacactcattcctatgaatacacacgcacactttacccctatgaagtcctcatagaatcatttgggactttggtacaactaagatagtctctgggttctggttctggaactggagttctggtccatatggttttactgaaatcaaccaacatgttatgttagggaaggctgtatttggatcaattagagatcggccagagattaattggcatgaaaaatgttcttgcaaaaccaggacacatatatgcaatatgtagaacattaatgtttgccaa

SEQ ID NO: 11658 - DNA, 380 bp, Oryza sativa
  Clone ID: uC-osflcyp106c12a1
ttttttttttttttttttttttttttttttttttttttttttttttttttttttttttttttttttttttttttttttaaccaaataaaaaaaaattttaaatattatttttttaaaaaaggggggattaatgaaactgggaaaaagggaaggccctgaaaaaaattttcagggatgggggagaaaaaaaattggtaaaaaaaaagaaacaacaaaaaagaaaaggggaaaaacaaaaaccgaccttttttccaggggttccatagctacccaaaaaaaaatcgctttgggagccaaactaaaaaatggggggggtaaaaggttttgaacccggtttaaaaattttggctttttccaagaggggaaaaaaaaggggggtt

SEQ ID NO: 11659 - DNA, 324 bp, Oryza sativa
  Clone ID: uC-osflcyp106d01a1
aaaacggggtttccaggctaacctaagggtttcaccagggctttggttaaaaaaggaattgggctacaaaagcaaaggggggcaaaaaaaagaggggatttacggggccctatttacatttaaaaaggaaactaagcgcacaaaaggccctagggggttattttggcagggaatttaccatgttagggtggctttttggctggctgggggattaaccttggtagccccgttcaccgttggggtggcccgggggggggctggggttacggggccaggggccaaattttggggcactaacaaggggccctttgggctaatgctttg

SEQ ID NO: 11660 - DNA, 400 bp, Oryza sativa
  unsure (1)..(400): unsure at all n locations
  Clone ID: uC-osflcyp106d02a1
caacgacaaacacaaccaataagtctaactgcgtgctcaacaatcgtaatatggcactagttggttaacatgtgacaggaaaaatcaactagtgctaggactaggagcatcgtctttgattgcaagcagcccccttgccgtgcgaaatgcaaacgacaggcaggcaggctcattacctagtaatatctcattcatctgggacactcagggtgtaagggaactttctgtgggaatccttgtcacagtttcctcgttagtttgttattttcggctttcacccttctccggngacaggcttcaaagtggggatgataactggtctcccgtcgatttacaccgttcgatgagcccccgtaatcaacaagcctcaagaggaacccattatatcttgtctctatca

SEQ ID NO: 11661 - DNA, 409 bp, Oryza sativa
  unsure (1)..(409): unsure at all n locations
  Clone ID: uC-osflcyp106d06a1
aatcatcttgaaagttcatcttttaaattgtactcagttattcactatcaaaattgttggtacattgtgccagaacaaatgtcacgcaagaactataagtaccaaaatagaaattctagatgcagaagcttgccttcagaaagtcctgtcacagggtgataattgaacaatnaaagggctctgtnntcagcagccataccctgccacagcctgtctgagggctgccggcagtttcaaaatttggcctgcaaaactggcaagccacttttgacactgcctcccagctgcctacccgcttgcctaaaaaaccgacctccccaaaacaccacccaaagatgtttccaagaccataaaatgttttgggccaccaaaaaatgctttattttttttagattgtataccttcctgg

SEQ ID NO: 11662 - DNA, 315 bp, Oryza sativa
  unsure (1)..(315): unsure at all n locations
  Clone ID: uC-osflcyp106d08a1
ctgcctgcaaggagtgccagcgctcattatgttatagcacacggtgacgttacaacaggtaatcgtttgatcaggtacagtacagtacagagagggcgtgttaacaggtccagtactggttgcataaaacatataatggtaacaatagtatatatgtaggttctagatggggatacanataatggtaacaatanctttagaggtggagaagnnaagcatttccttgngctacgnnaaatgtgatgacccatgatggatcttgngattttgatgtttggngtaccaacnnaggcacctgcgatggggaggggaggg

SEQ ID NO: 11663 - DNA, 387 bp, Oryza sativa
  unsure (1)..(387): unsure at all n locations
  Clone ID: uC-osflcyp106d09a1
gaggaaacttttcctttatttatagaatatactccgtatgttcgttcaaaaaaagaatatactccgtaacaaagtacgtatagataactgaaggcagggataacacgtcaaaagccattcttgaaacacgtctggaatgaggagcgccaatgatttcccatattctctgaacangcatacccaccacccactctaagagctttcatgcactattagattggttaaacttgccagatccgaagatccaattgataccgcaatccaaattcttgcgtcctgccattttcctggtggtgtttactgagtttcatgaaccaccccctttcctagggccattcagaatcagcattgaacaacaaactgccccttcccaatatggaaatgagg

SEQ ID NO: 11664 - DNA, 396 bp, Oryza sativa
  unsure (1)..(396): unsure at all n locations
  Clone ID: uC-osflcyp106d10a1
ataatgcaataatattattgtctcaacatttatacatatatcaaataacgttttccagtacctttcaaattacaaaaaaaaagggcaaaattatacaatttagttataatttataaatttataaatgacttagttcttgggcatcggcccggaagtcgccactcgcgacggnncggtgggcttcactttgnnacgcggcggcaagagggggtgatgccgtccgcccgaccggggggagctggccagattcttcgaaccgccggtgggtccggccggcgaggggcctttgttgagcctcgaagcaccgaagttcgcggttagtaaaccggatgttacttgccgcattgggggccgtttcggcggggaagcaccgaacggagccccggaccgcgtggg

SEQ ID NO: 11665 - DNA, 196 bp, Oryza sativa
  Clone ID: uC-osflcyp106d11a1
ggagtacatagcaggttttatgcacaacaggagatgtctctgttaacaaaaactgaaatttaattattgcaagatggaagggcgcataaactacaaaatgttcaacagaactctaactgggcaagggttttttttttttaactggacaggctctccacattcctaaaccaactgaacaacaattggttccaaagac

SEQ ID NO: 11666 - DNA, 322 bp, Oryza sativa
  Clone ID: uC-osflcyp106e02a1
cacagcaacttgtcttacattactactactgcagttcgtcttacgcaaaaggcgggaacaataccaaatttcattacaataaaccgaaggcaccaagtgaacgactgaatccaaaggtttgtggaaacacatatttacatcacaggcctagatagccagttcgccccgcatttagtatagcattcaagccaccaggaatagaacatgtttcaaatgccaaaagtttcagaatatatgttttaaggagccaaaccatggctggcccacactcaaaatttctcaaaagtttgtggacgagaagaaacaccttcgggcttgcatc

SEQ ID NO: 11667 - DNA, 191 bp, Oryza sativa
  Clone ID: uC-osflcyp106e03a1
ttttttttttttttttttttttttttttttttttttttttttttttttttttttttcccccgaacaaagcaacagggcattgggaaattaaaaaacgggttaacaaccagggataaaaaaaacagattcgggggggggccataaagtttaaaatttaacacactacacataagaggcccccggggcagggg

SEQ ID NO: 11668 - DNA, 67 bp, Oryza sativa
  Clone ID: uC-osflcyp106e04a1
aaaaaataaaattaaaaaaaaaaaaaaaaaaagaaaaatacaaagaaaaaaaatataggaccaaaaa

SEQ ID NO: 11669 - DNA, 116 bp, Oryza sativa
  Clone ID: uC-osflcyp106e06a1
acataagcatcaataccttataaattcatcaaataggtagccactacattgggaaaacaagtaggggaaggcaggggatcaagcttaggaattacaacaacttgaagattttttta

SEQ ID NO: 11670 - DNA, 325 bp, Oryza sativa
  Clone ID: uC-osflcyp106e07a1
aaaaataaattaaaaaaaaataaaaataaaaaaaaaagacaaaaaaaagcaaaaaaaaaaacgaccaaaaaaaaaaaaaaaaaaaaaaaaacaaaaacacaacaaaagaaaagaaaaaaaaaaaaaacgaaaaaaaaaaaacaaaaacaacccaaaaaacaaaaaaaaaaaaaaaaaaataaaacaaaaagaaaaaaactaaaaaaaaaataaccaaaaaaaaacaaaaacaaaaaaagaaaaaaaacgaaaaaaaaaaaaaaaacaataaaaaaaaacaaaacaaaaaaaaaaacaataaaaccaacaaaaaaaaaaatcaaaa

SEQ ID NO: 11671 - DNA, 117 bp, Oryza sativa
  Clone ID: uC-osflcyp106e09a1
tttttttatgttttttttttttttttttttttttttttttatttattttttttttttttttcttttttttttttatggttctttttttttttttttttttttttttctttttctttt

SEQ ID NO: 11672 - DNA, 388 bp, Oryza sativa
  unsure (1)..(388): unsure at all n locations
  Clone ID: uC-osflcyp106e10a1
ggaatattcaatcaatttttgttaatttttcaaataattttggcgaaaaagtatgaaaattcctgaaattttcagaaattttgagccatactacttacagttacagtatagatgaatatangttcttgttttcatgaaaagnttgaagtgtgcccacttagctgtatnntattattaattgnnataaaaaatagataatggtcgattnnntgttgttcttttaggcaaaaaannnaagagctaccatcacttttttgtcgattttgagaaagttcaattttganggaggtttttataaattcccgataaattattctgtttaccattatttagcctttcgattttgtgttccgcttctgtttttcatattcaattaataattaaaatt

SEQ ID NO: 11673 - DNA, 422 bp, Oryza sativa
  Clone ID: uC-osflcyp106e11a1
ctggattaattaactagcatatttaaatttaaaacgtaactgtttgagcaaataccacgaaatgttcaggcgctaagatacggcaataccgatacatccagcatagcaaaaatggcgaagagcacagagtcagataaagctatagtagaactagggtctccaggagatgggggcccgaattgacaacccatgtgcgctttagtccgaccctccttccattcttggctctcggccggccgtcgttccttccaagccgggcggcattgttcggccgtccagcccttcaagcagaccttcgtccttcgtccgatgcctcaggccccgagcttgaagcattccggttggaatcctggttgcccgaaggtgtttggggttcctcaaggcttgaaagcccggaggttcagggagggcaagtcttcgaa

SEQ ID NO: 11674 - DNA, 157 bp, Oryza sativa
  Clone ID: uC-osflcyp106f01a1
ttttttttttttttttttttttttttttttttttttttttttttttttttttttttttttttttttttttttttttttttttttttttttttttttttttttttttttttttttttaattaatttttttttttttttttttttatttagcagggggg

SEQ ID NO: 11675 - DNA, 395 bp, Oryza sativa
  unsure (1)..(395): unsure at all n locations
  Clone ID: uC-osflcyp106f02a1
atcacaagagcttatatctgattgacacgtggcaaaaattttggtgatgtttagctaatttttcaggctgccacgtggcccaataacattctagaatcatgaccctgatataggtagaagagattgctgataaagaaaaatggcattttgcaacacatttaacttgttcagtgttcaagctaacngttgaacctggtacaagtacaacantgctggcacgcatgttccacatctcgcgggttcgagggtttcaaagccgaatacaacacacggcatgttgcatttcatcataatttaaagtacttagcatcactttgaacaaggttttggtggtcacatgtatattcgcaaccttcttaaggtgtccgcaaaagacgtgcgcagcataatacttt

SEQ ID NO: 11676 - DNA, 71 bp, Oryza sativa
  Clone ID: uC-osflcyp106f03a1
atttttttttggggtattttttttttttatttttttttattatttattttttgtttttactttttttacat

SEQ ID NO: 11677 - DNA, 192 bp, Oryza sativa
  Clone ID: uC-osflcyp106f05a1
ataattaattcacaacaccatatttcattgatcaggttcagaacctgcacagaaatacacactaccggtacagatctcaccttctctccaatactcgtacatccatccacgcggtccacacgaatacgtacattctatacggtacaccgtacgttacattctacttgcaccggtgtacacacaacgcaacac

SEQ ID NO: 11678 - DNA, 256 bp, Oryza sativa
  unsure (1)..(256): unsure at all n locations
  Clone ID: uC-osflcyp106f09a1
gagttccaaattttgaatcccttctcaaattccaaggtagtacaccaagcactatcaagcttgctacttgctacagtgtatacacacacacaacccggcctagctagctacccagtacatacgcaagtacatgaatgtattgtacgtacaacgtgtacagtgcagcttaattaatnttaattctaaatttaaattgatttaattagaccgttgaccgaagcggccgagcccggttgagggaaccttcggtgaaagg

SEQ ID NO: 11679 - DNA, 110 bp, Oryza sativa
  Clone ID: uC-osflcyp106f10a1
aacaaaaagttacgagcacacgcattcggtataataacaaggtaaatttgccattttgataaaccaatacgattaaatggggcccgtacagaagccgtattcggtatttg

SEQ ID NO: 11680 - DNA, 123 bp, Oryza sativa
  Clone ID: uC-osflcyp106f11a1
gggctacaacaaaatcggattttatgactgaggtagcagtggcgactgtgatacataatgaaaaggggaagaaaaaaaatacaaacaaaaaaagctctcgcctatggccctgaaaatggaaaa

SEQ ID NO: 11681 - DNA, 180 bp, Oryza sativa
  Clone ID: uC-osflcyp106g01a1
tttttttttttttttttttttttttttttttttttttttttttttttttttttttttttttttttttttttttttttttttttttttttttttttttttttttttttttttttttttttaggggggggtaaaaaaagggccctaaaaaagggaaaaaacgggcattataaagatgacgag

SEQ ID NO: 11682 - DNA, 101 bp, Oryza sativa
  Clone ID: uC-osflcyp106g03a1
ggaaaggcccaaagagggcaacaacagccattccaattttaaatcgaccctgggcccagggtcacatagacactttaactcatctgaaggttcttttgaaa

SEQ ID NO: 11683 - DNA, 419 bp, Oryza sativa
  Clone ID: uC-osflcyp106g04a1
actaacaattccgaaccattttattttgtgtattactacatttcagcaagtaagacctatttgtacatggcaaaaacatgaagagttgcaaaccattttattttctgtacattttctgcaggtactatagtgttgtttgtacacggaaaattgctcccatggcttctcagcagatttccaacttccttgataagaaagtttcagaaccgagcttggggaaacattcctttccaaaaatcgtttcaccaataacttacctgcgaaaaaaccccaggaaattccacaacacaggttccattcgaaaagttctcaaaatcttattggaccaagaactttgaagcaccaatactgggggttggagttggtgactaccaagctttgggtgcatggaacataaagaccggtgagaccaacaagcg

SEQ ID NO: 11684 - DNA, 381 bp, Oryza sativa
  Clone ID: uC-osflcyp106g05a1
acgacaaaccacgaacttggatattaaagatgccacaaagaaggttcacataaacaacacaggtcacagcagcgaaagctacaagcaaaccctgcataatcgaaaagcaaatgtttttcaaaaccagacacacaaactgatagatagaagcccacacggacagatcataggattagcagcagtaatccaagcattgccaaggcaaccaggccaagaacccctgaaccttctctagtacttcgtcacccctcatcacccttgtcaccattcgtcgaactcggagcccgacctcctcgtagtccttttcccagcgcggcgagggtcctcgcgggccttggagaactccccctcctccatgccctcgccgacgtaccagtggac

SEQ ID NO: 11685 - DNA, 329 bp, Oryza sativa
  Clone ID: uC-osflcyp106g06a1
aaaacatatcacatcttcatagcaccatcaatatgatttgcctgaatccaagtaacatatagcaatatgtagaagtatattattacacaagaaccttttaacaaatcacccagcaacaccatccagccacccggccacccgcgttaatatacttcgcggtgaatccatccatgccgaaaagccttctctggggtgggaataaattaccagtagttccacgaagagaaccacctagtgcagaacgccatttgacccaaaaaagccttcccgcgagggtatacaggaaggaacaactaaaggtgccagaatatctccctttatgaacctgc

SEQ ID NO: 11686 - DNA, 247 bp, Oryza sativa
  Clone ID: uC-osflcyp106g09a1
actatataagagctatcacgtcgcgcgcacgcgcgcgtgcgcggggcccctctatgttcgggcgcccttttttttttttttttttgtttttttttttttttttttagaacggcgtgtagtaataatctttgcacagtatagcatcggaaaccatataacaactttgaacaaaactgcaaataactgatggatgaatgtaagggttaagaatgtaatataaatggcaccctatggtgaatcaatatcg

SEQ ID NO: 11687 - DNA, 94 bp, Oryza sativa
  Clone ID: uC-osflcyp106g12a1
aaaaaaagcatagaaggtttaattgatacttccacatgagcagataattcaaatgatagctctcatagtataaggttaaaaacccctcgtttga

SEQ ID NO: 11688 - DNA, 367 bp, Oryza sativa
  Clone ID: uC-osflcyp106h01a1
acattctaaaggctttgttattcaaaccagaaaacgaacaaatggaacactccattcttttacattctaaaggcttacattccaagggttttgctatttaaaccagaaaagaacaaatggaacattctaagggcgtaatactcaacaagaaggcaagattgatcactcaagaacaggccttggcctcaaacattggaagaaactacaaaggcgaatcgatgttcggtgccaggtacacccggcgagtttgacagccaacgagccgcagggcctcatgtgccggaacgccgcccgtcgtccgagagttccagcggtgcgccgttgagcaagaatcgttttgctctggaggtcgccgtccttggccgtc

SEQ ID NO: 11689 - DNA, 159 bp, Oryza sativa
  Clone ID: uC-osflcyp106h02a1
acgggaagatataatttaattacactagctagcagtggcacatttgaaaaaacaacgtgaaataaaagggaaaaaaagcaagcagaaagctagctcatcactttattccagaaacggtacagtgtttttgacttcgctcgctcacttcctcttggcgaa

SEQ ID NO: 11690 - DNA, 197 bp, Oryza sativa
  Clone ID: uC-osflcyp106h03a1
catggtaatatatcgaatcactcaagatttcaccagtgcgatagaaaaagataatcatgtccaccaaaacacatggtaacttaaagcatcatcatcacggctaagttcaaaatcttgaaagcaaccatagatctaaagacaaaacatagaactcagctagtacgcagagctaggcgagcgcatggcgtacgacggcg

SEQ ID NO: 11691 - DNA, 161 bp, Oryza sativa
  Clone ID: uC-osflcyp106h05a1
ggatatgagcgaaaacataaaacatttaatggaggtcattttggttccgtcacgtttccgttattttgcatttttacagggaacgatcagactcagttttggagttgagcgggggagattctcgaggggattcttttgggcgacttggattttcgtccttg

SEQ ID NO: 11692 - DNA, 74 bp, Oryza sativa
  Clone ID: uC-osflcyp106h07a1
attaaaattgttaagggggcggggtaaattgtattgaagagaaaaatatggggggtaataaaaaaacacaaagg

SEQ ID NO: 11693 - DNA, 340 bp, Oryza sativa
  Clone ID: uC-osflcyp106h08a1
aagatatcaagggaagttttgttataacggcagcgatacttcgctcccaataattccggagcatctatcacacacaaaattgataacatcgaatgagggaaagaggatgggagggcaatttcatagttcaggactggtcttggcttcaggaactaggaatctaggggtgtttttttaactttgccttccaacaacacctaatcagaaagatcagccatgcaagtaggcaaaccgatcactccggtcgctgtcctcggtcttggacttctttttcttcttcccttcaggggccgtcttaggctcagcgtcctccgagacttcaccggtcctcttcttcttt

SEQ ID NO: 11694 - DNA, 333 bp, Oryza sativa
  Clone ID: uC-osflcyp106h09a1
gttgaatgcaaataatcattaatggagggttgtctcttcagctatacttgcttcattgcttggctgtcttgtactaagcactagcacacaagagcaccagcccctttgacaaattactactatttctttcaggtacaccgacaaaacctgattattgtccgacacttgggatcccaattctttctagattggccaaaccgggccttgttgttaacttacccaaaccaataatgttaatattcagaagtccagatgcacaaagaataaataataataccgtcaaacattaagcccacagagaggatcattcacccccaaggatgataaaacaag

SEQ ID NO: 11695 - DNA, 91 bp, Oryza sativa
  Clone ID: uC-osflcyp106h10a1
ataattaaatcacaacaccatatttcattgaacagggtcaaaacctgcacagaaatacacactaccgggacagaactcaccttttttccaa

SEQ ID NO: 11696 - DNA, 377 bp, Oryza sativa
  unsure (1)..(377): unsure at all n locations
  Clone ID: uC-osflcyp106h11a1
gtccaaacagctgtcaatctcgttgtgtaactgatggttttctgacaacaaaatatactttccaccgacacaaaaatgatgaacaatcaatgtgcaactaagaacaaagaatttgaatttagcctgtgtatgcccttattgacaggacaaaacaagggggtcaaaaaaattcaacaatagaaaagaattaancctgcatcgatgaggcgcaaggntaccaatttgaataaaggtgccacangcccaccaccgatcgatcgttctgtcccgtactctagaaggtgagagtgatgctccctttacctgaagcctcactaacactcatcatcattgtctactgcattatccttcagcttaagactaatttctctaactgt

SEQ ID NO: 11697 - DNA, 93 bp, Oryza sativa
  Clone ID: uC-osflcyp106h12a1
gagaacacacaggctacaggagtataatataactatatatggcctgacggccatcctacgtacacgtgctgcttgaattttgagttcaaataa

SEQ ID NO: 11698 - DNA, 246 bp, Oryza sativa
  Clone ID: uC-osflcyp107a04b1
cgctacgccacgccacgcttctcctcctccagatccggttcgcctcgccggcgatggccgaagatccggcggggtcccgccgctggcggtgcgacgccggcgacgagcacggctgttggctcttcttctccgccggcggcggtggttacttccattttctatcgtcttcccctacccctttcttgcttgttatctttaatccgtatcggcttcgcacaagtgctcttgtttatttgttttcttctc

SEQ ID NO: 11699 - DNA, 386 bp, Oryza sativa
  Clone ID: uC-osflcyp107a09b1
gagatggcacaactacttctgttgtgcttgctcaggggctgattgctgagggtgttaaggtcgttgcagctggtgccaatcctgtgcaaattacacgtggtatcgagaaaactgcgaaagcactagttgaagagctaaagaaattgtcaaaggaggttgaagacagtgagcttgcggatgttgctgcagtcagtgctggcaacaattatgaaatcggtaatatgatagcagaggctatgagcaaggttggcaggaagggtgtggttacccttgaagaagggagaagttctgagaataatctctatgttgcggagggaatgccagttgaacgtggttatatctccccgtattttgcaactgacagctagaaaatgttcttgctgaat

SEQ ID NO: 11700 - DNA, 325 bp, Oryza sativa
  Clone ID: uC-osflcyp107b03b1
gatggacgtgaaccctcatgagttcgtcaaggcctactccgcccacctaaagcgctgcggcacgatggagctccctgagtgggttgacatcgtgaagactgcgaggttcaaggagctccctgcctatgatccggactggtactacacgagggctgcctcgattgcaaggaagatctacctgaggcacggtattggtgtaggtggctcccataaacattacttgtgggcgttctacgtactcctcaagccttccctgctctgctcttgacacttgcgcactttcctttttgatgagctacgagagcccaatgcacgccctgcaaat

SEQ ID NO: 11701 - DNA, 239 bp, Oryza sativa
  Clone ID: uC-osflcyp107b11b1
tcggacgcgtgggcggacgcgtgggttttacttccaaggagttccaactgaggattacaatacccctggagaatcgtcggaataccgagctcccacaccggctgttggaacaccaaaaccgagaaatgatgtaggcgatgatgatgagcctccgtttaatgaagatgacgatgatgatgacgagttagatgaccttgagcaaggggaggatgaattcaacacactcccttcatgttctc

SEQ ID NO: 11702 - DNA, 263 bp, Oryza sativa
  Clone ID: uC-osflcyp107c01b1
gtctttggcatgatgtgcccgtacatgatcgtgtgttccgtttttattggcaccatcatctcgtgcggtgtaatttggccgtacatcgagtcaaaggagggcatctggtacccaagcaaccttgggcccaacagccttaacgggattagaggattcaaggtgtttatcggcttgttcatgataatggctgactgcctcttcgtctttcctctgcatcatggtgcggacaacatgtggcatgatctaacggcgtctgtaggcaa

SEQ ID NO: 11703 - DNA, 383 bp, Oryza sativa
  Clone ID: uC-osflcyp107c04b1
ggcaggacatgtacaatttcttgcttgactccggcatggacccggtgttggcagacttatcggtgaggagtgctcttatcgtctatttgggatgggaagagcagcgctgaggatttggagaaggttgataccgacctcagggccagcatttggaagcaaatggttgacgctgggatcatgtacatttctagcaacaccttctagtactatgatcaggttcttgacacggctgccatgcttggtgctgttccagagcgctacttatggactggtggagagattgggttcagcatctacttctcgatggttaggggcaaagccactgtcctctgcatggagatgaccaaaggggcttggcaccaacctaccactttattgttcct

SEQ ID NO: 11704 - DNA, 213 bp, Oryza sativa
  Clone ID: uC-osflcyp107c07b1
aaaaaaaaaaaaaaaaaaaaaaaaaaagagaattttataataatagtcaccatgatttcgtgcggtgtaattgggccgtacttctagtggtactcggtttttttggccccctttttcgtctctcattttatatagcctttaactgtctttttatgttttatggtgtccatctgtcttcaccatggtcttggctgactgtctcactggtttcct

SEQ ID NO: 11705 - DNA, 561 bp, Oryza sativa
  Clone ID: uC-osflcyp107d02b1
cctattctcaacctctcccaaaattagccccgatccgatcgcttcctagccctgattcgaggtaaaaatggggaggagaagatgaggtagattctttttatctcgttctcctctcattattttcctctccttctcttccttcttcttctcttctcttctttttttttctttctattcctttttctttccatcttcttttccttctcacatcctctttcttttcctttttcttcttttttcctcttcttttttttttttttctcattctttacctttctatccttctttctttcctccttctacccacttcttttttccttctcttctccttctctttattttctctaccccctccttttctttcctcttctttctttacattcttttcacttttcatatcttcttattttttcactctcttctcaaattctcacttctttactttctctctctttcttccttctttctatctttcttcttcatcctaccctcacctctatttcttctatctttctttcctcttttctttcctcttcttttctcctctatctttactctctt

SEQ ID NO: 11706 - DNA, 261 bp, Oryza sativa
  Clone ID: uC-osflcyp107d08b1
gtctgcgacaacgagagggagagcgagagctaagttcgccggagaagatggcgatgcggcggtggagagaggatgcggtggcgctgtcgctgcgcgggtgcggattcggcgacggggacgacgaccggtcggagaagccgcggcggtacggggtgacggagatgaggagccccttctacgccttccgccccgcccaccacgcgctccaggaaatattggattctctaggtcctttcgttgatggtttgccgtttactgttg

SEQ ID NO: 11707 - DNA, 494 bp, Oryza sativa
  unsure (1)..(494): unsure at all n locations
  Clone ID: uC-osflcyp107d09b1
ggcattggcatgatgtgcccgtacatgatcgtgttctccgttttcattggcaccatcatctcgtgcggtgtaatttggccgtacatcgagtcaaaggagggcatctggtacccaagcaaccttgggcccaacagccttaacggcatcagaggttacaaggtgttcatcggcttgtccatgataatggctgactgcctcttcgtcttcctctgcatcatggtccggacaacatgtgccatgatcaagcggcgtcggcaggcaatgcaaggtggtggcggtaatgcgcagccattccagggtatcgacatcgccgatcagccggtgaagagcttcgatgatcgccgcagggcgcaggtgttcctccgggacgagataccggactcggtcaccattggctgctatgttcttctgtcgaacatcttcatcgncgccatccctcacctctacccacagatgagggacagccatgttgcgcttatctaccttgcgggccc

SEQ ID NO: 11708 - DNA, 339 bp, Oryza sativa
  Clone ID: uC-osflcyp107d10b1
tttttacacttcgaacagaaggtaagacggtgtctgtcggcacggttctccccctctcttttctcttctcttcttctctttttctcctcctttcccctttttcctctctctcctctccttttttcccttctctcctccttctttcttctctctccttcttcctctcctctccccttccccttcttccttctttcttctctctcttttcctctcccctttttcttctctcctctttttctctctctccttctctttttcctctttttcctctcctccccttctttccctctcttcctctcctcttccccttcctattctctccttttcttcccacttccc

SEQ ID NO: 11709 - DNA, 105 bp, Oryza sativa
  Clone ID: uC-osflcyp107e04b1
cacgctgcgagatctcgcagcaatggcggcgccgcgccaccaccacctcgccctcgccgtcgccctcgcccttctcgaagtaaccgtcgcggcggtagaagaggg

SEQ ID NO: 11710 - DNA, 134 bp, Oryza sativa
  Clone ID: uC-osflcyp107e07b1
tattaaaaaaaaaaaaaaaaaaaaaaaaaaggggggacaaatatagaggaaacacaagctaacatacacatacatgggaggtcttttttgtggtttcgggctatccttacttttgtttgctgccttttggtttt

SEQ ID NO: 11711 - DNA, 116 bp, Oryza sativa
  Clone ID: uC-osflcyp107e12b1
ggtcatacttcaagatcctatatcgatattattggtcgtgggtttttctttttatcataagaaattgtatctaccatgcatgtttatatatttatgtgttggtggagacgctcctt

SEQ ID NO: 11712 - DNA, 90 bp, Oryza sativa
  Clone ID: uC-osflcyp107f05b1
ttctagatcgcgagcgccgcccttttttttttgtgtgggtttttgggaacaaaaagagtagattgaaacatcagaaagaaatcagcgagt

SEQ ID NO: 11713 - DNA, 248 bp, Oryza sativa
  Clone ID: uC-osflcyp107f07b1
tcagatacggaactactcccctatccaacacctccgagtccgagcaactcaagatggcgtcgtggtcatcttcggtaagaccctgaccgttgaaagcatatttttggtggctgagttttttctccgtccgattcgcttacgacagaccctactcctatcacctatggtccgcatccctacactgaccatctagcctcggtcccatccattccggtacattaactattcctcctcctccagatggttgt

SEQ ID NO: 11714 - DNA, 153 bp, Oryza sativa
  Clone ID: uC-osflcyp107f08b1
gaattttcaattccatgcaatgtatctgaagaagcaagggttaccctgaaagaaagagcagccattttgcagaaattgagggatagcatgggtgaagctcatagaagaatgaaacattatgccgatttgaataggactgaaagagtgttggag

SEQ ID NO: 11715 - DNA, 318 bp, Oryza sativa
  Clone ID: uC-osflcyp107f09b1
tctctattttttttttctctctctttcttctccatctctcctccttccttcctaacctctccccacctacctccctgccgcctgatcctgatttccccaattgaggccagcgtcgagcacctgcacacacgcacacgctcgctgctgcgcctcgattctcgacccagatccgccactcccttccccaattcgccgtcacctgcagctgagtgttgtttgctcgagctagctggtggttcttgccttgcagggcgaggcagtggtagcttgcgagctttagctgcgggagcggttggctttggctttggtttggtaaat

SEQ ID NO: 11716 - DNA, 241 bp, Oryza sativa
  Clone ID: uC-osflcyp107f10b1
tttcttaagaaggtacttggtgctacccttggggcacaaagtacatccaaaatccaagcacaacaactatccgagatatcagtggaggctgtgtcagtagctgaatatgtttcttctacaaagcgtttgtccgatattgaggagaaggtcattgcgatttttaccaagcctgcagaaatgccagctgataaagaggagatgcttatgactgccgttagccgtgatagtgcattgtaggagg

SEQ ID NO: 11717 - DNA, 190 bp, Oryza sativa
  Clone ID: uC-osflcyp107f11b1
tcatcatattttacattggtcaaaggagtggagggcatcactggggtaatcatggttgtatgcatgataattgcttttactctagcaacccggtggttccgccgtagcttggttaagcttcctaggccatttgacaaactgactggcttcaatgccttttggtattctcactcatctgttcatcattgtg

SEQ ID NO: 11718 - DNA, 163 bp, Oryza sativa
  Clone ID: uC-osflcyp107g04b1
gtttctttggtcaaaagctaccacatttatcaagaagaggccacctgatattcctgtagcacagatacctgaagatgtcgccgtgaacgtgtcacgagcattacgcagtgacatatacagagcacttcatctgtttcgggagatcgtgttggtgctctgactt

SEQ ID NO: 11719 - DNA, 180 bp, Oryza sativa
  Clone ID: uC-osflcyp107g05b1
gagtgttgaagatgctgctgaccaccccgttcgtgtcgtcccctgtgagggtccagggcaatgggggcagcggcgcctcgccgtgggcgggcgcggcgacggcgctgaggatccaggcggcgaagcagctgacggggcgtgtggtgacgacgaaggcggacaagacggtgggggtggtgg

SEQ ID NO: 11720 - DNA, 378 bp, Oryza sativa
  Clone ID: uC-osflcyp107h04b1
agttcatgaaatattgacttgggaagcaaaatcagaagtgaaaactgaagttcttcatgatctcaaggaaattgggagtgctttgtattggatgagccttctggatattgttttgagacaaatagacactacacagttcatgcagtctgctccatggttgggattgattccaggaaatgatgggcaagtgaagcatgcatactctgataatactccatttaccactttgttaagtgctgccaccaatgcagttgcatcaagtcctgcatgcccaaatccatcttcatttcttgtcatggcaaagcaagctgaagctgtcagtctactctacaaatcaaacctaaactctgggagtgtgcttgtgtatgctcttgcttt

SEQ ID NO: 11721 - DNA, 228 bp, Oryza sativa
  Clone ID: uC-osflcyp107h09b1
gtagattgcatccctaccttttcagcccctagtatctgtttcccgtgattaccttgcacgttcgctattctggtgcatgctcttgggtcactacatccgagggcttgaggacaggttagaatcggcgcagcttctgaggatatttaccgatgtagagtctttccccaggggtgatgagcttatgatttgagaaagtttttgaccggtcgatcgatcgtgctaaccaat

SEQ ID NO: 11722 - DNA, 222 bp, Oryza sativa
  Clone ID: uC-osflcyp107h10b1
gtttccgctgccgaatttttttttaattcggggggagagatttgaagaggcggcaccatgttggtctaccaggatctgcttaccggtgacgagctcctgtcggattcgttcccctacagagagatcgagaacggcatcctctgggaagcccatggcaagtgggtcgttcaaggagctattgatgtggacattggtgccaacccatctgctgagggtggtggt

SEQ ID NO: 11723 - DNA, 406 bp, Oryza sativa
  Clone ID: uC-osflcyp108a03b1
gctgtctgtctctctctctctctctgactatctggggctgtgaaaactctgagcatgtgaagaactcatacgttacctgtgatctgagaagcttgagctgaagctgtgacagcgtctcactgatcgatgatcactcaacttggctgctactgcgcattcactgcgtggttagctagctaactgagcacaagagctttagcaatggcgacgcctgggcagcagctgccgccggggttcaggttccacccgacggacgaggagctggtggtgcagtacctccggcggagggcgctgtgccggccgctccccgccgacgtgatcgaggacgtccactacgccggcgtgcttgacccctgggacctccccggcgcccgcgatggcgaggcctacttgttcagtttccggc

SEQ ID NO: 11724 - DNA, 421 bp, Oryza sativa
  Clone ID: uC-osflcyp108a06b1
attttctgaaagtgtttgttgcgcagccttatagggaaaaccttggtttatatgcagaaagacttggagcaataaatgttgtctgctcaacacctgaagtcgcaaacagggtgaagagccagctgaaaccattggcacgatccatgtattcgaatccgcctattcatggtgctaggatagctgccaacgttgttggggatccaaccatgtctggcgaatggacacaggagatggaagatacggcaggggcctatcaagaatgtaagacagaagctttatgatagcttggctgcaaaggcccacagtggcacggaccggtctctcactctgaggcagataggcatgttctcctacacgggcttgaacaaaactcaaagtgataatatgaccgacaaatggcacatatacatgacaaaagatg

SEQ ID NO: 11725 - DNA, 463 bp, Oryza sativa
  Clone ID: uC-osflcyp108a07b1
ctttccgcaactatcgacggcggcgaagtacgggacgatgatgatggtggaggtgcggtctcacccatatattggtatgatagcggaacaactcattgctgagtttgaggtatcatctgacgaacatgcatattggaattggcaatcaaagccagccattatcaaacttatgaagctatctctgcccatagaggttctctccaagaagaatcttgaacatgaataccttgaccatggagttctcactcttctaaaaaactggtttgagccattacctgatggaagcatgccaaacatgaatactcgatctgctgcacgtgaaatcattagctgattttccaattgacttggaacaatatgaccgaagagagctccttaagaaaagtggcctgggaaaggtcattttttttttgtccacatctgatgaggagaccactgcctaataggaaattggcttaagagc

SEQ ID NO: 11726 - DNA, 266 bp, Oryza sativa
  Clone ID: uC-osflcyp108a08b1
gggtctttgtgcacctcactccgcctggtccggggcccaaagggcacgctaccctgcgtccgaccaacccaccaccagggtcacccatggtggaccagcgactcgccggcctgcacgccgccgcgccgaatggacttcagctgcacgtcctccgcctggcatggccgacccgcggagcgatccatcaccaccgctctcctccggggggccctcctgggggactacgacaccctgcgcgccggacgttctctgctaccgccccagga

SEQ ID NO: 11727 - DNA, 453 bp, Oryza sativa
  Clone ID: uC-osflcyp108a09b1
gttttgttgtgtagcagtagtccaccgttgagagggtagcaaagccagccatccatggagcgcagtactctcgggagagctagaagcgatctattctagccacaaggaggagagataaacgtatcgaaatggagcacatcgcgaggttcttctttggagtgtccggcaatgtgatcgctctcttcctgctcctttcgccagttgtcaccttctggaggatcatcatgaagagatcaacggaggacttctccggcgtgccttacaacatgacacttctgaactgcctgctatctgcttggtacgggctgacgatcgtgtcaccgaacaacatgctggtgacgacgatcaacgggacggggtcggtgatcgaagccatctacgtggcgatcttcctcatcttcgcggagaggaaggccaggctgaagatgatgggcctcctgggcctagtcacct

SEQ ID NO: 11728 - DNA, 338 bp, Oryza sativa
  Clone ID: uC-osflcyp108a12b1
aattggcagaaataatcaagcaaatcgcaggaggtggtgctctatctgggcaatgcgggtagaccgtagctcggcggccatgtcgaacacgagggggtgcttgcgacatgaccgtcggcggagctccggcggggcggatcgtgatggagctgtacgcgaaggacgtgccgcggacggcggagaacttccgcgcgctctgcaccggcgagaagggcgtgggcaagagcggcaagccgctgcactacaaggggagcaccttccaccgcgtgatcccggagttcatgtgccagggcggctactttcacccgcggtaacggcacgggaggggaggtcgatct

SEQ ID NO: 11729 - DNA, 124 bp, Oryza sativa
  Clone ID: uC-osflcyp108b02b1
ggcttgggtggatcggtacgatctaagcagtaaggggctgagtgcacttggtgacagggaaccagagtttgagtgcaggactgtaaaaaacactgaaacgtgcgacgtgcatggatttaagagt

SEQ ID NO: 11730 - DNA, 112 bp, Oryza sativa
  Clone ID: uC-osflcyp108b03b1
gtctcggggtgctggctaccatcggaacaatctggggctgctgattagtgaagctcggaaaccctagcgcggtgcatagtgtataacacaatggggggccgtagacatgacc

SEQ ID NO: 11731 - DNA, 193 bp, Oryza sativa
  Clone ID: uC-osflcyp108b07b1
cgtcctccccggcgtaggcgacggcaacgacctggaccccggcggacagtactccgacccgctcggcctcgccgacaaccccgtgaccttcgccgagctcaaggccaaggagatcaagaatggccgtccctccatgttctccatgttcggctcatccgttcagaccatagccaccggcatgggacccttggtg

SEQ ID NO: 11732 - DNA, 301 bp, Oryza sativa
  Clone ID: uC-osflcyp108b08b1
gctccaccttcacctcctcgccccttgctgccggacgacgaggtcctcccccctcgccctccgccgacgtcgagccagcagaagatggctgacgccgaggatattccagcccctcgtctgcgatagatggaactggtatggccaaggctggcttcgccggagatgatgcgcccagagctgtcttccccagcattgttggccgccctcgccacactggtgtcatggtcggaatgggccagaaggacgcctacgttggcgacgaggcgcactccaagaggggtatcttgaccctcaagtaccc

SEQ ID NO: 11733 - DNA, 276 bp, Oryza sativa
  Clone ID: uC-osflcyp108b09b1
ggtgacagatcaaaacaaagtcttgtgtccaccatggtcctggtgtgttgaaacagcaaaagctgcttttgaagctaacaacagcaagctgggtctttttgctttggaatatcttgcaagatggattgctcgttctgagcgtgttattcctcctcttcatctttcagtagatgaaggtttagtactttcagctctaagcgttgtaggtagaacttgtagaactgatctcctgaatgctgcttgaataatattacgtatgtccttgctccataaatg

SEQ ID NO: 11734 - DNA, 534 bp, Oryza sativa
  Clone ID: uC-osflcyp108b10b1
gttttccgtcgtgagggtgtcggctcgcgcggaggacgtcggcgaggaggtggaacggatcagggcgtgtatggtcggggacatcgacgtgagcctggactgcgccgggttcagcaagacggtggcgactgcgctggaggccacacgcggcggcgggaaggtgtgcctcgccggtatggggcacaccgagatgacggcgccgctgacctctgcggcgatcagggaggtggacgtggcggggatattccggtacaaggacacgtggccgctctgcatcgagctgctccgcagcggacagatcgacgtgacgccgttcatcacccaccgatttgggttttcgcaggaggacgtggaggaggcgtttgaggtcagcgcccgtggtcgcgacgccatcaaggtcatgttcaacctgtagatcgatccatccatcgatcgatcgacagcagaatatgtgacgggtttggaacgtatgtcgatcgtacaacacaatgtgagcttgctctgctggttgccgtgtctgcctgtccttacatg

SEQ ID NO: 11735 - DNA, 254 bp, Oryza sativa
  Clone ID: uC-osflcyp108b11b1
tctaaccgccggcggatcgccctcgttagaacgaggggccgtgtaggcgctgagcgagacgaccagcttccttggctcggacgcttggcgggatgagattgggcgccgagtcggctagtccgggggccgcttcaccctgcgccgtaccggcacgagggcgccccagagcatctgggatggaccacgaccgtctcagtgccttgtgtctgtttctggagcagacgccatctctccctgactggagagattccggt

SEQ ID NO: 11736 - DNA, 373 bp, Oryza sativa
  Clone ID: uC-osflcyp108c06b1
atctagtctaacggcacaataacccaaccacctggactctatgtaaccaaaggcggggttcccgacaatatctcgtatctcgtagtctacagcgaagaactcagccagtacacccaataaggggctcaactccaggtataccatgaacgccactgctgaaagcactcatgacattgagtctggagatgttttatttttaacaagatgcttaatgctgaatacagaatacccatgtcagattattttgaaggcccagatcttaatattattcattggactattgagcttggttgtctctggaggaccaggttgcatggatggtctactgtggttgaattgatagaacccatgtttatatttttcttgttggtcc

SEQ ID NO: 11737 - DNA, 56 bp, Oryza sativa
  Clone ID: uC-osflcyp108c07b1
actatgtccaacgtcacacaaacccaatcaccaggactcttagtaaaccatggccg

SEQ ID NO: 11738 - DNA, 488 bp, Oryza sativa
  Clone ID: uC-osflcyp108c08b1
tctaggttctcctgcgcacccaaaaatatcaaagaactcataagcggagagaggcgaataacaggggggacgccatgtacgtggaggaggaggtggggatgtctccagtggattttctatggggctgttctccacatataggatgaggcccccagctgacgtctggctgtatgttaagacagtagcgtcttgatctatgttgttagcttctattttcaggattggctcctctattcatttaactttttccttatagactctcttctccttcttttccgcttgacttattcttttaattttttcttgttttgttcttcctctttaatatcctttttttgcatttgttttttattctttatctctttacttttttgatattttattcatttttttatctgtatattttttcatccttttatattatctttacctttacctttaattttatttttttatttttccttactctttatcttctttttcctttt

SEQ ID NO: 11739 - DNA, 118 bp, Oryza sativa
  Clone ID: uC-osflcyp108d07b1
atcatgcccaacgtcacactaacccaattaccaggactcatagaaaacaatggccgaatgcccgagaacatctagtatatcgtggtctacagcctttatctcaaattataaaatatat

SEQ ID NO: 11740 - DNA, 416 bp, Oryza sativa
  Clone ID: uC-osflcyp108d10b1
gccttatcacggccgggcgacgagagcaacagccaccgatcgtcggagtccgtacatggatcgggacggttagcgcgcccggccggccacgcctcataggaagcttaatgctctctttccagttgcaggatcgaacacaccgatcaagtgcggcgagcacgtagcctctccgagtgatggcacgcgctcccgtgctcgccggcgtggatctactactggccgtgctgctagcgatggcctgcgccgagcacgctgtgacatgccagacatcttccccggacggctctcacgagtggaacgagggcgagtcatctgagtctgaacagtgcgccagtggtgcggaggggccgcagatgctgtctgaagcctccgaggagcttggcttgggggccgggccgctcaagacgatgggcatg

SEQ ID NO: 11741 - DNA, 101 bp, Oryza sativa
  Clone ID: uC-osflcyp108e03b1
cacgcgtccgatctcttcgaacggcacactaatccaaccaccatgactcattgtaaccaaaagccgagtgccctacaacaactcgtatatcgtgttctaca

SEQ ID NO: 11742 - DNA, 72 bp, Oryza sativa
  Clone ID: uC-osflcyp108e04b1
tctttatgctgcgattgaaggtcttctttagggggttctttttatcagtgtgaggcggatcaaacaacaagg

SEQ ID NO: 11743 - DNA, 127 bp, Oryza sativa
  Clone ID: uC-osflcyp108e05b1
atctcgtccaacggcacactaacccaatcaccaggacccattgtaaacaaaggccgggttcccgacaatatctcgcatctcgtagtctacaacgaagacctccgccaatagccccaataagggcact

SEQ ID NO: 11744 - DNA, 120 bp, Oryza sativa
  Clone ID: uC-osflcyp108e07b1
attatgtccaacgtcacactaacccaaccaccatgactaattgaaaacaatggccgaatacccgacaacatctcgtatatcgtaaactacaacgacgacctcaacctgtagaacatataa

SEQ ID NO: 11745 - DNA, 313 bp, Oryza sativa
  Clone ID: uC-osflcyp108e11b1
cgaatttccgggttgagaccaagccgtcgcgatttctcaaaaggagaggaaaccgagggcgaggaagcccctatcggcggggccacaccacccgccctacttcgagatgatcaaggaggcgatcatggcgctggacgggaacggcatggcgggatcgagcccgtacgcgatcgccaagtacatgggggagcagcacatgggggttctcccggcgaactaccggaaggtgctcgccgtgcagttgcggaacttcgccgccaagggccggctcgtgaaggtgaaggccctgttcaagctgtcggctgtcgaggag

SEQ ID NO: 11746 - DNA, 103 bp, Oryza sativa
  Clone ID: uC-osflcyp108f01b1
actatgtccaacggcacactaacccaattacctggactaatagaaatcaaaggccgaatacccgacaacatctcgtatatcgtggtctacaaccaatacgtca

SEQ ID NO: 11747 - DNA, 127 bp, Oryza sativa
  Clone ID: uC-osflcyp108f07b1
ctcatgtagagcacaataataacttaaagaccaagggacaattgaacactatgtacgggtacctatacgctctggagaatatacaaatgtatactgtttcttttataaaattattaatttaatgaaa

SEQ ID NO: 11748 - DNA, 122 bp, Oryza sativa
  Clone ID: uC-osflcyp108f08b1
atctcttcgaacgtcatactaatccaattaccaggggtcatttgaacccttggaggggtacccgacaacatctagaaacccgtggtctactccgaatacttcatccagtagacctaataagg

SEQ ID NO: 11749 - DNA, 477 bp, Oryza sativa
  Clone ID: uC-osflcyp108f11b1
gatgttctatgccatccatggattcgtgatcacggagttgctccagatcggcctgttgatccagctgtcctatctcgcatcaagcagttctctgcaatgaataagttgaagaagatggctttgcgggtaatagctgagagtctctcagaggaggaaatcgctgggttgaaggaaatgtttcagactatggatgctgataacagtggcgcgatcacatatgatgagcttaaagaaggcttgagaaaatatggctcaacacttaaggacaccgagattcgcgatcttatggttgccgcagatatagactacatcggatcatctgattatacctgatccattgctgccacattgtctcttcaattcactggttccggaggaacatcttgtggcacttcttcttaccattggtcacctattgaggtcctccctttattatttgagaactgttttctgcttgaattagttcccctctccctc

SEQ ID NO: 11750 - DNA, 257 bp, Oryza sativa
  Clone ID: uC-osflcyp108f12b1
tcggtctcgatcgtgggcacgaaaggctattccccgggggtctttgtaacagtgtgacggttatccaacaacatatcgatgaaaatgatgaaattggttaccattaaggactactttttgctttggcgttgactcgttttgataggacacacctgtgtccagaagaggattaagaaaccaccttaccgtcaccacatgggaggatgtcctcaacaccaagggacgattccgctgatgctattactacctacatattt

SEQ ID NO: 11751 - DNA, 399 bp, Oryza sativa
  Clone ID: uC-osflcyp108g05b1
gcgtggcgccgccgccgactccgcctccgactcgggctccggcgatccccatgcaggacgcgaggcgccgtctccgactccggcgacccccatccatcacgcgaccgccgcttcgtcggcatgctcccaccgcatccatcctgaagaagatcatcgtcaaaacatgtcgctcatttcgaagctgcggtcgatcactgtggatgtcaccggcactctgcttgcctacacagggcagcttggtgacttactactgtatggcagcctaaggctgctgggaagccatgtcctgactaccagcgaatgcattgagggcttcaagcttgcacaccccgacatggctaggcaatacccatgctttggatttgcagcgaatatgcctgacttcgactggaggaggat

SEQ ID NO: 11752 - DNA, 384 bp, Oryza sativa
  Clone ID: uC-osflcyp108g06b1
acctcttcatgcgagtcagggtgaaactgcacggggatccttgtaaacatgggaggggagcagggcttttttcccacgattcagtccagatggaaagtatcttgtgtttatctcagcaaagagtgctatagatagtggaacacacaatgcgacaaattcaatgcataagattgactggcctgcagatgggaaattggagggcctcagtgttgctgatgtggcacctattgtgatgtgccctcaggatggttgttttcctggtctgtactgctctgtcatacttaggaatccatggcttactgatggacaaactatgattttattttctatttgggggagtaaggaagtaatactttctgtaaatgttgggagccgtgaagtttc

SEQ ID NO: 11753 - DNA, 90 bp, Oryza sativa
  Clone ID: uC-osflcyp108g07b1
gaagtaggagagaaacatctagagtgaataagaaagacggtgtttcgcccgcgccccggccctgcccccaatcctacacggtgcactccc

SEQ ID NO: 11754 - DNA, 500 bp, Oryza sativa
  Clone ID: uC-osflcyp108g12b1
attacttaatgtcagtaagggtgaaactgcaccggcaaccaagttaacatcagaggtgagcagtgcttttttcccacgattcagtccagatggaaagtatcttgtgtttatctcagcaaagagtgctatagatagtggaacacacaatgcgacaaattcaatgcataagattgactggcctgcagatgggaaattggagggcctcagcgttgctgatgtggtacctattgtgatgtgccctcaggatggttgttttcctggtctgtactgctctgtcatacttaggaatccatggcttactgatggacaaactatgattttatcttctatttggggaagtaaggaagtaatactttctgtaaatgttgcgagccgtgaagtttcaagagttagtcctcaggattcggattattcatggaatgttcttgccctagacaaggataatatttttgcagttttaagcagccttattacaagttctaaatatactatgggtctga

SEQ ID NO: 11755 - DNA, 350 bp, Oryza sativa
  Clone ID: uC-osflcyp108h03b1
gtttgaagcaattcttgagctcaatcagcaacaggatctatctccttcttgcttagttaagtccttcgccctcccaagaagaagaagatgtcttgctgcggcggcaactgcggctgcggcagcggctgccagtgcggcggcggctgcggcggctgcacgatgttccctgatgtggaggccacagccaccaccaagaccttcgtcctcgctgctccatccaacaaggcgagctctggaggaatgcagatggcggtggagagctgctagaacggctgttgctgatgcaacacctgcaagtgtggcaccagctgcagcggttgctcctgctgttcctgcaactgaacttatcg

SEQ ID NO: 11756 - DNA, 148 bp, Oryza sativa
  Clone ID: uC-osflcyp108h04b1
ggataggagggcgcacgcaccacaccaccaccacgggtaacatgcaccgcaatcttctgtctccctttttcttcttctttctttctttctttcttccccttatccccaagaaccgcgtctctcaagaggtggggagaggaggaggagg

SEQ ID NO: 11757 - DNA, 347 bp, Oryza sativa
  Clone ID: uC-osflcyp108h08b1
gtcggattccggttggaccaaagggtccggtttaatctcccccccccttcccaaccacataatggtatcatgcgcaccgcctccagcgtgacacgccgcgtgagcgcgggagcacctctcctgacgagccttcccttttcctcctcgccttcgcgtcagcccggcatggggttcccggactgctggtacatccgagctgctgctccccaagcagctgctccacctcctcctgctgctcggatacatccgccgattcctcctctgggcgttccacgccgtcggcctcggggacctgctggatctcggggacgagcagcaggaggtgctgcaggaacacgcgcgcgagc

SEQ ID NO: 11758 - DNA, 379 bp, Oryza sativa
  Clone ID: uC-osflcyp109a01a1
aaacccaaatccaacatcacctccatatccatatagaatctaaatttggtcgcatttcctacgtagataagatcactaggttgaacacagcatgataaaagaccatcctacttggggcatctatacaattgttgtttttgggtacgcgactcatgataaaggcagagcattttcacattcactgatgaaaacgtatttgaacaccatgtgacgcgatgcgaggaactcagtcggctgccctgaagagggtcatgagggagaggaagaggttgatgacttctaggtagagggagacggtggcccaaacctactggtcgtaggtgtagcgcttgatgatgttgacccggtcgtaaacgatgtaaccactgaagatgagcga

SEQ ID NO: 11759 - DNA, 195 bp, Oryza sativa
  Clone ID: uC-osflcyp109a03a1
tgggtaagccgatcctaagggacggacaaaccaaaaatgagagcgcgaccacgcgcgtgcacggacggggaacactcttaagaacctcagagccggcccggggctgctgcccgaaacattaggaagtcaccagactgcggcggacgcctcgggaagagtcctggtttctgcttaacagtccgacaaccctggaaa

SEQ ID NO: 11760 - DNA, 392 bp, Oryza sativa
  Clone ID: uC-osflcyp109a04a1
ctagtgggcggcctgtccttttttttttacgatttgttggacaaaattgctttgaaacgacttggatctatcgaatacacattctgtcctaactgacagtacagttacaggaaattttgaaccccattttcatgtttggacaaaactcctataagtttccacattgaacctctctttgggaaaaaaaaaattctatcaaaacatttcaggcattccatgatgccgaccgtcgcatggtcggtttcaccggccggtcttcctccatggagatcatcatcagcgtcgacgggtcctccagcatcatacgggctacgaggtagccagcgatggaccatgtctggaacttcctggcctgcttgccgatgaaccgtcccagcttgccatcgtagtac

SEQ ID NO: 11761 - DNA, 210 bp, Oryza sativa
  Clone ID: uC-osflcyp109a05a1
ttactttttgtttgacaaaattgctctgaaacgacttggatctgtgggaaacacaaatgctctaacggacaggactctttcagggaattttgcaccccgttttcatggttggacaaaccctcgtatcattatttcacattgcacactttctgggggaatattaggaattttttaaaaacatggaaagcaaaacatgaggccccttgcaga

SEQ ID NO: 11762 - DNA, 91 bp, Oryza sativa
  Clone ID: uC-osflcyp109a06a1
ccctcccccagggggttttttgtatttgggcggggggggaagaccaccccggccccttttattaaaaaaatgttcacaataataaaaaccc

SEQ ID NO: 11763 - DNA, 344 bp, Oryza sativa
  Clone ID: uC-osflcyp109a07a1
gaggagaagagattgtatcccaccatagatcgaatccgccattacaattagctgattaataagaagtcctaggataagaaacgcgagaacattctacactaaacacaggtgattaatagggcgattatgagagaagaagaggaagacaaagaagtgtgggtgacgaagacgtttttgtcggcgaacttgacctccatggggctgtcgttcttgacgatgctgcggaagttatggtcgccgtgctggctgacagaatgggcctattctgggaaactgcgggcataacaggggtggtgctgcaaatcctttgttgtgcatgaaagcctgaataggaaagctaaaat

SEQ ID NO: 11764 - DNA, 287 bp, Oryza sativa
  Clone ID: uC-osflcyp109a08a1
tttttgtttttttttttagagaaagagatgcagtgcctcgggggatcgctgacccgacattgaataactggagcgcagcgagccagatagtatacactacataggcatacagggaaagaacaagaagttcaataggggttgactaagagaagatgaagaacactaggacgtggacatggtacagaggacactgtcggagaacttgacgttgacggggcggaccgactcgaacaagctggggaagacctggacggcgccgtgggtggcggtatgaaccatgtacgggg

SEQ ID NO: 11765 - DNA, 435 bp, Oryza sativa
  Clone ID: uC-osflcyp109a09a1
catgagcaacgacctacggttcttcactctcagcttaactcatgcatccaagaaacagctttcttggaccaagagaataagatattcaaaaggaacttacaaagtcagatgtggaaactccttacagtacaaccccattgagaatgacctgttttcaacactgatggtattttagaattacattgaacaccatcgcttttaaaatatctagtgccataggtgcctaatgaaactgcctatattctagttatctactgtcatcattctgatgtttgcacactagttggttaaacgcttctcagaatatgagatgctataccaacccctctgacttaccatacgatgcacgatagatccaccagttgcccagaatcccaatgacgtgcagtacttgtatgcctgctgattcaactgttccaatggaaaagagcttgt

SEQ ID NO: 11766 - DNA, 375 bp, Oryza sativa
  Clone ID: uC-osflcyp109a11a1
cttcaaaggggaaaagaaaacaaaacgggcccccaaacaaacaaacaccacaaccccacccaaacaccaggaagaaaaaagaccccccaaggagggggagacaaacaaggggggacaaagggaccaccaaccaacaaaggggggaagaaaccccccaagggccgggggacccggccaagaacacgggggcacgggaaaacggcaagccagccggcggcaccaaaaaggggaaaaacggcgaggaagaagaggacgacctcaaccaagatggtgacggagaccccaaaaaaaccggggggaaaacaaaacccccgaacaaaaccagcccccccacaacaagaaaggccccgggacgaaccagaaaacccccgcaaa

SEQ ID NO: 11767 - DNA, 395 bp, Oryza sativa
  Clone ID: uC-osflcyp109a12a1
gggcagacaaagcaaaccacctagagcccttttattcaaaattttttcaagataataaagaacattgggcatagcatatactagtactatatgaaaaggcgggctggctgcttcacaaagtaacaaagggatcgctattggagttttgagtattttttaattttaagggggcttcccttataaggagctcctaattttcttaccctctgggccatctatttcctggacaggattgttttcccaggagagagcctccattttaccagttttttccgggttttcatcaacaaagcaatgcaaaacaaatcggggggacccgggggcgatttcagcagtagcagggaagctttgggaaatgagcaaacccccaaaagggagttcctgctaaccatgtt

SEQ ID NO: 11768 - DNA, 407 bp, Oryza sativa
  Clone ID: uC-osflcyp109b01a1
ggttggttgtttttgtgtttcacaggttttttcatttttccggccaaaaaaagaccaatgaccaggttggctggatgaagaagccctaaatcaatcccacgcctgtacaacaaaaacgcggccaaccaacagggggaaacccaccattcctggtggatgaccctcctgctgccgattggtgggcacttactagctttgaagagggggaggccgggatccatgttcattgcaccctgcccggaggtgcttgtcggcccttaggccctcgacggccatccttggactgggggaaaactccactgcctgatggaccaggggttttttggcggggggccccctgaaaagacaagagcaggggcgcaccaccattttgggcggcaaagaccccatggaaatgttggggaggg

SEQ ID NO: 11769 - DNA, 368 bp, Oryza sativa
  Clone ID: uC-osflcyp109b02a1
aaaggaaaatatcaacttttgcacacgggaagcccataatttttgcaagacacacaagtaatagaccaacagacagcacaggcggtttatttcagggaatacgcatgaaaaggaaccccttgacttccaaagaaaaagagggcatataaatgagcggaaaggggaggaagctaccaaacaaactaacaccccaggtgctcccggggaaaaaataacgccattaaagaagacggaatacagaggatccaagggccaggattgaaggcatgaaaaacaggggccccacagatggggggagcaaccactctgaactacttgacaaaagggggggggccaccataccgctaagggcacacggccccgcaaaa

SEQ ID NO: 11770 - DNA, 435 bp, Oryza sativa
  Clone ID: uC-osflcyp109b03a1
aaagaaaatccaaacacctccaagatttgcgttttgcgaacatagtaatagattcagtacacagagataacggttttgacaaagtatgagctagtagtattccgaatttccgataggccaaacaaggggacaaccagccaaaattttcactcagccaaaagccacaggctatataataatctgatctaacaaacaggcagaaggggggcaaagcttccttttttaggccttcctggctgcgatctgagacttaggctcttttttcactggtttttccttttttgacaggataagctcaatggggcacggggaggacatgtaagggttgatgcgtccatgagcacggtaggtacggcgcctctgcttttgggcctggttaacttgaatgtgggacacataaagaggattaacatccagaccttttacctcaggatt

SEQ ID NO: 11771 - DNA, 466 bp, Oryza sativa
  unsure (1)..(466): unsure at all n locations
  Clone ID: uC-osflcyp109b05a1
gtatactgtggagggcccgcccttttttttttattttaactcatatttattcacggattcaaatagaactcatgcaatatattttccactatcgtatcattcccgcaaccgtcgggtcaggcgggtgcggaaaatacccgcccgttttcacccctaaatacaagatcccaacgcttccccattcttgaatccgtgtacaggcagctgatctgatgcaacaggagtcatttagaagtcgtcgtcctggttgggcttgggggaggtgaggacggccgncaaccaaattcttctccccctccaagatgggtctaaaaaggatagttcggggtccccggtttagggccccctaggggggccctttttgggcttaccaaaccctcttccccccccggaaaaatatagatttcccgcagaaaacaaaaaaaaccccttgggggtgtttggttttaaccccaccccccccttt

SEQ ID NO: 11772 - DNA, 492 bp, Oryza sativa
  Clone ID: uC-osflcyp109b07a1
atactgcaatattaggaatatataaaggcatgactaccattatgccaccggtacaatgcgaactacggaaaagggtgaaagaaagaatgtcaagtaaagaaagaaagacggaaagaaagaacggcatgtaaaccgctgagagaagttttacagaggaacgtttggattggatgtgtgcatcaaacacgtgtataaagtttcacgcatagattttgactgtaacgagcctcaccactactctgttaagaagggtgaacctaattaaagcagcgaagatttgcacaggtaatgaacgcctgaaggaacatggacttgctgctctccaacttgcataaaagttttccaaggggtggagctttcttcccacttcgtttaaacatctaggcaaaacagctgatactagcatctcaaatgtacagttgtgattcaaaagaatgacagaatctcatctaattattgacactactgaaactgcttgttgattcataatac

SEQ ID NO: 11773 - DNA, 420 bp, Oryza sativa
  Clone ID: uC-osflcyp109b08a1
ggaaacaattcatgccatcattttttgggcaccggaagcccataatttttgcaagatacataactaattcaccactgtttgtccaggcggcataatttaggggatatgctgccatagcttcccctttctttcgaatgaaaatgatggcatatcaatgagcggcaagggggggagttttccaaacaaattctcaccccaggggctcccagataaattataaagtcattttagatgatgcaatacagatgattcaatggcctggtttgaagccattaattataggtgccccgttaatttctggggcagctcctttgttcttcttgacgtaggcagcgtattcaccatagggcatagggtacaaggtactttggtagcgggtgacacggagtttcttcctcaaagaggcggttatggtaccat

SEQ ID NO: 11774 - DNA, 400 bp, Oryza sativa
  Clone ID: uC-osflcyp109b09a1
aaaacggggcatgcaaccccccaaaaaaaaaccaggggggggggggggtttaaccttgggttatccattagggacggtggaccaaaagggggaaacttcttggggagagggcggcccaattttggggcatttttacagcataacaggataggaaggagtccctttaaactaccaccaacacattttttatccttaaagggcccaccccatttttttttaaggggaaaacaaaaggtttaatcctttgggggggctaactacagaggggctaggccggggccctgatttgagggatatgatggggggaaaacagccagttttgtttaagaagaccacatccccaaaatgggaacagggcctccaggggggggtcttcccttgccggccataaaaatgttgg

SEQ ID NO: 11775 - DNA, 423 bp, Oryza sativa
  Clone ID: uC-osflcyp109b10a1
acaaaacggtctcatccggggacaaaattcaaaagcccttgggtaaccggttacctccccaatttttatttaaaggggaaaggggggtattggtttttttggtacaaccaaatttttggggggggggattcccggccagggggccttgggctcaggggtctttggtctaggtggccttggaaccaaagacttttttcgcaaaagacgggaaacaaaatgatgctggggggatcccggaattggaaaacttaagggggcctttcgattttggggggaaccccttatcctcaagggtaaaaaaggggggggggaaataaaccgggggccccccggggggggaaaggctaaaacccataaccccccttggggttggtggcccctggtgtccaagactatatttactgggcccttaaaaaccggggg

SEQ ID NO: 11776 - DNA, 387 bp, Oryza sativa
  Clone ID: uC-osflcyp109b11a1
tttttttttttttttttttttttttttttttttttttttttttggtttttttttttttttttttgtgttttttttttttatttaaaaagaagggggccgacgtacacaattggaccgggggaaccctttttggaacagggaaaaactggcgcccgggaaaaaacgggtcccggcccatgagctggggaaacaggaaaaaaaaggacatttggggattaaacgggcctgccggaggctacgcccgcccgaaaaaaaatacccgaaccctcaaggttggctccaaaagggacaaccgaattcccattttaaaagggcccaaagggtaaacccttggggcttcaccaaggggggggcagacccgggagaacctaaatttcccggggggac

SEQ ID NO: 11777 - DNA, 335 bp, Oryza sativa
  Clone ID: uC-osflcyp109b12a1
acgttatgttggacaaaattgctctgaaacgacttggatctattggatacacttctggcctaactgacaggacagttacagtgaattttgaaccccattttcatggttggacaaaactcctataagttttcacattgaacctctctttgggaaaaaaaaaattctatcaaaacatttcaggcattccatgatgccgaccgtcgcatgggcggttttaccggacggtctttctccatggagatcatcatcagcgtcgacggggcctccagcatcatacgggctactaggtagccagcgatggaccatgtgtgggacttactggcctgcttggcgat

SEQ ID NO: 11778 - DNA, 496 bp, Oryza sativa
  Clone ID: uC-osflcyp109c01a1
gcacacttagattcattcattcattcatttgatcaaagcaaacgagacgagctttcttcttgcgatcaaaaacacagatgggcaaccacacagttaacacaaactagatagttccacacaaaactaacgatgataacgatcggatgatgatgatggtagctcgattagatagatagataacttggccatgagggccctaccgctcagttactgcagttcccgaaggagttgtcgacggcgcggatgtcgtagccgccgacgtagacgtcgtcaccacggtcgtcaccgtagccaccgtcaccgccgtagccgccttcacggcgctggccgtagccaccgtcgacgacaccaccaccgtagccgtcgccaccgtagcctacgcctgcgacgtgctggccgtagacaccgtcgcctccgactccggagcggctcgactgggcctcgttgacggagatgttgcggacgtcgagctccttgccgttcatcctctcatggc

SEQ ID NO: 11779 - DNA, 275 bp, Oryza sativa
  Clone ID: uC-osflcyp109c03a1
attgttattgtttctgtttttttttggtttctctgttagttgccacacaggtatgttcactctccctgctcaaatttgatgtttgaagaggaaggatggatgaaaaagctctgtcttaatccaaagtctttacaagaatgacgctaagaagaaactgggggaaacccaccattactgtcagctgatgctcctgctgctgctagctgggtcactttctagctgagaagaggccgaggacgggatccatgaacatatgctggttggtcagtggtgct

SEQ ID NO: 11780 - DNA, 396 bp, Oryza sativa
  Clone ID: uC-osflcyp109c04a1
atgggcagtacagactacagataaacagttcactcttgctcatggcagctacagggcagagggcctaagcaattcattgcctggacccttagttgtattacaacacaagggacaaactgcacattagccatttggtggtcaactacctcaacagaccatgcactggattgcaaaagggactctatggagactcttcctaaaatctcggccattgattattgacatatactaaatctgaacaatggaatttcctatctgaaaaggctgatgaaatttgcaggcttccctttcttttctcttgcattacttttttttttctcactccatcccccggggaaacagcttaacaaacagacaaattttttcagcaaatgttatttgaacaaacataagagc

SEQ ID NO: 11781 - DNA, 475 bp, Oryza sativa
  Clone ID: uC-osflcyp109c05a1
gcattagccataagccattacattaattagtagcagtacaaaactcggttcgtatgaaacaaccgatcgatcgaactcgacccaatttcacgtacttgatcgaatacaaattaaactgaaaattagcagtacaggtcaaaggtgatggtatactagactggtaatgcgccgtacgtgtcgtcacacattacgcctagccgtgcgtggttattgcgctatccaattccaaacttgtacgtggacggacgagcgcgttgatcggcgtcgaccttgccaccggcttacttagggacatcggttgcctttggctccgtggcgggcttggccgcggcttcctgggcgtcgctggacttcggcttgacctttcccttgccgcccttggcgcgccgggccgggccgtcgctgtcaccgagcgcgggcggcaggatggacttcctgacctccatgaaggagatggcgtatgggcgcgcggcga

SEQ ID NO: 11782 - DNA, 383 bp, Oryza sativa
  Clone ID: uC-osflcyp109c06a1
cttgttaacttattatattctaaactgaaaaataatgcgaatttgggcatgctgaatttgtttcctaaaaaaaggaacctacatttcaaacattttcatcaatctgcatcctaaatcttgctaaagttcaaacgtaaacgtcagatgcatcccttcccagcaatagaaggtttctttaaatacaataaaggttaaacaaccaccaggtatgtaattgtgcaggttctcgcagttcaattccagtgttagtcaacagcatcggttccaccaaaggtccagattcttgttagattcactaaaaacgaaagaaattacgagcatggaatacataatcggtactaactccatgtcgaaatgagcaaaacaataaaacggaggggatg

SEQ ID NO: 11783 - DNA, 500 bp, Oryza sativa
  Clone ID: uC-osflcyp109c07a1
ggagcaacttccaatccataaaaacactaaaaacagcattggtactagtgagtataaactagttcaagcacactggtagagtgaggattaccatgaaacgaatccataaaacagcattgaccacaatgccgaatgcaaaaacatataaaaacaccaaaattaaacatctccagacatatctttaattcgagctacctaacatggtgccaaaaagtgctaacataaaccaacatttgaaggccaacctgcttgaattctgaaatccagataggcaagctacagaatttgggcccagttactcagcacagaaagttttatgatcattaaggaaacaactagttgcaaacttcttttctcattcctaatcttcctactaaccgaaaccgtcaccggcgcttgcattcttctggctcttactcttcaccctaccaggggggcctgcaccgaatgggcttgtcagtgagaagtcaatgtgcttttcagactcaaccctcaccatg

SEQ ID NO: 11784 - DNA, 474 bp, Oryza sativa
  Clone ID: uC-osflcyp109c08a1
ggattataaaggtgcgccatttattcaggatttaccgacctggtacaggacaagcagataccacgaaaagtacaaaatagtattatcagacaatccaaagcatctgaacatagtgaacttctccaaaatctataccctcctgcccccagggagaaactgcgaaaaccgaaatgatatcgccattcagatatcaatattcatttaactggtacacgactgtaggtctaagcaccaaggacgtgaagcatgatagcattctgggcgtgcattctgttctcagcctgggggaatacgattgagttgggagcttcaatggcgccggctgttacctctatccctctctgtgcaggcaaacaatgcataaggaaggcatttggcccagccatgtccatcatagcttcatgcaccgtgaatacttggaacactatatttgtatattcagcttccttcttttggcccatgctgggccagaca

SEQ ID NO: 11785 - DNA, 502 bp, Oryza sativa
  Clone ID: uC-osflcyp109c09a1
gaaactgaaactgaaactgagctgccatggctacttgctaagttgctacacaggtatctccattttccctcctaaaatctgatgtttgaagaggaaggctggatgaagaagctctctctcaatccaaagtctttacaagaaaaacgctaagaaaaaacagggggaaacccaccatttctgtttgctgatgctcctgctgctgcttgcttggttctttctagctgagaagagggggaggacagggatccatgtacattgctgcttggtcagtggtgcttgaagggcctcaggtcctcgacaccatcatcgtcctcgtcgtcatctccactgcctgatggatcatcatctctcttccgcttagcgccctgcgaggacgagggcaggtccgtaccaccatcatcatcgtcatcaacctcatctctatcttcatcagcatcatcagcctcagctgcatcaaagtcgtttccaaccgccatggcctgaggttgagcaattggttgaa

SEQ ID NO: 11786 - DNA, 485 bp, Oryza sativa
  Clone ID: uC-osflcyp109c11a1
ttgttttttaacaagaggatctgtgcattgcatctttggggaaaaatcttcccctcgggtacaatttcagactttcagcctgtcatcaaccgcatcaattttccttttcgccatattggtgcacaatagtagaagctgcaaactaacatgttggaagcacatgatcaacctctaaatcaacataaccaaaaaaaaaatttcaaaattggcgccttggctttgtttctgcaactgtaactcggatctgcctgccgtccaggtcaacgccgtcaagatttgatatggcattgttgacttcttcagcggagccataggtgacaaaaccaaagcccttcgacctgccgctctccctgtcgtagatgaccttggcatccagcacggcttcctgcttactgaacaggtttctcgagtgtcgagttgtcgacaccccaagcaaggttccctacatagagcttgttggatgaatcaaagttgctcccaccacc

SEQ ID NO: 11787 - DNA, 322 bp, Oryza sativa
  Clone ID: uC-osflcyp109c12a1
actaatcatattctaaaccgaaaaagaaggggaatttgggaatgctgaattcgttccctaaaaaaaggaacctacattcaaaacattttcatcaatctgcatcctaaatcttgctaaagttcaaacgtaatcgtcagatgcatcccttcccagcaatagaaggtttctttaaatacaataaaggttaaacaaaccaccacgtatgtaactgtgcagggttttgcagttcaactccactgttagtcaacatgatcggtttccaccaaaggccccaaattttggtagattcccctaaaaccgaaagaaattaccagcatgggga

SEQ ID NO: 11788 - DNA, 497 bp, Oryza sativa
  Clone ID: uC-osflcyp109d01a1
ctccttggtttctatttcatttcattccgatagatagcaacaagcagttcaaacaccataaccaaagcgaactcaattcatggtaacatcacggacgaagaacacctaacactggatggatggatagagggcttctcgactcgagagagccactggacacgataacgactcgactcgatgataagatgattctgacacggatagctaaggataactggccacgatgggccccaccaatcagttcctccagttcccgccggagtcgccgccgtagccgccgccacggctgccaccgtagccgccgccgccacctcctccgtagccgccgcctccacgaccgccgccgtagccgccaccgccgccgccgtagcccccgcctccgccgacggagcggcgggactgggcctcattgacggtgatgttgcggccgtcgagcttcttgccgttcatgccctcgatggcgtcgcgcatcgactgctcggaggagaaggtgacga

SEQ ID NO: 11789 - DNA, 479 bp, Oryza sativa
  Clone ID: uC-osflcyp109d02a1
agtataagaacgatttaagtagattgtattcgggggttttacaataaaccggccttgtcccttaaataggggttggtcttgccatttacaggcccttctccacatccaactcgggatagaaaccaaaggaaacacgaaacctgccttcccgagtaaggaaacccgtcactttccaaactttggcaattttcccgtatttcgtccataggtgccaaatttgggtgtaaacagaacctgctgtgtataactatatatatgtggtatataaagcgcatgtccaataatatacgatgcccaccaccagtctcgcccctgttggtctcctaattgccgcatcttcaccgctgctttgccaccggtcatgagaaccaatccaagcaaaagtgtgacataatggcgattacttacccaaatccaatatagctgcaacaataaaactaatgcaaaattgcaaagtcggtcatagttgggttataaaa

SEQ ID NO: 11790 - DNA, 446 bp, Oryza sativa
  Clone ID: uC-osflcyp109d03a1
gcttcggcatgcaatggttgaagtaggataaaagaacttctacaaaatatctttacacaaagcggtgtctgaaatcaatgtcaacttgcaattacattggtattagaattaggcagaatcaactaaggtatggtgatcttccgtgtttgactatggccaggaccccataaaaacaaaagggaaagcatttgctctattatccttgcaactggaccaatatcattcagaaaggcattacctatcatacaatttaacagaatatataccggtgttaccacactaatagattgaggatagtatcaatggcgaaaagggaaaaagatgcaagtgcagtgaatgtgattccgtaaagatgggtatggtatatataaacaaaggagatgttgacctattgaagaaagcaccagttattactgccgtcaacagaagagagaaataactcacga

SEQ ID NO: 11791 - DNA, 416 bp, Oryza sativa
  Clone ID: uC-osflcyp109d04a1
gggaaccacaaactttcagtttcattattcatggctagaacggtatacatggcactgatgcattggaacacattcaaggaggtacgctagtaaatggagaaagaaaacaaaaagttagtttggctgtaactacaagatgggatccacatcagaatatccaaactggtcaagacattggcattgtgagaaagggcatagcttgagtggcccgttcccaaaatgtggatacatagacaagaccttcagatatggttctttcaatcagggactgacaataagtaacagtacgccgcatcaagatttgattggacactaaaaccagtatgaaggactgcctgggcatgaagccatgttccttcattattcatcttaatttaagcagcaacagccgtggcctctgacttatctattccttc

SEQ ID NO: 11792 - DNA, 289 bp, Oryza sativa
  Clone ID: uC-osflcyp109d05a1
acggcccgtcctttttttttttttttttttttttggaattttcacaacagccaaggaagaaatgaatcctacccgatataggtaaggcgtaccactgccggaacacagatcatgtaagctattgacagcttacaagtactagatacagttctaaaaaaaactgcctctggactacacaggaggggtacagaaggaggccaaactacccgcttatgtaatatgaagctcaggtgcccacaacatatggaccaaaaggggggggcctgcagggaccatgccaccaaggggg

SEQ ID NO: 11793 - DNA, 458 bp, Oryza sativa
  Clone ID: uC-osflcyp109d07a1
gggggtgttacaattaaccggtcttgttcttttaattggggttggttttgtcatttacaggcccttttttcgggaacacaaaggggcgaaccccggggaggcccgccccccccctccccggggggggccacccgggactcaccacagggggggggggtccaggatttcggccccaaaaaccagggcggggtgtttgcagaacccccagcgtggggggggaaaacccccccggggggccctcttgggcaataccatcttaaaaccaccaccaggctcgcccaaaatgggccccggatagaaaaagggttaccggtgctctgccaccgggggggacaaccccttggggcaaaggtggacttcctggggcccatctgacccaatttcgaagggggggcggcccccccccaaagaaagggggaaaaggggccaatgccggggggcaaaaaaaagcccaaagt

SEQ ID NO: 11794 - DNA, 260 bp, Oryza sativa
  Clone ID: uC-osflcyp109d08a1
ggaacggcattgcaattggttgttgttggttgttttaccagccacaaaacatgttttctcactttggggttttaaggcaatggggagaagcacttccactggcattcggaggaggaacaaacaagaaacgtatgcaaaacggccgggtttgactataccccgtactccctaaaagcaaagggtaccacagggctctgtggatctatccactgggccaatgtgatcctagaacgcggtccttgtaccatacaatggaccag

SEQ ID NO: 11795 - DNA, 420 bp, Oryza sativa
  Clone ID: uC-osflcyp109d09a1
gggaccgtaaccagcaattggtatattaactcgagcaaacttaaaatgctcgaaaaagttgttcagcaacgaacaaaaaaaaagctctaagcaaaataaaactaatcacattgttgcccaatggcagataaactttgagcataccaactgacgacggttacaaaatcctaccagctgagagcatcttcctcttgtttattggcccgggggaaaaaagggtaaaatgcggctaactctttcgagtttatgctcagttattagcatcaaagatgctcaaagagttaaaggaaagaataaataaccgcaaccgtgtaggcgtgtgtagcttcaagcagcaaccttcttgcggtggttctccagccactccatggtgacactttttggtctttcgagcgggaggccaagagcacggtcccaaat

SEQ ID NO: 11796 - DNA, 457 bp, Oryza sativa
  unsure (1)..(457): unsure at all n locations
  Clone ID: uC-osflcyp109d10a1
agtcatggaataaacacattaattttgcattcagtttttcctccccttttgcatcaggcataagactgaggcaacacaaattatctaaattatagcctacttttagggcctaaatccttttctaaaaaagtttgcttctgaattgtacgctacttttagggcatacaccctttttccccccttatgtattctggggctttactgcccagaacatttctacttcttttgctgttcttccagggattcttccagctataagttcccacctgttcccaacaagcctgtgcattctgaaaacgagatcttcctcttcttccgtgaaatgaacaaaattctgtgcagngttattaacttcttttgtttcacaaccatcactggttttggaattctttccctggctaccactgctgctatccattaggcgtgaaaaactccaatgaaatgccgagttgagatc

SEQ ID NO: 11797 - DNA, 349 bp, Oryza sativa
  Clone ID: uC-osflcyp109d11a1
attccctcatcctttgtattcattcctcccagagagacggatccatggaagttttcttgccctcatcaggcaggcagagcacacacacacggtggtagtggaattgctatgaacaagacgctaatcaacatacagagttgaaacaaacaaggggatcaaagcaaatcccgaaaaaaaaaacacaggggaacgcccacatttggttctagtgcccaacgcctccgtgtcaccaccacgtcttgcggatttttctttaccctgttctattcgctaaggcgaccacgatctcgccgtcgttcttcgacgcccggattagttccgggagcgccggcggcgacgccgccttttt

SEQ ID NO: 11798 - DNA, 435 bp, Oryza sativa
  Clone ID: uC-osflcyp109d12a1
tttttagccttttttttttttttctttttttttttttttaatggggggggggacagactacagataaacagttcacttttgctcatgggagctacagggcagaggtcctaagcaaatcattgcctggacccttagttgttttacaacacaagggacaaactggacattagccatttgctggtcaactacctcaacagaccatgcactggattgcaaaagggactttttggagactcttcctaaaatctcggccattgattattggcatatactaaatttgaacaatggaatttcctatctgaaaaggctgatgaaaattgcaggcttcccttttttttcttttgcattacttttttttttttcactccatcccccgggtgaaccggtttaccaacagcctattttttaccgcaaatggtttttgaacaaacctaa

SEQ ID NO: 11799 - DNA, 384 bp, Oryza sativa
  Clone ID: uC-osflcyp109e01a1
gtcctttttttttttttttttttttttttttttttttttatttcttcctggttaaggttccacttttctggaggaaggagctttggccccaaaacaaaagtgccaacaagttgatcaggggaaaaccccccaatgcacataaggggttggaactttatcacccaaaagggtcccccttgcatcccacagcgcaaagggagggctaacaatggtgttcgggggcacacacaccccagacagaaaaacgacaccgggaatactggacacaagagggggggcacgttaaggggggggcaagcggggaaagggggggaattgaaaacatctttgaaggggggcgggggggtccaaaatcaaaatgcctcattggggcaaggggggttg

SEQ ID NO: 11800 - DNA, 483 bp, Oryza sativa
  Clone ID: uC-osflcyp109e03a1
ggacaataaacaatcaacatttcattgataaattgtaacttggcaacaatcaactttacttttgtctatgataaactgtacaattttctatatatagtttttatctcttgttaggcttgcccaggctaaaaaaatttctggctccgccaccggtagctggaatgaacggagtggactattctgcatgctgtccagacctgacaaaaatcagttcatctctgatccgtctttttttacacacttgatgtaatctgtaatatggatagacgagacaatgcaaaacatactaatgtctgaaaacaagaaataaaaaatccggctagaagagaaggcaaacatatttcttttcccccgtcttaggcgggcataaatgcaagaatccttctcttagcaagttatatgtgcagagtacgcagtgccaatcggaagagaggtattgcgagggatcatatgctcatccgatcccacagaaacaaaccaata

SEQ ID NO: 11801 - DNA, 407 bp, Oryza sativa
  unsure (1)..(407): unsure at all n locations
  Clone ID: uC-osflcyp109e06a1
ataatgngtattcatcaattcagttactaagaaaatagtggttcttttccaatgtacaaacagatgaaatgtgcaggctccaccaagctagctacacacctccagctagccttaaacttcaatataatataaggcatcaagcaagcaaacgaacaaacaaaagaaataataatattgcattagattaactagttcactactagtaaaccctagctatttttgcgttgatgcgacagctcaagtgctcatttctccctccttaaaacatcggaaatggctcttcatgtcgctggagctaaggaccctttcaatctcttcttagtttagcagagagacgaatccataaccctaaaaaaaataggagaaaaaacacgcaaaaaaaagggagaaaaaacaaagcaggtaaa

SEQ ID NO: 11802 - DNA, 476 bp, Oryza sativa
  Clone ID: uC-osflcyp109e07a1
aaatcgaagtcatcttcattattcattcgagataaactttttttttctcctgaggaaactactatccgacggtactacaatttgttacaatagaaaattggtaaatcttagtagtcgcctaattttggtgcgcatctgagtttacagatcggtgttacataaccacgtataacaccaacagaggatcatctcatgttgccctctcttaggacatcaatcatatcatataatttcttgttggcaccagattgtatctttttatggagaaacagggcagcatccacagttccctctgcgtaaattgaacggccacatacattgtgttgaaactcaaatgaaactgtctcatccggtgaagtgagatggtacatgtgaaatgcgtgaccaggaagatgttcttctgggacaccaaccaatgtaagctgttcctgaggatcccggacctgcttaacctcgttcaagttaaatgacacacc

SEQ ID NO: 11803 - DNA, 369 bp, Oryza sativa
  Clone ID: uC-osflcyp109e08a1
gaaaactacagcaatactcattttggtaaatggtaagggagatgcgggaaaacaggtaccaaatacaaaacgttcttatactgagacaaaattcaaaagcacttggataaccgtttacatctccaatttgtatttaaaggggaaaaaaggggtcattgctctctctgctacaaccaaatatcttggcggagggatttcagtccagttggccttgggctcagagatctttgatctagatggccttggatccacagactctgttcgcaaaagacggtagacagactgaggctgtgtggatctcggaattgttgaactcaagaggtactttagactgtgttgagaactgattatccttattgttaaaccccg

SEQ ID NO: 11804 - DNA, 396 bp, Oryza sativa
  Clone ID: uC-osflcyp109e09a1
aagcaagtggcggaccaattcataagatgggaatgttctaaactgattccagaagctctgactacattcttctcccacatgatcaaaccctactagagatgtagacagatctgtactgttacttggctacccacggccacatacaaatgatgcctatgcccacaatagccgtgacaaacaggatgggattgtatgcatgcaaccaacacccctaccgagagattaaggctctgaacaaacaaatttctcactcggatgaaatattgtcataaaaaaggggcagactcgcaaggacttcacgatgaatcggcagtcgggaaattactgttcttttatgacgatgatggaatattatttgttcatgcctgtctcaagcgggcctatgggataccaacc

SEQ ID NO: 11805 - DNA, 484 bp, Oryza sativa
  Clone ID: uC-osflcyp109e12a1
gtccaaataatgtgtattcatcaattcagttactaagaaaatagtggttcttttccaatgtacaaacagatgaaatgtgcaggctccaccaagctagctacacacctccagctagccttaaacttcaatataatataaggcatcaagcaagcaaacgaacaaacaaaagaaataataatattgcattagattaactagttcactactagtaaaccctagctatttttgcgttgatgcgacagctcaagtgctcatttctccctccttaaaacatcggaaatggctcttcatgtcgctggagctaaggaccctttcaatctcttcttagtttagcagagagacgaatccataaccctaaaaaaaataggagaaaaaacacgcaaaaaaaagggagaaaaaacaaagcaggtaaatctctcaagtgcaatggcctgatgcagagctatgctgctaagtatgaagaatgctgttgccgtttgcataa

SEQ ID NO: 11806 - DNA, 400 bp, Oryza sativa
  Clone ID: uC-osflcyp109f01a1
gaaagtccgaaagatggcaacaacagccattccaattttaaatcgacactgagtccaggttcacatagacatttaactcatctgaagtatttttgaaactgtacattattgtaaaccaggcattttaaagccatacattgcttgtggatacaagaacactaacaatacagatatcgcgagcagctcaattcgaatttgagccggttcgcacagaagccacgcagattcaaccatccaattcattcgagtgactggaacctcgaccgctgaccaagaaatcttcgttcgctggattccaggaaataatttcccttcacagcatctgtgtctcataacatgaagccacgcttccttcatcactgatatttgatgacattcctttggagtctgacattcatgc

SEQ ID NO: 11807 - DNA, 323 bp, Oryza sativa
  Clone ID: uC-osflcyp109f02a1
gggggggatgaaatcggtttcgataggttataaccatccagtcaccttttcaaaacggccagggtcggaaagataattttgggtggtacctaaaacagaaacggatttacaaaattttttaaaaacagaaaccaattccggtggggttgttttctgggaaaacggttgaaattgtccgggtccctatttagataggttccggaaacaaatacctagcccatatttatttttattgggttcatagaatggaactgccttcactaggttattcaaagctggggggggatggaacagcatcacacaggtttatttcatttttgcaa

SEQ ID NO: 11808 - DNA, 392 bp, Oryza sativa
  Clone ID: uC-osflcyp109f03a1
gggaaccatgtgaaaattaatatagattatcttattcaattccagagcctacaagtaaaatcaacataacatataataatccaaacttgttccccgtaaaagttactcgtaatttagcacatcaagtaaccaacaaaatttgaacaggtacatccctgtgacggtatgacggtcaggctcattagccctggactttcctcacttgaatgtggtgagtagactcctctctccagatcgacttcactccactctgaacaagggtcacgtagtccccttctttcacgaattgggcgttcagcaagctactaattgctctagagaaagtttcctctgcatcatcagaaaacttcatgtaaatgggaaccacaccctggtagagtgccagacgttgc

SEQ ID NO: 11809 - DNA, 451 bp, Oryza sativa
  unsure (1)..(451): unsure at all n locations
  Clone ID: uC-osflcyp109f04a1
gcacaatgcaaacaacaaataacacataacataactgatacatagtttacagatgccaaaatttgcgcagcaacaagtatgacaaaactcgcgcagcgattagtccactaaatttcgtacgctaaaagaaaaaaagaatacagcaaggctacccaaggaacaatagccatttgacagcattaacccatattagttgctataactccatatcagcagacatttttatgctgctagctgtttggatctcttaacaaacttcgatgtatggcatttcacatcttggngtgaagacaaaagaatgggatgcctgtcgcaagtgccaaaagttgaagatgtgccaggacggcatggatcatgtaccgataatatgtctatgaactggtgcgccaaaaccttcaactacatccatccatctcttctctaccattagaaaggaagttgtctgaatagg

SEQ ID NO: 11810 - DNA, 306 bp, Oryza sativa
  Clone ID: uC-osflcyp109f05a1
ggggggaatcattgattacaaaactggtatgaggccgggccagtctaacatgggggattaatgacaaagctaacaacataagtattttaagcaatcgtgccattgagcatattaaaacatgaaaacccactgggggtgacccaatgtgagacgataagctctgactgacttggatgaccagggacaacacacagggttggcacagtttgcctccacttattatgggatgggcaattaccgtggtacgcttctggtctttgattttgggacagactcaataagccggaacatccatcgggcaagaat

SEQ ID NO: 11811 - DNA, 522 bp, Oryza sativa
  Clone ID: uC-osflcyp109f07a1
ctaaagaattttacactatgattccaatgtttatatatcatctatcctacaagctgaatttggaattatacatcatctgtaaggtgagagaaatttaaatattgacatagataacccgttaactacggcaaatgtttgctgacttcctaagcagacgcctgacagctagcaagagccgagtggaacttctcatcaaatcatggtaccagtggcaagtgaataaaattagcagcgcaccatttcgtcgccaatctgctgcctaatggacctcagcatgttgcctcatcttagaaatatcaccaattctgcccgcaatgtttccagggaagtcgcattaagttagctaaacgagtctgcgcttcaagaggatgttcgggcccggttgatgtcatttctggctcgcattagcgcctgtcttgcagcatttccatcaaagcccatcgaaaccagcatagcgattgaagattctgggggcttcacgacaggagcgaatccagatggctgattgttctgcacagcacg

SEQ ID NO: 11812 - DNA, 545 bp, Oryza sativa
  Clone ID: uC-osflcyp109f08a1
atactgtggacggcccgccctttttttttttttttttgttccaagcctatgtacaactgttcataccattcatcaatgatttccccagcctccaatttcttgttcaagatgacctgacattacaacaccgtggcgctcaatagtaacaagaagtgtgccacccccagcactgatcgcaacacaaacatgaacttctattaactggcatgtctgtttagtttattattttacccatatggagaattcctatgttgcatgcagacatgttgagtcatataccttttccaacagccatatgctgcaaacaggcacaagtttacttcaaaagctcagcttgaagtgtgagctgaacacacattttttgacaacttggcagacgcacattgcctagtaaaccagggggaccaccatccgagcatgaacacaccgcataacgccccatcagcggccggtgaataaagggaaccgtgatccagggaaactaatgtaaactacagctactttctgatcctagttgcgtgttaactggaactggaactagggct

SEQ ID NO: 11813 - DNA, 359 bp, Oryza sativa
  Clone ID: uC-osflcyp109f09a1
aaagcaagcctgttcctggtaaatagttttttgtcacaaagtcatttgtacaactatctggtcttttttttccccctgaatgtttcttagggttagaaacataagcacccaaaaggattccatttccatttttccagctaaaagggagggataacactgatatactgggccacacacgcacgagtgggagcattgtcacagttaaggggggacatttttgggagggcacggggtcggttgggcatccggagaaaggtaggagattgagaacagctttgatctggatttttttgctccatcttcatgatcttcgtttgctgcacgggggctcggagactttacctccaggttttgggctg

SEQ ID NO: 11814 - DNA, 336 bp, Oryza sativa
  Clone ID: uC-osflcyp109f11a1
ctacctacttaaaaaacacctgggaaagaaaagagggaggggggcaaaagaaacaaaaaccccacccaaaaaggaccgccagggaaaggggccggaaaaaacttaaaacccaaaaaaccaacagggcaaaaaccgaccggtaaaaaaaagaaaaaccaacacaagaaacccccacccccgtcaaaaaaccgcccccgcaaaccaaccctcaataaagcacggaccaattcagggggaacaaacaccggacagaacaggggccccccaaaaaaaaccccctcgctaaaaaaaaaaaaggccccccccctttggggggacgggggacggaacggaaaa

SEQ ID NO: 11815 - DNA, 385 bp, Oryza sativa
  Clone ID: uC-osflcyp109f12a1
aaaaaaaaaaaaaactccccccggggaaccccccccaagaaaaggaggggcccccccctaaaaaaaattaaattaaagggggggcggccccccgacccccatttttcccaccccaaaaaaccgggtaaataaaaaaacccccacatcccgggcccccgcccaacgggaccccccaagggggggggggacccgggggggggcttccgggggggggggagaagaaaaagggaaggatggagacccggggatattgaccgggcgacctttttaagggtggggggggccccccccggggggggcccgggcccccctggggggggaaccccctaaattcccccccgaacccgaaaaggggggggggggggggggccccccgacccccccc

SEQ ID NO: 11816 - DNA, 298 bp, Oryza sativa
  Clone ID: uC-osflcyp109g01a1
gcacgcgccgtagcttgatcctctgagcgggcggccttccttttttttttttttccacatgaaacagacgcgtgactatctcacgataaggtcatcggctctagcactgtcattcgagacaaataaacacggggtttgtcttcgacaatgatctccttggcgaacagtgcggcatgtaaagagagctagctgcattcgacaaaaatgcatgagacgcatcacatccaccccacgctatgtacacctgtaagatgagactcgagacggtttgcttatttcacaccaggaccgagttctc

SEQ ID NO: 11817 - DNA, 396 bp, Oryza sativa
  Clone ID: uC-osflcyp109g05a1
aattaattaattaatcatcttccctgcacattaacaacgttcgtacactcagctcaactcaaccgctaatcactacacctacccccttgctgcactaccaaatcttttgattttcattatgatacagctttaattaattaatcccaacaacatctgcgtccctctcccttcttctcaggcgccggcggcgtcgcgcgcctcgtcgtcggcctgcagcggctcgagcgacgcgacgatgtcccgcatgagcggcctcgccttggggttccggttcaggcagtgggacgccagcattgccgccttgtgcaccgccctcgccggcagctcgccgcctgcgccggcggcggcggcggacgctgagaggcgggggtcgacgatggacatgaccttgcgctt

SEQ ID NO: 11818 - DNA, 334 bp, Oryza sativa
  Clone ID: uC-osflcyp109g06a1
acaattggtacgctgttctttgatttttaggtacaccgaaagaagaaggcccccccggggggggagaatataaaccggggggggggagggctgcacaaaaaaacaagggccccaacaaaaggaacccggggctaaatcaggagcgcggcccaaacgggtagcgggagggggggtccaaaggggcccctgggctaaaagggaagggggggccgcaagggcgcttccaccaggggggggaacaacaggcggggcccgaaaccaaagggggaacccgccggggggggaccatgcgaggggagctttggtatgcccccggggaggggcaaaatccccc

SEQ ID NO: 11819 - DNA, 295 bp, Oryza sativa
  Clone ID: uC-osflcyp109g07a1
gcacgaaatgtccgggtatgcccacaatggaggaaataggccatgggaaaaggaacaccgaaggtccttcaactgggcattgagtgacaaaatcgcccaccaaccgcaaaacctggtatacatggtccattaactaacaaaaaccagtcacagtgggtccgttgggggttttgaccccggttttatcctacgtggcagctgaatcagtgcgggagccacgggggacctacatgtcaggctgacacatcagccaaggctgtctctatctatcctgtgccctattttctgccttact

SEQ ID NO: 11820 - DNA, 415 bp, Oryza sativa
  Clone ID: uC-osflcyp109g08a1
gggacaaacatacgggtggttgttttgttccggttcatgtatcatatccagtcaacagatcgacaataaccggtcacagttacatgctcgcgcgcgcggtgcgtgcagatccaagcatgcgaacgctgcgacactgcatgtgtgatgagcatgtatgctgcctggttcgtgttagctttgctcttgtgggtatctgcatggcacgatatgtagcatatgtagctacacagcggaggagttgccgtccttgctcagctagagggcgcccttgttcttgggcgtcgacctgtagcagtagcagaagttgaggatcaactgcttcccgcccagtatggttcccatgccgatcggtatcgtgatgaggatgtcaaagcggatgaacgcctatattgtccagcatatgccgttgatgaag

SEQ ID NO: 11821 - DNA, 452 bp, Oryza sativa
  Clone ID: uC-osflcyp109g09a1
gaattgttctttatgatggcaacatcagtcatttcaattttaaattgtcacttagtttcaggacaacaaaccgatcacagccggtgagggatttatgactgtgtgcacaacagagggccagggattttactgccaaccctggatagtgaagccctggccatgcaggctgtactttttttgagcggaaagatgatactgataagcggctactatgagacccccccaccttgtaccacgcccggacaccgaaacattatcctattgcacagttgccaagaaagcattggccctttcaaccttggagggtgcaccccctaactgtttttcatttgcaggaacagcaggcaccttgttctttgggtttttataagacttcaagcctccaagagcattggaataaggccacccttgggggaaaggggcaagtgacttgccccatgatcctttaacca

SEQ ID NO: 11822 - DNA, 366 bp, Oryza sativa
  Clone ID: uC-osflcyp109g10a1
cctgggcatcaacgtttattgcaggcagttcaagatcttaattggtactacaagatcaggttcagaatggcagtgcattcttccaggatagtgaccaacttgaacggcaccacagaatgcttattggcaatttgattgatagacagtagcaggtaactagagagcagcaatgcactcgatctcgattctggcgttcagcggcagagctgctacttggtaagttgggcgtgctggtgcaggagctggaaaatatttggcatagatctcattcactttcttgaaatcttgtaggagcagccaacatgattgctgccttgacaactgaagagtagctagcaccacttgctttcaatatttcacccatat

SEQ ID NO: 11823 - DNA, 446 bp, Oryza sativa
  unsure (1)..(446): unsure at all n locations
  Clone ID: uC-osflcyp109g11a1
ccagcaaaagacagcgtatataatccactagaagaattcgatcagttttctcttctcaaaaaaacaagaacaacaagaattcagtttcacccacagctacttaaagactacagagacagtggtagtaaaactgacatcattgtgggtttcacagggaaacgatgacttgtacaagccaaacagaaacagaagtgaagtgaagtgaagagaaaatttgcataaatgagaattcagacctcggccttgtgctcggggcgatgggtgaactcgaagtcgacgtgcacaaaggcgcgctcgctcgganagggttgctccagcttctcctggagcgactncccgatgtcgggcgcgtggctgagcggcatgtcgccggggaggaccgatgtccacctcacgaagtagtgagtcccgaagggtgtaggccctcaccgtgtcgatgtgccgga

SEQ ID NO: 11824 - DNA, 488 bp, Oryza sativa
  unsure (1)..(488): unsure at all n locations
  Clone ID: uC-osflcyp109h01a1
cagtctcagatcaaattggattgataagccaagcatcccaaattctcaatgtcacaatgtacaaattggcttacggcacagcagcagtaagcaacctgagcttcggcgagatcctcacgaggccagggtggtggtggggcagttgtcgacgccgcaggcgaggatgtcgcggtagtcgcgggagacggtgaagctgtcgtgcacgctgccgtcgcggctccggacgtactcgaacagcagcgccgtgtggttgaaggccgtcagcttggcgaacccgtagtcccggtcctggacgtggctccaccgcgcccgtacgccgacgtagtccgccaggctcgccccgccgccgcccaccacccacgtgcgtcgntcgccgtgaacgcgccgctgtagtggctcgccgccttcgccacgcacacattctcgtagactgggcaggttctctcgtagccatggacatggccgtactggcgaatgtcgaccttgta

SEQ ID NO: 11825 - DNA, 376 bp, Oryza sativa
  Clone ID: uC-osflcyp109h02a1
gtaaagcacaacaccacgactatggcgaaacaatcacattgattaatgggtctataacattacatgactttatgcaaagagaaaaaaaagaaacaggagggtaaacatggaacttttatcaattttatgtgcaacctcaggtccacgagtaaagctgaaatcataatttggcatgcggaaaccgctgacagaaatcttgacaacatgaatcctaggaccgaaaagacaaaccccgataatatacagacccagacaacttatgtgagataaggttttctccactagtcaaggcggccagatgctttttttaccatccggaccgacgactttatggtttagccattatcttggcccacgtgtttgggggctttatgcc

SEQ ID NO: 11826 - DNA, 431 bp, Oryza sativa
  Clone ID: uC-osflcyp109h03a1
gaatagttgaatcaattagacgattgaaacaacctcttccacacttcaaaacctgtcttatctccacaggggttaaaaacaaaaaagaaaaaaaaagcgaacaaagaatcaagaaataatagatgtagcaggtacagtaggcaagcaccaacacctcccctccaacctcacactatggaaactactaattttttacagaatacaactcacacttcaagatcagcttcagggcaacagaggcaagggaagtttgatattctccctaccacagattttcgtcggtttgtttgtttacgcgttctcagctgctgcatgcgatcgctttggtcgccactctgtgtgtgccttcacaatgtcagccttcacaagatggccgcactggatggcagaagcctgcttgtcggcgccaatgctggtgcattcccctgaca

SEQ ID NO: 11827 - DNA, 385 bp, Oryza sativa
  Clone ID: uC-osflcyp109h04a1
ccagacttcactacagtttatgaacaaagttcaagcccaaaatctgtataatacagcatggatgcctctacctacatctctggtttattataaatagctgaattctttggtcttcgcaccgttccttccaacatctctggtttttgcaattagcattgcccagattgcctactccagtttgtgaagatgtcagacgaggatatccggaaattatgcacacatcgcctttccaaaattttgtacatgacacagttttcatttgtccaacgatgaaatgccatatatcagatagagataggcctgcaactctcatgcaaatgaatgctagcaaatcgtggcatgcaggtctgctagtctgctactgtttcgaagttggaacttggaa

SEQ ID NO: 11828 - DNA, 393 bp, Oryza sativa
  Clone ID: uC-osflcyp109h05a1
gtcctttttttttttttttttttttttttttttttttttttttttttttcaaaagaggcaaagtttttttattaagataagttgtaaaaaaaccccaattccattaccaaacataaaaccatccatcaaaatcacatgggaaacggaatacagcccaccatgtcctaactttctcacgtagcaaacgataaagaggaacactctactaaaactacttgtcacaactaactcaacttaagcttcgattttttgacccacgcagggacccaaatgcaaagagatgcggaaattaataacgcaaccttgacctggaggggcttgggctttttgggctccgggggggggagcttctcgacggggacggggagcccgccggccgggcacacggggaaa

SEQ ID NO: 11829 - DNA, 444 bp, Oryza sativa
  Clone ID: uC-osflcyp109h06a1
aaaacaaatgagcagtgatatctctgaactttcgcttacacatagatagcaagcagtctagtagtggaccaatccggccttctgcacgcatacagtcactcacacgctactacgctatctttacatggagaacatatacatatattgcgacatagaagtgcatatgacatataattagtgtgcacatgtgtgcatgctgctgctgcatgcagcgctagattattcgttcgcagcaggtagcgaagttgtgtgatcagttttgtcaggcgtggtccggctcaccaggaagagcagcgagaacatcaggaggagcagcgaatacatggcggtctatgtcgtcaggtggactagcgaacacttggtccggatcatggtctacgtcatcatgggggctagaagacacgtagcggtgggtcggatcatggtctacgtcatcagggggac

SEQ ID NO: 11830 - DNA, 503 bp, Oryza sativa
  Clone ID: uC-osflcyp109h09a1
cacatgctgaagaggtgaatcaattagacgattgaaacaacctcttccacacttcaaaacctgtcttatctccacaggggttaaaaacaaaaaagaaaaaaaaagcgaacaaagaatcaagaaataatagatgtagcaggtacagtaggcaagcaccaacacctcccctccaacctcacactatggaaactactaattttttacagaatacaactcacacttcaagatcagcttcagggcaacagaggcaagggaagtttgatattctccctaccacagattttcgtcggtttgtttgtttacgcgttctcagctgctgcatgcgatcgctttggtcgccactctgtgtgtgccttcacaatgtcagccttcacaagatggtcgcactggatggcagaagcctgcttgtcggcgccaatgctggtgcattcccctgacacggggtaagtgattgcagcacgctgactcgccacattcttccctgaatcaggcatgctgcagct

SEQ ID NO: 11831 - DNA, 312 bp, Oryza sativa
  Clone ID: uC-osflcyp109h10a1
aaaaaaaaccaaaaaataggggggtttatttttttttttaaaaggagggggggattttttcttttttcaccattacaaaaggtgaagcaataaccgataacaaaatctcctccttctttggggaaaaattttaaacacaaaacccttatagggccttatttttaggaaaggggcgggcatgggaataaaaggaagggggggggcggttaaaaaaaacaatggtgggggggggggaaaaaaaacaccattatgggaaaaaaaaaaaaccctcgaaagggagctttttggcggaaggcttttcccacttggggg

SEQ ID NO: 11832 - DNA, 331 bp, Oryza sativa
  Clone ID: uC-osflcyp109h11a1
gccgccctttaaacttttttttttttttttatctatttttcttttttttttttgtacgggtcgattcacatagttagcaagcagtctagtaggggaccaatccggccttcggcacgcatacagtttcttacacgctactacgctttctttacatggagaacatatacataaattgcgacatagaagtgcatatgacatataattagtgtgcacatgtgtgcatgctgctgctgcatgcagcgctagattatttgttcccagcagggagcgaagttgtgagaccaagtttggtaggcgtggtcctcctcaccaggaagggccggggagaaca

SEQ ID NO: 11833 - DNA, 419 bp, Oryza sativa
  unsure (1)..(419): unsure at all n locations
  Clone ID: uC-osflcyp109h12a1
gggggaattaccatgaaacgaatccataaaacagcattaaccacaagtctatgccgaatgcaaaaacatttccagatatatctttaattcgagctatctaacataatgccaaaaagggctaacataaaccaacatattaagggcacaacctgcttgaattctgaaacccagataagcaagctacagaatttgggcccagttactcagcacagaaggttttatgatcgttacggaaacaactagcttaaaacttcttttttcattcctcatctttttcctaaccgngaccaccaccgccggttgcctttttttggttcttccgcttcaccctaccaggggggcctccaccgaatgggcttgtcagtgggaagtcaatgtgctttttagactcaacccttaccatgaatgaggggatgttg

SEQ ID NO: 11834 - DNA, 276 bp, Oryza sativa
  Clone ID: uC-osflcyp110a01a1
aatctatatcatttgttttttatttacttacttgtaaaatggttcacatatggatgtaggggagggggccaaaaggcagcacaaaacctggggaaaggggaagactaaaaaaacacaaaagggttttttgcaaaaacaaaacaaaaaaaccccaattttttcaaaggggacccgaccaaccacttttcaacaagaggtcggcaagggcaggaagaagaaacacatcccctagaagatttgtacgaaaggctaaaaagggggggaaaggaaaattgg

SEQ ID NO: 11835 - DNA, 324 bp, Oryza sativa
  Clone ID: uC-osflcyp110a02a1
cccttccttaccttaatccacaccatccccatcccaacaaggacacgagcccaaatcgcccaaccaggccataagcagcacacgggccccggcccccggaccgcccgcccacgaggaccgcccgatttgcaccacccatacacagcggagtgggccccacccatactcacccgaccccatccgggccgacacagcaaaccacactcacgaagaaaccccaagacacccgcccccaatggaccgcgaccccaggggccccgccagctatatacggggggccacaacccggaccgacagagccacccccacccgcatgggccccca

SEQ ID NO: 11836 - DNA, 605 bp, Oryza sativa
  Clone ID: uC-osflcyp110a03a1
gctgaaaatctgcacttatttagccaaaacgatgtagaaaagatccatggttctttaaatccacacaagctcttttacaataaggtcacaagccctgatggccattcgaaaatctaaatagttgtacatactgcttaattttgaaagataggattgaggaaacaaagttcttgtgaaaactttgaccactagagtaatcgatttgccagaaacagcttaaaacagcaagtttataagtgcgaagcaggaacacgtagaatcatctggccacagtaaaatagttataagcatcctaatgacccatgtaatttcttcctgggcctcctggtggagtactgccatacccaccaccacccccatagccgcccaaataaccaccagcaccaggcatcccaggcaaaccactactacccagtcctgcagaagcccctgggttaggcaaccctgaaccatttgcaccaactcccaggatgttgttcagacccaaccctccaccctgggaggcaaggatagctgtcaaggcctgccccagagcaggattcacccctgggccaccagctacacctggccatgaagtcaaactggatactggagatggcatcaca

SEQ ID NO: 11837 - DNA, 490 bp, Oryza sativa
  Clone ID: uC-osflcyp110a05a1
atgttaccttgcaaatagaggattttataatgcacagttatgggcagaatatacacatttcctaccatcatacgttattttcaatcaaaaagaaaaataataaaacatgagaaagaaagaaattgcaagaagaaactaaagagaaaaataaacaattaatcgagcagctatatagcttctagatatatctatatatattagtagtatataagtaacactatatgtagactatagtatgcactagatagtagtagttgctatgaactgtagcatcgtagcaaccaggccagcgtcctggcgctgtcattgctctgagaagacgatttcttctcccagtttgcagcgattcccttcttgttttcctcatgctgcttcttgtgttgcttcctcttcttcttggtgtgcaccatcgtccctctcactgtcacctccttcttcccaaaatccaccatgtaatctagcaacccgttcatcttggagacaacctttg

SEQ ID NO: 11838 - DNA, 497 bp, Oryza sativa
  Clone ID: uC-osflcyp110a06a1
aagaactgactcttaaacacttcaaatgaaatgagtcataaggacaggattgagattctgggagaactatcaatctctaactcgcattctttttacagagttgatgataacagatcacacttatttgtagttgatagaaagaatcaccagctgctattggacgacattttacaaccactgccaaaagctacatacaccgcgacacaattttgccgaagcattttagaaacaaactagctcgatcttatgtagtcatcatataccttgtagttcttttgtttctcttgtggagttctttgtctgcttctctcctcaacatgacaattgggtcatggacgtgaaattttccttttttatggttagttaaaagttatccttcgctcgtcgaacaacttcaagaacgcgtgcatcatcaaaatggtctgggatggacagggtattctttatctctggacttgaggtcctcagaaaaggattgcactgcttctctctcccaa

SEQ ID NO: 11839 - DNA, 474 bp, Oryza sativa
  Clone ID: uC-osflcyp110a07a1
tttttgtggttatgaatcgaatagtgtattagaaaatcaatatatcgtcaagacctatatagtatgtagcagatatgattccagtaaaataagaacatgagtagatgtagctcagcaagcaaaaatgcagcacattggctttttctctggttctgacgcagctagttgcagtaccaattttccaccacccatccaaccacaacaataagatcacgtaaattaacaagacctgctgctgtacatcagcatatcggcaaaggaagttttagtaaacatatagccggcaacatttcaacgattcgctaaaagggcaagacaggagatattggaagccctaatctgcatgagaatggttgtaacatattggaagatgatgctaacgagatgctgcaccctcaaaacctccacggttggatggacctaccataaaccaatactcagtgcccaaaaccagcaaataagagtcctagcaat

SEQ ID NO: 11840 - DNA, 544 bp, Oryza sativa
  Clone ID: uC-osflcyp110a08a1
ggtattgaagggagtagcatatggtattgtatgattgtatatgtactactaatctaatcatcttaggcaggagaagaagcattcaaccaccagccagccagccagccagccaaacacaaacaagctcacatgcagtgcagggaaggcaatgcaagcctgtgtgctgtacccagctcactcactgctgagctggcacacacacatacatacaccaacacatacagtacataccaaagaaaattcccttctcaagaatctcaaaaaaaccagccccaattggcttctcaccccaccttttccttgatcttttcttgcttgtaacacatcactgacaaacttaatatcacacaggtgcatggactagagagagaggaagagagagagagagaggaggcaaaaaaggttaagagaaaaaaaaacaggttgcaaaagtacccacatctcccttaagtagatacacccaaaccctgtgcaggcagtagcagtttgtgtttgcagcatcagcagcaatctcaccacaggatttttacacaaggggaaaact

SEQ ID NO: 11841 - DNA, 437 bp, Oryza sativa
  Clone ID: uC-osflcyp110a09a1
gggcctgtagaaaattgaaaaagcttatattacccaccaacttagatagaattagggcacaggctcagatggaaatttgataaccatgagacttgaccgagccgctaactgaagaacaaattgagagaagaagcactgtgtcttgggactttcaggatcgaacagtagaactgatactaggcccaaagagcaataaatccttggctctgaacttagctagatcgtagcgaaatcaaggatttggggaggttagggtaaagaaaacggcctatggaccttaagcaatttcatcctgggcctactggaggcgagctgtcgtacccaccgccccgcggtgggacggcaaataaccaccagcaccaggcatcccaggcaaaccactactacccagtcctgcagaagcccctgggttaggcaaccctgaaccatttgcacca

SEQ ID NO: 11842 - DNA, 356 bp, Oryza sativa
  Clone ID: uC-osflcyp110a10a1
atattgcacagttatgggcagaatatacacatttcctaccatcatatcgttagtattcaattcataaaatgaaaaaatataaaacatgagaaagaaagaaattgcaagaagaaactaaagagaaaaataaacaattaatcgagcagctatatagctcctagaaatatctatatatattaggagtatataagtaacactatatgtagactataggaagcactagatagtaggagaggctaagaactgtaacatcgtagcaaccaggccagcgggctggcgctgtcattgctctgagaagacgattttttttcccagtttgcagcgattcccttcttgttgccctcaagctgattttt

SEQ ID NO: 11843 - DNA, 322 bp, Oryza sativa
  Clone ID: uC-osflcyp110a11a1
tttttgtatgtttacctggctaagggaggactctattaaagcacagagtatgggctagaacaaacaaacaacctacacttgtacgaggtctacaatcgagaataattttcatcaaacgtgagaaagaaagaaatttgatgcacagaaatctaacgagaaaagtgctctattgatcataacacctgtgtagcttctttatttatacaatagaacaacaagaggctattaattacagctttatgcttactaataaaacgcccttgatactggaggtcagctaataactgggacatcggaatcaaccagggccatgagccctgga

SEQ ID NO: 11844 - DNA, 321 bp, Oryza sativa
  Clone ID: uC-osflcyp110b01a1
aatatataatttataattaaaatattttgtataaaatataaaataattatgataaaaataaaaaaaaaaaaaaaaagaaaaaaaaaaaacaaaaaacaaaaaagaaaaaaaaaaagaaaacaaaaaaaaaaaaaaaaaaaaaaacaccggaaaaaaaaagaaaaaaaaagaagataaaaaacaaaaaaaaaagaagaagaagtaaaaaaaaaaaaagcacagaaaaaaaaaatgagaaacgttaaataaaagaataaagggaaggggaaagaaccaaaccaagagaaaaaaaaaaaaaccccagaaagaggggggggaaaa

SEQ ID NO: 11845 - DNA, 539 bp, Oryza sativa
  Clone ID: uC-osflcyp110b02a1
ggttcactctactatttatttgtgtaaacatccagatagtgcaacctaacaaacggaggcgcgcgaattcgccacggcatgctaagtcgaaacgtcaaaaaataaagaaattgtttgtttctacggatgtatctctaagcctgcctgtataggaaggatcggatcggagtaaggtctatcccctgagcatttgaagcacctgctgcagcgtgggagcaaatctggtgacgttgagcttgatatcctgctcaatccagtagtacttcatcccgaactgccacccttgcttgtgtatagattccgggtccctgatcgccgggtggtccttgccgtacttgtcgtagagcgtgctctcctcggcggcgatgctgtactcgacgtcgcgcagcctcatctccctggccggaccaccgtagaacaccatggatgggtgttccatgtggccccacggcaccacctgcagcatcaccgcgttggtgcggaggaaagaagaagttgtgagttccgccccgtgcgcgcccatgagcacgtcacatgag

SEQ ID NO: 11846 - DNA, 514 bp, Oryza sativa
  Clone ID: uC-osflcyp110b03a1
gaagatagtccacaacttcagagctcacatttcacaacagtggggcgccctagagactacacccgagtgccccactggtttattgtattattacctcaaatcagtcaacagtatctttaagcattacatgatcacacatatttacatacatgtatacaaagatgtacacatacaaaaacatttcgagccatgccccaccccgagggaaaaagaattgctgagcacacaaaactggctatctacatgaacatgattgatgagcaaaactagcctagggttagagcattattggaagctatacagatgccacggccacaacacgtgctagcgttggtaaactgccggatcagccgtccacaactccagtacaaagagaacacaagaacgtcttgtggaaacaactgaagcttcgtccgcatacaagcagttctccctcactcacttgttaccatgaacgggagatggcaactttgtgggatccaagatttccatgccttcagacttaattgggtcc

SEQ ID NO: 11847 - DNA, 463 bp, Oryza sativa
  Clone ID: uC-osflcyp110b04a1
gtgcctcgcacccaacagcatacactgcgttatattacttagctgaaataacaggatcttcggacgtcaaagacatgtttagcgcaccaggaacacagggggaacatccatcatttgtatttttggctaaccatatacaaaaagccaggtgcatgggcatcctcagttttctctgggttgcaaaggttagacggcctgtgcttcaggtaaagagttaaaacctctctgccgggacaaccaccggctgtggctccacacgcttcctctcagaaagataaggacccgtttaacccgcttcattcaactttgcaatgagttcagaaaggcttggctcatgacgaacatgggatgatgataatgccttgctgaacgccagacaacaatcatgccgtgcttccatgccaagttttgtcatctccatttaggggactgtaacacggctgattatgcgcaactttgaaca

SEQ ID NO: 11848 - DNA, 554 bp, Oryza sativa
  Clone ID: uC-osflcyp110b05a1
gaccccatacaaatacgaatgactttgcggaattaatgtatcggaataaatttgtttcaagtacagttggaacaaaatggttatattaagctaccaaaacactctatctggtctacaacaaaggcccacacaatatatgaagttacagaagtttcccagtcccacacccttgattccagtctttcgttgcagtagaacgcaccggtgaactgaacgatcgtaacattcatcgtaacattcctgttagacaccaaatcttcataaaatctctaggtatttggcaaaattgtgccctgttctttatcatgcagggttcctagccttttgtagatcactctgattgctccgcgacttcactatcttcattagttacaccaaattccttttggcaaggaacattcatctgctgctgtgatgagattattcccgctatcgctttcatggcggcagcagtcctgtcactactcaccccttcctcatcggatttatccacaggttcagctgtttaaatggactatcttcaccttgctgggtggaggcacaaaaaagggaat

SEQ ID NO: 11849 - DNA, 396 bp, Oryza sativa
  Clone ID: uC-osflcyp110b06a1
cgagttgtgcctttctttttcccaaaagaaaaaaaaggggctacggccccccctccccccaaaagaaagcccccagacccccccccccgggcgggccccgaagggggggcccccaaaaaggccggtgggggacccacaaccccgcccggggggggccccaaagcggggacccgggggggaaggccccccgggcaggccaacccccccccggggggggaaaaagacccccgccccccctgggggattgccccccccgggggggggcccccgggaaaccccccttggcaaggggggggggtccccccccccaaaagggggggctctggcaaccccggggccctggggggggggcccccacttcggcccgggggccagggggggggccccccccccccc

SEQ ID NO: 11850 - DNA, 466 bp, Oryza sativa
  Clone ID: uC-osflcyp110b07a1
tttttggtttactttactttttatttgtgtaaacattcatatagtgcaacctaacaaacggaggcgcgcgaattcgccacggcatgctaagtcgaaacgtcaaaaaataaagaaattgtttgtttctacggatgtatctctaagcctgcctgtataggaaggatcggatcggagtaaggtctatcccctgagcatttgaagcacctgctgcagcgtgggagcaaatctggtgacgttgagcttgatatcctgctcaatccagtagtacttcatcccgaactgccacccttgcttgagtatagattccgggtccctgatcgccgggtggtccttgccgtacttgtcgaagagcgtgctctcctcggcggcgatgctgtactcgacgtcgcgcagccttatctccctggccggaccaccgtagaacaccatggatgggtgttccatgtggccccacggcaccacctgc

SEQ ID NO: 11851 - DNA, 498 bp, Oryza sativa
  Clone ID: uC-osflcyp110b09a1
tttttgttttttttttttgagcgcagtaacaatccatttgttcttctctccagatcagaacaactgtattttatcgactaagctgcagaatgtttcacagatgtctgcaaggaaaactaactacagagagtttaaaacccgggtggttctgaagcagcaagcctacacaaaagggtacgtcctctaacatcccacctaaacaattttaatccattaacaccccacctataatatcatttttatccatgaactcttgaggtccaagaagcacattcattatcgctagatgcctcatccggctgtacctagcaacaagtgagtgccactccagcgattcgctgccatcgtccagcattgcgtcctgggagcgtaggatttttgcatccggcaagtacttgaggactgaataaccagcgggatcagaggtatcaaccatgaaaaccggagaaagtgaacgtcctctcacttgagcatggaaggtacatatgtagtacctat

SEQ ID NO: 11852 - DNA, 161 bp, Oryza sativa
  Clone ID: uC-osflcyp110b10a1
tttttggtttttgttcccatttgtgttctatttattttttttctaaaaagaaaacccaggggcgaacaccacgaccaacggggacagaatgcgagtaacaaaggcccaacatgcgcaatctgtaccacgggggaggcgtacacaataggaaaaggtgcggg

SEQ ID NO: 11853 - DNA, 357 bp, Oryza sativa
  Clone ID: uC-osflcyp110b11a1
tttttggttttttttttttttttgtttcttttttatttttttttttttatgtttttttttttttttggcaaaagaggagagggaaaattgcccccaaattgcccaaggggaaactttaggcgggccccaggacagggcctttctttaaatacacaaacaggggtggaccagcccggcacaaaagaaaggggccgagcctgccctaaaatcttaccaacaaaaagggcaaaagaaacccccaattacacaaaaatgggatacaccaaaacaaaataccttgaaacagggaaccgaaggatcgggccctgcaactaaaacggcaaaattgctaaccggttgaaaaaaaaggggaaaact

SEQ ID NO: 11854 - DNA, 457 bp, Oryza sativa
  Clone ID: uC-osflcyp110b12a1
tttttggtagcacaagacaagaggcaagctagcctctgtttattattattaccgttgatctcatgaagcggaaatgctcccaaggagcgccttacaaattaacaacagattatttaatgtacaacatagctgcgagcttctcgagttgaccgtgagttcacaacagcttgaaagcttcagccggaacagctcagaccttggatggtggaggatcctgaataccgcatagcaaattcgcgggcacgggtacatcgatcatcttgggataggccaagttcaagttgtccataattttcttgaatggtcccttatcctttgttaggggggcattatacggaacctactcttcaacagtacttactgtgaaacctttgtagtcatggccaggataaaggagggtattctttggcaatgtgaatatctgcgaatgcaccgactcatacagttcaacagaact

SEQ ID NO: 11855 - DNA, 521 bp, Oryza sativa
  Clone ID: uC-osflcyp110c01a1
actccaaccaaaaaagaaataaagaagaaccataaaactatgaaagcagccgacagaaaatttaacggacactggaatgctttacacaatgtattatttctttgcccctttaaaattaaaagttacaacctggtggccatggcgacgcttacatctgccaccatggtctgtgacaacttatagcaggatttattatcaattgtgtacaggcatcaccattgcccgttggcatggcgatacagatgttctccattcaccctcccactccctaaattggtgtagttccccatttgctgtgaaaatccatttgggttaactccaaggttcactgctggatttgagaagttatgtagccaaggttttgaagtaatcgagtccatccttccattggaataagcatccaatgtggaattttgcccttctcttaacctattaaagagcattcagcctgtcataagccatcgggtagccctcgtcataagtatgatcgggcagtttaaccggcccagactactttatgg

SEQ ID NO: 11856 - DNA, 396 bp, Oryza sativa
  Clone ID: uC-osflcyp110c02a1
aaaaattaccgggcagtatatgatacatcaggcgcaaagggctccactgggtacactggttacatcattcaaccattactgaaaggggcaaataaaaacccccatcattcagtcatttgaagcaacagttcagcatattactgatagcaacaagcatgctacagaccattggccagaacactgaatacacaaactggggctcgaataaccatcccaggcattcattatgggctgacctgggggggtcgccaaggaatagcattatatctttgggaaagattggattttgattgggaactctaatatttttcagcagcactggcagcactcaaatcgacactgagatcaacagtctttccagggatcaggggttacatattaagaacgtttggcacc

SEQ ID NO: 11857 - DNA, 520 bp, Oryza sativa
  Clone ID: uC-osflcyp110c03a1
agcgctctcaaagtagcatatattattcaatcttgatgaaagagggacacaagccatcatctatagtgatggtgcctcttacaaacttcaacacacgggtaacaagcatacactcaagagtcaagaggtggctaggttttgtgtgtacaatggaacacgcaggcatgtacacaaccaagtatactccaccccaaactatagtctttgcaatggttttggcagttgctcagaaaccatgaatcttgatgtgttccttcttcacaatgccggcctgaacaagaaaatttgatacgttcttcctctgatcaccctgaagttgaatgacctggccaagctctgggtcctggacaacagtaccattgcagcaaaactctttcttgagatctttgaggatcttgttgtagctgaattccttcttcaatccctggacagtggtcaggctcttacggccattacgctgctggatgcgtacatgaacgtagtcctttgatcctgcagccgcaccagagtctccagcatt

SEQ ID NO: 11858 - DNA, 557 bp, Oryza sativa
  Clone ID: uC-osflcyp110c05a1
tttttggtttttttttttttttttttttttttttttttttttttttttttttttttttttttttttttttttttttttttttttttttttttaaaaacaaaaagggggccccacccccaatttcggggggggggggaaaaagggggggggccccccccctttacaggggaaaggccccaagcccccgcccccaaaaaaaagcccccgaccccccaaaccggggggggggccccaccccccgggggaaaggggcccggaattttaaggcggaaaaaaacaaaacggggggggtcaagggggggctagttggggaaaaaacccacaagggggggggacccctgaccccaaccccagggttgggggggggggggggggcccggttcaaaaaaatggggggggccaaaaaaaccccccccccctggggggggggggacccaaaaccccccccgggggggggcccccccccccccgggaacccggggggggggggggggggacccccgggggggggaacccggggggggccctagacccaaaatgttttgcccctggggccc

SEQ ID NO: 11859 - DNA, 422 bp, Oryza sativa
  Clone ID: uC-osflcyp110c06a1
tttttggggaatcacaatatattttccatcagccattactgatgattgttttatttgtctgctcggatgaattcttattcatcgatgtaaagcatccgatcagtggttatcagtgcaagcttgaagctagaacgagctattaggagttgaaaggcctctggttgtagcagtccaagttggcgccgtagctgacgcccaacatgtcgcagtagcgcttgtagaacccaatccggtcggcgactctgctgtccgcgccgtggccgcactccacgccgccgttgatgatgttggtcaccacgccgtagcccggcacgcgccccgccgcctggtcgttgccgttgggcgtccactgccctgtcatcaccgcgtggcacgacggcttgggcgactgcggcgtcatccagaaccagaacgccgttttg

SEQ ID NO: 11860 - DNA, 393 bp, Oryza sativa
  Clone ID: uC-osflcyp110c07a1
gttgttaagaataaccattattctttttgagaagcccccagaaaaatgagcggacacaggagggcggcgcccaaaggggtatcgctgtgcacaatattaaaccaaagctgcaagctggcggccaaggcgacccttacttgggccaccgtgggaagtgacaactaaaaaacggatagaaaaaagattgctgacaggcattggccaggaccgtgggcacggaaactggggggtgaaaaaccaaccctgccattcattaggggggggccgggggcgatcggcaaggaaaagccatatgggttagctacagggtggactgctggggggaacaagaaatgtatccaagggtccggggggatctgagaccgaccctgagagcaacaggcattccagggg

SEQ ID NO: 11861 - DNA, 338 bp, Oryza sativa
  Clone ID: uC-osflcyp110c08a1
agaaaaacacccaacagtatatggtgcaggagcctcaaagggccccaaagggaccactgttaacattactcaaccgagtcaggaggtggcaaagaaaagcccccatcatgcaacactctggagcgaccagctccaatattactgatagcaacaagtatgcttcagaccgttggccagaacactgaataaacaaactggggctgggagaaccatcccagcaatgccttacggaccaacctggggggttccccaaggaataggattatatttttgggaaaggacggggtcaagctgggaaccctgaaattctttaccagagccggcaaaccttaaattga

SEQ ID NO: 11862 - DNA, 537 bp, Oryza sativa
  Clone ID: uC-osflcyp110c09a1
agcgctctcaaagtagcatatattattcaatcttgatgaaagagggacacaagccatcatctatagtgatggtgcctcttacaaacttcaacacacgggtaacaagcatacactcaagagtcaagaggtggctaggttttgtgtgtacaatggaacacgcaggcatgtacacaaccaagtatactccaccccaaactatagtctttgcaatggttttggcagttgctcagaaaccatgaatcttgatgtgttccttcttcacaatgccggcctgaacaagaaaatttgatacgttcttcctctgatcaccctgaagttgaatgacctggccaagctctgggtcctggacaacagtaccattgcagcaaaactctttcttgagatctttgaggatcttgttgtagctgaattccttcttcaatccctggacagtggtcaggctcttacggccattacgctgctggatgcgtccatgaacgtagtcctttgatcctgcagccgcaccagagtctccagcattggcctcagcaaagggat

SEQ ID NO: 11863 - DNA, 157 bp, Oryza sativa
  Clone ID: uC-osflcyp110c10a1
ttttgggttttttttttttttccggtttttttgttttttttttaagtttatatataccgatagaaagaccgcacacgccccaaaaggtcacagacaaaaaagcacgagccaaaaacccgacagcaagggggggaaaaaacagggggggggacccccc

SEQ ID NO: 11864 - DNA, 445 bp, Oryza sativa
  Clone ID: uC-osflcyp110d01a1
tttttttttttttttttttttttttttttttttttttttatttatttttataattttaatataaaaaaaaaaaaaaaaaaaaaaaaaaaaaaaaaaaaaaaaaaaaaaaaaaaaaaaaaaaaaaaaaaaaaaagaaaaaaaaaaaaaaaaacaaattcagaaaaaaaaaagaaaaggaaaaaaaaaaaacaagagaaaaaaaaacaaaaaaaaaaaaaaaggaaaagaaggggggaaaaaaaaacaaaaaaaaagggaaaaaaaggaatgaaaaaaacaaagtgataaaaaaaagaaatgaggggaaaagagacaccaggaaaaaaaaaccagtgatgatacgaaaaaaaaccgaaaaaaaaaggggcaaaaaaaaccaggaaagtcacaaaaagaacgaaaggacgggtggaccgggaacagaaggaatggaaccatgaggaac

SEQ ID NO: 11865 - DNA, 532 bp, Oryza sativa
  Clone ID: uC-osflcyp110d02a1
gaaccaagtgatccaattattattcactaattaagcaaaaaaggaaataaaaacaagtacaaaattgtttgacaaaaaaaaaatcgagcacgctagcacgaggacaatgtacgtgtcacactctcctagaccttaatgttgaccaggcgctccgacgccaacgacgcggcgtccaccgtcatggcgcggacggtggcgttcgttcccagggacgggtggctcactgtcaggttgtagtcgccgtgtgggaggtcgagctcgacggcgccgtcggcgccggtcgtcgccgccgtcttgtgcgtcttccactcggcgatcagcttgtcgacgagggtcccaacgggcaggttcttgaagctgttgtccgtcaggcacatcacgtagcaacccttggcgtgccacgccgcccacattatcatcccgttcaccgacgggtgcgcgtacccttccctcagcacctgctccaagaacttcacctggttgggtcctttgacgacatcgacctcggtgagccacatgggaagcttgagct

SEQ ID NO: 11866 - DNA, 475 bp, Oryza sativa
  Clone ID: uC-osflcyp110d03a1
cattccgatagatagcaacaagcagttcaaacaccataaccaaagcgaactcaattcatggtaacatcacggacgaagaacacctaacactggatggatggatagagggcttctcgactcgagagagccactggacacgataacgactcgactcgatgataagatgattctgacacggatagctaaggataactggccacgatgggccccaccaatcagttcctccagttcccgccggagtcgccgccgtagccgccgccacggctgccaccgtagccgccgccgccgccgccacggccgccgccgtagccgccgccgccaccgtagccgccctcacggcgcccgtagccgccgccgccaccttctccgtagccgccgcctccacgaccgtcgtcgtagccgccaccgccgccgccgtagcccccgccttcgccgtcggaacggcgggactgggcctcattgacggtgatgttgc

SEQ ID NO: 11867 - DNA, 457 bp, Oryza sativa
  Clone ID: uC-osflcyp110d04a1
gttaaaaataaaatatgggcaaaagaaaactacataaaagtctatttatacaaaaatgactaacaatggacagacttgcaactctcctatctatagactggaacaagattacccttgaaagcctggctgacccattgaataggctccatataataaaaaaaaacaccatctatctttagtgcactccataaccgtttagaataagagcgttaaggtatgaccttccttgcttcagaacataattgctcaacatcattcccttgaatgggatggtgaataatgagctttactgaacctgaattaaggatgcctttcattccagaaggcatcagtttccctgtgccgagaagagtaataggtatcacaggagcaccgagttttgtagccacactgaatgcaaccttcttaaatgcacctagcttaccatcttcgcttctagtcccccttggaaagaaaa

SEQ ID NO: 11868 - DNA, 358 bp, Oryza sativa
  Clone ID: uC-osflcyp110d05a1
gatcaaggaaaaggctttggccaccctttcattaaacattatgcacggcacaatgcgtttgcacagttaaatggctatacgccgttggcagtttggcaccatttcattcgaggggatcacacaatggaccaccatttacttctttttatgctgctctaactaatgtattttgggaatccacttgtcaccctgtatgaagctggcgacgctgtatacgtcgacgtggtccctgggcacctggctggtccacccgatcctgctcccgatggcgccgtcgccgacggggccggggctctcgaactttccgtaatcgagcgttttgagcgcgaagttgccgttccacgccattcaccccggc

SEQ ID NO: 11869 - DNA, 424 bp, Oryza sativa
  Clone ID: uC-osflcyp110d06a1
aaataccaatctcaatgcatattaaaaaagttaattcaaaacgttagatagacagcctaagcttcacatggtcagagccacaacacacgtgcaaattttcagacatcttgtgcattccattctaggagtaggtgaccatttgagaagatagcagttggctgcttctaactcaactttctgacgaacatagacccttactggtattctcattgtagtcaagagcatgttccaagtattcatggaacataatgcagcagtacaagcacaagaacagtagtgctctttctgcatcaacaacgctgcgaaagagaattcttcatgtctttcacttcacaacgttgaatcacttggaatctatcactgactggttcccgttagcagaattgtcctccttcaaggaatttcttaggtacggcgagtcttt

SEQ ID NO: 11870 - DNA, 551 bp, Oryza sativa
  Clone ID: uC-osflcyp110d07a1
tttttggttttttttttttgaaccaagtgatccaattattattcactaattaagcaaaaaaggaaataaaaacaagtacaaaattgtttgacaaaaaaaaaatcgagcacgctagcacgaggacaatgtacgtgtcacactctcctagaccttaatgttgaccaggcgctccgacgccaacgacgcggcgtccaccgtcatggcgcggacggtggcgttcgttcccagggacgggtggctcactgtcaggttgtagtcgccgtgtgggaggtcgagcttgacggcgccgtcggcgccggtcgtcgccgccgtcttgtgcgtcttccactcggcgatcagcttgtcgacgagggtcccaacgggcaggttcttgaagctgttgtccgtcaggcacatcacgtagcaacccttggcgtgccacgccgcccacattatcatcccgttcaccgacgggtgcgcgtaccctttccttagcacctgttccaagaacttaacctgggtgggtcctttgacaacatcgacctcggtgagccacatgggaagcttgagct

SEQ ID NO: 11871 - DNA, 241 bp, Oryza sativa
  Clone ID: uC-osflcyp110d09a1
cagcgcagaaattttttggaaacaacctgagtacattatacgcctctgtcatatgccttcttagtcactggattgcagaacactcagatttttgctccgggacgcataagaataagagtgacaccacaaggggcgagcgggtaacgctttcaatttcacacggtggaactggcacaagctatgcaggcggttagtggttattaatgctgctcaggcttacggcactggtccgtgcttaatg

SEQ ID NO: 11872 - DNA, 479 bp, Oryza sativa
  Clone ID: uC-osflcyp110d10a1
aagataagttcttaggatctgttatatatttgtattgttaaaaataaaataggggcaaaagtaaactacatcagagtctatttttacaaatctgactaacaatggacagtcttgtatttcttctctcttcagtctgtaacaagcttagccttgaaagcctgtctgtgcctttgaataggttccatataataaaaaaaaacaccatctttctttagtgcactccataaccgtttagaataagagtgtcagctatcaccttccttgcttcagaacataatttctcagcatcattcccttcaattggatggtgaataatgagctttactgaacctgaattaaggatgccttccattccagaaggcatcagtttccctgtcccgagaagagtaataggtatcacaggagcaccggtctttgtagccacactgaatgcacctctcttaaatgcacctagctttccatctttgcttctagtcccc

SEQ ID NO: 11873 - DNA, 492 bp, Oryza sativa
  Clone ID: uC-osflcyp110d11a1
tttttggtttttttttttttttggtgattattgaatgggttttggtgttatttttattgaacataaagaaccgtacaatgcgggcgggcagaaaaaaggggaaaaaggcggggcagaatggccccaaaacccccccgggaaaaacacagggggggaaaatgaggggggccaaaggagccagaacaaggggggggggaaaaaacaggggaaaggggggggaaagacgggggaaaaaggggggaacaacccggcagagggccccaggaaaaaaagggggaggaagaacccgcgggggcggaggacaacggggccggaaaaaaagggcccgcagaaccaccggagaggggggccccccggaaacagggccccccaaggccgccgctgggggggcacccccgggggggggggggggcccctaaaatgggcccacggccccacaaaccccgggaaagggggggggggggggacccggcggggaaaaaggagggaaaa

SEQ ID NO: 11874 - DNA, 465 bp, Oryza sativa
  Clone ID: uC-osflcyp110d12a1
aaataccaatctcaatgcatattagaaaagttaattcagaacgttagatagacagcctaagcttcacatggtcagagccacaacacacgtgcaaattttcagacatcttgtgcattccattctaggagtaggtgaccatttgagaagatagtagttggctgcttctaactcaactttctgacgaacatagacccttactggtattctcattgtagtcaagagcatgttccaagtattcatggaacataatgcagcagtacaagcacaagaacagtagtgctctttctgcatcaacaacgctgcgaaagagaattcttcatgtctttcacttcacaacgttgaatcacttggaatctatcactgactggttcccgttagcagaattgtcctccttcaaggaatttcttaggtacggcgagtctttatacttggcgtataatggtaaattcagggccttatctgata

SEQ ID NO: 11875 - DNA, 454 bp, Oryza sativa
  Clone ID: uC-osflcyp110e01a1
gttgtgtcctgaatttttgctagtatatgcatataagtagatactactccactacagtacagaggagaggattgacattgactagctagtccacttaaccgtctccttactactatcagaagaagctaatttaattaagtggagtaaaagcaaaatgaggggtgggctgggctcattggtcgtcgttgtcgtcggtgacgaacttgccggttccggggttgatggcggcgaagaagaagaagaggatgttgaagaggaggagcggctcgatctcgttgatggggacgccggtctcgatgttgagctgcgccagcgcgcccttcccggtgatgatctcgccgatgagggagaaggcgatccccagctgcgcgaggcgacccacgaagagctcgttcgccttggtgaacccgaacagcgggccaccctcgctgagccccagcgccgcgcggaaccc

SEQ ID NO: 11876 - DNA, 569 bp, Oryza sativa
  Clone ID: uC-osflcyp110e02a1
ttcttcgcgtcctccacctcgtcggcggcgtcccccttcccggccgccgccgctggcgtggcccccttgtggttccggtagatcgcgtagaggatcagctgcatcaagcccagaaagctcccgcatccattggggatctgcacgtcgtacaacacaatgatgcaatttcgtcagttaaactctttgcgtgccattcgtgtgcacggctatagctgctactcctatactccctccgtctcatgaaaaataaatatgtggcatattctaatactacaaatctggatatatatatatatatatccagattcatagtaccacgaatttacgatgcgtcatatctggttctatattggtttttcatggaacgaagggagtacgtacgtacgcccaacatgtgcgcgccaagttggacgagacatcgaaaggataaccgacgccgccggccatttcgcggcattgagttgcaaacagcgttgcttgtgcggtgcagtgctgtgcttttgagcggtttgcatgtgcccattagacagtacgatcaatcgagatccaaacaaaaacacaaaaaggca

SEQ ID NO: 11877 - DNA, 494 bp, Oryza sativa
  Clone ID: uC-osflcyp110e03a1
tttttggttttttttttttttttttttttttttttttttttttatatttttttatataaaaaataaaaattaaaaaaaaaaaaataattatatttaaatttttttaaaaaaaaaaagggggaaccgggccaaaaggcaaaaaaaaaaaacagggaaacaaaaacgggggggggcccccccccccaaaaaagggaaaaaaaaagggggaggggggaaaaaaaaaaaaaaaaaaaaagggggaaccaagggcccccccgggaaaccccaaaaggggggggggggaaaacctggggaaaaaaaaaaaaccccccccggggaaaaaaaaaaaaatttccccccaaaaaaatgcccccccggggggggggaaaaaaagggggggggggccccccccccggggaaaaggggaaagggggccacaccccaaaggggggggggttattccggcggggggacccccgggggcccggggggccccaaatttacccggggggccc

SEQ ID NO: 11878 - DNA, 536 bp, Oryza sativa
  Clone ID: uC-osflcyp110e05a1
gcaatgctaacacagatataatacataatattatcaaaattgaggtgatatgaactatctctgcatcttcacaacctaccacaaacctcgtaacgtcaaagcacaagctacacagttgtacgggggcgcggggatgtaaataaaaaaaatccttaacttcgcttcgttgcctgctctggcttgaggcagggtcactaccaaaccaaacactaggcgatatgatgatgtacattggcaactcaaaaaaccctgacaggaaagcttttacatcttgtccgtaatgactgaacagatgaacttcgtttccttttactcagccgatcaacagatgttaccgcagccacttggaagagatgatagggcaacaaaaatcaaaactgcaatctcacggcgacgatccactagccattaatttgagggaagatttgtgatatcttcataaaaacatccatgacctctttgtcgttctggtattttacaatattgagcgggttttgtgagcaatccatgatcgctgtttgaatctttgggttctg

SEQ ID NO: 11879 - DNA, 533 bp, Oryza sativa
  Clone ID: uC-osflcyp110e06a1
gagtgaaatttgttgttataagtattagttaggagtgcattgagtttactaaaaagcttgcaagtttacaacgtacacccggcgataggacaagggatacatctgtgttacatccatctgattaattgaactgaccacctagctacatcgttgatcgttttgccatgagctgatcaagcctggaaccacgttaacgagctcgcaattaacagcttacttggcaggtgccctgggcatggtgcaatgtatgggagcttcttcctttggatgtcaacatctgtcacgtggatgaatcctgcaacattgctggaaactattacatcaggttccttagcatatgaaacaggcagcacggggtggaccatatctgtgctgaggttaacagcaacaagtcgagtagggtctgccacaggctctgcaccaatcggtagtgcatacttaggagcttgatgagtgccaatcttgtaaacagattcaattactgaagttaacaacattttgagtgggggtgtagatcattcgcaatgccataa

SEQ ID NO: 11880 - DNA, 230 bp, Oryza sativa
  Clone ID: uC-osflcyp110e07a1
agctgggcgctgaagttccgctagcctgtcgatataagtggatactactccactacagtacagaagataggatagagattgactagcttgaacactaaaccgcttccttactactatcagaagaagctgatttacaacacatgggagtaaaagcaaaatgaggggcgtctttgggctcaatggtcgtggatggcgatggctactaacttgatggttcctgggttgaagga

SEQ ID NO: 11881 - DNA, 338 bp, Oryza sativa
  Clone ID: uC-osflcyp110e08a1
ttttgatttttttttttttttttttttttcctgcacgagaaaatggcgtttaccccatgcgcttttattagatcatggggaggatcggatccattaagtccacaaagctacaaaatcccgaggggggcccacaggctgcaacacaaggatgtgattcatgacagcaggggtgggcgtgggccaccattgagcgcggcaaaagatggtgctggtatactccctaaaagccatgaaaaatgaatacgtgggcccacctcgtactacagatccgggggtatgggaaccgatgtttagaaaaatagaaccaccaatccacgaagaaaaaaaccgggctctcc

SEQ ID NO: 11882 - DNA, 585 bp, Oryza sativa
  Clone ID: uC-osflcyp110e09a1
ggcgcaagcccgcggaccgaagcctgggacccccagagggggcggcccttttttttttttggttttttttttttttttcgtttttccttttttttgttttttgtctcgtgtctttaattaatacaagaggaacacagcctgcccgcaactaaagggttacccgggaaaaaaagcgccaccgggcccaagggccggaaaaaaaacccgggaccccggacccggggggggccccccccccccccaaggggccccccccgggggggggggggcagaaaaaaaaaggccccccagggggaccccgggccccccccggggagcccttaccggggggggggggggaacccgggggaaaaaaaaacccccccccggggggaaaaaaacaaaaattccccccccccaaatggcccccccgggggggggggacaacgggggggggggcccccccccccgggaaagggggggggggggcccccccccccgggggggggggccttctcccggggggggcccccccgggcgccggggggcccccttttcccccgggggggccggggggggggaacccccggggccccccccggcggg

SEQ ID NO: 11883 - DNA, 311 bp, Oryza sativa
  Clone ID: uC-osflcyp110e10a1
ttttgggtttttcttttttttttattttcttttttgttgttaaagttctggaggtgggggcgggagccgcagagaaaccccgcaccgaggagctcaagcggctatgggcctacataaagaagcacaccctgcaggagcctggggacaaaaaggagatcgtgagtgatgagaagctgaaggtcctggttgagggacaagaacgaccagagaaaacggagggcgacaagatgatgaacacggactacgggaaaagaccggccccaaaagaggagacaagttagcctaaaaggctgaacaggagaacggagggg

SEQ ID NO: 11884 - DNA, 293 bp, Oryza sativa
  Clone ID: uC-osflcyp110e11a1
attaaaattgatgttatataaattatttttggattataacaaacaaccacatatttgaaaacgtataagcacaagctacacacagtacgggggggggggaagaaaaaaaaaaaaatgcaaaacaacgcaaagaagccggccaaggctagaggcagggccaccaccaaaccaaacactaggcgaaatgaaaaggaacaagggcaacgaaaaaaacccggaaaggaaagccaaaacaagaagaccgcaacgacggaacagaagaacgaagcaatcgttggacacaggcgaacaac

SEQ ID NO: 11885 - DNA, 370 bp, Oryza sativa
  Clone ID: uC-osflcyp110f01a1
ggggaggaaaattttaaaaaattttccttcgaaaatgggcagccggtccaaaaaccccaaaaaatttggtatagggaccccgtttatttaacttcccaggggaaaaaaaaaaaaggggtggaaaccccccaaaaccccccaaaatttaaatttaagccccccccccaaaaaagggggggccggggccctcccgggaaaaaaggaaccgtaacttaaaaattaggcccccgagccggggggggccaatgggttggggacgggcccaagataaagcttcttgaattttaaaaaaaaccaaaatccaaggggggaaaggtttggccccccccccaaaatggttaaaaaaacaatttccccccttgggggggga

SEQ ID NO: 11886 - DNA, 373 bp, Oryza sativa
  Clone ID: uC-osflcyp110f02a1
cttctcttctcaaccaaagagcactacaacactcaaacaagacaatattcttatttacattcagacaatgcataaacttgagaagatgctacacaatctaactggagcatctatcgatcaccaaaaaaaaaaaaagttaaaaccaccgatgacatacttacaggacataattggaaccggcaaaatgatcatcaactaccttttcatgcttttggttagacatgatatgctttatattttctccatggtcgggaaacctttctgaacttgggcaaacctcaatcagcttaaaggtgggattgagactacatggcgcgacattgcacaaccaacatgtacaaatttgtaacgttcgccgttcacatggaacctt

SEQ ID NO: 11887 - DNA, 394 bp, Oryza sativa
  Clone ID: uC-osflcyp110f03a1
ggaagatccctagttcactaccgtaaattaagtttcacttggtactactagtatcaatcaattttattacaggattgaatccgaaaggctaaaaatgcaacgtatgtacgtatgtgcggctcacaaacccttgctgcattgcagtaggtacgccgaggaggcatggacagcggagccgtatccttctttgacgacgaaatattcctcgcgctatggtttgatggctgggccgcggtgggccagcctcctgaaagagcgtccatttatgcccggggtctccatgatactcttccccagcggtggcagcgtacccttcgtggtccccgacacggccggcgacgtacagcccagcacccccgtggccaggctcactgccaccttaagcggccgcaac

SEQ ID NO: 11888 - DNA, 549 bp, Oryza sativa
  Clone ID: uC-osflcyp110f04a1
tttttgtttttttgataggattgtcattaatgcttttttcaagagcatggttgtagttatttagacctaaacttgtcacaacaacggggtaaaccataaaatacaccaaaaataataataactcatgttgattaatgaacttctaaaaaaaaaaacccccggcctctaactttgcctccatatattgaatcccacaagttagggtcattcaacccgaattttttgggatgaaaccaaacgttagaccttgagtcccaaaaataatgctactttcaagcatcagtgtgccttcaaggcgaacttccccccgcccctaaaccaagttctgaacaaaagcccaccccttggtcctgcgcggcaaactctaaccttgggggggcaaaaacccgtaggggcaagaggaactaaaaatcatccttttgtttttgaaaatctataaaaatgaagtctggttttgtttccccccaacaatggggggacccccacggagcccccccccttgtctccgggaccagtttaaccccctctggaaaatttttttccaaaata

SEQ ID NO: 11889 - DNA, 516 bp, Oryza sativa
  Clone ID: uC-osflcyp110f05a1
gggggaggcggggcagtcgacgaagcgctcgccggcggcgtccacgcagaagtagagctggtacagctggctgttgccggactcgtcgcggttgcactccacgaacggctcggcgccgacgccgcgctggatggcgcccttgatctgggacagcgtgtagtagccgccgtcgggcgacacgccgccgtcgcgcagcgcggcgagcacgggcagccgcgaccggaggcggagcgccgcctcgaagtagccgtgctcgtcgccgagcgccgccgcggcgcaggtgccgtgcttctcccactcgtgcgcccagaaccggatgccgtcgttgctcgggcacgccagcgtcggccactccgagcgcatgctccccagcaggtcgctcaccttggaggggtcgaactcgctgtcagggtcgcagttctgcgggtagctgccgtcggtcgggttgggccagagggccgggatgccgagtcgggcgccggcttgccggagcgcgggtagcagcagctttgcttc

SEQ ID NO: 11890 - DNA, 522 bp, Oryza sativa
  Clone ID: uC-osflcyp110f06a1
aagagccatcacggcgcatggaccccgaccggaaggctggaacccttttagggggccgccctttttttttttttgtgttcaaactctctttttgtaagtgactaattggttttacatttaacagggcacacaggttacaacaactagggttgtaagcccattaagccccaaacatcagatcaccacaagcaaatgtttcgatagacacacgcacacggcaacaggataactccacactggcagatcatgggataggagcagtgatcaatcaggccttggcacacagaacattaagcccccagacgacgacgactcctataggactcgtcaccatcatcgccatcctcattctcgggggactcagggccaacctacaagggggccttcaacaacggggagagaaacctaaagggcctcagagaactcaccctcctccatgccctcacccaaggaccaggggacgaaggcgcgcttggagtacatgagggcgaacctggggccgatgcgggagaacacctccac

SEQ ID NO: 11891 - DNA, 406 bp, Oryza sativa
  Clone ID: uC-osflcyp110f07a1
tttgatgtgagttctgtttttataggatgtttgacttgtatggtccggagcaccttcttcctgttgaattctctgagatttgggtctacaatgcccagagggttgatgttctagaacagctcccaggcccattcgaaaatgtaaatgttatctccttcaagtgtatcatcgtagttcggccgttcagctaatgcctgcaataagaccacgccgaatgcaaagacctcaactttctcagccatatgacctctcatggcatactcaggtgcaagataaccgaatgttccaccagctatcgagctgacatgcgttttcttgtcatcataaaggtcgagttagcccaaaatgtgagatctcaggattgagattggcgtcaagttaagacattgttggccttgatgtccct

SEQ ID NO: 11892 - DNA, 458 bp, Oryza sativa
  Clone ID: uC-osflcyp110f09a1
gcgaacaaaactttcgaactcttttttttctccttgttttctatttcatttcattccgatagatagcaacaagcagttcaaacaccataaccaaagcgaactcaattcatggtaacatcacggacgaagaacacctaacactggatggatggatagagggcttctcgactcgagagagccactggacacgataacgactcgactcgatgataagatgattctgacacggatagctaaggataactggccacgatgggccccaccaatcagttcctccagttcccgccggagtcgccgccgtagccgccgccacggctgccaccgtagccgccgccgccgccgccacggccgccgccgtagccgccgccgccaccgtagccgccctcacggcgcccgtagccgtcgacgccacctactccgtagccgtcgcctacacgaccgccgccgtagccgccacc

SEQ ID NO: 11893 - DNA, 417 bp, Oryza sativa
  Clone ID: uC-osflcyp110f10a1
ccacaaaaaaacaacccttgcaggcgggggaaaacgagggacccccccctctcctaaactgggtctaaattcccaggccccatcaaagaaacccccccccccccccaggcgggccctgcatttttttgggcaaccaccccgatggattggatttggatcccctggggataaaagaaaacctgaaaaagaaatttcgccaaccatgcaaccctaaaggggctggttgccctttcaacaaacttccgggcccccttgaccccccttttggccccggcctgccccttgaaaatgaccagcttgccctctttgacgggggccggaaccaggtggggcttgccccccttgtggccgcccgccgtccttgtaagccccggtacgctgaagaactgtttcccccccacccccggggccgggttt

SEQ ID NO: 11894 - DNA, 488 bp, Oryza sativa
  Clone ID: uC-osflcyp110f11a1
gaacaaacgcgcatattataagtgacgaagcggtctcacataaaacagggcacacaggttacaacaacgagggttgtaagcccattaagccccaaacatcagatcaccacaagcaaatgtctcgaagacacacgcacacggcaacaggataactccacactggcagatcatgggatagcagcagttatcaatcaggccttgacacacagaacatcaagcccccagacgacgacgactcctctagtactcgtcaccatcatcgccatcctcattctcgtcggactcagcgccaacctcctcgtagtccttctccaacgcggcgagatcctcacgggcctcagagaactcaccctcctccatgccctcacccacgtaccagtggacgaaggcgcgcttggagtacatgaggtcgaacttgtggtcgatgcgggagaacacctccacgacgctggtggaggttgaatcatgcacacggccctctgcacctt

SEQ ID NO: 11895 - DNA, 346 bp, Oryza sativa
  Clone ID: uC-osflcyp110f12a1
atattatgtggggggtcaccgttttgtcgaggtctttgtttgtgttttcggtgctgtatgcggtggtgggagccgtggagatcccccgtaccgaggtgctcaagcgcctttgggcctacaacaagcagaacaaccggaaggaaccggcgggcaagagggccaccgaaagggaagacaaggggaaggctcgggggctggccaagagcgcaaaggggggctggagggcgccaagggaaaggacccccaccccgagaggggactgcccgggtaaaaggcgccgagagagcaggggtggcaaagggtgaacaagaagggggcccaaaaaagagggaatgtaggaaagagg

SEQ ID NO: 11896 - DNA, 328 bp, Oryza sativa
  Clone ID: uC-osflcyp110g01a1
ggacaagcaccaagtatgttttttcagccatttttaaaactgctacaagggggcgcgaggaacacataactcggggggtttgtgacacttcacactaactggagtgtcgtgaacgaggtaagaacaaaacaggcagtggcggacctaccctcttcatttccacggaaattttacccatttggaatccatggaaaccgagccttccctcccggcgaacaggggccaccgtggtccgaggagaaaaatggtcattgggggcttataatacctatcgcatcccggcggccttgaagggggcgagcagattgtcctggcgggtgttgaggag

SEQ ID NO: 11897 - DNA, 237 bp, Oryza sativa
  Clone ID: uC-osflcyp110g02a1
gacacaaaacaatggaggctttatagtatttcaaaagaaaatttcaacatggccattttgtgggggaaaaacgagggcacaaacttgattggaactaaagactgaataatgggaaccaatgaaaaaacttatttgcaattcttagctggaatataaaaggtttccacgcgaggcgctggcaaacaagagcacatagcagcactttcatgatgaggaatcaatgaacagcttagatcc

SEQ ID NO: 11898 - DNA, 537 bp, Oryza sativa
  Clone ID: uC-osflcyp110g03a1
gactgaacacaggcagcaaatccacacaagattaatatcgttgcacaagaggttgatagagcattacatatttagatgaggcacacaaccaaagaagcagcagcagctgaccaaagtttagacccatacatagggcaaccagtcattgcatacaagatgatactagtggattatggcagcttctctttttctcttctgattgagcagagagatgccaccgccattatttcttgaggtgagggaagcacgcggtgaggtcgctcttcggatgcttcgcctcagcatgctctttgcacttggtctcagaggtggtgcagatgaaagtctgcatgcatatcttgcactggatgttcatggccttcttgttggcctcaagctggctccccttggcgcccttgttcttctccatgttcctctccctcgccatcttcgacttctgcccattgccgccgcccatctcgtcgacctcgaccttcctctcccccttcgccgcaacaagagaagagaagagaagaaaagaaaacgagttttttttcc

SEQ ID NO: 11899 - DNA, 435 bp, Oryza sativa
  Clone ID: uC-osflcyp110g05a1
tcgtgatctagaaatcgcgacggtcgcccttattgtttcttcttttttattatcccttttttatttaaccacaggaacccaacttagggggcaccttccaaaagtgacaactataaagactatttggtaaatataaaggaacctataagggaaagacaggcctttcccctcgaaaaaaaattatcacattgaatctgtttcccggcaatgagctagtcacttactcttggactctggacgaggattatatggcactcaaaagaacagcatgtgaccggcccaaaaaaaacacccctaccagcaactccctgctctgctgcaccaggggttaaaacacttttcaccgggagcagctaccaaaaaaactgccgctcttgttatcccctccttgaatatgcatagtacatgtacaagctgttccaagcggctgacccc

SEQ ID NO: 11900 - DNA, 496 bp, Oryza sativa
  Clone ID: uC-osflcyp110g06a1
ggacaagagcatgtttgacgcctcgcattatcgcatatagcggatgaaaaaacgtcaggccagcctgcgcgacaacgtctagttacagataagagcagaactgcaagtcaaatacactcttttctctccatagtagagtttgagcagcgagcgggcaaacataaattattcaattattaaatgatatgatcactcttgatcatctcaacactataggaacaaaacttcgctaccgcgattttactattttagttgtccacaacttcaatgagggttggttcgtagtcagcaggagcctcgaaaccatggaagttcattacggttgcagcaacattggcgagcccaggggtctgaatgtcagaccggaatttcacaccagggtgaagaccgggacctccaatagcaaccgggaccggctgaagagtatgtgaggtaagaatctggttaccaccgttcttgtcgagaagtggctggccagatttgtttctttttacca

SEQ ID NO: 11901 - DNA, 449 bp, Oryza sativa
  Clone ID: uC-osflcyp110g07a1
atatcaaacgctctagaaaagattcatgtgatgaaatacatgatgaaccacgtatgttctcaaggtaaaattaattaatgcagtatagttttaactttgtccatcgatctcaacctgtaactgtgacgacacactggctacagtgccctcgaggtactagcagtatagcagtagctgtagtacgtagcagcagcagcagcaggttcactgtcttgattggattggatcggattagtagacgtagttcttgacgaacatgccctccttggcctcggcggcctagccgtcgctggtgtacttgccgagctgcgccagcgagttggccttggcgcggaggagcagcgcgtcctgcgccgccttcacgttctccggctgcccgccccacgtcttgaggcacgtgttctgcagcgccctcgcgtacgagaacgacacgtgccacgggttgggcc

SEQ ID NO: 11902 - DNA, 353 bp, Oryza sativa
  Clone ID: uC-osflcyp110g08a1
aactaacataagatagtcattaattaagccgagatagttcagtgcttgaagattacatgccggatttttttttgggggttttagagtggtttagactgaatttcaccacaggatgaccccgagggtccagggacaacacgtgcatactttacattcagtttctttagtggcgaagtgcgagagctagctaataacggggcgaactaaccaacacaagcatatttttggattgagggacacacgcccgcacccacctaccgttggatgctgtgactacaaaagatgttcatggtggcgagccgacctggcgccattagaagtttagctgattgtcatttcatgggctttgactg

SEQ ID NO: 11903 - DNA, 396 bp, Oryza sativa
  Clone ID: uC-osflcyp110g09a1
tttttgtgtttgttcacatgttgttttttttcacatgattaatatttgttgtacaagaggttgtttgagcattacatatttagatgaggcacacaaccaatgaagcagcagcagctgaccaaaggttagacccatacatagggcaaccaggcattgcatacaagatgatactagtggaaaatggcagccccactaattctcttctgattgagcagagagatgccaccgccattatttcttgaggagagggaagcacgcggagaggtcgctcttcggatgctgggactgagcaagctctctgaacttggtctcagaggtggagcagatgaaaggctgcatgcatatcttgcactggaagcacatggccttcttgttggacacaagctggctcccctt

SEQ ID NO: 11904 - DNA, 397 bp, Oryza sativa
  Clone ID: uC-osflcyp110g10a1
caacatgaatacaacggaagatcatccccttatcatctaaccacagattcccaacagttcttgttccttccaaatgtcgaactagaaatcttatcttttaaatctaaatgaacctataagggaaagacaggcctttcccctcgaaaaaaaataatcagaatcaagctgcttcccgggaatgatcgagtcacttcctcttggactctggacagctctatatggcactcaaaagaacagcatgtgaccggcccaaaaaaaacaccactaccagcaactccctgctctgctgcaccaggggttaaaacacttctcaccgggagcagctaccaaaaatactgtcgctcttcttatcccctccttgtttatgcatagtacatgtacaagctgttcgcagcgg

SEQ ID NO: 11905 - DNA, 390 bp, Oryza sativa
  Clone ID: uC-osflcyp110g11a1
tttttgtttttttattttttttttttttttttttttttattttattttttgtttgaaaaaactttagggaacccaaagcgacaacgactaattacaaataaaaccagaactgacctgaaggggcactcaaatttattcacaagagacaaagaggggccagcgggcaaacataaacaatgcaattattaaatgagatgaccactcccgagcaccccaacactataagagcaaaacaccggtacaggaacctaactataaaagaagaccacagctccaaggacgggtgacccgtaacaagaaagagcctcgaaaccatgggaagaaaattacggaggaaagaacataggcaaggccgccgggatgaaagtcagaccgggaagggacaccagg

SEQ ID NO: 11906 - DNA, 436 bp, Oryza sativa
  Clone ID: uC-osflcyp110h01a1
agaaaaaccaaaacataggggggttaatttcttcttctcaaaggagggggacatatttccttcttttaccattacataagcttaagcaataaccgataacaaagcctcctcctcctttagggaaaatattcaaacacaatacccttataaggccttattattaggaaaggtgcgggcatgggcataaatgggaccggggggcctggtaaaaatcacaagggtgcgcagcggggaaacaaaacaccataatgggacagagcaaaaacctcctaaagggagcttttaggcagaaggcttttcccacttggggggctttaccacctcccaggggaagtctggggcgccccttccgaagggaccccaagccgccggcttgagggaacggcccttgccaccttttttgagggcaagggtgatgaacaacatgcccggcctg

SEQ ID NO: 11907 - DNA, 426 bp, Oryza sativa
  Clone ID: uC-osflcyp110h02a1
ttttggggtttttttttgttttgggtttttgtttgtgtttttattgttggggtgaaaggggggaaaggtaaagaaaaaaagccttgaagagagggggacccactcgctcccagggggggaaaaaaaaggggggaaaaaataaaaaaacccgggcccccagggggggggggggccggggcccaggaggggaccccccgggggagggggacccccccaagggggggggggaaccccccaaaaaggggcggccccagaagaaaaagggcaccgggggacccggaggaaaggggggccccggaaaaggggggggggggcccccaaaaaaacccgggcccggggcccggggggcacccgggaatagggggccggaaccccaagggggaaaaaggggcacaaaggggggggggaccaggggggggcaaaaag

SEQ ID NO: 11908 - DNA, 417 bp, Oryza sativa
  Clone ID: uC-osflcyp110h03a1
tttttggtttttttttttttttttgacagcttcttaataatttttttttattttaccgagggtaatgtatggtaggaaaaacgccagacaaaacagagccggccagactcaacttaaactcaaccctatgatggtaaactgtttgcgaataacgcctccgcctatgacaatgtttggagataaacgcttccaccaaaaaacgaatgtcggggagggttctcccctacaagaattattattggtttcaaaggtaaaaaggcaaaattcaccagatcccgctagggcaggaccaggaataaacacttggtcggcatcaatttctgccagtttaggcaccgcccgagccggacttttttccaaagaagaggaactgcagctggtcatagcctgggagcacaccagcaccagcaatggcac

SEQ ID NO: 11909 - DNA, 418 bp, Oryza sativa
  Clone ID: uC-osflcyp110h04a1
ggttcccttattaggcatttgagcaaattggaataaaccgaacatatgtgtacaaactcacatgcgagaaccacaggtagcaacaggccttacagtttttgaacagaagaaattgatcgcagaacggccggatgaacactttgcccacactagggaagaaccaggctcgaaaggagagacacatgccggaggacggccataacagctcctattggtttagcattattggacccggagaatgagaagcatttcctggggacaagtggaaggcccagaataatcggactcggtctttggcatccacatctgttggaacgggctgagagaagacacgatggatcctccagtgcagagactggccttacttgtaggaggagcgcccaccttgacctttatgccgctaggagccaaggcagtg

SEQ ID NO: 11910 - DNA, 460 bp, Oryza sativa
  Clone ID: uC-osflcyp110h05a1
actgttaaaacgcgcacgttgtaactgcccgtgcgaaacatggaagttggttattaactggtcgaaatggttacagagtgacgcaacctttggtttcgggagtgccagagacactgaaactaattaaccaaagaagttccacgggcagagacctctcactttgtagtttactgactggcttgggtctatgatacaacaccggcgcaggcaatacaacgcgatcaacataaggccgttgaaacaacataacggcggtacaaatgaatgaaatacttgccaacacaagcaaccaaggagaaacaatgatctgagaaatttgaacggtaacagaatggacattttaagcggacccaaactctgtctgccaattatagtgcttttctatatcagcgggagattcactattctgaaccttggtcagggcttcctcaaagtgacacatggccactgggttttttgg

SEQ ID NO: 11911 - DNA, 167 bp, Oryza sativa
  Clone ID: uC-osflcyp110h06a1
ttttgtttatttaaagcacggacttatttccctaattagccttgattttatggtcaaaaacaatacatgatccatggatcaaaaacaataataatactcattaatgccattatatgaacattgtacaagctgctggagcagcatcaaccaaccaacaataccaagac

SEQ ID NO: 11912 - DNA, 512 bp, Oryza sativa
  Clone ID: uC-osflcyp110h07a1
gatcccaaatgttctcattgattgatagcgatatcatagaagcagccgacacgaattaagatttaaaaccaaccccaagaaggatcgcagatccaactccaccgaatcgatccaagaactccgcctaatccaaccaaaccatgggcgatctcatctcaccaacacgacacgaactcataaaaagactaacaccaccaccacctcctacttatttagggactcgacgactcaagacgactgatactggcgaaaggcgaaggggaacagcacagatctaggagagctggccgcagtcggcgatgacgaccggcttggcggtgctcccgccgcgggatcccaccttctcgatgggcttgacgacgttcatgccctagacgacgcggccgaacacgacgtgcttcccgtccagccagctgcagggcacggtgcagatgaagaactgtgacccgatagtgttgggcccggcgttcgccatggacaggatgccggtgctgtcgtgcttgacttgaaca

SEQ ID NO: 11913 - DNA, 405 bp, Oryza sativa
  Clone ID: uC-osflcyp110h09a1
gacagcaactcaataatctttcgatatttcaccgagggtaatgtatggtaggaaaatcgccagacataacagagccggccagactcaactcaaactcaaccctatgatggtaaactgtttgcgattaacgcctccgcctatgacaatgtttggagataaacgcttccaccaaaaaacgaatgtcggggagtgttctcccctacaagaattattattgctttcaatgttaaaaaggcaaaattcaccagatcccgttagtgcaggaccaggaataaacacttgttcgtcatcattttctgccagtttaggcaccgcccgagccggactttttttcaaagaagagggatcggcagttggtcatagcctgagagcacaccagcaccagcaatggcacgtaggatgttg

SEQ ID NO: 11914 - DNA, 440 bp, Oryza sativa
  Clone ID: uC-osflcyp110h10a1
aggggaattcaaacaagttttactgctagcattttcttcattacaggatacagggctacatccgaaacaagcagattcctaacaagacaaacacaatgcaaaaggctcctagccgccgaagccgtaaagggtgcggccctggcgcttgagggcgtaaaccacgtccatggcggtgacggtcttgcggcgggcgtgctcggtgtaggtgacggcgtcgcggatgaccttctcgaggaagatcttgagcaccccgcgggtctcctcgtagatgagccccgagatgcgctttaacccgccccttcttgccagcctccggatcgccggcttcgagatcccctggatgttgtcgcggagcaccttccggtgccgattcgccccgcccttgccgagacccttcccttccttgccgggccccgacatctacgacgatggaattgggg

SEQ ID NO: 11915 - DNA, 481 bp, Oryza sativa
  Clone ID: uC-osflcyp110h11a1
aattaatacactgtattattttgtaatcagccttgttcttatggtcaaaaacaatacatcatctatgtataataataataataatattattaatgccattttatgaacattgcacaagctgctgcagcagcatcaaccaaccaacaaaccaaactataaacttcctctgctccatttctgcctccattttcatggacagcaacatcatatctctgcatttttttttcaccggttgtgtgactgaaaatagagaaaacgtcggcgttggccttagctgcttttgggcgcatcggcggcggcggcggcgacggcgtcggggatgccggcggcgagcctggctctcaagtccttcctgaagatcttgccggaagggttcttggggatggaatcggtgaagaacaccttgttgatcctcttgtagaacaccacctcttttgcaacgaatttcttgatctcatcctcggtgatttttgagccttct

SEQ ID NO: 11916 - DNA, 367 bp, Oryza sativa
  Clone ID: uC-osflcyp110h12a1
gacgtaagcaatcttggccaagcatttggatattcagcacttatgtaggatgtatggcccaatggacaaataggtgagaagcccggctatactaaagctaccaaaacatttccagccttaattgaggcctcatcaggaactaaaccggacactacaccaccctatacctaaactttgtttcaacatgaccggaggacgtttccttttaaaacatggaaaccgggtatgtcgagcttgcaactattagccttctgactggagcagggacacatgcaaagccgaacaaggaatggacgcgttttctgagaggaggagctgattagggttaaagcagaaaaccgttcaaacaaatctaaaacaaggcctc

SEQ ID NO: 11917 - DNA, 405 bp, Oryza sativa
  Clone ID: uC-osflcyp111a01a1
tttttggttttttttttttttggagttctcaagagtgactattcacttgattattacaaggatatagtgctctcaatactaggcttctttacagtgaactcagggccggatcaggtagtatattgtagatacagctcatagaagggaagcagccatgtcaaacagcacaaggcccaggggtcatcttctgcctcctctcatctaagtctagggtatgaacaaaagccggcaagcaacagcgaccggtgtaccacgccttcttcttgcgattcttcgcttctctgatcggcgtcggttctgtgctacacgtggagctggactcagatactggcttcacagctgcagaaataggctggaattgctgcttctcattcttgctgatgtctggaacagatgcatcggtgc

SEQ ID NO: 11918 - DNA, 363 bp, Oryza sativa
  Clone ID: uC-osflcyp111a02a1
ggggcaccaaagaccgggccccccaaaaaaaaaatttttccctgggaaacggccaaaaaaaagggggaaaaaaaaatttcaggggggggaaaccctttcgagaaaaacaaaggggggggggggaaaaccaaatttttaaaaaaaattttggacccccaaagcaaagctgggacagggggggaatttttacaggaacagggttcctttggggggggaaaaccaaacccctggaagggggggaacatttagcaaaaagaaacctctccgttttgacggggaaaaaacaaaccctactttttattggttttaaagggtgaaaggggggctccccaacaaaatgaatcgggaacccgagggtttttt

SEQ ID NO: 11919 - DNA, 408 bp, Oryza sativa
  Clone ID: uC-osflcyp111a03a1
gcatgggattttaacattcagtagactattaggatcagcatgtgatcataaaatggtcggcccagtaacaagggagcaaaagatacataactttagctggaaacttgggatataaggaaatattcaaacaatacattcgcacagcctccagtagcaccatttattcctcctcctcggcctcctccagccatttaacaaaaggttccagtgctttgacgaaagattgcctgccctttgggtttgaacccttgcggaaccaaaggaggatggtatcttcagctaggacatcttggtcatacagcgttctgattatttcaggaaatagcttcatcagcttagcatcctcatagcactgtgtctgaactttgtatatgagttcgagttcaagcctgccacttgtgcagaatg

SEQ ID NO: 11920 - DNA, 309 bp, Oryza sativa
  Clone ID: uC-osflcyp111a06a1
tttgggttttttttttttttttgttttttttttttttttccaaaaaagttgtctgaaaccttttttggcccggtctgggggagaaggaaaatgctggcactctcattatacaagcctggtactgaaaacacgattccatgggctcaactctcaagggaaggggtcacatgaaacctagaggtaaccccccttggtagggcaaaacaaggtcaaattttggccaagcagcattaagtcccgttgcggggccagaccgtgagacaacgcaggataaggtcaggggcccaaagattttccataataacctga

SEQ ID NO: 11921 - DNA, 414 bp, Oryza sativa
  Clone ID: uC-osflcyp111a07a1
aagaaaagcacgaattccaacgggtccacatcgagcttacaaataaaggacatgcaatgcctggcctgtattttcaatcataaccagcccatggaaaacgctaatacagcgatactaataatgggctgcaaatacaggaaggggttgaaaggtgctaattaactagtaaataagtcacggaagcaatggagcgcacataaactgggtccactgggtactttagctcgacacattttgacatacgcagccctaatcttatgattccacatagcaattgatcctagtacattttatgatccagtaatacagcaggtagctgagtaaatggactcagaaatagacttcaggacagattagtggccctctccttcaggcttcgctggttccttgatctcgtcaccaccatccttcgca

SEQ ID NO: 11922 - DNA, 496 bp, Oryza sativa
  Clone ID: uC-osflcyp111a08a1
atgtgcgacgcaattgctcgaatcacttatgttttgtacggttcagtgcattgtacagacggcaagtaggttctccaatcttattagtgctttcgacaattttttccacgataagaaatgaaataatggtactataagggtctcgtctgtcaaacggacggagcagactgcgaaacagtgctgctctttgtaagaaccgaactctgctgttggagggatgagtgcacacgctcgacgcgctccagatacagtgaggtctgcatttctatgagacgggatatcgccctacggaatgcaaacatctcttcttggccagacaaaattgccactaggcctgtaggagaaggcgctgcaccaacattaccttctgctaaaacatccctcctaagctttgccccttcagcttcaccttcgaactgaaaactctccaagtcaaaaagaggtccttcatcagttccttgaaaagatcatcaatggatgaggcagctagacatac

SEQ ID NO: 11923 - DNA, 384 bp, Oryza sativa
  Clone ID: uC-osflcyp111a09a1
cttgggtaggaggaaccaagaccaagttttgcccttcccccatcaatgtcgtgtctgcaggacttattcaccttcaatgtctttgcaatctctttcagggcctctgctgtcgctttcttccatatatacatcctacatgaacatatggacgagggacgaccttccgcacgtgcaaatcagaacaaggttaaagaaacccctagccaaattgacaaatgaacaacagctgcttccatgtccaatgattgttcacacccaaacaacctggagttatgtgcattttctgaactacaaatttgttcagtcatattcaatggcccctggtggttcttggcttatgggcaccacccatcttggttggtttttgggctttatttttcatgc

SEQ ID NO: 11924 - DNA, 393 bp, Oryza sativa
  Clone ID: uC-osflcyp111a10a1
ttttttttttttttttttttttttttttttttttttttttttttttttttttttttttaataaaaagaaaattaaaaaaaaaaaaaaaaaaaaaaaaaaaaaaaaaaaaaaaaaaaggaaaaaaaaaaaaaaaaagaaaaaaaaagggagtaaaaggacataaaagaaaagggaaaaaattaagaaaaaggaaacgaaaaaaaagaaaaaaaaaccccgggcggaatggacaaaaaaacaaccaacggggccaatgttcagggaccacccaaaacaaaacaaccggggtaaaaaaaaaagcccggaaaaggaaaaggaaaaaaaaaaaaaaatgggaaaaggaaaaaaaaaagacatgggagcaaaaaaaaaagaggggaacctgagaatcat

SEQ ID NO: 11925 - DNA, 429 bp, Oryza sativa
  Clone ID: uC-osflcyp111a11a1
acacaaacaaaaaagttgtcttcaacttttcaagtacaagtggggaggagaatgcaaatgctgacactagaaatatacaagccgaggagtcgacaagtgattccatggtctcaactctcaaggtaagtggtcacatgaaaactagagttaacctcccttggtagtgtaaaacaaggtcgttttttgccgctccagcactactacccgttgtgtgaccagaccttaaaacaatgaaatctaagttcattccctcaaagatattacctaataacctgcaaaaacttgctttgctgggtaaccaaattattaaggcacattccactgatgaccactataagcctttgaggatcccagtagcaatttagcatccctgctttatcacctttctttcatatatatgcccaacagtgcttaccctttacagcccgg

SEQ ID NO: 11926 - DNA, 395 bp, Oryza sativa
  Clone ID: uC-osflcyp111b01a1
ttcttcgcgtcctccacctcgtcggcggcgtcccccttcccggccgccgccgctggcgtggcccccttgtggttccggtagatcgcgtagaggatcagctgcatcaagcccagaaagctcccgcatccattggggatcgcgatgaaagggtcgcggccgaccaggccgtaaatgaaccaggaggtgccgcacaggaacacggacagggagagcaggaacggcatgaactccacgctcttcgtcttgatcaccagcctcatgatggaaagggccaagcctacaagcaaatggagaaaatggtggcggcgaggccgcaaaagagcttgcggccctggccgtgcagggccaggagggagacgagcaccaccatggtgaagatggaggtgacgaggccc

SEQ ID NO: 11927 - DNA, 428 bp, Oryza sativa
  Clone ID: uC-osflcyp111b02a1
gatcccaaatgttctcattgattgatagcgatatcatagaagcagcgacacgaattaagatttaaaaccaaccccaagaaggatcgcagatccaactccaccgaatcgatccaagaactccgcctaatccaaccaaaccatgggcgatctcatctcaccaacacgacacgaactcataaaaagactaacaccaccaccacctcctccttatttagggactcgacgactcaagacgactgatactggcgaaaggcgaaggggaacagcacagatctaggagagctggccgcagtcggcgatgacgaccggcttggcggtgctcccgccgcgggatcccaccttctcgatggccttgacgacgtccatgccctcgacgacgcggccgaacacgacgtgctttccgtccagccagctgcagggcacggtgc

SEQ ID NO: 11928 - DNA, 128 bp, Oryza sativa
  Clone ID: uC-osflcyp111b03a1
tttttggggttttttaactttgcgcggctcattcaaccataggaaaaacctgatcttagttgtccttcacgagactcgcacggaaagaaactggtgggtcacacacaccggccagtagttaagtatta

SEQ ID NO: 11929 - DNA, 259 bp, Oryza sativa
  Clone ID: uC-osflcyp111b04a1
aatctaacatacgcaaacttgattttttatcaattgtttgtcgttgactttggaaagagtaatctaggtacaagcggatcattgacggaggagacaagacattggctggaccacaacaacccaccaggggcgccaacaaggagcgctattccgttataggacgagggaaaaaggaaaacatcacgatgtgaagggaaactggataattttaggagacgatgatgatgatggatagggctccttagggacggccggcggc

SEQ ID NO: 11930 - DNA, 400 bp, Oryza sativa
  Clone ID: uC-osflcyp111b05a1
acaacgcaactttaaacaattaatctttgtagcaccaggtacaattattccttacatagttacacgtgcactcgtggcaaacaaagaacatggataagaatcggaatgaacttccgatggtctggcactcgtggcattaagaaaaatgccgtacaactttgctcaagtaatcaacatatctgtcaaatctacacaaaactcctcttgctgaggatatggcttccccccaaagaattaacctattgtacatatttatgacgccagaataacacgctaattacaaggctcaaacttacaacacaacacatggatatggactactcgttacgaaataagttattatgcagcagctgtagtacacaatacacagcgcattcgagactcgcctgatggggtacct

SEQ ID NO: 11931 - DNA, 305 bp, Oryza sativa
  Clone ID: uC-osflcyp111b06a1
aaaaaggaaagggcctgggccctgctccggaaggccaccaacctttttaaaaatttttggcccctaaacagttttgggcaaaaggaaaaactggcccaaaagcccccgggggggtttttcccctaaaaacccccacctttttaaggggggggtcaaaaggaaacctggttaaaggggagaaaccccttttggggggggaaaacaataaaaaggggttttggttattggggggccccccaagggggggggaaatcataattttaaaaaaaaccggggtcctccaaaattgggggcccggtcccttt

SEQ ID NO: 11932 - DNA, 351 bp, Oryza sativa
  Clone ID: uC-osflcyp111b07a1
cgagctgaacaataccaggcatgctaaggatgggaatttttaattgccggacagtttacagacagcgactgacgcaaaggcacatttgcgacagggagctcactgagttacaatatgaatagctgcatagacgagttacaacccaaaatttgaagagaagatacccagacccgagtattgcaggcaacatttgcaattgctctaattgctggcacatgggataaagataggttatttggggaaatacattggctggccaacctggggagcatggtgtggagcaactgggggtacaccatactggggcatctgatgtgaggcctggaacgattctggcagtgctccggaact

SEQ ID NO: 11933 - DNA, 420 bp, Oryza sativa
  Clone ID: uC-osflcyp111b09a1
ttttgtttttttttttttggaacccaaaacatactgaagttaataaattgatttaagttggttttaaagagactattggcggttagaaactggtgggagaaactgcctggagagtggacgatacaatcagtgctttggtgagaaagaataggaaaaattgacaacggaggaagcaaccacatgtgcgccacacaggtttcttgggtcacacgcggggaatgtgaaacttgaaacggagaagcgcgtaattgaatgcaggccatacattggtaagaaggatacctggttccataggatctgattgggcagatagaaaagacggtcgactcttttactttctgggaggacattatctaatgcttatggtgggggaaaaactgagaatagtgacattaggaaggtttgacagtatgctattgc

SEQ ID NO: 11934 - DNA, 484 bp, Oryza sativa
  Clone ID: uC-osflcyp111b10a1
agaaacaatttaatctaacatacgcaaactgatattatcacaatgttagccgatgacaatggaaagagtaatctaggtacaagcggatcattgacggtggagacaagacattggctgcaccacaacacccaccagtggcgccaacaaggagcgctatccgttataggacgagagaaaaagtaaaacatcacgatgtgaagtgaaactgaataattctagtagacgatgatgatgatggataggcttcttaggacgcccgccgcccttagcgtcttgctgctcccatcttgtccactggaaggctcactcgtcatcgtcttcatcctcttcgctgccctcgtcgtcatcctcatcattgacctcggacttggacttgtcagattcctcctcgtcgtcctcctcttcctccttggcgggtgccttcttggcagtgctctcgcccttgttgtaggcagcaatggccctgttgtacttcgccttgagc

SEQ ID NO: 11935 - DNA, 467 bp, Oryza sativa
  Clone ID: uC-osflcyp111b11a1
gagatgagaattattaatctgcccattgtacgcagaacaacaaaacttgtctggtgacagtggaagctaaaagtggacaagcaagaagtatatatattcatccatttctcaaactactacaagaggtcgagaggaacacataatcaggagggattgcgacaatttacagcaacaggagtctggagatcgaggcaagaacaagacaggcagcagcagagctaccctcttcatttccactgaatttttacacatttggaatccatggaaaccgagcctttcctcccgtcgtcgtggtgtcaccggagtccgatgagaaaaatggtcatggcgtgctcataatccggatcgctcgccggcgtcggtgaaggaggcggggcgattgttcgggcggctgttgaggagtgggttcagagtcttgacgacgatgctcatgttgggcctgaagttcgtctcgtactgcacgcaca

SEQ ID NO: 11936 - DNA, 380 bp, Oryza sativa
  Clone ID: uC-osflcyp111b12a1
acatggttgaaaataggttaaggcactagttacaaggtaattaaacccagaaaagtgaacggaaaaacaccccacctgaaaaaccgggggaaaaaaaaagggaaggcaaattttccgggggaataaaatacaacggcggtaggggcgcccccaaaaaaacagaagaccctagtaaaaaccgcaaaagaaaccaaggggttgggccggagaaaaaaaaggccccctttttgagcgctaaaaaaaaaaggagtcaaaggcagaagggggtgggccccctccggggggaaaaaaaaaaaaagggggtgcccccgggcatcacccccggggggccgaaaaggagccaagggggcccggaaaccccaaaaaggggcccccccccc

SEQ ID NO: 11937 - DNA, 271 bp, Oryza sativa
  Clone ID: uC-osflcyp111c01a1
aaagaaaactcaatattataaatctagctgcattaacaacattgatttcgcaaggtaaacaatatagcatggcaaaaaaagtctcacatggtaccactttaagcatgacaaaagtttacttcttgagcaagagcagaacaagaacagatcaagcttccattctctgcactgcaccaggaaccatctaggtagaaaaactacttcagcagcctcacataacaaccaccccaatgccaaacctgcttaagctgaggggatctcgacctcgccg

SEQ ID NO: 11938 - DNA, 415 bp, Oryza sativa
  Clone ID: uC-osflcyp111c02a1
gacaataaagaagaaaaagatgaaactatatcatgattcacttgagataattagccaggagataattaagcatgggcccatgaacgtcatgcatcatttgctactgatgcatcaaatacacattgatgaagcctaaaaaaaagtgaaatatggcatgattcacttgacatttctacttagaatttgcatttatgtgacctttcaagctataaaaaataaacatgggctgccacaccagtactctcctatgccaaatggttacatcagcaatatacaatgttcagagaaccacatttattgctcctttacaaaaccagcatcatgtacatgtttgctcagccactcagtatttgaaccagcatcctttcagacttccttcctcccaaagcccgagagaagatggcggccggaggtg

SEQ ID NO: 11939 - DNA, 505 bp, Oryza sativa
  Clone ID: uC-osflcyp111c03a1
gacgaaaatcggattcggtgtaaagttaagggacctcagatgaacttattcctcataactaactatgaattccaagttctatgattcatgatccaaatgggcttcaaatttacaatgaaacaaccaagcatcaaaatacactgtaatgcctgcaaaaactgacagccgaatgacaccagggataaatttatacacaactactccatgagacggaagaagcttttagctgccaggcaagattaagcgccttctttctttgcaacccatgggcttctagaggaagccataatcataatcaatttcagcagcaattggaggcgatgtatggaccctcttggagtacagataagtcattttcaggtaaggacaacaagctatcagctcaaagcttgctgttttagcgtgatgttgagtatgccgataggggttttggctgtaatgctcatcagtatcaacttcttgatctctgacatatcttgccattgatacttgcccaatacaacag

SEQ ID NO: 11940 - DNA, 449 bp, Oryza sativa
  Clone ID: uC-osflcyp111c05a1
acatggaacaggcaggtatcagatattcacattggaccgtctcctctcgaaagcatatgtacatggcgcacgcatgcaggtgcccgggtgtctgcacaaatatttttcacgcccacataccgtacttcaccggcgtgccggtcggcttgatccatggctcggcgtgcaagaagttctgcagggtgaacttggtggcctccttcttgctgatcaccttcttgtaccccggccagctgacgcggccggcggtggcggcgccggcgcccttgttcccgtactccgcgtaccagagcgtcttgagcccgaagtcgccgctccacgggaggtagccggccttgtcgacgaaggcggggatgtcggagttcatgatgagcgtgcgcgagtactcgcgccacgggcgtgcgaggtagctgcggacggcggggcgggaggcgtcgccgagcgccgac

SEQ ID NO: 11941 - DNA, 258 bp, Oryza sativa
  Clone ID: uC-osflcyp111c06a1
aacagggaaacccgatacgtttgctatttctgtagaaaattaccaagaccacaccgtccatacaagctacaggaccgaccaaacacttatattattcacgtgaattgtgtacagaatgattcaaagtccctagacttattttttataccgaaatgagggctttaggaaggaatgtgtcagtccacgcagaattccccgttacacagtgcgcggccacgttaaaatggaaccagttcggatacaactgggcccgaaaac

SEQ ID NO: 11942 - DNA, 389 bp, Oryza sativa
  Clone ID: uC-osflcyp111c07a1
aaagaaaactcaatattataaatctagctgcattaacaacattgatttcgcaaggcaaacaatatagcatggcaaaaaaagtctcacatggtaccactttaagcatgacaaaagtttacttcttgagcaagagcagaacaagaacagatcaagcttccattctctgcactgcaccaggaaccatctaggtagaaaaactactttagcagcctcacataacaaccaccccaatgccaaacctgcttaagctgaggggatctcgacctcgccgtcggaaatctcctgctgcaggtccttggggtccttgccgtccacggggcagcccacgctgacccaggtgccgaggatcttcttgacggtgccggccatttccttggccatggacctgg

SEQ ID NO: 11943 - DNA, 365 bp, Oryza sativa
  Clone ID: uC-osflcyp111c08a1
ggggacaataaagaagaaagagatgaaactatatcatgattcacttgagataattagccaggaactattaaagcatgggcccatgaacgtcatgcatcacttgctactgatgcatcaaaaaccaacctgttgaagcctaaaaaaaagtgaaatatggcatgattcacttgacatttctacttagaatttgcattcatgtgaccttttcaagctattaaaaatcaacatgggctgccacatcaatactctcctatgcctaatgggtacatcagcaatatacattgttcagagaaccacatttattgctcctttacaaaaccagcatcatgtcctgcttgcttaaccaatcgaaatttgaacccagc

SEQ ID NO: 11944 - DNA, 480 bp, Oryza sativa
  Clone ID: uC-osflcyp111c10a1
aaaaccaaatccattacagaaagtagcatgtcttgaacagaacaactctgataatagctcattacagaaagtagctcatgaatcgcccagtctctgcagctcgtttcatttcttcaacccaggtagcctacgtgattcattaattaattcctacatcttcttttttgagactctactattaaccccagtttttacaagagttcctgcctcacctgtagccttgataagatatttggagatctcactggtgttgtagtagcgctcgaagaggaaatacttcctctcatcaatctcagccacgccttgcagcgtcttactcctcagatcaacagagataacccatcccttatcatccaagcgattgatcttggacaggaaagaaatgacatccccatccatacccaaggtggggaaacctgtgaccagcctcctcaatgtctcctctggatcattgccaatctttggcagcagctcactgaa

SEQ ID NO: 11945 - DNA, 513 bp, Oryza sativa
  unsure (1)..(513): unsure at all n locations
  Clone ID: uC-osflcyp111c11a1
attagaattgcatgaatacatataccatatgtctgatagcacaatatagttgaataatcttacaccatacatacaagctacggatcgatcaaacatatctctaaaccatggaattgtgtttccatgatctaagtcgcaagatgattttcagacgaaatgaagggcttaggcggcacctgtagtttctgcaacctccccgttaacatgtttactacctttgtcatcgagggccggtttgttgggttccactgaatgcaccataacgctacaatggctagctgtctaaccgtttctttctccccttgtgttgtctccatgttaagcaccagttcctgcccattgattactctctcatatatccactcaggaaagtagaactcattttggttctcaacggttgggtctgtgttcctcctcccactcaccatttctaacaccagcatgccgaaactgtagacatccnacttgtatgatattgctccaaaactccgagaatataggttggtgcaatat

SEQ ID NO: 11946 - DNA, 408 bp, Oryza sativa
  Clone ID: uC-osflcyp111d01a1
tttttggtttttttttttttttttgttttttttttttttttttttttttttttttaagcaaaaaaaaaagagggggccctttatttctttcttctagcaggggacatgcccccatttggttcttggctcaaacagaatgcctccattcatgtcacggggggcatttgggtttttgacaaggggggttttgaaacccaagctgggtttaaaggggggcccctggttaaaaagcttgaaaacaaaacagggggcgaacacaaaatgggatctgaaaaccttcatgggggaaaaggggtcaaacattgcttgatgggctgggggccaaccgaacttggggagaaacaaaacaggtttatgagcctgaggccccggggttccctttttttccgctacaaaaataaaaggggg

SEQ ID NO: 11947 - DNA, 393 bp, Oryza sativa
  Clone ID: uC-osflcyp111d02a1
ttttttttttttttttttttttttttttttttttttttttttttttttttttttttttataataaataaaataaaaaattaataaataaaaaaaaaaaaaaaaaaaaaaaaaaaaaaaaaaaaaaaaaaaaaaaaaaaaaaaaaaaaaaaagaaaaaaaaaaataaaaaaaaagggagcagaaaaaaaagaaaaaaaagaagcaagcaagaaatttatcaaaaaaaaaaattgcccgatctaaaaaaaagattaaaaaaaaaaaagggaaaataaaaaataaaaaaaagaaaagaaaaccaaaaaaaaaataaaaaaacagaaaaaaaaaaaaaagaaaaaaaaaagagaaagttaaggatgtaaaaaaaaaagagagtgattaatattgaac

SEQ ID NO: 11948 - DNA, 517 bp, Oryza sativa
  Clone ID: uC-osflcyp111d03a1
gaaaatataattttatttatttcagacaatattatgatatgttttcttctgtccatagcgaagtaccggcattcagctagtattacacataaaaatgtaattaactcatctacactattgttaaagggaacatcaacattgcaagcttagttgctatgctaagttaaagagaattactagtttttttaggtatcaatagcataactcttgctattattcttgaaagggaagagctaatactaacgtagacaaagtgaaaaccaagttcagacatctttcatgcaaaatgtaccgatctaaaagtctaaacactgctccttttgggatcagggcatggtataattccccagttcctcctcacttcatccaaatcttcatgaaaatgctttttatagttcccagacttagaactgtgcacttaagacctgttttgaagcccatggaaatatgctgaaaaacagtgtcctttgttctcatgaacctcgcaagcccccacgactgaagcatgcacatgaag

SEQ ID NO: 11949 - DNA, 289 bp, Oryza sativa
  Clone ID: uC-osflcyp111d04a1
agtatcaaagttagacagctgctgttccgatataaaaaatattggtaaatcgttctacatcaaaacaggcctggcttttacataccacagggctacctgctcctctatagtcccttgcacggccgggtgggcttttaataacacagtggaccgtgagaagctaccccagcaactagaggtggagttgtggatacctcaggtggaggccatggcgtgagcgtggcaccagctcttccttctggctgcagtggcagtggctgctgcggctgcggtacaagctgggggggag

SEQ ID NO: 11950 - DNA, 393 bp, Oryza sativa
  Clone ID: uC-osflcyp111d05a1
aagtaaatgatactgtacagaacaagataaaaaaaaaattctggatgtcatccagttcacaatctacaagagtttctgagttcatatatcaaccatggaagtaatgggtaaaactcaggaggtaaaagcacacacactgctgagctcctctaaaaaaacaagaacgcagcgcccaagcatgcgctatgctgtcaggccttcttccaatgtttggctacaccagtacaaaatcatgaactcacccaaatcgccaagcgatcgctcaactaagtcagccaaattgtatcaggtacaaccaatatctcgcatgttgttctccaaaggggcatcatccacgatccccatgcgcatcaggttatgcaagctgcaagtgcctagccactctctctcatg

SEQ ID NO: 11951 - DNA, 165 bp, Oryza sativa
  Clone ID: uC-osflcyp111d06a1
cgatcgaattcaagcgtacgtacgtgcacggggcacccacgtgggaataacttcgaacaatcaactgagcaagttgccacatactcctacaatgtgtgttcatgcggcggctctgcccatcaagcttcacgccattttgaacggacgccgagcgtactacggttc

SEQ ID NO: 11952 - DNA, 260 bp, Oryza sativa
  Clone ID: uC-osflcyp111d07a1
catagacgtaatgagcatatagaaacatttgaacatgaagcagtaatcatatagctagattagaactgcatgacttcatccgttgcaattggtcagatgacctaaaatagcaagtttcaatatagtttaataaaaaattaaggccacacaatctaatgcaaaaggggcctattgacaaatcatcacgacgagcgggacttggctaatttcagccaaacagttttagctccaccaaaactgggagtggagttgggtggtcc

SEQ ID NO: 11953 - DNA, 194 bp, Oryza sativa
  Clone ID: uC-osflcyp111d09a1
cgcgcgcgtgcgcgtggcccctcgtgcgggcgccctcttttttttttttgggaaatttaatttaaagggttacccccagtattaagacatgatgcattctggacatagcataagtacgggtagtcatttgacatgcaccataaaagtgtaagtaacttacactaaactattggtaaagggaacatttacatatg

SEQ ID NO: 11954 - DNA, 480 bp, Oryza sativa
  Clone ID: uC-osflcyp111d10a1
tttgcaatgcgattcccaattgcgcacgcgctggattcctgcaggtgaagttgctgttggttggcaatggctagtactcgacgatgaggctgccgaatggcgcgcggtgtggaatgcccttgcggcgcttgggcggcagggtgggcggcggcggcggggtggacggcgtgaagctcctcttggcaggggaggtggagttgtcggagtcggaggtggaggccatggcgtgggcgtggcgtagtctcttcctcctggcggcggtggcggtggcggtggcggcggcggtggcggcgtggggggagcagccgacgaccttgcagccgagggagcagaagcggaagttgtcgaggaggctgcggctgcagacctcgcagatgttggcgacggcgcccttgccggccttgtgctgggggcgctcgctgaggaacactcacgcggcgctgttgatgacgtacgtctgcacccccgcgatgtccatga

SEQ ID NO: 11955 - DNA, 328 bp, Oryza sativa
  Clone ID: uC-osflcyp111d11a1
gtggtgttgtttttggtttgttttttgtagatgaggatgccaacaggttcacgctgtggaaagccagagctgcagggggggggcagggcgggcggaggacggggagaggaaagagtgaagcacaaatcggcaggggaggtggagaaaacgcaaaatggggcggagggcaccaccagggcttggaggaagctgtgcctgcctacaaccggggccaaggtgaaaaccggggccggcgccccgtggggggagtggcccaagaccaagcagtagacgcaacgaaagcggaaaaaggggaagaggccgggagggcaaaaccccggaggggaag

SEQ ID NO: 11956 - DNA, 72 bp, Oryza sativa
  Clone ID: uC-osflcyp111d12a1
ctttgtggtattgtgtactcgctggattttttgttgttatagtgctgtttgttgccattggctagtactcga

SEQ ID NO: 11957 - DNA, 408 bp, Oryza sativa
  Clone ID: uC-osflcyp111e01a1
tttttgttttttttttttttttttttttagggatatatagacaggcgaacatgaagcgggtttttagtaccagctacgccattgtagggaccatatgaagccgggaaaatccagctgaaggtaaacgaccgacaacatgtttaacaaacaacaaatggagtcagcttttatcgcttggtggggaggaattaccgttcatattggcatgttgaaatttcacgacagtgcatgggatattggcaccactcccttgggaaaatgcaggagatgtcagctttcgagctggtgccttagggtcctccccaaattttacgaggggaaccggattcttaattgggaacaacatgccaaaggccattactagctaaaatcagaaactccaattcatcatctatttcttggtcctga

SEQ ID NO: 11958 - DNA, 125 bp, Oryza sativa
  Clone ID: uC-osflcyp111e02a1
tttggggttcgaacattttttttccttcttggtttatataccatttcattccgatcgagtgcaacaaggcaagttcaaacacccttaaccaacagcgaactcaatctcatgggtaaccatcacgg

SEQ ID NO: 11959 - DNA, 365 bp, Oryza sativa
  Clone ID: uC-osflcyp111e03a1
tcaaagccataaattaaagccgatagagacaacttgcatggcgtgccatcttcacagtttgatcaggccacaatgacatagtttctgaatatttggccaatcaaccaaactatccaacggagaaagaggcgaggctgtacaggaaggcggcatgataatctcaggccagcttaacaaatggaacatatcagtctaagacatcacagagaaggcaaagcgattaaacggtgtatccagtctaacctaatgttttcaccagtgctttggttcagaaaggaattgagctacaaatgcaaaggggggcaaagaatagatggtatctacgtggccctatttacattttaaaagtaaactaagcgcacaaa

SEQ ID NO: 11960 - DNA, 125 bp, Oryza sativa
  Clone ID: uC-osflcyp111e05a1
ataattaattcacaacaccatatttcattgatcaggttcagaacctgcacagaaatacacactaccggggcagatctcaccttctctccaatactcggacatccatccacgcggtccacacgaaa

SEQ ID NO: 11961 - DNA, 468 bp, Oryza sativa
  Clone ID: uC-osflcyp111e06a1
ctttttccggggggttttttgattcctcggagctctcttccattgttcaggttcagaacctgcacagaaatacccactaccggttcagatctcaccttttctccaatactgggacatccatccacgcggtccacacgaatacgtacatctatacggtacacgtacgtacatctactgcaccgggtacacacacgcacacttttctgcagagacgcgcattgtcgtcaacctagctagcttagctgaaggcgaagcgtcgccatggcagcacggcggcggcggcgctcacttgccggggacgaagttggtggcgtaggcccaggcgatcttggggaaatacagattatcatagcaggaacaaaactggaagcggaaaatatatgttttgacccgtaaagccttaaatgtagaataaactcatctagaaaccggggccgttttggccggatttcaagcaaaactagaatt

SEQ ID NO: 11962 - DNA, 353 bp, Oryza sativa
  Clone ID: uC-osflcyp111e07a1
cattccgatagatagcaacaagcagttcaaacaccataaccaaagcgaactcaattcatggtaacatcacggacgaagaacacctaacactggatggatggatagagggcttctcgactcgagagagccactggacacgataacgactcgactcgatgataagatgattctgacccggataggtaagggataactggccacgatgggccccaccaatcagttcctccagttcccgccggagtcgccgccgtagccgccgccacggctgccaccgtagccgccgccgccgccgccacggccgccgccgtagccgccgccgccaccgtagccgccctcacggcgcccgtagccgc

SEQ ID NO: 11963 - DNA, 303 bp, Oryza sativa
  Clone ID: uC-osflcyp111e08a1
ttttgggttcgaactctttttttcctccttgtttcctatttcatttcattccgatagatggccacaagcagttcaaacaccataaccaaagtgaactcaattcatggtaacatcacgggcgaagaacacctaacactggatggatggagagagggattctcgactcgagagagccactggaacatatcacgctaagacattgatgataagatgattctgacacggatagctaaggataataacctaatgttttgacccagtgatttggttctcaagggcccgccgctacaaatgcaaaggggg

SEQ ID NO: 11964 - DNA, 173 bp, Oryza sativa
  Clone ID: uC-osflcyp111e09a1
tttggggtaaattaaagcctgtggggacaacttgcatggcgagccatattcaaaagttggtccaggcacagtggcatcatttttggctatttgggcacattaaaccaaccaatccaacggagaaaaggtcagggtttaccaggagggcggtaggataatcctaaggccagctt

SEQ ID NO: 11965 - DNA, 484 bp, Oryza sativa
  Clone ID: uC-osflcyp111e10a1
aggattcacatccatctcgtaccctttgtataaatatatatagccggagcttccatatatttcattcacatatgcctcacccaacaacatatagtcgtagcagataccactcttacatcaagtcagagagagatcaggtgaaacaaaaacaaaagcagagcacggccggtaaaatcaaaagacgatgaacaaactgggaacacacgaaacaaggtgggagacatcatcgaatcagagatgaacaattaaacaaggctatatatgacgatgacggcttagttgccaccagactcctcgcagcccgggggcttgtaggcgatgaagctgatgagctgcacctgcctgacgttgtcgaagccgatgatacggacgaatgcatcagggtacgccttcttggcctcctcgagctccttgagcacctgggtggcgtcagtgcacccgaacatgggcagcttccacatggccagtacctgccatcgagtat

SEQ ID NO: 11966 - DNA, 408 bp, Oryza sativa
  Clone ID: uC-osflcyp111e11a1
ataattaattcacaacaccatatttcattgatcaggttcagaacctgcacagaaatacacactaccggtacagatctcaccttctctccaatactcgtacatccatccacgcggtccacacgaatacgtacatctatacggtacacgtacgtacatctactgcaccgggtacacacacgcacactctcctgcagagacgcgcatcgtcgtcaacctagctagcttagctgaaggcgatgcgtcgccatggcagcacggcggcggcggcgctcacttgccggggacgaagttggtggcgtaggcccaggcgttgttgttgacggggtcggcgaggtggtcggcgaggttctcgagggggcccttgccggtgacgatggcctggacgaagaagccgaacatggagaacat

SEQ ID NO: 11967 - DNA, 454 bp, Oryza sativa
  Clone ID: uC-osflcyp111f01a1
accgaatcaaaccatacgagcataccatgcaagcaaaacaccatatcatttcaacgcatttcaccatattctcataatatgccagcaaattatatgacacatggggggagagaggaggcagagctccatagaataatacaatttttgtaaacaaattcaactcggccaaccgcctcccaaaaaaaccactccaagacctataattgtttttgtttttcagcagcccagcttcttcaaggaaactgaaatggagccaaaggatggtaacccaaaaaaaaagaaagaaagtacaaatgcctgctgctccgatacaccaggaaataaaaccgatgcacgcgaggacttgtacaacggcgtgctgtaccggaccggactggaccgaagttttgataaaaggtgaactcttacaaaacagaccaagaatgaatgcaagacaatgcaagtgaagaaatgc

SEQ ID NO: 11968 - DNA, 416 bp, Oryza sativa
  Clone ID: uC-osflcyp111f02a1
gcaaatgaaccaagcccttcaacactgccaatttccgcctgacaagaattccacgattttctctagaatataccaatgggggctaacacatatgaaacaaaaccaaaaagaaaagaaaaatgacctggagaaaacacaacgcttgctgtacaagtttacacgcctaccagcaagattgacatgtacatcaacaacgccttttgataacaatccctttttttttttcgttttcccatattcttgggtaggaggaaccaagaccaagttttgcccttcccccattaatgggcgtgcctgccggacttattcacctttaatgtctttgcaatctctttcagggcctatgctgtcgctttcttccatatatacatcctacatgagcatatggacgagggacgaccttgcgtacgtgcaaa

SEQ ID NO: 11969 - DNA, 483 bp, Oryza sativa
  Clone ID: uC-osflcyp111f03a1
cccaaactacaggggcaaatccatctaattaaacatcaagactcgtttcaacaacaacctgccacaattcacaaacagcaggctgctgcacaagacggtgtacacggttcattttatttgggggttcgtttccaccatcagattgatataatacacgcgaacaagcagaaacattcggcaacaatttctccaggaaaaatgggggcttttttggcattattcccgagcgagcgttatttggaagagggagtttttttcagacaggcacagcctcaatggcaggagcgagtgaccaacgttgacgtcggcgtcctagtagccaccctggatgtaggcgttgagccggttcagctcttcccggtgctcgctgaccacggcgcggacaatgtctccaatggagaccatcccaaccatgcccgtgccgtcgatcaccgggatgtgcctgatgcgcttctttgtcatcagctgcattgcttgcaggac

SEQ ID NO: 11970 - DNA, 374 bp, Oryza sativa
  Clone ID: uC-osflcyp111f04a1
aagaacactaaacaaacagtttttgctattggtagaaaacaaaggcacacgtaatggaaggaaaagagggttttgagcctttgaaagggaagttctgcaaaatttttcaatacgaaaacagaaagcgtttttgcagaagaacacggaataccgacagcgacgcccatgggggatatttgaatgcgaaagggggagaaaatcacatggcggggcatctcctatcacatgggggtggaaattaatacccctggggctccaaaggggcagaatattggacagcaatggtgatgaaaccctgaagaagaaaacatagttcctggaacataaaacaagccaggggttcatttcagtcccgcttaggcacgtgctgaacc

SEQ ID NO: 11971 - DNA, 97 bp, Oryza sativa
  Clone ID: uC-osflcyp111f05a1
cattccatgggttttattatcatatttttatcaaacccctcaaagggcaaccaagtttatttcaaattggaaatcttcccttgggcccctctaagaa

SEQ ID NO: 11972 - DNA, 341 bp, Oryza sativa
  Clone ID: uC-osflcyp111f06a1
agagtacaaggcccaaacataattttgataatacattgtaattataagctttaatttcctcactatggttgcttagcaaaacaaattgttcaactgaacagacacagaactgcatctttctttggtctggactttgcaaccacctagacaatctattaaaattactgctcgatggctgcagaaatctactcttttaagagaggattcatgagatgttcatacactccgagtgaccccacaggaagacgcatgtttctaagttacagatgggactaacttttgttacaaattggacacgaattaacttaagagattgacaggggacaccaccggttaacccc

SEQ ID NO: 11973 - DNA, 201 bp, Oryza sativa
  Clone ID: uC-osflcyp111f07a1
gttctcgtccggcggcggcgcgccgggctcgaagaccaagacggcctgagccgccgggccgccggaaaagatccagccgtggacgatccagagcacctgcactgtatactgcacgacgatcaccgtgtcgttgcccttgaactaccactgcaagctcctgacgtgcaccagtacgacgccgtccagcggaccctgatcaac

SEQ ID NO: 11974 - DNA, 432 bp, Oryza sativa
  Clone ID: uC-osflcyp111f09a1
aaaggagagaatttttttcgttttcacattacaatttatacaacagaaagcatccaatccctgtcttctgcacactcgttacaacattaagatcaccatgacgcatcctccagaaaccttcagttccagctcccaagcatatttgacgggtgttaaagtatgtatatttctaggatttgaatggctctaaaattggatgtcaaaatgaattcacaagagctgcgaacacaggaaagcagatacaaaatcctagagcgagacattgtacatcatcatcaggcaggcggcgtatcacagtatggtacacccacatctgttctgcttgggggaattcgcaagctgcttctcactggttttggcgggttgtggagggcgtacctaccacggcatggaaattccacttctgggaacttttcttactgaacacgggac

SEQ ID NO: 11975 - DNA, 428 bp, Oryza sativa
  Clone ID: uC-osflcyp111f10a1
ttttttttttttttttttttttttttttttttttttttttttttttttttttttttttttttttccccccaaaaaacacacttttccatttttttttaaaggggaacagaacaaaatttcattccagatttagacagatggtatatgatttttcggacccctgggctgaaggctgactaaagaggggcaacttttgggggggtttttgaaaggcacccaattaacaaatttacctcatttttttggacagggtcccaaaagccctgctagagggggggggcacacaaaattttttaaaacactgacaataatgggccaatttggagggggggaatcttttttgggggttttttcctcccgggaatccgacaagggctcacaacattggcagggcctgggggccccactttcccaagggggcccttttc

SEQ ID NO: 11976 - DNA, 433 bp, Oryza sativa
  Clone ID: uC-osflcyp111f11a1
agaaagtaacattccatgggtttcattatcatatctttatcaaacccctcaaagggcaaccaagtttatttcaaattggaaatgcgaacgtaggtacatctaagaattttacaatcccgcataaacgaatgccgtgggattgtggagaattattgttgaagtctcggtgttttaaaagatgtaacaggacacaaactgaatttttctagatgcttgagagctaaacagaagaaccagagtggagagagcttcttgcgatctctaaggcatcctcgacagaggttgcacttttgagcttagctttgtctacaacgggctgagacttagcgagttgaggaagaagcgaaaattcctctgagctaccactcttaaggaaaacacccttcagtcgactatcagagtcaatccagaagggagcaatctttgggtcaaa

SEQ ID NO: 11977 - DNA, 443 bp, Oryza sativa
  Clone ID: uC-osflcyp111f12a1
gaaagttgaccaaatatacttttttccatatatcttatataaatgacatatattccaaacaatgctcacatacagctccgcagcaatattttggaaggacacatgtatgccttatgttgccatcggcctattacaacaaaataaccaaaaataataattatttgctcactcaaacatgacacgatctcttttaagagaggattatttagatgttcatatttcgcatgggacccaacaagagtacacatgtctggtacttagagttggattccactcttgtactcagagccagctgtaaagctttcagggatgacatcgtcgacgacacggtagccgccattcttgacaaggaagcggacagagaaggggcccttgagcggcgactcacttttgagcgtccaggtgttagacgacgactccttgagcgccacccagtccttggc

SEQ ID NO: 11978 - DNA, 335 bp, Oryza sativa
  Clone ID: uC-osflcyp111g01a1
ccccaagaaattgtagttggttgctgtgttgcatatgtaaacactttttaaacatttgggggataactgaatgcatgctctaacagtacaaggtgatgggtcgcacggacggactatcattttattatcttgtcacaaaaacacttccattaggggaaaggaccaaaaaacagaggtgtaacaaatactaatactactcatgattatgagatctgatcggggctataggttaccttgcaagtacgatcaaggcattctgtatgcagataaggtgctcacaccatgggtggaactcaaatatccaaatcgtcatctgggtcttcatcggaatcagg

SEQ ID NO: 11979 - DNA, 374 bp, Oryza sativa
  Clone ID: uC-osflcyp111g02a1
gtggagggtgacacccctgtactttgagctgccgcgggagaagccggtgctctgtcgtcggcgaacgtgcacgaactcctgcttggacaagctcttcatctgcctcatgtgctactcgtagtcgctcaggctgaagttgatgaaagcctctactaccctgaactggaccgccggcctgtcgtacgcccttgcagctgcgtgagcagtggctaattcacctaggtagacttgcttgccgcattcccagacgtggcagtcccagcgggcggtgcggcagtaggaggggaccccctcgtattgccagcttggagagcgcggcccgcggcggctattcttggtcgtctgaggctgcggctgttgcggcggcggcggtg

SEQ ID NO: 11980 - DNA, 350 bp, Oryza sativa
  Clone ID: uC-osflcyp111g03a1
acactatttaagagctatgacgttcgatggaccccttccttaggttggatccttttgttcgggcgcccctgaggtgggcgacggccctgtactttgtgctgtcttaagggactcatgccttaggtctggggcttccctgcaattcccgctaagaaaaagaaaggtatttacatgcgcaaactcctgtaaagaaaaatgaatcctataaaatcgttgggtaaacataatcagatgttttctcggggcttgcaccgatgatgggtataaacatttaaacatttttttcgaggtacaacttacaatcacctaactaggatccacagggtggggcaaatcacctaattagcccc

SEQ ID NO: 11981 - DNA, 124 bp, Oryza sativa
  Clone ID: uC-osflcyp111g05a1
gtattgccgattgcacacaacaatgacaaaacgctgagctaaacatatccagaaggactgcgcgcgcaagctgagaataaaatacaatccgcatacaactaatcacacgggggcatcctcctag

SEQ ID NO: 11982 - DNA, 401 bp, Oryza sativa
  Clone ID: uC-osflcyp111g06a1
gagattactaacagacggcccatactgagaatactgttattggtccacaacgtaaggttaaacgtgcaatgagcaaaaccccttatttatacgattttggagctggtatagcacatatctaccgattttagaggggtaatctaaccagttttgtcgataagaaaatatacctaagcgacactaaatatgaaaccctgcccagtcaaagtcttaaacctttggggcatgaacattacaagcaaaaacctggccataattgcccttgccattcttatccagatagtgagaccttgtattgagagctagcatgtggtaaacaagccagaatagagttgcttgaagggccaggaaggcggatccttcaaagaggccagtcttcgcagtagggcactgggtatcca

SEQ ID NO: 11983 - DNA, 428 bp, Oryza sativa
  Clone ID: uC-osflcyp111g07a1
acacagcaatggaacgtttgaccgtcctttattattattattatacctctgagcaaacaagcgtgcgaatagttggtgctcggcgataataatgaacaaataggtagtgttttacatagcggatgaatactttaaacaatcaatttggcacaaacaggtgaaattccttgcagctgcaggttcgaacctgcagctaattacatggaagcagctataccgcagctgaaattacatgcacagattatgccgtcacctgaccaaaaagaagcttccggatctccggtaatttcttgcggaagacaacttccagcctggcatcaagtgtgttctcacacacaatctttccatctcgagaagccagcacaacacctccagagcaaaacctctcatgggaatcatgagagcttggagaaggcggtaggtacaca

SEQ ID NO: 11984 - DNA, 426 bp, Oryza sativa
  Clone ID: uC-osflcyp111g08a1
aaggaactcatgcctcaggtctggggcttccctgtaattcccgttaagaaaaagaaaggtatttacatgcgcaaactcctgtaaagaaaaatgaatcctataaaatcgttgtgtaaacataatcagatgttttctcgtggtatgcacggatgatgggtataaacatttaaacatttctacgagttacaacttacaatcacctaactagtatccaaggtatggggcaaatcacctaattagccactacatgaggatagctcattgctaccctttctgtcgcataggattgcagaatccaattcatgttgcatcagccagagtccagggccgccttgttcgaggagctaaacatgccccaggatgcagtgacaggttagctgcttgcggtcaaaattatcttgagagattatgggcacatgtatttac

SEQ ID NO: 11985 - DNA, 116 bp, Oryza sativa
  Clone ID: uC-osflcyp111g09a1
acctaattaaactattcttttattctatttatgctttatttcttttgctttactgtaaaccccgacaagaaaaagaaagggataaacaagcgaaaacccccggaaagaaaaacgaa

SEQ ID NO: 11986 - DNA, 469 bp, Oryza sativa
  Clone ID: uC-osflcyp111g10a1
agcgttcctgaatacatatcaaacacacaagatttgaaatatccagctgaatgacaaaaatgcccaaacgaagggcacagcgttcacagaaggaatgaaatgaggagcccagcccatacatatgccaatccaatgtaaagccatagcagggtcattgtaccatctcaaggtccttgaagtattcatgctcaagagcctgtctagctgtgatccttttgtttggctcgtaccgaagcattttagagagaaggtccaaaccagcagggtcaagagtagggacaatagttgcaagatcctgtgcttgccacttggggaaagcagacttgtagtcaggtaatgagctaactcctggccaactttgttcatttggagttcctagtaccctgaatatcttaaataattcatcaatctcagaatcaccagggaacagtggtttctggctcaccatttctgcaagatacaccaactg

SEQ ID NO: 11987 - DNA, 303 bp, Oryza sativa
  Clone ID: uC-osflcyp111g11a1
aacattcaagaaagtacttttgctctctagagctggaagcagaaatttatcttgggtaaactttggaagtttgaatggacaaggtcattgatccgattattgggtatataatataattgcatacactaatcacagggggcatcctctagtgtctagaggaagggttccaaaatctcacaacaattctttatttcaggcgggccaaaatgaatagaaatcctcaactaaatagggatacagcatgagcagacttcaaattggaacacaggttactttccgctttagataggggtgatcagaggg

SEQ ID NO: 11988 - DNA, 239 bp, Oryza sativa
  Clone ID: uC-osflcyp111h01a1
cctgagcggggacaatcaagccgccttccaaacaaccggaagcacgcgcaaggggcccaaaggagggcgcaacgcgggaggaaaaagggaacggaaacaggcaacaaaaaaaagagaagggggggaaaagcacacaggaagggggagggagaggggaaggggaaaaacgaagacaagccgtaagaggaccgggggggacccaaggcgggctgagaaggggcccaagagccccaaggggg

SEQ ID NO: 11989 - DNA, 364 bp, Oryza sativa
  Clone ID: uC-osflcyp111h02a1
tcgccatgttctccatgttcggcttcttcgtccaggccatcgtcaccggcaagggccccctcgagaacctcgccgaccacctcgccgaccccgtcaacaacaacgcctgggcgtacgccaccaacttcgtccccggcaagtgaagtgggggaccgtagcttagcagtggttaattgtggttggatggatttgtggccagcgagttcgttgtctttgggttggggaagatgggtatagtgccacgagaggatgaccgagttgttgttgggtccactaagaagatgtagaatatgacgatgttctggcaaaatggacaaagccgccctcgtgggatgctccgggaatttcggcaccgcacctgcag

SEQ ID NO: 11990 - DNA, 280 bp, Oryza sativa
  Clone ID: uC-osflcyp111h03a1
ccacgcacccagggccggctctttttagcagaaggcaaaggaaatttcccgcaaatacttattcatatgttttgacaacatttctcccgacgcatgctcattgtggcagacgcagctgaccacctagagcttttagttcaccattattatttagacccaggcttccgtcccaggaccagaacacatgcttacaagcgaaaatactaatagcctggctggctgctttacagaataaccaaacgacaaccttaaaaaaataaaaaggccccggatggaaaac

SEQ ID NO: 11991 - DNA, 447 bp, Oryza sativa
  Clone ID: uC-osflcyp111h04a1
aaaacatcactctagaatttaatttttgttctcagacacaaacctgcatgaaaaacatacaaaggctacgatataattgcagtgcagctgcttatttatactacagttcaggcccatttgggtggtccattcaaagcccaaatccagccccacttcagtctccccgagatcagtgcttcgcacacggcttgcgccgatctcaaacgaggcggcggcagagggtgatgccgtcggagaccgggagctgcacggcctccacgcgcgggtcgccggcgatcttggcgttgaaggccacgatggagcggcggatgtcctggtcgaactcctccagcacggagtcgtcctccagcgccacggacccgccccagagcgtgttgtcgtaggccagcacgccgccggcgcgcaccagccgcagcagccgctcgtggtactcgccgtagttcccct

SEQ ID NO: 11992 - DNA, 394 bp, Oryza sativa
  Clone ID: uC-osflcyp111h05a1
gactcaaacagcatatattaccactgccatcccggcacaacagcatacataggcacactgcagcctacacaagtttctgttgggcaaaggcaatagtacaattacacatcaaacacaccctcacagagagagagagagagagagagagaaaaatccttaaaacacctgcttaatcaacaggttacaattagttaagggttggggcagagaacatatatagcacatttatgcctttccagcatagcactgcgtatatctagcagcagtagagggagatgatcacactgccagttaatcagcagcagcaaagcacaccggatagatagattcagggatggataaatagatagatagatagattggatggattgggggaaaaaggaccgtagggggg

SEQ ID NO: 11993 - DNA, 373 bp, Oryza sativa
  Clone ID: uC-osflcyp111h06a1
acacaagaacaggcatgttttttgggaataaccaatcaatcaatatacaggcattggcaacgcatatatgtagctagcacgagatgacatgggtcatttcaacactaagctagcctagctaagggggaacctcctcctttgggacttgacggaattaatgggggccgttttcccgtcgacgatgcccgacggggccttgccccaaatgccggccttgaacgggttcagccggttaaacgtccggaaccacgagccctttttcccccttgacgacgacgaccccttggtttggtggtggatccccgacacggacgcccgaatccgggccagtttcgaccggagggccttgttttccctcgccagggacgcctcc

SEQ ID NO: 11994 - DNA, 120 bp, Oryza sativa
  Clone ID: uC-osflcyp111h07a1
ctggtgcttaattgaaagttttacccagaagtttttttagtttgtcccgacccaggactgacgaaagaaaggaaaaaagggggggggtgttctgggaaaaaaaaaagaggggcgcccccg

SEQ ID NO: 11995 - DNA, 360 bp, Oryza sativa
  Clone ID: uC-osflcyp111h09a1
acatcaaccactccaaggagcccactgccattgacaacaccataggtccacagcatgatgcataattgcctatccggctatcccactatcaaaagaaaggcctatatcaaccgagtagactgagcatgccacactccagaacaaaacaagcacaacacatggcacattattggttcagcaacagtaacccgcgaagtcgtcctaatgggatgatgatactggtgaaagatttgaaaacactgaaaatgtgtttattatgaaactcactccgtttgcatctccgccgcaggcaaggggattgaagagcagcagtagtagtaccctctttcatcgaacttgaatcgctgcgaaagatggatc

SEQ ID NO: 11996 - DNA, 471 bp, Oryza sativa
  unsure (1)..(471): unsure at all n locations
  Clone ID: uC-osflcyp111h10a1
gagcctaaagactgctgcataccacattattaccacttacaggagaaatattttgacaaaaagtacaaaccagattaactttggcaccacaaacacactttattacccaattattaagataaaagaatgtccaaacagctaaagcagaaaatcaaataaactagagtacacaaacgtcctggagaactggagatggatcacaaggcttcttatgcaagctcgagaacgagagcagatgctccgcctccgccattgcaaacaccagcaactccgattttgccacctttctccctaagaacaccaagcagggtgaccaaaattcgagcaccactgcatccaagaggatgtcctaaagacacagctcctccatgtacattaattttttctgaaggaattccaagaagcttttgatttgcaagtgcaacagctgaaaaggcttcnattaatttatagtaatcaacacgagaagac

SEQ ID NO: 11997 - DNA, 332 bp, Oryza sativa
  Clone ID: uC-osflcyp111h11a1
ataattaaaattataaaaaaaaaattaaaaaaaaaaaaaaaaaaaaaaaaaaagaaaaaaaaaaaaaaaaaaaaaaaaaaaaaaaaaaaaaaaaaaaaaaaaaaaaaaaataagaagagggaatagggggaaataaatgcaaaaaaaaaaaaaaaagtagaagcccgaaaagggccataaaaaagagaaacaaatggggggaagaaaattaaaaaaaaaagataaaaaaaaaggggaaaaagggttaagggcggggggattgaaaaagaagggctaaaaaggaaaatgaagggggggaaaaaatccaaaaaaaaagagaaaaaaaggggggg

SEQ ID NO: 11998 - DNA, 440 bp, Oryza sativa
  Clone ID: uC-osflcyp111h12a1
aggttcaaatccaacttattcataaagcatactgctgtcccacaggaaactgtttcataaaactaacatatcatacggactcgatggtccattaaaccagacacaagtagacatcagcaccacaaatacttgacgaacagaggctcgggatgaccaggcacatcggcagctccaccaaactggctgattactgaccaccacggaggcggagcaccaggtggagggtggactccttctggatgttgtagtcggcgagggtgcgtccatcctccagctgcttgccagcgaagatcagacgctgctggtctgggggaatcccctccttgtcctggatcttggccttcacattatcaatggtgtcggagctctcaacctccaaagtgatggtcttcccagtcaaggtcttcacgaagatctgcataccaccacggagacgaagc

SEQ ID NO: 11999 - DNA, 122 bp, Oryza sativa
  Clone ID: uC-osflcyp112a01a1
gggaattgatggttcatggggcaaaatatcgaaatggcagacaaaacaaaccatggagcagaacagaaccctattccacagtatgcaagagctcaattctggagctactacagagatgggta

SEQ ID NO: 12000 - DNA, 443 bp, Oryza sativa
  Clone ID: uC-osflcyp112a02a1
gtaaaccaaatcaaactccattcgccacccaaaacttggaacacaaaattgtacatcagcatcatcagactgaaattacaaggggtatgctgcgacgaaagtagcaggagggaaggctattatacacgactggaccacgaacaccagccatcggtctctctccagcagtttcagaagcaccttgcaaaatcagaactcaagatcccaaaaagaaaggaaaaaaaaaaagagaggaaagaatagctagtacaataacactattcctttttgccattccaattggatgcaaaaaccacatacaactgcctatccaccagcagccgagtatatacaggtgaagtgaagcctctttgatctccagataaatttttgtgaattgaattgtttactggcgtgttcgggaaacagcttggactggacggcgctgtcaggatgatcatttt

SEQ ID NO: 12001 - DNA, 292 bp, Oryza sativa
  Clone ID: uC-osflcyp112a03a1
tttttggggtttttttttttcttggtttttttatttttttatttttttttgtttttaggaaaaaccccaagccctaattaaaaaccccccaagcggatttggccaaattggggggggcacccaaagggcaatccttttaaaccccaaagacagggggggctaccaaaggtgaaatcccagatggtaggggtccaccaaataacaccggaatgggttcccaataaaaccccattgtttaggccttgggccccggtgactacccttaaaccatggggtttttttatgaaagaac

SEQ ID NO: 12002 - DNA, 51 bp, Oryza sativa
  Clone ID: uC-osflcyp112a07a1
ttttggggttttaaatatcatgggttattttattttattccacggaaaatc

SEQ ID NO: 12003 - DNA, 114 bp, Oryza sativa
  Clone ID: uC-osflcyp112a08a1
tttgggggttttaaactacttcggtgcatacctttcatcacattatatcaatatcacacgttattaaagcatgaaagcacccacatgattggcacagattaccaggtatacatg

SEQ ID NO: 12004 - DNA, 435 bp, Oryza sativa
  Clone ID: uC-osflcyp014a02b1
gcggcgagggcgatgaggtggaggaggacgaggacgaggtggtggtcgtcgtggtggaggaggacgaggatgatgaagacgaggagggggagggggagggggagaaccaggtggtgccgtgggcggaggaggcggaggccacgccgccgcccgtcgcgagctccacgttgagcagcagccgggaggccgccgccaacggcgcgaacgccgccgaccgcgtcaaggaggaccagccgtgctcgacgtcgcagccgagcttgtgccggtacgcgtcctcggctcaccatggcggtggtggccggagcgacgaggccaccttctcccggtacggcggtggcgttggcggccgattccttgcctcccggcataggaagagatcgccctcggatttccgtcggtcggggttggcgcaatcggtgagcggcgtgcatggga

SEQ ID NO: 12005 - DNA, 353 bp, Oryza sativa
  Clone ID: uC-osflcyp014a06b1
tcgctctcactcaaaacaacgtcgggggcagcgcctctccccaacctttctcccaccagcgccgacgctccccctccccctccctgcaccggtgaccggcgccaccgcgacatctccccctcttgctcctgtctcaccggcacggcgcggcgactgggaaggcgacccaccaacagcgccgttttccctaggccactgccccggtcctccaccggcggcgctctacttccggcacgaagtcagcggaggcggcggcttcctcaaccccttgtcacctccctcccgcggtatatccggcggcggtggcggtggcggtggcggcgtcagcgggaggaggtgggatcgggagtggc

SEQ ID NO: 12006 - DNA, 162 bp, Oryza sativa
  Clone ID: uC-osflcyp014b05b1
tttttgtgagacgagtccattgagtccgcacgaaggatagcaggcagacgattggtgtggccactaacaaggcacggcctgcgctggcggacccaggcaatcatccggcggaggatcagcgtgaccagggccatatagtagacgagcaaggtacgtagctga

SEQ ID NO: 12007 - DNA, 235 bp, Oryza sativa
  Clone ID: uC-osflcyp014b09b1
tatcaccttgccagatcccaacacggaagagctcgcttctgtcgctgccatggctcattacttcaagaacaccccataatcaatggctgacatgggaacggaccttttccaacagtgatagggactctatcagatcaatattgacgagtcataaatgccacccatcaagaagatacgcctcaaggtgagccactacaagatcttcaagggcgcaaggaaattggggtacctccac

SEQ ID NO: 12008 - DNA, 321 bp, Oryza sativa
  Clone ID: uC-osflcyp014c03b1
caatggttctaagaggcatgtgttgtacaatagaattgtcagttcatcagatactggtggctgactgccgtttttcatttgtggcactcattattttagccccctaaggttgggaatatgtttaacaagttttgtatttttaagataataatgttctaggttaaatttcagttttggtggatatatgtcaaaatcttgtattcttttcttatttataatggaattgtggttttccctctaaaaaaaaaaaaaaaaaaaaaaaaaaaaaaaaaaaaaaaaaaagggccccctaattcggggggccgcctttttagaggcccc

SEQ ID NO: 12009 - DNA, 443 bp, Oryza sativa
  Clone ID: uC-osflcyp014c06b1
tctttcgcgggggggtactttgtcttcgtgcaggcgaactcggctgccgccggctaggcggcccacacgcggccgattagcagccgtgccgaccgtaagcgcgaccggcggttaggagaccttactaggcgtagagagagacaccacccagccggctgttgtctttaagaccgagttatacactctgactggtgtgccacctgaaagggaaaaaactatcgcgaagggtggaaaggcggaagatgatacagattgaggtactgtgggagtgaaagatggtgcaagaactgatgaggatcggcgcagctgatgagattgcgaaagcttcagagtacggaccagaccttgaagaggatataccagaggaagagcacgtggctgcacagggaacatacgctgtgcttcatacagtgacaaaaacaattaaaactcaattgttcttc

SEQ ID NO: 12010 - DNA, 306 bp, Oryza sativa
  Clone ID: uC-osflcyp014c07b1
tgttcggcgggccggcggctccagaggcgagtggatttgaatggtggataaaaaggattaatcgtgcccttgatttgtatgatgagttccgtatagaccatttccgggggcttgcaagtttttgggcaggtccttgtgcagcaaaagttccgctgattggaagctggagggctggaccgaggaatgcgttttttgatgcattattcaaaagtgtaggttgaataaacataattagcgggaagtcttttcttaagctgtaacctcaaagggtgccgcaactttttaggcatatggagcaagatgttg

SEQ ID NO: 12011 - DNA, 233 bp, Oryza sativa
  Clone ID: uC-osflcyp014c09b1
ttggagtcgactgggggagagtggcgcctgatcacttcatccaggggcaaggaggatgcagtccacaactttgtctcggttgtggtaccggatacggagtcgtgcaggcacttttttcaacctggggtaagagactcccttgggatataccgaagctgcgtgagaactacaggggacggaatctaggaagacatactctcatggtcctgccgtggatccaaagaacccaccca

SEQ ID NO: 12012 - DNA, 447 bp, Oryza sativa
  Clone ID: uC-osflcyp014d10b1
ttgggaatcacctcacctagctagcttgcgagtgacacgtcacccacacgcacgcacgcacgtacggcgcggacatggcgaagctcgcgctcggccaccaccgcgaggccaccgaccccggctgcctccgcgccgtcgtcgccgagctcctcctcaccttcctcttcgtcttctccggcgtcggctccgccatggccgccgccaagctgggcggcggcggcgacacgataatggggctgacggcggtggcggcggcgcacgcgctggtggtcgccgtcatggtctccgcggggctgcacgtctccggcggccacatcaactcggccgtcacgctcggcctcgccgccggcggccacatcaccctcttccgctccgcgctctacgccgtcgcccagctgctcggctcctccctcgcctgcctcctcctcgccgacctaccggcggaga

SEQ ID NO: 12013 - DNA, 437 bp, Oryza sativa
  Clone ID: uC-osflcyp014e05b1
tattttagtgatgactatgattctgatgcaggcgagaaaagctctgagacttctataaatcacacgttggtaaaaggtctttccatccgccttgaggcgttaagtgtagaacagttaatcgaacgagctcggccactgcattgaccagtatgcatacatgcacaccttgctatcgactggtacaatggggtacaacctttgatgactgatgccagaacaatagggttctataaaggcaactcgtgcacagagaattggctaggttagagctagaagagctatatcgcaggggaacttgagccggtaccatctgacgatcaatctagcaaatggaaaggatagcgggatagctctgatcgtgagatctgtagcacaccaatggtggttgttatgaacaactgtttggaacacgatgaggatgatcagtggaaaggtat

SEQ ID NO: 12014 - DNA, 450 bp, Oryza sativa
  Clone ID: uC-osflcyp014e07b1
ttcctttctgagcatagggtcaagcgggagtgtgaagctaatgggcctattaaaagggtacggtttgtgaccgacaaggaaacaaataaacctagaggatatgcattcatcgagtatatgcacacccgggacatgaaaaatgcttacaagcaagcagatgggagaaaagtggacaataggagggtgctagttgatgtggagcgtggtagaactgttccaaattggcgtcccaggagattgggtggtggacttggatcaagcagaattggtggtgaaaatgctgaacagaagctctccactagggatcagcagcacgctggacgcccaagatcggaggagcctaggagagatgagcgtcgtgcagatagggaccgcgagaagtttcgtgaaaggccacgggaaagagatcgtgatgagagaactcgtgaacgaacccatgacccgactcgc

SEQ ID NO: 12015 - DNA, 261 bp, Oryza sativa
  Clone ID: uC-osflcyp014e08b1
ctctctagcttctctatcctcctggtgttatccccattctgaactctgacaccgcggagggcatctaacccatctcgatggcggcgccgtcgaaaccgcagacggagccggagcccgccgcgggcggcgcggggctggaggcgctggaggggcttgcgctggacaccgctatcgccaaggccggggtgggccaggccgtggcgttagactgagccagtacacgcctctgtgatcgcgcggggaaacaaccacctgtggcgc

SEQ ID NO: 12016 - DNA, 406 bp, Oryza sativa
  Clone ID: uC-osflcyp014f02b1
gcaccaaccccgtctccttcctccattcctccgccgctagaaccttctagaagctctcctcctcctcccatggcggcgacgatcgtgtccgtcaaggcgcgccagatcttcgacagcaggggcaaccccaccgtcgaggtcgatgtgtgctgctcagatggaacctttgcaagggctgcagttcccagtggtgcatcaactggtgtctatgaagctctcgaattgagggacggtggatctgattacttgggaaagggtgtttccaaggctgtcgacaatgtgaactcggttattgccccagctctgattggcaaggaccctacgtcacaggctgagcttgataacttcatggttcagcagcttgatggaaccaaaaatgagtgggggtggtgcaagcagaagcttg

SEQ ID NO: 12017 - DNA, 407 bp, Oryza sativa
  Clone ID: uC-osflcyp014f04b1
tacgctgccgcttcttcggcgcccccatcccctcccctcgccgaggatccggccggccgcagaaccctagccagcccctacccctcgccggggctcccgccgctgccttcgcgccgctcgtcctcgcccttcgcgatttcgtacccctccccgctccgccccgccgcggccatgccgccggccgacctgccgcgcccccctcgccgtggcccgcttgctatcgtggactacgctcatgacgaaacggccatgtacgccggagcaggacgagagggtagatcaatggcatagacagatcgggtttggatgctcaggttgctgaggcaatgtctcagcagaacgatgcacctgaacagaatcaagtaggggcagctgcagcaatgagtgtaactggagcagaatggaag

SEQ ID NO: 12018 - DNA, 294 bp, Oryza sativa
  Clone ID: uC-osflcyp014f06b1
ataatggcaacatgagagtaccaaggctggtagtgtttttaagctaaggcggccggacgcccttatccatccaggatttctgacgcgtgcatgcaccaaacgatataggggtcccggaaaaagagaaccaattgtctgtatgtctactactaggggcatgacagaaacaagcggggatgaacacaagtgaattttagagtgagactctctcctacaatagtctggaaatcctgcggagaaggcccaaccggtagttctaagccaaatatgggggagccatggctggcgaaatgg

SEQ ID NO: 12019 - DNA, 366 bp, Oryza sativa
  Clone ID: uC-osflcyp014f07b1
tgttacagacgcccacatcacacgcggaaagccgcattaacagccagccatggcgtccacgctgaccaacgtcggcctgtctaccccggcggtggaggtgtcgaccctcgttaggccggtcaccggagctggacgcgtggtggttccccgtgttggccgcggcggtttcgcggtggtgagggcaagcgggccggcgacgccgtcggacatctcggacaagatgagggagagcatcgacaaggcgatggaagcgtgcgcggacgacaccgggagcggcgagcgcgcggcggagcgtgacgaggtggaggagctgagcgctgcggcaagccatgcttgtgacaagctcatggagacctacgacccgtt

SEQ ID NO: 12020 - DNA, 422 bp, Oryza sativa
  Clone ID: uC-osflcyp014f09b1
ttctttttgaattcatgcaaggtttagattctgaaccaccttttgaaaatctctcagctgggacgccagaagaagattcagatgatcgagacgaagctgacactactgcagaatctgcggaacttcctgaggaagaagttaaagtttctgcagcagagaagattgtatctgaagctgacctgccatcttcgcaggataaatctgagtgcaggttagagtcacccaaagatgaggtgggctcaaatttgggccctgttgagcagcgtgaaggaaagctgataaaagcctgcccagatagtgttgaagtcaaacaaacaactactgaaaatgtgctgaatcgtgactctactgtgcataatatggcaactactctatctatgatacgtgaaagtatatgggagggtggcattcaacttaccatg

SEQ ID NO: 12021 - DNA, 438 bp, Oryza sativa
  Clone ID: uC-osflcyp014f10b1
ctccccttccctcctccttcctaccccgccgccggtgcttgtcgccgccgccgccgtcagagagggcgaggagggcggctcgaggaggagcagcagcagcagcagcaggaggaggatggggttcatctcgttcgtcgggagggtgctcttcgcctccatcttcctcctctccgcctaccaagagtttagtgaatttgggactgatggtggaccagcagcaaaggccttgaagccaaaattcaatctatttacgcagcaagtgtccaagagcttaggaatggcagtgccacatattgatataaagactgtcattgctgctaccatgtttcttaaaggctttggtggtcttctgttcatcatcagcagctcatttggagcattcctactgctcctgtacttagcagttatacacctgttgtgtacgacttctccactatg

SEQ ID NO: 12022 - DNA, 412 bp, Oryza sativa
  unsure (1)..(412): unsure at all n locations
  Clone ID: uC-osflcyp014g01b1
tttatgggcttcaatggaggatttctacgagacgagaatcgatggtgttgatggagagaccattggattatttggcgtattcgacggccatggcggagctcgagcggctgaatatgtcaagcagcaccttttcagcaatttaattaagcatccaaagttcatcagtgatatcaagtccgctatcgctgaaacgtacaaccatacagattcagaatttctgaaagccgaaagtagtcacactagggatgctggctcaactgcctcaacagctattcttgtaggcgatcgcttgctggttgctaatgttggagattctagagcagctgttttgagaggcggngatgcaattgcagtttcaagggatcacatacccgaccagtcagatgagagacaaagattgaggaccgctggg

SEQ ID NO: 12023 - DNA, 461 bp, Oryza sativa
  unsure (1)..(461): unsure at all n locations
  Clone ID: uC-osflcyp014g03b1
tttggtcgcgtgggcggacgcgtgggcgactaccggagggccatctacggcgacatcacccacaaggccatcctcgtcgacgccgccgggacgctcctcgcccccaccgagcccatggcgcaggtatacagaacaattggcgaaaagtatggagtcaactactcagaggatgagatcttgatgagatacaggagggcttatgcgcagccatggggtagatcgcggctgaggtatgtggatgatggtaggcccttctggcagcatatagttagcgcttctactggatgctcagatttacagtactttgaggaactttatcagtactatacaactgcaaaggcttggcagctctgcgaccctgacgctaaatatgtttntgaagcattgagaaaggctggtgtaaaaacagctgttgtatccaactttgacacacgtcttcggccacttttacaggccctgaa

SEQ ID NO: 12024 - DNA, 454 bp, Oryza sativa
  unsure (1)..(454): unsure at all n locations
  Clone ID: uC-osflcyp014g09b1
ttacggaggatgcgattcttaaccatgtttcagagcatggttctgttgtaaacacaaagctgtttgaggtgaacggcaagaggcaggcgctcatccagttcgagagcgaagaggaggcgaccgaagcccttgtatcaaaacatgccacctcgctggagggtaacacgatcaggatctcattctcccagatgcagagcatatagaaactcatcgtggggaaacttatccagctaatcggatgacgagtagcaagttttatttaggaaagcattgaactttagatgtgaatcctgttctgtcttctcctgtaggccgatgctttgtcttttgctgtaccatgctgtgagactgactgaacaagcttgacgttggggcctttagctgcaccaaatggttttaagcttcttttctttcccttgntggttttaggcatccaggattgtgtctggatatt

SEQ ID NO: 12025 - DNA, 422 bp, Oryza sativa
  Clone ID: uC-osflcyp014h11b1
tcgctcaccaatccccaattccccatcgatccccattaccgcggagaaatcagaaatcggcgtctccacctcatcgcccatcgatcccattcagcttcgcccctccgttcttccccgccgactccttccctccgttctccttactgaatcagcgtcggctatggttgggggttctcggttgctgccggtcacaatgaggattccaaacagtgcgccattgagaaccgaccacaggtccagggttttggtaggtaatgcgcattgcggcggacgagctgaggcggcagggtatagcgcataaacttaagttttacgtccttcaacagttcaacgatgaatcgatctgtgcaagttatgcagctattggctgtttgtgtgactgctcaacctcggctttgctgtcctccggctatggtggcagg

SEQ ID NO: 12026 - DNA, 422 bp, Oryza sativa
  Clone ID: uC-osflcyp088a02b1
gtctctccttcgccactccccagcggcggcgcgccttctccctctcccagcgacggcagcgcgccatccactcccttcctcccagatccgactggatgaggggagggcagcggcgaggaggcggcgctccccaccccttactatctccccaatactggatcaggctgaacgaggggagcgccggaggggccagccaccgcatgccacagacgaggtgatgctcccttcctagctggcaaaaacgtcaggaggagggagcgcacgtctactgggcggcccttaacgcactacctccaacagctggagggagggtgacgcatcatacaccctagcgacggccgcgagggcttctcactcatcagagtcctccacgagctaatgggggccaacagaaaccaaatatgatcagaacatagccgcag

SEQ ID NO: 12027 - DNA, 198 bp, Oryza sativa
  Clone ID: uC-osflcyp088a05b1
gttatttccagcgcactaagcttgcacctggtatgggacattcacacacctgggcgagcactatctcacctgcctgccatggtatatacttgcatgctgattgagatgatgcacacagttggctgcgcctacggcgcctgagccgagaatacaaccggggctggaaagatgcactaggactcgattaacatatctacc

SEQ ID NO: 12028 - DNA, 134 bp, Oryza sativa
  Clone ID: uC-osflcyp088a07b1
gttaaatcgaacgctcggagtcaggacctagggttcgcttgtaacaggcaatgtggggtaacaaatgagctgcctattattgtaaacactagcatacgcattgtcaccaagaacacagttgttgcagcatacga

SEQ ID NO: 12029 - DNA, 435 bp, Oryza sativa
  Clone ID: uC-osflcyp088a10b1
gtcttccctcccgctcgggccatcgacgcaggctcccctaaagaacaacacctaccctctgccgcgtcggcgaagagatggggaagcacgagttcctgacgccgaaggcgatcgcgaacaggatcaaggcgaaggggctgcagaagctgcggtggtactgccagatgtgccagaagcagtgccgcgacgagaatggcttcaagtgccactgcatgtcggagtcgcaccagcgccagatgcaggtgttcggccaggcccccgaccgagtcgtcgagggcttctccgaggagttcctcgacgccttcctcaccttgctccgccgcgcccaccgacactgccgcatcgccgccaccgtcgtctacaacgagttcatcgccgaccgccaccacgtccacatgaacctcacgcgctgggccacgctcaccgagttcgtca

SEQ ID NO: 12030 - DNA, 201 bp, Oryza sativa
  Clone ID: uC-osflcyp088b02b1
gagtatttgagtgcgcccggtctgaaccctaggaggaccggctaaactccaggaattagatcgtttcgcatgcatgccgacgtataaagaggagtgcgcctacaaacgaaggaaaccgatacggaacattatgactttaggtacagagatccgcatcgatctgaaagaggtaacgacggatgagaaaatgctcgagcaccg

SEQ ID NO: 12031 - DNA, 131 bp, Oryza sativa
  Clone ID: uC-osflcyp088b03b1
gagtactccagctaacgctctcagaaccattgagaggaccttaaatgtccatgaaggcgttattttctcttgctttcaaacctagaaatgtgaatgctgattgacaccatgtaaaccgtattggtcacatg

SEQ ID NO: 12032 - DNA, 114 bp, Oryza sativa
  Clone ID: uC-osflcyp088b04b1
gtctatatcagcgcacgcgctctgcaccttggcggggaatgtaaaaggccatggatgcttccatgtcggatgcttcccaacctacaaaggaaaatgcgcattcacaccaagtaa

SEQ ID NO: 12033 - DNA, 119 bp, Oryza sativa
  Clone ID: uC-osflcyp088b06b1
caacgcacgcggtcggcaccacatatgggaatgtcaaaggccatggaggcttcgatatcgggttcgtaccaacctataaacaagaatgcgcattctcaccaagcacacagttatcgtag

SEQ ID NO: 12034 - DNA, 128 bp, Oryza sativa
  Clone ID: uC-osflcyp088b09b1
ttcctccacaccactcgcgatccggactttgggttaacttttacatctgaaggattgattacaaaccctatacggacattgcgacccaccactctactcaacatcaacaagaacacagggtcgtctac

SEQ ID NO: 12035 - DNA, 531 bp, Oryza sativa
  unsure (1)..(531): unsure at all n locations
  Clone ID: uC-osflcyp088b11b1
atggcatcggtgcactattatgtgcaatcacacatacagatgaatgaatatcgagatcgtgttgtactgccgaaagcctctaagatgttcgggaaacagattaacacttgcctaaaggttatggatatgacggggctgaagctttctgccttgaaccaaataaagatgttatctacaataacagccatcgatgaccttaactatcctgagaaaacagagacctatttcattgtcaatgctccatatgttttttcagcatgttggaaggttgtgaagcctcttctacaagaaagaacaaaaaggaaaattaaagtcctgtacggctcaggaagagatgaattactaacggctatggactatgaggcactcccaaacttttgcaagcgagaaggatcaggctcgtcgaatgattcgtcggatggagttgattgctactcctatgatcacccttttcaccaggagctgtataattacatcaaacagcangcccttgatgaagacttcatcngtcccataaagcaaggctcaatg

SEQ ID NO: 12036 - DNA, 156 bp, Oryza sativa
  Clone ID: uC-osflcyp088c04b1
ccagcgaacgcggccggaaccgtagatgggattgtcaaagtcaatggatgcatcgttttcggatgcttgccaacctataaagacaaatgcgcatttaaaccaagcaaacagttaaagaagcctattattacatgatcctaagatacacacatgatc

SEQ ID NO: 12037 - DNA, 100 bp, Oryza sativa
  Clone ID: uC-osflcyp088c07b1
ttgtaaacgagcactctaagtcatcactaggtgtagtcatataactttccaggggggattaaaaaccagctaattgaaaatcgataaagacatatacaca

SEQ ID NO: 12038 - DNA, 548 bp, Oryza sativa
  Clone ID: uC-osflcyp088c12b1
tttgtacatgtgccagggcggcgacttcacccgcggcaacggcacgggaggggagtcgatctacggcgagaagttcgccgacgaggtgttcaagttcaagcacgacagccccggcatcctgtccatggcgaacgccgggcccaacactaacgggtcccagttcttcatctgcaccgtgccctgcagctggctggacgggaagcacgtcgtgttcggccgcgtcgtcgagggcatggacgttgtcaaggccatcgagaaggtgggatcccgcggcgggagcaccgccaagccggtcgtcatcgccgactgcggccagctctcctagatctgtgctgttccccttcgcctttcgccagtatcagtcgtcttgagtcgtcgagtccctaaataaggaggaggtggtggtggtgttagtctctttatgaggtcgtgtcgcgttggtgagatgagatcgcccatggtttggttggattaggcggagttcttggatcgtatcttggaaatggattctgcatccttcctggggtggtttaaaactaaatcgtgtc

SEQ ID NO: 12039 - DNA, 131 bp, Oryza sativa
  Clone ID: uC-osflcyp088d04b1
gttatttccagcgcacgcagctagcaccttggatgggaaggtcagagtacatggatgcatacttttcggatgcatgccaacctacaaagaagaatgcgcattcacaccaagcacacagttgtcgcagcctg

SEQ ID NO: 12040 - DNA, 76 bp, Oryza sativa
  Clone ID: uC-osflcyp088d06b1
tttatatacatcgaacatgtccagcacctaaggggggaaaatcataaaaaaggtggggttctctccctcttgacta

SEQ ID NO: 12041 - DNA, 52 bp, Oryza sativa
  Clone ID: uC-osflcyp088d07b1
tagaaagctaacataccaagccattatctggggcaattttttaaacttaaag

SEQ ID NO: 12042 - DNA, 157 bp, Oryza sativa
  Clone ID: uC-osflcyp088d11b1
tttctaaacaccattacctgtatagactttgtggcaatccgtacgtcggcaccgttgattagaagagaggaggggacatgggcacccaacactcgagccagcactgaggagtcgcccgagcgagctagagacggtgccgacagtaccgatccccggt

SEQ ID NO: 12043 - DNA, 158 bp, Oryza sativa
  Clone ID: uC-osflcyp088e04b1
tactaatcgaacgaaagcaggaaggggttcgtcggggcggaacatatgccttccgctgtccccatggaaagcactcatacgaaacatgaaacactggggattattgcgaagataaccacatctgatccacattcactgggaccatgtgttacagttaa

SEQ ID NO: 12044 - DNA, 257 bp, Oryza sativa
  Clone ID: uC-osflcyp088e05b1
ccaacgcacgcggcctggaccttatcggggactttcacagtccatggatgcttctgttccgcttgcgtgccaatcgacagacacgaatgcgcatttctcaccatgtgctacagctgccgatacccatggcttttgctcctaagatacaccctcttctgaacaatgcacttacgcacgattaattatatgacaactgggagatcatccggataggttatttatgctcaaagcataatacacttagtatacgttgtact

SEQ ID NO: 12045 - DNA, 91 bp, Oryza sativa
  Clone ID: uC-osflcyp088e06b1
gataataccaccgcacgcagtcagcacctattgtgggaatcacaaacgagtaggagggtattttatcagattcatatcgtccttcaaacac

SEQ ID NO: 12046 - DNA, 155 bp, Oryza sativa
  Clone ID: uC-osflcyp088e10b1
tgttctaattaccattcggggtctggaccgtgtgggagctattctctctggagggttgatgagaaacccggaagggacatggctacccacctctctgtgcaacagtactgagaggctagggaggtctatgccatagtgcgctttaacgatcgcag

SEQ ID NO: 12047 - DNA, 164 bp, Oryza sativa
  Clone ID: uC-osflcyp088f06b1
tataattccaacacacccggccaggactgtatcggggactgtaaaagtacagggatgcttcggatccggatacgtgcaaagcgacagacacgaatgcaccgtctcatatagtgtacagtgactgctatccgctgacagtggggcccagatacacgcagtgctat

SEQ ID NO: 12048 - DNA, 227 bp, Oryza sativa
  Clone ID: uC-osflcyp088f07b1
ttcataacaaccactccaagtttggactgtgtataagctcttcaccctacacggctgctaagtaaccagaaacggacatatctacagacacgaatgcacattctcatctagaacaccagctgtttatatcccatattgtcgatcaagagacacacgtctatcataattatgtatatataatctagaataagcatgactatcttcaccaatttgtatagctgctatta

SEQ ID NO: 12049 - DNA, 510 bp, Oryza sativa
  Clone ID: uC-osflcyp088g04b1
gccttgcgcgtgtacgagccgttcagtaccgacccgcagttttatgtgtatggttatgatgatctggtgctgcagcctagagagaatgcatcagtcaccttcatattcttgccgaagttgctaggcttttcatcggcgcatttggttttgcagacgaatttcggtgggttcattatacaggctaagggcatggctgtcagatcaccttatcagttggagccactagctgggatggatgtcataacaggtggacggctggagaggaacttgtcgatattcaacccttttgatgattctctctatgtcgaggaagtggctgtttggatgtcttcattccagggcacaaaacaatcttctcatatagtttgtcagttaggcccttttgacgagtcgttggagtttacttctttgagtagcaactggtatacagcaagtagtactgaatttggattgccgatgatccatatcaggcctagtgagcaatgggaggtgctttctacacaaagcagc

SEQ ID NO: 12050 - DNA, 162 bp, Oryza sativa
  Clone ID: uC-osflcyp088g07b1
gatatatccaacacacgctgtctggactgtgtcggagaatttaatcgtcgagggttgctaaggaaacggaaacgggcagagcgacggacacaaatgcgcaaacaaatggagcgcactgatgctcctgccccaaatggacgctgaagggacatacgatgtgct

SEQ ID NO: 12051 - DNA, 541 bp, Oryza sativa
  unsure (1)..(541): unsure at all n locations
  Clone ID: uC-osflcyp088g11b1
cttcaacctaaccccgcaagcaaacgccctgaccgactaaccctcgccaccgagcaaactcgagacccaaagccacgcaactttctttgtgttctttgatttgttcttggcaatcgcatcagagatctattgattgattttgaagcagaggaggagcagagaggtagacgaagagctgcaagattctttgcctgttcaatcgaccgtgctttgtgagagcatacgacggcggcggcggcgagggcgcggcgtctcacctgccccgacggcacggcgaccgaggaggggaggccggcgacgagatgggctccttgccgctgaggagtggtagcagcctgcctccaccgtccttctccaagtcgccggcctcgctgctgctgctgtccaagtcgctcaccctctactgctgagagagctcgagctcgagctcgagagctcatgggcggtgtcacctcgtcgtcggcggngggaggcggaagaggngagaccgcgctgggggacctgccngagagctgcgtggcggaggtgctgcgcaggctgg

SEQ ID NO: 12052 - DNA, 523 bp, Oryza sativa
  Clone ID: uC-osflcyp088h02b1
gacgttaggagagagatggccactgcttatgctcccatggcgagccagctgatgaagagcagcttggtgtgctccaagccgagggggctgtctggtgcttcgctgacaaggaggccccgcttcacagtcaaggccatccagtctgagaagccaacgtaccaggtggtgcagcccatcaatggcgaccccttcatcggcagcctggagacgccggtgacctccagcccgctggtcgcctggtacctcttcaacctgccggcgtaccgcaccgccgtcagcccgctgctccgcggcatctaggtcggcctcgcccacggctaccttctcgtcgggcccttcgtgctcaccggcccgctccgcaacacgccggtgcacggccaggccggcgccctcggcgccgccgggcttgtcggcatcctcagcgtctgcctcaccatgtacggcgtcgcctccttcggcgagggcgagccgtccacggcgccgacgctgacgctcaccgccgcaagaggaggccgacagctgc

SEQ ID NO: 12053 - DNA, 503 bp, Oryza sativa
  Clone ID: uC-osflcyp088h03b1
ggcgttcgtgctaagctgcagcacaacccaaagccatatatctccgataatggcgaactcaccgacgctgacaatgctggtgttcctagctattgggctatctctcgtcctctccgcagccggcgtgtctgtggagagcgtggtcaccgaggcgttcttcaacgggatcaagaaccaggccccgaacggctgcgccggtaagagcttctacacacggcaatcgttcctgaacgccgcccgctcctactcgggcttcgccaatgaccgcaccaacgacgactccaagcgcgagatcgctgccttcttcgcgcatgtcacacacgagactggacatatgtgctacatcaatgagataaatggggcaaacatggactattgtgacaagagcaacaaacagtggccgtgccagccgggcaagaagtactacggacgcgggccgctgcagatctcatggaacttcaactacgggccggcgggaaaagacatcgggttcgaccggctag

SEQ ID NO: 12054 - DNA, 370 bp, Oryza sativa
  Clone ID: uC-osflcyp088h08b1
gggcataaaatgaagccgaaactttattgcaacaacacgcacggaaatttgctgatggacttcaaaaccctgctttaactggaagagttagaccccatacctgaacctactacacttagcttcaacgggaacacagcttccctttacacttaatgccctataaatttccaaacgtgtgctacgaccattagatcttggaaagactgctacaataagagggcaactgcatgcttcagttacccagccttgggcttgggcttcagtctcttcaggtgggagcacaggaaaacctcggcaagtgccatggcagtgcccagggagttgataggaaaaaccggattcctgaagaacaaaaccggtgttacgatga

SEQ ID NO: 12055 - DNA, 552 bp, Oryza sativa
  unsure (1)..(552): unsure at all n locations
  Clone ID: uC-osflcyp088h09b1
gccgccgccaccgccgccgccgccgccgccgaatccgagacccccatctcggattcacctctcccgcctccggcctccgtcaccgtctccccacgcgcgtcagtcatggcgggaatggcaccagagggatcccagtttgatgctaagcactatgattctaaaatgcaggagcttctgaaccaaggtgaaaccgaggagttcttcacatcttatgatgaagttcatgagagttttgatgacatgggtctccaagagaaccttctcagaggcatctatgcctatggtttcgagaagccttcagccattcagcaaaggggtattgtccctttctgcaagggtcttgatgtgattcagcaagctcagtcaggaacaggaaagactgccaccttctgttctggaattttgcagcaacttgactatgctgtggttgagtgccaaggcctggtccttgctcctactcgtgagctngcacagcaaatngagacagtcatgcgcgcacttggtgactatctgggtgtgagggtcatgcttgtgttggaggtacttctgttc

SEQ ID NO: 12056 - DNA, 279 bp, Oryza sativa
  Clone ID: uC-osflcyp088h10b1
tttgctatggcttaggctctggatatggctcaggctacggcggaggcaacggacaccactaagctcgtttactctaccagctacaatagcctgttgttataagtgaaccgtgatcagtaatgagcctctctctctgctttacaaagagcttgtcggattgtatcgatatagcactgtactggtcggcttgccgtttgatcacataagttggcaaagcctagtaattaaataaaacgatctttgtactaaaaaaaaaaataaataaacaacaatctatgc

SEQ ID NO: 12057 - DNA, 524 bp, Oryza sativa
  Clone ID: uC-osflcyp088h11b1
ttatagcgagagtgcgttgcgttgcgagcgggaagcgaaaactcgaaaccatggccacggccggcgacgagcagcagcagcaggcggcggcggcgcagacggcggaggtgacggaggcggcggcgaaggaggtggtgtccgtggagatgccggcgccggaggggtggacgaagaagtttactccccagagaggggggagatttgagattgtttttgtttcaccaactggagaagagattaagaacaagagacagctgagccagtatctgaaggcacaccctggaggccctgcatcctcagagtttgattggggaactggtgatactccaaggcgctctgctcgcattagcgagaaagttaaggctttcgatagcccagaaggggagaagatcccgaaacgttctaggaactcatctggcagaaagggcacgcaggagacaaaggaggccaccgaaaatgaagacgcgaaagacgctgaagctgacatggaggcccctagcgaagatgctacaaaggagactgat

SEQ ID NO: 12058 - DNA, 559 bp, Oryza sativa
  Clone ID: uC-osflcyp088h12b1
ggagacggtggggctgatggaccggcgggcggcggtggaggcggagatggacgccatcatcgccgccctctccgtgcccgtcgggccggggatcaccggcggcctcgtggacgcggagggtttccccaggtccgacatcgacatcccggccgtcctcgcccagcgccgcaagctcgccgaattgcggaatgatcacaaggatattacgaacaaaattgagaagaatctggaagttttgcactcaacaaaattgtcaagaaatgaagcgtcaatccctgcaagttctggcacacctgcttcattgcacagtgggttatctcaaaatgatcctatggaagaagatgctgtgaccagacttccttttgccataattgatgaactgacagatggttctcctgctgctgtggatggcttgcagctttgggatgagatagtaaagtttggaaatgtggaagcaggtgatagattgcatgaaaggcttgtctctgaagctctttccaatgaggattgtcaagtatctctagtcatcattcgtcagggatcatcaatgaacttaact

SEQ ID NO: 12059 - DNA, 230 bp, Oryza sativa
  Clone ID: uC-osflcyp096a02b1
tcttctttttcttgcttctagatcacaacatgaactagaagtttccacaaaacaagcaatatttgtgggttctagcgtcagcgatactatcaaaacatgtattgccatgggaaatgaacgagctgcactcaaagtgaagtcagagtacatggttttgtaaatgccttcaaaaagtaaattgtggctgattaattttataattgtatctcttctattgtcctattcctttt

SEQ ID NO: 12060 - DNA, 141 bp, Oryza sativa
  Clone ID: uC-osflcyp096a03b1
gtcgtgacgaggggcaaaatccaaaaacgaggggggcaatttacccggggggggcgggaaggccccaagccccccaaattgggtaaccaaatccacacgctaccaatgggcctggttacggaacacgacgagaaggcaagg

SEQ ID NO: 12061 - DNA, 68 bp, Oryza sativa
  Clone ID: uC-osflcyp096a07b1
ttttcttctccggcacgggccgcgactacaggcgctgtatacatgtcatgctttagcggcgcaggcta

SEQ ID NO: 12062 - DNA, 140 bp, Oryza sativa
  Clone ID: uC-osflcyp096a11b1
tccggggattctaagttccaacaatccaatctgctgctcttcctcctctccttgagatccgatccaatccaacgcctgcggcagccgcctcgccggaggaggaggatgcacggccggcctcgccgtccggacaagccgga

SEQ ID NO: 12063 - DNA, 171 bp, Oryza sativa
  Clone ID: uC-osflcyp096a12b1
tggtagcaccgcatgagacgacgcctctacactgcgctcccttcccctccccttccctcgattcgctaccgacgcaatggcggccaccgtcgactacctaccgctccgtgcccaggcgcaggtgggcctggctccgctccggccgtcggactcggtcgttgttggggcgcg

SEQ ID NO: 12064 - DNA, 250 bp, Oryza sativa
  Clone ID: uC-osflcyp096b02b1
gacttctgcgaggagggaggagtaccacctgacggccgaggacggcgacctccagagcaagacgatgctgctcaacggcgcaccgttggaactctcggacgacggcggctctccggccatgagccctgcgctcgttgctgtcaacatgtcggtgtacctggcatcgtcatctgacggtctttgttgtacttaccattgccttgagggtcattccctgttctatgagagattcattttttgtcttttctta

SEQ ID NO: 12065 - DNA, 314 bp, Oryza sativa
  Clone ID: uC-osflcyp096b03b1
tctggctgaagagctatctctgccactggaagctgggaagtactctggtgggacattcatttttcctgaagcacagccctctccacacaagaacttctctgaggaggttgcagccctgaaccgctacttcggcggtctcaaatctggtggcaacgcatacgtgattggagatcctgcaaagccagggcagaagcggcatgtttactatgccacccatttccctggagcaacctgtggttacctcttgtgatgcgcatgccttgggcttggacactgaagtaagctttctgttattttttcattgtctcttgttt

SEQ ID NO: 12066 - DNA, 66 bp, Oryza sativa
  Clone ID: uC-osflcyp096b04b1
gcctcctacacttgaaccacgtgaaccaatacggggggatgatcccccgcacagcccgtttgaccc

SEQ ID NO: 12067 - DNA, 70 bp, Oryza sativa
  Clone ID: uC-osflcyp096b08b1
gtctgctccactagcacctcgagaaccagaagggaaggattatacggggaatggctagtttgcccacgaa

SEQ ID NO: 12068 - DNA, 86 bp, Oryza sativa
  Clone ID: uC-osflcyp096b09b1
tggtcttgaagaccagtaccaggaaaaccaatgtgggatgttcttctcgtggcacaccccaatattgctgatgatacacatcccct

SEQ ID NO: 12069 - DNA, 136 bp, Oryza sativa
  Clone ID: uC-osflcyp096b11b1
tctgttacctttgcttgaactccgacgatggagaagctgccaccgaggagcatatgtccatggctcgcacgaaggcgtggagaagcacgaggttaacacaaattgatgatgacgagcataacacagaagaaaggag

SEQ ID NO: 12070 - DNA, 200 bp, Oryza sativa
  Clone ID: uC-osflcyp096c05b1
gctatttccacttgcaccacgtgaaccagtatggaaggatgtttccccgcatagccacgattgcccccctccccattatgtgaacgcctgttctgtcatgctctttatgatctcccaccagaaatggggatcaaacatggtagatgaagaataggagcatcaacatgatgctcaagtgtgattgtcaggatgacctgtac

SEQ ID NO: 12071 - DNA, 73 bp, Oryza sativa
  Clone ID: uC-osflcyp096c08b1
gtcttttatacgtgcacctaatgaaacaacaggggagcattaaacgactcgaggggtggatggatccataatc

SEQ ID NO: 12072 - DNA, 136 bp, Oryza sativa
  Clone ID: uC-osflcyp096c10b1
tcttttattctggttgaaggaccaaaataataacgggattttgttccttcgactggagatgtctcaaacaataccccatctatgaatgccatctaaatacgtttattcatggtcgtccaggagacaaatggtgcca

SEQ ID NO: 12073 - DNA, 58 bp, Oryza sativa
  Clone ID: uC-osflcyp096d07b1
gtcttctccactagcaccacgggaaccagtatggaatcagtagacgtcgtatagcgag

SEQ ID NO: 12074 - DNA, 170 bp, Oryza sativa
  Clone ID: uC-osflcyp096d09b1
gtcttttctacttgcaccaccagaaccagtaggggagcatgaaaggccacagggagtcgatggccccaattcggcttagaaggacaccatgtacgtgaaggactgtaagaacaatcatcaggaatgggggaccaagcaaggaagatgatgaaaaggagcaccaacctcag

SEQ ID NO: 12075 - DNA, 194 bp, Oryza sativa
  unsure (1)..(194): unsure at all n locations
  Clone ID: uC-osflcyp096e06b1
ccactagcaccacgtgaaccagcatggaagaaggaaccgccgcatggcgaggttttcaacgagccccatgaatatgaacgcccattctaaactgttcgtatcaggccattntccgaatggggtgaccaagcccggcggattgaagaaaagaagcatcatcacgaggacgaagggggatttcaggatgaccagaa

SEQ ID NO: 12076 - DNA, 197 bp, Oryza sativa
  Clone ID: uC-osflcyp096f09b1
ttcttctctacttgcactatgttaaccattctggaatcttgtgacgtcgcatagctgggttgacaccaggccccacaagatgaaagccagctataaccagatactagagaccactcaccataatgggtacccacacatggagctacaaaaaaagcagcatcaccatcaggctgaagaggaatttcaggttgaccaga

SEQ ID NO: 12077 - DNA, 201 bp, Oryza sativa
  Clone ID: uC-osflcyp096f10b1
tttttctcgactggcactgggttaacagttctggaagattttaacctggctggggccctttgaagccaatatctatatgatgaacagacattttatccgctacagctagtgatattatcagttacatgtctcgaaccttgtggccatatcaactgaagcaccacctccatgctgaaggtgaaatttagaatgactagacct

SEQ ID NO: 12078 - DNA, 53 bp, Oryza sativa
  Clone ID: uC-osflcyp096g06b1
ctccttgagctgaggaagaaagccagctggggggttttacgcaacgaagcccg

SEQ ID NO: 12079 - DNA, 66 bp, Oryza sativa
  Clone ID: uC-osflcyp096g08b1
atcttcaggaacagcaccatgtgaaaaaaaatgggagatttttaggaagcatagtgcttttctcac

SEQ ID NO: 12080 - DNA, 88 bp, Oryza sativa
  Clone ID: uC-osflcyp096g10b1
tctcgaggacttgcacacatggaacgaacatgggatatcacaaaaaatgatgagcccctagccacaggtactaacgaaggtcatgcta

SEQ ID NO: 12081 - DNA, 97 bp, Oryza sativa
  Clone ID: uC-osflcyp096g12b1
tagaggtgaaggaccgactcttgtggagtgtgagacttaccggttcagaggacattctcttgctgatccagatgagctcaggtggtctgatgagaaa

SEQ ID NO: 12082 - DNA, 484 bp, Oryza sativa
  Clone ID: uC-osflcyp096h02b1
ggctaatgcatatgttcactaactgacaatgaaggggagtcatatcaagcacagcagaccagtgaactcctttacatatttttgccagcaacagcgaaaaaatcatcaagaccatggtatagctttgaagcgaaagaaataaaaactggagaagctcctatcgaagatggaaaacaggaaacctatgagggcattgatacctgtgaagccaaaaagagtgacaactgtgtctgcagccaacaaagtaatttcaggaagtaaaaaatgtctgctggataatggatgcaaagcataagagtttggctcatcctcgagtcattgatctgctccagaatgaagaaaaggtcaacagcttgacagttgacaagcttagtgtggagtgatattttccttggtatactttgatttttcactagcatcagttcttccgttatacattgtcttttctcttttattttacaaattttatcaattatattttttt

SEQ ID NO: 12083 - DNA, 184 bp, Oryza sativa
  Clone ID: uC-osflcyp096h03b1
gcaggccccggcccgaaattccgggtagccccacgcgccctttttctagatggcgctcttctccaccacaggggctctttaagggggggagatgacaatggccatacccaggagaggcccttagagctttccttccaagccctctaatcggcattagcagcttcagatcttgacccctaacttc

SEQ ID NO: 12084 - DNA, 189 bp, Oryza sativa
  Clone ID: uC-osflcyp096h04b1
tttgttgcagcaggagacgcttcacaagcagagggacctcttacatcccggggggaggttctgcccgcgcccaccgaatagacaggagaggtttatccggcgtttcgaccggcagctcgtgcacccaaaggtctcccctgagctgctggccattatgttcaactacctctcccagcgagatgagtcgtt

SEQ ID NO: 12085 - DNA, 449 bp, Oryza sativa
  Clone ID: uC-osflcyp096h07b1
gtcgtcttcgtactcgcctctctccgcgccctcctccgccgtcgctcgccgccgttcgtctccgccgccaccgccgccgccatgagggagtgcatctcgatccacatcgggcaggccggtatccaggtcgggaacgcgtgctgggagctctattgcctcgagcatggcatccagcctgatggacagatgcccggtgacaagaccgttgggggaggtgatgatgcttttaacaccttcttcagtgagactggtgctgggaagcatgtcccccgtgctgtcttcgtcgatcttgagcctaccgtgattgatgaggtgaggactggtgactaccgccagctctttcaccctgagcagctcatcagtggcaaggaggatgcagccaacaacttttgcccgtggtcactacaccattggcatggagaatgttgatctgtgccttgaccgcatta

SEQ ID NO: 12086 - DNA, 496 bp, Oryza sativa
  Clone ID: uC-osflcyp098a05b1
gttcttttggggagatttactgtgacattgcgaagtttgctacacttcccaggagtagtgaatatccgagacacctctgatgtatgcttatcagagtctcatgtatttcctgtctttgagatacacagatattctcatggctagaacctttccttttccacctctagctagacggaaaatcgcttacctcaagttgctgataccatgtgttctagttctttcaggggctgatattgttgttacgcagtatttccataatatctgttaccttctgcggccactgtgggacacaccacctaagccatttatccgcatcccacactactatgcccccaacatcttcatgccgcagctctgtcagctccatggttggggtatcctccccacccctcggcgtgtctttggcgccgtccttttagtaatgaacctggttttctagaaattcgctacggtgagctcctttcgatgttgacagggttgcatccttggagctaat

SEQ ID NO: 12087 - DNA, 545 bp, Oryza sativa
  unsure (1)..(545): unsure at all n locations
  Clone ID: uC-osflcyp098a09b1
ttgatcggcacccaccaccaccaccttccttccttcttctctctttctcagtctcagatcagaattatcagatcccgagggagggaggaagggtgttctcttnctccttccttctttttttttcctctcttctctttctttcttctctttcttctcttctttttcctcttttcttcttttctcctcctctctccttcctctctctctctttttctcttccttcatttttccttctcccctctcttcttctcttttttttctttttcctcttctctttcttttctctttctttctttctttcttcttctttctctctttccttttccttctccttctctcctccttattttttttcctctctcttttctccttttcttccctcttctttcttactttcttcttcccccctcttctccttctttcctctttcccttctctttctttcttttctttttcatttcttttcttttttctttcttttttttttcttctcccttcttacttctttccccccctttttttctttcctttctcctccctcttct

SEQ ID NO: 12088 - DNA, 53 bp, Oryza sativa
  Clone ID: uC-osflcyp098a10b1
tgcttactggtcgaagatcctaggcacggagtacggcgtcaggtggagcgcgg

SEQ ID NO: 12089 - DNA, 223 bp, Oryza sativa
  Clone ID: uC-osflcyp098a11b1
tctggcacctcctctctagatttatgactggcccagccataacccagcttgttcagtccttctctgttgtcttcctctactggttctatgtcttctcagtaagctccctgtagttgcagccttttgaaattacaagacttatttatacaacataattatcaaggcatccacatataaactacaaggtatatatatatatactatatatatttaccaaaagaaa

SEQ ID NO: 12090 - DNA, 156 bp, Oryza sativa
  Clone ID: uC-osflcyp098b06b1
gctgatttagggcgaagcaaggagcagggaacgggtcaggtttcatgcagagacgcatagtagccctcttcgaaatagtaagattgtttcctaattgagcgatgcatgccatgtgttacgtctcctatttacgtggtagatcatatttgatattta

SEQ ID NO: 12091 - DNA, 394 bp, Oryza sativa
  Clone ID: uC-osflcyp098b10b1
tgcaagataaccatttacgtctaagttggcctagatttaactgatgtcgtcgctgtagccttaagtttgccctgcggttagcaagtgtccaaccagcatagtaatcagctttctttgattaagtcatggtgtaccgcatctgttaattttctacgttgcttgtgatacataatatacttcgtgtttgcgttttatatggatacagcttgtctccctcatcttccttctgctgttacttcatttattcttcttgttagttatttgtctgcatctaactctctactattgatttctttgcttatagtattctttttacttttttctttttcttttctttattatctctttactttatttcttttatcttttttttttttctctcctttttcttttt

SEQ ID NO: 12092 - DNA, 133 bp, Oryza sativa
  Clone ID: uC-osflcyp098b12b1
ttgtatatatgttctactactccccccgcgggttgctgagccccgcgcgcgcgcgatcaggaaccctcggggtactcggattccgcccgcacgggggtcgacgaattccgcatcccgttgtttctcttctttt

SEQ ID NO: 12093 - DNA, 302 bp, Oryza sativa
  Clone ID: uC-osflcyp098c01b1
tgatgcccccgcctgcacaacaagccgtcggtctcgccgacgctgctgctctccaacatgtacctgcgtccggacatgatcacccctggaattgatgctcagggcaaccccatcgaccctgagaagatccaggccgacttcgaggatttctacgaggacatctttgaggaactcagcaagtacggcgagatcgagagcctccacgtgtgtgacaactttgccgaccacatgatcggcaatgtgtatgtccaattcagggaggaggatcatgccgccagagcgctgcatgcgcttgaccgggc

SEQ ID NO: 12094 - DNA, 327 bp, Oryza sativa
  Clone ID: uC-osflcyp098c03b1
tttcctcttcctcttcccatcgcgatacctcctgcttcccgtcgaaccctctccagtctccactccactgaatcctcccacctcggctcgaaggaatggcaagcggtagtgaagctgagaagtcacctgaggttgtgctggagtggcctaagaaggacaagaagaggcttctacatgctgtttaccgtgttggagatttggatcgcaccattaaatgttacacagaatgctttggaatgaaattactgaggaaaagagatgtgcctgaagagaaatatacgaatgcatttcttgggtttggacccgaggacaccaactttgcacttg

SEQ ID NO: 12095 - DNA, 107 bp, Oryza sativa
  Clone ID: uC-osflcyp098c05b1
ttggtctacggggagctaattcgtctaacgcattggatttttccaaccgcggcttgttgctccctcagatagttgagtacgagttttattgtgttttttcatttcat

SEQ ID NO: 12096 - DNA, 56 bp, Oryza sativa
  Clone ID: uC-osflcyp098c08b1
tcgttcaaacttgggtgacaccacatgcatgggagcattccatgaccaagctccga

SEQ ID NO: 12097 - DNA, 123 bp, Oryza sativa
  Clone ID: uC-osflcyp098c12b1
tccggagtaggctgtgaatggcggtggagagatgcgttctctacgcgactcgctcctactcccacctacccgatgcgatcttgccaaacccaaatcccacccaccaccgtgccggggtcctag

SEQ ID NO: 12098 - DNA, 52 bp, Oryza sativa
  Clone ID: uC-osflcyp098d04b1
gctgaacacccaggaagctacgagcatcgcaggagaccctattgcaccgtat

SEQ ID NO: 12099 - DNA, 60 bp, Oryza sativa
  Clone ID: uC-osflcyp098d07b1
ctcgttagaaggaggaggaagcaaaaagcggggggggttttaaaaaagaaaccgggacag

SEQ ID NO: 12100 - DNA, 114 bp, Oryza sativa
  Clone ID: uC-osflcyp098e04b1
gcctgccccgcgtgaagctactagcagcgaaggcggcatttttcttgcagtgagcgccctcaggacccaaccaaaggttaggtgatgccctactcaaactgttacctttctttt

SEQ ID NO: 12101 - DNA, 82 bp, Oryza sativa
  Clone ID: uC-osflcyp098e06a1
aaatacttaatagtaatagactctttgatggagttttacaacaggcagaagagccattaatacgcccagtacatttaattaa

SEQ ID NO: 12102 - DNA, 117 bp, Oryza sativa
  Clone ID: uC-osflcyp098e06b1
gtcgtactaaggggaagaaataagtaaccaaggggtcagatttaatacttagacaccttgaaggatccatcaaaaaatctacttctatagaatatatactagtctctctatataata

SEQ ID NO: 12103 - DNA, 255 bp, Oryza sativa
  Clone ID: uC-osflcyp098e11b1
tcgtctctcactcccactaccatggatccttgcaagttccggccgtcgagctcgttcgacacgaagacgacgacgacgaacgcgggagctccggtgtggaacgacaacgaggcgctgacagtggggcccagggggccgatcctcctcgaggactaccacctgatcgagaaggtggcgcacttcgccccggtagcgcatcccgtagcgcgtggcccacttccgaggagccctcgtcaagggctttttctagtgctc

SEQ ID NO: 12104 - DNA, 272 bp, Oryza sativa
  Clone ID: uC-osflcyp098e12b1
gcctaaggattcagcatggttccgttgtactacagggacatgattgttcttgttgctttcggaggaaacaaaaaggaaccatctgataaggtcgaagtactagtggtactgcaaaacgagcactgcttcagctggcggtctgcccctgatgttgaacctttactgcatgaggactcacctccaagctcataggatctttctgatcacctgaacaacaattgtgctcctctgtactctactggatctgtagcctgagcatactcttttcctcc

SEQ ID NO: 12105 - DNA, 131 bp, Oryza sativa
  Clone ID: uC-osflcyp098f09a1
tctctattgaactatcactgaccatgcacgcacacgtacgtcttggtatgcctctcattattctagcccgccccttccttttttttttgtatattatctagacttggctattaatattcatttggttagaa

SEQ ID NO: 12106 - DNA, 65 bp, Oryza sativa
  Clone ID: uC-osflcyp098g10b1
tccctcactgccactaccatggatccttgcaagttctttctcgtcgagctcgctcgacacgaaca

SEQ ID NO: 12107 - DNA, 60 bp, Oryza sativa
  Clone ID: uC-osflcyp098g11b1
tctctcctgctttcccgatgggcaacattgatcaaacacgtatgtggaaggtgggtgttt

SEQ ID NO: 12108 - DNA, 200 bp, Oryza sativa
  Clone ID: uC-osflcyp098g12b1
tcgtagaaggtgagtgcagcagttttaggattcaatgtatttctgcaaccgtataatgatgggtgagatccagaacgtggaagattatgacctgctgtttgatctttccgttgttcattatattgtttcttatatcttgtatatttttttatttcttctctcttttttcttatcttctcttttattttttcctttccttc

SEQ ID NO: 12109 - DNA, 335 bp, Oryza sativa
  Clone ID: uC-osflcyp098h01b1
aacaaaaacagttctattcattaattcgtttatttggcataatccagcatgcatgcacacttacataatactccagattcaagtccagtgcatgtgcatgcagttaattaaacaactccttggttcggatacaaattaaaacactagaacacagtacgtacgtacgtagtagaactcatcacgcacatttttttttgttgtctacgtacatagcacagcacgtacgtataatagtacgtataatacgagactaattaatcaagatacgtaggtaattaattaacacgggtcgattgcataacacatttggggggtacgtaattaattaactgatt

SEQ ID NO: 12110 - DNA, 86 bp, Oryza sativa
  Clone ID: uC-osflcyp098h02a1
gggaacctaaccaatttatggaatgcaatgttaacttccaccatatatttgaatttaatgcgtcaaggcatcctcagatctggcaa

SEQ ID NO: 12111 - DNA, 232 bp, Oryza sativa
  Clone ID: uC-osflcyp098h04b1
gttatatgaagaccaaccagagataaaagcacgggaactgaggagggaaaaaggcgccggaggcctaccgatcatagacacaagcggcacaaaagcaaggggcaacagcaacagcagagatggccaatatctccgaactgcccccaacatatacaaagattacaggacaaccacggccaaggattcccctaccgcggcccagcaacacccttcaggagcaacaacaaaggcc

SEQ ID NO: 12112 - DNA, 81 bp, Oryza sativa
  Clone ID: uC-osflcyp098h07b1
tgtggaaaaatatagaaggagttaatgggcaggggtctttttttaaatagaactagcccttcccccccatacacaagaatt

SEQ ID NO: 12113 - DNA, 69 bp, Oryza sativa
  Clone ID: uC-osflcyp098h09b1
tcccagaccaggatgaagaactaaaacacgggggtgctagctgaaaacaagcgcgcgaagccccccgcc

SEQ ID NO: 12114 - DNA, 335 bp, Oryza sativa
  Clone ID: uC-osflcyp099a04b1
tctatctcttttctccccttccttccttccgcctcgcctccccttcccctcctcgccgcctcgctcccctccgccgcgccgtcccgtcgaatcccgccatgccgaagggtgccaagaagcgcgccaagctcaagaagaagcagcagggggaccaccccgccggctccgatgacggcggcaacaacaacaacaacaaaaacaacgccggcgaaaacggcagcaatgactccagccgccgccgcgacgccgccagcgacggcaaccaccacctaccgtcgcgaccaaacgttcctcatggggatgtgagggaggactccatggagagctccgaggag

SEQ ID NO: 12115 - DNA, 384 bp, Oryza sativa
  Clone ID: uC-osflcyp099a06a1
acgacaaaccacgaacttggattttaaagatgccacaaagaaggttcacataaacaacacaggtcacagcagcgaaagctacaagcaaaccctgcataatcgaaaagcaaatgtttttcaaaaccagacacacaaactgatagatagaagcccacacggacagatcataggatagcagcagttaatcaagcattgccaaggcaccaggcaaggaaccctgaacctttttagtactcgtcacccttatcaccctcgtcaccatcgtcgaactcggagccgaccttcttgtagtccttctccagcgcggcgaggtcctcgcgggcctcggagaactcccccttctccatgcccttgccgacgtaccagtggacgaaggcccccttg

SEQ ID NO: 12116 - DNA, 204 bp, Oryza sativa
  Clone ID: uC-osflcyp099a06b1
ggtgacttcgtactcgcctctctccgcgcccttctccttcgtcgctcgccgccgttcgtctccgccgccaccgacgccgccatgagggagtgcatcttgatccacatcgggcaggccggtatccaggtcgggaacgcgtgctgggagctctattgcctcgagcatggcatccagcctgaaggacagatgcccggttacaagatc

SEQ ID NO: 12117 - DNA, 66 bp, Oryza sativa
  Clone ID: uC-osflcyp099a09b1
actggcgaggcggcggcgccgcggaagccggtggacgttgttataagagaagagctacaagcccac

SEQ ID NO: 12118 - DNA, 550 bp, Oryza sativa
  Clone ID: uC-osflcyp099a12b1
aactaacacgcaaacggatgggttggcacgagatctccttataaaacagaaactcctgggtatagataacaaaactaatatagagaataattaaaataatataaaaaaaagagactaaaaaagtaaataaaataaataaaaaatataaaaaataaataaactaactataataagaaaaataaataacaaaaaaaataaaaataatattttgaaaatataaaaagaataaaaaaatataaataccattaaaaaaaaataaataataatataataaataataaaaaatcacaaataaaataataaaaaaaaaaattaaataaaataataaaaaattaataagaaatattaaaaattaaattaaaaaaacatattaaataaaaaactataataatattctaaaaaaattaaaatacaccataatataaataatattaacacaaagataaaaaatacaagaataaatcaacaaaacattaatataaataacaaaaataaaataaaatacacatataataactaataaaaataataatataatttaaaataaaaa

SEQ ID NO: 12119 - DNA, 266 bp, Oryza sativa
  Clone ID: uC-osflcyp099b03b1
gtactaagtaagtaagtattatcagatacagcatttccaatagttcactagtattatatttctcattgtctcacaggctgccgacacacaagtcatttcggaatatgtacgctattttctccaccaacacacaattcagcttgggcaaccagctactgtgaaagttgcagccaacttaattaggttgttggcttatcagaacaagaacatgttgcaagctggcatgattgttggtggatgggataaatatgagggtgtcctttttt

SEQ ID NO: 12120 - DNA, 569 bp, Oryza sativa
  Clone ID: uC-osflcyp099b04b1
gctgctaagttgcgagagagagagagagagatcagttagtttgttgagtggaagcagatcaggaagatgctggagaagctgtgggacgacttggtgtgcttttcttttctcttttctttttttttttttcttttttttttctcctcctctttctctcttttattttattttttcttctctttctcttttccttctctcttttctcctttctttccatttttgattttcctcttttttttttctttttttttttatttctttctttttattttttattttttttttttttttttttttattttattttatttatttatttatttttttttttatttttttttttttttttttatttttgtttttttttgtttatatttctttatacttttttttctctttctctctctcctcctttccttctttttttttatatttattttttttatatatatttttttctcctttttttatgttactatattttcttttcttcttccctttattttctcttctcttttctctctcttttctctccttctttttctactctctccttcttttccttttct

SEQ ID NO: 12121 - DNA, 339 bp, Oryza sativa
  Clone ID: uC-osflcyp099b07b1
tcgtataaaaaaaaaaaaaaaaaaaaaaaaaaaaaaaaaaaaaaaaaaaaaaaaaaaaaaaaaaaaaaaaaaaaaaaaaaaaaaaaaggggcggccgttttggggggcccttttttaggtccccgggtttgcgacgcgttagttcttttttagggtcccctaattgggatcccttggccgaattttttgaccgtcttttttgggaaacccctgtggtaaccccctttagtcgccttgcttaacatcctcttttaacaagctggtttattcggttgggggcccgcccaagtgggcctttcccaacggtttttccaacctgattggccactgggactggcc

SEQ ID NO: 12122 - DNA, 267 bp, Oryza sativa
  Clone ID: uC-osflcyp099b09b1
tggaaatctctggagcaaaatcttcatgtgtatcttcaaccagaacagctgaagatgcagacaaggatggacagccagtcccttgcatgaatgatgcgaagagtctgacacagcttcttgttaaggtttgcaggaatacagtttccgttcaagaagatttaaatgtcattactgtaaaacaatttgtcaaggctgtttgccaaaagataggggtccatgcttatgatttctatgctgttcttggtggaaacccattattggattacc

SEQ ID NO: 12123 - DNA, 485 bp, Oryza sativa
  Clone ID: uC-osflcyp099b10b1
ttgtatccttataacagacatggcactttggtggacgatcaagtaccagacagttctccagaagttatccaagtatcctgtgattgatttcagcaaggatgaccaagtgcactgcttcaagcatgccattgtcgggctgcatgcctatatggagttcacaatcgactcaaccaaggcaccgcacaactattcgatggctgatttcaacagattcatgcgtggagcttactcgctgggcagggacagtgtgaccgtgctcggtgagtaccccaagatcaagccaaggttgctcatcattaagaggcaccgtacaagtaatgtttctaacctggatgagtccatcttcatggtccatgatctttcctttacctctgtcatttactttgttcatttaccttttttatcttttttatgctctcttttttcattttctttcttttcctctttatttttatattattccactttattttctattctttttc

SEQ ID NO: 12124 - DNA, 104 bp, Oryza sativa
  Clone ID: uC-osflcyp099b11b1
actggctctcacagatcactgcatcaatggccgtggccaccatggcgctctcctccccggtgaaggcccgcgcgaaacactataactattttatacacatctta

SEQ ID NO: 12125 - DNA, 513 bp, Oryza sativa
  Clone ID: uC-osflcyp099b12b1
ctggaaatggcatacattcctttggacgaggacatgaaggtcaaaggtaaggcagcaattgatgtggtctgcaacccattggggaagtctggaggcgccttgatccagcagttcatgatcttatcatttggatctctcgcaaattctacaccctacctgggaggaattctattggtaattgctcttgcctggttgggtgctgtaaggtcccttgactcacagctctccccactggcaaagctagagcttgtgaaggagaaaatgcttaaagctaagactgtctaaacatctgttcaagttgtttttgcaggaaatggttctttccattaatctttagttcaatctgacctttcttcttggttccatcttcaacaggtttatagtcccttcttaatctatttttttaatatttctttttactttttttccttctttattctttcttatttcttattcctctactttttttctttatatcttttactaattcctctatctttttctcattttctt

SEQ ID NO: 12126 - DNA, 456 bp, Oryza sativa
  unsure (1)..(456): unsure at all n locations
  Clone ID: uC-osflcyp099c01b1
taggaatctacctccaattctgtggcgacgccacgcctacgtcatgtagccctcaagccgaacagttggtgggcatggacctctcgtcggcggcgggggtgtcgccgtcgtacgccaaggcggtggagacctacaggctacaggagggcggtggccacggctaccacgatgaccgcctacgcggtgctggcgcgcggcatggcgagggagctcgtcgtgccgcacgacctatgcgcggtggtgagctgggccacgacactcgtccacgcccgcctcgggcctcgcccggcggagcgccgcaccgccatcatcaaccgcgtcgatgaggacggccgccacgacagctgtttcgcggacgccnacgcgtacctcgccccaagatcgatccccgtgccctgggccggttccgcctcagcggcgtcgggggcgggggcgagcgcggccgatggaattcgc

SEQ ID NO: 12127 - DNA, 231 bp, Oryza sativa
  Clone ID: uC-osflcyp099c04b1
cctcgatagaggtgagccggagaggacgaaggagatggacctgcccaggccgcagatgttcgccggagtctcgccggaggtgtactttcccagcggaggagcgagtgggattaatcggaggaataagcgctcgagggaggccattgccatggcgccgccgccggccaaggaggagttggtcaatctgtttatgctccatgtcgatcagtttacttcgtttgtcaataatgt

SEQ ID NO: 12128 - DNA, 217 bp, Oryza sativa
  Clone ID: uC-osflcyp099c08b1
tcgtttctctctctctctctccccctccctccgatctcgccgcgtccgtgtcccctcgccgccgcagccagcgtcgagggctcggcgaccggaggaggagaggccggaacccgccgccgccgccgccgcctccgcctgtagcgagatcgctcgatccggttcgcctcccgcgcgccagaccgccagcccagttcgatccgttgagggggaggggact

SEQ ID NO: 12129 - DNA, 178 bp, Oryza sativa
  unsure (1)..(178): unsure at all n locations
  Clone ID: uC-osflcyp099c10b1
acctcngatagttgtcaccgtggagggttttatatcagctagtcacttggttaaccagtcagaaatttaagcggttttgaggagttttagcttttctttttatttcggactatttgctgtatcatgatgacaattatttgaaggctttttagcggatttgaagctacagaggtttagc

SEQ ID NO: 12130 - DNA, 483 bp, Oryza sativa
  Clone ID: uC-osflcyp099d02b1
tacgctgagactagcttgcaactaggctcgatgcttttgagaggactgggtgtcatgtctgatgatgtatccttctttagtaagcttgtgagagactcaatggagttacaagctcaggaagcactcaacaacatcgaaaatcgagaaattgatatcatgaagccacttgagataagaatatcagacttggttgagcgcaatgggaatggttcaagaatgatagcccaggaggattcactaaggctaagtagtcgcccaaacataccactaattgaagcaactctagaggaccgaatacccgaaactacaggggaaaatgaccagactggatatgacttcaacaacatagattctgaagatggtgtcaaatattggcttctggaagcttgtgatgaccaaagccaatcctcccaattcagcaaggaaatgatcgaccatctgtatagcccactggtaagaaccaagaatctaacttccacttta

SEQ ID NO: 12131 - DNA, 104 bp, Oryza sativa
  Clone ID: uC-osflcyp099d05b1
gtccatcatcaagagcaccgtgacggccgccgtgaacaactagccacgcatgggcgcgtctctgctcaggctgtactttcacgattgcttcgtccaaggttttg

SEQ ID NO: 12132 - DNA, 249 bp, Oryza sativa
  Clone ID: uC-osflcyp099d06b1
taatgagccgcccccaccgttcacattattcaccgctcgttacatgtcttgaacttcctcattcgaagcctgaacctataggttcgttccatgtcttccactctatacaccactccaggccgccaaggttttacttttcacattatttattatagggaggccttgcgggatctttcaattggtgtactgctactaccttaattcaacaaagaagcccattgcaaccaaaaattcatcggtgcaccagct

SEQ ID NO: 12133 - DNA, 537 bp, Oryza sativa
  Clone ID: uC-osflcyp099d08b1
ttctatcaagctcaaggccgagtacaacaaggccattgttgactacaacaagggctagagcactgccaagaaggcacccgccaaggaggaagaggagtgactactagtacaagtttatcgaagcccttaacatcattcaaaattgtgaaatcgatattatgaattcacttgagattagaatattcttacttggttgagtttatattatttttttttgtatgttagtttttatttctttatttttctcttttactttacttattttatttattattttttcatctttatttttatctatttccctaattttcttctgttatttactattttttatttttttttcactcatctattatttatttttgtttctttttttttttttttttattcttttttttttttattttacatttttcttttatatatcttttatcatccactttctttttttttattcttttatatttattatttatctttattcttaattttctattatttttttatttttacaatctttttatttttatactatta

SEQ ID NO: 12134 - DNA, 593 bp, Oryza sativa
  Clone ID: uC-osflcyp099d12b1
actcaccccgcgatcccctcctccactcccccccgctctctcccatcaagaggagagagagtgagaggagctttctcttatcttttttttttcttttttactcattttttattatttctcttttttttcttttctttttttcttctcttctctcattttttcttctttctttttattttccatcttttctatttttttatttttttttctttattttctattatattttattttttctttttattttttactttttacatttttattctttttctacttttctcttctttttcattctttttttctcttcttcttttttcctcttttctttccttttctcttctcttctttattattttcttttttaatttcttctattacatcctttttatttattctcctctcttctcttacttctcaccttttcctctatcttttcctacttttattatctctctctttttttttcatcttaatccttcttatcttctttctatattctttcttttctatttctcttttttttctttcttattttttttcctctattctttttcttcttccttttccttatttcatccttattccttctt

SEQ ID NO: 12135 - DNA, 338 bp, Oryza sativa
  Clone ID: uC-osflcyp099e01b1
ttatattctcgatctgcacatgggcagccactcatatcttggtgcacttgcaactgcccccattattccggctgctgcagagaaaggctggagtgagtctgcaagtcctaatgtgagaggccctactgcacttgttttcaccttctcacaaatggaagacagactcaaggctgcctacaaggccaccacagaaggtaagttcccagaagccctgaggcagttccttaacatactgcataccatccctcttatcgtggtagactcgaggagggaagaggattaagataatgactttatcttttatgctatagattcttctttataattatattataatc

SEQ ID NO: 12136 - DNA, 187 bp, Oryza sativa
  Clone ID: uC-osflcyp099e08b1
tcgtacgcgtgcgacagtggagtaaagtgaagcagcagcagagaagcagagaccatttccctcctccctcctctctcgccaaacacgacgacgtcgcctcggtttagtcgtcgtcggccggcagccggatgacgggcagtagctgtccggccgattcttcccagttgctgtaccctcgccggggcgt

SEQ ID NO: 12137 - DNA, 495 bp, Oryza sativa
  Clone ID: uC-osflcyp099e12b1
tctttcaagcaaacaggcaatgaactctgccttgttctctgcattggttgttgtggtcttggcttctgctgtgaatgggcaactaaacccatgccaagcaccggcaccaaccccgactggaactccagccccagcaccagccccggtggtgacaccgacgcccgcaccaactccagtcccgacgccatcgccggcaccaacaccttcacccaccgttgcccctgtcaatccgccatctccgacgccgcctcccaagtgtccgctggcgttaattaatctcaacgcgtgcattagtgtcggtcttggcaacccgctcttgaaccaggcgtgctgctcgcagctctccagcctcccgagcgacaccgctgctgtctgcctttgcgaagccatcaaggttaatgctctcgtcaatctgaaggtcaaaatccccgaccatccttaaagtatgcgggaaggtctccgcttgagtttgtgtctaatcagcccgtcgagaga

SEQ ID NO: 12138 - DNA, 380 bp, Oryza sativa
  Clone ID: uC-osflcyp099f02b1
tgtagcttctctcctctctctcaactccggcgagaggaggaggcggcggtggggcgttcgtcgggagagagaccagggccggggggctagggttcggccgttcagagaggcggcggctgaggaggaggaggaggtggtaagctatacctctttttcttctattcttttctttgactttattatgattcttttttagctttttttttttccttttcttttcctcatccaatttccttattattcatttctactttcatctatatctattttatattcttctcatcttttctttcattgattttcttcattatcttacttctgccttctattcttttagcatcctttttatcttttttctcctctttatttattttcatcct

SEQ ID NO: 12139 - DNA, 517 bp, Oryza sativa
  Clone ID: uC-osflcyp099f06b1
atcagttgcctcttgcctccttcttcttcttcttcgtcttcgtcgtcgcgaaatacaggcgtgtggggcgagagtgatcaggtggcagctgggtgtttcttcttcttcttcagctcgagttctttcttagccatggcgctcctgctgctgcgtatgggcgttttcattgcgctgctctttgcctttttctcctttctgattttttttttagaggtcattcttccgttttgttctattgtgctcattacttttttatttgttttgttcttgttctgttttttcatttttattcctttttccttctttatcttttcttattcttttcatttttctcattttctttctttttccttttctctttctttttctcatttttttcttctcattctctttttttcttccttttcttttatcttctttctctttttctcttctcttttacttttctacttttcttctctctattcttctcctttttttcctcttttccttttctttctcttttttcttttctctt

SEQ ID NO: 12140 - DNA, 472 bp, Oryza sativa
  unsure (1)..(472): unsure at all n locations
  Clone ID: uC-osflcyp099f07b1
ttgttatcctctcctacaaccagctcaccggcccgatcccgcgcgacgacgcgcaggacgagatcaacaccgtcgacctctcgcacaaccgcctcaccggcgacgcctccttcctcttcgccgccggccggcccatcggcaaggtggacctctcgtggaacgacctcgacttcgacctcagcaagctcgtcttcccgccggagctcacctacctggacctcagccacaaccgcatcaggggcaccgtgccacgctccctcgccgcgctctccacgctgcagacgctggacctcagctacaaccgcctctgcggcccgctcccgaggctgcacggcgtcatccgccacggctgcaagccgtacgagcacaaccagtgcgccggcggcgccccgctcggcgggggccaccaatcgtgagcatccatccatccatcaccgncggcaagctgatgctgccacgtaaggtggagccc

SEQ ID NO: 12141 - DNA, 302 bp, Oryza sativa
  Clone ID: uC-osflcyp099f08b1
tgaccgccatggcttctctcaccgatctcgtcaacctcaacctctccgacaccacggagaagatcatcgccgagtacatatggatcggtggatctggcatggatctcaggagcaaggctaggactctctccggccctgtgactgatcccagcaagctgcccaagtggaactacgatggctccagcaccggccaggcccccggcgaggacagtgaggtcatcctgtacccacaggctatcttcaaggacccattcaggaagggaaacaacatccttgtcatgtgcgattgctacacgccagcc

SEQ ID NO: 12142 - DNA, 282 bp, Oryza sativa
  Clone ID: uC-osflcyp099f10b1
tcgtaacaatgtcggcctactgcggcaagtacaaagatgagctcataaaaaatgctgcctacattggcaccccgggcaagggtatcctcgccgcggacgagtccactggcaccatcggcaagcgcttcgccagcatcaatgttgagaacgtcgaggataaccgccgtgccctccgcgagctcctcttctgcacccctggcgccctccagtacatcagcggcgtgatcctcttcgacgagaccctgtaccagaagaccaaggatggcaagcccttcgccgatg

SEQ ID NO: 12143 - DNA, 566 bp, Oryza sativa
  Clone ID: uC-osflcyp099f11b1
tacaagcccaagtcgcgtcgcaccgaagcagagtagagaaggagaggagcttcctctccttcatccgttcgatcgagtgatccctactctttttgttttcttcacctctttcttttttttccctactcttaattttccttctcttttcttttttatttttattttttattcttttttttcttcttctcttcctctctcttttttcttctcattttcttctttttttctcttctcttctttctctcttttcttttttttctctttttttctctttttttcttctctcttttttctcttattctcctttctctctttctctccttttctctttttatatctacttttttttactttttctctttctcttttccatatattctctcttctttttctatcttctttctcttttctctttttctttcacactttcttcttttctcacctatttttcttttctctcttttctacctttattttttccttctctttcttcactttacatctacctttttttttctttcttcttttatctctatcttcctcttttatccttctcttctattctt

SEQ ID NO: 12144 - DNA, 580 bp, Oryza sativa
  Clone ID: uC-osflcyp099f12b1
actgggagagcggcggcggccatggcggggaaggggtttttttatacattcccccttttccccccccccaccccctcttttcttttatctccctccttttctctctcctcctctttcttcatcctttttttttttctcttcttttccattcttccccctcttcttttacttttttcttccttacttcctcattcttcttaccttctcttttcatatcctttcccctcttctctctttttttacctctctatttatcccctttttctctccctttctcttttttcccctttttttcttcttcccttaactcctttttccttctcctcctcttcctctatttcttcttttcattcctctctcctcttttctcctctcctttttcccttttccctctctctctttcttttttcctccctcttattttcttttttccttattatctttcttatcctttctatatcttccatcctccattctctttctctttctattttttctctcttcctttatacatatctattttattctcccctctctctctccacctttctctcctctcctttcccatatctcactcctc

SEQ ID NO: 12145 - DNA, 637 bp, Oryza sativa
  unsure (1)..(637): unsure at all n locations
  Clone ID: uC-osflcyp099g04b1
ttttctttgcagtcgcagtcgttttcgtttacgtctctcttttttaggaggagaggtttgtttttttatttnctttttttttttttttttttttttttttttttatttttttttttttttttttttttttttttttttttttttttttttttttttttttttttttatttattttttttttttatatttttttttttttttattttttttttttattatttctttttttttttatttttttttttatttttttttattatttttttttttattttttttttttttttatattttttttttttttttattatatttttttttttttttttatattttttttttttttttttattatattttttttttatttttttttattttttattatttattttttttttttattttttattttttattttatttttattttataatttttattttttattttttttttttttttttttttattattttttatatttttttttttttttatacttttttttttttttatnttttttttttttttttttttattttttcttatttctttttttttttttatttttttattatttttttttttttttattttattttttattttttttttatttttcttttttttatt

SEQ ID NO: 12146 - DNA, 251 bp, Oryza sativa
  Clone ID: uC-osflcyp099g05b1
atccggcaagcatggggttcaattatcttcattgccagaaagctgctattagtacatcaaacacaggagttgaggaggcgatgaattggcttctctcacacatggatgatccagatatcaacgatccaatatctaaagattcacaggctgctgaacaaactgttgatgaaactagcgttcaaactcttgtttccttcggatttcaagaagatgctgctcgataggccttgactgcttttggcagaaatttt

SEQ ID NO: 12147 - DNA, 227 bp, Oryza sativa
  Clone ID: uC-osflcyp099g09b1
tcggcggcggctacggcgaggtccggattccggcgcatgttctacatctcggccttcaccccgcccaagccgttgacgaagaccatgaagaatgacgcgccaccgaccccctaaaataagactaatgcggcggtgaccgacgatataagcaaaaagaaatggaggagggcgggggcaaatccataacataacataaaacatccaccaccaattggaggcatgaactg

SEQ ID NO: 12148 - DNA, 594 bp, Oryza sativa
  Clone ID: uC-osflcyp099g12b1
actggatcgatctgttccctagccaagaagcatcgatcatctgagtgagctggcaagcgagagatactagctaggatgtacgacgtggccgttgagcgtttgcgcttctttttctttctcttctcttttatttctttttctcccttctctttttctttttcttttttttttcatcttttctcctttatttcttttatctcttattattctactttttctttttttttttttatttttccctctttcttttattttttttttttcttttatcttctccttttttactttttttctctttttcttcattctcttctttttcctattttttcgttctatttttcttttatcttatttttatcacctcttcctctcttttttatattatttttaatattttctatttttctctttcctcttcttcttcattcatttttctctactctttttatatctttcatttttcctttttttcattttcatttcttttatttatttccttcactctttttgctctattattttcctttaccttcctatttttacatcttctttttttcttcttttactttctctctcttctctctttatactctt

SEQ ID NO: 12149 - DNA, 73 bp, Oryza sativa
  Clone ID: uC-osflcyp099h07b1
gctaccgccgcacgacatatgccgaggagagcgggggttgtttaacccagcggcgactatcgccagaaaggag

SEQ ID NO: 12150 - DNA, 232 bp, Oryza sativa
  Clone ID: uC-osflcyp099h08b1
acctgccgccgccgccgcagagaaggaagagagggagagattgtcggatcgccgcccgtctccaccacgatgtcgtagatgctgatcgtgttctcgtagatgttttgttaatcatttttcattatattttaattctatttcttttgctttttatatattatttcttttttatttatcaattttagttattatttatattttacatataatttttttttatttttttatatat

SEQ ID NO: 12151 - DNA, 492 bp, Oryza sativa
  Clone ID: uC-osflcyp099h12b1
actggagacactcactcacacgatagcaagaagctagcttggttgctcacattgagctcaacaatggaggccaagggagtggtggcgatcacccttgtggtcttctttgctgtttttgtcatctctctcctttcaccttttcctttcaactcttttcctcttttcctccttctcttttctttttcctctcttttctttcttttttcctttcttcattcatttttctccttactcttctctccatcccttttaatccttcttatcccttctttttccttttttcttcctttctttctcttctctatttcttctctcttctttactctacatctttttattcttactcacttttctttttctctcttttttttatctcttactttctctttcctctctttcatttctttctttcttttttttctctcctcttatatctcttctttctctctctcttccttttttttacatatcttttttctcatttatattctt

SEQ ID NO: 12152 - DNA, 299 bp, Oryza sativa
  Clone ID: uC-osflcyp102a02a1
gcaaaaacgggttttattattgttacacagagcagaccctggctgtttcgcgacaaagggaaagcacaagacaaaataaatctgacaatccaatgaggaatactcttattcagctataatgacgttctaacactataattttttttcgttgttgttttgtacacacctgtggcttctacaattctgaatctttctaactgttaaattcacaaagttgcagccgagcaattgaatgtctttctacagagttgttcgctcattctttttgtaacaccatttggttagaaagagattgggag

SEQ ID NO: 12153 - DNA, 61 bp, Oryza sativa
  Clone ID: uC-osflcyp102a03a1
ctagggtaagccctttaaaaaataaatctttcaatacaatgatgaatactattataaaagg

SEQ ID NO: 12154 - DNA, 92 bp, Oryza sativa
  Clone ID: uC-osflcyp102a04a1
ttttttttttttttttttttttttttttttttttttttttttttttttttttttttttttttttttttttttttttttgttttttaaaattt

SEQ ID NO: 12155 - DNA, 691 bp, Oryza sativa
  Clone ID: uC-osflcyp102a06a1
gcacgcacacggaagcaaggaagcaccattattgagccggaccaaaaaaaaaaaggggggggataaaaaaaaaaaaagaggaaaaaaaaaaaaaaaaaaaaaaaaaaaaaaagacaaaaaccaaaacaaaaaaccaaaaaaaaaaaaaaaagaaaagcaaaaaaaaacaaaaaaaaaaaaaagacaaaaaaaaaacaaaaaaaaaacaaaaaagaaaaaaaccaaaaaaaaaaaaaagacaagagagaaaaaacaaacccaaaaaaaaggaggaaaaaaaaaaaccaacaaaaaaaaaaaaaggacacccaaaaaaaaaaaaaacccccaaaaaaaaagggaaaaaaaaaaaaaaaacaaaaaaaaaaaaaaacggaaaaaaaaaaaaaaacagggaaaaaaaacaaaagactcgacaaaaaaccaaaaagaaaaaaaaaaaaaaactagaaaaagggaggaacacaaaaaaaagaagaaaagaacaaaaacaaagcctaaaaaaaaaaaaaaagggggaaaaccccacaaaggcaacaaaaaaaaaaaagtcaaagaaaagggaaaaaaaaaaaaacccggggggggggaaaaaaaaaaacataaaaaaaaagggaaaaaggaaacacaaaagaagaaaaaaaaacaaaaaaaaaaaaagcggaaaccaaaaaaaaacacggaaaaacaa

SEQ ID NO: 12156 - DNA, 72 bp, Oryza sativa
  Clone ID: uC-osflcyp102a07a1
ttttttgttttttttttttttttttttttttttttttttttttttttttttttttttttttttttttttaag

SEQ ID NO: 12157 - DNA, 70 bp, Oryza sativa
  Clone ID: uC-osflcyp102a09a1
cacgtaggatagcacgtcgtacggtaagcttaggactcctttttgtagcggccgctcctttttatttttt

SEQ ID NO: 12158 - DNA, 101 bp, Oryza sativa
  Clone ID: uC-osflcyp102a10a1
cacgcacacgtacgcaagctagcaacttatttgagcggccgaccataattttgggggggagaataaaactggcatcagcagagacatatccataggcataa

SEQ ID NO: 12159 - DNA, 82 bp, Oryza sativa
  Clone ID: uC-osflcyp102b01a1
gaaagaatgaagcttgactaaagagatgggcaaaaaaacctgggaaggggcaaagtttttggatctattaaaagaccaaggg

SEQ ID NO: 12160 - DNA, 422 bp, Oryza sativa
  Clone ID: uC-osflcyp102b02a1
aaccaaaacataggaggtttaatttcttcttctcaaagtagtgtagcatctttccttctttcaccattacataagcttaagcaataacagataacaaatcctcctcctcctctaggtaaaatattcaaacacaatacccttataagtacttattattaggaaagtagcgtgcatgggcataaatggcagcggggggcaggttaagaatcacaatgctgagcagcgaggaaacaaaacaccataatgggacagagcaaaagcctccgaaagggagcttttaggcagaaggcttctcccacttgaggggcttcaccacctcccaggtgaagtctgggtcgtcccttccgaagtgaccgtaagccgccgtcttgaggtagcgtccgttgccggcttttttgaggtcaaggttgatgatgatcatg

SEQ ID NO: 12161 - DNA, 210 bp, Oryza sativa
  unsure (1)..(210): unsure at all n locations
  Clone ID: uC-osflcyp102b05a1
tacctttttttttttacaaatacaactcatacatcaccacaattcacgaagaacaagttacaagggaggggatagaaaggtacatgagcagtttctgcactacagattggccatncttttttttccctgttgaaaaatcctatactgtactgagtaaccacaaacaaccgtcagggactacaaggtctttatttcacacctttttgtaaa

SEQ ID NO: 12162 - DNA, 262 bp, Oryza sativa
  Clone ID: uC-osflcyp102b06a1
cccaggaaagacaactattcccatttatctgaatatttgtatcgagcaaaaaaacatcggttgataacattttaagataatacaatctatgagaaatgcccatacacaaataacacttcaagacattaaatgtcatttcgacaatgcagagcttattctacatcttcctcattatgaacaagcaacttgcctttccgtgaattcgcatggcttgatgggttacagcctaatttgctttgcgccatttttcttacaacaaatg

SEQ ID NO: 12163 - DNA, 380 bp, Oryza sativa
  unsure (1)..(380): unsure at all n locations
  Clone ID: uC-osflcyp102b07a1
aaacatgcaatagatattaattaactgaaggggaagaaacccaatcatttctgctaatacagcgaaagcaagatgcttggcactacagatgactaaataagctaaagcataaacatagttacaaatatattacatngtcggatcacatgattgcacacgattaaatagattagctatgacagattaccctccattgtgcatggtacggtactctttgagtacaaggaagaaaaccctgtgatgaccgagttaattcgaaatggtaggggcagtaacaaaattcatncaaaagccaataagcccttctcttacctccaaagagtggtcttccacggttcaaagccttgtaagttttgtttggaccgtaccttcctttaaag

SEQ ID NO: 12164 - DNA, 79 bp, Oryza sativa
  Clone ID: uC-osflcyp102b09a1
aaaaaatgtaaaacttcatttaatggacccgggtgaagggggaaaaggcggaaaaaacccctcttttttttatttggtt

SEQ ID NO: 12165 - DNA, 310 bp, Oryza sativa
  unsure (1)..(310): unsure at all n locations
  Clone ID: uC-osflcyp102b10a1
aatcaaatggagagtatatcttttcttttattcccatatcaaatggtacaaatattaaactggctaagaacataacttcgaatccgtattaaccaagagtaaagaaacaaataaatacaaacaaaataccgcctcttacaacaacatcatttttcaccagcatgtgtttccccttccctattagaatgaaggccctttcacttcagcctcaacaagccagccaggctttcaaggtaaccaanaagtaaaaaaaagccttcatcacncttcattttgcttcagtttcattggcaggtcccttcctttcatg

SEQ ID NO: 12166 - DNA, 95 bp, Oryza sativa
  Clone ID: uC-osflcyp102b11a1
ctaccttttctactaccgttttcaaaaaaaaaaaaaaaaaaaaaaaaaaaaaaaaaaaaaaaaaaaaaaggggcggccgttcgcgatctagcggt

SEQ ID NO: 12167 - DNA, 285 bp, Oryza sativa
  Clone ID: uC-osflcyp102c02a1
gatctagtcttgagtttctggcagcgtatctataaacccattacacagcaagtcatggagttctcttacaaacgagctgctgcataacaacattcagatgaactaaaatgaacgatcgtgggggcaaatcaaacttgacgccattccagcctgcgtatattaatacaaggaaaacagcggtttcaaattaatccccccaacaagcgacaagctgaaacaacagccaaaagaatattcttcacctaatttccttttcgccttgtattccccccatgggcaaaagaa

SEQ ID NO: 12168 - DNA, 383 bp, Oryza sativa
  unsure (1)..(383): unsure at all n locations
  Clone ID: uC-osflcyp102c03a1
attacaagataaccttttcataactagggcaaacatccgacaagttacaagcacacctgatcttacgattccattttttttctgtttgcttttccaacaaatgcaacaatagcctagtcacatcaacatacaaacaagtcaatgctaaaagattagaaaagtctttacagttgaagnatccaatccggcatgcacgatctatctttgngatttaggtctgcagactgggttttgctagctctgctgatgatgtttgacgttcctggccaattgggcacccccggtttttccgtggggaggccggtcgtttccccactttccctttcgggacttccaaagggtttcaaatcacttttaacaggatccatcttgaaaagcccaac

SEQ ID NO: 12169 - DNA, 213 bp, Oryza sativa
  Clone ID: uC-osflcyp102c04a1
aaaagagaccggttttagtcctttttttttccacttgtcatttgcaaagtttctatcaacaaaagggtttaagcatagaagaaggggacaaaaaaacaatacgatatcctgcagccatgtcgattgttttcgcacctatcacccactcgagtcgctaaagccaactttgagttttgtgcatgcatgtacattacgacagatgggtttgccttt

SEQ ID NO: 12170 - DNA, 430 bp, Oryza sativa
  Clone ID: uC-osflcyp102c05a1
cagcgtacatcctggtccttcaggcttcaataaatcataaaaaagagcatggaacatgctttgtttgtagtttatcccacacaagaatctaattctcgatgttctctttacactacactactacagcaaccaccttttacacgttaccgtgccaaacaaaggtcaaacgattatcttttttttaaaaaaaaaggggagaaataagtaataaatgaaaaggttaaaggtataagataaaccttgtaccggtgtaatcctttattcttgcctaaactcgttcttaactacttacttttacctcccaaaaacttgctaccttttaagctgaacccagatccctgtccactaattcaaggaatttagtctttttttttacctggcccattgtttttgttgccaaccttacaaccgcatagtgcggcctttacgc

SEQ ID NO: 12171 - DNA, 131 bp, Oryza sativa
  Clone ID: uC-osflcyp102c06a1
agaaaaaaaaaccggggtttatcaaaagaaattttcccgggaaaaaagaggcttaaaatttaaaggggtttttcagcattttacaaacttacaagagggggcaaattatacaaggcccaacctatttttaa

SEQ ID NO: 12172 - DNA, 124 bp, Oryza sativa
  Clone ID: uC-osflcyp102c07a1
ttttttttttttttttttttttttttttttttttttttttttttttttttttttttttttttttttgtttttttttatttttttttttttttttttttttttttttttgttttttttttttttt

SEQ ID NO: 12173 - DNA, 437 bp, Oryza sativa
  Clone ID: uC-osflcyp102c09a1
ggagcacaaatttacatgttacacccacaccctacacccatgcataataatacatcgtatatacgtacgtacatacatacccctctcgatcacacgcaccatcgatcgtacaaagttgcgtacatacatacgtacacacatatacgcatacgcacgtacatacatacataattaaaaactcgtaattaattaaatacgttagttgatggcatctctaatggaacttgaggctggtgaggatgttttgttgtggacggggatcagcgaggttgatcaagccaggtttctgcacggggcccaaccccggtgaagaagcgcctggaacgggagaagccgaggaaggccagcatggcgagccctgccattcttgaatctccttgagcttgagcttcctttatcttccgccttgcttttggtcccgaagcccagcgggttga

SEQ ID NO: 12174 - DNA, 236 bp, Oryza sativa
  unsure (1)..(236): unsure at all n locations
  Clone ID: uC-osflcyp102c10a1
attcagaatccgggcctcattttattcgggaaaaagatgctcaggccagttccaggtcacctgatggcaagctcacaagttcagacagttcacgcacacacatacaatanctctcggacaaactgtaacaagatgcaagactcccttgaggattatccttatctgcacttctacnngatgactgtccggtagacttctgggccggcaccgaaatccggccgtttggtcaggtcacg

SEQ ID NO: 12175 - DNA, 71 bp, Oryza sativa
  unsure (1)..(71): unsure at all n locations
  Clone ID: uC-osflcyp102c12a1
ngcggtaccagcctttccctatagatgaggtcgtcattgagagccttgggcgttaattcatggatcattag

SEQ ID NO: 12176 - DNA, 246 bp, Oryza sativa
  Clone ID: uC-osflcyp102d01a1
aacaaaagccatactctctgtattaaagatccaacaggttcagagaacacgcaagctcagaactacacatcaccaaaattggagcaagtttgggggtacatatccgctcatacagtggaggatttattttttgattctacgagctttttaactagagtttcgacccgggaaagtcaatttacggattgaaatgaggcattccttgtctttcacaaaaacccattgcaccacaacagttggggcatg

SEQ ID NO: 12177 - DNA, 284 bp, Oryza sativa
  unsure (1)..(284): unsure at all n locations
  Clone ID: uC-osflcyp102d02a1
aggttcaaatccaacttattcataaagcatactgctgtcccacaggaaactgtttcataaaactaacatatcatacggactcgatggtccattaaaccagacacaagtagacatcagcaccacaaatacttgacgaacagaggtctcggtgatgaccaggncacattcggcaggctccaccaaactggcttgatttactgaaccaaccaacggagggcgtgagcacccaggtggtaggggtgggacttccttcttggaatgtttgttagttccggcgagggttg

SEQ ID NO: 12178 - DNA, 154 bp, Oryza sativa
  Clone ID: uC-osflcyp102d06a1
gctatcacgctccatgcacgcagctacgtacgtcttggtatcctcttttgttggccgcccttctttttttttttttaaaaaataactgatgcaggtttggaaatgtttttgagcagactcgaacgcagggtatttcatgtagagtacttctaag

SEQ ID NO: 12179 - DNA, 70 bp, Oryza sativa
  Clone ID: uC-osflcyp102d07a1
tttttttttttttttttttttttgtttttttttttattttttttttttttttttcttgctttgttttttt

SEQ ID NO: 12180 - DNA, 213 bp, Oryza sativa
  Clone ID: uC-osflcyp102d10a1
caattagaagatatactcagcaataaatagaatagatctataaaacctgaaacactttctcgaatggcttccaatgaccatcatctcttcacttggtaaacttccaaaaccaggcaaaataatgccaaggaatttccccgtgggaagtggaaaacaaaaattaaaaacttagggaaagccaatgttccccagcccttaggctccaaaaagtag

SEQ ID NO: 12181 - DNA, 176 bp, Oryza sativa
  Clone ID: uC-osflcyp102e02a1
ggaaaacacatcaactttattaagcaggaacagtatctagggaataaaccccattacattatccaagcaaaagagcccatccttaagaaaggcagagttaaactgaacttacgaaaagcaaaccttccttgaaataaccctaaccatcaataaccagaaaaaaagggagccaagtt

SEQ ID NO: 12182 - DNA, 113 bp, Oryza sativa
  Clone ID: uC-osflcyp102e03a1
ggatgtactagcgcatgcgaatatatatggtttgcttcattatttcatacagcaggtaaacaaccgaggtaattccacaccaaaagaacaaacaggttttacgacatagactg

SEQ ID NO: 12183 - DNA, 70 bp, Oryza sativa
  Clone ID: uC-osflcyp102e04a1
gagaagctgattcataatttggcatgtcaatttcacataccagatcagaaggaggataacttgagctaga

SEQ ID NO: 12184 - DNA, 118 bp, Oryza sativa
  Clone ID: uC-osflcyp102e05a1
gaggcagaaaaccttgcatttctgaagcaaggagacattgattaatttgatatgaacactgtatatatatctactagtttaaacctccctcttttgcaagaaccggaaagcattcagt

SEQ ID NO: 12185 - DNA, 149 bp, Oryza sativa
  Clone ID: uC-osflcyp102e07a1
agggagaacggaatattgtagctggactatagtcaaatgtaaatattaccaaaaccagtccccaattgaatcaggctcaacttgatgaatcatctaaggagtgaatccaacaaaacaaacgtaaaatggaaaaggcagtgcttaattac

SEQ ID NO: 12186 - DNA, 194 bp, Oryza sativa
  Clone ID: uC-osflcyp102e10a1
atacaatacaaatactattagaggtgtaccaaatttatatttgaacagaactcgtgtgcaggtagaattacacaatatatcatatcccaatcttggagaaaaatgccattttccatagtattcagcttgcaaaacttcccaacttccccaactttacctcaagcagcttcaagccaccgtttattttgtgaaaa

SEQ ID NO: 12187 - DNA, 459 bp, Oryza sativa
  unsure (1)..(459): unsure at all n locations
  Clone ID: uC-osflcyp102e11a1
gaggcagaaaaccttgcatttctgaagcaaggagacattgattaatttgatatgaacactgtatatattctactagttaaacntcctcttttgcaagnaaccgcaagcatcagttacatcttacagttacacaacttgctcctaacagcaatcacantcgatattagaggtagattgcctttttgtcttgtttcaaagtaatttacctgaagnncacgtgaccacgaattaccagcaaccagggtggtccagtcctggttcaatgaaaaactttgaagtatttagtacaagggaattggaagttttttttttggtcagttgcatggctcctttttcctcatttcagnatgaatcttttcacccgacattcgattttctagacctctttcaatgcctgcttctaacaaggaagccaccatggaaaggtctgtagcactacatgagaagagcttatgacca

SEQ ID NO: 12188 - DNA, 73 bp, Oryza sativa
  Clone ID: uC-osflcyp102e12a1
gacttctagagaattggatttataaatgctaacaagaagaatgggccagtgccaggcaaccataaggcaggtt

SEQ ID NO: 12189 - DNA, 89 bp, Oryza sativa
  Clone ID: uC-osflcyp102f01a1
ttttttttttttttttttttttttttttttttttttttttttttttttttttttttttttttttttttttttttttttttttatttttt

SEQ ID NO: 12190 - DNA, 242 bp, Oryza sativa
  Clone ID: uC-osflcyp102f02a1
cgaagaacaggggctcagtgagtgagaccaattttatttatcgagaaaacaatctatgggtgtattttaaagcatcaccgtttcgctcatctatatggagagactactgactggtaacaaagctacaagcttaaaaaccatttcttttctgaaactcaatagcacgaatggaaccaaaagttcgaagttcgatgaccttgtacacattttctctcacagaacatggaaaaaatccctcagca

SEQ ID NO: 12191 - DNA, 226 bp, Oryza sativa
  Clone ID: uC-osflcyp102f03a1
aatcattgatcaaggaaaacaactgcagctcatagattaatgcttactagctttgtccatcaatacatacaaaaaccagtccaacagttcatggtaactgctccaaatcaaagcacgccagaagttctcttaacgcccttaccacagcagggaaacaccaacaacaaaactgggatttttattttattctaccacaatccattcatattttacattacccaaggga

SEQ ID NO: 12192 - DNA, 130 bp, Oryza sativa
  Clone ID: uC-osflcyp102f06a1
gactcctagagaattggagaaatgaatgctgacaggaagaatgtagtcgggcaaggcaaacataaagaaggtcacatgcaagaaacaatatgctaaaagtcacatggtggaaaaaccattcaagaattga

SEQ ID NO: 12193 - DNA, 143 bp, Oryza sativa
  Clone ID: uC-osflcyp102f07a1
actatacgaattacagctgccactcgattcaaaggatacttgaaactgataatgaaaagcattaacaagtatctcatgaccatccagtgtaacataaaatcgatgaaggttttgatcgtcactttcatccacaggttagcata

SEQ ID NO: 12194 - DNA, 428 bp, Oryza sativa
  unsure (1)..(428): unsure at all n locations
  Clone ID: uC-osflcyp102f08a1
acacactctaaccagctactctcacttgcttttgcctgcacacaatatctttgggtacaaaccggagaagcaaaggttatactatgaggcatacatcaggaagcaagttgctccagccaaccgaaattgcaaccatctttttagccatggtacaacagggtcgaggctcaacaaaaatctttcccagnccagtcaacccgagggatttttccgattgctgttagctcaaccttgacctggngccagttgctagcacccattcaaacacatggccctcttccttgggctttttgctgcaaactttttgagcaccaaacaaatggtattggtcaatttagcttaaggccagcaaccaacccaccatccaaaagcttgatatttttcagctgactttgcatatcatttacaatcccccaaatcatttctgc

SEQ ID NO: 12195 - DNA, 79 bp, Oryza sativa
  Clone ID: uC-osflcyp102f10a1
gtgttctcttcagccggtgcaattcttctccagctccagtgggctggcgccccttctgcatcttcgatgtggatgggtt

SEQ ID NO: 12196 - DNA, 54 bp, Oryza sativa
  Clone ID: uC-osflcyp102f11a1
ttttgggtgttacacaaaaacacaatacgaattatacgatgtaagacgttacgt

SEQ ID NO: 12197 - DNA, 374 bp, Oryza sativa
  unsure (1)..(374): unsure at all n locations
  Clone ID: uC-osflcyp102g03a1
gataacttaagaattaagatctccatcacataaaaacatacagtgactgagtactggattacacgattgagttgttcagggttcagataggaaaaacatcttggggactagagatagagggaatcgacagatgcgcagcagtagtcgcgcgggtaaacaggacatcacggattgcgttgcatgtcgttcggctgccgcagtcggtcggccgcgggtgcttaagaaacctgctcttgaatgnggatacgccctgatgattcaccttggtggttagatggtcagccccagggcagcggccaaacgaagggtaccaaaccccagaagtatccaatggctcatttccaggcatgggtccttgttgtagattgatggca

SEQ ID NO: 12198 - DNA, 85 bp, Oryza sativa
  Clone ID: uC-osflcyp102g04a1
actcaagctggtaatcagttatacttactgctagttcagtaagaaacacagttagtatcacgctcatacagtttcttgtccacat

SEQ ID NO: 12199 - DNA, 57 bp, Oryza sativa
  Clone ID: uC-osflcyp102g05a1
ttttttttttttttttttttttttttttttttttttttttttttttttttttttttt

SEQ ID NO: 12200 - DNA, 296 bp, Oryza sativa
  unsure (1)..(296): unsure at all n locations
  Clone ID: uC-osflcyp102g07a1
caggacaaattcaagctatctacaagcttgccagcatcatcatattataataattgctttaatagtcagcaaactcgtacagaatagccagatccaaatttccacaaactatatatcatcatcaggaattttaaaaagagaactcggaatcgatttcgcatgatatttcgaggacaccccaangccaaacctgacgattaaccgatgacctaacgctaaataccctacctacaaccaccaggttgcctggccccttattttgaataacctttgcgccttgccgaagaatttcttag

SEQ ID NO: 12201 - DNA, 218 bp, Oryza sativa
  Clone ID: uC-osflcyp102g09a1
caacagatgaaggtgtgctttatatttgattgaaatacaaagtatatctcaaaagaattacaaaagattcattgccttgtacaattgtagagattcaccatgttaacaagtacaacgtcaatctaaacgtacgatctaacagcttgcaaggtctccaaagcaattttggtattattttatttcctttttccaccctgtcattttggggaaccatttat

SEQ ID NO: 12202 - DNA, 114 bp, Oryza sativa
  Clone ID: uC-osflcyp102g11a1
tttttttttttttttttttttttttttttttttttttttttttttttttttttttttttttttattttttttttttaattttttttttatattaatttttttttttattatttt

SEQ ID NO: 12203 - DNA, 491 bp, Oryza sativa
  unsure (1)..(491): unsure at all n locations
  Clone ID: uC-osflcyp102g12a1
agtaccagctacgccattgtagggaccatatgaagccgggaaaatccagctgaagttaaacgaccgacaacatgtataacaaacaacaaatggaatcagcttttatcgcttgttggtgagngaatcaaccgtccatctttgtcatgtttgaaattttcacgacaattgcattgtgataatttgtcaccacttcccttcgggaaaaatgccagtcttctgttcaggctttccgagccttgcttgcccttcaggtttccttccttcaaatctttcacgnnnagtgaaacagccatcccctcatttcgggaaaccacattccccacagcccccattcaactagcctaaaaattccagaaacttccaaatttcatccaatctattttcttggttccctgaaattctccaggaatcctttgcaacaaccaaattgcctttcaaccaagcggtttgcccaaatgccccgagaacaattgcaagttacaaccacctac

SEQ ID NO: 12204 - DNA, 165 bp, Oryza sativa
  unsure (1)..(165): unsure at all n locations
  Clone ID: uC-osflcyp102h01a1
aaaccagcaacggcatctgcgctccacatctcgcgatgtgcagcggtctgagataaacagtttctatgtgatggaacttaaaagtctcttttattcaaaaacacgggtagcgggcaatcgctcactatctgtccctctgggtattgccttagnttttagttgagg

SEQ ID NO: 12205 - DNA, 377 bp, Oryza sativa
  unsure (1)..(377): unsure at all n locations
  Clone ID: uC-osflcyp102h04a1
aataagtgctagcgcagggccgcatgcatacagaatttcaccttctatcataaattatacatggactacgacttcttgacacactcgattaaacaggggctagagtagtcagcagggcacattataatcgcgcgatttcatactagctacttcaatgtattttttttttcagtcaaggctttcggcctgttgacgatcgttcactgttgcacccctgaagaaagacgaatgaatccaaaaccttcttgaaaaaactcctaccacccgaaagnnagattcttttcccaaacccctcccctttgaagggagaaaaactgccttcttaaaaaccggtttttcggaacattcgttgccacctgccgtttttgcccacaagg

SEQ ID NO: 12206 - DNA, 91 bp, Oryza sativa
  Clone ID: uC-osflcyp102h05a1
tttttgttttaataagtaataaaggagaacccaatgcatacaaaaattaacgacgaataacaaataatacagggaaggacgacttgaggac

SEQ ID NO: 12207 - DNA, 108 bp, Oryza sativa
  Clone ID: uC-osflcyp102h07a1
ttttttttttttttttttttttttttttttttttttttttttttttttttttttttttttttgttttagttttttttatattctttttttaacttttgtttcaggttt

SEQ ID NO: 12208 - DNA, 162 bp, Oryza sativa
  Clone ID: uC-osflcyp102h08a1
ataatgaacatttttaaaaattcatattcaaactggacgaacctatacacgtccattcaagacattattacaaaatgttcaaacatactactatcagataaccgcaaaaagaatttaaacataactgagaggtccagcacagatgtcgtaccgctggctgag

SEQ ID NO: 12209 - DNA, 96 bp, Oryza sativa
  Clone ID: uC-osflcyp102h10a1
ataatgcttatgcatgtgcatttgtacttgaacaggtaaatattactgaaaaactgaaaagaagagcagcaggactgaacagaaaacaattcccgt

SEQ ID NO: 12210 - DNA, 77 bp, Oryza sativa
  Clone ID: uC-osflcyp103a01a1
attgtgactaactaatcagcaaagaatttacattgagataaagtgcaacggatactgccacaggacctactgggcaa

SEQ ID NO: 12211 - DNA, 54 bp, Oryza sativa
  Clone ID: uC-osflcyp103e03a1
atgtagataaagaactttatacatataaattgccataaataaagagacaggttc

SEQ ID NO: 12212 - DNA, 412 bp, Oryza sativa
  unsure (1)..(412): unsure at all n locations
  Clone ID: uC-osflcyp103e04a1
acaatattgaaaaaaatattttcaaatattgataacaatgttacaaatgcagcatgcatgcgatatccatgcgcatcacgcacttattacatatatatcatgggnaattatccaaaatataaataaaaaaaattttagtggtaaggggatatatagcctaagattgaagggtatgattcgatcgatcaattcattggctttattggcattttgaggaggtcgcgattggctgttggctcgttgagtcaggttcttatgaccccaaaccggttgggaaacctttcttgtacacccgtactttgaacaggatcaccttatacttgcactttgctcgtcgggcttatacgtattggggtcttccaaaattcttggttccacttgggcaccgtttccaggttcctccttactgggt

SEQ ID NO: 12213 - DNA, 61 bp, Oryza sativa
  Clone ID: uC-osflcyp103e05a1
gatctataaaaaactgttacaaaaaagtaacatataaaaagaacacgcaaggtcaggaaag

SEQ ID NO: 12214 - DNA, 147 bp, Oryza sativa
  Clone ID: uC-osflcyp103e06a1
aggttcaaatccaacttattcataaagcatactgctgtcccacaggaaactgtttcataaaactaacatatcatacggactcgatggtccattaaaccagacacaagtagcacatttaggcaccacaaatacttgactgaacagtag

SEQ ID NO: 12215 - DNA, 77 bp, Oryza sativa
  Clone ID: uC-osflcyp103e07a1
ggaaaccaggcttggataggtactttcgaatgccccaaatgatggaggtttttttgacctctccccagaattttcag

SEQ ID NO: 12216 - DNA, 86 bp, Oryza sativa
  Clone ID: uC-osflcyp103e08a1
tttttttttttttttttttttttttttttttttttttttttttttttttttttttttttttttttttttttttttttttcattttt

SEQ ID NO: 12217 - DNA, 122 bp, Oryza sativa
  Clone ID: uC-osflcyp103e12a1
tatgcctctcttagttggccgcccttctttttttttttttttttttttttttttattttttttttttatctattgtcaggtgcatcaggaatatttttcatacatattgcactagccaaggt

SEQ ID NO: 12218 - DNA, 64 bp, Oryza sativa
  Clone ID: uC-osflcyp103f02a1
attgtcatgtatgaacggcggtgatcagattcaaagggccaaaaatagagggtctgggttcggt

SEQ ID NO: 12219 - DNA, 70 bp, Oryza sativa
  Clone ID: uC-osflcyp103f04a1
ttttggggttttttttttatagaaggagcatactgaacaaagtcagaatgccaaaatgatttattacagg

SEQ ID NO: 12220 - DNA, 60 bp, Oryza sativa
  Clone ID: uC-osflcyp103f07a1
gggataaccgctttttaaaatattgatccatgaggggttgtatgtcagtttcgaaccact

SEQ ID NO: 12221 - DNA, 54 bp, Oryza sativa
  Clone ID: uC-osflcyp103f08a1
aaaacaatgaggaaattaattaattcccaaacatgtccctttatacatataacc

SEQ ID NO: 12222 - DNA, 116 bp, Oryza sativa
  Clone ID: uC-osflcyp103f09a1
caggttacacacaattttactgttattttgttcttcagttatctacattgggatcaaatatatggggagtaaagaatgaatctgtgtagtcccttctgtggccaaagcaaacaaaa

SEQ ID NO: 12223 - DNA, 56 bp, Oryza sativa
  Clone ID: uC-osflcyp103g02a1
cttaattgtcaggtttgaacagcggagttaagaagtaaaaggccctggtcaaattg

SEQ ID NO: 12224 - DNA, 115 bp, Oryza sativa
  unsure (1)..(115): unsure at all n locations
  Clone ID: uC-osflcyp103g04a1
nannnnnnnncaggggaaattaagaagccagggaaaaggtgacaaagcacangaaaccagggcagaggggataccgaaggcacgcggggggaaagccaacaaaacccggcagaac

SEQ ID NO: 12225 - DNA, 57 bp, Oryza sativa
  Clone ID: uC-osflcyp103g05a1
gttatgggtttatgaaaatttcttttggctcggaattaggggcaccgcatagggggc

SEQ ID NO: 12226 - DNA, 75 bp, Oryza sativa
  Clone ID: uC-osflcyp103g06a1
aattaattagattgattttttttaatgtacatatatattttaaaggttgcttgatatcaacagaacacaaaaatg

SEQ ID NO: 12227 - DNA, 51 bp, Oryza sativa
  Clone ID: uC-osflcyp103g11a1
aatgacatgtaaaaaaagcaaagaataaatataaaatgaccaaaaacaaaa

SEQ ID NO: 12228 - DNA, 81 bp, Oryza sativa
  Clone ID: uC-osflcyp103h01a1
ttttggggttttttttttttttttgttttttttttttttttttttttttttttttttttttttttttttttttttttagaa

SEQ ID NO: 12229 - DNA, 157 bp, Oryza sativa
  Clone ID: uC-osflcyp103h02a1
tgggttttttttttttttttttttttttttttttttttttttttaagaattaagatctccatcacataaaaacatacagggactgggtactggattacccgattgggttgttcagggttcagatagggaaaaacatttttgggggctttgagatagg

SEQ ID NO: 12230 - DNA, 55 bp, Oryza sativa
  Clone ID: uC-osflcyp103h03a1
ataaagagagtttttcatagaaaatgtaaaaacccaaaactaagaatacccaagg

SEQ ID NO: 12231 - DNA, 73 bp, Oryza sativa
  Clone ID: uC-osflcyp103h04a1
aacacttgtgaattattaaaaaaattgtattaaaacaattgacttggtattgcccacaaacccatatggataa

SEQ ID NO: 12232 - DNA, 129 bp, Oryza sativa
  Clone ID: uC-osflcyp103h06a1
ttttgggtttttttttaagccatggttttggtgacaaagtacatcaaaccagtttagaggggatactgaatgcacctggggggaaagcttaacaaaacctggttatacacttaaaatggatccagaaag

SEQ ID NO: 12233 - DNA, 230 bp, Oryza sativa
  Clone ID: uC-osflcyp103h09a1
cacgcatgcacggcgcgacgtaaagtcaaggctatggcatctcttagttggccggccccccctttatttttttggggggtttttttttttaggggtataactgacctgacatagattaagctgaaccaagggaaccaattattattgcactaattaagcaaaaaaggaaataaaaacaggtacaaaattggtttgaccttaaaaaaacaaaatttcgaggcacggctagc

SEQ ID NO: 12234 - DNA, 190 bp, Oryza sativa
  Clone ID: uC-osflcyp104a03a1
agacagcaaaaagatgatccaggttccacatcgtcatagacgataaaaaagtttagacagcgactagatgtgaggaaaacagcttcgacaaagggaaagaaatcacacaaagagttttagataacaactagaacatgtagggaaggacacacagcgggcaaaaattaagttgtctaaacgaagggagcat

SEQ ID NO: 12235 - DNA, 237 bp, Oryza sativa
  unsure (1)..(237): unsure at all n locations
  Clone ID: uC-osflcyp104a05a1
atgcacgcccgacgtacagcttggtatgcctctcatttttgagccgcccttncctttttttttggttaacaaattaatacagatcttgggaccttaattaatcatcatggcgcacaatatattttgatcagcgccgatgaaacgagagaggagaagaagaaaaaaaaattcaagaaaccaagaagaaaatatgtttgcatggtgatcggcaggattcaggaaggtcgggagcggcca

SEQ ID NO: 12236 - DNA, 164 bp, Oryza sativa
  Clone ID: uC-osflcyp104a06a1
tttttgggggttgggcagagccaatacatgttagtagatatatttggtaggggcaccagtgacaggagaatccaaaaacccaatgcagcaattatggaagctctcagaacaatgagaaccaaaaaggccctcacaacaaaggaacaaaccggcgaaaaatacaa

SEQ ID NO: 12237 - DNA, 415 bp, Oryza sativa
  unsure (1)..(415): unsure at all n locations
  Clone ID: uC-osflcyp104a07a1
acgtaataccatccattttttttattgtcgacgaatttatcagatatgctctagatacatatcttgtgtgtatatagccggagctttgttttcacatatcctcacccaacgataattgtagtactcttacaataaaaccggttcggagaggggagggaagagattattacatatgtgttaagagcagnaggnccattgagatggtacataaccaaattgttaaaataaaaatatataggcatattatatattgatattatcatncaacattagcccaaaacaaagctgcatactattattataggcagcaatccaccagcgcgatgcttgatcttagcttagttgccaccagactcctcgcaacctgggggcttgtaggcgatgaagctaatcaactgcacctgcctgacgttgt

SEQ ID NO: 12238 - DNA, 384 bp, Oryza sativa
  Clone ID: uC-osflcyp104a08a1
gcttaattatcccctctctatatgcgaattattactacaagtagctgtacacctgaaccatgcagctagccacaagcatggcactgtacgtagtaccaaaaaaaacacaggcatgaaaattaagtaagaaaaaggtcaaattaattcgtactgtaaatacataaaaccactggtggcaggcatatatgcaagattactccgatcctcactcgatcagttgagctgagcttttaattatatagcttcttcatcagggctgtgcttgtagaatgtagatcgatcaattaagcaagcaattatatatggaaggaggagaattaattaaggatgatatgatttgttggatgcatgagaggaggatgaggagatggatggatggatcag

SEQ ID NO: 12239 - DNA, 193 bp, Oryza sativa
  Clone ID: uC-osflcyp104a10a1
gcaaagagtgaagccattataatataatatataatgttcatcatatggtctatttcaaccaatatgaatgatcaatttgagatcaatgcttccagaaaaaatgcatatggacagttcaatgactaacctacagagttaactagtttaccaaaattttctatgacaagcataaattcattgctctatttgctct

SEQ ID NO: 12240 - DNA, 188 bp, Oryza sativa
  Clone ID: uC-osflcyp104a11a1
tgggggaacaatattaatacagatcttgggaccttaattaatcattatggcgcacaatatattttgatcagcgcaaatgaaacaagagaagagacgatgagaaaaaaattcaagaaaccaagaagaaaatatgattgcatggggacacgaaggaatcaagaagctgggcggccccactttgctgatat

SEQ ID NO: 12241 - DNA, 376 bp, Oryza sativa
  Clone ID: uC-osflcyp104a12a1
ctttgttggccgccgtcctttttttttttttttttgggcagagccaatacatgttagtagatatatttggtaggggcaccagtgacaggagaatccaaaaacccattgcagcaattatggaagcttttagcacatcagcccaacaaggccttacaactttgatcaaccggcgaatatacaagaagggaactaattcacactgcaacaggaaacctggtataaatctcttatcttacatacagacgtacccaagccagtcgcactactaaaaattaattagcctagagttatgatgttacgagccaatatatttggtgtcaaaatcctcaagatcatggccttgagactttttcagttttgccactagaacccacat

SEQ ID NO: 12242 - DNA, 245 bp, Oryza sativa
  Clone ID: uC-osflcyp104b01a1
atcaccaaacaacatccatcatccaaccgtcttattgataggcaatcagcaaacaatcatgtggacgtgccatcaagtatacacaagcacggtccgtgcaaactactcagctcttgttcactacaacaaagtacacagacgtccaaacactttacaaacattttaggagaaaattaatgccggcaagttactgttcaaatgaggtttgctccattattgaacaccagcgattggaatgcccctcc

SEQ ID NO: 12243 - DNA, 141 bp, Oryza sativa
  Clone ID: uC-osflcyp104b02a1
aacatcgaccggatccaaataagcttgcagttccagcaactgttaaaaagggaaaagatgtccaagaaaggtgagaggttgagtatgacattagacgcagagactatttcaaattggagaaaacccaggaaccaaacacaa

SEQ ID NO: 12244 - DNA, 406 bp, Oryza sativa
  unsure (1)..(406): unsure at all n locations
  Clone ID: uC-osflcyp104b03a1
aggaattagcaatgtaaatactcgcattccacaacagccgaagggcaataatcaggctcagaacaagtttaaaccgaacagaaaatagagagttttaaacgacacagtgcacacagcggngcatatgataataacggttcaatgcaacgagtgccatgngccgtgcacaaaacttaacgaattagttaaaaggcctagatattcttaaattgcagnacacgccaaacccaccacttgaaacggaggnaatcaatttctttctttggccggcagcccttggttcaacctttggccaaccggttgggttccttcctttcttccacgtttctttgatgaacgccccaacaagccaccgttttggccttcatgttaacgcaacccgcaaaacgaccaaataggaggggta

SEQ ID NO: 12245 - DNA, 257 bp, Oryza sativa
  Clone ID: uC-osflcyp104b04a1
gaaagaatactatatgcgtctattgaagaataaaactatataccaatatacgtctcatggaaaataatggactagctatacaactctagccattcaaagggcactggagaagtgaaaatttatacacgtcccttaataagggaggttggacatcagagcaaaagagagaaaggcacgtttatctctggacaaacaaatatcactgtactttcgcactgtgacccccaaaacatgacaatgttgctataccacgaacg

SEQ ID NO: 12246 - DNA, 202 bp, Oryza sativa
  unsure (1)..(202): unsure at all n locations
  Clone ID: uC-osflcyp104b08a1
agtacaaaaacagtacgatattatcgatcacacatgtacacatgatggttaacaacataataatagcaaagtaataacattccagatacacangcaaagggatttcaccaacgaatcaatccttctttcgacaaatatgctaaactactattgccccctttcttttattttttttcttttattttacaatgttacgggcaaa

SEQ ID NO: 12247 - DNA, 167 bp, Oryza sativa
  Clone ID: uC-osflcyp104b09a1
tttttggttttttttgccgagctcaccctcacagcattgttgttcgaaatagggacggacaaacaacacaggttcagctagaaatgtcctaaaaacagttgagatccatggggtaggctatagatgatccacattggaattttgggtcgtttgacttcatgccttcg

SEQ ID NO: 12248 - DNA, 61 bp, Oryza sativa
  Clone ID: uC-osflcyp104b10a1
tttgaaagaatactatatgcgtttattgaagaattaaactttttaccaattttctttttta

SEQ ID NO: 12249 - DNA, 359 bp, Oryza sativa
  Clone ID: uC-osflcyp104b11a1
ataaataaaaacatatatagatgataccatcatcaaagttagacgatcgtgcaagatgatctgcagcaagttcagtttgcaggctcgatgtagctggcacatcaccggttgtttcaaaggaaggcgttggatttagcaacgacgagctacaatcctcagggcactccaatgcaatcgattgagtgcatggtttgtcacgcctagctgcatacagttcattacgtcgtgccagatgagcagaccgttctccaggagtaacactttgtcgtcttgatcgctggcgagcattcatatcatgtatttccacattcggcagaatttgcctttgcaacccctacggcgaatcattccattcttct

SEQ ID NO: 12250 - DNA, 155 bp, Oryza sativa
  Clone ID: uC-osflcyp104b12a1
agagttggggcacaaaagagatggatggacgattcacgggtcacattctttttttgggaacaagaaagatccatgcttgtattggggtcgaacacgccttttatgactgctgctgcttgctcattcattcgtagggggttcctgaagcgttttga

SEQ ID NO: 12251 - DNA, 171 bp, Oryza sativa
  Clone ID: uC-osflcyp104c02a1
ttggccgctcgcgatctagaacgcccctttctggtttctttgaggtgagattggtcaacaaggagtctagatatgtggaaggtatataatctcttgtgttttgttgattttgcaactccttctgaagcctcgtgctgctctggagacctctgcaagggcttgctaaggcga

SEQ ID NO: 12252 - DNA, 55 bp, Oryza sativa
  Clone ID: uC-osflcyp104c03a1
attattatatttataacacataaggtagaaaggactttgcagccggaatatgtac

SEQ ID NO: 12253 - DNA, 85 bp, Oryza sativa
  Clone ID: uC-osflcyp104c05a1
tttttgttttttttttttaatttttggtttttttatttcatatatttacaaattacaggctggaaacataaaacaagggggaaaa

SEQ ID NO: 12254 - DNA, 159 bp, Oryza sativa
  Clone ID: uC-osflcyp104c06a1
gggttaaaaaatttattcgcacattaatttctatttatgttttttacttccataacacttaaaatattgatgacaaaaaaatttcaaataagacgaatgatcaaaagctgaacatgaacagtgcaaaactggccttatatttgggacctaagggagtag

SEQ ID NO: 12255 - DNA, 56 bp, Oryza sativa
  Clone ID: uC-osflcyp104c07a1
ataattattacagggtataaaaatatttgagttgggttattattgtaaaacctcat

SEQ ID NO: 12256 - DNA, 101 bp, Oryza sativa
  Clone ID: uC-osflcyp104c10a1
tgtttgttttttgatttaatgggattatttggggttgaaaaataatgagaagctgccgaaataatagacatatgatgtgggcaaatttataggggcagaaa

SEQ ID NO: 12257 - DNA, 258 bp, Oryza sativa
  unsure (1)..(258): unsure at all n locations
  Clone ID: uC-osflcyp104c11a1
gagcaaaatctttgaaccaacgcacacacgactactcatcagaaacatggcatacactgtccactcctgtcggaaaatagaagcagcacatgagctactatngtctgacaaacacagcaatggtgatggatgggtgcacctgggatatgcacggggtatacacgacaggccgataaacacaaccactccttatctgggaaggggccgacattaacaacaaccagtacttcaacttcgaccacgacacagttttttcag

SEQ ID NO: 12258 - DNA, 333 bp, Oryza sativa
  Clone ID: uC-osflcyp104c12a1
aaaaaaaattagtcacacataaagtactattcatgttttatcatccaataacaataaaaatattaatcataaaaaaatttcaaataagacgaatgatcaaaagttgaacatgaacagtgcaaaactgcacttattttgggactgagggagtagtgctgtggcttgtcagttccacaaagcatacttactcgtccataaaaaaaattttggtcatatgtacgttttgcagcttgcaggctttccattccaaaacctcactgtctggcctatatctgcatgtttggggtgtatgtggattgcttctttgcaggaccagagacaatatggatcttt

SEQ ID NO: 12259 - DNA, 53 bp, Oryza sativa
  Clone ID: uC-osflcyp104d01a1
gtaaaaaaatttttctgtaattttaaaaaaattcacaaaaaaaaaagtttata

SEQ ID NO: 12260 - DNA, 83 bp, Oryza sativa
  unsure (1)..(83): unsure at all n locations
  Clone ID: uC-osflcyp104d03a1
tttagttggnnccgcccttttttntttttttttttttttttttttttttttttcttttttttcttttattatttttttttatt

SEQ ID NO: 12261 - DNA, 52 bp, Oryza sativa
  Clone ID: uC-osflcyp104d06a1
ggggaaaacataatttaagggggaaaccatgatagaacgacggaattatggc

SEQ ID NO: 12262 - DNA, 54 bp, Oryza sativa
  Clone ID: uC-osflcyp104d07a1
tttttttttttttttttttttttttttttttttttttttttttttttttttttt

SEQ ID NO: 12263 - DNA, 57 bp, Oryza sativa
  Clone ID: uC-osflcyp104d09a1
attactggcttaaaacataatttagtgaagtaaatatgataaaacaacagaataaag

SEQ ID NO: 12264 - DNA, 172 bp, Oryza sativa
  Clone ID: uC-osflcyp104d12a1
gcacgaaaccttgacatgccattagaactattaaatatgcaccccccggactggacaatacaacactcaaatgcttgacccctggcaaccttaatcgccttaaaccaaccaggtcacataacagtagaataactgtctattctcctacattgttaaattaacccatgactgc

SEQ ID NO: 12265 - DNA, 137 bp, Oryza sativa
  Clone ID: uC-osflcyp104e07a1
gttcgtaaagtataattgttcttgaaataaagctttccatgagattgtaacaaaaaaaaggctggttagttcggatacccagaattgttcaagaacacaaaacttggattttgacatttaaataacttcagtaactg

SEQ ID NO: 12266 - DNA, 216 bp, Oryza sativa
  Clone ID: uC-osflcyp104e11a1
actggaaagacaccaatcgttccagggcgcttccgtttcgattagaagtttagaacttttgacaccatggttacggttaggccggcccagagcatgcatgcacacgcacatacatgttactacgctttctctttttgggttggatttgatcagttagtaagtaccccggggagcccacttcctttgccgttgattgaaggtccgatgtttgatgaa

SEQ ID NO: 12267 - DNA, 405 bp, Oryza sativa
  Clone ID: uC-osflcyp104e12a1
gatcgctccaaaaacattttggccctaaacattcaccttaactaaaagatccgttacacacatgccccgaacattactgatgaacatgttcgaaaagggtacacagagtgtttcaaatgttcaagaagtggacagagtctttacatagtagtagttaggggggctttaggcaaagaattagttttgatccttgcctttgggatattcaaacctgataacttgaaacccctaggtttccagataggttgcagtaaaacacctgaaacgccagaacccgaaaaggccaccttaaaacttcgggcttttttcagggagggcagaaccaacacgggaagtagccatttttttggcataaaattgtaaacgcttttcttcccaattgaattcattcttcagcaatggaaa

SEQ ID NO: 12268 - DNA, 165 bp, Oryza sativa
  Clone ID: uC-osflcyp104f02a1
aaacgaattctttcaccatttaacatttcataatttatgagttatgacgcttctgaacaaacagttcagaacaaaccataattcacaatttcacatatgcacaattgacaaggaatagttttgtgtatgtacaaatttgcttgatcatcggcgcatgcattaatt

SEQ ID NO: 12269 - DNA, 72 bp, Oryza sativa
  Clone ID: uC-osflcyp104f09a1
ttattgggcggccttcctttttttttttttttttttttttatttattgtttttcttctttatttttttttta

SEQ ID NO: 12270 - DNA, 62 bp, Oryza sativa
  Clone ID: uC-osflcyp104f10a1
gattgctattcaatgttttgtttactacaaatatatctccaacaacaggggagagaacacaa

SEQ ID NO: 12271 - DNA, 110 bp, Oryza sativa
  Clone ID: uC-osflcyp104f11a1
gattgctcattaattttttgtttactacaaatatatttcaattacagggggagaacatatttgaagggggaaaatatactagtacaacatcatcagcaccaagaacacaa

SEQ ID NO: 12272 - DNA, 101 bp, Oryza sativa
  Clone ID: uC-osflcyp104f12a1
tttttgttttttttttttttttttttttttttttttttttttttttttttttttttttttttttttttttttttttttttttttttttttttttttttttt

SEQ ID NO: 12273 - DNA, 196 bp, Oryza sativa
  Clone ID: uC-osflcyp104g01a1
catggaccagtaggtccggttgatgtacgtcattaatacccagtttaaaagaccaaaagtagtatcacatcatcatatgcctaacatggaaaacttgatagtattatcgcccctagagcggaaagaaacattttgtcgccgccgtcaaagccgtgcagatttgtatgccaccggcgcctgcttgctgttttactgc

SEQ ID NO: 12274 - DNA, 244 bp, Oryza sativa
  Clone ID: uC-osflcyp104g02a1
aaaagggtcacagtccattcaatccgtctatttagtcataaatttctcaccagcaacatgtttaaatacgacagctactcttgtctgcgaatacaactgtagatggagtaggaattataattacggccaagagaagattttcaaggtctaaaatcatgaacatcttttcaggtagttcatctactttctcgtgaatgctacctgtaaggtttccacaaggattaatcccccgctttgattaaaa

SEQ ID NO: 12275 - DNA, 182 bp, Oryza sativa
  Clone ID: uC-osflcyp104g04a1
ggagtgccaaacagttataggcataccgatatctagtagtctttagcagcaacatggatatacacagacgtttcttaaaatgtccaagctagtgcactatggatagtaagccacctaaggtgtagaaactaataagcatgggtaaccaattccagggggaggggaagccggcccgattcctg

SEQ ID NO: 12276 - DNA, 68 bp, Oryza sativa
  Clone ID: uC-osflcyp104g06a1
aaactaaatttttttaacaattatgaaacataaattaattcgagtaaaggctaaaagcccgacatttc

SEQ ID NO: 12277 - DNA, 93 bp, Oryza sativa
  Clone ID: uC-osflcyp104g10a1
actacaaatatattttaattacagggggagaacataattcaagtgggaaaacatactagtacaacataatagatcaccaagccacacaattct

SEQ ID NO: 12278 - DNA, 241 bp, Oryza sativa
  Clone ID: uC-osflcyp104g11a1
agagaatctgattcaaggaaaatttgcacaatggctaactagagaacaaaaaatagggcacagacctgaacagcccacagtaagaaccaaaagatcaatcaatgggccacgtgtaaaagaattacaacaagataaaggctgtgaccagtgtgaaacctttggttcctatcgccgcttctaatttacctttccctgtgatgactttacaaccctagtgcttagcctcttgaaatcaagttcc

SEQ ID NO: 12279 - DNA, 385 bp, Oryza sativa
  unsure (1)..(385): unsure at all n locations
  Clone ID: uC-osflcyp104g12a1
gctctgaaactaaatctctttataaatatcaaatagagcactaatacgagtaaagctaaaagccgatatttcttatctacatgatgagactacgactagttcacggttgttgccaaataagggtaatatttacatcacctacgagcaatctcggttcaggctacaaaaggctatgngtaaatatttggccagggcgacaataggcctgagtttggttttcacttttcagaaccacgggtgccatgttcggatccatcatgcacaggttccttgaagataatgccgtttccacgagatccgtgacgcctttttggaaccgactgaggtggctcagatgaaatttcctccctcatcagcaagataatgtggtgattttaatttgata

SEQ ID NO: 12280 - DNA, 206 bp, Oryza sativa
  Clone ID: uC-osflcyp104h01a1
gatcataaggcaaagctgcgagcgccagatcatcttattactacagcttcttggcgatatgctacagtagcttcttcctcccttgcaaaaagaaacccaaaccttatctacaacgcatcacacacactggacacagagcgctcggatcgatcgaagccagacgagacccaccatggccaaactactacttaggttaagccgacaac

SEQ ID NO: 12281 - DNA, 193 bp, Oryza sativa
  Clone ID: uC-osflcyp104h02a1
tttagaattaacaaaaaaatagggggtttaatttatttttttaaaagtattgtagattttttccttctttaaccattacataagtttaagcaataaccagataacaaatcctactcctgttttaggtaaaatattcaaacacattacctttataagaacttattatttaggaaagtagcgggcatgggcataa

SEQ ID NO: 12282 - DNA, 264 bp, Oryza sativa
  Clone ID: uC-osflcyp104h03a1
aaccaaaacataggaggtttcaattcttcttctcaaagtagtgtagcatctttccttctttcaccattacataagcttaagcaataacagataacaaatcctgctactactttaggtaaaatattcaaacacaatgaccccttataaggaccttattaattaggaaaaggaagcgggccatgggccataaaatggcagccgggggggcaagtttaagaatcacaatggctgagcagcgagggaaacaaaacaccataaagggac

SEQ ID NO: 12283 - DNA, 177 bp, Oryza sativa
  Clone ID: uC-osflcyp104h04a1
ttttttttttttttttttttttttttttttttttttttttttttttttttttttttttttttttttttttttttttttttttttttttttgaaatggaaaataccccatttaaattaaaggtgttttcgttaacggtttccattttttttggaaaactaaatgttagaatccttttt

SEQ ID NO: 12284 - DNA, 112 bp, Oryza sativa
  Clone ID: uC-osflcyp104h06a1
gtaccaaatatatatcacaaaggttttataggaccaattaacatacaatattacataggcccaattaatatctaatagaaaaatacaaacccaataacataccttagaaaca

SEQ ID NO: 12285 - DNA, 115 bp, Oryza sativa
  Clone ID: uC-osflcyp104h07a1
tttaggaggacgaaaataaaagggggtttaatttatgtttacaaaagaattacagcttgtatcatactttaaccattgaatagattaacataacatcaggcaaaaaagctcaaaa

SEQ ID NO: 12286 - DNA, 260 bp, Oryza sativa
  Clone ID: uC-osflcyp104h08a1
aaccaaaacataggaggtttcatttcttcttctcaaagtagtgtagcatctttccttctttcaccattacataagcttaagcaataacagataacaaatcctcctcctcctctaggtaaaatattcaaacacaatacccttataagtacttattattaggaaagtagcgtgcatgggcataaatggcagcggggggcaggttaagaatcacaatgctgagcagcgaggaaacaaaacaccataatgggacagagcaaaag

SEQ ID NO: 12287 - DNA, 190 bp, Oryza sativa
  Clone ID: uC-osflcyp104h09a1
aaaaatcccttaacaattaaccacaacaccaaaaaaactataagctggcaaaaaatttacacagttttacactcaagtaaaagggaaaaaaaggtattcaaaacccgaaaaaaagccccgcacggttaaattaaaagaccctggaacaaactgggaaccccccaaacaggggggggaagaaatcattgca

SEQ ID NO: 12288 - DNA, 198 bp, Oryza sativa
  Clone ID: uC-osflcyp104h10a1
ctgcgaagcaacacttcgatttagattaagcgcaagaaaattagacacaaaatatgagccatgaccaggcccaaccaaccaccatgatacaaccaagtatagttttaggtttcgactgacataaaaccctacataattttaaaatttatttctcgggaagaggctttcattctactcttcttctgggggcaaaaacac

SEQ ID NO: 12289 - DNA, 88 bp, Oryza sativa
  Clone ID: uC-osflcyp104h11a1
ttttttttcttttttttttttttttttttttttttttttttttttttttttttttttttttttttttttttttttttttttttttttt

SEQ ID NO: 12290 - DNA, 224 bp, Oryza sativa
  Clone ID: uC-osflcyp104h12a1
atgaaaaataggattataaagtatattagttaattaagtaatattggatccctattacatatcccgtatagtctatttatagtttcactgtcctagatttacaattctaggttttttttatgccaatgaatttacatgaccgcctttataacagggaggttttaaaggggaaaaaagttacaccgaaggtcctcttcaactttgtccatcaagtttacaaaaac

SEQ ID NO: 12291 - DNA, 179 bp, Oryza sativa
  Clone ID: uC-osflcyp105a03a1
aacaaaacaaaccaccacacaaaggaaaaaatcaaacacaaaaccctaaaaaggaacaaaaaaaaggaaagaaaagagaaagggcaaaaaaggaaacggggggcaggtaaagaatcaaaatgctgagcagcgaggaaacaaaacaccaaaacgggaaagagcaaaagccaacaaaaggg

SEQ ID NO: 12292 - DNA, 466 bp, Oryza sativa
  unsure (1)..(466): unsure at all n locations
  Clone ID: uC-osflcyp105a05a1
aagagtctatcacgtatgcatcgcacgccgttacgtctgggtatgcctcttgtttggccgccctttntttttttttttgaactttcaaattcaaaaaccacgatttataaagtgccggagatgaagtacacaaattaacattacatcgagttttaataaaacatcatgcgaaaagccagcaaaaacaaaaggcagcatacagctaatgaagctctactggagtagctcgcaaaaggtccgacttattttcagtagcactctactccatttcttccgaaagagtgaccatcttctactgggtgttgtacatgtgaacggatcagggtcaacaacgcgagagcctgtaatccccattcgttgtcataccaagacacaagcttaacaaagttgtcattgagagcaataccggcctttgcatcaaagatgcttgacctgttgtcaccctggaagtctgtggaaacaaggt

SEQ ID NO: 12293 - DNA, 158 bp, Oryza sativa
  Clone ID: uC-osflcyp105a06a1
cgatgcacgcacgacgtacgtaaggcagcacttgagttggccgcccttctttaataaggggggttttttttaatattgttttttaattataaaaagtgtttttattaaggggggaaaaaaaaaataaaaaggaaaaaaaaaagggaaagtaaaagaaa

SEQ ID NO: 12294 - DNA, 387 bp, Oryza sativa
  unsure (1)..(387): unsure at all n locations
  Clone ID: uC-osflcyp105a07a1
cgacatgatataaaacttctgtaaggagcgaaattgttacaaagaagcatcaataggaaaaaaaaaaaaagaacagatggaaactaggtatccaaaagttagaccagcttcattgaagctatctgggtagcaaccttcatagcttcctttagttgagaggcctcagttccctggccctgggcaattccatttttgccaccaccttccctttcctttgagggngcgcaatcgatggtgtcaaccaatccaacaccttcaagctgttagcagcgctgggaggcacaccagcataaatgactgccttattcgtggcttcatccgggctgaatagcatgattggcaaatccttctggtccttgactttgataactgcttcccgaatagcac

SEQ ID NO: 12295 - DNA, 385 bp, Oryza sativa
  Clone ID: uC-osflcyp105a08a1
attaattaaaccaaaacaactggacattattattcagattacaaaacgggattttaccatgcaaatcattttactggaaaagtaacaaggcgaacacaccaaaattttccaattggttatctaccaaaatttaagaggggcttcttctttttgtccctattggagcccgggccttattctttcaaaggacaactttgcttgggatcaaaggactaaaaacggttgatcctaattttagattggcctgggttttgaaaaggtttggccctggttcatttatgctggaacaggcttccaaaaaacctgcacccgaggggggttatgtcctttgcggcatcttggtcattccttgacaaggacttgtcgacagctgcagcagcttgcc

SEQ ID NO: 12296 - DNA, 399 bp, Oryza sativa
  Clone ID: uC-osflcyp105a09a1
cttcttctcaaagtagtgtagcatctttccttctttcaccattacataagcttaagcaataacagataacaaatcctcctcctcctctaggtaaaatattcaaacacaatacccttataagtacttattattaggaaagtagcgtgcatgggcataaatggcagcggggggcaggttaagaatcacaatgctgagcagcgaggaaacaaaacaccataatgggacagagcaaaagcctccgaaagggagcttttaggcagaaggcttctcccacttgaggggcttcaccacctcccaggtgaagtctgggtcgtcccttccgaagtgaccgtaagccgccgtcttgaggtagcgtccgttgccgcctttcttgaggtcaaggttgatgatgaacatgcc

SEQ ID NO: 12297 - DNA, 140 bp, Oryza sativa
  Clone ID: uC-osflcyp105a11a1
ttttttttttttttttttttttttttttttttttttttttttttttttttttttttttttttttttttttttttttttttttttttttttttttttttttttttttttttttttatttttttattttttttttttttttt

SEQ ID NO: 12298 - DNA, 54 bp, Oryza sativa
  Clone ID: uC-osflcyp105a12a1
gggggaaaaattaaatttaacgaaaaaaaaaggcttgttaaaaaaaaaataaaa

SEQ ID NO: 12299 - DNA, 432 bp, Oryza sativa
  Clone ID: uC-osflcyp105b01a1
cagtgaaaagaagcagtgaattgcagctaccgagaactctcgaactatatatatctcaaccaaacaatttcggttcgttgcaaacaatgtcagcaacttatgagaattttcagctaaggctgggactttacaagctacggtagttgcaatgtcctaaaaaaacaaggaagatgaggttatcttatgaaagcttggctgtcttctggttgccattgctggtcgccatcttttctttaaactccccatctccatcttccgtcttccggttattttgacgcgcaatcccccattgatacggattcgattcgggacgaacttcggtgggctgcgtttgctggctgctctctagattgccactgccaaatgccattttcctgaatttcttcaggtcttcattgtaatggcccgggtcgtacttcgttgctgttgtat

SEQ ID NO: 12300 - DNA, 185 bp, Oryza sativa
  Clone ID: uC-osflcyp105b03a1
tttttgtacgaaaaagagctatatgtatgtgtaataatctctagctctctctggtacacgttacccctcgaaaaggagcaaaacgttacgaagacgaacacatcaagaagaaagaaagcctagctaagcgtgatccgggcccgaatcaacccattgggattgcaacatcaacatgcaattgcatg

SEQ ID NO: 12301 - DNA, 198 bp, Oryza sativa
  Clone ID: uC-osflcyp105b04a1
tttttgtagcaaaaaagtcgaactcggctgaatatatttcacttgaatcaaatattcggattacaattaggagctagatgaaaatttgaaaccaaatccagctacctgacggacaaacgctatactacggcacaggacttactaagaaatcacaatgttgtgacaaagaaagagactaattcctggtctggactcacc

SEQ ID NO: 12302 - DNA, 80 bp, Oryza sativa
  Clone ID: uC-osflcyp105b05a1
aaccaaatcaaacttattttattcttttaataaggcccttgcccaagaaactaaataaaagcaaacaaaggctgcaacta

SEQ ID NO: 12303 - DNA, 456 bp, Oryza sativa
  unsure (1)..(456): unsure at all n locations
  Clone ID: uC-osflcyp105b07a1
gatagttgatacaacttaatttgcaaattaagcaggatacaaccactgcaagttcttcaaattcctccccctcttctttctcaactcataagacccaaaaaaaaaagtgaaaacacatagcaccgattctggcagtttgaccataacttcataaggcaactcaagatnctagtagatncactttcacacacacagttcatcatagccttcctcaaancatgcacatattcaagctttcaactttaattttaggcttattgcatgcattgcaagttctggtatcataatnnatgttagcagtatacattacaatagatagataatatttatccatattataatgtatatatgcatatatgcaggggtagggttcatcaggttcagaggccaccgtagcggatgtcggagaacttggacttgatccacttgaagctgctccggacggtggacttgagc

SEQ ID NO: 12304 - DNA, 205 bp, Oryza sativa
  Clone ID: uC-osflcyp105b08a1
agaagggaagggaccataaccaggaataggcatagctgcacaatgtcgaagtctggaaacttactaacaccacaccacatactaaacagcagttccattaaaccctaactttaaaaggctaaaagggttttggtttaaagggataacttcctaaccagctaggataaattccattgaccacaggccaggcattgccaaggggcag

SEQ ID NO: 12305 - DNA, 390 bp, Oryza sativa
  unsure (1)..(390): unsure at all n locations
  Clone ID: uC-osflcyp105b09a1
ggaaaatctttcctttggcaacagcccattagcccatgtgttgggttgggttgggttgcaaactttgcaattggaacccaaaagttgcacacagtctggaatcagtcttatgggaaaatttacggggtaataactggtgttttgctgtctaaagggatcatttggtttacactaaacattagcagggaccaatgccattggagaccatagngctggcggccatgttaaaaccagaatccaaaaaagaagagcaaaaaattacacttaacgcaaagatgttttgctcataggagcgatggcgatgcattcaagtttcgcaaatccagcctcctgtcattggagtccttgaactaaaaggacggcgaaaattttaacttcagctccagtttc

SEQ ID NO: 12306 - DNA, 170 bp, Oryza sativa
  Clone ID: uC-osflcyp105b10a1
agcacgtcgattgattgattataaatccatggatctcccggattaattccagggacatggatatgatggatgggatatggtttacacgtcgtcttttcgatcgatcgggtcttggccttcgtttagattcgccggggatagatgattcgccttggcggttgccgctgcca

SEQ ID NO: 12307 - DNA, 131 bp, Oryza sativa
  Clone ID: uC-osflcyp105b11a1
ggggaaaaaattttccgggattttgggggccgtgtaaaaaaaaacttgcaccaaaaatttttggaaaaaaaaaccctaaaaaaagggggaggagaaaagaggccgcccctcttttaaaaaaaggggaaaaa

SEQ ID NO: 12308 - DNA, 348 bp, Oryza sativa
  Clone ID: uC-osflcyp105b12a1
gggcaaaaaatttttcaaccattttttttccattttggattccccaaaaaaaccctttgttagggggaaaaagaaggaaaaaaagaccaaaaacgatcacaacacggttggggtactccaaaacgtaaccttccgggcactcccactaaaacccaaaaacctttttaaaaagagggaaaccgggcccaaattttggggggcactttaaaaattggggcttttaaaaacacccagggttttttgggtttttggttttccaaatatttaaggaaaaattcctttaaccaaagccccccttgaaattcccccttcaaagtttttgacaaattttttttaaaagcccagggg

SEQ ID NO: 12309 - DNA, 107 bp, Oryza sativa
  Clone ID: uC-osflcyp105c01a1
ataagaatgcattgaataaaaaactagcttgaatcaaaaattctttaatgcaataggaaacagaattggttactaagataatgcaaaagtttcaaacacagaaaaac

SEQ ID NO: 12310 - DNA, 255 bp, Oryza sativa
  Clone ID: uC-osflcyp105c04a1
agttgtaaattgaactgtatatatcttgaatttgaaaacaaacagctgcccaaattatgttttacactccatcgcattgcactgctgacccaaaaaaaagaactagcaaaatctttctattctagcggggctaaaagaatcgctactttgtcgggggattttgtaccaagaagcggccggttggttgtgattcgaatcgaatcgatggttcaggaagcaagggtggttttccggccgaagccccgcggttggagg

SEQ ID NO: 12311 - DNA, 77 bp, Oryza sativa
  Clone ID: uC-osflcyp105c05a1
cgggggaactggtggccccataccaatgaaaatttaaacccataacacccgttttgatccccgatcccgagtacccc

SEQ ID NO: 12312 - DNA, 404 bp, Oryza sativa
  Clone ID: uC-osflcyp105c06a1
gaagagaaagacaattggaatcacataaaaagatggcccaaagcacactaatttttattacaaccgccacgacagggttgatcgtaccgcccctaaggcccaaaatgcaaagcggcattaaccttttgggggatatcccgctctctaaaggctttttattcctcagcaaatcccagttcagagagctttgaggtgggtcctcggcggtaattccgcaaagaagggcgtcctcatccgccagcatatttcctccaccagtggcacggaaggcctgggttcagcccatgagggcctttgagcacttggcagctgaagaaggccttcctttttgccactcacaagcttggtgaagtaagagttgtcaaagatcaaagggttggacgtccaggctccctcaaagccag

SEQ ID NO: 12313 - DNA, 428 bp, Oryza sativa
  Clone ID: uC-osflcyp105c07a1
cgttagggggcaaaatggattatcacaaaactctgaattcatcatacatcagacaaaaaaaggtgtatttgttgagcaacagataacaggacaatcctgggacgacacgatttgcacgatatacacaaggatgtaacagaaggacacaactggcgcaactcgggtacaaatagcttacgaagtcggccgatcccaaagtgcagtaaactagccatttagttctgcgtttgtattgcgtgtatgggttctgaactgcagctgtattggccaggcaaggtccgtatttctacggagcataccagcaaacaggggcccagccaacttttctgattagcctggtagtgaagacacgtaggccacttctgtgatcaagggctctggtatccagatctactgcacgttattgtcatcacaaataggtacttcct

SEQ ID NO: 12314 - DNA, 432 bp, Oryza sativa
  unsure (1)..(432): unsure at all n locations
  Clone ID: uC-osflcyp105c08a1
ggacaagcaagaagtatatatattcatccatttctcaaactactacaagaggtcgagaggaacacataatcaggagggattgcgacaatttacagcaacaggagtctggtagatcgaggcaagaacaagacaggcagcagcagagctacccctcttcatttccactgaatttttacacatttggaatccatggnnaaaccgagccttccctcccgntcgtcgtggttgtcaccggttagtccgattgagaaaaaatggtcattggcgtgctcataatccggatcgctcgccggcgttcggtgaaggaggcggggcggattgttcgggcggcctgttgaggagtgggttcagagccttgacgacgatgctcatgttgggcctgaagtccgnctcgtactgcacgcacagcgcagctacggcagccatcttggc

SEQ ID NO: 12315 - DNA, 173 bp, Oryza sativa
  Clone ID: uC-osflcyp105c09a1
ttttttttttttttttttttttttttttttttttttttttttttttttttttttttttttttttttttttttttttttttttttttttttttttttttttttttttttttttttttttttttttttttttttttttgcccacaaagggggggagggaagtttttttttttatt

SEQ ID NO: 12316 - DNA, 192 bp, Oryza sativa
  Clone ID: uC-osflcyp105c11a1
ttttttttttttttttttttttttttttttttttttttttttttttttttttttttttttttttttttttttttttttttttttttttttttttttttttttttttttttttttgttttaaaaatggggaaaaaaagtttttttttcacagtgggaaaaactacttaacgggggggcccccattggggtcac

SEQ ID NO: 12317 - DNA, 419 bp, Oryza sativa
  unsure (1)..(419): unsure at all n locations
  Clone ID: uC-osflcyp105c12a1
atctcaagctggtattggtattatcacatcaaaggtaattaaacgctgaaagtagggaaacacacggcagtatttacacatggaagatgtttacacacaaacacacttctttgggttgtcgctagcccttgataggagccagcaggctagctgacacgtanccggtctctggtagtactaacangagacagcaagctactaggaacangagtaacaagataagtatagcaacatactagataattaattacgtattagataaccacaaggnaccagcaaacatggcgtgacagagagatcgaccagcctccgatcaatgggattattcagttcagcgatggctgctcctggtctcgtcgctgtacagccagtcgtagacggtggggggagttgggctgggggcgtcgaagaggttggcg

SEQ ID NO: 12318 - DNA, 838 bp, Oryza sativa
  unsure (1)..(838): unsure at all n locations
  Clone ID: uC-osflcyp105d01a1
aacaaaaaaaaaaaaaaaaaaaaaaatataaaaaaaaagaacaataaaaaagaaaaaaacaaaaacaccggaaaaactccaaaaaaaaaaaaaaaaaaaaaaaaaaaagaaagagaaaaaaaaaaaggacaaaaaagagaaaaaaaaaaatacacagaaaataaaaaagacacataagacaaaaaaaaacgccgcaaaaaaaaaccacagaaaaaaaaaaagagagaaacgcaaaaaaaaaaagagagaaaaacaagaaacaccaaaaaaacaaaacggaaaaaaaaaaaaaagagacacaccaacacaaaaaaaaaaaaagggacaacaaaaaaaacgagagaaaaaaccgggaaaaaaaaaaaaaaaaaaaaagacgcgcccccaaaaaaaaaaaagcagaacctaggagaaaaaaaaaccaacaaccacgagaaaaaaaaacacacaagcccccttaacaaaaagcaccccagaagaaaaaagagggaaaaaaaccaaaaaaacaaaaacagccgcgacaaaataaaaaaggagaaacataccaaagagaaaaaaaaaaaaatacaacaaaaaaaagaaaggggcaacaacacaaaaaaaacagaaaaaaaccnaccaccaacagggggagaaaaacaaaaaaaaaacaaaaaaaagggagaaagggcaaaaagccctaaaaaaaaaaaaaaaacagaagcgggggaaaaaaaaaacatataaaaaaaaaaaaagngggacaaaaggggggaaaaaaaaaaaaaacaacaaaggggccccccaaacaccggagaaaaagaaaaaaaaaattcgcgaaaaaagaaaacaacacaag

SEQ ID NO: 12319 - DNA, 110 bp, Oryza sativa
  Clone ID: uC-osflcyp105d02a1
tttttttttttttttttttttttttttttttttttttttttttttttttttttttttttttttttttttttttttttttttttttttttttatttatttttttttttttt

SEQ ID NO: 12320 - DNA, 423 bp, Oryza sativa
  Clone ID: uC-osflcyp105d04a1
atgagcataatgccatttggtatatgaaattccttttcttgcactgttgatatacattggaactttgtacaaatctataactgggaaagagccaccaagacattgccttttccctacaaccacatggtatattaataaagacttgattttgaaatttgcgccttacaaaaagaattgattttgtcctagcctttgcttttaaaaggataattgcgtttttcctagaatagtaagaggtaggaaattcccaatccccaaaccctaatatgacataccctataaagggattttttacaaaaaaaaactagccttggaaaagaaaaaggaaaatattaacaaaaagaaaagggttacacacattccaggggtaaaaggaattgaaaaaaaatttaacaacaaaatcaagggaatatttctgacaag

SEQ ID NO: 12321 - DNA, 437 bp, Oryza sativa
  Clone ID: uC-osflcyp105d05a1
gcaggcaggcagcaggaagagccaaacatagccgatcgagtttgacacgaacttatgtacacaacatggtcacgtactcacatcacatacatacatacagacatactactatcagcatgtacacaatacacaacccgacgcgtggtggacaggttacacgtagcgtggtagcaggcggaacgtgtccggggttcgaagagcgccggtgagggagggtatttccggtccgttgcgcgaccgtgcgacgttgttagcctggctgcccggtggccctttgtccaccagccagccgcgcccggcgttagcccgggttaccgcgcccttgccgtacacggcccgtgcaccgcccgtcgcggccctccagcgccgtggccgagctttccctggttgaacccgtcgtcgaacggttttggttcaccgtgccggccaccatgctg

SEQ ID NO: 12322 - DNA, 447 bp, Oryza sativa
  unsure (1)..(447): unsure at all n locations
  Clone ID: uC-osflcyp105d07a1
aggaaagaaatatcacttttgtaaaaacaaaattatcaaaagcttcagtgcctccgtcctgaagttacaagaccataatttcaacatgaatacaacggaagatcatccccttatcatctaaccacagattcccaacangttcttgttccttccaaatggtcgaactangaaaatcttattcttttaaatctaaatgnnaacctattaagggaaagtacaggccctttcccctcgaaaaaaaaataattcaagaattcaaagctgctttccccgggaatgatccgagtcacctttcctcttggaactctggacagcttctatatgggcactcaaaagaacaggcatgttgaccgggcccaaaaaaaacaccactaccaggcaacttccctggtctgctgcaccaggggtttaaacacttttttaccgggagcagctaccaaaaatact

SEQ ID NO: 12323 - DNA, 452 bp, Oryza sativa
  unsure (1)..(452): unsure at all n locations
  Clone ID: uC-osflcyp105d08a1
aactcatgcatccaagaaacagtcttcttggaccaagagaataagatatttcaaatgaacttacaaagtcagatgtggaaactccttccagtacaacccccttgagaatgacctgttttcaacactgatggtattcttagaattacanttgaacaccatcgcttttaaaatatctagtgccataaggttgcctaatgaaactgcctataattctagtctattctactggtcatacagttcttgatgtattggcacacttagttggtttaaaacgctcctcagaaatanntgagatgcttataccaacccctctcactttcccatacgattgcacgtatagtatccaccagtttgcccagaattcccaatgacgtgcagtacttctctgtctgctgattcaactgttccaatggaaaagagcttgtaatctttagtatcaactttccttgtaa

SEQ ID NO: 12324 - DNA, 203 bp, Oryza sativa
  unsure (1)..(203): unsure at all n locations
  Clone ID: uC-osflcyp105d09a1
aatgcaactgtgcaagtaagtttcaacaattttgtcacaacattataagttacatctcgtagctctaattcacttcccagtactagctaggcctttcctaactggatgtctttgacgcctttgcatggcaccccagngcttggcgtcttgttgaaactggtctcccttgctttttgtatagatggcggtgcggtcatttattt

SEQ ID NO: 12325 - DNA, 382 bp, Oryza sativa
  unsure (1)..(382): unsure at all n locations
  Clone ID: uC-osflcyp105d10a1
aatatcagaaattttatactgaaaactcaaggaacccaacattttggtcgcactgggcctactatcacaactcttaaggaaattctgaaaagaacaaggtaacaaaaatgttgggtttcataccatgngctttgaaccaaccttttttaacagttagggtcactatgggagttggttcatttcaacaatgacagtatttgaggaagtctgcggccaattaaaaacatttgcaatttgaattttctgaaacgataaaacaacccaggaaccgggcggttttattttgaggccaaggcaccttgcccaaaaatctcggcaaaagttacttgaaaaccttaggacattagtacacattccatggccaaacatgnngatgccaaat

SEQ ID NO: 12326 - DNA, 371 bp, Oryza sativa
  unsure (1)..(371): unsure at all n locations
  Clone ID: uC-osflcyp105d11a1
aggttaactcacttgagtctgaattaccagatgagcaatacatgtatttagtaagttacaaaccaacaaaaaccgccaataaaaaaagattacattcatttccaagcaaagcaaatctcaggaaacactttcaggcgaggcaccaaaactctccagggaacctactccaatccaagcatgcaaccttgcctaacaaagaactttatnngaatcccagattatttgtaataacccagatctacaacagggtaacaaccattccatcagagccacggagacaagatccaaagaacaattggcacagcgtgttaatcccgctaatgnaagagcaggcaacagcgcctggatcacccgaccctttttccccttat

SEQ ID NO: 12327 - DNA, 126 bp, Oryza sativa
  Clone ID: uC-osflcyp105d12a1
ttttggtttttttttttttttttttttttttttttttttttttttttttttttttttttttttttttttttttttttttttttttttttttttttttgtttttttttttcggcccgggggagtttt

SEQ ID NO: 12328 - DNA, 216 bp, Oryza sativa
  Clone ID: uC-osflcyp105e01a1
ttggcgcctttttttttttttttttttttttttttttttttttttttttttttttttttatatttttattaaaggatgaaatttaaagaaaaaatgaaaaaaaaatattaaaaaataaaaaagtaagaaaaaaaaaggaaaaaagaaattaaagaaaaaataaaaagataaagaaaaaaataaaaaaatgaagaaaaaaaaaaataaaaggaccaa

SEQ ID NO: 12329 - DNA, 57 bp, Oryza sativa
  Clone ID: uC-osflcyp105e03a1
ggaaaacgggcaaaacgggttaacaaatgagcataaaagttaaaaaataagtttaaa

SEQ ID NO: 12330 - DNA, 84 bp, Oryza sativa
  Clone ID: uC-osflcyp105e04a1
tttttttattttttttattttttattttttgttttttttatttttatttttatttttattatttttattttttattattttttt

SEQ ID NO: 12331 - DNA, 441 bp, Oryza sativa
  unsure (1)..(441): unsure at all n locations
  Clone ID: uC-osflcyp105e05a1
aaatcaaactgttgtttatcatagtaaatcttcccggagaatcagatgctcagaattcatagtgttcttcagcatcttacaacttacaagatggcgcagatatacaagcgcaactatcttaaagtaagcttgtaggaggtaaatggaacccatttctaacacacgggaaaaatatatggttattagaagggaaaccattttgaacaaattaataggggaaattaaattagggaggtattcgtttttccgttccgatcttcaatagnaacttcggacgtttgaatacgttagatggccgttttggcattccagtttgaccggggatgacgttctttggccgatgaggcctcttgccggactcggttggtgacgcgaatggagaaggggtgccttgagtggcgtggcggngttccatcctccagatggcgccccccgacagct

SEQ ID NO: 12332 - DNA, 430 bp, Oryza sativa
  unsure (1)..(430): unsure at all n locations
  Clone ID: uC-osflcyp105e08a1
gatgccatcatagggatgtgataaccgcatatcaaaatatcgatccatgagagtatgtatgtcagttcgaaccacttcactcgcggcagcgaggaagtcgaaaagcttattcacgactcatctagcaaaacttgacgataagcctatctcaagttcttcatacaagcattgacattgcaaagttacaccgagaggtctgaaacaaaagtgcagactgctgatggatgacaangccgaattagcttacgcttcatcaagggcaagaacacctgggnagggttcttgccttccagcaactccaagctagcaccaccgncggtggagatgtggctcatcttgtcggccagcccagccttctcgaccgcagcaacggagtcaccaccaccgatgatggtcgtggcgccctttgtggtagtaagatcagccaact

SEQ ID NO: 12333 - DNA, 363 bp, Oryza sativa
  Clone ID: uC-osflcyp105e09a1
ggaaggcaaactggaaaaaagttgcatttgccattgaacaatcggtaaagttggaaagcctttttccaaacttatacctaaatcagggttagcaagactgacgggaggggttttttacatttgggaaggggtggacccgaggttatacaaggcccccgaaggggttgtggccagaacaaaaaaggcaactatcacggggccctggtttacagaaaggaccacgggacaagcccatttaaccttaatattggggtaaatttattccctcggggaagatttcactggaggccaggaaaaaattggggatgaacggaaaaagggcttgggaaccacggggtttgttcggaccaaaatcggggggct

SEQ ID NO: 12334 - DNA, 417 bp, Oryza sativa
  unsure (1)..(417): unsure at all n locations
  Clone ID: uC-osflcyp105e12a1
agcagaaggcaaaggaaatttcccgcaaatacttattcatatgttttgacaacatttctcccgacgcatgctcattgtggcagacgcagctgaccacctagagcttttagttcaccattattatttagaccaagcattacgtcccaaggatcagaacacatgcttacaangcgaaaatactaatangcctggcttggctgctttccacagaataacccagaacgacaacctcaacaggataaaaatggccaacggaatgaaaacaaagcagcgaatcgtcaccagaagtcccatcttactcatcaaacactccatcattctcctccaacgcatcctctccccaggggagaagattgcccagtttaccttccttaacaggagcagggttcaccatattctcagccttgaagcagtgca

SEQ ID NO: 12335 - DNA, 108 bp, Oryza sativa
  Clone ID: uC-osflcyp105f01a1
tgtagttgggaccgcccttccatattttttttgttggggattgaatatattaaccagactggcatttcagaatgcacgatcaactgtatcatcagtcagagtatttct

SEQ ID NO: 12336 - DNA, 186 bp, Oryza sativa
  Clone ID: uC-osflcyp105f02a1
ggttatccgaattcgagctcgctctaatggcgtcgcatctctgcgccgctcagattagtagtgtatacaagatgaaatccgagacctaggagaaatcaggctactacatttacaacaaaaacttctcgggttcaatctacaagatcgaggattatacaagcccgaaaacttcaatttttgttttcg

SEQ ID NO: 12337 - DNA, 78 bp, Oryza sativa
  Clone ID: uC-osflcyp105f08a1
ccacgttaagattaattccttaattaaacccctgggggaaaattttaagttaaaggtgaccgaaaacaagtgaaataa

SEQ ID NO: 12338 - DNA, 434 bp, Oryza sativa
  unsure (1)..(434): unsure at all n locations
  Clone ID: uC-osflcyp105f09a1
ggaacaacatatacctggatgataagtagtcattacaggggggtttttttttacagaagggttctgaaaatcataatcttttacatgtatgatgtattccatttttacaggattttttaccccctataaancccccacctgctaaancttaattataattacattttcatggctataacccccccttttttgtcacccaaatgcaacctacagtttaacaatttttccaggccttttctgagggcatggatattctgggcactacaaaatttacaaatgcttccccccaggcaaaattcttgccctccatggtatttttggtttttttggagcattttagggccacaaaaatcatgcattaaaggccgaaggtttcgaaccgttgcctttgaaactattggggttcgggggattcgtagcccccaaaaggaagc

SEQ ID NO: 12339 - DNA, 251 bp, Oryza sativa
  Clone ID: uC-osflcyp105f10a1
gcacagggaactaatgatatttttattttcaaggaacaaggtcatatcaatcagctacttcttcgatcaaaacctttgcctcctctttttttgaaggctactttttataaatccttcattcaacatcaccaggaaaatgtttggcaaaacccctacgctatccaaatgtgcaaaactaaaggagccctattgagccatggggaatcccattagtaaaccaaaaaaggaacaatttttggtttcacttccct

SEQ ID NO: 12340 - DNA, 417 bp, Oryza sativa
  unsure (1)..(417): unsure at all n locations
  Clone ID: uC-osflcyp105f11a1
agacaatacgcattccaaatcatatttatatattttcacgatgtaatcatgcattacaaataatcgtgcgaataaacaaataagagcaaatagttagagaagctgacagcctgcctaaccactatagtaaccaaatacgaacacngagcagtataagcaacaacttcgtcacgcgtcaaccgcccgcagtccgcccgcccgcagtccaccgtccccccgcacccgctcgcccgtccggcacccccgccttcccgccggtagttcaacggcccgaggtcgtatgatggcgcccggttgggcgaggcccccgcggtcgggcgccgacgggcgaggcccgggcttcctggngctcgaaccccgctgcggcccagggccttccgggcgtttcgccgccgggtacgcgttaccccgcggggg

SEQ ID NO: 12341 - DNA, 394 bp, Oryza sativa
  Clone ID: uC-osflcyp105f12a1
gtggtggtggacccggtcgggcgtctcgggggattgggtgcggtggcggcggtgtcgctgatgtcggaggcggagatggtcggctcggcgttgacgaacttgttgatgacgagcgaggagcggtgcacccgcggcccaacactgccgccgccgttgctgcgcgcctgcggctgcgtgctgaccttgacctcgacgatggtgcccctgtccacgacctcgacctcctactcgtcatcctcgtcgtcctcctcctcctcctcgtcgtgcgcgacctcgtcggccctgctgctcggggttcttcttggtcattgttctcgacgtcctcgtccgaggaggggagcggcggtgttcggcgaaggagaagagcaggcgcccgccgcagcgctgcgcgcgg

SEQ ID NO: 12342 - DNA, 397 bp, Oryza sativa
  Clone ID: uC-osflcyp105g01a1
cgataaatattgcttcacttgtacaaagtacagataaaaatacattgatacatgacacggagagagccatgcacaccacttatttggacacacagagggcaaggctgcagagaaaatcaagcaacacaagctgaactcacggccccacctgtcagcctctcactggtcgaggccggagactcttgtgaaaaacagcaacaccacgcatgcagaagaagacaaattattacacacacaaatcgacgacacggcggccggcgacgtacggcgaggttcgtcgccgacgtcggcgacgttgtgatgaggtcgatcagcctaagaggtggtgcttcttctcgccggtggactcctcggcgcttttgtggtccttcttcttcttgtggtgctcgtggaaggc

SEQ ID NO: 12343 - DNA, 88 bp, Oryza sativa
  Clone ID: uC-osflcyp105g03a1
cacccttggggccccggggtttgctcttaacccaaatttggttacaatttaaggttttttcccggaccccaatttggtaccctctttt

SEQ ID NO: 12344 - DNA, 412 bp, Oryza sativa
  Clone ID: uC-osflcyp105g04a1
aaaataacactataagtgatgaactaataaaataactgtccgatacaggaatgtcacgccgctttcaaactagagtctacaggaatacacgatcgaaaattcagataacaaacctgatatatattatacataataatgagatgggagctacaagaatcatctgcgctaatgtttcaccaacgctagagctaaagaatatgtttcgaataaacagaataaactcataagttaaacttctgaacaactgcctccatccacgcacggtacagccaactaggcgtctaggccaaatcaacatgagatgaacttgcatggtcagaattgcctgcttccaccttagaaaccgcaagaatcaatcactgtcgtgctcagcatcatcagcagatccatcggcagcttttccaacattatt

SEQ ID NO: 12345 - DNA, 201 bp, Oryza sativa
  Clone ID: uC-osflcyp105g05a1
acagcttaaaatagcccttttattatgaagaacatggggctttatattaaatatatagcttgataaaaaaaaaagaaactatgctggggaatcgatcaagggaaactcaattcgggcagcaaacatttcctccttgggtattatacaaacacccgttacaggcatacttagatttcagacattcacccatgggcgaaaaca

SEQ ID NO: 12346 - DNA, 195 bp, Oryza sativa
  Clone ID: uC-osflcyp105g06a1
ggcggcgcatctctattgaagtagtgtatgacgtatgctgcacgccgtcagatggtaggctcttcattggcggccgtcctttttttttttttttagtatgccaaccgtaaatttttatttttgaatacattggtttcgtaaaatcaaggtacaaagcgaaacaatcaaaccagttagaataccaggaaaggatca

SEQ ID NO: 12347 - DNA, 175 bp, Oryza sativa
  Clone ID: uC-osflcyp105g07a1
gtgttttttgttggttgtttaagacgtgaaaattcaagaactttaactatgagcaagacggcaatgattagggcacacaaagggcgaggctgctgagaaaatcaagcacaaaagctgaactgaccggcccacctgtaagcccatgactggccgaggccggggactcctgggaaaa

SEQ ID NO: 12348 - DNA, 415 bp, Oryza sativa
  Clone ID: uC-osflcyp105g09a1
aaaaacgggcagaggcttccaatgggaatatatatcattcacaaatattcgggttcgaccagtattcataatgctacaactgtacacactgttaaaaacttacaacaacaaattgtcaagaccaccgttaagtatatgtatatatatatataaattcataagtagaaaaaccaacacctgtgtttacaaataaatcataaaccgttacaggccaccgaaaaagaaagaaaaaaaaggggaatgagaaccaaggggttttcgagcttctttgggattcaagcttcagcaatgggggttaccaatttgtcagcagaaacagagggggagacggtccgttatggaccaaaggaatataataggaaaggaatgctggatgttctcatttggaaaatgaggctctgctcctgcttggttt

SEQ ID NO: 12349 - DNA, 413 bp, Oryza sativa
  Clone ID: uC-osflcyp105g11a1
atctagattgattaacatataaatgaacgggggcaaagctagaaaggtttacattttaaaacgggggaaggaaaactcatacgcgcacacgtggttgaaaaagaaaaaaaaaacaataatttttttacggatttttcgcttaggttgggttgaactttatttggtggggccaatgggaacaacgtccaaggcactttaattaattcggaacctcaccaaatttacacccactaatggggaaccgcggggggtcgtacccgggtaatttccgggaccggtcaccctgcaggccgtcaccaggattttccctatagggggggcgttttaagagcttgggggtaataatgggccataggctggttccccgggggaaaatggtatccggttacaatttccccccaacattcgatccg

SEQ ID NO: 12350 - DNA, 342 bp, Oryza sativa
  Clone ID: uC-osflcyp105g12a1
aaccaaaaatttgaaacggtttattttgggacggaaaaatccatccaaaacatttaaaaaggcccttggtccaaaccaaaaacaaatatattaacaaaaagcaaaaaaggggtgggttttccagcgcacttaaaagggccaggttaacttcgtggctgggattcttccgggctcccagatttaaaacggaaagacaagggttatttcaccggggaaacgttatttaaaaccttataaaggcgaaaaaataagcgtgccattttgaagagcttcggttttggggcattttgggatttaggaaacaggggcttagcaataatgccccaaaattcctttgcaaac

SEQ ID NO: 12351 - DNA, 295 bp, Oryza sativa
  unsure (1)..(295): unsure at all n locations
  Clone ID: uC-osflcyp105h01a1
gcactccagaagaattctattcatctctgtctaaggcatcaaccaccctaaacattttgctagtctcagtcatcactcatcagtaaatatcagacactagcacaagagacatttatacacacgttacagtacttagctggtgagctgttaccttgcagcctcagtaactagataangaattcttgtttgattcagttgagtgggntatctttttccctgtggagcagttttttgagcttcctaagaaaacttcaactaaggagatcccttcagttaaaaaacaacccccaaaact

SEQ ID NO: 12352 - DNA, 368 bp, Oryza sativa
  Clone ID: uC-osflcyp105h02a1
aactcatgaaagaatccaaagttcccatgagttccagaatgtttgactgatatgacagacaaacttttgtaaggttctcctaaataacacaaagaaatttctcgtacactacatggctgtatggattgaacataatttgcctgtgacactttgtcacacttgtgacactttccaggtttccaatacaaccttacagccaatggagcaaagagcacagtcaagaagagaaatatagagttgcattttgtttggcaagaaaagaaaaaaattgattctacaattacatcaaggcttatgccttttcagaattcaaccaagaatagtttgcatatctagagccaaaattcagtctaatgtaccactaacca

SEQ ID NO: 12353 - DNA, 489 bp, Oryza sativa
  Clone ID: uC-osflcyp105h03a1
cgtcttggtatgcctttttatttggccgcccgtcctttttttttttttactcaacgaaacgcatactcatcaaaacttgcacagtaaaaatggacggatgtactttgacatagcatatgtttcgccattacaagccgctctgcagttcaactacttcaagataagaggcactaatgacaggcatcactcaaaaataaactcaaactagcacttctgtgaaggataataagatgggatgaaaaatgcttccagaacaaccagtcccagtcccagtttttggataagtagcaacatccccttttgatattttaaatcttgttgaacgcaacgatgtcgcagctctggacaaattcgttgatcggctcttcagtcagatgttcttcgataaggctatccacagacaccaagtcatcaacaatggtcaacatgatctgcaacttcttgatcccgtaacccacaggcacaagctttgatgctccccaggtgaga

SEQ ID NO: 12354 - DNA, 433 bp, Oryza sativa
  unsure (1)..(433): unsure at all n locations
  Clone ID: uC-osflcyp105h04a1
atgtataaggccttctcattacgagcttataaataagcaaatgcctacaaaattttttagccttggcggcaacccaaacatgacaaacccaaatacccaatgtctaagacgtttgtgctcagttcatcatagatctggcttctgtggtgcagttctgnctcctatcctacctttgggnctaagaaaaggttatgcctagaaattgcaagccacattaatccttccatgggatcacttcttcgggcctcactttagaagggctcaacaacttccgtcgcggnaacctttagaagnactctacctcaaccgttggattcgctggtggcggctttcagactcctccggtcttccccatctcccgccaagagcgatggtcatcatctcgtagatcttgccacccaactcagctgggctgtcaggagtatatccactg

SEQ ID NO: 12355 - DNA, 427 bp, Oryza sativa
  unsure (1)..(427): unsure at all n locations
  Clone ID: uC-osflcyp105h05a1
gatatatcaaactgaaactgattcagaagaccgtaaaaactatcaacagatacattatcaaagttccatatctgttgcataccacccgacacagcaaaatatatagttccacagcacaacactaccaacaccgatactagatgtgtaacaaacacatcatatttctgacttgtcttataactctttaacaatagtagaacagctatttagaacaggtaaattaatggcaaaaacatatgcgagaccaaaaggngttttttcttagagcttgttcctcgaaatccgagagaggggtcatctgctccttgagacccttcctcttgcggatgtccagcaccagctggtttcgcctgcgagctcacctccagaggatcagaagtcatcatgtcccagtgatcaaagacacactgagggaaggcctggcccg

SEQ ID NO: 12356 - DNA, 342 bp, Oryza sativa
  unsure (1)..(342): unsure at all n locations
  Clone ID: uC-osflcyp105h08a1
ggggaaaccatcctttaaactttttagtccagttcaatttcccacatacatataagcattagctcttgtgacaacaaatagggtttacaaatctgatagcccaagtcacatgcgatgctatgcgaattgggctccttaatgggatgggcccaacattaacactttcacttttaagaccttaaccttttaagnggcccttttaccgggaatcggaatttcctgggcttatgcatttcccttttctttttcggttgttcaagactcccgagaaacgggtactttttggctggctattggacaacttacctttcttagggttttcagtcaagccagcgacccctt

SEQ ID NO: 12357 - DNA, 87 bp, Oryza sativa
  Clone ID: uC-osflcyp105h10a1
ttttttttttttttttttttttttttttttttttttttttttttttttttttttttttttttttttttttttttttttttttttttt

SEQ ID NO: 12358 - DNA, 125 bp, Oryza sativa
  Clone ID: uC-osflcyp105h11a1
aaaaaccattagccataaagagcgggaaaataaacacacaaagtaacattacataaagttttaataaaacattatgtaaaaagaaagcaaaagcaaatgaaaaccaacaactaaagaagatatac

SEQ ID NO: 12359 - DNA, 67 bp, Oryza sativa
  Clone ID: uC-osflcyp105h12a1
agccccaaaaaaaaaaatattttaaattcaaaattttttgggtcccaaaaaaaaaaatcacaaaaag

SEQ ID NO: 12360 - DNA, 490 bp, Oryza sativa
  Clone ID: uC-osflcyp134a02a1
ctcttttttttttttttagggggaataaacgcgcatattataagagacgaagcggtctcacataaaacagggcacacaggttacaacaacgagggttgtaagcccattaagccccaaacatcagatcaccacaagcaaatgtctcgaagacacacgcacacggcaacaggataactccacactggcagatcatgggatagcagcagttatcaatcaggccttgacacacagaacatcaagcccccagacgacgacgactcctctagtactcgtcaccatcattgccatccttattttcgtagggctcagtgtcaattgcaaaaaaaaaaagaaaagaaagaaagtaaaaaaagaaagaaattaatagctccatgcagacccttgtttgcatggtcaattaattagttgccaagtgaccacatgagataatgatggacaaccttagcatggcttgatgcagatacagtttcgcacgaaggtgctgaacctg

SEQ ID NO: 12361 - DNA, 419 bp, Oryza sativa
  Clone ID: uC-osflcyp134a03a1
aatagttaatacatataaaaggatatcagctatggtaacacacaaaataatttaatgttagcaaacttacttatttacatggctgaggcgcacaaagaatgaaacaacttaattgggtctaaatactaacaaatttgaggaccatattgttgtttgtcctcgcgtgtcctatgcagcagccgacttgcaaattgggcatgagttcttctccttcaaccacttcttgacgcagtcggtgtggaagtcgtgattgcatttcagtattcccagcaaactgttgtctttgtattcctccagacaaattgcacatttcccatcatcttgatcattttgctgttcatcagaactgcaatagatcacttttctcacacaacctgagattttctcgtccaccaagcctgtgcagacattaccaatag

SEQ ID NO: 12362 - DNA, 364 bp, Oryza sativa
  Clone ID: uC-osflcyp134a04a1
aaggacaattcaaatctttattatttgcagaaacagaaggatttgtaactatttacagaaatgttatataggagctaacattggttaggatcattcatagatgcaggaatttacaatacaatcgtgcaaggacacattttggtagcttggacacgttatgcaacgggaactagacatcgtttgctagtagacagtagcagctagtaacccatggagttgcagattaacagcattgctgatgatggggatcatggccaaaaagatttttatcaacggcttggttgagactttcacttggagattactttcaaaaaccggctcacggaactaaaaacgcccaatacaatggtcaaaaaagatgggg

SEQ ID NO: 12363 - DNA, 281 bp, Oryza sativa
  Clone ID: uC-osflcyp134a05a1
cgatcatcccttggatgcggcctggggtttacattaaattttgtcccaaaaaagcaaaacttttgccagccagaaattaattaatttggaaattttcttgttcgatcccccccccccccccaattaggggccatacatacatgccctgttgaaactgcaactgcagggtcggtgcgtggttactccaagggtcccctaggcccgggggttggccccattttaatcgggttgttgggcttatttgccggggacaaagttggtttcttttgcccaggtttttt

SEQ ID NO: 12364 - DNA, 440 bp, Oryza sativa
  Clone ID: uC-osflcyp134a06a1
ggttaggagtaaaatttatagccgcagcccgtggctccagacacttttagtcaatgtgcattgaatatgcaatagcgatggaaaacttgcattctacttaatgttgcattccaccggtctatgccccccaaaaacaaacttgaataaaaaaggaaaaaaattccatacaggtccaatgtatagagaaggtgaaatctattaacggggcaatggccaaaaaagacccaaaagggaaagaaaaaaaatattatgaacaccaaatagttgctggcttctagcactttccggttacacctccctgcacatccttcgcagcaacagtcctataaagcatcgtgggcaggccggtactttgtcaacaaatctcatcagtcttcagggaccaacgccgatggttgatgcaggcaacaaatgaatctagtagcaggttatgtaagagt

SEQ ID NO: 12365 - DNA, 445 bp, Oryza sativa
  Clone ID: uC-osflcyp134a07a1
atgaaaattaatcaatcatattaattgaacaattaccaaacattcacaacaaaatactaatacaaatacacacccaatattacacaaccacatatccgacaataattaatggttatgacttctccttacaatggaaaacaacatacatgtaagtaaaaaacagagagaaacacatatgcatgcttgactctgttgtacaattaattagtcgagctagcaagaaaacgccatgcattaagcgagctggtgttttattctagctgaatttgccatgcatgcagaatcgtacatctgcttgcaaaaaaaaaaagaaaagaaagaaagtaaaaaaagaaagaaattaatagctccatgcagacccttgtttgcatggtcaattaattagttgccaagtgaccacatgagataatgatggacaaccttagcatggcttgatgcaaataca

SEQ ID NO: 12366 - DNA, 397 bp, Oryza sativa
  Clone ID: uC-osflcyp134a09a1
acacaagctggcaagcatttattaagaagcccctgtttaacatagttaatcaacatgcataatagcccttttccacacccatcaccatcctgatcttggctacctgaacataacaagtttacatggcaacattgcacaaagctggaggcatttttcacatgagcatatatcccttcctggactcactccataaaaagcaacacaaggggcaagcattacattatttttcttctctggtgctctatgggcctacccaaaacttgcaggaagggcccagccggtgtttaatccgctgccctgaagccgccgaacgcttctgcagagttttttttagcagctcctggaactttttaaggaatatattccacttttttggattcatgtccgacagcctgac

SEQ ID NO: 12367 - DNA, 249 bp, Oryza sativa
  Clone ID: uC-osflcyp134a10a1
aaaaaaaaaaaggggccaaaagggggggggggggtatttaaaaaaaaggggggggggctctattgggaaaaaaaaaaaggggggggggccaaaaaaaaaaaatttaaaaaaaaaaaaataaaatgggggcccccccccgaaaggggggaaaaaaaaatgccccctttttttaagggaaaaaaaataggggggttaaaaaaaaaaaaacgggggggaaaatttaaaaaaaccctttttttcacgagaaaa

SEQ ID NO: 12368 - DNA, 362 bp, Oryza sativa
  Clone ID: uC-osflcyp134a11a1
ggccacaaagaagggtcacataaacaacccaggtcacaggagggaaagctacaagcaaaccctgcataatcgaaaagcaaatgtttttaaaaaccagacccacaaactggtagatagaaccccacccggccagatcataggatagcagcagtaatcaagctttgccaaggccccaggcaagaaccctgaacctttttaggacttggcaccctaaaaacccttggaaccattggggaacttggggcccacccccccggaggcccttcccaagggggggggggccctcggggccttgggaaaactccccttttttaatgccctggccgacgtaccaggggacaaaggcccccttggggtccatg

SEQ ID NO: 12369 - DNA, 85 bp, Oryza sativa
  Clone ID: uC-osflcyp134b01a1
attttttttttggttattttatgttttttgtgttttttttttaccttttttactttatttcttttcttttactatttattttttt

SEQ ID NO: 12370 - DNA, 116 bp, Oryza sativa
  Clone ID: uC-osflcyp134b02a1
attagggttacagtataccaggcggactttcattaaacaagcatacctagaccgacacaaagagccttgctcccagaaaagacacatatgtcccttatgtcgatttcgagcctcat

SEQ ID NO: 12371 - DNA, 344 bp, Oryza sativa
  Clone ID: uC-osflcyp134b03a1
ggggaatgcaatttcattctttttatttaattaatttaatttttttcgtacttcactaaaatgtgtgttcaatgaggtgccgggcaccagggttaaacaagaaacatgcgggggggggaaaaaacccggggccccactaagagcacaccaccagggccaaaaaaaacggggggggaaaagctaacccatcactaaaaaagggggaaacggcggctgggaaggttctcacccctttacaggccggggagagggaaaaaccaattaccacccttccttaaaaggggttggaaaggccccccacccggggggggacccggaaaagggggacccattcccgggaagcg

SEQ ID NO: 12372 - DNA, 414 bp, Oryza sativa
  Clone ID: uC-osflcyp134b05a1
gtgcgcaacatagatcttattaatccatcaagttccagtcacagcagtagataagaggcatagagcagctaagcccatagtaattacacgcagtttacctggcaaggtaaccgctttttaagaggcgcgcacgcgcacttaacacatatctccgcgacaaatataccagtcgcacaacaccacacacagttcataagcaagcaggccctgagactgtagcagcagccccggcggccggcgctagccttacacctcgtcacattatttacgcatatacacacatagttaggttatagatagggatggctcaagagcacacgatcttcactggtctttcttctccctagcgatgaggtccatcacagcccgcttgatgcttcctccgttcttctcgagcatctccttgtttatctc

SEQ ID NO: 12373 - DNA, 366 bp, Oryza sativa
  Clone ID: uC-osflcyp134b06a1
acaggtaacatggtcgtatttgtatatcagttcatggctgcatgcagattcatttcaatgcagtacaggcatggcacagagagagccatgagttcttacatttcctcttttcataatccactaatcgcattcgcatggcagtatttaattagtcaagcgagtccacatgtggcatacgtaggtgcgatttattattaattagcgcggttaattacttcattagtacttaatcagagcgaggtggagcagccggtggcgcaggacaagacgtcgctggtgcagccgatgacgcagaacggcatcgccgtggcggcggaccacctcccaggtgaagtctgggtcgtcccttccgaagtgaccgtatgc

SEQ ID NO: 12374 - DNA, 495 bp, Oryza sativa
  Clone ID: uC-osflcyp134b08a1
ggtgaaaaggagaaaattacttcctcttgggtgatgttttgctctcgaattgttaaatttagatacaacacataattgaccagtaagttgatgtcctgctaaatgaaaggatcaatgctactgtgcaagaaatgcaagatgaattggttggttcacctctagatagtttcaaccaacgagaaaatgaagaattataataacagtttaaagagaaagatatttaggtgccaaacttccagagttaaacagattatttcacctgacaggactcctcctagcatgttgctggcaaaaaattgctcatgtagacttgtgcgagcatttcaccaagctttacttgtgattcagtggtaagatgcagatgatcttcatttaatgacagtccaaatgcgtccacagttacaacattgggcaggttgataccaagctgagctttcctcactttttcaatgttctttttattcccagatgcaagagcaacctggatgaatggca

SEQ ID NO: 12375 - DNA, 487 bp, Oryza sativa
  Clone ID: uC-osflcyp134b09a1
aaggcgaaagtatgaatatgcacacaagaattaaactgcatcgtggcagatggtacacagcaggtttccgtattaacatcacaaaatatgctcccgtacgaagggtaatttctgccgtgagttgtcatgcacgtttacgcctgaactgaccaaacagctggaatgggtattgcagaatccatccaatgactggaatctggtataggaaggcctggataggaggtccataaccactgaagagaacaaaagatccatatagcttcattattatgccagcaacaggccatcggacaaagagaagaaacagaccaaggaagaaaggaacagatcccttaatgtttgccttctttgtgaaaagctgccacatagattgccaaccaagcaacaagccgatttcagtcaagaagaaaatatttcccaacgccaacaagcccctatcaaagaaaaggataacgcccaaaaatgagaataggatgccaaagcccac

SEQ ID NO: 12376 - DNA, 486 bp, Oryza sativa
  Clone ID: uC-osflcyp134b10a1
aaagttgaccaaatatacttttttccatatatcttatataaatgacatatattccaaacaatgctcacatacagctccgcagcaatattttggaaggacacatgtatgccttatgttgccatcggcctattacaacaaaataaccaaaaataataattatttgctcactcaaacatgacacgatctcttttaagagaggattatttagatgttcatatttcgcatgtgacccaacaagagtacacatgtctgttacttagagttggattccactcttgtactcagagccagctgtaaagctttcagggatgacatcgtcgacgacacggtagccgccattcttgacaaggaagcggacagagaaggggcccttgagcggcgactcacttttgagcgtccaggtgttagacgacgactccttgagcgccacccagtccttgccgcccttctccttgacctccacctcagagatggcaacattagtga

SEQ ID NO: 12377 - DNA, 444 bp, Oryza sativa
  Clone ID: uC-osflcyp134b11a1
agaataaccaaaacataggaggtttcatttcttcttctcaaagtagtgtagcatctttccttctttcaccattacataagcttaagcaataacagataacaaatcctcctcctcctctaggtaaaatattcaaacacaatacccttataagtacttattattaggaaagtagcgtgcatgggcataaatggcagcggggggcaggttaagaatcacaatgctgagcagcgaggaaacaaaacaccataatgggacagagcaaaagcctccgaaagggagcttttaggcagaaggcttctcccacttgaggggcttcaccacctcccaggtgaagtctgggtcgtcccttccgaagtgaccgtaagccgccgtcttgaggtagcgtccgttgccgcctttcttgaggtcaaggttgatgatgatcatgccaggcctgaagtcgaa

SEQ ID NO: 12378 - DNA, 693 bp, Oryza sativa
  Clone ID: uC-osflcyp134c01a1
ccctatatataatttttatattggaaaaaatatttaattttataaaaaatgaataaaaaaaaataaataaatataaaaatataaattataaaaaaaaatataaaaataaaaaaattataataaaaaaaaaaaaaaaaaaaaaaaaaaaaaaaaaataaaaagagggaaaataaaaaaaaccaaaaaaaaaaaaaaatttagtaaaaaaaaaacaaaaataaaaaaaaaaaaaaatttaaaaaaactaaaaaaaaaaaataaaaaaaaaaaaaaaaaaaaaaaaaaaaatattggatgaaaaaaaaaataaaaaaacatttattttaaaaaaaaaatatattttttcaaaaaaaaaaagagaaaaaaaaactaataaaaaaaaagattttaaaatataaaaaaaaaaatatttatcttaaaaaaaaaactctttaggattactcaaaagaaaaaaaaaaaaaaaaaacccatatattaaaaaaaaaaaaaaataaaaaaaagagggtctatttaaaaaaaaaaaaaaaaatatcaaaaaaaaaaaaataaagtaaggggagggtgtttaaaaaaaaaaaaataagcaggggggagaaaaaaaaaaacactattaataaaaaaaaaataaaaaacaaaaaaaaaaaaatatttaaaaaaaaaaaaaaaaaggttttatttttatttttaggaagg

SEQ ID NO: 12379 - DNA, 131 bp, Oryza sativa
  Clone ID: uC-osflcyp134c02a1
attgattaattacaattttttttttttatttttttccaaacaacagggcccaaacaaagaacggctatggggggcaaaaacccccggcccaaaaaaaaaattttcccccacaaacaaaaacaggagggggg

SEQ ID NO: 12380 - DNA, 343 bp, Oryza sativa
  Clone ID: uC-osflcyp134c03a1
aatggtacaaaaacaaattaggttggccatattcattttttgcaagagaccagtgaattaagaacattgtgattacaacgagatcgagtaacaatttatcaaatcctttattttcgtgttatctagcatgggggaactgacatatatactttgacatgacaaagatgtcctgatggatgcaagcttagtgagactgaaatctttaatgctgaaacttgtcatacagctgctactttggcaatgcatacagccaatggggaaatctggtggattctggtttcagtgacccttaaagaagtcgaccatcggtccgtatatgagttctggagcattgtaagccatg

SEQ ID NO: 12381 - DNA, 239 bp, Oryza sativa
  Clone ID: uC-osflcyp134c05a1
cgaaacaaaagtaactaaacgaaacgcatactcatcaaaacttgcccagtaaaaatggacggatgtactttgacataacatatgttccgccataacaagccgttttgcagttcaattttcttaagataagaggctttaatgacaggctttactcaaaaataaacttaaaactagcacttctgagaaggataatagggggggattaaaaatgctcctaaaacagccagtcccacccccag

SEQ ID NO: 12382 - DNA, 257 bp, Oryza sativa
  Clone ID: uC-osflcyp134c06a1
gatctcatgctacagatttcacccacatttattcagttaaaacaaaattagggccacgtctagtaagttcaaaggaaatcctgcacctttgaacacatacaaaatgcatctcttcagacaggagatgagattaattacaacattacactgaagcttccagctcagtcagcaatgtacactactagttacacttacggcttcattcattcagtagttcagtgcttgctagaatatatttgtagcctttgtcctataaa

SEQ ID NO: 12383 - DNA, 402 bp, Oryza sativa
  Clone ID: uC-osflcyp134c11a1
aaaaaccacacgaatccccgatggattaatttcactgaaaatagcccgggtccatcacatcacacaaattcatccgttgatccacgcatagtcgccgaagcgaccagttgtttaataaatcgataccccccgggtttaattcagcaataatcagcacacacacaaaccacacttatatggggggtttttatgggggactaataaaggaaggggactcgccggcggcaagggttcggttgcttcgggacttcacttgccgcacttgcagtcggtgcaggagcagttggtgccgaacttgcagccgccgttttcctcgcggggggggacctcctggaaggggtttttttgggtttaaactatgacgcccccaaagctggacccttttttcacgccctggctttt

SEQ ID NO: 12384 - DNA, 469 bp, Oryza sativa
  Clone ID: uC-osflcyp134d01a1
acattacgactgaagtactgaactatcattgcaaacagaggatgagaatgcacaattttgttctatccaacaggagcccagcaaagtgattgcgtcaaaagggcatctaaattaagcactaaccgtttaaccgtccttgaacaaggatacgttacaagtgggattaatgccgatctttactagaatataccaccaggtagctacatcgctgatgcgcgggcttgacatgaaaatacccatcgaattggagtgcatttctgagggagagctcgtcagatccacaatgacattgccgtagtggggaggccagtaggcatctttacatcagaacctctgattgacaggaaagtgagaactgatttcttctgaaactggggtaggaccttccacttttttctgggttggggtggaaccttccacttcttttttagctggggttgaaactttcgctttttttgtagctggggtt

SEQ ID NO: 12385 - DNA, 496 bp, Oryza sativa
  Clone ID: uC-osflcyp134d03a1
gatggagtaagtgtattatatgtatgtaaatattatattattgtaaatcattttgaggagctagactagcgtgccttattaacaaggagatatgtaccattacatgatgattaacatataaatctgtagctacatggaattaaggtagtggagcagaggaggaaggatgatagaagactccaattctccatggatgggaatgggatcaggtggccttgcagaactctccgcccagatcgtcgcacgcctcctcggggaacaccgtggtgggctcgtcgtaggataggtagtccctgtcgacttcctccgccgccgcacgagaaacagcaacagcagccgatgatgagagcttggcctctgggtacatctgcacgttgcacgcctcgccgccgatgaggtcgcacgcctccatcggaaacaccgagatgttagagctgtagtccaccttcgcagccttcactggcaccgccgtcgtcgccggacgaacgcgcaacgc

SEQ ID NO: 12386 - DNA, 507 bp, Oryza sativa
  Clone ID: uC-osflcyp134d05a1
attccagcaagactttcattaaataagcatctcttgtccgttacaatgtgccttgctcccagtatagacacatatgtacttatgtagtttcgagtctcatgtccgttgaatatatagatatataatatatgacaatatacagaaccaaaaaaaaaaagggaaaaagacgaactccggaagctggacgagcaaaatccagtagcttctgcatgtataaacctccttgcctgagaattatttaccgagggaatggatccgagtctcccagtgccgcgaactgccgatgagaactatcgagcctgacattcaaaaaccttccttttctttcccgtttcagagaacagaagaacgcaaaaattgcaagtgaatcgagcttgcctgtaacctatgaatgctttattgagatggcagagaaacaccaccctcgccgagccttctctacagaggccacagctttttattcacattggaggggcctatcataactgtgtcaagtgattgaaaaat

SEQ ID NO: 12387 - DNA, 407 bp, Oryza sativa
  Clone ID: uC-osflcyp134d06a1
cgggtaaataacagacatgaaatcttcatataatagtatgaatgcaaatgtttgtttaattccagccgtggacatgttatgtacagtcgtagcaaaaataggtgccgaatatgtatgtacaagacgcagagcaaggagccttcagaactagctagctggagtgaactggagcaaaatgccgatgaaaattacaccggtttcagaccatatgtcagtcccttgatcccttctgcaggagcgggatgatcatgcgtccaagtctctgtttgacctccacattgggccctcagtcacaacaccatctgcaactttagctgacccgttctgtactaggagaagagtccctgcttcaccttctttcacctgccaggttgataagcaaggcggattaccgatgggggagaagc

SEQ ID NO: 12388 - DNA, 306 bp, Oryza sativa
  Clone ID: uC-osflcyp134d07a1
gaaaaaaaatgaagtttattcatatgatcatgatgagcccgtccttggagaaaactttgttacatacatgcatggctcgctttataaacaaaacaattaattaatgaagtgattgaaatcaagaaaaaaaaagaagggacaggtaaatcttacgataatgatctacatggaaattaattataagatggtcacggccggaatcaaaagctgaaatccataatcacagtttcggcgagcagctgatgatttatgacgattattaagagagatgattagttaaccacgttgcactttttcctgatctcg

SEQ ID NO: 12389 - DNA, 478 bp, Oryza sativa
  Clone ID: uC-osflcyp134d08a1
atctcaagctggtattggtattatcacatcaaaggtaattaaacgctgaaagtagggaaacacacggcagtatttacacatggaagatgtttacacacaaacacacttctttgggttgtcgctagcccttgataggagccagcaggctagctgacacgtaccggtctctggtagtactaacagagacagcaagctactaggaacagagtaacaagataagatagcaacatactagataattaattacgtattagataaccacaaggaccagcaaacatggcgtgacagagagatcgaccagcctccgatcaatgggattattcagttcagcgatggctgctcctggtctcgtcgctgtacagccagtcgtagacggtgggggagttgggctgggggcggtcgaagaggttggcgccgaggcttttggtggcgaggttgctccccgggtggaacacgcttcttcacacgttgttgcccc

SEQ ID NO: 12390 - DNA, 181 bp, Oryza sativa
  Clone ID: uC-osflcyp134d09a1
aataataaatatacttattttaaattttttaataaattaacaaattaaaaaaaaaaaaaaaaaaaagcttaaacaaaaaaaaaggagatcaaaaaaaaaaaacaaaaaagggggaacaaaaaaaaaaaaggagggaggacaaaaaaaataatcaacacacacggaaaaacaaagaaagggg

SEQ ID NO: 12391 - DNA, 408 bp, Oryza sativa
  Clone ID: uC-osflcyp134d10a1
agcacagctcaaactcaatatatacaatttcgacatcgttcttttggtcctggaaatacataggagaaacacatgtttttgtttcaaacaaagaaaatggtaaaggtaataatgtatttacagcgccaatatagttcacattagcaatccccccaaaaaaatcagaatattgaggtgagtgatggtaaactaatagtagtcagattcactaaatccataaggttgtcagaaaagccggccaaagaaacaaaaatcttccaaccagggcgcctttatttcaactttttccttcgcaagaaacataaatttacagagggcaatctagaatgcacaaataattacatacaaaattgcctatgatgactgaaggttggccatgcaagttttcacaaggtttccatcatcctt

SEQ ID NO: 12392 - DNA, 477 bp, Oryza sativa
  Clone ID: uC-osflcyp134d11a1
aacaataaaaagatagcatggaattaaagccgctgctccaatttaccatacgcagcatttgattacaggaataccaaaaaactactaccgatgacaggtattaattattaaaaagcacaggttcagattattgcgacaaaagtttttgatacccgtaagattggacgcttgatagccaaaccacactcagaaccctaaatatgcatacggaggatgtccaatcggatcttcagccaccaccagaggcagatcagtacttgtagtccttgacgtgaaggctctcagaggcaccctcgccgagcacagcatcaccctggtatgtaccaagggtagcctcagagttggccttgcacctggtgatgaaggccttctgcgccttcaccacgttctccgtcttgccgccccaggccttgagcgtgctctgctggagagcacggccgaaggagaaggacagagcccacggcttcttggtgctga

SEQ ID NO: 12393 - DNA, 462 bp, Oryza sativa
  Clone ID: uC-osflcyp134e01a1
agtcaacgaaacgcatactcattaaaacttgcacagtaaaaatggacggatgtactttgacatatcatatgtttcgccattacaagccgctctgcagttcaactactttaagataagaggcactaatgacaggcattactcaaaaataaactcaaactagcacttatgagaaggataataagatgggatgaaaaatgctttcagaacaaccagtcccagtcccagcttttggataagtagcaacatccccttttgatattttaaatcttgttgaacgcaacgatgtcgcagctctggacaaattcgttgatcggctcttcagtcagatgttcttcgataaggctatccacagacaccaagtcattaacaatggtcaacatgacctgcaacttcttgaacccgtaacccacaggcacaagctttgatgctccccaggtgagacccttcatttggacactgcgg

SEQ ID NO: 12394 - DNA, 326 bp, Oryza sativa
  Clone ID: uC-osflcyp134e02a1
aagttacatcatgatttattatgactggcaaagacccaaaaaaaaaaaaaacttttacacaatgcaaacaatagtagagattagatgcagtctatacctgactagaaaggattatgtagtacctgcagaaggccgacaaagcgtgacaaactgtaaccatatacgacgcatacacgacgtatattatgtatcacaaacgacgtttaaaattaacagatccggtccaccatgactgaaacaaagaaagctgcatactatgctggatggacacttgttaaccgcagggcaaacttaagggtacagcgaccccatcaggtaatttaggc

SEQ ID NO: 12395 - DNA, 330 bp, Oryza sativa
  Clone ID: uC-osflcyp134e03a1
ccaacgggagacctttgtaacaaaattgccagatatcccaggaaaagatggacaccaccctattttagctgcaaactgaccagagctttggccaatatttgcagttttccttagggttaaaccactggcccccatttttgggggtgcttggggaacagatgccaaaccaaaaagaagaaatggggagggaaacataagactaacattataccctaggggggggggaaccaaatctttttcctccagcctataaggaactctagggggaagcccaaaaaaagcctcttttttttttccccatataaacccccttggaatctttggctccca

SEQ ID NO: 12396 - DNA, 490 bp, Oryza sativa
  Clone ID: uC-osflcyp134e04a1
gccgctagaatatgccaaacaccttactttgatagggcgatacaaaacatctgtgctgctcttttcttatattatatcatcaataaatatacagtgggataacatccacataacacgggagaggcaacaaggaaccagtacttccgagaagtttcgcctccgcggtgcctcagggcttaagaggtggccatcttgactcaaagaggtctccgcccggggcagacacaagaaacatatacaacttgaaagtatttattgtgcgcagcaggaaaccttaaatgcacaccagtttccattcattctggagcaacttcctttcatatgcatcacagagactactggagctgatcctcgttatggatagtacatatatcctgcgagcgtgctcttaaaagaaccgtgcatatcacgttggatccagttggttttgtagaaagtcagaaccgagagacgccgttgctcaagactggcctttccagattccagcttt

SEQ ID NO: 12397 - DNA, 261 bp, Oryza sativa
  Clone ID: uC-osflcyp134e05a1
aggagcccccttatggggagggatttttagaaggtccattgcatgggttcacaaggtatgcaatgaccatcctacttttttttagcgggaaaatttccaaaactagttacaaaaaaagcgaggaagcccaatgtcaatgaaatgggatggggatgaaaagattcacgaaatatgaatggggagctaaaaaaacttttgccgcttaaaaaggggcaccggccctttaagaaaaaaaatggttataaagaactttaattttta

SEQ ID NO: 12398 - DNA, 414 bp, Oryza sativa
  Clone ID: uC-osflcyp134e06a1
ccttgttatggtttggcttttttttatttaatttattattttggtcaacaggttcagtccagtccagtcctagcaaccataagctaattatgtactacgaaataaaaaagagagagaaagatattaactttctctgcagttaggcaaagcagactaatccatccactcatccaccacttctgctgcataacgggcgcctcctacaggcgcagtagttgttgcaccagagctcttcttgaccttctcggcgaggaacttggccgtgtcggcgcccttcacgttgaactccatcaggagctccttgaacagcgtcttgaggttgtcgttgaacgtggggcgtctactgacggaatccaccttgaccggccgcggcttcaaagcggcggcggcggaactggcgctggcgctggtgga

SEQ ID NO: 12399 - DNA, 420 bp, Oryza sativa
  Clone ID: uC-osflcyp134e07a1
gcagaataattcgacggaactcaatgtaatagctgtttaattcagaaacatgttaaggctcaaagtacagtaaaccatttaactgtgaaatcataaccaaagctcaataactattgagctccggaattacaccttacatattgggatagcaaccacagccctaaatacccatcgatccatccaaagctcccctagcttatgcaaatcttgttaaaatttaggccttgctggcaatgttgctggacagccagtccaggccctcgtacaatccctcacctgttgtagcacaagtgctctggatataccagtgtcgctggcgaagggagtgcagtcccaggcttatcagtgatctcagcagcattcatagcgtttggcagatcttgcttgttagcaaagacaagcagcacagcatcacgtagc

SEQ ID NO: 12400 - DNA, 387 bp, Oryza sativa
  Clone ID: uC-osflcyp134e09a1
ggggggacaaaacatttgcaagcttcattgaacatttatgtagcgaacaaaccgttcattgcccacattttgcaaaggaggtaggggggctcaatcatagcagaagcccatggggtccaaaccatttacccgaatagcattaacccccgtccaaagacttgggcccaatcaaaaagagtttatgtccctaggagatttggggaagctaacataacaggacccctttttttttaactttcacaaaagcaaaccatggagtccaaaccaaaggggagactccattttaaaactggtggacttttgggttttaaaaaaattccctacaggaattggacccccaatttgcttttgactggggggcaaaaaccattctaggtgcggtttttg

SEQ ID NO: 12401 - DNA, 352 bp, Oryza sativa
  Clone ID: uC-osflcyp134e10a1
ggtgaatgagacagttctgttaacggacgactgatgaagcctataactggtgggaaagaaacacttgggcaacaatatgacaacacaaagctagggaaatagcggagtggcaatagcgacaggggaagaggatcttaaatggagtttaggcaacatggcctacaagcagaccattgggactgaccgcaggcgctggttattgcagcggacgtggtgttccttgccatgcagatgccacacagcttgatggatttatgcaccatgaaaggaaaaggtttggatactgcagatacggtggttgaggaatacacgtggatgagacgtttggagaaccaaccatatgaaaccccca

SEQ ID NO: 12402 - DNA, 422 bp, Oryza sativa
  Clone ID: uC-osflcyp134e11a1
aaataagaaaggaaaatgatctacatactaatcaagacaatgtatagggatactagtcaaatatcacttgttcaaccttcagcatggaggaacatactaaccaatttggcagtggagcaaagaatgacgcattcaagcctatgcttgctgacttttataactggaaggatttcttaaaagcaacaaaagcaaccaagagtatgggggaaacaaggaagagcacgtacggggtgatctgatcgaagcccatctcaggatcgcttagggcagcgtaggagatcaactggcccccaaacttggggacgtacttgttgaagcccgtggcaccgggcaaaggggagctgatgaccttcatgaagaccatcgcctgaaagcagaacatgaacatggttgctttcttactgagaacagaatttgaatga

SEQ ID NO: 12403 - DNA, 384 bp, Oryza sativa
  Clone ID: uC-osflcyp134e12a1
ccatattattttattttattttcctttaaatcttattttcattttctaatggttaacttaaactgaaaagggaagaggctgaaactgccccaagaaaagtacatacataacggggaagtttttgggactcccagaataccaaacccatgaatcacaaaaacacccaaccattaacaagggaaaaataaagcccaacaacaatgggcatgccaacaggcccgcacttggctgaacccaaagggtgataccagctcccagggggaaacaagaaaaaagccatcgaatttcctaacgaacatcaatgtgaaaaaaccaatcggaacttcacgaaaaggacccacagcctttgaatatggagaacagcagcctgcggccccagcttgg

SEQ ID NO: 12404 - DNA, 398 bp, Oryza sativa
  Clone ID: uC-osflcyp134f02a1
ggaaaagacaatccttaaaaacccatttttttttaagccccttgctgtcaaattacaatagggcctaaacccccttttaggatacaggctaagggaaaacttttttgggccaaaaaaattgaatggccttaatagcctagtccaaatatttttattttacgcccacaacaaacacatacttgggctgggcagccccccggctttgggaaggaaatccttacaactggaaccttggaaaaattttactacccatccctcgaatgcttgggcatatgtccttgattcggcaaaggggcttttaatttaaaatagcctttaaacaccctttatccaaacccccttttggagcaagctacatgccctgaaagctttcacctaaattccccaaaagggaaaag

SEQ ID NO: 12405 - DNA, 359 bp, Oryza sativa
  Clone ID: uC-osflcyp134f03a1
gaacccaagcccggaaattgtcatttcaattcgatttccatcgatttcagttcaagtaaaacacaacccgttttttggctctttgtaatgccatgatccaaacagcacctaaactgatcataagcatacacatgctgccgtttttcatttggctgagcgatcgaagttgattaaagagaaaaattgaacgaaggaacaaagaatttgcagagaagtgaccccttgggaatcctggggattccttaggccgcagccgttttcatgaacttgaggaactcgcggaaatcgaccctgccgttcttgtccgcgtagaaggcgtcgaacatgcgctggcactcgggggggccggcgccggcggt

SEQ ID NO: 12406 - DNA, 281 bp, Oryza sativa
  Clone ID: uC-osflcyp134f05a1
aggaacccccccatggggagggatttttaaaaaacccatagcaaggtaaaacaagtattgcaaagaccattctacttttttaaagcagaaaaattttcccaaaccagaaacaaaaaaagcgaggaagcccacaccacaaaaaaaagggaaggggataaaaagattcccccacccagaagggggggaaaaaaaaaattttgccgctgaattacggacccccggacaccaaagaataacctgccccaaaggccgcccaatagggagccaaacgaaccacggga

SEQ ID NO: 12407 - DNA, 471 bp, Oryza sativa
  Clone ID: uC-osflcyp134f06a1
gcttaagagccttgagatggataggcatatatctatttaattcatcatcttggtcaacaggttcagcccagtccagtcctagcaaccataagctaattatgtactacgaaataaaaaagagagagaaagatattaacttctctgcagttaggcaaagcagactaatccatccactcatccaccacttctgctgcataacgggcgcctcctacaggcgcagtagttgttgcaccagagctcttcttcaccttctcggcgaggaacttggccgtgtcggcgcccttcacgttgaactccatcaggagctcctcgaacagcggcttgaggttgtcgttgaacgtggggcgtctactgacggaatccaccttgaccggccgcggcttcagagcggcggcggcggccctggcgctggcactgctggtggatgctcccgcgtcgccgtactccggtttctttttttcggggaccacc

SEQ ID NO: 12408 - DNA, 384 bp, Oryza sativa
  Clone ID: uC-osflcyp134f07a1
cggttcttattgtaatattttgtttaatttataaacatgttaaggtttaaagtacagtaaaccatttaactgtgaaatcataaccaaagctcaataactattgagctccggaattacaccttacatattgggatagcaaccacagccctaaatacccaaagaaccatccaaagctcccctagcttatgcaaatcttgttaaaattcaggcctcgctggcaatgttgctggacagccagaccaggcccttgtacaatccctcacctgttgtagcacaagggcactggatataccagtgtcgctggcgaagggagtgcagtccaagcttaacagtgatctcagcagtattcatagcggttggcaaaacttgcttgaaagcaaagac

SEQ ID NO: 12409 - DNA, 443 bp, Oryza sativa
  Clone ID: uC-osflcyp134f08a1
gtttcttttgttgtttttttgtttttttttttttttttttttttttggttttaatgttaccttttttttttttgacaaagggggccctatggcccacgcatggaaatgcccagtgctagagaagaccctcctttccgaaaccgatagcgagagggaagcaccaaaaaccaaacaaaaagaaaaaaaagatccctgtcaagggctgtacacaggttcaccaaacccaaagggcctaaaaggcgggcccctgaaattccacccccccttgggcgcttcgaaggggaagaacttagccccctggtcctaaacttttttaaccagaaattccttggacttgcccacccttgaaccttttgggaactggtcccccgtttttttgtccatgcccctgaaattggaaagggcccccacgggaatttttttaaacccctcaccaacggggg

SEQ ID NO: 12410 - DNA, 61 bp, Oryza sativa
  Clone ID: uC-osflcyp134f09a1
gcacctaatttatcagcaaagctgccggatttaacaaaaggatcaactctcgcggagaaac

SEQ ID NO: 12411 - DNA, 398 bp, Oryza sativa
  Clone ID: uC-osflcyp134f10a1
catgaaagagacagttctgttatgtattgacttatcgagcgataaaaaattgtgaaataaattcaggcacaaagctctgatgacaatattttcagggattaagggttggaaattggaacaggtgaacagtcattagaaaggaataatggcaaatagtcatcagaaatgaatagtggcaaatagagcaagcgctcatcatgacaatggagctatcgttgttagccatgctggtgttacaatggattctgaatttctgatcgtcagaaacttatgatattcctcctccagattctgttctttagggctccaaatggaccacgtgtttgaagaacgcatagaatgggatggccgacgtggacaaacaggacccgagagtcctacccacatttgccacactt

SEQ ID NO: 12412 - DNA, 484 bp, Oryza sativa
  Clone ID: uC-osflcyp134f11a1
aaagaaaaatggcattttgcaacacatttaacttgttcagtgttcaagctaacgttgaacctggtacaagtacaacatgctggcacgcatgtccacatttcgcgggtcgagggttcaagccgaatacaacacacggcatgttgcatttcatcataatttaaagtacttagcatcactttgaacaaggttttggtggtcacatgtatattcgcaaccttcttaaggtgtccgcaaaagacgtgcgcagcataatactttgcagacctatggttatcaacagcaacatgccactaggcacctttttgctcatgtctttagcaccttcgtgagcattctgaatgcagcagtactgtaccttctcgattcatgagtaccactcagttgctgaattcttcccaagaaactaatattatggttcagactcgaagactcgttactcactactgaattacggaactgtggacgatgaagcattgacttctca

SEQ ID NO: 12413 - DNA, 365 bp, Oryza sativa
  Clone ID: uC-osflcyp134g02a1
acattaaaatgacttggctgtaaataacggctactgtaaaaatttacacttaggattgataattgcttaattggtgaagcagttagctccttatttatcacttgggagaccaacgaatagtatcagcttatcacatatatggccacctaatgtggattatttttaactgaacattttggttgcagatgatgtaaaccagggatgatttgttcatgcaatgcttccctggctagtagttcaactctagctgttcaaccttgttgaacttgaacccgcggattctgatctcttccttgtccgaggtgtccttgtgatcgacgtgctggatagtccagcctttattctttatatgacctgtaacattg

SEQ ID NO: 12414 - DNA, 424 bp, Oryza sativa
  Clone ID: uC-osflcyp134g03a1
agatacaacagcagaaaaggatatacctctgcttccccggttaccatatggaaagatttttacgttacagacatacaagttacagcacaagcagttttcatatgcttgaacatctaatgtcagcggtagcacattaaccaaaagtaaagtaaaaatcacattttgggagcaagccccgtatcatgcttgggaacatcagctaatatcagtcttaaatcacatctcaggaaactgaccggcaagtcatcctttcctactcgctgatcctacagcagctgcttgcagtgacagtcatggggtggccttgtcagcaagtgagtgggcagccgagctccttcgccgccgtggtgaggaaggcgagcgtcagcccggtggcgcggcggctgtgggcttcccactctatgcatcttttcacatcggcttg

SEQ ID NO: 12415 - DNA, 493 bp, Oryza sativa
  Clone ID: uC-osflcyp134g05a1
gatgcttcaaaaatatagcattttcttattgctgcaatgtgtatcagaaatcattgaaaaaaaatgttgagcgagctccgtcagctagaaatactcatgaaacaacgggatctaataaaggattaaatgttgcacagccacataaagacgaaatggcactgtatttttgtacgtgctggaggtgaagcaaccaagctccgagctgcatgggaaagatttttcttggccaacctttttccaacagaatatttgaaagcacgattagtactaactttcatttacaatagcagtctcctaatgtcaccaaaattctgtgacaactctgtgaaaaacttgcctcctacttgaccatcaaatacacgatggtcagcggacaatgtcaagctcatttttgtaaccactgtagccttctcggttccatcactgtccaccacaggctcgataatcttattaccacgcccaacagcaagaattccagactgaggaggattga

SEQ ID NO: 12416 - DNA, 416 bp, Oryza sativa
  Clone ID: uC-osflcyp134g06a1
cccaataaaacactggcgccagccattatttcatcacaattccttaccactatttgtttacaatacacttgaggggatagcaggtaagggggagtaaaagggcttccaataaaaggaaattctaccatcaagttacatacatttagaggggtaaaaaaaaaggtgaaaagaatccccacccctaaaattgaactttacagggggggctctttgggtcttcctggggtctatctactaaaaactggggccttgctttgtctaaactagaactccacaaatcccatagaagcaacaccccaagaatgtccctgagttccaattagcctactttttttttggcatctttcaggagataacatcctattaagctgccaggatacaaaatctaaagggaaaaaaaaattttccctgaactt

SEQ ID NO: 12417 - DNA, 319 bp, Oryza sativa
  Clone ID: uC-osflcyp134g07a1
ggaggttcttaaaaggcgccttaaataaggtaaacagtcgcattacagctagcagcaaacatgagttcgcgaattgatcaacataacatcaggcaaaagagctcaaaaaaggatagtctggggcagatagttctatatccttgcaaacaactcgctatagcaaaactccaggcagacgcagcagcagattttaagcgttggcagcagcctgggcggcagcatcccgcttcctttgctcctcgatgatgctgagcttgatgcccttgcccttgggcaggctcacccaaggcttgttgcccttgccaatggtgaacacatt

SEQ ID NO: 12418 - DNA, 422 bp, Oryza sativa
  Clone ID: uC-osflcyp134g09a1
aaggaagggaaacccccaatccaaaacaggggggggggaaaaaaaaggtttaacccccaaaattaaacccaacaaaaaaaaaagtttaaaaccacgggcaaagggccaaaaggggggaaaaataaacgggcaaaggcacaaccgaaaaggccggggaaaaaacttaagggggtccaaaagagacttagattccaaaaaaggcaaaatggaaaggcccccctggaacgggggtcatatttttttgggggcagccttggaccccctggccccggggggggccttttttcccccgtttttggaagcccccaccgcccccggttgcccaaaggcccccccgggaaaacccccaaggggggggcccctaaagaagggccccccccccccgggcggggggggaaaaaatttaacccccggggcccccc

SEQ ID NO: 12419 - DNA, 52 bp, Oryza sativa
  Clone ID: uC-osflcyp134g10a1
atatataaaacccggggttgggaaaaacagaactcccaaaggggaaaacggg

SEQ ID NO: 12420 - DNA, 484 bp, Oryza sativa
  Clone ID: uC-osflcyp134g11a1
gatatataattattctgtttttatttgaatacacataaacgatcaaactgtgaaacggtacaggatctgagataattaggaaactacagagcagcagctacaatattaaccatagcagctgcaggataaacacggtgctaaataggcaggctttgttcttctttcacagcctggatatctggaaggggaccatgacttcagtcatctcctccctcatgataatcttcccaacctggaaaaggtcggagatgcctagctgcgtcgacagatgccttcggcaatcctctgcagcaacaatgcctgaagaataagctccatgcacggacccagagtgatcgatgcaggcggcctccccagcgaaaaacaggttgcccaccggagcacagaatctttcatacaagtcagctggcttcccacaaggtcgcaggaataagaaccaagcgaattcggttggttccccaccttgaaaccaaatactggaccg

SEQ ID NO: 12421 - DNA, 306 bp, Oryza sativa
  Clone ID: uC-osflcyp134g12a1
ggggaaacccccacccattttaccttgggggccccaagggggaagggaaaaaaggccaattttaaaaaatttccaaaacccaaaaaaaaaaaatacccttaaaaaaacccccctgggccccaaaaaaaaacccccttttttttggcacccaaaattttttttaaaaaggttttaaaaaaaaccctttggggcggcggaaaaaaaacccctaaaattccaaagcgccccaaaaaaaaaaaaaaggggggcccttttggggcccccccccggttttctcaaaggcccccctcccggggggggggggtt

SEQ ID NO: 12422 - DNA, 377 bp, Oryza sativa
  Clone ID: uC-osflcyp134h02a1
ttgtccgcgcggcgatgatgtcataggtgcgaatgaggcgggcggcggagggggctagggcagaggcgcaggcggcggcggagtcaagggagagggtgatgcgcgtgtactataggaagggatgtcggcggtggtggaggggggcagagggcggcagcaggagagaggaggcaatgggtgcatgggagtcagtgaggaggccacggtgagggtgatcgagcgcgacggcggagtagctgagggcaagggcgcaggcgactatgctagtgttggtggtggtagatttggagtcgtcggggaggatgctgaggtcgaagaagccagcaagcgccatggcagacagtggtgtagctaggaatttttcccttgtgtagtcc

SEQ ID NO: 12423 - DNA, 185 bp, Oryza sativa
  Clone ID: uC-osflcyp134h03a1
aactgggggcccaaccaaaagcccctatgggacaaaaattggttgccccaatttttttttttagcaacatttgggccagactatggggaaaagcaaactaacccccgggggggggaggactttggggggaacggaaaattggggctgggctttagccaaagggaaatattaccaaaacccgcccc

SEQ ID NO: 12424 - DNA, 487 bp, Oryza sativa
  Clone ID: uC-osflcyp134h05a1
gataaaaatactacatataataataatcaagcggtaccattcatccctagatacaatatttctagagctttgcttaacactaacacacagctatataacctagctagcttcatgatgacttcaatatttctcgaccttacttaatactaacacacagctataacctagctatagcttcatgacttgatctaccaagctaggcatgcatatgcaagaacaagaaacagattagtcacaccataatgactaactaattatagattcatatcagctagtaatatagttcttctaggccctgatcagatcatgcaaaattaaattacttacctagtttggttccatgcatgcatgatacacacaacatatataacactcttctagttctaggattctagattgatttttcttcttcttttccccatgaagccatgcaccatccatgcattgacccattctgcatatgcctcatgacttgagtcatcacagt

SEQ ID NO: 12425 - DNA, 127 bp, Oryza sativa
  Clone ID: uC-osflcyp134h06a1
aaaaacaataaccacgaagcacctagaaaagaaacaaaatgaccacaaaaacaaccaagtcaaacccagcaccccccgggtcatccaagtcctacaaaaaaacatacaaaccccactcagtaggggg

SEQ ID NO: 12426 - DNA, 428 bp, Oryza sativa
  Clone ID: uC-osflcyp134h07a1
aacctctccgagatgcatcattaattgagtctcgcaatgttgaccagaaaaaaaattacagtctagatgtacacatgaaatcaacttgcccaacaatttatcagaaaatgcatagcagttcgcaagccatatgcctcagttacacaaatagcagccaggagcgcctagaatacaaaagctgacccagaaattcgagagcagcacatcacaagagagtttgagagagggagagagccagcaaggtagagcatttatttagtaaatcgtttcacttgccattgccagcgtttcaaaacattttcagttatttttgcacctacaggcttacggtttttttgagggaattgccctttttcttcaagcttacaagcaggctgttgaaggccttcttgaaggagttcacacttttcagtttttagctgtttgcc

SEQ ID NO: 12427 - DNA, 507 bp, Oryza sativa
  Clone ID: uC-osflcyp134h08a1
gatcagaaaaagattttattagcaaagaacaggggataaattattccacatgccgacttgatgaatgatactaattatttccagtgttaaatggaattaagttggcgtaaaaaaaaattctagctgaaacaacaccagttgaactggcatgccaattggcggtacgctgccttattctatttacttttgaccgtgatacccttcggctgttcttgggataattttctatggtttaccattcaactggactttagctagcttctctccgctttcttcggcgccatccaccttaccaggaaatgacctcccactacttgtgacaagttccttgatggttgcttggatgtccttatcgtccaacagcgaatccaatgtcacatgtagccggaatctccaataatgcttcgggttagttgggtcattgattgtttcctcttttgctggtcttgtggtgacttgtctttaagtgcaagcaggtcctgtagtgggaagattgcccacattgat

SEQ ID NO: 12428 - DNA, 429 bp, Oryza sativa
  Clone ID: uC-osflcyp134h09a1
cagtcgtaatttgtgtatgtattgatgcctctgttgagattgtcagttccagttcggtttttgtatgttggatgttgtacagtgatcattgagtaatacagtgtatatatttcttgtcattactcgagcatacctgagtacaagaacgccttgcacgctactaaaatgatcatctggattcttgaagcatgattattcttttggatccttgtacactcgaactgttcaacgcacgaatgtcaatgcgaatggttggttttccggtttcaccttttggggaggggctagtaagggaccttttttgcaagggcagtatgcattgcagttccaattgggataacatcttaataaacgaagaatttagggttttgaacagtgtgaactgaaccaacttccccgtttttaataccaaggccaaacataactcca

SEQ ID NO: 12429 - DNA, 433 bp, Oryza sativa
  Clone ID: uC-osflcyp134h10a1
gaagattagttacggatctgtgttcacttgttcagcaacaaatgtgcttcatatctcactgaagttctaaagtacaaggcaataaatttaaaagtgccacgttttagactaaacccaaaaaaaatggctgcaaaagctaacacaatatgttggaaatatttttttcctgctccaaccattttctgctgccttgaagtagactctgttctacaccctgttgtatgccacgtttttgctgaataggcgacggatgtaaacaacttgcaaagcgcttgcacccatgaaagctaggtactccgctattgtgtagaacatgacacgccttcttgtgctctcatttgtgtgtcggtgacgagcttcacgggctttaaggtatttcttgctcagcagtgacagattctaatgcttccttcagcttcgcttttttcacatt

SEQ ID NO: 12430 - DNA, 176 bp, Oryza sativa
  Clone ID: uC-osflcyp135a03a1
ataggttctgacttgtttaattaattacgccaggaatggagggggcaaaagaaatatttttttttcttagttatagcatattatgtacaaaaaaaaaaaagagccgccatcccaaccaacaaccaatggggggaaaaacataatgcgcacccccacaactagaacaaaacttcagg

SEQ ID NO: 12431 - DNA, 199 bp, Oryza sativa
  Clone ID: uC-osflcyp135a04a1
ccacaaaaaggtacgggccaaaattttttttcgggtccataaacaaggggggaccccttcttgggcatgaacataaaacctttccaggggggcccccaccaggggtggggccgtccaattttttaaaccccccggggattttaaaaccccccgggaaaacagggggggtttacggggccctggaaacctttattttcat

SEQ ID NO: 12432 - DNA, 263 bp, Oryza sativa
  Clone ID: uC-osflcyp135a05a1
agagattaaaaagaggaggaaggagattggcaagccccaggtgtacatggaaaagttgaaaacaaaccaccaaatagctgaagtccatggtacgtagatggcttacaaccatacaaaggccacacatttttctacatcaacagttcaacataagaacaagggcagccatgtccgtacaccgccagtcagtcccatccgatccggccatcccatgcacaaattgagcatgccacgttattcaagcatttttcacagagccacac

SEQ ID NO: 12433 - DNA, 297 bp, Oryza sativa
  Clone ID: uC-osflcyp135a06a1
ggtaacagtaagtagctcataaggtggcgagcaggaaccttatgctttcacacgattagatcggagttccatcatatcggacaggtgtacacatgtgacaacgccttgcactacaattaacagtacactacatgaacgattacccgaactacatatacatttactactgtacaagctcttctataattaagaacgatagccattaaatatctttacgacagcacgatagtcagggtacgcttagtcgcattcagaacttgccagcatcacataagccgctgcactctgagcagagac

SEQ ID NO: 12434 - DNA, 286 bp, Oryza sativa
  Clone ID: uC-osflcyp135a07a1
ggtgaaaagcagttcacattgcacatataagaagttaagtgctacaacattaacatccaaatatatcataaaaactcggaaggcagtggaaaaaggtctacttttaagtattaagcaagctgatacaaatagccaggcaggtactacactgccagcccaaatagacactacgctaatgtatcaagacatcgacaaaatgttataacaaaaacagtaccaggtacaactagccaagcaggcactacactgaattgacgttctagcatatgtgctgcccgtcgactac

SEQ ID NO: 12435 - DNA, 285 bp, Oryza sativa
  Clone ID: uC-osflcyp135a08a1
aattcaagtatcaagtgtagtatatcatcatcatgcaagtacagtgttacatagattaatcacaatgcagtttgattaagcagtgggcatcatcacatcgcattcagaggaaggctatcttagattacagatgaatatgcagacacccagcttggtgttacatacatagactggatttgggtgaaatttagccggcgagggcgctggtgttgtagacgaggagggcgccgccgccgaggagcccggcgagggtcacggcccagatcagaagcccggtggttccac

SEQ ID NO: 12436 - DNA, 265 bp, Oryza sativa
  Clone ID: uC-osflcyp135a09a1
gggacaaccggcaaagatcctcaaattgcaccaagatccacaggatcatactagtttaattaattacgacacgaaaggagggggcaaaagaaaaaatgaacacggctccaaacgcaaaagctcacaatacacagggcgcgcgccatcctaaccgacaccatctgcggacacacgtacgcacaccccccaactagatcaacttcaggccagcggcggcgacggagagcacggacacggcgatggccgtgaaaacggagcggccaac

SEQ ID NO: 12437 - DNA, 261 bp, Oryza sativa
  Clone ID: uC-osflcyp135a11a1
ggagagaaaaatggagattttattccacaactcgttatttgcacaattacattttaaccatgggggatacaaacgaaacaccaactaatttgcaatattggccgagttcacatactaatatgtacaattttcttccatggggagatagctgagccccttgataaataaactttcacctcaacaccaaatattcctatgttttgctaactgactcggtagctcctgacaatggccgatgatcctccaacgatgtttgtgctg

SEQ ID NO: 12438 - DNA, 298 bp, Oryza sativa
  Clone ID: uC-osflcyp135a12a1
ttttggttacagtaagtagcttataaggtggctaaaaaaaacctgacttttacaaactgcgggaccaaacaaccaagttacaatatataaaaactctgagatccccgcctcgcactatctatttttttagacaaaaggatcatccaacaaaactgcctatcaagactgtcctgattgaaacgctcattagacaagcaacgatggctttgctttacctttggggacaggaatttatttttttgtacgctaagccgcattttttaccttccagcatcacataagccggtgcactctgagc

SEQ ID NO: 12439 - DNA, 222 bp, Oryza sativa
  Clone ID: uC-osflcyp135b01a1
aaaaaacaacggtcccggccggcccttaaaaagaaatataaaattttcaggggatttcccagaaaaaccgggtttggggcccaaggttttgcccccctcccggggggcgggggcccccacgggaaacccttttttcccgggggggcccttttaaactttggggccctaaaacgggggaaaaacaaacgggattcattttagccccccttaaggggtagaccc

SEQ ID NO: 12440 - DNA, 285 bp, Oryza sativa
  Clone ID: uC-osflcyp135b02a1
ttttttttttttttttttttttttttttttttttttttttttttttttttttttttttttttttttttttttttttttttttttttttttttttttttttttttttttttttaaaaaaacccgggggggggaaaaggttcctttttcacaaattggggtttttttaagaaaaaccatttttttttcggggtttttaaaaaaattggttgggggggaaaaaaagggggttttggccaaaaaaccccttttaggggcccatttttttaaaaaaaccccctttggggg

SEQ ID NO: 12441 - DNA, 210 bp, Oryza sativa
  Clone ID: uC-osflcyp135b03a1
accttcaaatcattattataaatactttccttgaaaagctttcttacacaaaaacctttgcccccccttttgcttgcttaaaaaaaacctaccattttgttcctccctacccttaaaaaccaaaaccagccccacataaaccattgccaaaggaccattttaccaactggtaatccctttaccaccaacaggttcaagaaaaagcaaatt

SEQ ID NO: 12442 - DNA, 287 bp, Oryza sativa
  Clone ID: uC-osflcyp135b04a1
aaagctgatctgacagatataatcacatcgatctcaaatcaacaattcccaccttagggtcagcatttccctgaacttgtacataatcacagcgtaggaaagatgaggaataaaaaacctcaaacctaatcgcatatctttcggaatacaaaaatatctattccattatactcttgcatatctttttgcagggcaagtaatggcataacaaaaaaaaaaaaacacggtggtagcacgaacattgccatggctaaggaaccgcaatagccctctctgcaactgatatc

SEQ ID NO: 12443 - DNA, 245 bp, Oryza sativa
  Clone ID: uC-osflcyp135b05a1
aacgggggggaattaccccatccatttttattggaaaaagcccaatttattcagcgtcacccaagaaaagggacaatttatacccacacctatccaacaagggaataagggctcacaattttttcaacaggtccataaagggtttttcaacccatatgcttggcaaaggtttaactagacgagcacaatgttcgatggcacaaaccaaaatttcctctcaaaaaagcaccggaaacccttaaaac

SEQ ID NO: 12444 - DNA, 261 bp, Oryza sativa
  Clone ID: uC-osflcyp135b07a1
aaatcaaataatcatgaaattgattggaatttggaagagtgtttctctttgcactttgaaagcacaagtttataaccaatgccctatggggcattagatggcaaatgcgcgatgttcaggtaatagaggttgagtccctaaaaaaagttgtatcaagttacatggtttgtttgactgtctattttggtttacaagcagcaacgaataaccaatcaaaactcggggcaagaaaacagctttctttggtttacttttccttac

SEQ ID NO: 12445 - DNA, 280 bp, Oryza sativa
  Clone ID: uC-osflcyp135b08a1
tttttttggtttttttttttttttttttttttttttttttttttttttttttttttttttttttttttttttttttaaaaggcaacaaccccaaataatttaaggggaaatcccgcttcgggtgggtcttgccccaaaaaataggggaaaccccaaaaaaaaattttctttcagggggcccaaaagggaaccccagggggggcttcccccaaatttattttttgaggccagaaaacccaagcgggcggtttacaaagggaaaaaaaaaaaccaatctcct

SEQ ID NO: 12446 - DNA, 303 bp, Oryza sativa
  Clone ID: uC-osflcyp135b09a1
gacgctgtcgcccatggagtagacggtgaagttggcgagcagaagcatcacggagaccatgagggcgggggtgccggagaagatgtgctggaagagccacacgaaggaggcgtgcatctcggcgtggacgcgcgcgagcacgcgctgcaggtcctcgtagaagagcgcctgccgcatctgcagcgtgaagctctgcagctcccggatgatgagcaccatcgacgagaacgcgcgccccaccgcgccgcgcgcggactcgccggcgcagtcgatcagccgctcgtcccaccggccctgctgctg

SEQ ID NO: 12447 - DNA, 244 bp, Oryza sativa
  Clone ID: uC-osflcyp135b10a1
gtagaaaagggaagttttattaagactcagttaaataccccaagatgatacattccaactgagtccacccccggcctttggatagaatgcacacagccaaaaaactggacaaagaatgcacagtttatttaagacccttgcaagaagaaaaacaagagaaataagagggtgaaaagtttatacaagcccgtttagcaacaccaaatgcaaatggcatgggttagaacagccataacaaggggaa

SEQ ID NO: 12448 - DNA, 299 bp, Oryza sativa
  Clone ID: uC-osflcyp135b11a1
tttttgttgttttttttttgggaattaacccccttttcttcattacttggggaatttcacagaattttgggggcaatgcataactcaagccacatggcatggaatgtctgccccccttgtcaacaattactggcttaaacaatccaggttgaataaagccaattaactaatgcttctaatcattggcacaaaatggcctcttagctagatgactggcatgtgtgggatttcaaagaagaaaaaaaaagaaggaaatcccacactgcctcacagcacaagaaatttattctgtagcaatg

SEQ ID NO: 12449 - DNA, 174 bp, Oryza sativa
  Clone ID: uC-osflcyp135b12a1
aaacctaaaaagggccattttaaaaggaacaatgggtaaaaaagcaaaaattttttaaaggttttgggaaagggtcaaaaaatagtaaaaaacctttttttttttaaatttaaaaacttttgtaaaagagggaaaaaattttaaaagcccgaaacttaaaaaaaaacctttaaa

SEQ ID NO: 12450 - DNA, 273 bp, Oryza sativa
  Clone ID: uC-osflcyp135c01a1
agcactgtaagtactcgcattccacaacaaccgaagggcaacaataggactcagaacatccaagtttttaaccgaatagaaataaacgagttttaaacgactaacatagtgcacattgcgagcagatattaacggtccatgcaacgagtaccatggccgtgggcaaaacttaacgaacgctaagatatctcaaatgcagccagcataaccaccacttcaacgatgctcatttcttcttggcggcagccttggtcaccttggcaccggttgggt

SEQ ID NO: 12451 - DNA, 199 bp, Oryza sativa
  Clone ID: uC-osflcyp135c03a1
gggggaacccaaaggggggggcaaaacccaaagggatttaattccccccgggggctcaggtaaaaaggtttttcccaaccagggggggggggaacaaaagggctttccctccccccaaaaagcaaagaaggcccccctttaaggaaacccttttctaaagggggggggggttaaaacggggaaaaaagaccgggttttc

SEQ ID NO: 12452 - DNA, 169 bp, Oryza sativa
  Clone ID: uC-osflcyp135c04a1
atcaatacaaatctattcttgccaagggatttaataaagccggcgctaggggaagacgcactactggagaaggggggtcttaaagaagcggggcatggacatgggtagctagctccaaagggccatgggaactcaattggctcaggccaaaggtagattgcataccaaa

SEQ ID NO: 12453 - DNA, 91 bp, Oryza sativa
  Clone ID: uC-osflcyp135c05a1
ctccttttttttttttggggggggttttttcaataatccggggtgccaaacccaaccaaaaacagctttgatttgccgtaatgtattttaa

SEQ ID NO: 12454 - DNA, 271 bp, Oryza sativa
  Clone ID: uC-osflcyp135c07a1
cttcttcttcttcacagttcacatggaaatcagaaggaagtagcaaaaggaagagctgttctacactcgacagagtaacaaactaagagagcaacacaagtaacaagaggagagatttagtctcttttctggtgttctgcaaataaaactctcccctcttgctacccctaaaccccaacccaaggtagtagtaagtcaccccactaaaagtaaccggccatctcttacaaaaattggctgtctcctttgaatcaatcgaatcagatcatca

SEQ ID NO: 12455 - DNA, 117 bp, Oryza sativa
  Clone ID: uC-osflcyp135c08a1
gggatgaaagccgaggtagattattttaagaagcctggcacgcatgaggagatggagccagggttccatggaggggacccccttgtggatggaatgacccatccaagctaggttggg

SEQ ID NO: 12456 - DNA, 281 bp, Oryza sativa
  Clone ID: uC-osflcyp135c09a1
ggagtacacttttcaagcaatttattccaaagttaacagccagggttccttttgtttttttataagcacacgtaagggcctgaaaccaacaaaacacaaaaaggggggatcaatggcgggaccgaacgaacccaaaccaaagccggcgagcccccaatggggtcaacgaaattgccaaacttttctgggggggggctcacacagagatgatgagagcccttgacgatgcccgcactggacccgggggcacaagagttatggaacttgggcaaagaccgcag

SEQ ID NO: 12457 - DNA, 264 bp, Oryza sativa
  Clone ID: uC-osflcyp135c11a1
ggcaaacacaaccagatacagttttgatttgccgtaatgtttatattgacaatattgatctctcttgtcatctacaaaggagtgctcaaaaatgtgttctgtaaccagcaacagtaataacagcagctgaaaaaaaggggcagcaatataacaggtgatacagaattacagatggaaacttatcatactaccaacagctatgaacttccatgaatcaaaatatgcccaactcctgatgtcaggattgagactagagatcaccta

SEQ ID NO: 12458 - DNA, 289 bp, Oryza sativa
  Clone ID: uC-osflcyp135c12a1
gaacaatgacatgacaatcataatcatactggtccaaaacactcaccaattacagaaacactatgatgattaggagctgttgagctctcattattctttgcatgtggggactttggtagtagtacaagggaaaatagggccatggcaaagctgctaccacaacacactccacccaaagcctctgagccttttcaagatagctactgatcctagctcttcttttgtcccctgacactgaaaaaagtttgtgttttctccattgttcatcttcgcttttgatgagtaaata

SEQ ID NO: 12459 - DNA, 287 bp, Oryza sativa
  Clone ID: uC-osflcyp135d01a1
gcatatcactgcttgtctttgaaaacggcacgagtattggagcgtacactaacgagaaaattcccagcatacaggaatgcggtttattcagtttcataacagtgggtatcgaaatcagatatgctcataacagataaccaaatttcagcctaagcgctttgagctccgtgagatttccagagtttggtccattcctccattgcatcagcagctttagcgaagattgcattctgcggtcccagtttctccttgacaatgctggttagttccttaacacagtcttcaaa

SEQ ID NO: 12460 - DNA, 207 bp, Oryza sativa
  Clone ID: uC-osflcyp135d02a1
gagtaaaaaaaaaattttttcaaagaaaaaaaaaatttaaaaaaaacaaaaaaaacctaaagttgtaaaaaaaaacttaaaaaaaaaaaaaaaaaacttaaaaattcaataataaaataaaataataaaaaaaacactaaaaaaaaaagttttaaaaaaaactacttaatttaaaaggaaatataaaaacttgggcaaaaaaaggaa

SEQ ID NO: 12461 - DNA, 274 bp, Oryza sativa
  Clone ID: uC-osflcyp135d03a1
gggtccaaatcatcacaatcacgttcatttggccaaagaacaaaatcacttcacatttacaatcatttggacacaaaacaaaatcacaaaaatcatcacaatcatattcatcaccgctagatccggcggttggggctcggatccgcccacgagctccagatcccgccggcgcctgcaatctccaaaacggatccggcgaaggctggccctcgagaagaacggctcgcggtggagaagccagtcttcattccttccctcccgccacttgccgggc

SEQ ID NO: 12462 - DNA, 213 bp, Oryza sativa
  Clone ID: uC-osflcyp135d04a1
gggcaaaaaaagggccctctctcaggaaaactttccttttatagaaaggggttttcccagggggccccttaaaaaccccatgggttggaaatggaagagggaatcaacattcccggccccccttttatggggccccccccctaagcccgctggggccgggggcccccccccggggacccctttttggccatcccccctcaaggcccccccccc

SEQ ID NO: 12463 - DNA, 253 bp, Oryza sativa
  Clone ID: uC-osflcyp135d05a1
ggggagccactgcacacggtgcattgtcagttgtagcattcacaacataccgagtttttttttaggaggtaaaactttacgagtctcacagcatattaaaacgtagccagcttttactagatacgaggagcattttttaaggcgcaaacaaaagggatacagtcccggcttaaggggggtaaaatcagcttcactatcttcatgttcgccgcaacgggaaacagagcacaatcatctttgggtccaaaaattt

SEQ ID NO: 12464 - DNA, 277 bp, Oryza sativa
  Clone ID: uC-osflcyp135d07a1
atgtgtataaatttactaaaatagtaaagtaatgcggtgcaaaaaaagaaaccaggtagagagagagagggagagggggattgatcgctacccccggtcccgggcgatcgatcgccgattaggattttcgagtccaagttctagtacgtggagtagttacgtggcaggagatggaaacaggtctcatgagaggagaattcttgagcacagagacatttacccccagattacaccacagaagccatcgttacgccattctcccttggctcagttggtc

SEQ ID NO: 12465 - DNA, 288 bp, Oryza sativa
  Clone ID: uC-osflcyp135d08a1
aggtgtgaaagaggtaaaatttgacactactgttcttgacctttattcagattttacagcgttcacaaatgtatacaacagttaaatgccaagacttggcatacaggacggagcttttattcatgctgtcctccaccaccggacacgattccaacgaggtgattcggatacgttagatatcctctcgcacggcacagccttctagccagccaagattgaccagagaattttccaaggagtctagttggtctgcatcatgctgcattagccggccaataatcggtgcat

SEQ ID NO: 12466 - DNA, 304 bp, Oryza sativa
  Clone ID: uC-osflcyp135d09a1
gcactccggcgagagaatgggcagcaggtgggcgggggactccacgatggcggccatatcttcgcttcccttcgcggcactgcgccgggccggcgactgcaggccgtcgacggcggcggcggcggcgggggcgggggcgggggccgtcgtgctcagcgtgaggccccggcgggggtcgcgctcggtggtgcgctgcgtcgccacggcgggcgaagttccacccactgccgcagaaacaaagaggaattctttcaagtcatacaagcgttctatcctaagcatttacagtacagttctacaagaa

SEQ ID NO: 12467 - DNA, 285 bp, Oryza sativa
  Clone ID: uC-osflcyp135d10a1
attcaatcttcaggctttcaccattcaggtcgaattatgttagcgaaacatctgttcaactccacagaagcaagcaacaatgacaacagagttctgtctaattgcttgaaatcataaagctcctacaaatccacacttactgaacgtgtggagcccttttttcttaactccctaatgcaagttcgattccgagaacatgacgaaaaccaagcacagctcagcgcatggtaagttggtaactatagccgaatgaagatattcactttttccttttctttgggggct

SEQ ID NO: 12468 - DNA, 284 bp, Oryza sativa
  Clone ID: uC-osflcyp135d11a1
ccatggaagcttcagtagctaagatacacatttcagtatggaagaaagtacacatatgaactgctcatataacaccaggaaagctgatcgaatccccagactttgattgatgtatgtaagttctttattcagatcaagcgactacatgatggcaagtgcgaccaacatgaagaaatgcactcgggacgccattctctccaagccccctaaaccatggaagcacaatttgcacaatgctggagccgttcatggctcgaacaccatgttttcggcctccctcttga

SEQ ID NO: 12469 - DNA, 201 bp, Oryza sativa
  Clone ID: uC-osflcyp135e01a1
aaagggggggaaaaaatttttttttttttagcccccctcccgggggccagggccaagttttttaaaccccccttcccccaagggggggggggggcccaaccttaggaagggctttaaaataacccaatcccagcggggggggcatttttttccaaagttcccggggggttaaccggggccagccggtggccagggacggaa

SEQ ID NO: 12470 - DNA, 284 bp, Oryza sativa
  Clone ID: uC-osflcyp135e03a1
gaaaaaagaaaaggcagggctagctgtttttaacaagagcagccaggccctcctcctgtaaataagacagtaaattacccccaatgggactgacaatagtagcactgcacttgagagtacatataagaagtgcagctcaatttgttcttcttttgctctctgccatactaattaacagcagcggattaggcagggtgatggtgattagattagctaattaatttgagacatgtagtaatatccctttgggacggcttagctaaaggtagtactccactttgcta

SEQ ID NO: 12471 - DNA, 249 bp, Oryza sativa
  Clone ID: uC-osflcyp135e04a1
ccaaaagccatttggccttttaccaccaacagcagaaaggtccaacaccatttttttcctgcccccacacccggtcacaaatcaaatcaaactgtatgcatcgattggggacccaatttaattaaaatggccctagctacaacattcaccacgcccaatatttaaatgccctgtttcttaattgggtccactatctttatcaacttcctggctaaaaactagctatcactggtccagaaactgatccat

SEQ ID NO: 12472 - DNA, 283 bp, Oryza sativa
  Clone ID: uC-osflcyp135e06a1
gattctaaatataccataacacattggcatagattgaaacatacaggttttttttgaaggccctaatatctaagggcccaaatggtcgtttatcttgcacatctcgagggatggatcatatacatgtattcgacacaaactctaacatgcaacatcccatatacaggtgtaattattctatttgccgtaatcgacatggatggtgtagctataatatgcaggtgggaacaatcttgcaaccatcatgcagagttacaactagtaccaaacagagttacatacc

SEQ ID NO: 12473 - DNA, 289 bp, Oryza sativa
  Clone ID: uC-osflcyp135e07a1
ctaaagaggatgtaaagttgttgccactctccttcattcttaatacaaaagatgtgcaattcttttgcacattctcaaaaaaacttttatttgtgcatcagtacaacagcattgacgatatgaacattgcttaaattttgttgagttaaaacattattttcgtaagtaaaccaaaagaacggtttgtgctttgctaggaggtaatttttcccttcttttcgtgtgtaagaaagaaagataccaaagaaacttttatacccattcccacaaatcccacttcttccacata

SEQ ID NO: 12474 - DNA, 284 bp, Oryza sativa
  Clone ID: uC-osflcyp135e08a1
gccatgcctaaaaccacaatgaccttacttgacattgacacaacaaacaagcctagaaggccaggacaacatccatggtatggcattaacattcctgtaaggaaactggaatacataaaatatcaagagaaacaagaaaaaatgactatgtacaggcaagagttacagtagtagtatttatttgcactgtccattaatctctgatttatttgtactgtattgactctttttcctccctctgttaacgaataacatatgcagtttgatgcggacatcactaactc

SEQ ID NO: 12475 - DNA, 263 bp, Oryza sativa
  Clone ID: uC-osflcyp135e09a1
cttcttcttcttcacagttcacatggaaatcagaaggaagtagcaaaaggaagagctgttctacactcgacagagtaacaaactaagagagcaacacaagtaacaagaggagagatttagtctcttttctggtgttctgcaaataaaactctcccctcttgctacccctaaaccccaacccaaggtagtagtaagtcaccccactaaaagtaaccggccatctcttacaaaaattggctgtctcctttgaatcaatcgaatca

SEQ ID NO: 12476 - DNA, 285 bp, Oryza sativa
  Clone ID: uC-osflcyp135e11a1
ctcggatcaaacatctcagaaacattaacagaagtagaatgataatatcatcgattggtaccgatgcacagtgaagcaaattgtactagtatggataatagtatcaacacaacttagggactctaaaccagaacacaacacaaccatgacacgatgatatgacagacgagcggcataggtataatgaagtccaatgctgcaccacagcacacgctcagagaccaccacggaggcgcaggacaaggtgcagggtggactccttctggatgttatagtcggcaaggg

SEQ ID NO: 12477 - DNA, 286 bp, Oryza sativa
  Clone ID: uC-osflcyp135e12a1
agttagaaagtttcaagtaaatggattctacacaaacagcaacggcgtttcacataagctcaggaaagttcctccgttcaaaagcatcggataagcacagtacaaatctcccatcaattcagtaaaaaccgtactagttttcagtttatcagcatctcctttatcaattctgtaaccttgggagagtacgtctcctccaaaactcatctatttgcaatatctgcagttcccatttacagaaggaacccaacagatcattctctttttattattttcgcgccttatt

SEQ ID NO: 12478 - DNA, 297 bp, Oryza sativa
  Clone ID: uC-osflcyp135f01a1
ggtgaacatataatgcattttttaatttatgttaccacagagccaacatagcaattacttaacggttggtaaacattagcagcaaatacggttccataacaagtttacattactgaaccgacatgactaggagcaaaacttttaggtaaaactagggatataagatgataacagcacaggggaataagccattcaacaaaacgaatggtggcaccacgccaaggaggttgacatatcaacgagcttggcagccgaagacatggatcagtgggacacgccatcaccatgatcgcccat

SEQ ID NO: 12479 - DNA, 294 bp, Oryza sativa
  Clone ID: uC-osflcyp135f02a1
agagataatccttctttgtacaccgggagaccgggaataagtggcaatcttcagctaaaccattcttacacaacaaaagttgctctaatagctcaaaatgaactgaactggtattctaatggttacaacgttttaatacttttgaatcgtacaagcaccatactaatgggttcatcatgtcaccttttatccctgctgccctgcaatacagctatttttgctggttcaccgggaggtagtactccttcagctgcaagccagacattgtcaggacgtttgtcgccaacaccacat

SEQ ID NO: 12480 - DNA, 282 bp, Oryza sativa
  Clone ID: uC-osflcyp135f03a1
aacttcaagggcaccagattatggtgccaggaacacttccaaaatgtagcacaatgctttcgtagttacaggatagaaattccactgttcaaaacttcacacatgatctacattttgttacaaaagaaaatatgtaaacagatattcaaaaaggcattcccttgacccctccacctaggcagcgcgctcaaatgaacggcctcctagacaagctcaatgtaagccataggtgcattgtctccccgtcttggaaatgttgggatgatccttgtgtagcccccc

SEQ ID NO: 12481 - DNA, 241 bp, Oryza sativa
  Clone ID: uC-osflcyp135f04a1
aaaacaagctagcatgaggcctcatgatttcaccacaagcaataatgctcgaaattggcaccaattaccccaaaaatttactgggccagtttgatctttttacaggatacatcagccattcaattaaaaattggctactcatcggacaccctacagatcgcgaattttctttactggacagtatttcttacaaaaggggacccaggcacaatatgattttttgccaactcttttaaaatta

SEQ ID NO: 12482 - DNA, 222 bp, Oryza sativa
  Clone ID: uC-osflcyp135f05a1
aaacttaaatcctctagatcatgctcacccttaaataaattttttttgaaaaaatatattttttaaataaaattatttttaaatttattattcttttctttttaagtggaaaaaaaaattaaatctaaaaggtatatcaaaaaactaaaaacaaccaaaaaatgaaactaaatataaaaatttttaaaactaataaaatcgtaaaaaaaaaatggttgcaat

SEQ ID NO: 12483 - DNA, 283 bp, Oryza sativa
  Clone ID: uC-osflcyp135f07a1
acaaatattaatactgcattctactaattaacaatttgtcttttctttaacgaagttcaacccattttatgtacaaaacatacatgcatatgaaaattatacaccttgaaaccgcgaaaacatttatgattcatttattgtgtattcaaatttacaatccacaagtttcatcagacatggagcagacatctgagtgacttcccctcttccagcaactggaaagctttgttgatgtcggcgaagggcatctcttgtgttatgaacccatcaaaatttatgttaa

SEQ ID NO: 12484 - DNA, 257 bp, Oryza sativa
  Clone ID: uC-osflcyp135f08a1
ctagcaaaggatttaatcagcagacaagaactttcatttttagtttggtcaatataacacagggaagcgtgataacaataacatttgactcatgacataagcagttccatgtttactttcacagaaagaaagtattttgctacaacatacaacttcattgccgacaaacagcacaaacaagagctttgcatggaggattacagaggggtaggtccaaacctaacataatctatatcacccggttttcggtaacattt

SEQ ID NO: 12485 - DNA, 232 bp, Oryza sativa
  Clone ID: uC-osflcyp135f09a1
gggggccagtccctttcaaaattttaacttaaaaatgggcccctgtttccccgtttgttccatttgataaagtttcccaaagggaaatagacatcctgaacaaaagcccgggggttaaatttaaatggcccagggacctaactttttaaatcatcatcgccagctgggggggcagcggttgcaaaggggtcagggggggggccggggccagaccctgggtggtcagggaacc

SEQ ID NO: 12486 - DNA, 294 bp, Oryza sativa
  Clone ID: uC-osflcyp135f10a1
ggcggcgaaattgtgggtgagcaacgtatatacgtgtacgtacgtacatccttgctcatcttattgtaccgtatatatacgtacgtagtagccagtatttatttagtggtacgtacgtacgcatggattattaataatttgggggtgattaataattaatcagttgcagtagtagccctgctgctgcggcatcctgccgtagccgtactgctgctccttggcgccgtagctggcctgcttctgctcgcggtgctcgtggtaggcgtagccgccggcgcccaccgtcgtcaccgt

SEQ ID NO: 12487 - DNA, 254 bp, Oryza sativa
  Clone ID: uC-osflcyp135f11a1
tttttggtgttttttttttttttttttttgtccaacccaacctgtttctgttttgattcgccgtattgtctatattgacaatatggatctcttttgtcatctacaaaggtgtgctcaaaaatgtgttctgggaccagacaacacaataaccgcatggctgaaaaaaagggggcggaatgataagcaggtgatactagaattacacgatggaaaacttgatgatcactacccaaccagggtaatgagagcttcca

SEQ ID NO: 12488 - DNA, 215 bp, Oryza sativa
  Clone ID: uC-osflcyp135f12a1
ggtacaacactcattttttttctgcccccacatccgatcacaaatcaaagcaaaaaaaaaacaaccactggggacacaatataattaatatggacctagctacaaaattcaccacgcccaatatttaaatgccctgttttttaattggggccactattttttaataacttcccggctagaaagctaactagcactggtacaaaaactgatctatg

SEQ ID NO: 12489 - DNA, 295 bp, Oryza sativa
  Clone ID: uC-osflcyp135g01a1
ggggggggaaatcacttattttggttatagagcaacactgaatcaacctatttacatgatcgctgaaccttggacatcttagaagtcactttggtagtacaatctgcatgctgcggacaaggtgcagataaaacaaaattactacattgtcaggcagacactctcacactcctatcttcacacactacactggccggggtaaagacggatccaactgagattttcactgccggtggccctccgggagaggaaccactctatagaacggcacagctttttgtggtagatttccatc

SEQ ID NO: 12490 - DNA, 232 bp, Oryza sativa
  Clone ID: uC-osflcyp135g03a1
ggggtcaatttttgttttttaaataaggtggagtaccctccaccgtttccaaggtttacatacaacaggctttacaaaatgttcggcttccaacatgggggttttcacttcaaaaaaacttaaactttgatcttcctcggggattccaaagacccgcggaaatgatatcttaaaccttagtttttgatcttttttttgggcctcaactggttgctggggccacacttttttt

SEQ ID NO: 12491 - DNA, 290 bp, Oryza sativa
  Clone ID: uC-osflcyp135g04a1
tcctctagtatctaacaaccttaattttttttttttaaaattttttaaatttttatatattttttatatttttttttttttttttttaaaaacaaggaaaaaaacaaaaaaaaattaaataaaaaaaaaaaaaaaaaatcttaaaaactaaaattgaataaaaagaaaaaaaaagggggcctataaaaaaaaactttaagaaaaaaatctaaaataaaccggacgttttaaaaaaaaaaaaaaaaaaaagaaaaaaaaaaagaaaaaaaaaaaaaaaaaaagtccatttt

SEQ ID NO: 12492 - DNA, 164 bp, Oryza sativa
  Clone ID: uC-osflcyp135g05a1
ggaaaaaaaaaccccttttaaaaaaaaaatcaaatttttttttaaacgggggccctttttaggccaagccccaaaaaaaaaggggggggggggtccccccaaaaattactcccaaaaaacccccccccttaaaaaatttccccccccccaaaaaaagagggggg

SEQ ID NO: 12493 - DNA, 265 bp, Oryza sativa
  Clone ID: uC-osflcyp135g06a1
ccaccaaaaaacacacttttccatctttctttcaagaggaacagatcaaaacttcattacagatctagacagatagtatatgatatatctgacccctgtgctgaatgctgactaaagatgggcaactcttcgggaggcttctgaaatgcaaccaatttacaaatttacatcaattttctgtacagtgttgcaaatgtgctgcttgagagggggggcacacagattttcttcagactatgacaataattggacgatttggatggat

SEQ ID NO: 12494 - DNA, 207 bp, Oryza sativa
  Clone ID: uC-osflcyp135g07a1
ggcaacggacagcttatgattaccctaaaatctgattatccccaaacaacaaaatttttcataaatatcgggccaaccaaacaaggcatcactttttttttttttgggggggggggggggggataaacattataccctccatgccctttttttcaaatatatcaggctccataatgggacaacccggttttaatccaatagtcaaaa

SEQ ID NO: 12495 - DNA, 251 bp, Oryza sativa
  Clone ID: uC-osflcyp135g08a1
gggaggcaattatgtcatcaaaataagctggagtactctccagcgtaaccaaggttaacatacaacaggataaacagaaagttcggcatacaacatgaggcattacactacaaaaaaacttaaactctgatcttcctgttgatttcaatgacccggggaaatgatatctcaaactctagttcttgatcttcttcttgggcctcaactggttgctggggccgcacttttttttgcggcagttgacagccctg

SEQ ID NO: 12496 - DNA, 182 bp, Oryza sativa
  Clone ID: uC-osflcyp135g09a1
tttttgggggttttttttttttttctcgttttcccctttttttttttttttttttggtaacttgccgggggacaaaaaaaaggggcccaccccacacgccagagaatccttgaccacccccccaaaaaaacgaaaaaaaaccccccccccacaaaacccccgctaaaaaataaaaacaaaaa

SEQ ID NO: 12497 - DNA, 239 bp, Oryza sativa
  Clone ID: uC-osflcyp135g11a1
gggagataatggcatgatggatacatttttttaccagttttgagtttatttacacatgaaatgcaccaacgaccctccaaaaaagtggtggtggtactttacctggggcagcttattagttttttagtacacacattttaacgagcgaaaaactggttgtactacacaattttttttgatcatccgttttcctgggaatttcccttgagttctctgccatgtggaatcaacgagcttgt

SEQ ID NO: 12498 - DNA, 150 bp, Oryza sativa
  Clone ID: uC-osflcyp135g12a1
aatctataatgtctaaaattgataaaaaataataaataatataattgtattattaaataccaaaaaaaaaaaaaaaaaacttttaagggaaaaaaataaaaaaaaaataaaccccaaaaaaatatttctccaaaaagaggggaaaccaaa

SEQ ID NO: 12499 - DNA, 254 bp, Oryza sativa
  Clone ID: uC-osflcyp135h02a1
gggcaaaaaatattttccacaccaggttttaattcaaacagtttgcccctgggactttcaacccccaatttagtttatcgaacaatgttaaattaacccaactaattagacctccaaggtgacaatgttcaaaagttgctggggatacattacataaccctgggaaaatagatatttttgggctaactagagcaaaactggaagacctcttccttggggggggaacacttgcttggcacaaaaacattgttttt

SEQ ID NO: 12500 - DNA, 329 bp, Oryza sativa
  Clone ID: uC-osflcyp135h03a1
tttttgcgcccttctttttctgtgctgcgcgtctaaaaggagatattgttatgcttctgtccattaatccacatagccccctctgtcaccgaattccaatacaaacaccatccttgaaatcgtgctacacaactgaaccagcataagtgccaaaacaaaatgctctttacaatgtgatgcgaaatttgacgcattcatattctacaaaaatactggtcaaagtgcagctattgcctattcccactgcttgccccacatgcatttccaaaagactgcatggagagttcagctcctccaaacaatatggaatttggtcagtatggatactg

SEQ ID NO: 12501 - DNA, 281 bp, Oryza sativa
  Clone ID: uC-osflcyp135h04a1
ggggaaattaaccaaagctagcttactttggaggaaaaatatatagaaaagggtctatcagcatccagttaaaacctcagtgcaaacatccacaagggaaatctggtacctacagctccttttcacctatatccattttcacatgtcaatctacaggaaagatcaattcagattgcacaacaatgttcagccaagccactcatccccccaaccaagttccaccaactagaccaggattctctagttatttcacgttcggcttgggtgagtagcggaacggg

SEQ ID NO: 12502 - DNA, 263 bp, Oryza sativa
  Clone ID: uC-osflcyp135h05a1
atcaaaacgcttgcgaatgatatcagataagtagagtcaacaagacaaaactgtatctgccaaagcacacctccccaactccacccaattacgccattatttctgggcaaaagcaaacggcttcccattcctccccttcaccagtctcaaaccataaaccccacaacaaatcctcctaagtgacggcatataagatgatgaaaacaaagcaggatactccagagtcgtcatggcgaacttcaagttgacacttctcatgccac

SEQ ID NO: 12503 - DNA, 262 bp, Oryza sativa
  Clone ID: uC-osflcyp135h07a1
aatcgggccaaaacacaatcgatgttgatcaaagagaccgtcgcaaagttgtagtactgaagaaagggtacacaacagtcacagctttctaaaacagtagtcttttggaaactcaaacacggtgtaagggaggagataagatgtatcttgggcctagatgtccatgggcgcggggtccgtgcccttgtcctcctcctgcatggagctcgactcaacctttgccgctggtgcctcctcggcagcctccatggaatcgattatt

SEQ ID NO: 12504 - DNA, 319 bp, Oryza sativa
  Clone ID: uC-osflcyp135h08a1
gcagctccggtgctgcgcctccaccgtcgacgacggcgtcgtctccgccgcggcggcccccaagccccgcctccccaggtaaacccccgcggtgcctctgtgccggtgtgccccacgcgtgggcgcgtggctcgtggtccagtggttaagcactttggctgcgagatgtggctggttgtgtaaaagttaaagagatcctacagttccgttcacctcgcgcagaagggtcgtcggtatgggttcaaaactcattggatgcggatcggccactccatcgcttagcgtttcaaatgatgacctttctaaaatagttgaaaca

SEQ ID NO: 12505 - DNA, 232 bp, Oryza sativa
  Clone ID: uC-osflcyp135h09a1
atgttgcaccaacgtgcactacatttttacaagggttttggcctgaaagcatttccggtataaccccgtatgattcagtgtggattcacgacccatctcatgctcataaaaggtggaaaaggatttgctgcctcggaaatctgaccaaactgtaacatggtaacaccacatcctctccatgattaactagccactagcaagatttgaagtcagggggacctatcattggccc

SEQ ID NO: 12506 - DNA, 267 bp, Oryza sativa
  Clone ID: uC-osflcyp135h10a1
aacatctcagaaacattaacagaagtagaatgataatatcatcgattggtaccgatgcacagtgaagcaaattgtactagtatggataatagtatcaacacaacttagggactttaaaccagaacacaacacaaccatgacacgatgatatgacagacgagcggcataggtataatgaagtccaatgctgcaccacagcacacgctcagagaccaccacggaggcgcaggacaaggtgcagggtggactccttctggatgttatagt

SEQ ID NO: 12507 - DNA, 97 bp, Oryza sativa
  Clone ID: uC-osflcyp135h11a1
aaaaacatattaaatctaatccttctttttattcagtaagagcttaaaaaacacaaacttaagacaccattataaaaaaaaaaaagggggggttatt

SEQ ID NO: 12508 - DNA, 266 bp, Oryza sativa
  Clone ID: uC-osflcyp135h12a1
gggatcatcttaacaacataaatttaactcaacataggtaacaggcaaaaccatattccagagactagagtagagtcttaaacatttcaatcacatccatttcacaatgtcaaaaaggcaaggttcagggctaagttttaaaagactaaacttgaaagtaatgcagtagctagatagatgtagaacaagccaagtagctccattgatagggtggaaaagagaacaccgttccgaatcggtccggcgagcgctcagcggtacgactt

SEQ ID NO: 12509 - DNA, 242 bp, Oryza sativa
  Clone ID: uC-osflcyp136a01a1
ggggcataaaatgccttattttaccatcacatattgagatgtttatgaagacgtcaggccaaagccataattaagataactcactccacattatttgtttttactggagctgaaagggaactttaacatttaggaaaaatgggagtagcccattaccaaaaacaaagttcatatttgaagggcatccgcaatcgaaccagcaggggtcaacacctaaaatggaggttgttggttgatggctt

SEQ ID NO: 12510 - DNA, 279 bp, Oryza sativa
  Clone ID: uC-osflcyp136a03a1
aaagtgaacttattgttttaagatggagtgtataccgagcacgaaaatacaatgatggcatgaatacctggatataggcatccccttcattctaaaataaacaaattttgtgtatggagggagtagagcctcgtcagattgcaactgttattattataagccgaagctgtaggtgcactgggtgatgggtcaacaccagagaatcaagcataaagaaactgaacatgtggatgatcgagaattacagcagccacagtatcccagaagttccataacatt

SEQ ID NO: 12511 - DNA, 281 bp, Oryza sativa
  Clone ID: uC-osflcyp136a04a1
acagggcatgcaaaactatggtattacgagatcatttaagtaaatgaaatacaacgcccttggcacaccaaaaaacagaagtacggatgtgccaagatgattacaattattctgtaatgggatcatcgagccctggctgccgaatgcacacgacaattacaaaacgctcagctaaatatatctggaaggtttccgtgagcagcctcaaagatcctccggaccgttgatgtccttgttctcaagcacggctccatctgggatctccaacttccctgacttgg

SEQ ID NO: 12512 - DNA, 175 bp, Oryza sativa
  Clone ID: uC-osflcyp136a05a1
accccgaccccccccggggggggggggatttttggggggcccccccccccccccctgggttggcaaagggggggggggggccccgggccccccccgggggccccaaattccgggggcccccctggggggcccgggggaaaaccctttcccccggggggggcccttttggggggcc

SEQ ID NO: 12513 - DNA, 270 bp, Oryza sativa
  Clone ID: uC-osflcyp136a06a1
ggagggaaaccaactccaatatatatacaaacacaaacaacgtacccaatttttactgttaaaatacaggcacaatgcctggtatcacacgttattaagtagacagactcgataaccatgacacggacagggactttttgccactggtttacgcacggttaatattacagaccacacatagagagacggcttagctatttgcaaataagcttgacaagatagatgatgctccaaaaggatgcgatctcagcagttgagtacttacgctgg

SEQ ID NO: 12514 - DNA, 281 bp, Oryza sativa
  Clone ID: uC-osflcyp136a07a1
gacaaacactccctcagagagtactagatttgcttccatttacaatcctgagggcctatatatttaactaaacaagcaaagaaagacacagaatccctttttggcagattaaccattcgccatagcaaactacaagtaacaaaataagccaggagtcccaagacatctgatttacaaaaatgaaagctagtctaactgacccaactggccttctcagaatttttccccccttcatttacacaccttcatagaccttgtatatacattcaatcctgtacagt

SEQ ID NO: 12515 - DNA, 214 bp, Oryza sativa
  Clone ID: uC-osflcyp136a08a1
aaaaaaaagggtgggatagcatgacccattggggcactgggggaccctgggaatatccctttaacctccccccacaaaagacccttttcccataatcccagatcttgggctcacatattttaccccctgaacaacaaaggggggaaaaacattttatttaaaagcctttgttcccacttcccaaatgggacatattctgcaggggaaccccgca

SEQ ID NO: 12516 - DNA, 293 bp, Oryza sativa
  Clone ID: uC-osflcyp136a12a1
ccaaccaaaatgaggccgtgaaatatgcatactgatttcatctcaactgagatgagcagattacaccgccaaatcgccaatacaacccatccagcctctctgaagtttgagctatttacaggtgctccccccggtagcacaaccaagcatgcagctgtctgaccattttttcaggctacagctacctatgagaaaagcttttcaacccaccccccaaattatcaactttctcaatgtgcaaaagtttctttgtgaccatgcggtggactttcctcagcctcgcgcctttgtcc

SEQ ID NO: 12517 - DNA, 281 bp, Oryza sativa
  Clone ID: uC-osflcyp136b01a1
acagaagaacattttattgaactgtttaaggacttgtacaaacaaagaatgctaccgcatgcagatacatgtaaaatacaacccaatgtgagcatgaataaagtttaaccggctctacagtgtgcagagagaggcaacttccttagtacagggtgttgtatgtgcagaatgttgcaacgagggaggctatgcagatgacaagaggtggcagcagagtgatgttgagcaggaggtccgggcctagataacccgccgcggtaatcgtcgcgtctgcaactaca

SEQ ID NO: 12518 - DNA, 281 bp, Oryza sativa
  Clone ID: uC-osflcyp136b02a1
aagcaaaaaaaacatcgatatatcgcttatataaagtaccctcttcagtttcagaactgacaacattatcgccgcacactttaccggacctgcagcagaaacgcagtattggcaagaaaacgagaacagttgatacatacacgtttattcggggagagatgtaaaaaggctatcaaacaggaggccataaagaaagttcatgggtagcctcaaaagcattctagaatggctcttgaaaagtttatgtgatgacggtgggagcagatcggccagtgtactct

SEQ ID NO: 12519 - DNA, 268 bp, Oryza sativa
  Clone ID: uC-osflcyp136b03a1
agacaattcttcttgaggcctcttatttgcgccagatcacatgggcataaccccaaatgtcacgatcgcaactttattacactcttccatggtgatgtaattaggtaaagtgagagaaaatgaaaaaaaaacaaaacaaacaggggagatgattcgccggttagttgaccccgtagatccacttctcttcgttgctggtgtaagagaccagctccctgggctcaaaccagagaccaatctcagcctttgcagtctctgggccatcgct

SEQ ID NO: 12520 - DNA, 155 bp, Oryza sativa
  Clone ID: uC-osflcyp136b04a1
tttttttgggggttttttttttttttggggttttttctttttggtttattttaatttagttaattattatttaaaatataaggggggaaaaagggggaaagaagagttggggataatgaagttgggtagaatagaggggaaaggggggggcccac

SEQ ID NO: 12521 - DNA, 282 bp, Oryza sativa
  Clone ID: uC-osflcyp136b05a1
aaccaaaaatttgaatcgttttattttgtgacggaagattccatccagtacatctcacaagtaccttgttccagaccaaatacatatatattagcataaagcaaaagagggttgcgttttccagcgcacttcaaagtgccagcttcactcgttgctgggttctccgcgctccagcttacaacggaagcaagtgttattcaccgtggatcgttatctaatccttattattgcataatatagcgtccatcttgatgagcttcgtcttggtgcatctcgtattta

SEQ ID NO: 12522 - DNA, 275 bp, Oryza sativa
  Clone ID: uC-osflcyp136b07a1
acgtaataccatccattttttttattgccgacgaatttatcagatatgctctagatacatatcttgtgtgtatatagccggagctttgttttcacatatcctcacccaacgataattgtagtactcttacaataaaaccggtcggagagggagggaagagattattacatatgtgttaagagcagaggccattgagatggtacataaccaaattgtaaaataaaaatatatagcatattatatattgatatatcatcaacatagcccaaaacaaa

SEQ ID NO: 12523 - DNA, 279 bp, Oryza sativa
  Clone ID: uC-osflcyp136b08a1
gaatcacccaaatactacggcaaattctgccagtcatcgcgagggttgatttttgtctataacagaacgcactgtccgtgccacagaatactaacaggtatagtggacaggacatagtgatatacatcaaaccggctgacaatgaacgatgaatcattttgagggcaagtggcaaaatcaaactgcaatccactttggtggagagcataatcttcataggccgtaagggtttctggtacttgaaacaccactgatggaggttcatagtattaagacaca

SEQ ID NO: 12524 - DNA, 278 bp, Oryza sativa
  Clone ID: uC-osflcyp136b09a1
accacaactttttaaggatggaattgagtagcaatactttcaccccaaaatacagtttagcgacaatatcttagaaaagccgcttgctttgccgccatggctggcaagctgagcagagcagctaacacaaagaacacgagatcactataaaccaaacggcaacgaacgaagaaaatacagggtcttttttgtctgaagatacacgaagcggttcgttttcttttatttttagtctcctctcctcctcgatgatgggtgtatggcaatggcaatggcga

SEQ ID NO: 12525 - DNA, 212 bp, Oryza sativa
  Clone ID: uC-osflcyp136b10a1
aaaaggggttattttaaagttaataaaattggggaagcccaaatttaattacaccgtttttaaaaatttgtaaggcaaagagagcatacataagcataaaaattatgaccaaaaccctattttgaccaaacccaaaaaaagcaaagttaatggacaaggaaatttaaaaggggtaaataaattgtttaaagccaaggtttttggggttagcc

SEQ ID NO: 12526 - DNA, 274 bp, Oryza sativa
  Clone ID: uC-osflcyp136b12a1
tttttggtggtttttttttttttttttgtttttttttttttttttttttttttttttttttttttttttttttttttttttttttttttaaaaaaaaaaaacccgggggggggggtttccaaagggggggaaaaaaagcccaaaaaaaaaaaaaagccaaaaaagaaagaaaaacaaaaaggggaaacaaggggggacaggggccgcctacggaagaaaaaacccaccccaggggaaaaaatttcaagggctctctgccccttgagaagggcac

SEQ ID NO: 12527 - DNA, 277 bp, Oryza sativa
  Clone ID: uC-osflcyp136c01a1
gggatgaaagcagaggtagattatattaagaagcctggcacgcatgaggagatggagcaggagtacatgatgagatcaccatgatgatagatgatccatccaagctagctagggatccatccaacattgatcgacacacgcacacactgacaacgacgacgacggttttatttaggcgtcagagcaaaaggcaaggcctgcctacatataagctgggtactaatgcaagcaaattaaggccttgatcaaagctttgatcgacagtagcagcatccat

SEQ ID NO: 12528 - DNA, 242 bp, Oryza sativa
  Clone ID: uC-osflcyp136c03a1
ggattcaaatgcatcgacatacatattcattcgattaatcaatttgacaacaatttggtttcaaacaatagcaatacaaatatcataaacagctacaactgagatcgaattgaacactacttcctacaagtacaggcttagaaaccaaaagccgttcaaccagacataagtttagatgaacggcatcgcaagcagtccaaaaaaagggacttactaggcaaatttcaatgtatctcttttgc

SEQ ID NO: 12529 - DNA, 267 bp, Oryza sativa
  Clone ID: uC-osflcyp136c04a1
gagggtcaccaagtgaacttattcccaaaatccaataatacatggttcgaacatgggctggctatatatagctcctggagtttagtcgtgacagagaagttgcatgggccatacatgattctgtcacgcgtcgttattactacggcaagcctagttgccatcccagtatctaaacaggagccgtcacgagttacaggcccgaagcctaaacgtgcacggtgatcttgttcgccttctcctcgttgctgtcgagcttgatgcccttgt

SEQ ID NO: 12530 - DNA, 274 bp, Oryza sativa
  Clone ID: uC-osflcyp136c05a1
accaatgcagatgcatccatcagatcaacgaagtgcattgagtggaacaacaaaatattgtacaacaagcatgggtacagtgaaggagatatcaagcaagtgcactgtgcacagctattggtgcagcattcagtgcgtgctcctcatcagagataccaggaaaactacttacatgagtaagccaatcagggggggggggggggctttgcctatctaaattaccaccaaaataatcattagaaaaggagaaggtctttgtttagcgggtccaagg

SEQ ID NO: 12531 - DNA, 205 bp, Oryza sativa
  Clone ID: uC-osflcyp136c06a1
gtgggtggtggtttttgtgttggggggggaaaaaaaaaaaaagggggccaaaacccccaaaaaagcccccccagggggggggggggggggaaaaggggggggaaaaccccaatttaggggggggggggggggcccgggggaaccccccccggggtggggcccccccaaccccccgggggggggggcccggggaagggggcccccc

SEQ ID NO: 12532 - DNA, 262 bp, Oryza sativa
  Clone ID: uC-osflcyp136c07a1
gaatcaaatatactatccagtttaaaagataataaaaattgatcgcaacacatccagttactacgatggccattgctgtactcggggcaggagcaggacaaataactccatacactggcatgaacaaaacgcatactgctacaagattctcattgtaagtaagtcggcaacctaagctgattctgaggtctcccattacatgacagccggccaagcagcactgcgactcgcaagaagttccagctaggagttatacagctaa

SEQ ID NO: 12533 - DNA, 270 bp, Oryza sativa
  Clone ID: uC-osflcyp136c08a1
cccaaattgaagatgaatatatgaacaacaaacaataatccccataaccttatttcaagatatgaacaacacatacaaatccttaagattaaaaaaacatgaataaacatgaacaaatcacatgagtaatttattatcatcgccatcatcactgcttctgcttctggtgtgggaggaagaacaggagggggcggcgtcaccatcgcacctcccagatcggcccatctccgacctccaacactaatggatcagacaagccaccgccaccag

SEQ ID NO: 12534 - DNA, 195 bp, Oryza sativa
  Clone ID: uC-osflcyp136c12a1
ggggggcaccaagatttaaataaaaaaaaaaccccggaaccccccccctggttcccaaagggccaaagggccccggaaaaacaaaaaatggtttaaaggaccccccccccctttaaaaaaaaaaaagggatgggaaaaaaaatctttccccccccccccttaaaaaacaaccccccccgccccattaaacccccc

SEQ ID NO: 12535 - DNA, 278 bp, Oryza sativa
  Clone ID: uC-osflcyp136d01a1
gcaggaaaaggcagtaagcccccatcttactcaagacattcaatagattatccttacatcgtcccaagactgctcatgataataacaatggtgcgcacaaacgacaaagcaaacatctcaacacatgtaaaccccccatctagatgaggtagaatggaaacggaatcaaatgatcgaacgcgaatctcgctaagttgtgagttccatgatggctgtgacgatgtcgccattggcagccttgagtgccttcaccgccttggacctcgacacggtggcct

SEQ ID NO: 12536 - DNA, 260 bp, Oryza sativa
  Clone ID: uC-osflcyp136d02a1
gtaagaaagaattgcattacttttggggtctgcgatactataagcaacagagttttgtaccagtctaaaagcagccttcttttactcttgccacataaacatattcagtttaactacacttttagcaccctgtgtggatgtcatgtgatgagaggcaggaccgactgacttgttcactcacgggattattcaagctgccaggcctctttgaagctatctcggacacattctctgatagcccattggctgacacgaatcat

SEQ ID NO: 12537 - DNA, 207 bp, Oryza sativa
  Clone ID: uC-osflcyp136d03a1
aacccaagggggggaaaacattagcagaaaaaccgggtccaaaacaaggtcaaaaaactgaacccccatgtttgggggcaaaactttgggaaaaactggggatttaagaggaaacccccccagggaaaaaaccccttcaacaggggaaggggggcccccccccaagcagtttgacaaaaaaacaagcttggcaccccaaaacatgga

SEQ ID NO: 12538 - DNA, 283 bp, Oryza sativa
  Clone ID: uC-osflcyp136d04a1
attaccaactacttcagcttgcataattctcaaccttaaaaacattatgttgcactgtttcagctcttctgtaaggtcgagcaacaataaactgtcataatgctggccattcataacctactactcctctcatctgccacattgacgtacgcaacaattacacacaggaaaagaaaaaacgtctcagatgcaactgtgaaattctgcctgcctccagtgtaaaaatggttgccaactgccaaaaagggtactcctcttcttctaaactaaaatccaaaacctg

SEQ ID NO: 12539 - DNA, 276 bp, Oryza sativa
  Clone ID: uC-osflcyp136d05a1
aaaataaaaattctataggaatgaaatcttttaaaattcctatgaatttcctttgaatcaaatggggcctagtgcttacctttttaacggaccacacaatctcatcagtaacgaaagatattagcaaaaacacatagcagccaccaacaacacatactcctgctacgtgttcttagcactacgaaagatattagcaaaaacacatagcgaacgactgctccaaaccgggatgaagaaaagacatgatacattcaattctgaaatctagctacagca

SEQ ID NO: 12540 - DNA, 279 bp, Oryza sativa
  Clone ID: uC-osflcyp136d07a1
gcaaagtaggtaggggtgctcaatcatagcagtagcacatggtgtccaaaccatttacacgaatagcattaacacacgtacaaagacttgggcacaatcaaatagagtttatgtccctaggagatttggcgaagctaacataacaagacacctttttttttaactttcacaatagcaaaccatgtagtacagaccataaggcagactccatcttaaaactgttagacttcttggttttcagaaaattccctacagtcatttgatctccatcttgctttt

SEQ ID NO: 12541 - DNA, 276 bp, Oryza sativa
  Clone ID: uC-osflcyp136d08a1
tttttgtggttttttttttttttttttttttttttttttttttttctttttttctcatttttttttttttttttttgggggggaaaccaaaatgcccaaagcaaacgctggggcgggggaaaaacccccacccccttttgagggggagcccttaaacccaagcaaagcccccctggttgggttacaggggaaccctgaaggactagggccgcccaaaattaaagggggggggcccccccgggggcaaaaaaattttacaaaaaggcattgcccccc

SEQ ID NO: 12542 - DNA, 278 bp, Oryza sativa
  Clone ID: uC-osflcyp136d09a1
gagtgctaaaagtggtgaaactccatccaactacccttaagtaaaaagtagaatagccaaaaagggcaaaaaggtgcaaagatcaagttgcagttttctgcgatcaacatggataaacttcacaaaattgtaactacggaagacggttgataatgagtaaacagaaagaaataaatttaccatcatatagttagtgaagggcaggattgggtgtccggaactgataaaaatgtggtgcagcttccgtaagccatgatggttcaatggcaataacatta

SEQ ID NO: 12543 - DNA, 280 bp, Oryza sativa
  Clone ID: uC-osflcyp136d10a1
ggtgtatagtaagttgataaattaaaatgcataatacattctttttcatatcctccacatgtacatttcctcttaaatacacacgcacttgtctaagtgtgcttcaatgccttgacgaggcaaaaaaaaatgtaccatacacaacgagttaacgtaactggtggtacctgaccgtaaaattcctcgcaaactaaacaaatatatactagcaaattaagtgtggagactcgatgtgatgatggcatatgatacgtgatcgatcatttgacgaagcccatga

SEQ ID NO: 12544 - DNA, 145 bp, Oryza sativa
  Clone ID: uC-osflcyp136d11a1
gcatgccgcgtaccttcttgatcctctatttggccgccttattttttttttgacacaaaaaataactcggatatcccaagacttaccaaattcccttcatttcaatccttcttctactcccttaaatctacaagtaaaccctgca

SEQ ID NO: 12545 - DNA, 257 bp, Oryza sativa
  Clone ID: uC-osflcyp136d12a1
acgacaaaccacgaacttggatattaaagatgccacaaagaaggttcacataaacaacacaggtcacagcagcgaaagctacaagcaaaccctgcataatcgaaaagcaaatgtttttcaaaaccagacacacaaactgatagatagaagcccacacggacagatcataggatagcagcagtaatcaagcattgccaaggcaccaggcaagaaccctgaacctctctagtactcgtcaccctcatcaccctcgtcac

SEQ ID NO: 12546 - DNA, 282 bp, Oryza sativa
  Clone ID: uC-osflcyp136e01a1
aatgagagattttgaactctgaatgttaaggtgcataaacagtcagtacagccattattaacctcgccagaagttttaggcccatcattatatgccagacaaaccattacctatatgatgagatcagattaaaaagccctaattctcatcgtgctcatttgctcattacatctgcattgcaccatccaagatccatatctgcatatccatagctgatacagctccatcgtgaaaacgtttattcctctacaaggttttgcatgctactactaatgcactata

SEQ ID NO: 12547 - DNA, 276 bp, Oryza sativa
  Clone ID: uC-osflcyp136e03a1
gatagaggagatcaaactgtgtttatagactgaactgaaacttgattatacagtttgccacgactcctaactcaagcccctatgacgtggatacatatgtacaaaagttttgacacctgagaaaatgatctagtttccctacatggatagctaactagtagctatctcatgtcatggagtgttgccaagaaggcgtccaacttgacattgtcacctcgagacaagaacttgatgcagatgggcgccctggcacccatgagtgtcagcatggacagc

SEQ ID NO: 12548 - DNA, 243 bp, Oryza sativa
  Clone ID: uC-osflcyp136e04a1
gaaaaaaaaaaaccgaaaaaaaaaggttttttaaaaaaagtgcaaaaaaaaaaaaaaaatgcctgttgaaaaatgcaaaaaaaaaggtaaaataaaaagcaaaaaaaagtttgtttggcagcaaaaaaaaaaactactggaaaaaaggaaatttttaaatcgtaaaccttttcctcgtcataaacatcaacaccaactgaaaaattttaaaaaaataaaattttcaaaaaaaatggccttcct

SEQ ID NO: 12549 - DNA, 271 bp, Oryza sativa
  Clone ID: uC-osflcyp136e05a1
catggtcaataccgctagaaagaaaaattgattgttacagtaaaatagtagcacagatgaattcaatgaaaatgaaccttggctgacacttgcaaccaaaaaaaacaaacttctccctaccttggatcattacaagttgtggagaagctcacactaacagacagaagtaacttctcaaaattctctaattggaactagactctcagcataattaaatagatgcaaatcccttgcttccttctccaaatatggttcatagcaggtgaagtct

SEQ ID NO: 12550 - DNA, 256 bp, Oryza sativa
  Clone ID: uC-osflcyp136e06a1
aacagaatattttacagttcattaatcattgttagcaacaagctatcacattgtttgtacatgtgtataccaggatcccaagaatcatgtatgggtgtactgtaattaaggagcaatacaacagtaacaaagaatcaatagactggatattttttttctgtatctaaatgtatttttcagttcctagaaatactcacagatgggagctagaaatactcgaagtcgccggaggaggaatcgctcgccgccggcttgg

SEQ ID NO: 12551 - DNA, 204 bp, Oryza sativa
  Clone ID: uC-osflcyp136e07a1
agagaaaaaaatttataaatatagcatgttttatacatactcatacgtatgcacgtcacatcctaatcaacatcagctaggtaaattaaccttgccaagccatttagatacaattatcagataatactaggttttatacaatttttgcaggtacaccaatgctctcgtacaaaatcaaggcgtagggtaggggcacagtaattg

SEQ ID NO: 12552 - DNA, 274 bp, Oryza sativa
  Clone ID: uC-osflcyp136e08a1
gacagcgaaaaatgaggagatatattaattacggtgtatcgtttcaaggatgagttcggatgagtgatcgatcactctccacatacttggatcggtctctctcgcacacgtacaacgacaaggggagacggtacaacagcagcggcaacaaacacgcacgtacacgggtagtactacagaacgcgccaacgtcatgggcgattggtgagaaaacacgcacacctactagtactagctttatccttttttagtgtacaccacacggccgtcgacc

SEQ ID NO: 12553 - DNA, 277 bp, Oryza sativa
  Clone ID: uC-osflcyp136e09a1
gttaaaaacaagaactcaatgatcctatgcttcatggatctgcattataaaggacacatgctttcgaagttccgagtacttttgtgcagcacaataaatgtcactgcggttccttattaggggtaaaaggagaaaaagaagacaaaaaaacatcgctcatcagaagatgtcacccctgcttgtaatcacgtcctggctacagaacgggcatatagaaaccagaatccaaaaatttaacttgtacagaacttaacaatgaagagatcttatgaagccg

SEQ ID NO: 12554 - DNA, 266 bp, Oryza sativa
  Clone ID: uC-osflcyp136e12a1
gaatgaaaatatatggaatcaacacctttgagtaacttgtagtcggtaagtacacggtaagcgcaattaagatcgtgtgcaagaacttgtagtcgatcttctacacgctgaggtacaagtcgatctgcaggacggcgttgttggtggtggcgttgaaggagtgcgtcctgaggaggccgtacccggcggcgccgcggagcacgccggcgccgccgaccaccggcagctccctcacttcgtcgaggatggcgtccctggcgagcacc

SEQ ID NO: 12555 - DNA, 243 bp, Oryza sativa
  Clone ID: uC-osflcyp136f01a1
ggaacttggccaacagaacgggcacaattttgaactaagctaccgtacagaattcagtcattttgtaacatacactccccaaagctaaaagaaattaatgtaaaaagaactacagggctcagttttgaaagagacaacctcccccagtaactagaatgataaacagaacaaaatggggaatggcaaaacatcaagaaatggcaataaagcaaataataacttacatggggggatttactatat

SEQ ID NO: 12556 - DNA, 281 bp, Oryza sativa
  Clone ID: uC-osflcyp136f02a1
ataaacttatgcattctaattaacattataattggagcattgtgtagcattgcactgatctgttttcaaataacagacaactttgactagctcactactactaaaaggatttttttcgtgcggtcaaaaagttttttttccatgcggaggtcttgcccgtctacaccctacaccctggtgtctgtgaaaataaatatttccgcatgcgggcagcctaaccgcacggaaaaaataatcttcacatgcggtcagtttaagtagaccacacgggataatcggat

SEQ ID NO: 12557 - DNA, 282 bp, Oryza sativa
  Clone ID: uC-osflcyp136f03a1
agattgatgtgggtctcttatttatctactatgtataaatacataagtacacatatattgcctttacacgatctcttcatcgatctctgactctctttttacagaactagatcaggctagctgcgtgccatgcatattctcatgtcgtctatgcaactttatctttttctcactacatcaacaaaggaagatttgaagaggagatgggcaagaaaaaagtagtagattacaagcagggactagctagttacagctgctgatgctgctgtcaatgtgcaggga

SEQ ID NO: 12558 - DNA, 281 bp, Oryza sativa
  Clone ID: uC-osflcyp136f04a1
aagtgccaattaacttgttaccacatccaaaacggaaattgttatacatggacggtcctacgatacagtgacagatacagacatacagtacgtgcatcaaacgaaattattattcccctgattaactgtttgggggagaaggtcgtaagagagcacgcacgtacttagcaaaatatagatcagggattacattacattacattacatatgccctgtaattactggattacaggacactgtttgcattggcttctctgaagcctgaagcctgaaactgaaca

SEQ ID NO: 12559 - DNA, 276 bp, Oryza sativa
  Clone ID: uC-osflcyp136f05a1
caaaaaggagtttaaataaaatcaattgcaaaaacaacagcctttccttgtagcctgcattaaacacttaattcccatggcttgctgagtactcctgtactcacccttgctctatataaataaccccccccagttgctgaagaagatgaagtggatcccgctgacgaggagttcttccaggagcaagtcggcttcgatgagttttaagggtttcggtctagttcccaagtcacgcctgtgatgattggtccaagtcttggcttccgctttcccttt

SEQ ID NO: 12560 - DNA, 283 bp, Oryza sativa
  Clone ID: uC-osflcyp136f07a1
gacaggcgaaggtatgccatctcaagctcttgaattgatttatgttttacaaagctgaccgtctcagattatgctcccggaggccggaattacatttataacatacacaataagggtagcaggtatataaagcattgcagtaggtagagtgaggacagaaataaatatctccacttgacgtcgaataagcgtagagcaatcaagtgttgaggttctggaacagctcaggcagatgggcgttcgtgagcttggtccggcgtgtgatctcacgctgtttcttctt

SEQ ID NO: 12561 - DNA, 278 bp, Oryza sativa
  Clone ID: uC-osflcyp136f08a1
ttttttttttttttttttttttttttttttttttttttttttttttttttttttttttttttttttaaaaaaaaactttttttttttttttttggacatttgtttcaaaaaaaattattacaggtttgcgcaaaaacaggaccaacggaccctatttttttcaggggaaaaaaaaaaacaatttcgaacaggaaaacccgtaaaataaatatacaaccatatccaaggttttttggaccaattcgggaaaaggaaccgggcacttttttcccgggttg

SEQ ID NO: 12562 - DNA, 278 bp, Oryza sativa
  Clone ID: uC-osflcyp136f09a1
attataaaatgacttgtattatattcccaacattaaagtttgatattcggatacattttgctcactgtggcagacaaagcagaccacctagagcccttttattcagaatatattcaagataataaagaacattggtcatagcatatactagtactatatgaatagtctggctggctgcttcacaaagtaacagagtgatcgctattggagttttgagtattctttaatcttcagtgcgcttccctcatcagcagctcctcatcttcttaccctctgtg

SEQ ID NO: 12563 - DNA, 279 bp, Oryza sativa
  Clone ID: uC-osflcyp136f10a1
cagaaaagacaaaccattaataatattgattggtaccatcagagaataaaagtatatcataaataagatggttaatatcaagaaaacacataacccataaggcacatacaaaagttggtgatttctcaacctggtgataacaattgagaaaactattgagtctactacagaacgccaaattagaacgctggatgcaataatatgtcaagattgtcaggttcaccgagaatctttgacgtcatcagaaaatttaagctttgccgggtcatgtaatactta

SEQ ID NO: 12564 - DNA, 269 bp, Oryza sativa
  Clone ID: uC-osflcyp136f12a1
ataattgtcttatgtgactatatgaggatgtaaagttgagcagctgttctcatcagatatcaggaatgatttcaagataattgccttttgtgacctcaataaaattgcttacagagaacgaagattacaagtctgtggtgaggagcacataatttgcacagaaaataacagagaagggccaatacaaactgtggaatgtaaaacttttaaatgagtctaacaacaaggttgtgcatactctaacgctttgagaactgcgggcgcttgcg

SEQ ID NO: 12565 - DNA, 279 bp, Oryza sativa
  Clone ID: uC-osflcyp136g02a1
aataatataaatatatcgaaaacagttggttaaacagagtagtcaagagtcgatcgatcgatgtacacggagacaaaatcaaagacctctctcatcacttggattaattaatactagtaatatttagagactcttgggcaagcatagaaataattagcaaatgaggatggtgatgcaggaggtgtagaggctaggcagcaagggaggggtggtggtggtcagagttggggatggtctccttgtggagatgaccgtctcccttggggacgatgagaccga

SEQ ID NO: 12566 - DNA, 239 bp, Oryza sativa
  Clone ID: uC-osflcyp136g03a1
ggcaacaacaacagaccattatttatattcagccacggtttaactttaccggggaagggggccacacttacataatccataatgacttggaccaaagctactgatgctactgggcacactggtgattcagctttcaaacaagcaagcaaaagcagcactacttaactggctggctagttgcagaagggggagggggattaatcacccaaacctgaagcagctcagttgagctgagcggt

SEQ ID NO: 12567 - DNA, 278 bp, Oryza sativa
  Clone ID: uC-osflcyp136g04a1
agggatcacttattcattatagttcttccatgctgctctaccacagcaaaacgtttcagacaccatcaaaccagacttaaggatacacattacaggtaaatagtacacaatgaaacgggacacgaccaaggaccagaccagacaaccatagctccattggggaagacaaataggcagacttgtgaaccctagaacagcagcagctccatggctgaggacttactggccaccacggaggcggagcaccaggtggagtgtggactccttctggatgttgg

SEQ ID NO: 12568 - DNA, 262 bp, Oryza sativa
  Clone ID: uC-osflcyp136g05a1
gaaagaagataaacgagctttattgatttggaaatacatatacatatgtactcaaactttagaaaaataaaatgtaagaaactatctagatgaaggttcaccaactatactttttcccacaaatattatatacgtaatatactcaaaatcgtctggatatatacctctgcagcaacatgcagacatggcatacggaatgctttatttggttgatgacatatttcacaaaataaccatagaaaattaattattggcttcccca

SEQ ID NO: 12569 - DNA, 234 bp, Oryza sativa
  Clone ID: uC-osflcyp136g06a1
accaaaaaaatgagtaggatttggccacatataatcgccaagtccatacaataagacagaaaatcgatgagcagctttacaaaaagggtaagtctactttcgactaaataagagttaagactccaaatgcttggtgggtaattggcaactcgtaaccaaatgggagttagggtgaaaaaaaaaaaacaaccctactcatttttagctatcgaaagctggatcaaaacgggagct

SEQ ID NO: 12570 - DNA, 282 bp, Oryza sativa
  Clone ID: uC-osflcyp136g07a1
gcaagttccgcaagggaccgcataactgcaaataagcctggagctcaatgcttacatggcctgaaaaggtggccatactctgaagaatgattataatgtatacatatctatgtgctgagaaatataaaaaactataggacgagaacagctaaaatacaacagaaaaaagaacatcttgaggccaaaggaagcactgagctttacaggaggctcgccaatccttgctaatagttggtcaagattttatctggtgatacaccatctgctacaagggctgatgtg

SEQ ID NO: 12571 - DNA, 212 bp, Oryza sativa
  Clone ID: uC-osflcyp136g08a1
gggaccccccaggcttttattcccaaagggaaccccaaaaaagaaaaccctggggttacatttaaaaaaaaccccaaattcccatcccagggccccccggggaaaaaaaaaattttaacttggccccataaaatggcccaaaaaaggggggtaataaacgggggggaaattggggggaaacgggcccaaaaaaatccccccaaaggattttt

SEQ ID NO: 12572 - DNA, 272 bp, Oryza sativa
  Clone ID: uC-osflcyp136g10a1
aattcacaacaccatatttcattgatcaggttcagaacctgcacagaaatacacactaccggtacagatctcaccttctctccaatactcgtacatccatccacgcggtccacacgaatacgtacatctatacggtacacgtacgtacatctactgcaccgcgtacacacacgcacactctcctgcagagacgcgcatcgtcgtcaacctagctagcttagctgaaggcgatgcgtcgccatggcagcacggcggcggcggcgctcacttgc

SEQ ID NO: 12573 - DNA, 148 bp, Oryza sativa
  Clone ID: uC-osflcyp136h01a1
gggcatgaattgtttcaaaaccgatttattcaaaaccagtgttactgaacaagggtttttaacaaaaagggggggcaaaaaaaaacaagccaaggaaaaaacaggggttgatgccccccagggggaacccccaccaaaaacaaaaagg

SEQ ID NO: 12574 - DNA, 293 bp, Oryza sativa
  Clone ID: uC-osflcyp136h02a1
atgtaaatgggtgatttctattaggtaaccgttcagcaaactgtttggtttgggcagcagatgagttcagcaaaggggtcaggtgcttgggacccgagtatctgacatggcatacatggaaagaaaaggtgctgcttcttgtcttaacatgaatagtagaaggtatatatccccgaagtactggttttagaccatgtatgttaacatatgtcgtactattgatgagaaactgttcagtgaatcatgtagcctctgcaagtgatcagcttgagatcactttcttaagcttttaa

SEQ ID NO: 12575 - DNA, 282 bp, Oryza sativa
  Clone ID: uC-osflcyp136h03a1
gaaatcgggttcacatatagctccacaacaatgttttggaaggacacatgtatgccttattttgccactggcttattacaacaaaataaccacaggaaattaattgtttgcttgctcacgcatagcatgatctctttcaagacaaaattatttagaggttaataattatcatgcaacccaatgcaagaatactcatgtctattaattagacgttgatacccacttcttgtattcagagccgggccgtaaaggctttcgggggatgacgtcgtccgacgacac

SEQ ID NO: 12576 - DNA, 309 bp, Oryza sativa
  Clone ID: uC-osflcyp136h04a1
tttcggccgcgtcatgccgatcgagagacgtggcaaggatggcgcggaggacgtgcgccgggcggctcgggtgggagtgcggggacgctaggacggcgtcggcgacgatggcttggcacgaggccgggtcaggggagctcgcgcagaggttcgtggccgtcggggagagtaggaggaaggcggcgcccgcgcagaggcagagcacggtggctaaagagagcagcgtgaacgatagaagtttgcatgggtaggcgtttctgtgcgaggggagaagagaggagaggcttcgttctctctgacgcatggtgt

SEQ ID NO: 12577 - DNA, 230 bp, Oryza sativa
  Clone ID: uC-osflcyp136h06a1
ggatggaaagggcacaaaagggcccaacaagaacaatgatccaaaaaattccctatttattgggggcgatctttttctaacttactacaagatattggaatctttacaatacaatgcgctaaccggaaaaaagggggctacttttgcaccgaacgtgttctaaagagtttctattggggttctacattgatgcagtttcctcacatttttaagggtcagggtcggcccaa

SEQ ID NO: 12578 - DNA, 295 bp, Oryza sativa
  unsure (1)..(295): unsure at all n locations
  Clone ID: uC-osflcyp136h07a1
tttttatggttatggttgatttttattatgtaatttttttttttttttgtttttttgttttttttaaaatttagtaaaggggtaaggagattgaaaaccaaaaaaaaaaaatgtnacacatggaaagaaaaggggcaaaaaaaaaaaaaaaatgtaaaaaaaaagggaaaaaaaaaaaaaaaaaaaaaatccaacacagccttaaaaaaaaaaaaaaacnncgggaaagagaaaaaaaaaaaatttttttcccccccccccttaaaaaaacctgaagggccaaaaaaaaaggcaa

SEQ ID NO: 12579 - DNA, 175 bp, Oryza sativa
  Clone ID: uC-osflcyp136h08a1
aattgaagcagacccatttgccaaagtgagaattaacgtggcagaaaatttttcatccattatttctccatcttgcattccgcaagaagaccgctagttagggggaaaagagtaaaaaaagaccaaaaacgatcacaacacgtcgtcgtactccaacacgtacgtacggtactcc

SEQ ID NO: 12580 - DNA, 260 bp, Oryza sativa
  Clone ID: uC-osflcyp136h09a1
cagcgagcaaagaagcaaggcaacaattgcatttatttgttgaaatatagctaacaaattcaattatgcggttccataaaaagtctccaggatccactaagcaagaatttacagcagaatcaacaaaagcgtgatgcttaatcagggtacaggaatccacggacattcgttatgtgcagggtagagactagccttgatgaactagttatcagttgccctaaacactcgcagcagagctaaaaagaggttgatcacgtcga

SEQ ID NO: 12581 - DNA, 221 bp, Oryza sativa
  Clone ID: uC-osflcyp136h12a1
caaacccaaacattttaaattttcatccaacataatttacataagggttaaagggatatcttaaaactaaattctcgcaaaaatgcgcggggtttcacctaattaaatttttaagggcggtttccttatgctgacccgacttgatttatttattcaacaacaggtccctttttttttctttcccatttcgtttcctggggggcggggtaaaggaaaacaac

SEQ ID NO: 12582 - DNA, 136 bp, Oryza sativa
  Clone ID: uC-osflcyp084a02a1
ggacacagcactgcattcttaattacgtacacaccacaagactggagaggaaggactacataatcgtacagacgaccatagaatgttctcaaaacatactgtgatacttaggcactaatcaaaaactaaggatgca

SEQ ID NO: 12583 - DNA, 78 bp, Oryza sativa
  Clone ID: uC-osflcyp084a03a1
ggatcaaaaggatgatgctaaatattacatcaatctttcaactcacatacagcatcatacatgaatatccatcctaca

SEQ ID NO: 12584 - DNA, 395 bp, Oryza sativa
  Clone ID: uC-osflcyp161d09a1
gggtaccccacacaaagcatacgttaggatctggggagtaggaaaattaacacaaacacatcctaataaaattctcggaagtaccatgaacgacagcaattaaaatacggggatgcccaattgcccagattcatcttttaaagtatcattacgggccatttagcacttagcagtagacctaaactggtgtctaagtgagggcagaatttctcacagtaagtttttagttattccgatgggatttttaatatggggaatctcaaggggaaacttctggttccgggtcgaaggtaagcttttaaggagggaaaccgggtctttacgaaggcatttgggtggaagttttaatttgctcaagaaggtcctttaagggaacctcaggttttttttggagt

SEQ ID NO: 12585 - DNA, 397 bp, Oryza sativa
  Clone ID: uC-osflcyp162b09a1
ggcaacaaacggaaatcccttaccccctcgcagtcatattgtgcttgtctagtactccctccgtccaaaaagaccccacctaagagcggggtgatcctcttagtacaatgaattcgttacactgaaagggtcacattccatctttgattattattatttttatcggaggggatatactctgcagaacagcagttgctatctaggaagcaccgatgcacataatcagtgatcaacaaaatgacgtaacagtagttcggtatgtttacatagacattataatggggcatcacacagatgcagcaaaaagtactctcagatgtctcactgtcagttcgagttagcacaatgaaacttctgcgatagtcaccgactcgccattcaacttacgaaagggaac

SEQ ID NO: 12586 - DNA, 381 bp, Oryza sativa
  Clone ID: uC-osflcyp162b11a1
gggcccatcacccctttgaagattagttacggatttgggttaacttggtgagcaacaaatgggcttaatatttcactgaagttctaaaggacaagggaataaatttaaaagggccacgttttagactaaacccaaaaaaaatggttggaaaagctaacacaatatgggggaaatatttttttcctgctccaaccattttttggtgccttgaagaagactttggtttacaccctggtggatgccacgtttttgctgaaaaggggaaggatggaaacaacttggaaaggggtggcgcccaagaaagctagggcccccgctattgggtaaaaaatgaaacccctttttgggggttaaattggggggcggggaccagttttacgg

SEQ ID NO: 12587 - DNA, 527 bp, Oryza sativa
  Clone ID: uC-osflcyp162c02a1
aaggctcaacctggtgtgtccatatcatcagagaaaccaacacaggtgcatcatcagggagacagtaagctgcttggcgttcacattgccaatacaaaaaacaaaattctccacgcaggaaggtaacaagcaatccaactcaaccgttgacttgtctttgtacttcggtgcagtttttattacaaaaagcaagaataacattcattggtatgcttacagcgccggctgtcactggaaaagaaaaccattatggagtgtccgagcatttcaaaatgccttgagagatttatggcctacaggaagtttctgatgtccaacttcttgacatcaggcatctcctcgtctttgaactcctccctctttagttgaacctccattgcttcaacacattccttcttaagctccgtcagctcacttttggcaatttccaattcaagctcttcctcaatcttgggaagatcctccttgcggattccaagctttttgtttatcttctcaaactctgccaagaggagacccatattctt

SEQ ID NO: 12588 - DNA, 437 bp, Oryza sativa
  Clone ID: uC-osflcyp162c03a1
aagggaggaagagaacttcacttttaaaagagtatcaacttgttttttacatgggttccataatagtccaggtccccaatcaacaggggatgcagggctccatccacaattccatcccaatacaccacccccattaacagcctactccgatcccaaaaaagaggggtaagtcgggtcgacaaacagttttttaattttcctccatgggcagccattgttaacactccaacacctgaagaactcctaatttgggggggaaggcctggaaaatgggggcgtggccggggtcggcgagatgggcaaagaggttgtcaatggggccggggccggtgtactttgcctggaaccaagctcccatgacgggaagcatggcgagccccccgtttttgatctccttggggggcagttccttgaatttctccggggagccggggccc

SEQ ID NO: 12589 - DNA, 350 bp, Oryza sativa
  Clone ID: uC-osflcyp162c04a1
gctgataaaagatccaatgttgcatctttaaaaacaaacggcggtttacacgtcaaacgaaacacaatgtaaatagaatccagaatcctgcatttaaaagggttactcagccaagcatgagtaccaaacgacacacactaaatatccacttagaacatagcagcacaccacgactccagcggatagtgattgccatgaaggcatgaaccggccatccatagagatatcactgctttcgttcaaggcttttccttccgttcacggttccactgtttaatcttcgccctgcgttcctcgctgctttccctgactgggctccttgcacgccttggggggctgtcatgcctgcg

SEQ ID NO: 12590 - DNA, 319 bp, Oryza sativa
  Clone ID: uC-osflcyp162c05a1
cttggcaacaaaaaaaagccctttaattaatcggagggggaaaaaagggggaaacccaccgttttttctacgggggaaggaacatttttgtttttacagggggccctgggaacccccatcccaccccgcaaggatggtttgaagccccggaacaggaggccttaaaagggggtccaggaacttttcggaagggaaaataaaggccatcctgcccttgacacaacactttttaacttcggggggggggacaagcggaacaaagcctccccaaccactgggggaatcccgatcaactgaagcctgggaagcttgggagaaa

SEQ ID NO: 12591 - DNA, 342 bp, Oryza sativa
  Clone ID: uC-osflcyp162c07a1
aaaaagaaaagcatttcctcctgggaaaataaaaaaaacaagaaggaaaaacccccccccccccatgggggtttccattttaggcaacacagcgggaaagtttattcaaccatccccaaaaggccaatcatttggaaaaaggggcggggggttaaaagggcccaaaaaaccccccccaggaaaaacctgggggttgggctgaaaacggaaaaaggctccatggaagcccaaaaaaaacaattgcccatttttaaacaaggggacgaaacctttcttccaaaaacctaaccggacttaaaatggtagacggggagccaaaggaggctccctaaattccctggg

SEQ ID NO: 12592 - DNA, 144 bp, Oryza sativa
  unsure (1)..(144): unsure at all n locations
  Clone ID: uC-osflcyp162c08a1
ccctttntttctttttttaattgttcatttggaaggagatgcgaaagaccccaaagcccaacagaagggagtcatcaaggagagagttataaacatgacattgacaacgacaaaacaaatatcaatgctctgcacacgagaggg

SEQ ID NO: 12593 - DNA, 369 bp, Oryza sativa
  Clone ID: uC-osflcyp162c09a1
gtatggggcctaccgttgtccattcttttcaccaaatgcagcacacatcattccctaataccattctatcacacatctgtgctttcttgtacatcataccgtgtcgcttctttctttttacattgaacaacagtggccactaattacagcttctccttgctaataaaactcgctgagactgtagttcagttcattcctcggaatcggaatccattgggcatgatccgtcatccacgggggcgagtggatcaaacatgtgcgagtttggatccatgcaccctgacacaatgtccagcttgcagcgatctccccccttttcgtagtagctgcccattttgcaacttgggatgacaacgttttcgtttggga

SEQ ID NO: 12594 - DNA, 407 bp, Oryza sativa
  Clone ID: uC-osflcyp162c10a1
gccgaagtcaactactgtaatcctccatttatccagaaaaaaggacataattacatactttgaaggcatagctgatgagacaacctaaagatatattatgaggggatcctaaagaatggagctaaatacttagtagcaataaacttgaataggcaagttaaaacttcagtattcattggacacaagaatgttctgaagctatgtagcaatagcacaggaaggcatgaaagggcatttttcagttttcatgagaattagcttccttcctgtaccacaaaaaacttgatttgctagagcaatggttcacgtcatctggaaaatctctcgagcctcctacggcgaatctcctcaaccgatggctccccattccccccagcttggaggtgctgtttatgagaaaaagcatg

SEQ ID NO: 12595 - DNA, 388 bp, Oryza sativa
  unsure (1)..(388): unsure at all n locations
  Clone ID: uC-osflcyp162c11a1
caggcacgcgacgaggttggttccctagattgcgcgccttnttttttttttttttgtgttttaagcaaaaaggggaagccctttacccagggacggaagattccatggaggggataaacaagaaccatgggtcagaccaaatacatatttgttagcataaagaaaaagaggggtgctttttccggggaaataaaaagtgttagtttaacagggtgctgggttatccgcgctccaaattacaacggacgcaagggggataaaccgaggaccgttatcaaatggttatcagagcattttatagggtgaattttgattagcttcggcttggagcacaaagtttttaagatacaggggtggcacgagtgccacaaatttttttcgaatactg

SEQ ID NO: 12596 - DNA, 457 bp, Oryza sativa
  Clone ID: uC-osflcyp162c12a1
gaaccccaaggagaagtgagcatttcagtgacaattttttcttggaaacaaggatgctacaatatattattgcagaaacggcaccaaggccgtttctattattcataggtaacatcccagcaacaagaggagacagagcaccaaccacacaccacattccactgaactcacccccaactaaatcaaactagaaaactcccaaattcaatcgaccttactttcttaaggaaaaagagcagtgcctaggaatgcaaagcatcctgaaatatctctcttctcttttcatctctgaaaccagagaatggaaacaaagcaaagaaactccaatgctctcctctttcagagtctcagcctgagatgttggccagctcacttgttcgacggctcgccctcgacggccaacgggacggtgctagccatggtgcggtacttgagggcatacagcatctcaggtagc

SEQ ID NO: 12597 - DNA, 523 bp, Oryza sativa
  Clone ID: uC-osflcyp162d01a1
gctggtcaattattgatcgaatcttattagccaaaaacatgatcgtattataatttatatttctcagcatcagtttgtcacgtacttattagaaaagcaacaataaatcttgtataataactcattgttcattgcgactacaaactattatagatacaaaattcacaggtaaatgatcttctcgatgactttattgaaaaagaaaacatatatctaatcaacactatgagaaaaagtaaagttgtggttccagccaatgtacagttgaacatacgatgattccatccctcaatcagaacccatgcactttcttatttgtcagttgactatggatgatgacttcagaatatcacaagtagatgtagatttgcgcttcggtttaacagcaaaactaggccagatccatgtcatgaatgtaattgccgttcaaactcacaggcatcaagaaccgaaactggcaactagatcaaagtatttgtctctagatttggattgccctccacggcaaactatttcaaacttt

SEQ ID NO: 12598 - DNA, 533 bp, Oryza sativa
  Clone ID: uC-osflcyp162d03a1
aaattgaaaattggtaaaaaccaataaaaccctaacataatacatatacagcatagcatatgcccaaacatccttagatttctatcatcacttgtctttttttttaagagcaatcatcacttgttatgcatgtgctgttgtttcttgatcaactctatgtcttctgtcggctggctgcctcagtagctttccatcgatggagagggagtcgaggccccaagcctagggaggcaagaaaggggagcttcatgacctcaaaagggagatcttgcaggtctctttggagatgaatctaaaaaataaaacctgcactccatatgttgtgtcattataaaatctcccaaacatcattcgtaatccaatgaccaaacacataaaaaatgatacatctttcttataccacataactataacttgtaagagatcggccagaaagatgtgccacaccttgcaaggagggcaaactctgtaaagacattgattttacctttacaacctacaacaccacatttaaatgcatagtatttttttga

SEQ ID NO: 12599 - DNA, 363 bp, Oryza sativa
  Clone ID: uC-osflcyp162d04a1
attgggtgttgcctttttcaatttaaattaatgggtatttttttgattgatatattttatattttgtgtggaaagtattatgttaaataaaataattataagagggggttttaaccagacacaaaagtaaattggtgaaaagttttaggtaactgaaaggaagcaggggtagtttggtcatacagaatagaaaagattaaatgttaggaaaaaaaatttgggggaataggcatgaggaagatttatttgaaagcgttggggaaggagattatgtaggcaaaagaaaagcttgaagaagacagtgagggacaaaattattttgggggaaatgggtattaaaaaaaatttggggaggagcttgtt

SEQ ID NO: 12600 - DNA, 332 bp, Oryza sativa
  Clone ID: uC-osflcyp162d05a1
gggaaaaaaaaaaacccaaatggatttggggggggggaaaaaaggggaaaaaacggggaaaaaaggggaaaatttggggggctttttataaaaaaaaaccttaatttacaaccggaaaaaaaaccggggcaaggaaaaggaaagaagggggttcttaaaaaaactaaaaaggggggggggggggattcccggaaaaaccccggggaaaaaaaaaaaggcgggggtaccgcaaaaaagattaaaaatttttcctggaaaaagggggtttccgggaagaaaaaaaaaaggcttggcccctccaaaaagagggggaaaaaatttttttttggggg

SEQ ID NO: 12601 - DNA, 370 bp, Oryza sativa
  Clone ID: uC-osflcyp162d06a1
gtgttcaacactacaccgccattgcacacttctcaccattatgattgcgccaatatacaaaatctacattggcaatttagcgcgtggaacatcgatatcaatacaagatggaatgtgaactaacagatccacatacagaaatctcatagtatgaaacaacaaaccattgtaaatatcaaaggtggtacacaagattagggtgagaaaaaaaggggagtcctaaaattacctagtgtcacgcaatggacaccttggcgccgacctcctcgagctgcttattggcatcctcggcctcgtccttgctgacaccctccttgaccttcttggggaggccctcgatgaggtccttggcctccttgagggccaggtt

SEQ ID NO: 12602 - DNA, 371 bp, Oryza sativa
  Clone ID: uC-osflcyp162d07a1
accctgaaaattcattgatcattattcactcatggaccaaaaacattttttacaccacaagggaacatgagagagcttttgaacccccgggatcaataaatgaatgaatttagggacaaacaaatcacattacaggggggaacagggggagtattaatttattatcaaccccccgcacaaataaatacattttccaaatccaacacttaaaacccgttaaaactgggggggaaaaaaaaaaatactcgggataatagcgggctgtaattcacaacaagggcattttaaaattttaaacgggaaacacaatcattaacatattcttcctagggtacaacacctttacacaggggggtttttcttttttttcc

SEQ ID NO: 12603 - DNA, 378 bp, Oryza sativa
  Clone ID: uC-osflcyp162d08a1
caggcaccgacgaagtttgttcctctagattgccgcccttttttttttttttttttgttttttttgagttttttcggtttgccccttttccattttttttttgggtatgattttttttttttttttgggatttttattttttttttaaaaaaaatgggcgggggaatataatttattttgggggaaaaaaattatatgcagaaaaacttgcacatgggcagggggggggaaaattttttgggccttggtgcaaaaacaaacaaacaaaaagggggggctttcccaatggggggcggttgaattggccgaaaaaaaaaaaataatttggaagttccaatacccgttttacaaaaaagcctttttttggaaacggggggg

SEQ ID NO: 12604 - DNA, 330 bp, Oryza sativa
  Clone ID: uC-osflcyp162d09a1
aaaaaaaaaaaaaaaaaggggggcaaatatataaaaaaagaaaaggggggggataacaattgggaaaaaaatttttaaaaaaaaaaagaggaaattttgggaaaaaaaaaaaggggaaatccatttttttaaaagggggacaaaacaggaaaaagggggggcaaaaaaaaaaaagggggtcaaaaaaaaatcttttttggaaatttaaaagcaaggaaaaaaaaaaaaagctttggggaaaaaaagggggggggagaaaagggtaaaaaaaccccaggggggaaaaaaagaaaaaaaccccttcgcagaaaaaaaaaaaggggggggggg

SEQ ID NO: 12605 - DNA, 268 bp, Oryza sativa
  Clone ID: uC-osflcyp162d11a1
acaattatgattgtattaatatataaaatttatattgttaatttagtgagtggaaaaaaaatattaatataagatggaatgggaactaaaagagccacatacagaaatttcatagtatgaaagagcaaaccattgtaaatattaaaggtggtacacaagattagggtgagaaaaaaaggggagtcctaaaagtacttagtgttacgcaatggaaacgttgggggcgactttttagaggtggttattgggatagttgggctaggttttg

SEQ ID NO: 12606 - DNA, 491 bp, Oryza sativa
  Clone ID: uC-osflcyp162d12a1
ggccgaagaaaattcctgagcatccatttcaggccaatcatcaggggaagatagcagtttaacttgggataaacagacgaaaaccaaatccattacagaaagtagcatgtcttgcacagaacaactctgataatagctcattacagaaagtagctcatgaatcgcccagtctctgcagctcgtttcatttcttcaacccaggtagcctacgtgattcattaattaattcctacttcttcttttttgagactctactattaaccccagtttttacaagagttcctgcctcacctgtagccttgataagatatttggagatctcactggtgttgtagtagcgcttgaagaggaaattcttcctctcatcaagctcaggcacgccttgcagcgtcttactcctcagatcaacagagataacccatcccttatcattcaagcgattgatctttgacaggaaaagaatgacattcccatccatacccaatgggggg

SEQ ID NO: 12607 - DNA, 534 bp, Oryza sativa
  Clone ID: uC-osflcyp162e01a1
agactaaaccggcaggagaactgtcacccatatttcattaaacaggagtaaaaacccagacgggttacagaaaaagaaaaaacaaactctcggcgagtagagactcgccaagtctttccaccgtggctggtacaaccacacagcacacggagctctatatcactctagccaaactatcaacgaaacgatggcggaatccaacgacgaacaccgatgtcgagatgctgaagaggcggcacaccgcgttgacatcacaaggcacatgtcatcgttaccgagctagccgcccagcgacccagcagctccaactccacggcgatcatggcatcattgtaggcaccgccaaaccgagcaaagcaacaccaagctcacactttggacatcattcaagcccctgaagcgccaaagcctgtactagcaacacccacatccctagagagaaactgcaaatgttatcgttgccaagcttcgtcgcaccccaacgacgtagcagtttcgactccacccgacagagacagacgaaatagctggatg

SEQ ID NO: 12608 - DNA, 288 bp, Oryza sativa
  Clone ID: uC-osflcyp162e02a1
gccggatgaccttttcaaattaaattaatgttaaagggagaaagaagaaaacaggaacagaacaaacagaaaaggaaggtttaacataaaagtcaacctccacaggcagacaaaacacccaacagtcaaaaaagtattggggatccagtaggcaaaacacagaaaacaaaggcctactaaagaacaaacatttgaagggaaaacgggaaaacgcaaaatacccaggcaggggagccgaattacagaaaggcaagaacaatgagaggttctaaaaccagaaggagagaa

SEQ ID NO: 12609 - DNA, 345 bp, Oryza sativa
  Clone ID: uC-osflcyp162e03a1
aaacgactaaatgaaattcccaattttacttaaaaaccaggggggtataaaaaaaaacagacttgttggggaaacaaaaataaacggggcatagggggggggggattttttcccccaccgggggcggggcaaaattgaaaaaaaaaggcccagggaaattactacggaaacccacggataactccctccaaacgaaaatataagacatttttttatggaagggggggggattttcaatttatttggggggggctggaacaggcaaaacagaatggatagaggggacaaattgggggagaccacaggggaaaacgggggggggaaaaaaataaggggggagggggg

SEQ ID NO: 12610 - DNA, 325 bp, Oryza sativa
  Clone ID: uC-osflcyp162e04a1
gttaattgagactgaacgcgacacgccaaaaaccaaagtctggacggcatccagaccacaatctacaagagattctgagaccatatctgaaccatggacgtcatgggcacaactcaagcggtcaaagcacacacactgctgggctcctctaaaagaaccagaacgcagggaccaagcatgcactatgctgggaggcctgcctacaatgttgggctacacccaggcaaactaaagaactcacccaaagaggcaagcgagcgttgaactaacatagccaaagagggtcaggatcaaccaaaaccttgaatcgaggccagcaaagggg

SEQ ID NO: 12611 - DNA, 309 bp, Oryza sativa
  Clone ID: uC-osflcyp162e05a1
ctcataaccctcgtagcacttgatcggagaaacagatgttcacaagtagatacagagctaccgaaactggaagaacagaaacccgagggaatggacacaaggaacataactgaagggcaaagtgtttacattattatgattgagcccagcttgcaacaagtactaaaagtttctactgaggatttggtggcctggagttggcagcagaaaccctcgatccccattccagcagctttttgctggtgtcgtccttgtgcgcgaacacctcaatgaagcacaggcagtcctttttccccagcgccattccga

SEQ ID NO: 12612 - DNA, 436 bp, Oryza sativa
  Clone ID: uC-osflcyp162e07a1
gaaaccaaccacattatatagtaaacactggcttcagagttcagatccacaaggttcacagccactatagcaagtacagataaggtagaagctaagtaacttgttccagcctcatatagcagttacagatagatagtttcactgccaaatagtacttgagacttcagcatctaagctagacacagcacatactaacatactaacatagctatatagcgcaactagaagcgcccgacagacacatgccgcttcttggatgtccagaatgtttattccatttgtccttatatatacaggcaccagttgctacaccccaaacccctcagtagaactcggccgacacgggcatgtcatcgaagcttcaaaggtccatgctactggccacatcctgagatccatcagagctcagaagggtgtcaatcgactcatccgaacc

SEQ ID NO: 12613 - DNA, 389 bp, Oryza sativa
  Clone ID: uC-osflcyp162e08a1
atcgtgattccatcagccgtgaatatgaggttgaatggatgcaggtgcggtacaggcatggaacatacagcaaaggaagtttcaacataaaagtcaccctccacagcttaacaatacacccaccatccctccagctattcgggctcctcttggcagaacactggacacaatggcctcctcaagattcaacatttgattgtagtacggcacaccgcacactaccttgtcaggggagcccattttcagctttgcaagaagatgattaggttctaaaaccttaaggtgagaaatgttatttgccctttggcatacacaggtatgagcagacaagtgtaaatgtcgtcataccacactttgtcctatggtccagtgcaaaacaatgaattaaa

SEQ ID NO: 12614 - DNA, 402 bp, Oryza sativa
  Clone ID: uC-osflcyp162e09a1
ggggaggaagggggggaaaaaatttttaaaaaaaaaaaatttttgggaaaaaaaaaaaaaaatattttttttttttttgggaaaaaaaaaaagggggggaaaatttggggggaaaaaaaaatattagaccccgtgaaaaagaggaaaaattcccagaggaggaaaaaaaaaggggacccgggggggggggggaaaaatggggaagggcccaaacgcaaattaaataaggggggccaatttagaaaaagggggggagatttattggaaatattagggggaaaaataaaaaaaagggggcccggaggaaaaaaattttttggccgctcaagggtatttgtaaaaagggggggggggggtaaacttgaaaaaaaaaaggggggggggataaaaatgggggggggg

SEQ ID NO: 12615 - DNA, 293 bp, Oryza sativa
  Clone ID: uC-osflcyp162e10a1
ggaacccaacaaagggaaaagggggtcaagggtttaagaaaatggcctgggaattaccgggcaaaaaaaaggggggttggaaaaagcctcaatacacactgggggaaaaccgggaacggtgttggggctccaaatttggggaggggcaagggtctgggaaaaacaatttttttgggggggaacttaaaaggtttttttattaaaaaacacgggggggggcaaaggctaactatttggccctttggggattggttaggtttagggggggcatgagaaaaggggggttttttttt

SEQ ID NO: 12616 - DNA, 336 bp, Oryza sativa
  Clone ID: uC-osflcyp162e11a1
gcaacagctcaagagtgaaaagctcacggaatccctttattatttagtgtgtcaaaggaaacagcagcacaccagtctcggctctagtattagcaaaatgaaagttacagcattgccgcagcggttgcgaaagaaaatcagcacattctggttccccagtgtgccagggagctcgaagcagactgttaaactcgttcaatccagcgtcaagagtgagtaggtcagaggagatctcatctcttccaccgccgagcttgctatcttgagtccacaacagtgccctcaggaagcgcagacaggtgtacgagagcgtgagatttttgtgggctatcggag

SEQ ID NO: 12617 - DNA, 357 bp, Oryza sativa
  Clone ID: uC-osflcyp162e12a1
gggaaaggggaaacgtctcggtggcaaacacttacggtatagtaggggagttgggtgtacagggatatagtcatatttgggcgttttttcatgccggtcgttgacttcgttcacagggtcagggtcgggtaggcgaaatcgagggtgacgccacacaggccggggccaccgacgtcggggagaatccggatgtagccgggctcgccccatgactgggcccatgagttcttgatggtccaggacttggcgccggaagaaccgtcggggccgtacccgacgaccgtgacggcgtgcgctaggcgcgtgccgcacgggcccgtgtaaacgccacccttggagaactggattccactaccg

SEQ ID NO: 12618 - DNA, 520 bp, Oryza sativa
  Clone ID: uC-osflcyp162f01a1
aagtgtgacatatacacagcacatcgatcccctcatcataggttggcaggatcaaaacgcccttgccactaacatcaatcccatgtgacaaaaaagaagggaaaaaaagaaaagaaatagaagaagaaaagaaaaggaaaacaaaattcgacctttcctctggaccactatggcagtatctagtggagtaaatgacaatcggaagcaatggctaaagagacaacaaagtgtagtgtacataatacaacaataggaaggcctaccgatgacctcgtcagcaaagctctgctgctactctgtaaaacttacctgatgatccatgaagtacagaccagtgtgatcacagagtagagagcagagttggcagcagcaaagtctggagattcttccaatgcaatcatgtcctataaaagcaagtgccattatgtcattctcactaaccaatcttttgaggatttttggtttgatccatgatgataaaccgttgtgtttggtgcaccaatggaggagaaggatggat

SEQ ID NO: 12619 - DNA, 472 bp, Oryza sativa
  unsure (1)..(472): unsure at all n locations
  Clone ID: uC-osflcyp162f03a1
ctgncgncatgcaactcaacttccacacgcttttgttgtgctcctgatgttagtgccacaaactttctggattttaagggtcatttctggttcgtcctggtgatgctgctgatgtggacctccgttgcctacatgtactggaaaataaagatgagagttgatgaagtagagaagtttctgcaattgcaacaaatgctgaccccaacgagatactcctacaccgacattattgccatcacaagtcatttcagagacaagcttggccaaggaggatatggctccgtctacaaaggtgtgctactccctggtgatgtccgagttgccattaagatgctgaagggtgacgcaaattgcaaaggggaagagttcatcagcgaggtctccaccattggtaggatccaccatgtcaatgtggtgcgactcgaggggttctgctctgaagaaatgagaagagcgcttgtgtacgagtata

SEQ ID NO: 12620 - DNA, 437 bp, Oryza sativa
  Clone ID: uC-osflcyp162f04a1
aggatctataagaatgttttatagtagcccgatcgcagcaagatacaagtccgattcacacagcaacgttaggcttacagctccaactccaagttggaggattaaaatttgaaaaattgaaagaacgaagcattcgccttgggattactctctcttaatggattttacaggttgggtttaggctaataataatattccctcttcatcttggattagtagagtacttaattagcagcgcatctagtagtgctggctttttttccatcgtctagtgcgcgccaaaaaaagttgaagcacaccacatcagagcgcatcacggccgtccgatctttttggcgggaacggaggaatggatcaccacgatctcgggccgtccgccgtcgccctggcggtggcggtggcggccatcatcatgcgggcgaagtcctggaacccga

SEQ ID NO: 12621 - DNA, 225 bp, Oryza sativa
  unsure (1)..(225): unsure at all n locations
  Clone ID: uC-osflcyp162f05a1
acaggnggtgggaaataccacatttacaatttggaaacaaaatttcatatagagagagagagagaatgggcaggaagacgaatttaggggggaaaaaaattttttattttttctggggggggattaaggagggcggaggtaaaaaaaaattttaaaaaaaaaagggaggggggggttgttttcaccaagggggaaggggggtttgattaataaaaaaaagggggg

SEQ ID NO: 12622 - DNA, 212 bp, Oryza sativa
  Clone ID: uC-osflcyp162f06a1
ggaaagggaaaattcatccgaattatcaacaatgggagaccagctttaagtaatacagttcccaaaaaggtttccataggacatactaaaaaacaaattgaagacataggaagggggcgggggcattacgaggcggaaatgcggggataatgtatgacgggaacaccaagcacacaaaaccctgccctataaccaccaagcaaaagccacct

SEQ ID NO: 12623 - DNA, 373 bp, Oryza sativa
  Clone ID: uC-osflcyp162f07a1
ttttttttttgttttttttatatattttgcgggttgctctatcacatgttttttttattaaatttttttttttttttatattaattttatgtgacaaaaaagatgggaaaaaaagaaaagattttgattaagaaaaaaaaaaaaaagggggtttgaaaaaaaaaatgcaccaggaaagaaaaatcaaaagaaaaaaagacaattggaagaaatggaaaaagagaaaacggggggtaatgtacataacacaatattatgaaggcctaccgaggaaaaaaaaagaaaagttttgaagggaaaaaaaaaaagtgacctgaggaggcaagaagtaaaaaaaagtgtgagcaaaaagtagaggggggggtggcaccag

SEQ ID NO: 12624 - DNA, 381 bp, Oryza sativa
  Clone ID: uC-osflcyp162f08a1
gggtgaaattggagcaatgttcggagcacccgccctccgaatcaccaggcaaaaaaaagggagctagtacaaagcctcaatacacactggagtaaaaccagcaacggcatctgcgctccacatctcgcgatgtgcagcggtctgagataaacagtttctatgtgatggaacttaaaagtctcttttattcaaaaacacgggagcgggcaatcgctcactatctgtccctctgggtattgcttagttttagttgaggcatgagtaagcgagcgttttctcctccgacagctcctgggcagtcgcgtccatcttcttccttgagaacttgtcaatcgggagaccctgaacaatcgtccattcgccaccactgcatgttactgg

SEQ ID NO: 12625 - DNA, 459 bp, Oryza sativa
  Clone ID: uC-osflcyp162f09a1
cctggtcgcctccggctccccggacgtttgcaggctgtcgctgtctgccgctggccggtccacctcggcacggtctgtgtccggcagcagcagaacccagccattcccaaagcccactctcgccagagtgaagtctgaaagggccaccgccgccgccgcagcctcgccacggcctccagcgctggcggtgccagcgagcaattcgctcaaggacatggccaggacagcaccatcagcgtcttcgaaagcgccatccaccttgcagaagagcaaactgtctccaaggcctagccctgacaaggcggcggcatctctgaagccgatcacccagagatcgccggcttcagtgactgcaagaggtggaaggactccagtagtgtcgtcgtcacgtgtaccgggcaacatcgctgcaaagaaaagagcagaatctgcaaatggtggtagtgcaagctcaaaggc

SEQ ID NO: 12626 - DNA, 429 bp, Oryza sativa
  Clone ID: uC-osflcyp162f11a1
tcgcgatctatccaccgcctgcatgcataacgaggagggtcagatggcggacctctacgtccccaggaagtgctcggccacgaacaggatcatcaccgccaaggaccacgcctcggtccagatcaacattgggcatgtggatgagaatgggctgtacgatggccgcttcaccacctttgctctctctgggttcatccgtgctcagggagatgctgacagtgctctggataggctgtggcagaagaggaaggctgaggtcaagcagcagtagatcttgctactagttttacctggaagaactcgtttcaatttcatgtctctctagctacttcatgcaatgcctgtgttatcagttcgtactccgaaaaaattcgtgtgacttgatcggtttatcctgataatgttttatccatgttgaagctttattac

SEQ ID NO: 12627 - DNA, 467 bp, Oryza sativa
  Clone ID: uC-osflcyp162f12a1
atatgaggctctggcagcatttgcaattacaatttgctatggcctgcacagatgtcagacatgagcaaaacattcaatatcagacatgagcagaaccttcaacatcagagacacgggtaaaacattcgatatcagacatgtgcaagacttcacgaaatgatccaggttaatggaactggtagggaataatggatggttcggtgcctaacatgtcgccaaatccattggcatcccacagcatcagcaaaaggatgttcccgagttttgttcacacatacgagagaaaggtctcattttataatacgctttatacattcccagcttgtatgattgaataccccagatgccgctggatctagacatatttagtcttcccacgactctcctgcttcttcaccactctgaattctgaccgcagcttgcccacacctacagggcactcccccttctcatcgtaatcagcaaac

SEQ ID NO: 12628 - DNA, 388 bp, Oryza sativa
  Clone ID: uC-osflcyp162g02a1
gtggaacgaataaaatcattattgcaaccccatcatcttcttcttcatcttcttagtgtacacaacaccaactcgatcatcatctcgtcgcactaaacccatcttccccaacccaaagacaacgaactcgctggccacaaatccatccaaccacaattaaccactgctaagctacggtcccccacttcacttgccggggacgaagttggtggcgtacgcccaggcgttgttgttgacggggtcggcgaggtggtcggcgaggttctcgagggggcccttgccggtgacgatggcctggacgaagaagccgaacatggagaacatggcgaggcggccgttcttgatctccttcaccttgagctccgcgaacgcctcggggtcatcggcg

SEQ ID NO: 12629 - DNA, 433 bp, Oryza sativa
  Clone ID: uC-osflcyp162g03a1
agtgcttaactaagttccaatgtttcccctccagcacagatgacaattgattccaatacacaatgcgccaatcgcataggacttcaataaacctaccaaatatagctataagtctgcagcaactacagatagaaatagaatagcaaatatgcttctccctttagagataatgcgggcatggaaactacatctactgaccacccctcagagcaagcacgagatggagcactgagccaccttcaatgttgtaatccttggcagttttatcatcagcaagttgcttcccagcataaatgagcctctgctgaacaggtggaataccctctttctcctcaacacgctccttgattctatcaatggtatcagtgggctcaatgtcgatctcgatttccttcccagtgagtgtcttcaccttgatcatggttccacccct

SEQ ID NO: 12630 - DNA, 159 bp, Oryza sativa
  Clone ID: uC-osflcyp162g04a1
gccccattacaaatttttttattttaaaggaatatatacatgagggggaaaaaaaaaaaaactccaccggggggaaaagaaaatcctgggtggggatacaaacacaaaacaggtggtgaaaaagggggacttgagtcgggttgggggggaaaagaataa

SEQ ID NO: 12631 - DNA, 192 bp, Oryza sativa
  Clone ID: uC-osflcyp162g05a1
ggacgataaacggagcaacctgaacactatagtatgcacttatgcccacgcacaaacactaagtagagggtgacaggggacagaccataagctgggaagagcgacacatggaaactgaaaccgtgtgccaacaggaacgaaacgcacaggaccatgttagtggactgctaacatataagctcactgacttgg

SEQ ID NO: 12632 - DNA, 293 bp, Oryza sativa
  Clone ID: uC-osflcyp162g07a1
attataaagggggaagaaaaaaatattccccaaaaaaaataaaattttgaaaggaaaagaggggtttacaagggaaaaaaaccacagctaagggggggggccccacaaaaaaaaacaaggacggagggggaggttttcctaaaggggtttcaacttaccgaaaaaaaaaagggtaaaaaccaaaaaattaaggggttttatttccgggaaaaagggggtggttgaagaaaaaaaaggggcccaatatatctaggaaaaaaaactggaaccccgttaaaaagaacttttttaac

SEQ ID NO: 12633 - DNA, 383 bp, Oryza sativa
  Clone ID: uC-osflcyp162g08a1
cacgcgtactgaatttttgtatcctaagaatggccgcccttttttttttttttttttgttttttttaaaatttttgttgttgcccctttaacattttttttatttttttagtggaaaaaacagcaatttgataataatttggtaaaaataaaacaattttttttaattaaaaaaaaacgaaatagctgggcaaaaaggaatcaaacacaataaaccactgctaagattacggatggacacttcactagactgaggacaatgttaaatggttgtacgcccagggcgttgttggtgaaaggggaagaaaggaggccttgccaggaataagaagaggccgttgctggtgacgatggtttggaccatgaaaacgaacaaggggaaca

SEQ ID NO: 12634 - DNA, 425 bp, Oryza sativa
  Clone ID: uC-osflcyp162g09a1
ggtaaccaaaacataggagggttcattccttcttctcaaagtagtgtagcatctttccttctttcaccattacataagcttaagcaataacagataacaaatcctcctcctcctctaggtaaaatattcaaacacaatacccttataagtacttattattaggaaagtagcgtgcatgggcataaatggcagcggggggcaggttaagaatcacaatgctgagcagcgaggaaacaaaacaccataatgggacagagcaaaagcctccgaaagggagcttttaggcagaaggcttctcccacttgaggggcttcaccacctcccaggtgaagtctgggtcgtcccttccgaagtgaccgtaagccgccgtcttgagggagcgtccgttgccgcctttcttgaggtcaaggttgatgatgaacatg

SEQ ID NO: 12635 - DNA, 483 bp, Oryza sativa
  Clone ID: uC-osflcyp162g10a1
actaagaccttttttttatctaattttatccacttaggctagctatctagtttatctaccggctcgaactcgaatttgatcgctttccatatttcacaagctggggtttgttcaggactccatttgcaagctgatcggataatttcattaccttcacgagcaagatcgcgccctttgttacgagcttgtacacaggcttttaaagccacccgattagctgctgcaccaggggcattaccccaagggtgtcctaaagttcctccaccaaattgcaatacagaatcatttccaaagatttcggtcagagctggcatatgccaaacatgaataccccctgaagccaccggtataacacctggcatggatacccagtcctgagggaaaaagataccgggagcacgaactttttaaataaaatcattgggcaataaatcaacaaaacctaaaggcatttcgcggtccccttttaacttacctactact

SEQ ID NO: 12636 - DNA, 407 bp, Oryza sativa
  Clone ID: uC-osflcyp162g11a1
gtaaaaaaaaatgatcatcatggttaatgcatgtttagggatatttccacaggtatttcaaatggttttcctgctgagcaggctacagagaccatattgtttaatttgcacattgcagcactcaactggcttggtgttggtaagtttatttggtaggcaaaagaattggaccggggtgctccagcctaacacagtgcagcctagagatattaagaccagctcatagaaaagcattaaccgttgatgtgcatggagtatttttccttgtatttgtttgtcaataagatgctggcagctccattcctgaagatccatgagctgagcatagtgggttgcctctcccaatattaacatgagacatgaattatcatgaagtaaacctattccttgaagattgagcggggatc

SEQ ID NO: 12637 - DNA, 448 bp, Oryza sativa
  Clone ID: uC-osflcyp162g12a1
cagtgaacagtatagcaaatttgcaaatcccgttacaagcataacataacattgttaaatatacattattcaactgcatagaacgagaatttcgatctcaacaaacactagcttaggtcaccaagtaaaatgccaattcaagtctcaggctagaaacgcagaatttcctgctgtcaaatcataatattatgcaggcctcggtacaggtgaagtctgctaagaaaattctggttgtagttcctactggcaactgccaaactgccatacatgatatatactggtactacacaactggatgccacactggttggtcattttcctgccagaaaggtgtcaattatatgtccatgtctatcagtgcatcttcctcttcaccatcggatggtgcactggtaaggaagtcatctcctgatattttgcttatacaactgcaacgaaagctcacaac

SEQ ID NO: 12638 - DNA, 371 bp, Oryza sativa
  unsure (1)..(371): unsure at all n locations
  Clone ID: uC-osflcyp162h03a1
nnnntnnnnntttgttttttttaannnnnccggggnggcccaaggcacctcctttaacacatagggatgatatacaaaacagtacgcacacaatacgtccttttttcagctttgtcttaacacctgaccatgcaaatttagctatctcgaaccatttacaatccaaagctgaatctttctacggattgctttgtaaagcaccttctttcgaagagaaaattgttgcagtctagtctgaaacaattgcagcccactgcgattaattgcttcataaccaatggagtactagttttcttctctagggaaaacgtagaacttcagaaccttgaacctcacgtcgacactgatctaaggggggggttacatccagg

SEQ ID NO: 12639 - DNA, 170 bp, Oryza sativa
  unsure (1)..(170): unsure at all n locations
  Clone ID: uC-osflcyp162h04a1
nnggnnnnnnntttgtttttttaaagnnanngcgggcngggcccccaaccaaatggaacttaatatgattatatcaacacaggccatcatcaatttacagttttttaagggggcactatcaccggacaataaaaggcgcctccgagacatagcaacgcaggcacacaaag

SEQ ID NO: 12640 - DNA, 287 bp, Oryza sativa
  Clone ID: uC-osflcyp162h05a1
ttttttttttgtgttttttttattttttttggttttgctcttttcaaattttttttttttttttttttttttttttttttttttgggaaaaaaacaccttagggccaaaggcatttgggaaaaattaaaaaaggggatcgggtttggaaaacttaacgggaggggggggttgggtcattcaaaggggaattaacccctaaaattttaaaacacccccatcggggggaaagggggaaaatttggaggggaaaacccgggtgggggggaaaacccgggggggggggggg

SEQ ID NO: 12641 - DNA, 423 bp, Oryza sativa
  Clone ID: uC-osflcyp162h06a1
ggggaaagggttttttttattccaccccaaaaaattcccccccaaacggaaaaaaggggggggggccaaattaaaaaattggaaagggcttttcaggggaaaaaccaccggtcaaaagggggtttgggggggaaaaaaacaaaaaagggcccccatgatccccaatttcccgcccaaattccattgggattatttggggcaaaaaaaaggctttaaaaaaaaaaaaacgggggggaaccttatggggggggggggaacattttggggggggggaaggggggccaaaagggtcccttaccctttgggaaaaaggggaaccgggggttgagcccctatggcaccggggtcttttggggggaaaaccacctccctttccctatccggtggggaggggaccctcaaagacccaaaacttttttttgt

SEQ ID NO: 12642 - DNA, 388 bp, Oryza sativa
  Clone ID: uC-osflcyp162h07a1
cgggggcgcccaaaaacattgcctttcctagatcaaaatttctcagcactatgccaggggtattggcaatatgataataccaaaccggcgatattcatcactcaaccataagcttcgcacaagatatgtcgacccaatacaacaatggaaaaagctaccaaacatataataccatgtcccgaaaaaaatatcccccgccagttccactaaaccaactcaatcccaacactttcccaactggcttttcaaaccaaatggacgagacattgcattaagccgaaccaaacattttttttcactccaggaccggactttggaaacgctcaggtaggaagcatcttactgttgcttgcattctgcagggcgctctccctgctggccttcccct

SEQ ID NO: 12643 - DNA, 310 bp, Oryza sativa
  Clone ID: uC-osflcyp162h08a1
aattgattggggaaggcccttttccaatttttgtgctgagatgatattttttttgtacgggttttgagaaaaacaaattacaggactttgggactacaacttggacagcatggttaatccaaataatacaatttaaagtagagacattgtgacaacaaattgaacaatggggtttttttgggtaaacgaccaaattgaacagcacactaattacctaacaagagcaggccagtgggaggaattgcttccacaccgaagcgggcctggaacgaattcagtttgttgaaatgggaaaggctgacccaaaatt

SEQ ID NO: 12644 - DNA, 458 bp, Oryza sativa
  Clone ID: uC-osflcyp162h09a1
gagtgatgaagagaacttcacttctaaaagagtatcaacttgttttttacatcggttacatcatagtacaagtacacaatcaacaaggcatgcagtgctccatccacaattacatcccaatacaccaccaccattcacagcctactccgatcccaaaaaagagaggtaagtcgcgtcgacgaacagtcttttcatcttcctccattggcagccattgctaacactccaacacctgaagaactcctcatttgggggtgaaggcctggaagatggtggcgtggccggggtcggcgagatgggcgaagaggttgtcgatggggccggtgccggtgtactctgcctggaaccaagctcccatgacggcgagcatggcgagccgcccgttcttgatctccttggtgcgcagctccttgatcttctccggcgagccggtgccccagccgagcgggtcaaaccac

SEQ ID NO: 12645 - DNA, 577 bp, Oryza sativa
  Clone ID: uC-osflcyp162h11a1
tttttttttttgtttttttttttttttttggttttgcttttttaaaattttttttttttttttttttttttttttttttttttttggggggaaaaagaaagggttgaaaaattgtttgtttttttaaaaagggcaaagggtaaaaggggttttagtttttttgaagggaattaacagccaaaaaggtgaaaaatttttttaaaaaaattagggggggaattaaggggaaaaagggggaattcaaaagttaaattttattttatttggaaaaaaattaaagggggggaaaaaaaaaattggtttttgaaaaaatttttattgaaaggtttttaaagggccgggttttttcaccaaaaattttgaaattaaaattagggattttgttttaaaggggaaaaaaaaaggggggtaaatttttaaagtttttttgaagagggaggttttttggggtaaaaaataaaaaatgggggggggggggggaaaattaagggggggatttgtgtttttaggggggttgtgatgaaaaaaaaaaagattgggtttagttttataagaaaaaattataaggttttgttag

SEQ ID NO: 12646 - DNA, 345 bp, Oryza sativa
  Clone ID: uC-osflcyp162h12a1
cgatagctagcaacaagcagttcaaacaccataaccaaagcgaactcaattcatggtaacatcacggacgaagaacacctaacactggatggatggatagagggcttctcgactcgagagagccactggacacgataacgactcgactcgatgataagatgattctgacacggatagctaaggataactggccacgatgggccccaccaatcagttcctccagttcccgccggagtcgccgtcgtagccgccgccacggctgccaccgtagacgacgccgccgccgacacggtcgtcgtcgtagccgccgccgccaccgtagccgccctcacggcgcccgtagtc

SEQ ID NO: 12647 - DNA, 355 bp, Oryza sativa
  unsure (1)..(355): unsure at all n locations
  Clone ID: uC-osflcyp168a01a1
aaggatggaattgagtagcaatactttcaccccaaaatacagtttagcgacaatatcttagaaaagccgcttgctttgccgccatggctggcaagctgagcagagcagctaacacaaagaacacgagatcactataaaccaaacggcaacgaacgaagaaaatacagggtncttttttgtctgaagatacacgaagcggttcgttttcttttatttttagtctcctctcctcctcgatgatgggtgtatggcaatggccaatggcgatgggatcttggcttagttgatgggaaggggcttgccgttccactccctgaggcaagtcgagcatggggtccgaagagcctgccctggc

SEQ ID NO: 12648 - DNA, 350 bp, Oryza sativa
  Clone ID: uC-osflcyp168a02a1
gaccaaaggaattagcagcctcgtaccatctcagaaatggtacatcatagtacaacagcacctgcactaatttatgctctaaaaatcggctgacccaaagcctccgggctctcttaagctgaaggatacacgaccacatgacatcgacaaaattgttcgttacagcgtcagaaaaattttcagacaaaaagttcagcgtcttctcacctgcctacacctacacatactttgcctccgtacttagggctgggagtccctgtctatggcccggcttcccgtcggcggcggcggcggcctggaacggcggggctgaacacggcggagtggaggtttcccctcctccatccact

SEQ ID NO: 12649 - DNA, 243 bp, Oryza sativa
  unsure (1)..(243): unsure at all n locations
  Clone ID: uC-osflcyp168a03a1
gaagggcaaataacancancggggganacgcccancaccncacgagaacagaggaagaaacaaaagctaaaaannaaaaccatcaacagcccgancgagnnngcaatactagatacacacattgcagcccttcccttccctccctccatgtatcgatatatcaacccggcccacgcacaaaacattttgtttcaattccctactcgagctgccgccgtaccacaacccccttggaaccttgac

SEQ ID NO: 12650 - DNA, 288 bp, Oryza sativa
  Clone ID: uC-osflcyp168a05a1
aggaaacgacttaaataacagaacagtcaggtggaacagactaccagactgaaacggacttcacaaggggggggacatatgagttaaactgggcacaacagccctaaaaaggccattcatacttcgttggggggagaggggcgacttgatggttatttaggggataacgccgttgggtttagacacgtccaccagtttggctggctttagcccatggggtacttttgggtccaggagcgagcgggggattcatacttggccctatcagacttggacatgggagcaatt

SEQ ID NO: 12651 - DNA, 363 bp, Oryza sativa
  Clone ID: uC-osflcyp168a07a1
aacaaaaatcgccatacatattgggaataccacgttaccatttacatttcatataacataaataaataaaataaaacagagcccctactatggccttcgttccttttcctcttttttgaacattttgggcgacaccaacccctattaatttaaataaataaataataaatgcaactcccacaattttgctgcaatgagcactgaacggttcaaattcgacatccttttattggctcccgatacagtacaacaacaacaggatttttcgggtgggacccattctatgccttgggtgaagaaactttcaactaactataagaaactttgttaccgaagggcagccattgttactttcacagtttg

SEQ ID NO: 12652 - DNA, 235 bp, Oryza sativa
  unsure (1)..(235): unsure at all n locations
  Clone ID: uC-osflcyp168a09a1
ggagtataaagnataccacatatcgagcatgtatttccaaatctctaagtacacttgcaaatcttttagtagaaaaaacatattcacaagatatggtgctacaaggcactagcactctttttttagttagtgcagcacagcaccggttcggaaaaactacattctccctcagattgtnccagcctgtgcctgcaaaatccgcgaacgaattccaccggacaccaattcccaccag

SEQ ID NO: 12653 - DNA, 274 bp, Oryza sativa
  unsure (1)..(274): unsure at all n locations
  Clone ID: uC-osflcyp168a10a1
tttgcgccctctnttnnnnnnnnnnnntggtttcttgagaagcagaattttatttagccattagggcctgagaaacattccaggattacaacagcttttagggggctactacaggcatcactggttacatgcatatacagacggtaacacccaataataaccggaactcctgaaggaagaagataggaaattaggtcatctaggacaacaattacgctggggttggctctgaaagggaagcaaaacccccgggtaaactaaagaccaacaaaca

SEQ ID NO: 12654 - DNA, 386 bp, Oryza sativa
  Clone ID: uC-osflcyp168a11a1
aaggcgaataaattgttttgaatttcgacgaaacacctgatagtaggtttgatacagtttttgcactacgctgttactgcacatgggagcagaacatattctcgtagagatatacaaacatcacacagaggaagcagcagcaagcactctagagagtcagcccccaaaacttccccggacaaatgcagctgcttaattactccgttccagcgatcttcttcttcaaggtctcgatgtcggtcgccaactctttcctgctctccttgaagaggaggtagcggtagacgaaccagccggtgtagccgaggccgacgagctccaggatcttggggagcagcggcacggagttgatggcgccgacgacgacggtggtgagccagagggcg

SEQ ID NO: 12655 - DNA, 348 bp, Oryza sativa
  Clone ID: uC-osflcyp168b01a1
aaaaaaaaaaaattttggccttttattggggtttatcaaaaacaaggcccaaaacaagggggggtcccttttttaggggggggaacccccccgggggggggtggggcttagcttaggggcccccagacccctggaaaccgggggggttgggggcgatgaaactaaaaaactgcccccgcctggcgttggcaaaccccatgatcccgccaaggggacgggggggggccttttgggcccccccgggcccctggggccccggggggggaagggggccccccaaccggggggggttccacaggggccaaaccccgccattgaaaaacccgggggacccggggttcccccggg

SEQ ID NO: 12656 - DNA, 511 bp, Oryza sativa
  Clone ID: uC-osflcyp168b03a1
atgcaccccgtccgtcagctggtatcctccagagttgtcgccctcctttttttttttttttttttttttttttttttaagagaaccttcctcttttatttccagttaagaccgcaaaaacattgcgttaaaaattgaacctggattcctggggaattgctccatcattccggagcaaaaaccaccatacacaagacacctgccgattgcacaaggttgggacgaacgaaatgatgacctaacgctataagaaacgaaaatcagtcggggctagacacctagtccaaagggaaaattttgtttcaaaagaacgcaggcggcgcagcaattaatcaagatgcgcgatcactgcatccgtgacttcctgcgtggcgctgctgccgcccaaggctttggttctggacttgccttctgcgatgacacgctttaccgacgtttccagccggtcagcgaatgatgggaattgcaaatgccgcaacattatggcagatgagaggagcagagcaacgggg

SEQ ID NO: 12657 - DNA, 276 bp, Oryza sativa
  unsure (1)..(276): unsure at all n locations
  Clone ID: uC-osflcyp168b04a1
nnnnnnnnnnnnnnaacggggcgcacgagacaatacgagtgatagaccaggaaaatattacaggactataaccctggagggtcataaccaggaaaaaggaaaaaatataccaccacccacacactgacagcgccaacacacaagaccgggagaaggctaacaccggaccggccgccgctaagcatgactgatcaccgctagaccgacaaaggaacgcagacgagatcacctaaaagaacacccccacaaccaacgcaaagcccaactcctagagtg

SEQ ID NO: 12658 - DNA, 464 bp, Oryza sativa
  Clone ID: uC-osflcyp168b05a1
aagaatagccagcacacctagagcaaaattttactaacatcagatgcaagaaagtctacatgagttctaaaaaggaaactggggaaaactaatttacaccaattatcactaatagtacactaaatataaacgaccaagaagggctctaggaacccattttgtatctagcacccgaacgttgaacctttctcccgataaaagagggatcaggcgtgcaacagactggctctcacgccagggaaaccacaggtacaaaagaggcagtgaaagaagaaacaaaacttttcctccggggcgaacatatacaacttgagaggaaaaatacacaatggccgagagacaaatcacagtactgtattgatgtgcagtgctttcaacaacgaggtggccatttgtttcaccaatacctgttgaccggcacgttgcccatccctttgttcttcgatcaggttttgtagcttttt

SEQ ID NO: 12659 - DNA, 296 bp, Oryza sativa
  Clone ID: uC-osflcyp168b06a1
gcgcccttttttttttttttttttggggcaaatgaaacatatgagccatgacaccatccatccacaaacacatacgcagttttccccacaccatgggaagcacatcctggggtttcaatttacataactcctcaaataccgggctgtattaagtttctacagtgagggacgcttgctagtcaggcatgggctggatgaggagtgtgccctgcccatggctggtgcagtatgcgtgagcagcacagctgcagcaggagcggaggacgagagctgacagcatgccgcatgaatgatga

SEQ ID NO: 12660 - DNA, 242 bp, Oryza sativa
  Clone ID: uC-osflcyp168b07a1
ttttttttggggttttttttttttttttgtcttttttttttttttttttttttttttttttttttttttttatttttttttaaaaataaaaaatattaaaaaaaaaaaagggaagaaaaaaaaaaaaacaaaaaaaaaaaggggaaaaaaaaacaaaaaaaaaaattttcccccaaaaaaaaagaaaacagaggaaaaaccccaccaaaaaaaccggtaaaaaaaaaaaaaattgaagatcc

SEQ ID NO: 12661 - DNA, 470 bp, Oryza sativa
  Clone ID: uC-osflcyp168b08a1
acccatgccgacttcaaagtgcttaactacattatcatgaccaagcggagtatacccctaaactcaaaaactttaatttgtcataacatggcagatatggagggggaaaggctttccaacaaactattgacaaaatctgccattgacacaggctaggacggtaacgaaccagaacttgatggctgcttactagcagcctaaaaatagggtcggaataagacgagatggtttgtactgggccataaccacctgctggccggccatggcctcatcttctgcaggcctatcaagcttcgtaccgatgtcctccttggcatagtcaccatgcacctccatgagcttccccaggtcaaatttcggggcctttagaatcttcactttgcggacaaacacattctgaagggggaaaatactggatgtcgccttctcaatttccttcccaataacttcaggaatgaactttgaaacta

SEQ ID NO: 12662 - DNA, 294 bp, Oryza sativa
  unsure (1)..(294): unsure at all n locations
  Clone ID: uC-osflcyp168b09a1
ttttttttgggggttttttgggnttttggggttttccccttttatctcgcagtttagaccgtaaaaaaaaagagtaaaaaaatgaaaaagaaaaaacaggaaaaaaagatcaaaaaatcccaaaacaaaaaaaacacaaagaaaaaaaaaaaaactgaaaaaaatgaacaaaggaaagaaaaatgaaaagaaactgataaaaattaaaggattataaaaaaaaaggaagaaaacaaaacaggagaaataaaaaaaaaataaagtccaaaaaagggaaaaaaaaataagtgttac

SEQ ID NO: 12663 - DNA, 508 bp, Oryza sativa
  Clone ID: uC-osflcyp168b11a1
ggactagatgatctgattattcagagtttcaaacaacaaggtagtcgcttattacccacccacacacaacacagaacaggtacaagagatagcctctcaatctttactctcaagcatggacgatcttcaaggttcagggacctacaatactactacaaatggacgaatcatcgctccacagtcacccgccgcattcgaatttgatgcagaagacaactgacatacagcaattgattggaggggagttagccaaacacacttcagagcttacccttgagcctcttcttgaggacatccatgacggcaccgaagtcagccttcacgctgaccgggggattcgcatacttgcaggccatgtcttcgatcttgctgtcatggtagtcgatcttggactgtgagaacttcagaccatgagctgtgctgacgactaccgtgcggtcatttggcccgatgatgcgctggtcacggagcttgaacagcgctgcgagggcaaccccagtatgcgggc

SEQ ID NO: 12664 - DNA, 449 bp, Oryza sativa
  Clone ID: uC-osflcyp168b12a1
acttcagatttatttattaatgcatacgtgctgattatacagtagcagccaagcagcaagtgctagcggtagcaggaacaacgatgacaacgcgtttttcccgggttcatccatacagtactacgtatgttacgtttacatcatggcaccatctgagatgatggccttcaattactataaacgtacgatacaatgtcacaagtggtgatttatttccaggtggccacgacggggctcctcaccatgtgctggccatcgctccagacgatatctccccacgcgttgtatggcgagttgcttgaccctgccgacaaggtgatcgcatagtcaagcgtcttgcgctgcgcgttgaacgtgagcctcattggtgccaccgtgagcctagtgccaggcggcgcggtgatggtcacgtcgtacacggcgttggtgttcgccccgacgttggtcac

SEQ ID NO: 12665 - DNA, 415 bp, Oryza sativa
  Clone ID: uC-osflcyp168c01a1
ggatgcaacttggtttaatttgatgttaagaaacacaaaatgatgcatcccaacatgggtttcaaatggtttttttcatgcggtaccaaacatccgaagcggattattcaccaaatggctgcacaggcaataattttgctgttggatcaaaggtttgattacccacggttttccaaataaaatttacaggttcaaaatggagagttgatagggtctcgctgcagtgccttttgcacaagctcggtttgctcctgcacatggacggagtaaaaacctgttgcggtggctgcaaatggggcccttccaacgtatttgatgtcgtttatcgggccccgaccaagcgcccttattgcggtcaggaggcgaggattgatgtaactgtacccccccatgttcatgggttccttttggcacc

SEQ ID NO: 12666 - DNA, 452 bp, Oryza sativa
  Clone ID: uC-osflcyp168c02a1
ggtaattaaacctcgacattttattatatttgacacactggatatatagtcaataaactttaccgcaaattatgaaatgtacaggcactgcactgtaccatacgtagtttttgtgcagcatataaccataggctgtcacgtacggccttttataccacatactagtccttgaacgcttaataataattaaaagtgcgtgcatcacatcagaaaagtttcaacacgctagcacacaaacacggaattactagtctcactcttgtaggagaagatcaatctaatggtgcgacttgatctgtgtcgtcacatccgtttttattggttgtcgcatcggccttcaggagttcagggtagccatgtcggcatgaaggcagtcacgcatgagttgttcatctgctctggagtaaacccgatctgcaaggtgggctcggcggcagcttccagggaatgga

SEQ ID NO: 12667 - DNA, 469 bp, Oryza sativa
  Clone ID: uC-osflcyp168c03a1
accatatggaaagatttttacgttacagacatacaagttacagcacaagcagttttcatatgcttgaacatctaatgtcagcggtagcacattaaccaaaagtaaagtaaaaatcacatcttgggagcaagccccgtatcatgcttgggaacatcagctaatatcagtcttaaatcacatctcaggaaactgaccggcaagtcatcctttcctactcgctgatcctacagcagctgcttgcagtgacagtcatggtgtggccttgtcagcaagtgagtgggcagccgagctccttcgccgccgcggtgaggaaggcgagcgtcagcccggtggcgcggcggctgtgggcttcccactctatgcatctctccacatcggcttgccagttgatgatgcttgctgccaagcactggtaggttgggctctggatgccattccggtgttccccttggatgagcttactggagtt

SEQ ID NO: 12668 - DNA, 140 bp, Oryza sativa
  Clone ID: uC-osflcyp168c04a1
aattggagggtttattgggggttccaaaagggggggggcaacattactttggtcaccattacaaaaggcttaagcaaggaacagaaaacgaaaacgctcctacctgctaatagggaaaaaaattaaaacacaataacccc

SEQ ID NO: 12669 - DNA, 482 bp, Oryza sativa
  Clone ID: uC-osflcyp168c05a1
gttgggacaagggcatgcaggccgaagggaactctcacaatggcacaaggaatgtttcgaaccaactgtgtacaaacattcacaccaaataaaaataaatgagatcacatgaatcaaaatccaagaaaaagagcgtacgtggattgaaccacatacacttttgaatcagaatagtgcatcaacctgcctactcaaaataactccaggtacaggttttattttatattttttttaatcgaacaaaacaatcaggcagacaatgtacatcgcgagagcgggctggttacgatcgctttgctttgatcacaaagcgaggccttccttccgaaatgagattctgctacacctgtgcaccgcgccggttttcacaggcccatcgaccgttttcacgggcttttcggcgtcaattatcgcggtggtattttgtttggagtcgattgccttttgttcctttctgctcttcagaacagattcaagcccct

SEQ ID NO: 12670 - DNA, 202 bp, Oryza sativa
  unsure (1)..(202): unsure at all n locations
  Clone ID: uC-osflcyp168c08a1
accagtgggaattttttnggcgatcgaaccatcccatttacatatattggacacaccgtatgcgtggacaataaacgttaccgcaagttatgaaaggtaaaggcactgacctgcaccataccgggagtttgcgcagcatatagcctggggacttgagctaacggtcttttatacaaacatctaaggctacagcgcttaatag

SEQ ID NO: 12671 - DNA, 184 bp, Oryza sativa
  unsure (1)..(184): unsure at all n locations
  Clone ID: uC-osflcyp168c09a1
aaaacccaggngcgcgaggcgcgggacgagagcggaccgtgcgcgggcaagaccaaggggaggtgagacagcgaaagtatttcaaaaagacgaagcaactagaagagaccggaaggagggagagaaggattcacactgaagaagcggacagctaagacaacatagcggttaaggcgcgaagcca

SEQ ID NO: 12672 - DNA, 420 bp, Oryza sativa
  Clone ID: uC-osflcyp168c10a1
ggggggccaacaaaaatttccgaaaaaattaaactggcctcgcacaggtcaattttacatggtccaacaatgcaaagtaccacaagggaaaggcccattgaaagcccagctggggaactagatccaactatcgggaactaggaaaagccgctgcgggaaaattaaacagttcaaactggagataattttgcaaaacgggcccaattgcctgacaaccccttaaaaggggggattggagaataggcaaaagctggggcccaaaacattactgttacaaacaaaatttgaaaaccccggagcttctggcactaagcaaaatattgaattggggactacccaacttttggaaaacctttagttccgggggcattacaagaaaaggcctagcgaattaacctgggaaaagggttaactaaaaat

SEQ ID NO: 12673 - DNA, 493 bp, Oryza sativa
  unsure (1)..(493): unsure at all n locations
  Clone ID: uC-osflcyp168c11a1
cctcatcctttttattcattcctcccagagagacggatccatggaagttttcttgccctcatcaggcaagcagagcacacacacacggtggcagtggaattgctatgaacaagacgctaatcaacatccagagctaaaacaaacaaggggatcaaagcaaatcccgaaaaaaaaaacacaggggaaagtccacatcttcttctcgtccccaacgcctccgtgtcaccaccacgtcttgcggatttttttttaccctgttctattcgctcaggcgtccacgatctcgccgtcgtccttcgacgccaggatcagctccgggtgcgccgccgacgacgncgtcttattgatcgtgccgtcgatggcgttcggccggccgagcgccttcagcgccaggtgcgccgacttttggccggagatcatcatggctccgaacgttgggcccattcttggggcgccgtcgatctcggcgacctccatgccggtgacgatcatg

SEQ ID NO: 12674 - DNA, 420 bp, Oryza sativa
  Clone ID: uC-osflcyp168c12a1
aacgagtcgcacgagacaatacgattgatagagcaggaaaatattacaggactataaccctggagggtcataaccaggaaaaaggaaaaaatataccaccacccacacactgacagcgccaacacacaagaccgggagaaggctaacaccggaccggccgccgctaagcatgactgatcaccgctagaccgacaaaggaacgcagacgagatcacctaaaagaacaccctcacaaccaacgcaaagccaactcctagagtgtgcttgcaccaaacgatcgagaggctttggctaggggatgccaaaacgacgtcttcaagaagagaagcgatagaaaaccgccgtcaccgtccgtcggggctcaaagaagccaagactggctttcgcccggcaaccacccttgagggatgagacaggacg

SEQ ID NO: 12675 - DNA, 312 bp, Oryza sativa
  Clone ID: uC-osflcyp168d01a1
gggggttctaaaagaagcatcggccgctaccaactccacaaacaatccccaaacacggacagaggctttgcttatgttcagcgcctgacttgagaaaacgcccaggaatcccaaactacagcggcagatccatctaactaaacatcaagactcgtttcaacaacaactctgccacatttgacaaacagcactgatgctgcacaagacggcgtacacggtccacttataattgggcgttcgattccaccatcagagcgaaaaaaaacacgcgaacaagcattaaacattgctgtagcacacttctccaggaaa

SEQ ID NO: 12676 - DNA, 462 bp, Oryza sativa
  Clone ID: uC-osflcyp168d03a1
aaaagtggacaagcaagaagtatatatattcatccatttctcaaactactacaagaggtcgagaggaacacataatcaggagggattgcgacaatttacagcaacaggagtctggagatcgaggcaagaacaagacaggcagcagcagagctaccctcttcatttccactgaatttttacacatttggaatccatggaaaccgagccttccctcccgtcgtcgtggtgtcaccggagtccgatgagaaaaatggtcatggcgtgctcataatccggatcgctcgccggcgtcggtgaaggaggcggcgcgattgttcgggcggctgttgaggagtgggttcagagccttgacgacgatgctcatgttgggcctgaagtccgcctcgtactgcacgcacagcgcagctacggcagccattttggcaacagccttgggaggataatcccctttaagccttggat

SEQ ID NO: 12677 - DNA, 225 bp, Oryza sativa
  unsure (1)..(225): unsure at all n locations
  Clone ID: uC-osflcyp168d04a1
cgcgcacgcgagcgcgggtcccctagagcgggcgccccctnnnnnnnnnnnnnnggagggaaaaattagaggngccaggaancacaaaaccaacagaanagacaaanccangncnggnaggcanggangaaacggngaaaccacaaaagcacaacnaggnncggggccccagacagcggaaggcacanccanaggaaaaaaagangaaaaaacaccnacgaaagc

SEQ ID NO: 12678 - DNA, 395 bp, Oryza sativa
  Clone ID: uC-osflcyp168d05a1
caatctcacttcgattcaatggtcatcccaaattgcaagtctcaggctctgagcagaacaaatgccaatacaaaggccaaaaaatcaacttcagttcaagaaaactcacatggataaggatcaaaaaattccacacacaaaccagcaacacaactactaggtcgcagggtaacacaggaaaaatatcactagatatttgagacagtaacattcttagatagatcagaatttccgtcttttgtcacattcagaggtcatagtccacccaaaatatcaagaatgatgatgatccacatgatccaaaattccaaatgcagcctgcatgaatcgcttgcacagctctggatgatattttgggttggggatagatttgtctgtcaaagctttcccgtatg

SEQ ID NO: 12679 - DNA, 530 bp, Oryza sativa
  Clone ID: uC-osflcyp168d06a1
cgcacgcgcacgtgcgcggagtgaccctgagtgtgggcgccctttttttttttttttttttgtttttttttttttttttgggataaaaaaagacgtcataagagtgaataagaagctggcatatacttcggttagtagcattgcaacgcaaacagtatgacagggtaccacccattgtttaagagctaagacaaagacaaaactgatgcatccaacgtaccaaaacgaaagcggaccgtattattcggatagctatgagaagggaactaggagggggataactagaagggacagaatggcatccatgggtccatgacgttcagtcgacctcctccatcttgctctagccggcgtcgtactgcagcggcggcatgtcggcttcagcctcggcgggctcgtcctcgactatgctaaggccgagcttgagcatgcgggggatccaggtgccgaaggtgttgggggcctccaagctgaaaccggaggtcagcagggaaggcttgaagagcagcttcaccgggtccttcacggac

SEQ ID NO: 12680 - DNA, 399 bp, Oryza sativa
  Clone ID: uC-osflcyp168d07a1
acattcaacttccactttttattccaactgtactcccatctctcagtcagtgacacatatcaggaatacgtaaaagatttgcagtcgctgacaaccatgtgaatgactgagaacatatttgagagcaaagtaagacaggcaagctccctgatattatatcaggctcacaatatttgtgcatacaaactaaaataatttctcaacactgcttgatctacctatcatctccctttgtattcatgtgccgtgctgaaatcacaatgtcacattattttatcaatgctttgcccacacacatgaaaaacagctttcagatcaatggccatatttcttcaatcctaccaagtaacaacacaaatggtggctgctgagctgctttgaagagaggcgggagagaat

SEQ ID NO: 12681 - DNA, 506 bp, Oryza sativa
  Clone ID: uC-osflcyp168d08a1
acagcaggtaattgcttctgtacagcaggaagatatgatgaaaccctcaagttaatgggcgtcgaatgcagcaggtaattgcatttgcaatagcactgtggtttaactattttctacatgaaatggtgcaacccggataaatcaatgtcgctgcaaaattacttatgaaacatcgtggtaaaaacaagacaacctgataaatttacagattacgtttacctagaactatggatatttgtccaatccacgatttatgtaaacaccaccagcatcctcttattttcttgcatgatgacgcatctcggactgggtaacctccggtaaggttacaatattgcaccacccccatcttccagaagcaggatgtgaaatagcttgtgtagcgtccatcatatatatgtgcatcgctcacatttgacacttgacagtacaaatatccgtagcctgagaatgatgccatgttaaaattctaacttctcatgtggagtctttctttggtgctggag

SEQ ID NO: 12682 - DNA, 252 bp, Oryza sativa
  Clone ID: uC-osflcyp168d09a1
aaaaggaaaaccatttaaggcaatataccattcgaaaggaaacatgaaccctggaaaaacaggggggttcaatagaggcaccagggggtcaccccgaaaaatggggggcttaaggaaacaaaccaagcggcccccaaggctgaacaataccttgggttggacaaaaaaaacggacgggggcgatcggaaaacagccttttttgcttaaacatcgttacttacccttggtgaaaaggggtgaaacagcccgaa

SEQ ID NO: 12683 - DNA, 489 bp, Oryza sativa
  Clone ID: uC-osflcyp168d11a1
acacattccaacatagatatatatttcagtaaagaggttacaattaataattagcatacaagcaattcatggttcatgtcagttaaagcaataaccaaagttacaatagctaggaacatattatttggttgatcaatcaataacagaaagatgatataaatagatggtacagatcctgaagttgatgcttgaatgtataattaaacttatggaagcacttcattgttgcactcctaatgtgggctgcacatttcgccaaccaaccattaagtatttgcaggattgccgagtgacctgcatatagcaactaaataaaatccggttgaaggtgcacatggagcccaggaaattcagaaacaagaaaaggtgcattttatgtcaggaaattctccagcatgtcgccgccatcagcgggaactcccgagccccgtcacatcgtcttcgttgctgttgtggtggatgcagcacgtagccatgacctggagcttc

SEQ ID NO: 12684 - DNA, 361 bp, Oryza sativa
  Clone ID: uC-osflcyp168d12a1
ccaaccaaaacataggagggaaaaataatttttcaaaaaggagggaagcaactttccttctttaaccaatacaaaagggtaagcaataacagaaaacaaatcctcctcctcctatagggaaaaaattcaaacacaatacccttaaaaggacttaatattaggaaaggtagcgggcaaggagcaaaaaaggcaaaaggggggaagggtaaagaatcacaatgctgagccagaggaggaaacaaaacaccataatgggcacagagcaaaaagcccctcaaaagggagaacttttaggaagaaggctttcacccaattgagggggcttaaccaccttcaagggagaagtctggggagaaacctt

SEQ ID NO: 12685 - DNA, 421 bp, Oryza sativa
  Clone ID: uC-osflcyp168e01a1
gaagggataatttaaatacttaatagtaatagactctttgatggagtattacaacatgcagcaggggcattaatacgccagtacattaattaagttacacatatgcaggctccattttggtttcttttaatttatcgtattacagaatttctgtagccttgcagatgatcacttggatatcatgtactagtaattaacaataggatgcatacaaaagatggcccaacgacaacagaagatgcgtgcatctgacattgactggccttatttgttggtagtactccaattaattaacaagagatgatgcattcttgtgccttagtttttttacatgcttggcttcacgttgagcctattcgcaatcttgacccccaacgactcatcacactgggagaggtagttgacccagatggcgcggagc

SEQ ID NO: 12686 - DNA, 292 bp, Oryza sativa
  Clone ID: uC-osflcyp168e02a1
ataattagtttttttactatttacaagtttgtggaaagaaaacaaagagcaatttaaaaatttaactagcaaaaaccgatggagaggaaactgatgaacactgggcagcccccaaagtgagaatggtcatagcatagcggtatccccccatcggaagacatggaaaaccaagggaggcagaaggattctagcagggccttaggccgagaggaaaaacaagagcctatgacgcggttgaggggaccccaaaggaagacaaaccatgctccaagcgggacaagggggtctttaa

SEQ ID NO: 12687 - DNA, 170 bp, Oryza sativa
  Clone ID: uC-osflcyp168e03a1
cgcgcgcgcgcgagcgcgggtcctctagagtgtgcgccctctttttttttttttttgggggtttaaaagaagtattagtcttttacccatgtccaaacaatccctaaacatggccagaggctttgctgatgatcagcgggtgactcgtgaaaacgaccaggattcccaga

SEQ ID NO: 12688 - DNA, 721 bp, Oryza sativa
  Clone ID: uC-osflcyp168e04a1
ggggggaaaattttaaattcattattttatccaaaaagcaataacgaaagaagaacgatagttagggggaaaaagagtaaaaaaagaacaaaaacgatcacaaacacgaaagaacgaacaaacaacaaaggacgaaaaaggaaaatggcacttagaaaaagtaaaaaacacactaataaaaaaaaagggaaaaaccgccacacaaaaataaaaaggctagaaaaatattaacaaaaaaaggggtcttgttttcaagaaacaaacaacaaagtatttagatagaaaaaaaaaaggatgaaaataaaaaaaaaaattaaaagcggaaaaaaaaaaaaacttttaaaacccaagagccagacacgttataggcaaaaaataacacgaaaaaaaaaagttgtattgggaaaaaaaaaaaatacataataaaaattgaacaatagaaaaaaggggggggccaaaactaaaaacaaattgggggaaaagtaaaaaaaacatgagaaaacagaaaaaaaaactggttaaaaaaaaaaataataaaaaaacattaaaaaaaaaaaatagataaaagagaaaataaaaaaaaaaaaaaaaaaaagacgtaaaaaaacccaaaaactataaaaacaaaaaaaaaaaaaacatcaagccggtcgaaaaaaaattaggtaataaaaaaaacaaggaagaaaacttaaaaaaaaaaggtataaaaaaataacaa

SEQ ID NO: 12689 - DNA, 364 bp, Oryza sativa
  Clone ID: uC-osflcyp168e05a1
ctaagcagccataatgacaatatcctttgcatgtaaatagtatcactgcgttcgatgcaccactatatacagagattcgatgaaactaaattcttctcagcgtggcgtaaccactgggtgggtacatagttacatacaaaacgctgatattttgtcttggactatatctgcttgggcctaattagtattactcatgaccaagatgcaaaatatattacagaaatgaaggctcaaatctgattgactttagcaaaacggcccttaatcctcagcctgctatcagcacgagctttgcgggacttataccggacctgcctgtcgaatcttcttggcttcctcttctttttatagccagaaatgacca

SEQ ID NO: 12690 - DNA, 464 bp, Oryza sativa
  Clone ID: uC-osflcyp168e07a1
tttttacgacaaaccacgaacttggatattaaagatgccacaaagaaggttcacataaacaacacaggtcacagcagcgaaagctacaagcaaaccctgcataatcgaaaagcaaatgtttttcaaaaccagacacacaaactgatagatagaagcccacacggacagatcataggatagcagcagtaatcaagcattgccaaggcaccaggcaagaaccctgaacctctctagtactcgtcaccctcatcaccctcgtcaccatcgtcgaactcggagccgacctcctcgtagtccttctccagcgcggcgaggtcctcgcgggcctcggagaactcccccttctccatgccctcgccgacgtaccagtggacgaaggcgcgcttggagtacatgaggtcgaacttgatgtcgatgcgggagaacacctcgacgacgcttgttgagttggagatcatgcacac

SEQ ID NO: 12691 - DNA, 449 bp, Oryza sativa
  Clone ID: uC-osflcyp168e09a1
ggagattctaaaagaagcatcagccgttaaaaactccacaaacaatccccaaacatggccagaggctttgcttatgttcagcgtctgacttgtgaaaacgcccaggattcccaaactacagcggcaaatccatctaattaaacatcaagactcgtctcaacaacaacctgccacaattcacaaacagcaggctgctgcacaagacggtgtacacggttcattttatttgggtgttcgtttccaccatcagattgatataatacacgcgaacaagcagaaacattcggcaacaatttctccaggaaaatcgcggcctatttcgtcatcatcccgagcgagcgttatttggaagagggagtctttttcagacaggcacagcctcaatggcaggagcgagtgaccaacgtcgacgtcggcgtcctagtagccaccctggatgtaggcgttga

SEQ ID NO: 12692 - DNA, 356 bp, Oryza sativa
  Clone ID: uC-osflcyp168e10a1
ggcagaaaattttacatccattatttttccattttgcataccgcaagaagaccgctagctaggctgaatagagtgaaaaaaggccaaaaactatcacaacacgtggccgaactacaacacgtgcgcacggtaccacactagaacgtaaaaccttttttgagagcggtataccctaccatctatttggtagcacttatcaacaaggggcgaacagatcagccaagatgtaggctcaaatgtgcttgcacttagtcatgacggaacttactttatcaccctggtacgattgcaagttccgctccagcgctgatgaccatctcttgttgaatgccgagggggcccctcacactgggaag

SEQ ID NO: 12693 - DNA, 493 bp, Oryza sativa
  Clone ID: uC-osflcyp168e11a1
acacacacaagccaccgctatcttttatttgagtcgtatagttttaatacaatgaacatacaaccaggcaccggtgcgaactcctgccacagcaattctcgaaaggattcaaatcccagtcggttatcctcaataatcacaacaatcccagaatgtatttggctccaggccttcaggggtgggttgcgcctccctggatatgatcgctcactggtggggggttgaccacagggatatccaagctgccgccttctgattctggggagacctcccgcacatcggcgatcaatgcttccgactgctggaaactaccccactccgcatcaccgataggacggatgtcgaccccatccacggccagttggacttcagtgttatcattggaaactaggacagatcttgagtcactcacacaagctttgtcgacatcgtcatctgatgcatcgacgtgctttgtcaagggaggggagttatcggtgccggagcatgattc

SEQ ID NO: 12694 - DNA, 497 bp, Oryza sativa
  Clone ID: uC-osflcyp168e12a1
tttttttttgggagaaaaatttgtggtgccattaatcatcaaatcaacagaatagacaaatccatgtcttgttggcatggatgatacggtgaaaccacaaaagcacaactagtttctgggctcctgtctgtggaaggcacattcataggaaaaaaagatgaataaacacctacgaaagcgttcttttttctttatcctcacctacgaaagtgttgggtctcggtatctcttgaagagggattcgatgtcatcaagaacttccggtgccaaaggccgtggagcactggtaaatgcatcaatgttctccttcaactgatccatggtcgttgctccgatgattgtgctagctgtgaatggacggtcacgcacaaagcccagtgcaagctggactggagttaggccgtgctttttggcaagcttgacatattcattcgttgcttcctgtcaaaacaaatgcaccaatcagcaagtcaccatttacgggtgagaatgaacag

SEQ ID NO: 12695 - DNA, 331 bp, Oryza sativa
  Clone ID: uC-osflcyp168f01a1
ggggagccgggccccgaattaagatttaaaaccccccccaaggggggggggagacccaacccccccgaattggcccaagaaccccgcctaatccaaccaaaccggggggggtcttatttcaccaacccgacccggacttataaaagggctaacacccccccccccttttttttatttgggggctcggcgactcaagacgactggtactgggaaagggggaaggggaacaacccagatttaggggggggggccccaatcggggaagaccaccgggttgggggggcccccgccgggggaacccacctttttggggggcttggcgacgtccatg

SEQ ID NO: 12696 - DNA, 308 bp, Oryza sativa
  Clone ID: uC-osflcyp168f07a1
gggaattaaaggggatttacgtaatttgtttggacaaaaaaagggaggagtaattgattggggggggaagaccacacaggtagcagctgcatggggtaattaaaattttagctatatatggatcgagacgggggaccaattccatttttgagactgggggcagaccatatgaaatgatatgaccagtagtcgggggggggcaattggtcgtgcgggccctggccgatgaaaatgatgtcggaaatgagcgcggctaaggcggcccccacaaaggggccgagccagtagacccaggggtttgcccaaac

SEQ ID NO: 12697 - DNA, 353 bp, Oryza sativa
  Clone ID: uC-osflcyp168f08a1
ggggataacacaagcataccttgcagcttgcacgaagttactgatatctgaggtagctccattgctggggctatctacagcgaggcagaatggcaagcacagagcttgtcctagagacagactatttattggcacacaaagcaactcacatatgacatgctcaatagttcatcgaaacagacatgaaaacagggatccagttgacaatgcactaggacattcaatccagggggggatcagtggatgagataactgatcgaagggggggggcaacctagcagcttaattgttctcctgcaagttggggtggttgggctgcacgcggaaggtgaacggcatttgggccgcaaagg

SEQ ID NO: 12698 - DNA, 386 bp, Oryza sativa
  Clone ID: uC-osflcyp168f09a1
aggcagaaaacaaacggattgattattggcaaatacttgacattccatgattccaaaaggcacaggctcctagaaattagaaacaagaggagcgaaaaaaaccgatgggggatgaggtggtcaaccaagccagatgcagaatcatggtgttgcagagtgcgtgtaacctagcctatgatcacttggatatgacgtactacgaattaacaatacggatgcatacaaaagatgggccaacgacaacagaagatgccggcatctgacattgtctggccttattggtgggtggaccttcaattgattaacaagagatgatgcattcttgtgccttagatttttcacatgcttggcttcacgttgggcctattcgcaatctttacccccaa

SEQ ID NO: 12699 - DNA, 346 bp, Oryza sativa
  Clone ID: uC-osflcyp168f11a1
catgaaggattttgcatttggtgcaaggtaatacaaatgttcttcacattggctagtcaaaattttctattagatatcacagtagatggacgctacgctgacaacagttgatagggcatgtaataagatgcaagatgaaatagtacatccacctagcatgtgttatagcacaacaatgtttggaatctgttaaaataactgctcacttaatgctcgcattaggaacagaagatctacatggaccagcagatgtagtgaagggtacccctcggtatgttgcaattccatttccatcagtgtgaagatccggtgtgatcttgtcgagctgtttcttttttggattaag

SEQ ID NO: 12700 - DNA, 717 bp, Oryza sativa
  unsure (1)..(717): unsure at all n locations
  Clone ID: uC-osflcyp168f12a1
aaaaaataaataaaaaaaaaaaaaaaaaaaaaaaaaaaaaaaaattaaaaaaaaaaaaaaaaaaaaaaaaaaaaaaaaaaaaaaaaaaaataaaaaaaaaataaaaaaaaaaaaaaaaaaaggaaaaaaaaaaaaaaaaaaagaagggngaaaaaaaatgggggccctctttaaaaaaaaaaaaaaaccccaagtgggggctcccaaaaaaaaaaacaaacccctatagaaaaaaaaaaaaccaaattctttatgggggggtgaaaaaaaaaaaaaaaggtctttcaatcctaaaaaaataaaaaaaagaaaaaaaaaanntctcaactctgggttttttcggcccctcccacaaaaaagaaaaaaccccaacgggaaaaaatttttatggaaaaaaagaaaaaaaaaaaaaaatttgagaggagaaaaaaaaaaaaattttggaaaaaatcacaaaaaaaaaaaaaaagggaagacccccaaaaaaaaaaaaaagggggggggggaaaattttaccccccacaaaaaaaaaaaaatttttaaaaaaaaaaaaaaaaaaaaataaaaaaaaaaaaaaaataaaagtaaaaaatggaaaaaaaaaaaaaagggaaaaaaaaaaaaataaaaaatccaaaaaaaaaaaaatggtgaaaaaaaaaaaaaaaaaaaaaaaaggggggggccaaaaagataaaaaaaaaaacagggggtggg

SEQ ID NO: 12701 - DNA, 224 bp, Oryza sativa
  Clone ID: uC-osflcyp168g01a1
gaagcacgccgacggaagcgaggatccagaagtgctggccgccggcgccgagaccgcccgagggggccggcacgctcgagagcggcgcctgcgccggaggcgccggcgcgcaaaagaaaatagccggctacgacggggacttaaaagggaacgcatgcgccggcacgccaagacaccgccaggggagaaggccaaggaagccggggacacgcggggagggcccg

SEQ ID NO: 12702 - DNA, 320 bp, Oryza sativa
  Clone ID: uC-osflcyp168g02a1
aacgactcgcacgagacaatacgattgatagagcaggaaaatattacaggactataaccctggagggtcataaccaggaaaaaggaaaaaatataccaccacccacacactgacagcgccaacacacaagaccgggagaaggctaacaccggaccggccgccgctaagcatgactgatcaccgctagaccgacaaaggaacgcagacgagatcacctaaaagaacaccctcacaaccaacgcaaagccaactcctagagtgtgcttggaccaatcgatcgagaggctttggctaggggatgccaaaacgacgtcttcaag

SEQ ID NO: 12703 - DNA, 363 bp, Oryza sativa
  Clone ID: uC-osflcyp168g03a1
gaaaaaagaagtacactctagtaagggtatcacataaattacaaatacaaatcaacaagaaattttataaccccaaaaaaaataagagaaagaataaagccgatggacatacagagcagcacaacaatatcggtacacggttcaatcgatctcgatcaattcggattcggattcggttcaccactccagttcagtcatcgtgcatacggcatgcatgggcgatgcatttgttcgacgtcggcgtcgtctccttagcttagagggcggcgagaatggcgccggccaagacaccggcagcggcgacgacccacctggagacggcggtggcgggcgcggcggccttcttggaggtgtcggcggcgg

SEQ ID NO: 12704 - DNA, 443 bp, Oryza sativa
  Clone ID: uC-osflcyp168g05a1
tttgccgccctatctatttttttttttgggtttgcattcaattgcatatcaatattattaattttcacaaaaaaaaatggttacacattcttcccgctttcggggtaccaccgactatgaacatattgacagaaagacttccattaatctatgcaagttcaatggccccatggaatcatatatggcaagagacagccattcttaaccaaacttgatgaacaaaggatgcatatctccatctcatgccccactccccaccccaccaaaatctagagtgaggaagtaagaaataacagcatgggcacgaggaagaaatttctaggaggcaaaaaaataggtagggggtggaaattctagcaaattcctagggattaacttctaaaaaaggctaatagagaaaaagaaacgaacaattaaataagggtgatacactgaggagcgct

SEQ ID NO: 12705 - DNA, 342 bp, Oryza sativa
  Clone ID: uC-osflcyp168g07a1
tagtttgccgctggcgccgagccgcccgagggcaccggcacgctcgagagctgcgcctgcgccggaggcgccggcgcgtctttcttcttagccggcttcgacggcttcttaatagggaacgcatgcgccgacacgccagactccgccggcgagatggccatggatgccggggacggcggggaggccggaggcggcggcagcacgagcaggcgggacgaccagttgacaggcgcagagcgggagcgctagcttagggccttggcggggaacaggggcccccggcaggaagccgccgggctgcactgccatggaggcagcccccgacgcagcttgagcttgagc

SEQ ID NO: 12706 - DNA, 322 bp, Oryza sativa
  Clone ID: uC-osflcyp168g08a1
ggccaacgttgacaagattctgacataaacttggaaaaacagatcattggccccagggctgtttagctaaacagaacaaaaggccgtaggtatataacttgctcaaaaaacaaggtgttttggaagggcaagccaggggcgcttaacactgaattcttattttggggggctagaagctgcatgactcatttgagagggataaaccgaggggggggggtggcaccaataccgggcctaccgggcttaaccggcttgtgggatatggagaaccccgcagggaagagcccaatcatctgaggtttaatctcaacctggttgaagg

SEQ ID NO: 12707 - DNA, 184 bp, Oryza sativa
  Clone ID: uC-osflcyp168g09a1
tttttattgttggtttatatttttttttgggttttaccttttttacatattctttttataaccaaacttaataaccccagaaaaaatataaaaaagaaaaaacccgaggacccccacaaaagaacaacaacaaaccaacacccccaaaccgaacccgagccagccgcattcgaaaaaaaaagca

SEQ ID NO: 12708 - DNA, 365 bp, Oryza sativa
  Clone ID: uC-osflcyp168h01a1
ggacacaaaccactgtttttgtagatattagagggcacacagaagacggaataatatatgtccaaagggcttttaaatagggaagctatgtcatctccatataattccccatgaaatattgatggggtatatgtagacatgaaggaagggttcgtatggctggatcatcactagaattttgttatttgaccctgatacttactatggggccatgctgatgaaaaacatagcaatcttacttgctttttttagaagcctcgtataggtggctcacgataactacagttgcagaaacagttaccccgacagcactttgggcgagtacagcaccagttaaaagatcagatttcgtaaatgcagggccg

SEQ ID NO: 12709 - DNA, 423 bp, Oryza sativa
  Clone ID: uC-osflcyp168h03a1
gaaccgaactccaataggaggaggatagcttaatttgcacatagtaaaagagggatacacaactgagtactgaaattacaagtctgtgttcagataaaaacagtagtacaacaaacttgaagaggaacgtcgactccacaataattactaacaaagcaggcagcgggaaacagccgcgcccatcagaaacagcttgctctggattggcatcttgacagtgataatagctgatgcaggttacgacctgctcttgaatggaattgccctgatgaccacctggtggtagatggcagcaagggcagcgccaatgaaggggccaacccagaagatccaatggtcatcccaggcatggcccctgttgtagatgatggcagcgccaaggctcctcgctgggttgatgccggtgccggtgatggggatggt

SEQ ID NO: 12710 - DNA, 295 bp, Oryza sativa
  Clone ID: uC-osflcyp168h04a1
cccattaaatattttcgaccttcatttgcaccaatctaaagcttctaaacagggggtttttgagggatgaattattcaccacatcaacaaggtagacggaaggcttaatcacaacagcaagggtagtgggcaccaagggcaggggctggaaacgtggcatttgaaaccaattaaaaagttctaaggggacaattgcagccaactgaagtacttttggaaaagggggcgggaaatggccaaaccataacccgtagccttcacagcatagagccccttcccggacggccattcattg

SEQ ID NO: 12711 - DNA, 506 bp, Oryza sativa
  Clone ID: uC-osflcyp168h05a1
ataacttaaactatcttatcatatgcttccatgtatgcacatttacattctgaaattttaacttagctatatacatattctgtaatatataccatatgctgaatctgaaataacaacatatgttttatgcaagtattcattaaaaaaaattatgcacaatattgtacaacataccagactacccaagcaaaattaaatgattttccttgtcaatttgactatatcacaaatatacttcatacattaatttcacaggatagataaacactgtacagagccgaaagtacaaatttattccattagtgcttagtgcttaaaaaatccaacttgaaatctcattaaattagtgcagttatgaacagcgaaagcttgattaaaataaacagaaaagcagtggtcagtcgaccttatttcttccccaaaatccatatactgctaaaaaaattcagtagacgattggcaccaaatgaattagctctaatcaattggcaaacttataaacaaag

SEQ ID NO: 12712 - DNA, 296 bp, Oryza sativa
  Clone ID: uC-osflcyp168h07a1
cattccgatggatagcaacaggcagttcaaacaccataaccaaagcgaactcaattcatggtaacatcacggacgaagaacacctaacactggatggatggatagagggcttctcgactcgagagagccactggacacgataacgacttgactcgatgataagatgattctgacacggatagctaaggataactggccacgatgggccccaccaatcagttcctccagttcccgccggagtcgccgccgtagccgccgccacggttgccaccgtagccgccgccgccgccgccacg

SEQ ID NO: 12713 - DNA, 444 bp, Oryza sativa
  Clone ID: uC-osflcyp168h08a1
agatgatatacaagtatattagcgggtagtagttggtgcatttgaatagtggcattcgagttgagggctgatcattagcgcttaaggtgcaaagctaactagcgtagcataacggtggaagaggaggcatgcagttctgctgttctaaggtgaatgggctaatttagtgctaacaaaaggacgattccactatagcataggcgacacacatggcatttagcagacatctattggcgtttggagctgaggtgccttgtggaagcgaaagatgaaaacggaccgaagatgaatgccattgatcgctgcaaaagttggccatacttttttttaagttgcagcgaacatgggttgaaacatgtagagaaagggtgactgaaaatctgcctgctgctagaacttgaatgtgcatggctattcgacctaccatgagtggctgaatgtagg

SEQ ID NO: 12714 - DNA, 355 bp, Oryza sativa
  Clone ID: uC-osflcyp168h09a1
gatgaaatccttcacaatgggtttaattaattcgccatcagaaaagaaaatttctacaaatatattataatttagttacaatacttttttttttagaaacacccccgtatatgaaacttgcagtcaagccaagaacttctcgaccttctccacttcctccacgctcccgatgtacagcggcactctctgatggatctccgtaggcatgatgtcaagtatcctctggtggccatcggagcccttgccgccggcctgctcgacgatgaagctcatcggcgcgcactcgtacagcagccgcagcttgccgttcttgctcttctggtccctggggtagccgtagatgccgccgtagagc

SEQ ID NO: 12715 - DNA, 297 bp, Oryza sativa
  Clone ID: uC-osflcyp168h11a1
cacgcgcacaaaagcgggtaccctagagttttcgccccctttttttttttttataattttaactattttatcatatgctttcatgtatgcacatttacattctgaaattttaacttagctatatacatattctgtaatatataccatatgctgaatctgaaataacaacatatgtttaatgcaaggtattcattaaaaaaaattatgcacaatattgtacaacaataccaagactacccaagcaaaaattaaatgaatttttccttgtccaaatttgactaataatcaccaaatata

SEQ ID NO: 12716 - DNA, 319 bp, Oryza sativa
  Clone ID: uC-osflcyp169a01a1
ttttgggtttttttttttttgggttttttttttttttttttttttttttgaatgtattttttggtttttctctaaaaagtgcaaagacaggttcagaaagagcaaaataaactgaacagaacaagggaggcaaactggacaaagaaagacaaaaacaccgcaaaaaggaaaaatttggggggaaaaaaagcaaacctggggggggaaaaaaggggggacggggggaccaacaaaggggcctggggaaaaccgggagaccaacctataaatgaccggggaactctagtctaaaggcatcgaaaaggccggggccaggaca

SEQ ID NO: 12717 - DNA, 316 bp, Oryza sativa
  Clone ID: uC-osflcyp169a02a1
aaaaaaaaaccaaaaaatttttgggaaggaaaaaagggggggttaaaagggaaacgctttcaaagggggccctttaaggggggggaaaattaaaaataaaaaaggggttaaacaaaactgggtaggttccaacaaaaaaaaaaaaatttggttttggggggggggggaaaccaaaaaaaatttccggaaacctgttttccccattggcaaaaaaccaaaaagggttcccaggggggggggacaaaagggaaagggggttttttttttttttccgggaaaaaacagattggggtttttggcaacaagggaattttta

SEQ ID NO: 12718 - DNA, 442 bp, Oryza sativa
  Clone ID: uC-osflcyp169a03a1
gttggtatataagtaatcattgaaatgatcttaccctctgtaagaatggaatacatgtggcagcttggccatgtacaacatgtacatttgaccaaaccaaatttccctccctttagaggagaaagaataaaagaaatagaagaagatacaagaggagtagtacatgtctagttgcacgtgtgatatataaaataaaggaaggcaaatcccctagtttaatttaatttatgtccccgtatacgccactggtgaagtccagcatgagtttgttgagcttctttgtgtggatcctctgtgggatcaccttgagctcatcactcggcggcgcagggggtcgcggcgcggcggcggaggagatgagcatctgggcgagcttggcggcgtcctccgggcggcagatggcgttgttgaagcaaaggtagcggccgtaggcggtgggcac

SEQ ID NO: 12719 - DNA, 282 bp, Oryza sativa
  Clone ID: uC-osflcyp169a04a1
tttttgtttttttttttttttttttttttttttttttttttttttttgggataaaaatatatagccggagcttccatatatttcattcacatatgcctcacccaacaacatatagtcgtagcagataccacttttacattaagtcagagggggatccggggaaacaaaaacaaaagccgtgcccgggcgggaaaaataaaagacgatgaacaaactgggaacacacgaaaacaaggggggggacctcattggattaggggtggaccatttaaccagggtttt

SEQ ID NO: 12720 - DNA, 342 bp, Oryza sativa
  unsure (1)..(342): unsure at all n locations
  Clone ID: uC-osflcyp169a05a1
gaaaggaaattaaactgatttattacttgttccattaaaaccatcacactcgggtacgtggtgaaaccgtgaaagttaaaaaacaaaaacagtagtagtagagtgaggccctgctcgctgttacatgagaggtgcacgaagaaccagcacacgagcagagcattcagcccacacgcagcaaggaaacggtagggatgccgncgncgccgncggccgatccgtcgcccggcgatgatgcgtcgtcgtcggcggtcaggtgcacgcagaggctgaacggcgtgcggagcggatcggtcgagaggtgatgagtagttgacgcggagcagatatatatggatggat

SEQ ID NO: 12721 - DNA, 310 bp, Oryza sativa
  Clone ID: uC-osflcyp169a07a1
tttttttttttttttttttttttttttttttttttttttttttttttttttttttttttttttttttttataaaaaaaaaaaaaaaaaaaaaaaaaaaaaaaaaaaaaaaaaaaaaaaaaaaaaaaaaaaaaaaaaaaaaaaaaaaaaaaaaaagaaaatgtggggaaaaaaaattgggggaaaaaaaaaaaaaaaaaaaaaaaaaaaaaaaacaaagcaaaaaaagaaaaggggaagaaaaaaaaaaaaatagtgatttttttttaaaaaaaaaagagaataaaggggaaggagaaaaagaataataat

SEQ ID NO: 12722 - DNA, 406 bp, Oryza sativa
  Clone ID: uC-osflcyp169a08a1
ccaacgagaaccatcagtcctttagatcctgattaaatagctagctacatcaaaattgcacaccatgtttgcagtttcaaacatacaacgcatgaatctagagcttgaggaaaacgaattcttcaatcgccggaatctccccaatctttgtcagggtgctctttttaggttcctcatcaacaccaatcgccatgacggcatgcttgcgaggagcgattcttccaacactcatgaaactgacattaacattctcctcaccaaggacacttcctactgcgccgatcataccaggttgatcgacctgcctgcaaaggatcaggcttccttccaagctcacatcaacctggaatgatccaacctttgtcagatgggggatgccatccttcaccttcccctcaacaggatc

SEQ ID NO: 12723 - DNA, 281 bp, Oryza sativa
  Clone ID: uC-osflcyp169a09a1
aaaaaaaaaacaaagaaaaaaaaaaaaaaattttgttacaccatttttttttgggattaaaatcaaaaaggggatttttaattaagcaacaaaaaaaaaaaaggttaaaaaaaatggtgttaacccaaaaaaaaaaggtggaggggcccaaaacaaaggggaaaataaaccaccggggccaaagggggttttttttaaaaaaaaaaaattgtggttttccggggcgcgttaaaaaaaaaattttatttttttatttgggggggcttgaaaatttttttttt

SEQ ID NO: 12724 - DNA, 430 bp, Oryza sativa
  Clone ID: uC-osflcyp169a10a1
ggtcatcagtaccatataacggacgattgctgattactattactggttgcaatgtaacacttcggatacaatagtacattacagagctagctaaatgcgaagccacaataccgtcagcgcaagacgatcataaataaagcttacacaacatagccaacatgcaaaccattcggactgaccagagatgagggttcttgaagctgccgtggtgtgccatgcatcacaaatgccgaacaactagattgtagcagccaacatgaaaaggaaaaggcatggataatgcagcaaagatggatgatgaagaccgcagattgtgacgcttcgttcaccaaccatatgaaaacccctaaatttttgcaagtttcttcgccttcaccaccggattagccttggcaatagcatccctagcagcggtccgatagtcaaactg

SEQ ID NO: 12725 - DNA, 461 bp, Oryza sativa
  Clone ID: uC-osflcyp169a11a1
caaaaagactgcccaaacagaccaagggtatcatcatagcagcaaagttttttaacacgcaacatcaaagagacactaatgcaataagataacttgaagcgcggatcactagcaaatttcgcgcttagtcgacctcctcgatcttggggccagcaccgttgccgcctgccgggggagcatcgtcctcgtccatgccgccggccatgtccgcgccagcgccctggtacatcttggcgatgatggggttgcagatgccctccagctccttcatcttgtcatcgaactcatcagcctcggcgaggctggttgccgtccagccactggatggcctgatcgatggcatcctcgatcttcttcttgtccgctgccgggagcttcgaggcgatcttctcatccttgatggtgttgcgcatgttgtaggcgtagttctccagcgcattcttggactccaccttcttctt

SEQ ID NO: 12726 - DNA, 300 bp, Oryza sativa
  Clone ID: uC-osflcyp169a12a1
acaggagcagctgaattagatgaacaattagaattccctgaacctgaaacacattcccgcctgttgaattagatgaacaattagaatcccctgaacctgaaacacatacccacacctacaagggtacaactgacagcgtacaaaaattgcaggcaagggtcgtatagagcatggagattgaagaagtttcaaagcttgactgtggacggttcagacttcatagtgaaccaggggcggctaattttatgcttatattcaagctgtttctcattgttcttcttccaacacccacatttggcc

SEQ ID NO: 12727 - DNA, 274 bp, Oryza sativa
  Clone ID: uC-osflcyp169b03a1
ggcccccggaaaaacccaggggttttttttcccccccgggaacaggggggggggccccaagaaaaaagggttttggggggggggcccccggggccccttttcccaaaaacaaaaacccggggaaaaaaaggggtttccaaaaataaaaaagggggggaaaatatttttgtttaaaaaaaaccccccggggaaaaccggaaaaccggggggaacactttggaaccccccgggaccgtttaatttgatagaacggggggcctttggtttgttttgg

SEQ ID NO: 12728 - DNA, 437 bp, Oryza sativa
  Clone ID: uC-osflcyp169b04a1
tttttgtttttttttttatatgcacaaacttcaaatcaaaatcacaagcaaccatacaattctgagagattgtttgcttcctatttctatatgactcttgctcatccaatggaagtttcatagggatatgagtaccatctatagcaccaatacaattctgaaaaaaggggtaaaattgtggtttcctcaagattggatgtgggtgtagggatggtgcacgaatgtagacagatgtgagatttgtgattgcttccagcactgctttgaaatatctatgtattgtgtctggactatgctgaaaccaatcttgaagtgtttcattggttgcattttttgccactgtatataagaatatagcaatatgctcttctactgaaacatatagtaccagttaggtactctttctcacgtaacttattgactagtgcatgaaaaat

SEQ ID NO: 12729 - DNA, 413 bp, Oryza sativa
  Clone ID: uC-osflcyp169b05a1
ttttggtttttttttttttttttgtttttttttttttttttttttttttttttttttttttttttttttttttttttttttttttttttttttttttttttttttttttttttttttttttaaaaaaaaaaaccggggggtaaaaaaaaaaaaccccccccgggaaaaaccgcccccaaaaaaaaggggggttttaaccctccccccccccagggggggggccaatacccccccccccccttttaaaaaaaacccccggggggaaagggccccctttttaccccgggggaaaaatggggggtagggggggaccccctggcccaaatttggggggggaaaattggggggggggcccccccccccccccacaaaaaacggggcctttaccccccgggggggggggggcccccccg

SEQ ID NO: 12730 - DNA, 411 bp, Oryza sativa
  Clone ID: uC-osflcyp169b06a1
ttttgttttttttttttttttttttttttttttttttttttttttttttttttttttttttttggaacaaaaaggccataggctgaatgctaaaaaccataccattttagcaacagggaaagacaatttggtttgggggtttttaaaaggggccttaaataagggaaacaggcgctttacagtttgcagcaaacatgagttcgggaattggtcaacataacatcaggcaaaagagcttaaaaaaggattgtttggggcaaatagttttattttcttgcaaacaacttgttttagcaaaactccaggcagacccagcagcaaattttaagcgttggcaaaaacctgggcggaagcatcccgcttcctttgctcctcgatgatgctgagcttgatgcccttgcccttgggcag

SEQ ID NO: 12731 - DNA, 455 bp, Oryza sativa
  Clone ID: uC-osflcyp169b07a1
ttttgtttttttttttttttttttttttttttttttttttttttttttttttttttttttttttttttttttttttttttttattttttttttttaattaataataattttaaaaattttttttttaaaaaaaaaaaaaaaaaaaaagggaaaaaaaaaaaaaaaaggggttcaaaaacccggaaaaaaaaaaaaaaaaaaaaaaaaaaaaaaaaaaaaaaagggggaattttaaaaaaaaatttaaaccaaggggaagaaaaaaaggttaaaaaaaaaagggggaaaaaaaattaaaaaaaaaaaacccaaagggggcaaaaaaacggggggggggggccccccggaaaattcgggccggcccccgggggggccaaaattttcctttaagggggggtaaaaaaaaggggggaaaaaaaaggaaaaaatttttttctgggaaaaaaattctttgg

SEQ ID NO: 12732 - DNA, 419 bp, Oryza sativa
  Clone ID: uC-osflcyp169b08a1
ttttgttttttttttttttttttttttttttttttttttttttttttttttttttttttttttttttttttttttttgggccttaaccaggccctttttattttcacttttcacaaaatggggaacaacaaatttggcatcccaaatctcacaacaattccctcgcctttaaacttcagcaacaaacggtttggggaaacccaaaccttccaacatttttttagaccgcccccggggggaacacccccccctgggttttgggggtttgggcagggaggcaaaaagccctcctttaaacgggacccgccaactaaacccaaggggggttgatgctatcgggagaaaaaaactgcctccttgggggctttaaacccgcagatcccgggaaggtggtttgggaggtctccaagggggaaatt

SEQ ID NO: 12733 - DNA, 468 bp, Oryza sativa
  Clone ID: uC-osflcyp169b09a1
ttgtgtttttttttttttactaggcaaaccacacgaatacacgattgattaatttcactgagaatagcacgggtacatcacatcacacaaattcatacgttgatacacgcatagtcgccgaagcgaccagctgcttaattaatcgataacacacgggtttaattcagcaataatcagcacacacacaaaccacactcatatgggtggtttttattgtggactaattaaggtaggtgactcgccggcggcgagtgttcggttgcttcgtgacttcacttgccgcacttgcagtcggtgcaggagcagctggtgccgcacttgcagccgccgttctcctcgccggcggcgacctcctcgaagtggctcttctcggcttcaactatgacgacgccatagctggtacctttcttcacgcactggctcttgtcagcacagtcgcagttgccgcacttgtccgacatggcggac

SEQ ID NO: 12734 - DNA, 313 bp, Oryza sativa
  Clone ID: uC-osflcyp169b11a1
gggttccaaaaaacgggaaaaacattgggtttgggggttttaaccgaacccggggtttacacaaagtaaccgaccaaaccctattacaaaggtgttaaggaaaaccagaactaaaacccggaagcggggggggaaaaaaaaaggggaccccctcaagtgggggggggtggtccccccaaattgttttggggctcccaaacccaccccgtttaaaggggggggtttaccccccctccccctaaatacggggggggaaaactggattccctgggcaaagggggacccccccttggggggggggggccaaaggggg

SEQ ID NO: 12735 - DNA, 320 bp, Oryza sativa
  unsure (1)..(320): unsure at all n locations
  Clone ID: uC-osflcyp169b12a1
aantaatttggggttttagggagaatcccgggcttcccaacccaaaaaaaactttttttttttaaataggaacaaaaaggccataggctgaaggctaaaaaccacccattaaataacggggaaagacaattctgggttggggggttttaaaaggggccttaagtgggggaaaaacgacagtttacagctgggcgcaaacatgagttcgcgaattggtcacctaacccccggcaaaaaagctcaaaaaagggttggctggggcaaaaaaatttaaatcccgggaaaaaaggccggtaacggaaaaattcgggccaaccccc

SEQ ID NO: 12736 - DNA, 385 bp, Oryza sativa
  Clone ID: uC-osflcyp169c01a1
gcgcttcagaacattttacatgtctggtatacacagatggcctatgataaagcactctgaacttgggagcatgcaatcctcacaagaaaacactgattcgaagcgacactttggacgaacctcacttattatgtacgaaaacaatatatctgaagcacagcctttccttacaggccaagacccgtttaattgctctaatataaaccggtaaaaaatttggaatcaagtgatcccacagaaagaataaaagcagagaaacagaagacctgtaacctactcaaagcctagtcagttatcatcaaatcgttaggaacttgtccgaagatatctggacagccttcccagctgcccttttctttggattcccagtaaccaccaaggtagc

SEQ ID NO: 12737 - DNA, 348 bp, Oryza sativa
  Clone ID: uC-osflcyp169c02a1
tttttgtttttttttttttttttgtttttttttttttttttttttttttttttttttttttttttttgtcttttttttttttttgtttcactatttttattgactttcttggtttgaagcaaaatagcactgaaacacaaactgagctatgggctgcagcaggaaaagcatacatgagaccaaagcataaaagggcaagcatcataagggtcgaaaaggacagggggtgctgcacccattgaaaagggggaaaaaaatgttgtcgctgcaatagggggcctagaaggcaaacgccaaacattggtcatggagaacaacaccccacggggcgctcattgcctgaaaaac

SEQ ID NO: 12738 - DNA, 432 bp, Oryza sativa
  Clone ID: uC-osflcyp169c03a1
aagacaatccaaccatattttaaggaaccacgaaggtacacatattgggtttgttaagcatgaaaactggaaatttccttgaaccaaaacatagcagccgaattaacttgacagtcaacaattcaggacactgagcaaaactaaatcttttttcaggaacattggagctataagactatccaaagaagagatgctccatggcgacaagttggctggcaatacatttacagcctccttcctttcctacctccctttctgcgggtgctgtccgtgggaaccggggtcacatcctcaatgcgaccaatcttcatgccagagcgagcaagagccctaagagcagattgagcaccaggaccgggtgtctttgtcttgttgcctccagtggcacgaagcttgatgtgcagagcagtaataccaagctccttgcaacgc

SEQ ID NO: 12739 - DNA, 367 bp, Oryza sativa
  Clone ID: uC-osflcyp169c04a1
aaaaacttaatagtaatagactctttgatggagtattacaacatgcagcagtggcattaatacgccagtacattaattaagttacacatatgcaggctccattttggtttcttttaatttatcggattacagaatttctgtagccttgcagatgatcacttggatatcatgtactagtaattaacaataggatgcatacaaaagatggcccaacgacaacagaagatgcgtgcatttgacattggctggccttatttgttgggagtactccaattaattaacaagagatgatgcattcttgtgccttagtttcttcacatgcttggcttcacgttgagcctattcgcaatttttacccccaacgact

SEQ ID NO: 12740 - DNA, 440 bp, Oryza sativa
  Clone ID: uC-osflcyp169c05a1
caaaggtaccagaatatatctatcgtgctatcagcgcaacgacagtgcaacatagctagagatgattaagtaattacaggtccagagtctccagctctgcaagacttctcgctgcatatatagtagtgtaggatatggtaggtaaggtaaatgtaactaagtttcttcagctgtaagaaccaccatgtactggacaaccgttgaagggcgtaagaacaggcgtgccacttagatggagaacgagagctgagccatgaagaggttgatgacgtcgaggtacagcgagatggtggcgatgacgtactcgttgtaggtgtggcgcttgatcagctgattgttgtcgaagacgatgaaggcggagaacagcacggtggcgaggcagccgtagatcgtcatgccagcccttcccagagggaaacagatctgaatgatgaggtatg

SEQ ID NO: 12741 - DNA, 406 bp, Oryza sativa
  Clone ID: uC-osflcyp169c07a1
atataattaatatggacctagctacaacattcaccacgcccaatatctcaatgccctgtttcttaatttggtccactatctctatcgacttcctggctagaagctagctagcactggtacagaaactgatctatgggctgctgcatcatttgcatccctgagccccatgcatttgcagtgaaaacatcataataatcgtaatggccagtagttgctgcagtcattgtagtggtggatgggtaatgtagtcgctgctattgtaggattagaaggtgattggtttccattgttcatgtagaagattatctcacggagcgctgatagcctgctatccagctccatcatctgagtgcgcagcactgagttctgagactctgcgaaggcacagctttgggtgaccatgttc

SEQ ID NO: 12742 - DNA, 407 bp, Oryza sativa
  Clone ID: uC-osflcyp169c09a1
ttgggtttttttttttttttttttttttttttttttttttttttttttttttttttttttttttttttttttttttttgtttgtttttttttttgtaaatttttttgtccttaacttggggccacaaaaaagggaaaaaaaaaaaaaaaaagggggtgtgcaaaaaaaaaaggggggggaggaacatgggaactatgggactaggcaaaggggagaaaaaaggggcccccaagaaggccccccaagaaagaaaattctcatttttttaaaaaaaaaaaaaccccggggctgttcggaaaaaaaggcgaaaaattataagggggggcaatctccaagcccccccgcgcaaaaaaaaaaaaaccagaaagggggccgggaccgaaaaaaaaaaaaattttttataaaaa

SEQ ID NO: 12743 - DNA, 423 bp, Oryza sativa
  Clone ID: uC-osflcyp169c10a1
tttgttttttttttttttttttttttttttttttttttttttttatccaacttgatgtactactggaggagtaattcattggccattacacatcagaaccacaataaattggggggggtagttcgtttatatttacaggcagcaacacatagccacagggaagggagcttaccatgagttttctggggggtattctttttttttgagctgttcttcccttggactttgttggacaacaatccttacttttcctatcactaactgacggactcatttcactttacaatggggattactaatcacaagcagaagctccagggcagaagtcagatcgtgcatatgccccttgctttgtccaaaaacttgtccctgcttatgcagccattctcggttggtttccacgcatgatatggcgcctgaacc

SEQ ID NO: 12744 - DNA, 388 bp, Oryza sativa
  Clone ID: uC-osflcyp169c11a1
gggaattggttacgttatgtagccttattatcttcaaggtaaagcagtacttacaatatgcaaagtaatctttaatggacaaagatcaacagataccggtaaagatcagcatttagtttgtgaaccattcagagcacaaaagttgttgttcaggctgtgaacagacagagctcacggtactagcaaaaggaaacatactccatctgcgtaatcgtcacaaccaatacacaccttatttggaaatactaggaatgagcaactaaaaatcccagcggggggacatcactcttgccaagctgctggaccagatagacaccactcaacttttctggtttcctgcgaccttgtcctcccaccagtagatgaaccttaggttggccccctgctt

SEQ ID NO: 12745 - DNA, 377 bp, Oryza sativa
  Clone ID: uC-osflcyp169d01a1
attggagaggcaaaacacggggtttgtttttcaaacgctttaaaaaagattcatgggatgaaatacatgatgaaccacgtttgttctcaagggaaaattaattaatgcagtatagttttaactttggccattgatctcaacctgtaactgggaccacacactggttacagggcccttggggtactagcagtttagcagtagctgtagtacgtagcaacagcagcagcaggttcactgtcttgattggattggatcggattagtagacgtagtttttgacaaacatgcccttcttggccttgggggcctcgccgtcgttggtgtacttgccgagctgcgccagcgagttggccttggcgcggaggagcaacgcgttct

SEQ ID NO: 12746 - DNA, 467 bp, Oryza sativa
  Clone ID: uC-osflcyp169d02a1
atcattatggaaggaataaaatttccttagatttgcaataaatatcagcagtagctcaattcaggcaatcaagacaacatgtaaggagccgaacacatcggcaacctgaataacaagtggcaacctgaataataacaagttaagtttatgcagtataagaactgaaccttggatctaataacaacaacaacatggccatgggacacgaaaaggtttcacctttgcggccacagctcacaccgcggagggctcctcgacatctctgccccttccgccgacgccagcggcgctgtggtgcggcaggtcaacgccagtggcgccctcgggtatcagggacgcggggcggttctcaattacctcgtcgatgagcccccaatcgcgcgccttctcggggtccatgaagaggtcgcgctccatgcactgctcgatcttgtcgatctcctggccggtgtgcttctgtagatctt

SEQ ID NO: 12747 - DNA, 414 bp, Oryza sativa
  Clone ID: uC-osflcyp169d03a1
aaagcatccaaagctcaatatatgattgctgcgcgatgaaacatcaatgcgcattaagaaacacactccacgaatggctggcgagctcagactgcgctacagttcaatcgcattgttttacaagggagcacccattcctaccgacttaacgaaaaaggatgccttcatttaaccagatccattaaagaccggactcaacagaaacaggaattttctggagcggcctctgattgctttaacttggatcgaatttagagctcaactgctgtaagtcttcgcatttagtaggcttctttgggaggtggggtgtttacattgcttcttcatcaggactctcaggctcaaacttatccatgctagccatgcgatctatgccgtccataccaccgatgccaccgattatatcagctatgc

SEQ ID NO: 12748 - DNA, 441 bp, Oryza sativa
  Clone ID: uC-osflcyp169d06b1
gttcgttaataagcatcgatcgaaggcgaggccagccagccagccggggcgccgggggagctggggaagatggtgcaggggacgctcgaggtgctgctcgtcggagccaagggcctcgagaacaccgactacctgtgcaacatggacccgtacgcggttctcaaatgccgctcgcaggagcagaagagcagcgttgcgtcaggtatgttccaataccctttctcatatactcctacaatgcagaagaaaaatgttttgccttttgtgatcatagtctagggaaggttgtcaggatggtagctttgttcagataatctttctgccaaccaaaagattaaaacttcagatgctcttgtaacagtgctcatacagattgtttatcatagtgcatgagccattttttgaggaacgacgtgctattatatggttggaactttgagc

SEQ ID NO: 12749 - DNA, 390 bp, Oryza sativa
  Clone ID: uC-osflcyp169d07a1
gccaaaaaacacacatgctcaatcattttgtagtaaatcaggatatttgtagacaaaaaactcaaatgcacatgcagttatgcacttaagacagcaggggtttattgccaaaggaaggaacaaaaaaaagtgggggagatttactaccaatatagggttcaaacctgacaaactaaagaagcagaaaagatttaaaatagtagatttgtttgaaagaaccccgtaattttgcccatagtaagcaggccacaggcgcaattaagaatcaagaggggttgtgctggtaccaaaacaccaatttgatagaccttatactcaatctttcaggctcccagttgcggtaaacttttccagcttggtccctagtgaacagcagatccatagaagaca
